United States Patent Application Publication US 2004/0214272 A1 - sequence listing, part 48

SEQ ID NO: 224444 - protein, 129 aa, Zea mays
  unsure (1)..(129): unsure at all Xaa locations
  Clone ID: MRT4577_136281C.1.pep
LYGVSPTYLTFEFPXDYXRYTAEMSADPVTFAKNRELEVINSRWAMLGALGCVFPELLARNVVXFGEDVWFKAGSQIFSEGGLDYLANPSLVHEQSILAIWACHVVLMSAGEGYRIAGGPLGEADDSLY

SEQ ID NO: 224445 - protein, 145 aa, Zea mays
  unsure (1)..(145): unsure at all Xaa locations
  Clone ID: MRT4577_136282C.1.pep
MVSLAGVSAKXPSAYKGLAGSSLSEKNLDTARPSARSIRRARPAGAQYNYRDKRDYFDLDDLGNTTGQSDLYGSDAPYVYNTVHSEIFXETIWCPFTERGLLLKVLLLRGGSLVAYVTTGXASADLLPIKKVSQEPHQPDQRGKI

SEQ ID NO: 224446 - protein, 202 aa, Zea mays
  Clone ID: MRT4577_136283C.1.pep
KNPAATFFFSLSPSSSRLHLGVQLLLPWMAPKPSSPAQGARPPSSLSLLYMAPLLLPRAGQQHLHSPRIHGARQQGVSMVGQQPRWSSSPAFPLLSMARASSLPLLAHGVPSLQRLPLPLCSAPLQQHARMSRASMGASPLAPPWARPPPAPLLSSPWRPENSSSAPLLFFPVVAILRRAASRSMPLPDLPPPWTPLAVPCA

SEQ ID NO: 224447 - protein, 38 aa, Zea mays
  Clone ID: MRT4577_136284C.1.pep
YILNGPKPELLSFVQSLMLTDRILCFLTKLLKRRGSFF

SEQ ID NO: 224448 - protein, 50 aa, Zea mays
  Clone ID: MRT4577_136285C.1.pep
ARNSARIYTINSIMETTTPRVALFVKVMLWSVYTICNTTCNIDLLFGFDP

SEQ ID NO: 224449 - protein, 112 aa, Zea mays
  Clone ID: MRT4577_136286C.1.pep
VIGQDPHSSSANSASSSIMQLPEPFGFIFTWFAALPLILFLAQSLTKAIVQDFLILKGPCPNCGTENLSFFGTILSVSSGGTTNKVKCANCSTELEYDSKSRVITLPEASNA

SEQ ID NO: 224450 - protein, 83 aa, Zea mays
  Clone ID: MRT4577_136287C.1.pep
EAPFPGFGLGPWHLVPRRGGPHFVVAPHPLRPVFWDPLRPPPPGWHAPGVCCLFTQRCPCSSCLVSELNSTPPSKKKLFHVYP

SEQ ID NO: 224451 - protein, 88 aa, Zea mays
  Clone ID: MRT4577_136288C.1.pep
QQIKVKKKHASVKSELGTDAASRNSPGTKNLKLHLSLHPPTKRSGNSGRTHLDGEPRRSPRHHLLLPASSAEVTNSVITPEISSKAST

SEQ ID NO: 224452 - protein, 101 aa, Zea mays
  Clone ID: MRT4577_136289C.1.pep
AAAPLVLLLLRVRDAQAHLMRRHRPLLLGPRRCLSNRQELLPGTGTGTGTVLRRSDHHRRHSIRTQQPKLTSDPGRDRLAQHGGELGRRRRSCGSVAATRG

SEQ ID NO: 224453 - protein, 85 aa, Zea mays
  unsure (1)..(85): unsure at all Xaa locations
  Clone ID: MRT4577_13628C.1.pep
MATQIIKKKKFWQLLAVSYAELNEMLTRELHEDGYYXVEVRLTPMRAEIMIRATRTHNELGEKVPKIRELTSVVQKRFKYLENSV

SEQ ID NO: 224454 - protein, 55 aa, Zea mays
  Clone ID: MRT4577_136290C.1.pep
ASSTPTLSGKLESKVWTAQLLSYIIFSVHTLSSRIHKSTYRFVIQSQRITRPGAS

SEQ ID NO: 224455 - protein, 138 aa, Zea mays
  unsure (1)..(138): unsure at all Xaa locations
  Clone ID: MRT4577_136291C.1.pep
LRCVCPELLAHSGVKVCEAGWCKAVSQIFSEGGLDYLGYPSLIHAQSILGIWACQVALMGAGYGYRIAGGPIVEAVDPLYRGSGSYPLGLDDDPDASAELKVMEIKIGRLTMFCMXGCFVHAINIGKGPVENLVHHLA

SEQ ID NO: 224456 - protein, 88 aa, Zea mays
  Clone ID: MRT4577_136292C.1.pep
PRKRSNRSDQTLARSKDGDDRLVIQTTEVCRELYNFFLGWRRDRPTCKLSSNQGKKTIAICDSNNTCMHSSFLRLDIASNVVIIDHMI

SEQ ID NO: 224457 - protein, 106 aa, Zea mays
  unsure (1)..(106): unsure at all Xaa locations
  Clone ID: MRT4577_136293C.1.pep
KXXPNSFDRITRLLLSHLFSFLLLYITIILXTLHSFLNPPYKIPTFSITILSTIFFSTSFSYYFYTPSSTPSLHIFNLNFLPNYTNSNYHFTLPLNFSPYLSSLFT

SEQ ID NO: 224458 - protein, 63 aa, Zea mays
  Clone ID: MRT4577_136294C.1.pep
APGCKIQQLVRSLQTCPLWAAEKHLMLLLLLTVHSIVSQMFQCIRFLCLSTRIILCSRAELLL

SEQ ID NO: 224459 - protein, 324 aa, Zea mays
  unsure (1)..(324): unsure at all Xaa locations
  Clone ID: MRT4577_136295C.1.pep
MFHHQQELLQAEAAAADRESSMSNNLTSSAPGGPNAAPAAAAATGNNNKRKRSLPGNPDPEAEVVALSPATLMATNRFLCEICGKGFQRDQNLQLHRRGHNLPWKLKQRGAGKEAQRKKVYVCPEASCVHHDPARALGDLTGIKKHFFRKHGEKKWKCDKCSKRYAVHSDWKAHSKICGTREXRCRGPCALSRRDSFITHRAFCDALAEESAKARAEAPSAEDGSSAAAVVPPPAPPIAPAPAPLRQQPPPPAPQHAEPRNEPDTNATEAVQFAPPTPPPPSTSQLQLPVLSQASVSAAANVSASSSSSSVAGTSQSLLGGMFA

SEQ ID NO: 224460 - protein, 472 aa, Zea mays
  unsure (1)..(472): unsure at all Xaa locations
  Clone ID: MRT4577_136296C.1.pep
MFHHQQELLQAEAAAADRESSMSNLTSSASGGPNAAPAAAAAAPPAPAASGNNKRKRSLPGNPDPEAEVVALSPATLMATNRFVCEICGKGFQRDQNLQLHRRGHNLXPWKLKQRGTGKEAQRXRVYVCPRXASCVHHDPARALGDLTGIKKHFFRKHGXEKKWKCDKCSKKYAVXSDWKAHSKIWGTREYKCDCGTSFSRRDSFITHRAFCDALTEESAKAIGLNAMAAVPAQHHHHPMLFSPPPTHVMQQDVALLQEHHHQEVMQQEHCNYAMKTEMPPWPGMTYDHPLLQPLCNAAAPQSSATSTPPPPTTMQLPAAYAHLSATXALLQKAAQMGATVAGAGYTQMAGAATSATFGLGLPDLQNTQQQQHQDGEIMAGLARTASHGRGGEEGGGGGGDGMTRDFLGLRAFSHRDILGLAGLDSSCMGAIISASASMNCYDEPQQRAQAQAEQQQQSSNEQWHSMGSHQS

SEQ ID NO: 224461 - protein, 92 aa, Zea mays
  Clone ID: MRT4577_136297C.1.pep
IPFRRLITYLTLLLHHHHHRWFCRCHTNTMLLTGGSHISRLPNLSNCTGSNNALPCPTTIPKLYAHREPYRESLISLNTMQLRQPDSLYAEL

SEQ ID NO: 224462 - protein, 44 aa, Zea mays
  Clone ID: MRT4577_136298C.1.pep
STIPTCYGGHIGRNYRDIFLNDCPQTVSAYQSTQVHSCSSYVMN

SEQ ID NO: 224463 - protein, 198 aa, Zea mays
  unsure (1)..(198): unsure at all Xaa locations
  Clone ID: MRT4577_136299C.1.pep
RFLSCPHRGRPISSSQVPVYISEITPKNLRGGFATVNQFMICCGASLAYVLGTFISWRTLAIIDFDFPIVGVAPCLLQLVGLLVTPESPRWLARFGHPGAFEAALQKLRGKGTDISDEAKGIKDFTEKLQQLPKSKMLDLFQKDYIRAVTVSXSGNTGMLAMVAVQIPMTGLGVLLMDKAGRRPLLMVSAAGTCLGCL

SEQ ID NO: 224464 - protein, 288 aa, Zea mays
  Clone ID: MRT4577_13629C.1.pep
RHLVAVKRLREKITKGHKEFEAEAAVLGRIRHPNLLALRAYYLGPKGEKLLVFDYMPNGSLHSFLHARAPNTPVDWATRMTIAKGTARGLAYLHDDMSIVHGNLTASNVLLDEQHSPRISDFGLSRLMTTAANSNVLAAAGALGYRAPELSKLKKASGKTDVYSLGVIILELLTGKSPADSTNGMDLPQWVASIVKEEWTSEVFDLELVRDAAAGTAADEQLMDTLKLALHCVDPAPAVRPEAHEVLRQLEQIRPGGSEGGAGPSEEGGGGAAAHVPAASASAGDDDE

SEQ ID NO: 224465 - protein, 189 aa, Zea mays
  unsure (1)..(189): unsure at all Xaa locations
  Clone ID: MRT4577_1362C.1.pep
LKAVSVLVGIDAISVDMAAHKMTVIGTVDPVQVVSKLRSKSWAAHLDSIGPAKEPEKKEEXGGXKEEKKDGDGKKEEGDGKKDGGDGKKEEGGEGKKEEAGDGKKDGGEGKKEDGDGKKEEDGKKEEGKKEDEKKPAAVAPPWMHHQHQLPPQYMHMLTADYMNQYHRPPPPXPVYHPYVPPQPQYYYM

SEQ ID NO: 224466 - protein, 381 aa, Zea mays
  unsure (1)..(381): unsure at all Xaa locations
  Clone ID: MRT4577_136300C.1.pep
MDLEDQEAQKPLLVTAPGRIGDGSHLAESDAAPSSSSIAVVVASTAVAVAGSFEFGISVGHSSPSQSGIMRDLSLSLAEYSVFGSILTIGAMLGAVVSGTVADRVGRRSAMAISDLLCIFGYLLIIFSQNFWWLDIGRFSIGCGIGLLSYVVPVYISEITPKNLRGGFATVNQFMICCGASLAYVLGTFISWRTLAIIGVAPCLLQLVGLLVTPESPRWLARFGHPGAFEAALQKLRGKGTDISDEAKGIKDFTEKLQQLPKSKMLDLFQKDYIRAVTVGVGLMVLQQFGGVNAICFYASEIFVSAGFSSGNTGMLAMVAVQIPMTGLGVLLMDKAGRRPLLMVSAAGTXPGCLLVGLSFLAKEHHWGKGPDLVLAXAGIL

SEQ ID NO: 224467 - protein, 61 aa, Zea mays
  Clone ID: MRT4577_136301C.1.pep
PFAYEYGEGINCLNPGVTFWMIQRRKPSLRFQQKHCFWVLFGHESRCMFFCFVFRMILVLR

SEQ ID NO: 224468 - protein, 155 aa, Zea mays
  Clone ID: MRT4577_136302C.1.pep
TLSLVVPERTTFQHILRLLNTNVDGRVKIQIALTSVKGVGRRFANIACKKADIDLTKRAGELSSEELERIVTILQNPAQYKIPNWFLNRQKDIVDGKSSQVISNVLDTKYREDLERLKKIRAHRGLRHYWGVRVRGQHTKTTGRRGRTVGVSKKK

SEQ ID NO: 224469 - protein, 154 aa, Zea mays
  Clone ID: MRT4577_136303C.1.pep
MQIFVKTLTGKTITLEVESSDTIDNVKSKIQDKEGIPPDQQRLIFAGKQLEDGRTLSDYNIQKESTLHLVLRLRGGMAKKRKKKVYTTPKKIKHKRKKTKLAVLKYYKVDSDGKIERLRRECPSDTCGAGVFMAAMQDRQYCGRCHLTYVFDKQ

SEQ ID NO: 224470 - protein, 155 aa, Zea mays
  unsure (1)..(155): unsure at all Xaa locations
  Clone ID: MRT4577_136304C.1.pep
PEPERPHLPPXHRVPGKFKGVWEKQCPKRVGAVLKVPGLSPSESPADFHFPEPGFSSVRRVFPSLAWWAMAPGRSKYLGILPGWGFFGWLAPLKIGEGLPPFAGVGFLPPFFGGGRSRFVSVGGPLPPCGCGSYSCFVCPPACSELYFYSPGFLV

SEQ ID NO: 224471 - protein, 583 aa, Zea mays
  Clone ID: MRT4577_136305C.1.pep
MGILLRSLLVASLVLSSLVLHVAAAKTIDPYKVLGVDKNASQRDIQKAFHKLSLKYHPDKNKGKGAQEKFEEINNAYEILSDEEKRKNYDLYGDEKGNPEFGGGNFGNHGGSTYFTGGGPKSSQFTSGNGWQTMGGQGNTKTFSFSFGGKPGASGGNPFGGGFDLGDVFSNLFGGGPMGDSHIGGSSGSARANTGTSGQHSGTTKIEDITTQVFNKEVADQGTTWLLLFYTPQSKSQFVLESVMQDVVHSLDGVLRAGKINCDNEKSLCKRSGVSIGKSARLFIYSYATAEKGSLHEYSGEHDAKSLKTFCQEHLPRFSKRVDISQFSFPLNVLPNLPQVLLLSSKKDTPAMWRAISGMFRNRIIFYDAEVHDVSHPLLKSLGVKNLPAVIGRTVNGEELLLKDGISVKDLRSGVKELKTVLDSFEKKNKKLLSNLANKKPSGQWEEIKKIPLLTASNFEEICGEKTSVCIIGVFRSNKAKGQLEAVLSEISKKTLIRGQNYNSRNAVSYALLDKDKQSAFLSSFDKSGYRSSDNLLIAYKPRRGKFAVYDGEVTLEEAERFVGSVLNGDVQLSPTKQKPVLR

SEQ ID NO: 224472 - protein, 93 aa, Zea mays
  unsure (1)..(93): unsure at all Xaa locations
  Clone ID: MRT4577_136306C.1.pep
QQWXTQEDYPSLRLLAAFCRAQQYAVQLFHNXSSCSIVPLLHLFLPPVTFNGXSNIPAVHSLXGYIQAISGERLTTYQFPSWQQHILGTXLTI

SEQ ID NO: 224473 - protein, 48 aa, Zea mays
  Clone ID: MRT4577_136307C.1.pep
KSVNFVQCLSNFPCHPNKICFGIKKPWIPVFLMFLVEKPIVCRHVLLK

SEQ ID NO: 224474 - protein, 195 aa, Zea mays
  unsure (1)..(195): unsure at all Xaa locations
  Clone ID: MRT4577_136308C.1.pep
MAAAAGGGRRPWVVDVEKKLGEADASVEVSRWQRHCIYRVPACIKDLKPKAYKPQVVSLGPFHHGDAELVPMEEHKRRALRHLLRRAKRPLEDFVAAVEEIAEXWRARTWTSAPSGVAXRERFLEVMIVDGCFLLEVMRATVLDGKNTADYAPNDPIFSHHGVLYMVPYIRRDMLMLENQLPLILARELVTVETG

SEQ ID NO: 224475 - protein, 52 aa, Zea mays
  Clone ID: MRT4577_136309C.1.pep
GAQFWPYKKKSFRHNFVLIKKKPCFFGFNPEGLLLFILGGLYEWGRHQGEHC

SEQ ID NO: 224476 - protein, 271 aa, Zea mays
  unsure (1)..(271): unsure at all Xaa locations
  Clone ID: MRT4577_13630C.1.pep
LAKRHCSVVFVKTLDKDSFSDAESINASTHASXLEKARHPNLVQFVGAVTQNVPMMIVSEYHQKGDLASYIEMKGRLKPHKAIRFALDIARGLNYLHECKPEPIIHGNLSPKNIIRDDEGQLKVAGFGSLSLSKVSEDKVQMAQPVTKFDNVYIAPEVYKNEPFDRSVDVFAFGLILYEMIEGAPAFHPKPQEEAAKMICLEGLRPPFKNKPKYYPSDVKELIQECWDPMPSVRPTFAEIIVRLNKIHASCAKQGSWRDTFKLPWKQTGER

SEQ ID NO: 224477 - protein, 235 aa, Zea mays
  unsure (1)..(235): unsure at all Xaa locations
  Clone ID: MRT4577_136310C.1.pep
LKPFIRKFTLVFFDDILIYSSSWTEHLQHVKXVLXLLRDNDLVLKKSKCSFGKSAVTYLGHIVFAQGVAMDRSMVDAVESWPIPRTIRALRSFLGLTGYYRKFIAGYGSVAAPLTALLKRDAFHWTEXTTDAFCQLKQALLTSLXLPDFNKRFFIDCDAFASGFGAVMHQGDGAIAFFIRPVSLHHQKLPAYERELIGLVKAVRHRRSYVWGXPFTVRTDHYSLNSSRPASRYPM

SEQ ID NO: 224478 - protein, 37 aa, Zea mays
  Clone ID: MRT4577_136311C.1.pep
RIGCLDKMKAVFTNLLEWSTTITVLLCSGISYHLDQE

SEQ ID NO: 224479 - protein, 69 aa, Zea mays
  Clone ID: MRT4577_136312C.1.pep
ALYPVSRALRSTTRKCKPSATHRSIVSCPEMDGSEFSRVRQLLVNSVLVPLLADLAAKDIARLDRQHRL

SEQ ID NO: 224480 - protein, 80 aa, Zea mays
  Clone ID: MRT4577_136313C.1.pep
TAGKKCCIVIFDHRYYLFSAFNFIKVNAFKDNSKAATVKDVPFNFHYNIGSSLPSEIETYRPLTFATCIYLLKGFAARAC

SEQ ID NO: 224481 - protein, 87 aa, Zea mays
  Clone ID: MRT4577_136314C.1.pep
TRGPLTYNLLEGEHNRTFTSHRIRTTRAGSVQTEAPAVQHSFHAPYKRQFAGVFDTIRVPMAQQWMILPFLGPVEPAVAALVTLPVP

SEQ ID NO: 224482 - protein, 102 aa, Zea mays
  Clone ID: MRT4577_136315C.1.pep
RNQICGPAPASTPFHSPDRCSGGSQFARQWRLARRVSMARLLTLVAALDGPACHQMQRLKHGDHPWLPEEAAHIEVSAVALLFCPHAKLEADGARCALTGRN

SEQ ID NO: 224483 - protein, 356 aa, Zea mays
  Clone ID: MRT4577_136316C.1.pep
VVVDGSEIRELVEDREAFGMLVDTKFRQLDADGDGMLSVGDLRPAVADIGAALGLPAEGASPNADHVCSEVVSELTHGTSQGEVSKAEFQEALSDILLGPAAGLKRDPLVILRMHGEDLRDFAAGSRYEPTAAAVFSQVVDLGSEVASPRQCVLAALQKLSVDHGVPPASDAWVAKHIVEPALQQLLPADQPGQQPASRDDLFQQLKKLLGAVADRLQEQPVIVAHTENHYDGSGVKRLLANKFELDKLLDSVWKGLAAEDKNKASKGCLIAALDKMADAASLPYYGAVKEVDAVVEESIKTAGVEEGKAVDEAEFKKSLTEILRAIMLRLNDSPVFVSTDVVVHEPLSGTSSSVN

SEQ ID NO: 224484 - protein, 80 aa, Zea mays
  Clone ID: MRT4577_136317C.1.pep
ERSNQTLRRHEGESPQALMLTPEVSQCELSLRRRPLFATCSCTPTCPRYSPLSRTTWVPYRSRWTNISTAYAAPTKVVWV

SEQ ID NO: 224485 - protein, 294 aa, Zea mays
  Clone ID: MRT4577_136318C.1.pep
PASSRPGRSLPPLPSLPPPPPPTNPRNPSTPSPEAAMAEHDLTASVAAWMDPHLVLPVLEFLQERGVYADEEILRGKIRLLGGTNMVDYAMDIHKSLHGTDDVPADMVARRSEVVERLRALQEAVAPIVAFLSSPQLVQELHADKQYNLHMLQERHQIGPDQIEALYQYAKFQYECGMYSDAADFLSQYRALCTNSERSLSALWGKLAAEILMQNWDVAQEELNRLKEMIDSSSFTSSPVNQLHSKIWLMHWSLFIFFNHENGRNGIIDLFFQDRYLNAIQTNAPHLLRYLAAA

SEQ ID NO: 224486 - protein, 106 aa, Zea mays
  unsure (1)..(106): unsure at all Xaa locations
  Clone ID: MRT4577_136319C.1.pep
IDRTRPHGSSTSKNHTFSLLLRTXXLGAGASSGAAPAAPAAADASAAVCTLTCRPTSPPSSRPLSSLSCRLYSGSNLSYACLQLYIFSIFLHKFNLLAFILYPFYW

SEQ ID NO: 224487 - protein, 226 aa, Zea mays
  unsure (1)..(226): unsure at all Xaa locations
  Clone ID: MRT4577_13631C.1.pep
FVGAARKXVPMMIVSESXSKGDLASYIEMKGRLKPHKAIRFALDIARGLNYLHECKPEPIIHGNLSPKXSLSIIPSLNSCKTFRYKWLHVCCTLXTLVRLXNIIRDDEGQLKVAGFGSLSLSKVSEDKVQMAQPVTKFDNVYIAPEVYKNEPFDRSVDVFAFGLILYEMIEGAPAFHPKPQEEAAKMICLEGLRPPFKNKPKHYPSDXKELIQEXXDPMPSVRPTF

SEQ ID NO: 224488 - protein, 154 aa, Zea mays
  unsure (1)..(154): unsure at all Xaa locations
  Clone ID: MRT4577_136320C.1.pep
AGAQNIRAQLLRQLVLANHGAYSQHHQFVPFXRLVAVSWFXYLQLQQLPLSQIVTANPQQFLPFMRLAALNSRAYLQQQQLLPFSQLAGVSHDAFLTQPQLLPFYQHAAPNAGTLLQLQQLFPFNQLALTNPAVLYQQPIIGGAYFRFLMSTVQ

SEQ ID NO: 224489 - protein, 110 aa, Zea mays
  Clone ID: MRT4577_136322C.1.pep
MPLCFAFHLVIFFLFYDSKTPHPQMKHIFKIAAILVAISAIWIALLETSTVPRSYTWLLPIYLVVALGCYGLFMVGFGLMFFPTCPREAVLLHQVSYFNVRLNCRTLETS

SEQ ID NO: 224490 - protein, 42 aa, Zea mays
  unsure (1)..(42): unsure at all Xaa locations
  Clone ID: MRT4577_136323C.1.pep
LVREEPLIHTIGHRAWLRSQWWRAPVCRHYDSPPLSXXPRNR

SEQ ID NO: 224491 - protein, 85 aa, Zea mays
  Clone ID: MRT4577_136324C.1.pep
RKFLERTAHLKVGLPFPRSGLSPPPPKLGGHGASKTAPVFASPRPSAKASWDFMDARRPGLSLRSGSTCPNFSLVSPPGRVLQIC

SEQ ID NO: 224492 - protein, 223 aa, Zea mays
  unsure (1)..(223): unsure at all Xaa locations
  Clone ID: MRT4577_136325C.1.pep
MGMEVVGAEAAPAQVKVADEEVTLFQDKESQATAKEREEAAVFGSDNGKAAANDMAPPKDAAEEWPEPKQTYTFYFVKVRSFEDPKLRAKLXQAEKDFQNKIQARARIIDAIKAKKTERAAVLAELRPLSAENRQYNEAFNEKLEEMKPYRNRLGKFRDENNAMRAESAGLCSSLEELEHEIKRLNHRISHESISLDEEKRLIKEIRPLKXNRPEVSFNAAKR

SEQ ID NO: 224493 - protein, 80 aa, Zea mays
  Clone ID: MRT4577_136326C.1.pep
EVSGIFPRPLFFLPFVKVFPVVTVLFLNQPLSLESPDGSPPRVGFHPFLSAPGGSPLLFVLPCLKKICPCCYPPLFFWFW

SEQ ID NO: 224494 - protein, 66 aa, Zea mays
  Clone ID: MRT4577_136327C.1.pep
APKEEEAGDGLWRKEIMMGERCQPLDFSGVIYYDAQGRRLAQAPPPRSPLRSPLPASVKLAANAAY

SEQ ID NO: 224495 - protein, 116 aa, Zea mays
  Clone ID: MRT4577_136328C.1.pep
SLCPVPFVSPLYEVCSFFMAPAPQNLFGGPRRFPPPLVLAPRWFPPRSQVGHFIPPAGFRGPFFLALRGGGGSPSFCFFRGAPLFPISVFFFFSPLFPLGLGGFLKLIIKKVRWLV

SEQ ID NO: 224496 - protein, 84 aa, Zea mays
  Clone ID: MRT4577_136329C.1.pep
KTSKLPGATIFKTQLTYKRRRRQTFEDFPQSALNMIEILLAINPADRLTATSALRSDFFTPEPFACEPSSLPKYPPSKEIDVKR

SEQ ID NO: 224497 - protein, 88 aa, Zea mays
  Clone ID: MRT4577_13632C.1.pep
RPNPGRPTRRHARHASPLSPRRCDRGTKPPRRSRGVRLTYRPLAAKGLRTCSGMRRLSDAYLALGSVILRHAGWAGDYTDPRGNANLA

SEQ ID NO: 224498 - protein, 85 aa, Zea mays
  Clone ID: MRT4577_136330C.1.pep
FSPLTVYMGGRAFWLIFKLGGAPPLLTLGLWRRHPPLFYGGIKIFWLWPKFFSRPLLFSEAKTQPKNKMNNSNHHDKNSRDKEQT

SEQ ID NO: 224499 - protein, 133 aa, Zea mays
  Clone ID: MRT4577_136331C.1.pep
INMMSDWKMFGFFCKIKVSMHLISLWISSSWSASLYDKGDPESPSLESAPLPDDDRLRIASEFRIVPHGDGGHYLLVALCDKVKLKDYMFHIFFMLKLSCMLFRPFKGNMPHISLFWCSELHMVLFMVSVASN

SEQ ID NO: 224500 - protein, 55 aa, Zea mays
  Clone ID: MRT4577_136332C.1.pep
LDPPPPPPFLSPKTPFPPPGGPPRGGGGRPPQKGGGPPPPPPPPAGGATPPKLPP

SEQ ID NO: 224501 - protein, 36 aa, Zea mays
  Clone ID: MRT4577_136333C.1.pep
ESYNPRHQRPSRLIKCKCSVCLECPRRYFKSTVPSI

SEQ ID NO: 224502 - protein, 165 aa, Zea mays
  Clone ID: MRT4577_136334C.1.pep
FPGSPSSPLASSRSCLRPHRRRRRGHDRSVGGAGLEAIDGGCGDVLLGRRGNSLLQHTLWWRLAIHMTQLKLQRARLCRRRKQRSWRPLSRGPSRRSQRTSRRLAGHGPHGRPRRDQVQRQLNITKKIRKARGFHFPDRLTSTLRLFVDSILVLVLLSCVVFVLF

SEQ ID NO: 224503 - protein, 179 aa, Zea mays
  Clone ID: MRT4577_136335C.1.pep
GWIPSHLRLFRRANTRFPGSPSSPLASSRSCLCPHRRVLQRRRRGHDRSVGGAGLEAIDGGCGDVLLGRRGNSLLQHTLWWRLAIHMTQLKLQRARLCRRRKQRSWRPLSRGPSRRSQRTSRRLAGHGPHGRPRRDQITKKIRKARGFHFPDRLTSTLRLFVDSILVLVLLSCVVFVLF

SEQ ID NO: 224504 - protein, 185 aa, Zea mays
  Clone ID: MRT4577_136336C.1.pep
MENSSHKRAREAGDLVAGGCGEEGSPQADAKRLRPQDLLDMLEDDTDAAAAGDLASVMRSLEEEIASFDEAAEAPAPAPELGFLLEASDDELGLPPASSSEEEEAGRAGAPFPPALDGQIWGFEDEIVDGGGFGGYSPEAAAAAAAGPPWLSDDGFGAGLFAFGGDDACGPSDLAALRHETMPAV

SEQ ID NO: 224505 - protein, 167 aa, Zea mays
  unsure (1)..(167): unsure at all Xaa locations
  Clone ID: MRT4577_136337C.1.pep
EGDSEGAARSATDRATAGAPATAAALEQVINHMMFNGLNLRFHHQSATXLSCTMTFSMYLSMYLASNLAVLLWLLDLICTVKNSIINSITQRAADGHGIALGVPVTSPRTLNIEXKLDRYDYSDDAGVYSNATYDDRKNWRMYYYMDNELAKDLSDNFGHLFTQQAS

SEQ ID NO: 224506 - protein, 42 aa, Zea mays
  Clone ID: MRT4577_136338C.1.pep
RTIHHDRTDISVPTQPAKYSASNAQRLMKQGRYRNYFTRLLN

SEQ ID NO: 224507 - protein, 78 aa, Zea mays
  unsure (1)..(78): unsure at all Xaa locations
  Clone ID: MRT4577_136339C.1.pep
TASGHTDLRSKGRERNPKKAKLIYRNWSLLSDTVLIWGGVATAGLSSIPSLXGKEKFKGYLCRXSYKLKQQDRPTMGQ

SEQ ID NO: 224508 - protein, 292 aa, Zea mays
  unsure (1)..(292): unsure at all Xaa locations
  Clone ID: MRT4577_13633C.1.pep
MVSASAPPPQAQSDAAGSGEEVSKKVRKPYTITKSRESWTEQEHDKFLEALQLFDRDWKKIEAFVGSKTVIQIRSHAQKYLLKVQKNGTSEHVPPPRPKRKAAHPYPQKASKNDSSSIHRNSGMNVPVSSWAHSSIPQAVASSMVKEDLGAGTPGSNNFCSSSTEGLPRTWQPGETNXSNKSNSVTPPSVPHDISDXHLVVQNXLRFCPSLLFMPDFAGVYSFLGSVFDPSRGTSGHLQKLKEMNPIDVETALLLMRNLSINLTSPDFEDQVLPIRDASTQQSRPEVRTTIL

SEQ ID NO: 224509 - protein, 76 aa, Zea mays
  Clone ID: MRT4577_136340C.1.pep
SCNQAPCLALPPLRLVAKGEHDFCHSKRAWVHHREKARLWSRIYPEEEDKTDRVHLSLSEANGSFLEATTIEPNDS

SEQ ID NO: 224510 - protein, 76 aa, Zea mays
  unsure (1)..(76): unsure at all Xaa locations
  Clone ID: MRT4577_136341C.1.pep
VQAALHAICIMMATAANRGVRGVLVCVSLFFAAYSARKVGGYYVRLMQIIEIRASQTIEXIALTEPNYRSYNHHTD

SEQ ID NO: 224511 - protein, 116 aa, Zea mays
  Clone ID: MRT4577_136342C.1.pep
SRSWEIGPQTRQHVELVRHVPLKSSGSVCFLLQSSWLAVRVFLWVPQCSPRQFPYAPSVFRRRMGGQIALAGQAPSGQTVWLGMVCGHLGPVWPAVSVRYLGVATEIKCGVRIGSF

SEQ ID NO: 224512 - protein, 48 aa, Zea mays
  Clone ID: MRT4577_136343C.1.pep
NTSLKNLFSNTVFGRLFKRYVFKTAVLTILHYFHSFKNLTPKIFNTWA

SEQ ID NO: 224513 - protein, 119 aa, Zea mays
  Clone ID: MRT4577_136344C.1.pep
PQGDFFSKKFGILKNKRRTLKQSFLAGKQKKNRSPILGIWGPSFFKFGGWFLKKWPGKNPFKINITPYWPEHPNGPRGFGIPNLTPLAKFKGGGGGNKIFLPQMGGLQLNGDQNHHTRG

SEQ ID NO: 224514 - protein, 75 aa, Zea mays
  Clone ID: MRT4577_136345C.1.pep
WVQKFQILATFQDLMPFHPRSETGTTNLGFFFSFPSTPIFYLVNLPCVHVLGGSKKFHNLKDKFQVLLKMGEKFF

SEQ ID NO: 224515 - protein, 97 aa, Zea mays
  Clone ID: MRT4577_136346C.1.pep
HSRVLGVVHRSSSVRERERERERERGREREQAMATAGNVIKCILALLLLAVTHLHFSVVYLRSPPIHSYVLSLYWLPLLNLPLHTPALPFPLEHFFF

SEQ ID NO: 224516 - protein, 304 aa, Zea mays
  unsure (1)..(304): unsure at all Xaa locations
  Clone ID: MRT4577_136347C.1.pep
MARPLQEAIDTFISITGADEAVAVRKLEEHGGDLNRAINSHFNDGDSILNGISQNTMPTSHDDMMDLDGPLDNTFQRSLFPENFRDPFALMDPNFQHQFFDRXAPLMXTRGPLVSHPREVREIPIEVKDSDPQTSPSGQAPVIEDVTGHESSNGLEVHETIIIDDEDSGLLSAPSAPHASVPSNTSSEPTAPPLVHVNDYDDDIEEEMIRAAIEASKKDSEGLANIAEQGDQHQEGVNLGEHSSDKAVMRTTDGIVERQVLASGKAGTSRQPIDEESFQEETEDVEEQPLVRXRSRRAPSETPS

SEQ ID NO: 224517 - protein, 89 aa, Zea mays
  Clone ID: MRT4577_136348C.1.pep
RARGLVLSCVCCSVTTREVGSRRRRRRWGRGCRPAGARIRARIRLSKPGVHGSARTTAPPARGKRRGDEWKARSGTFSRDALGSYPVNS

SEQ ID NO: 224518 - protein, 237 aa, Zea mays
  Clone ID: MRT4577_136349C.1.pep
MPKVPSRDMIKAQAGGVVAPRTVKIPWRRIIFSLPVWAIVVNNFTFHYALYVLMNWLPTYFELGLKLSLQDMGSSKMLPYFNMFIFSNIGGVVADHLITRRILSVTKTRKLLNTIGFIVSAFALMALPLFSTPSGTVMCSAISLGFLALGRAGFAVNHMDVAPKFAGIVMGVSNTAGTLAGIVGVGLTGNILEAAKASNKDLTDSETWKTVFFVPAYLCIFSSVIFLIFSTGEKIFE

SEQ ID NO: 224519 - protein, 104 aa, Zea mays
  Clone ID: MRT4577_13634C.1.pep
PRERTTRSGHSRTLGSPPLRLSMVSASAPPPQAQSDAAGSGEEVSKKVRKPYTITKSRESWTEQEHDKFLEALQLFDRDWKKIEAFVGSKTVIQIHLPSIGTLA

SEQ ID NO: 224520 - protein, 353 aa, Zea mays
  unsure (1)..(353): unsure at all Xaa locations
  Clone ID: MRT4577_136350C.1.pep
RRRHQETACPSSTPAHAGAVSSGLGLARGRRPAPLLACTEAGPPAREAAGCSREAGAAGAGTPTRLWLACAPARLCGWPACAPVWPRLPTSEARIRLSPALERACTRRGSRAETLSWPGLRLAGVLAEPALVPVANQSHAIRERLRVVRLTGSAKDCALVSCPRPGRVAAPASSQVRPRRVSALRRPSAPARQGFQAPAXPPGRGSSPRQAAPSACALPGRSGSDRAEDPRWGSRSRPAARGRSGIPLSLRALGRRGPRCHGLGPPWPASAPLETHARGRRSSADRPGPHPRAARPGPRCACARVRLAGAAPVPAVRQGRLFPWLSKVAKSRLYECMVKTMEISPCLPLSNPT

SEQ ID NO: 224521 - protein, 382 aa, Zea mays
  Clone ID: MRT4577_136351C.1.pep
MVTNVVDLRSDTVTKPSDAMRAAMAAADVDDDVLGADPTARRKTLGGGIEEERAALMGKEAALFVPSGTMANVHSKAKACDIRDRIKSHSSDSHIHLYENGGISTLGGVHPKTVRNNSDGTMDIDSIVAAIRPPGGGLYYPTTRLICLENTHGNSGGKCLSAEYTEKVGEIAKSHGLKLHIDGARIFNASVALGVPVDRLVRAADSVSVCISKGLGAPVGSVIVGSKAFIDKAKILRKTLGGGMRQVGVLCAAAHVAVRDNVGKLADDHRKAKALADGLNKIEQFRVDSASVQTNMVFLDIVDSRISSNKLCQVLGTHNVLASPRSPKSVRLVLHYQISDDDVQYALTCFKKAAEQLLMGSTELEHLAEQLLMGTTKNSYGQ

SEQ ID NO: 224522 - protein, 96 aa, Zea mays
  unsure (1)..(96): unsure at all Xaa locations
  Clone ID: MRT4577_136352C.1.pep
VDRERAAFFFLFRGTTISXRGVSGGRVCFHGLKALRLSTHQLYRTQSVNNKSYAVRITHPDLVKGYGPLHRSHERSVLCRTSYLRGACTSRRRTWT

SEQ ID NO: 224523 - protein, 112 aa, Zea mays
  unsure (1)..(112): unsure at all Xaa locations
  Clone ID: MRT4577_136353C.1.pep
CISPLGLPCPWVIYRCYKGPELLVDLLDYDYSLDLWSLGCMFAAMXWKDHDQLVILANRPMLMCYMVLXIFRVDPFFSGQDNYDQLVKIAEVCLKLLCVETSCHRVFLCHLI

SEQ ID NO: 224524 - protein, 67 aa, Zea mays
  Clone ID: MRT4577_136354C.1.pep
LGTHNVLASPRSPKSVRLVLHYQISEDDVQYALTCFKKAAEQLLMGSTELEHLAEQLLMGTTKNSYG

SEQ ID NO: 224525 - protein, 50 aa, Zea mays
  Clone ID: MRT4577_136355C.1.pep
MVTNVVDLRGDTVTKPSDAMRAAMAAADVDDDVLGAVPTARRFLVVMAAL

SEQ ID NO: 224526 - protein, 214 aa, Zea mays
  unsure (1)..(214): unsure at all Xaa locations
  Clone ID: MRT4577_136357C.1.pep
MEIGDDDCPPLAVELPPQTXSSVSRFXSASASAPVGVTVITGYLGAGKSTLVNYILSGQHGKRIAVILNEFGEEIGVERAMINEGQGGAVVEEWVELANGCVCCTVKHSLVQALEQLVQTKERMDHILLETTGLADPAPLVSILWLDDQLESSIRLDSIITVIDAKNFRRQIDEHTNSSSFPEAFHQIAFADVVILNKIDLVKDDLEDLERQIH

SEQ ID NO: 224527 - protein, 112 aa, Zea mays
  Clone ID: MRT4577_136358C.1.pep
PSLHNCEGTVIRIDYTQLRISNHTTYVALNPCICQPATGVLKTRSGSHKPRAQIHHRPASCHGGYMLLSPPLHAHFVLSYSGLSLPEARLTHDEACDQLKGPRSASLHRDGP

SEQ ID NO: 224528 - protein, 43 aa, Zea mays
  Clone ID: MRT4577_136359C.1.pep
SVCRWEDVGEGEQEERRSCCLPWRWSAVRNSERAWESGRKAHL

SEQ ID NO: 224529 - protein, 117 aa, Zea mays
  Clone ID: MRT4577_13635C.1.pep
MVSASAPPPQAQSDAAGSGEEVSKKVRKPYTITKSRESWTEQEHDKFLEALQLFDRDWKKIEAFVGSKTVIQIRSHAQKYLLKVQKNGTSEHVPPPRPKRKAAHPYPQKASKNGTLA

SEQ ID NO: 224530 - protein, 124 aa, Zea mays
  Clone ID: MRT4577_136360C.1.pep
CSHPDFRLQGSDQFFITAKVRAIRIDYTQLRISNHTTYVALNPCICQPATGVLKTRSGSRKPRAQIHHRPASCHGGYTLLSPPLHAHFVLSYSGLSLPEARLTHDEACDQLKGPRSSSLHRDGP

SEQ ID NO: 224531 - protein, 45 aa, Zea mays
  Clone ID: MRT4577_136361C.1.pep
RCCTCVVGTTEGLGMVDCPEVALPVPQPNVLENQPATNGPLNSSL

SEQ ID NO: 224532 - protein, 95 aa, Zea mays
  Clone ID: MRT4577_136362C.1.pep
NGKTFFIFLFQKTSQPHPLGNPGGLLFPRTPPQKKRGLFFLNQDPQSFYRPARGALATWGPAWTIGFGPGPCFTGNLFLGGPPPSVTCGPLVESP

SEQ ID NO: 224533 - protein, 72 aa, Zea mays
  Clone ID: MRT4577_136363C.1.pep
VPVGPALLYRLIPPLGSLFGVAPLAGLVFFTYKCFILSTCEPFEPIFLVTPPEGKNCNPGITCKWFYPVTPL

SEQ ID NO: 224534 - protein, 63 aa, Zea mays
  Clone ID: MRT4577_136364C.1.pep
HLRTQRITSHGWEPSVNTIRRPGSELSYRTINIALTTMEARHSSASLMKAHHKLEDGFTASKS

SEQ ID NO: 224535 - protein, 67 aa, Zea mays
  Clone ID: MRT4577_136365C.1.pep
GRQSGPTAGYSFFAGDKNKVVVWEKNPLYEDLLNPKKDISGTKMVFPGLKKPQERADLIGALKETTA

SEQ ID NO: 224536 - protein, 102 aa, Zea mays
  Clone ID: MRT4577_136366C.1.pep
KKLCSVSTTVLLIFSFSFTPLFLLYKKLDPNRSFIYTQVFFIIPILFSFFYFFFFFFFFFFFFFFFFFFFFFFFKLTELCKLRLVTTSFRTNCSHDNSRYKT

SEQ ID NO: 224537 - protein, 201 aa, Zea mays
  Clone ID: MRT4577_136367C.1.pep
MAEGNGGSRAEAGVRESSEPSPKRSSIPAMPHEECVEGIRSALKHPTVRFLRERMESAGCLVWPRLIRAATCSSAGGYASQQGIQVCCNHMTCQDEITQVMIHELIHAYDDCVAKNLNWTNCAHHACSEIRANHLSGDCHYKRELLRGFMKIKGHEPECVKRRALMSVKNNPYCSEGAAKDAIDAVWDICYNDTRPFDRAP

SEQ ID NO: 224538 - protein, 52 aa, Zea mays
  Clone ID: MRT4577_136368C.1.pep
SICAYIRMFMRIATSPSSCISSSIRSVVVLHEVILHIIIRFLALFTALNAIL

SEQ ID NO: 224539 - protein, 181 aa, Zea mays
  Clone ID: MRT4577_136369C.1.pep
MRRGHPLRAQTYARPEHHHHHGFSYPTVRFLRERMESAGCLVWPRLIRAATCSSAGGYASQQGIQVCCNHMTCQDEITQVMIHELIHAYDDCVAKNLNWKNCAHHACSEIRANHLSGDCHYKRELLRGFMKIKGHEPECVKRRALMSVKNNPYCSEGAAKDAIDAVWDICYNDTRPFDRAP

SEQ ID NO: 224540 - protein, 119 aa, Zea mays
  Clone ID: MRT4577_13636C.1.pep
MVKDLGAGTPGSNNFCSSSTEGLPRTWQPGETNDPINQIPSLRLMPDFAGVYSFLGSVFDPSTSGHLQKLKEMNPIDVETALLLMRNLSINLTSPDFEDQEACTLPGLSYPQKLGHLGS

SEQ ID NO: 224541 - protein, 74 aa, Zea mays
  unsure (1)..(74): unsure at all Xaa locations
  Clone ID: MRT4577_136370C.1.pep
LDVPVDKYANYNFVGRLLGPRGNSLKRVEASTQCRVYIRGRGSVKDSVXEFPADMVDVRLNQAVSILEDLLKPI

SEQ ID NO: 224542 - protein, 253 aa, Zea mays
  Clone ID: MRT4577_136371C.1.pep
GLLPETQKLAPFVQVLPFCTGLLNQEILRASYMAPNHNFVDPERIEHGSPLRLPGHPVNGQPMDLEGWSGIQTEASQHMGVLQASSMGWNGAPVLAATPVVKKVMRLDVPVDKYPNYNFVGRLLGPRGNSLKRVEASTQCRVYIRGRGSVKDSVKEDKLRDKPGYEHLNEQLHVLVEAEFPADMVDVRLNQAVSILEDLLKPIDESMDYYKKQQLRELAILNGTLREESPSPHLSPSVSPFNSTGMKRAKTGR

SEQ ID NO: 224543 - protein, 39 aa, Zea mays
  Clone ID: MRT4577_136372C.1.pep
LEVFFFFFFFFFFFFFFFFFFFFFFFFFWNFPPGGLNLF

SEQ ID NO: 224544 - protein, 73 aa, Zea mays
  unsure (1)..(73): unsure at all Xaa locations
  Clone ID: MRT4577_136373C.1.pep
MKVKPGTEPATGVPVGGAPGAPTAWSSTGVPVGGAPGAPTAWSSGLFDCFDDCGLCCLTCCCPXITXGKEAEI

SEQ ID NO: 224545 - protein, 40 aa, Zea mays
  Clone ID: MRT4577_136374C.1.pep
ICCSLDLIYNNLTWQESLIYYVRDVVSSPVNRHVLLPYEW

SEQ ID NO: 224546 - protein, 37 aa, Zea mays
  Clone ID: MRT4577_136375C.1.pep
LNLGYPIEELLPCKHAARNLEPPKRPPSVYNPERLPK

SEQ ID NO: 224547 - protein, 50 aa, Zea mays
  Clone ID: MRT4577_136376C.1.pep
MALSWSPAVVVFLLLLLLLPAPWPRAAAQAGRYHAVSVSRAGGQLSARLE

SEQ ID NO: 224548 - protein, 64 aa, Zea mays
  Clone ID: MRT4577_136377C.1.pep
IVWSGTNRSNTSVTPSSACCLLTSPFFVSGPSVIVNTRRTLHSSESSVLYTTGRLDMWCPESTR

SEQ ID NO: 224549 - protein, 119 aa, Zea mays
  Clone ID: MRT4577_136378C.1.pep
FFFFFFFAEPSRSRQAGASAIGRFAHQQNATNKLRSGNGLGLALSRRFVALMQGNIWLESEGVGKGCTATFFVKLGLSDANLRRMVPPVQPKHGNADPDVSSIINGDMAILPRCYQSMI

SEQ ID NO: 224550 - protein, 57 aa, Zea mays
  Clone ID: MRT4577_136379C.1.pep
LNTGEYTTHRLPPSSAGFNIIHNVYCTHKHTHEHYTPLGFDLLAVKYFLFRYTICSC

SEQ ID NO: 224551 - protein, 199 aa, Zea mays
  Clone ID: MRT4577_13637C.1.pep
MVSASAPPPQAQSDAAGSGEEASKKVRKPYTITKSRESWTEQEHDKFLEALQLFDRDWKKIEAFVGSKTVIQIRSHAQKYLLKVQKNGTSEHVPPPRPKRKAAHPYPQKASKNDSSSIHRNSGMNVPVSSWAHSSIPQAVASSMVKEDLGAGTPGSNNFCSSSTEGLPRTWQPGETNDPINQIPSLRRLYLMIFLIIIL

SEQ ID NO: 224552 - protein, 42 aa, Zea mays
  Clone ID: MRT4577_136380C.1.pep
NVALKSSNIQIFLWLLAHFTLSKVRYFNYEMKKIISLKWQHF

SEQ ID NO: 224553 - protein, 31 aa, Zea mays
  Clone ID: MRT4577_136381C.1.pep
MLILSKRIKLFLSYWVILEFLGEKSSSTFNN

SEQ ID NO: 224554 - protein, 49 aa, Zea mays
  Clone ID: MRT4577_136382C.1.pep
GGCESQRFFLGGPTLVCGKRNSKVFGGYKGPILKCPSCVEKRKGTPQDV

SEQ ID NO: 224555 - protein, 561 aa, Zea mays
  Clone ID: MRT4577_136383C.1.pep
AIVREQVNHPVWGAYAQRLLNPEARLWRNPSNGGHDDKAHPPIHPTKFSEGERNWSPDHTRLYEFVVRHFLACCSQPAVGAETTVEIDIAGEQFNASGRVILAKNYLDVYRFDSWGGTLLPTYNIGQQFVPTTLTLDSGVTRPPPLLAEADLLSCMDKAGIGTDATMHDHIKKLLDRCYATKDENTRFSPTNLGEALVMGYDEMGYELWKPYLRSMMEADMKSVSVGTKSKSEVLESCLQQMKACFLDARVKKAKLLDAMGTFFARSNRPINETQNPVEVVRPCGACNGSEMLLKRRASGEFMVGCRSYPQCRNVVWLPGSLSEAAVTNQVCPICAPGPVYKIQFKFRRRDIPPNFDVDHLGCVGGCDDILKDLMEISRFGSRSQAATPARGPTPNGVGQGTPRQDLHTIFRPASQLNNDNPSVMHSQGFRSTHTQNPSNASDAGQVLCTSCGALCISRIANTEANRGRRFYKCQDPGCGFFKWEDEVDNGTGRGRRGRGSSRQASASASASAGRRGGGRRGRGRNADGGMFVSATGDTVLGCCFNCGDPSHFANACPNRR

SEQ ID NO: 224556 - protein, 78 aa, Zea mays
  Clone ID: MRT4577_136384C.1.pep
HCPKPLSPSVELKPTPGTYTPSPKLTPPTYTPSLKPTTHSTLKPTSPTFTLSPYPITPKPTPPTYTHSSKPSTPNPPT

SEQ ID NO: 224557 - protein, 99 aa, Zea mays
  unsure (1)..(99): unsure at all Xaa locations
  Clone ID: MRT4577_136385C.1.pep
GCGDTLLHKRXTPHGKRIYXXCALFTFXAITENYCFLSCKPSTICKXTYRRLYQLKCXFRYSIAMDTSGRWNSGTVISYTVYTAARLPFIIIQQVHVYI

SEQ ID NO: 224558 - protein, 67 aa, Zea mays
  unsure (1)..(67): unsure at all Xaa locations
  Clone ID: MRT4577_136386C.1.pep
DSEIGNTYNLDGFXRRRLEHLSEAGFTVSEKEKNWLHRKAGNSEISGILRQNQINLIFLKQKCYNLY

SEQ ID NO: 224559 - protein, 64 aa, Zea mays
  Clone ID: MRT4577_136387C.1.pep
YHYQIYQGPLIMFAKQTGMEEPKEGLEPIKEFKGYRTKWFVKTKFLPMSPGKNIGGTFIHLNGK

SEQ ID NO: 224560 - protein, 68 aa, Zea mays
  unsure (1)..(68): unsure at all Xaa locations
  Clone ID: MRT4577_136388C.1.pep
PQLPVKMVKPPRRATGSTTTAVAALLAAASALSATAXPPSNGDDAVPGATCGENKLLVTANGTAAGRS

SEQ ID NO: 224561 - protein, 240 aa, Zea mays
  Clone ID: MRT4577_136389C.1.pep
MQGSYGYDGAASRDPKPRLRWTPDLHQRFVDAVTKLGGPDRATPKSVLRLMGMKDLTLYQLKSHLQYFAHRASVQPQRILLQVFLIKGRTQDHVLLDCEYGTVEVQKKLQMRIEAQGKYLKTILEKAQTNISFHTNASNGIESTRSQLMDFNLDGFMNNATQVCKEHREQLVKAMSDENDKDSLGLQLYHLGSQEAKEVKCTPKTEDSLLLDLNIKGGYDLSSRGMQACELELKINQQIV

SEQ ID NO: 224562 - protein, 87 aa, Zea mays
  Clone ID: MRT4577_13638C.1.pep
NFAHMLSQTERTSSVSRGPPETNQKAELNKEWEREQPALPRFSFHLPISKDSLDLKQHFTSLDGRAFGDRKGQEGCTLHNRQPKAWS

SEQ ID NO: 224563 - protein, 147 aa, Zea mays
  unsure (1)..(147): unsure at all Xaa locations
  Clone ID: MRT4577_136390C.1.pep
ELDFDELDIETLWELDRFVVNGRKALKKSQRNSTMNGDAAVMNADAIDVTIVPDDDDDRVEVAVNPSVVVEIGESEXRSREDXVEAEMGDEYVDIGDEMPTMNYQSVEIQRDSLAASSSSGPGSGSSSSTDSDLDPESDGDNASAPH

SEQ ID NO: 224564 - protein, 270 aa, Zea mays
  unsure (1)..(270): unsure at all Xaa locations
  Clone ID: MRT4577_136391C.1.pep
MQGSYGYDGAASRDPKPRLRWTPDLHQRFVDAVTKLGGPDRATPKSVLRLMGMKDLTLYQLKSHLQKYRLGIQGKKSTGLEPASGGVLRSQGFGSXSASSSRCSXQGKNTREIALSDALRYQIQVQRKLQEQTEVQKKLQMRIEAQGKYLKTILEKAQTNISFHTNASNGIESTRSQLMDFNLDGFMNNATQVCKEHREQLVKAMSDENDKDSLGLQLYHLGSQEAKEVKCTPKTEDSLLLDLNIKGGYDLSSRGMQACELELKINQQIV

SEQ ID NO: 224565 - protein, 34 aa, Zea mays
  Clone ID: MRT4577_136392C.1.pep
MAEESGRPLPKFGDWDVNDPASADGFTVFYTYYP

SEQ ID NO: 224566 - protein, 274 aa, Zea mays
  Clone ID: MRT4577_136393C.1.pep
IPNPPTRLSSFLPTARTARNPPPHRRQPPRSPRLHHRSSTSRAATTAPNCARRAVARPVPNRARHAQPRPPRRRQTHRSSTVLSTKRAASPKTISLPSSRSSHSSTASQLHPVSRSNRALHLLIVLYSPSTPRPRPRLRRRTSLPPARAGLILVEPKARILVAGGDIGGLAFALAARRKGFEVLVLERDVSVVCGEGRYRGPIQLQSNALAEIAALKARVRLPARRPRFSGFCTAVGQGDTADLPLRQVTSQFLLPASEAQEAIGDRSCSIHGY

SEQ ID NO: 224567 - protein, 169 aa, Zea mays
  Clone ID: MRT4577_136394C.1.pep
MAEESGGPLPKGGDCDVNDPASADGFTVIFNKARDEKKGGNGQDTEAPSKDTRTEPVAGKKKKKKKKKKKKNVTTPPPRIGTPALRNPPMAEESGRPLPKFGDWDVNDPASADGFTVIFNKARDEKKGGNGQDTESPSKDTRTERVESYAAKPSTKKWFCCVTASPTQS

SEQ ID NO: 224568 - protein, 250 aa, Zea mays
  Clone ID: MRT4577_136395C.1.pep
GYLEAGRVAAIPPGVSVLLASRQQDPPGSAAGLAGRTQEREISRFPCPRAKMQLFQGEKPAHDFLSLHTGGGPSSPVQQQHPAQGYESGAHSSLKPMKLDRRRRGGGGGGAIDMAPSSGLESDSEEHVLPGGVGTFSIRQVASATRSRGEAAGHGVVSGAFPPAVHVSRTEEGPPHGAESGARAHSGPLAMWQDSGVDQRSRGARGGEGRSSGSSADQGPSTPRSKHSATEQRRRGQDNDRLEILRELLP

SEQ ID NO: 224569 - protein, 80 aa, Zea mays
  Clone ID: MRT4577_136396C.1.pep
MAEESGRPLPKFGDWDVNDPASADGFTVIFNKARDEKKGGNGQDTESPSKDTRTERVESYAAKPSTKKWFCCVTASPTQS

SEQ ID NO: 224570 - protein, 114 aa, Zea mays
  Clone ID: MRT4577_136397C.1.pep
MASLKAKWTEMDDYGETLMNIHAGLCTYAGQWSLKEEESGRPLPKFGDWDVNDPASADGFTVIFNKARDEKKGGNGQDTESPSKDTRTERVESYAAKPSTKKWFCCVTASPTQS

SEQ ID NO: 224571 - protein, 96 aa, Zea mays
  unsure (1)..(96): unsure at all Xaa locations
  Clone ID: MRT4577_136398C.1.pep
AAFRTVLFTGVRMPHCSVAAXTGGQWRLQQGLAANPSGYGPLTELPDWSYADGRPAPPMKGQLRRKAERDTFARRVVLLSQEMDAGVQAWQLRQQK

SEQ ID NO: 224572 - protein, 79 aa, Zea mays
  Clone ID: MRT4577_136399C.1.pep
MAEESGRPLPKFGDWDVNDPASADGFTVIFNKARDEKKGGNGQDTESPSKDTRTERVESYAAKPSTKWFCCVTASPTQS

SEQ ID NO: 224573 - protein, 283 aa, Zea mays
  Clone ID: MRT4577_13639C.1.pep
MVSASAPPPPPQAQSDAAGSGEEASKKVRKPYTITKSRESWTEQEHDKFLEALQLFDRDWKKIEAFVGSKTVIQIRSHAQKYFLKVQKNGTSEHVPPPRPKRKAAHPYPQKASKNEPNYGLKTDSSSIHRNSGMNVSVSSWPHRSIPQAVASSMVKDLGAGTPGPNNFCSSSTEGPPRTWQPGETNGPINQIPSLRLMPDFAGVYSFLGSVFDPSTSDHLQKLKEMNPIDVETALLLMRNLSINLTSPDFEDQRKLLSLYSASDGPELGSSRSSALATSAPFM

SEQ ID NO: 224574 - protein, 227 aa, Zea mays
  Clone ID: MRT4577_1363C.1.pep
MPSNSPFPDVKIPDVDLWGFMFERKDRDFSDDKVIYRAINSDRKYTFAQVKDLAKVFGEGLLDLWGWQKDDVLALYVPNDVDVPPVIYGTFYAGGIVTPANPGYSKDELAYQLENSGAKALVTTKAFLTTALEAANKVGIPNDRVILLGPERDDSFKHKHWSSIRKASILERYRRRKANPEDLSFLAYSSGTTGLPKGVMLSHRNIIADLLSGCRPLVLISRRQVPR

SEQ ID NO: 224575 - protein, 84 aa, Zea mays
  Clone ID: MRT4577_136400C.1.pep
EIYVPRTSFGQSVSLKMDAQNPKLWHNLGPSDVPVWETKGWSLHISLDQIVAKALGADIKILCAAPGETKTTPRKRGGRSRSKT

SEQ ID NO: 224576 - protein, 100 aa, Zea mays
  unsure (1)..(100): unsure at all Xaa locations
  Clone ID: MRT4577_136401C.1.pep
FSTLTCIPREIVYNVAKIHLLHLPRIIEGATDGKGTGRHGIITARTCNDILIALAAVXPITHKRLIEKELEGFAIMLNKTPPTLTFITKDKGGINFSSTV

SEQ ID NO: 224577 - protein, 173 aa, Zea mays
  unsure (1)..(173): unsure at all Xaa locations
  Clone ID: MRT4577_136402C.1.pep
PPLGVHXPPPYAPRPLGVHEEAPPYAPPPGVHXXPPYAPPPVEGHVGEDPDPDPPWHGKGSVPPSHGVGTYPPPPPWHGVGELEPPVRWRHGRDPVPPPXPGTSEGPSPARSPASSRGPPRSPAPXGTGPGXPRPPRPARPARRARRSRGEISTPPWQQLLLSAAHSPAPRTE

SEQ ID NO: 224578 - protein, 56 aa, Zea mays
  Clone ID: MRT4577_136403C.1.pep
SNMMDGGASVVHQSDTPLSGGHSVCVMDKNRADHPCSSARASVRSYGGRPQGHPPL

SEQ ID NO: 224579 - protein, 135 aa, Zea mays
  unsure (1)..(135): unsure at all Xaa locations
  Clone ID: MRT4577_136404C.1.pep
MPSGERRLRTHLSPRNRTFALLLPHFASGAGQQPPPPAAMRECIQIHMRACVIQVGXNACXAIHCPEHGSQPDGHLPDDTTVGGRDDAYDTFLCETGAGNDVPRAAMRHLEPIGTEEARTVDNQQMFQPEQLISV

SEQ ID NO: 224580 - protein, 77 aa, Zea mays
  Clone ID: MRT4577_136405C.1.pep
PVPSTRPFTPLSRWFSILGTHHFISHESELMLTSTAILLIIIMLFPFMNFIPFSCTHTLVIHTYPALPSVNTHKKRV

SEQ ID NO: 224581 - protein, 96 aa, Zea mays
  unsure (1)..(96): unsure at all Xaa locations
  Clone ID: MRT4577_136406C.1.pep
CNHTLGHCGLTTSNVLKTNCILWLSIVFVTILCTPQXHVIMWSPNPTVSVDLLHQLEGFCARNASPYXVQWLGXLPFTTLQMVQLAVIRRSHEPSF

SEQ ID NO: 224582 - protein, 124 aa, Zea mays
  unsure (1)..(124): unsure at all Xaa locations
  Clone ID: MRT4577_136407C.1.pep
GRGEDRRGEVGSATAWRPMKLYGAVMSCNVTRCATALDEAVSDYYIVPINFVTAXHMSPEHLVRYPFGQVSALQDGDLYLFESRAICKFSARKIKPXLLKEGNLDEAAMVDVWIEVEANQYNRA

SEQ ID NO: 224583 - protein, 92 aa, Zea mays
  Clone ID: MRT4577_136408C.1.pep
GRSGSASVIQWPSWGCQLPGLDLEQLNLRISSEQQRQGAQTTDLSLPWHEWRAAEEAQLWPVAMDMVYRRRLDDLRLPWVLQLADRRARHGE

SEQ ID NO: 224584 - protein, 74 aa, Zea mays
  unsure (1)..(74): unsure at all Xaa locations
  Clone ID: MRT4577_136409C.1.pep
MAEVKPEDMVHHLPMDQLQGLEYCIDSNPSWGEGIALGFXHYILSLGTAVMIPTLLXPSMGGNDDDQAKGGQTL

SEQ ID NO: 224585 - protein, 55 aa, Zea mays
  Clone ID: MRT4577_13640C.1.pep
SVNPNKKCIYCFGIWEVNKNLLFKKKKKKKKKKKKKKKKKKQNKKKKKNKKKKIK

SEQ ID NO: 224586 - protein, 394 aa, Zea mays
  unsure (1)..(394): unsure at all Xaa locations
  Clone ID: MRT4577_136410C.1.pep
MAEVKPEDMVHHLPMDQLQGLEYCIDSNPSWGEGIALGFQHYILSLGTAVMIPTLLVPLMGGNDDDKAKVVQTLLFVTGIKTLLQTLFGTRLPTVMGGSYAYVVPILSIVRDPSFARIADGHTRFLQTMRAVQGSLIVSSSIQIILGYSQLWAICSRFFSPLGMVPVVALVGLGLFERGFPGVGKCVEIGLPXLILFVALSQYLKHVHIRHVPVFERFSLLMCITLVWVYAHILTESGAYKYNTLVTQINCRTDRANLISSSQWISIPYPLQWGAPTFSADHAFGMMAAVMVSLIETTGAFKAAARLASATPPPAYVLSRGIGWQGIGTLLDGLFGTGTGSTVSVENVGLLGSTRVGSRRVIQISAGFMIFFSILGKFGALFASIPFTIFAAIY

SEQ ID NO: 224587 - protein, 74 aa, Zea mays
  Clone ID: MRT4577_136411C.1.pep
KGAEKKMTTENGEGDTAVEEDEGKRRHLNRNPLIIGHRSEFFFFMDLLFLFFLYDFLFFFFFLFFFFFFFFFFF

SEQ ID NO: 224588 - protein, 44 aa, Zea mays
  Clone ID: MRT4577_136412C.1.pep
CVLKDLISNAYPVISPPANKVVTASIPTIRNWYDKIVPVTTKSD

SEQ ID NO: 224589 - protein, 84 aa, Zea mays
  Clone ID: MRT4577_136413C.1.pep
YSFMYSSVQVCLYRLLTVVALALAFQLAKSMGVTCVADNGVVSSRRSMLWPIAAIEYGLERQLSAGTDRVHVADNRPSPPASRH

SEQ ID NO: 224590 - protein, 75 aa, Zea mays
  unsure (1)..(75): unsure at all Xaa locations
  Clone ID: MRT4577_136414C.1.pep
IGIRIITGIVTPFRYISAIMGANDAEMHTGFPTDLTQVVHTGXDRPRSTNNTNTNNTKTTTGQTPNWMKDYHSAP

SEQ ID NO: 224591 - protein, 93 aa, Zea mays
  unsure (1)..(93): unsure at all Xaa locations
  Clone ID: MRT4577_136415C.1.pep
MVAPMAAKIFAILALLSLXVSATTAFIIPQCSLAPNAIIPQVLPSVTSMGIEHPIVQAYMLQQALAASSLQQPFAQLQQQSLAHLTIHTIATQ

SEQ ID NO: 224592 - protein, 55 aa, Zea mays
  Clone ID: MRT4577_136416C.1.pep
LHGPVLLSPLPLAAALLICWRLASLLPDAAVGSSSSLLLTPSFQARATWLPISGE

SEQ ID NO: 224593 - protein, 56 aa, Zea mays
  Clone ID: MRT4577_136417C.1.pep
MATDEVQTPTDMVDAEAAWGETPTAAGAHEDVCPAESSMSTHEAAAPDDTEELDRD

SEQ ID NO: 224594 - protein, 77 aa, Zea mays
  Clone ID: MRT4577_136418C.1.pep
GEEIPCYSILNSMNFPPLQSPPIPLSPKPGCPYITHAGPIVQTEFGFFKNSTNNIVHRLSQPARKDLHLTFNSKLML

SEQ ID NO: 224595 - protein, 55 aa, Zea mays
  Clone ID: MRT4577_136419C.1.pep
KAIGKNKTRGRCIQLASISLLITAIPADLHYFRPLINGEITISTFMRVFTLSPLL

SEQ ID NO: 224596 - protein, 66 aa, Zea mays
  Clone ID: MRT4577_13641C.1.pep
VSLLVFLFGVWLGLHIPYLELIYSQSGKKSVVLPIGRICVRSRNRFAIDGPFGCCWTKGLCLMLDA

SEQ ID NO: 224597 - protein, 91 aa, Zea mays
  Clone ID: MRT4577_136420C.1.pep
SPSLMWRARYPPPPPPKRGPPGERVPGPGKAPPPKGTCFFAPRQGGSGGQTGRGLSPPGPGIWLKVIMTFKKKKISRFTGVFFFFAPPQFF

SEQ ID NO: 224598 - protein, 132 aa, Zea mays
  Clone ID: MRT4577_136421C.1.pep
RGLLNLLKRFLKNQNSPAPFFLKKKPKRGGPYSVPFFSPRASRVPLRPQKNAPPPGGSSLQNNNPGGAPPPLCSPGQSPFFSNFPPPGGFFLRQLGGGGGEQKGPVWVVPLGSKPVNRGIFSPSFLFGLAKL

SEQ ID NO: 224599 - protein, 121 aa, Zea mays
  unsure (1)..(121): unsure at all Xaa locations
  Clone ID: MRT4577_136422C.1.pep
MECVCXVVXRDFALAADDTSAAHSILVHKTEEDSRWCSHSQKMMGASGEPGDLSLFTELLLNSLHLYQFRNTIPLSTDDADNFTRXQLDTALRKNTYMLDIXLLEGYDKDDDASLYYIDYI

SEQ ID NO: 224600 - protein, 42 aa, Zea mays
  Clone ID: MRT4577_136423C.1.pep
IHYSTPCGSMLLECPLTLSVQPISKNRCGGFNNHGMNTCGIK

SEQ ID NO: 224601 - protein, 49 aa, Zea mays
  Clone ID: MRT4577_136424C.1.pep
RSQYAPLAHQVEINTHSVRDCCIHSTRRRVYRCIGMSDTTVITSLTSGC

SEQ ID NO: 224602 - protein, 158 aa, Zea mays
  Clone ID: MRT4577_136425C.1.pep
SAASSPAASAASPGATCAAPGAAASSSVSSSMGTTAHLAAAFWAFFAPFGSAASSSVWSSTGTTAPLAAAFSVFFATRGLPSLVSFAPPSAGSTTSLASTSCAKPRPSSVSTAIVTSSSLESPLSRTFASGACSSASVKGMSWVMPRFFSSFEQLLLS

SEQ ID NO: 224603 - protein, 132 aa, Zea mays
  unsure (1)..(132): unsure at all Xaa locations
  Clone ID: MRT4577_136426C.1.pep
QCRRRWGLPPTWPPLSGPSLXLSAQQPHHQCGRRRGRPPPLAATFSVFFATRGLPSLVSFAPPSAGSTTSLASTSCAKPRPSSVSTAIVTSSSLESPLSRTFASGACSSASVKGMSWVMPRFFSSFEQLLLS

SEQ ID NO: 224604 - protein, 42 aa, Zea mays
  Clone ID: MRT4577_136427C.1.pep
RSVGDLQKVVTCIEGFFHDPERSKTAGIRCRNPICLLRRGKH

SEQ ID NO: 224605 - protein, 152 aa, Zea mays
  unsure (1)..(152): unsure at all Xaa locations
  Clone ID: MRT4577_136428C.1.pep
GIIAHEKSRSSLSKVXVNTCNNLNDRKVELRLLGEKAVKRKDYNGALELYSEAIGLDSFDATLYSNRSLCYLKIGEAQKALLDAETCINNRPDWVKGYYRKGAALMLLKEHKRALDAFLDGLKVDPTSAEMEKAMREALEAVKMESVAVQRQ

SEQ ID NO: 224606 - protein, 77 aa, Zea mays
  Clone ID: MRT4577_136429C.1.pep
FKNYKRGGKGGFFGAGGFKYKFFWMEVLEQPNFKTFVLGQRFFGLQKTKKFGLKNLPPTGIPPLNLNGSKEKKGGGY

SEQ ID NO: 224607 - protein, 199 aa, Zea mays
  unsure (1)..(199): unsure at all Xaa locations
  Clone ID: MRT4577_13642C.1.pep
TRVRPACAQRPPTRTSQKHDRRDHDGRLGASRVTLMQPAKIGGRAPFGSLPSRPWMKLAWREFGVNAGAARITCCLEDVTSRCVDSGKIAGFTLNTLALLELDASAEGTPKXRLTYDKIQSKMYMEVKGTGTENQCPTMDRGVEXLPFKAGKDQMKKLSLEPTFFTVKAEGIVKNSPHEIQKTKLMTRLTYTLDEIEGP

SEQ ID NO: 224608 - protein, 281 aa, Zea mays
  Clone ID: MRT4577_136430C.1.pep
MEKESSATYEPKRNSEIRVFESSDEISTDLAEYISQVSEISVKERGYFAIALSGGPLVSFLGKLCEAPYNKTLDWSKWYIFWSDERAVAKNHAESNYRLTKEGFLAKVPILNGHVYSINDNATVEDAATDYEFMIRQLVKVRILGVSERNDCPKFDLILLTMGSDGHVASLFPNHPAMELKDDWVTYITDSPQPPPERITFTLPVINSASNIAIVSTGDDKAKAVHIAVSDMAEGLDAPTSLPARMVQPTDGKLVWFLDKAAASFLDSKNDDDDACYERHE

SEQ ID NO: 224609 - protein, 100 aa, Zea mays
  unsure (1)..(100): unsure at all Xaa locations
  Clone ID: MRT4577_136431C.1.pep
SATTTRQIPAAYAEXYLINQLXALNCLXLLQQHQLLSFTSXLGXASATFXDQPQMMTFYHDAAPYAGTLLQLLQLLRFNQLALTNPAAFYQQPIIGGALL

SEQ ID NO: 224610 - protein, 96 aa, Zea mays
  Clone ID: MRT4577_136432C.1.pep
RWWSLSFGFSIFFFFWVSPQVFCLLNFFFFFIFFFLIFYFLGLVFSVFFILYFCFKKKLIYIKKKKKKKKKKKKKKKKKKKKKKKKKKKKKKKKKK

SEQ ID NO: 224611 - protein, 112 aa, Zea mays
  Clone ID: MRT4577_136433C.1.pep
GCRLCIVAEDRSLLDRRRSAEAGEETQRTHAGGRADPHTPGLTRSSSSVVTSVSSRPPPCFSVLPSTSSPPPSPSTLAMTCVERPACPVPFQCNFPSPGSGWFGEVPHRAPA

SEQ ID NO: 224612 - protein, 76 aa, Zea mays
  Clone ID: MRT4577_136434C.1.pep
AVSGHLISTLITGKQDALHTGYMWLQMPGLEGILSTIVHSIGDPKIDNNKMSRPHEPAFTNVDGIMDGLVLSASYC

SEQ ID NO: 224613 - protein, 61 aa, Zea mays
  Clone ID: MRT4577_136435C.1.pep
LTFYFSVLYFLCVCNALLFHKSFLLQQYAILIPVLPGVVLLSFLSVFVALVMLKSKNKKTA

SEQ ID NO: 224614 - protein, 54 aa, Zea mays
  Clone ID: MRT4577_136436C.1.pep
ARKEVLNRIKGVSFNLAPESISSYLRSCTFSIIRPRGYCIVQQQDKFCKLLLLH

SEQ ID NO: 224615 - protein, 42 aa, Zea mays
  Clone ID: MRT4577_136437C.1.pep
IGTQESHYFTITQTFNYSGDVVHERPHMQVRKNISSKALNTQ

SEQ ID NO: 224616 - protein, 43 aa, Zea mays
  Clone ID: MRT4577_136438C.1.pep
NIVRFLGYCFQEEGRFFIYEYVLNNSLNKFWYKASSQCQKLEW

SEQ ID NO: 224617 - protein, 365 aa, Zea mays
  Clone ID: MRT4577_136439C.1.pep
EKDEFSRLLKAKINELGMSDRIECTPNDSPSGKLTVPVLQELISALATDMSTSISQCSNYSGASAPLRCNGNVDCINPAHCIFSNEQSPDFQKCYQGEQDVDSSATSLNNEPNQPSPTSVLEASFSNDTSLGSPVEKNEGKDFIVSIENKMEDLFNLESDIVDLAMSIDTRKTDAEEAHHGNDKLSCLQNFLAHDFNILESRLCSIREAISNAELLLGISLLHSTTSGLPLHPFIVETLENTMDMFSGGEYSDFTEDKKYQHTNFLFDCIIESLDSKFCNLGKCGYKAWLKLPHSLSKDLLKRQLLENISNWRESSGTALRQVSDKEVDQVTDRWDANLEAFDISIAIENDILEALVGEFAVDLW

SEQ ID NO: 224618 - protein, 50 aa, Zea mays
  Clone ID: MRT4577_13643C.1.pep
RSSSNVVHGSKVKVKKSKCSNSKNRDNVEFRSYCKASDDICISLSCAVYQ

SEQ ID NO: 224619 - protein, 157 aa, Zea mays
  unsure (1)..(157): unsure at all Xaa locations
  Clone ID: MRT4577_136440C.1.pep
RSVFCLGAYNNELCGRACLVAKRNALSILNRSSTVRDPKDHTHIVVDMLKLLEHDXCSNQIHALTDTNGRLQKPNKLKLHQNPIAMPAEDIVNKGVDAVKEYHVKEWAXILVEEEQRRMAEETHRIANGSLSLSDSQPFMRNWTYLRVMAGYHGWGT

SEQ ID NO: 224620 - protein, 31 aa, Zea mays
  Clone ID: MRT4577_136441C.1.pep
ASGLYQSNILICALCVNLDIKYIFGEGRVDH

SEQ ID NO: 224621 - protein, 70 aa, Zea mays
  Clone ID: MRT4577_136442C.1.pep
SGFLLPMVSVGVFDSFLPGVWSLWPLLVPACSSCASPCRLLASGPSSAGLFFPRLLSPVPWLRKGNSAQF

SEQ ID NO: 224622 - protein, 159 aa, Zea mays
  Clone ID: MRT4577_136443C.1.pep
KTRNQLSRKNQHDSVPVAPKRTRYECPGRKLFSSYQALGGHRASHKRMNASCSSPKNKITPAASSAPPEPSTETYTSFNTMSPSASPDSVAIGFGKPKDDEAVPDAELEHKRSHLMSCESNGVDLYYVAGAGADHQEQHSAVADGLLDLNFPPAAAEET

SEQ ID NO: 224623 - protein, 57 aa, Zea mays
  unsure (1)..(57): unsure at all Xaa locations
  Clone ID: MRT4577_136444C.1.pep
CQWLRQQCCQQLRQVEPQHRYQEILGLVLQSILQQQPXSGQVAGLLGAKIAQQLRWM

SEQ ID NO: 224624 - protein, 80 aa, Zea mays
  Clone ID: MRT4577_136445C.1.pep
TCHTSDPYRTAALRVSSFFLKKKDTSACHIAHELLNANVLPHFWPVKIENQLVDIPANKLPLVRQLHFHKRFSFFKEKIN

SEQ ID NO: 224625 - protein, 70 aa, Zea mays
  unsure (1)..(70): unsure at all Xaa locations
  Clone ID: MRT4577_136446C.1.pep
VYSSMSYVALWSARAIGSKQSASRLGSPTLGRYAPRARAAACEFSLDPAPMPAPDSCTCGRVGRGRAXPA

SEQ ID NO: 224626 - protein, 162 aa, Zea mays
  Clone ID: MRT4577_136447C.1.pep
MAEVEQPQDAVKLFNRWTFDDVQVNDISLNDYLAVTAAKHATFLPHSAGRYSKKRVRKAQCAIGERLTNSLMMHGRNNGKKVMAVRIMKHTLEIIHLLTDANPIQGVVDAIINSGPREDATRIGSAGVVRRQAVDISPLRRVNQAIYLLTTGARESGIRLEE

SEQ ID NO: 224627 - protein, 217 aa, Zea mays
  unsure (1)..(217): unsure at all Xaa locations
  Clone ID: MRT4577_136448C.1.pep
AGMMYEAXAIEADREQVQNMFNTNVFGLFDMVQAFSPLLLASVADSQTTPTIINTASIVARVPYYFTAQYDATKAAVASYSDTLRLELAPLGIKVVTLYMGVVATHLTSSDKKLFSPDSIFIDAEEGLRERSRLHLKNGTKPEEFARLVVKDVLKNKTALSKGEYIWRGANAYVIWLLNAIGWRKIFDGVSEGGVGLTKDVKKAIYKKGQGSLPKSS

SEQ ID NO: 224628 - protein, 75 aa, Zea mays
  Clone ID: MRT4577_136449C.1.pep
TPFPVICELVSSYFVEILEHSDGPDKMLLLCLVHTVPGFPGQNLWRKLSSVDSGDAGKLPLTCMDFNSPHRIFSK

SEQ ID NO: 224629 - protein, 140 aa, Zea mays
  Clone ID: MRT4577_13644C.1.pep
MQSFSMKREISEAHDTIRFGINAGVKADLAPPHPLQSTIQSETKFWADKKKFGTDAIYGSALNIRKDLDAQILSRFQRPPGALPSSLLGYEALTGSLDDFGFEDYLNMPHDSDSFRQPDMHHGMEVRLGLSKGPICPNFN

SEQ ID NO: 224630 - protein, 199 aa, Zea mays
  Clone ID: MRT4577_136450C.1.pep
MAEVEQPQDAVKLFNRWTFDDVQVNDISLNDYLAVTAAKHATFLPHSAGRYSKKRFRKAQCAIVERLTNSLMMHGRNNGKKVMAVRIMKHTLEIIHLLTDANPIQVVVDAIINSGPREDATRIGSAGVVRRQAVDISPLRRVNQAIYLLTTGARESAFRNIKTIAECLADELINAAKGSSNSYAIKKKDEIERVAKANR

SEQ ID NO: 224631 - protein, 199 aa, Zea mays; identical to SEQ ID NO: 224630
  Clone ID: MRT4577_136451C.1.pep

SEQ ID NO: 224632 - protein, 199 aa, Zea mays; identical to SEQ ID NO: 224630
  Clone ID: MRT4577_136452C.1.pep

SEQ ID NO: 224633 - protein, 76 aa, Zea mays
  unsure (1)..(76): unsure at all Xaa locations
  Clone ID: MRT4577_136453C.1.pep
LSSADTRSALQFIPKHNYVHRDLEPGSLLVDKNGHMNXSSLGXLASPQPAXKPSTMNEDTPMGDDNTRECMDMERS

SEQ ID NO: 224634 - protein, 135 aa, Zea mays
  Clone ID: MRT4577_136454C.1.pep
EQWQKGKSSECLTSPNGQAANSFGNFANYAHMGEGTQTQVFSSSCRHPIDWVIDSGASKHVTGISTFFKTYIPYTHSESVQIADGTSQQIHGVGSIECTPSLNLSSVLHVPSFPVNLLSVSSIIDQFKCTVTFDE

SEQ ID NO: 224635 - protein, 61 aa, Zea mays
  unsure (1)..(61): unsure at all Xaa locations
  Clone ID: MRT4577_136455C.1.pep
GKVTPQIKFSPPPKIFLFFENLFPPTLNNFFLKINKXQFPLKSQHSFIAQITKNLFLFNEH

SEQ ID NO: 224636 - protein, 84 aa, Zea mays
  Clone ID: MRT4577_136456C.1.pep
PLDHPELGRQKKPCSLFAQKGLSRKLCLQQDLHLLLLVVEHPLGSWCLWPFQKPAPQNFQQNFPTSVPAKTAFLTDGCGPTRYS

SEQ ID NO: 224637 - protein, 96 aa, Zea mays
  unsure (1)..(96): unsure at all Xaa locations
  Clone ID: MRT4577_136457C.1.pep
AGDIQFFDVRRSAEPYLGIEGHRGSLSTFAVYRHAPIVGCGLAPTIIKKCSXLKRDAYTKIRSQPFFMGQRIXTVNRLLFYLYKTHISSCGGDEDF

SEQ ID NO: 224638 - protein, 57 aa, Zea mays
  Clone ID: MRT4577_136458C.1.pep
RYVSDNSATNEHIFALLELREVDELSAICSTDPHYASESLLFGLSGFMIDLRMVEFL

SEQ ID NO: 224639 - protein, 35 aa, Zea mays
  Clone ID: MRT4577_136459C.1.pep
CIHDKGMRTTRRVNFLWLRRHRPKARPRRPEQRAT

SEQ ID NO: 224640 - protein, 126 aa, Zea mays
  unsure (1)..(126): unsure at all Xaa locations
  Clone ID: MRT4577_13645C.1.pep
PKQDAPGGGRKLEGPTPXPPDDKTGQADHPGADPTTTAQGEEPRKQXGAPDHNEGSAKTQQNAKGXTEAATKGAPQPPKANKKKKAQRGASTTPRPKQGQTKKQGRRRQGKAPRTSTREQQERAPP

SEQ ID NO: 224641 - protein, 245 aa, Zea mays
  Clone ID: MRT4577_136460C.1.pep
MPAHPTPPAARLSGVTSRRHAELLLHSGVDGVSVKDLRLRRIVPPAAGSLDTSPKCVSPVKPGSVDSTPPEAVSSAAAAAAGDLDRKLAPPRSKLVRDPRSFGYRRLLPFLNEMTKNSVSHSEPDAMDPVEPAVVSTGGDTDGKATCGNVMEETKTAPHDLTNKPLLARCTRSRFVHHPSSFSYKRMLPFLMEDEIYAQESGRVKIRKVAEERQFAANKHDASANGQQCLAVSDDSSQEGIELNL

SEQ ID NO: 224642 - protein, 102 aa, Zea mays
  unsure (1)..(102): unsure at all Xaa locations
  Clone ID: MRT4577_136461C.1.pep
WERERTRRRGARWRAASRTRTTRRGAPGAEHYLASNEVEXYDEYDEEAALAAXTAAVDAYACDEFRMYEFKVRRXSRGRNHDWTXCPYAHPGXEKARRXRPQ

SEQ ID NO: 224643 - protein, 297 aa, Zea mays
  Clone ID: MRT4577_136462C.1.pep
MPAHPTPPAARLSGVTSRRHAELLLHSGVDGVSVKDLRLRRIVPPAAGSLDTSPKCVSPVKPGSVDSTPPEAVSSAAAAAAGDLDRKLAPPRSKLVRDPRSFGYRRLLPFLNEMTKNNSSIGKEVFLQDTAAHPTDELSRSDSRLADESIGVSHSEPDAMDPVEPAVVSTGGDTDGKATCGNVMEETKTAPHDLTNKPLLARCTRSRFVHHPSSFSYKRMLPFLMEDEIYAQESGRVKIRKGAEERQFAANKHDASANGQQCLAVSDDSSQEGNRAQFKIVEEEKPLKADVNHILDD

SEQ ID NO: 224644 - protein, 194 aa, Zea mays
  unsure (1)..(194): unsure at all Xaa locations
  Clone ID: MRT4577_136463C.1.pep
PIVRPASGSCHTPVVGPGHTVXSSGRPTVVSXACARMDSQLAQALNPLRLMKHDAXHYALCAHHLHLQVEVHHFVDRFNHDFLQCSVYDFYKASVHLIXVVHPLHTPCSRXLAPDEHKLRHSHAYDVKAGLWTDXICVPAALHMSDMAILIRTYGKFWCTLHVDRGDSLTLGAPELMVLAHVDLPGRVREELVL

SEQ ID NO: 224645 - protein, 73 aa, Zea mays
  Clone ID: MRT4577_136464C.1.pep
NQNKLFQFFQKKKNPHPTKFFFLRPKHEKTSPKQKAQKPTLFNFLKGTHCSTHGDPNKLKKTGQIIRPTKITK

SEQ ID NO: 224646 - protein, 55 aa, Zea mays
  Clone ID: MRT4577_136465C.1.pep
RMQLQNLKAKPVKSVRQDLCHQGREETDKIMVGTKGWFSRALGRTASKIRQLWLL

SEQ ID NO: 224647 - protein, 58 aa, Zea mays
  Clone ID: MRT4577_136466C.1.pep
THPMAVERAYHLTYRPLHLCSRDGRVLTISVDEVMLGGGCFALSLVQAIAVSLGRHAH

SEQ ID NO: 224648 - protein, 135 aa, Zea mays
  Clone ID: MRT4577_136467C.1.pep
FWVGMQKAAPPGGRKTTRGPPPAGVPPHQRVHQGPRQGPRHRPGQGWPEAPQVQPPQGRAFLVNQGLVRRCPMSEPMFSPVFSSPVNLGSWNPAGLIGFIFFKSLRPCPSKRNFACCEKNPFGPSKKKIKTPNPI

SEQ ID NO: 224649 - protein, 43 aa, Zea mays
  unsure (1)..(43): unsure at all Xaa locations
  Clone ID: MRT4577_136468C.1.pep
KGGKGLSKGGANLHRNVLRDNIQGITXPAIRMLARMSDVIVSS

SEQ ID NO: 224650 - protein, 451 aa, Zea mays
  unsure (1)..(451): unsure at all Xaa locations
  Clone ID: MRT4577_136469C.1.pep
TCLSAAAGGGGGYHSPASHLLELEGVRFLLDCPIDLSALAAFAPVPLAGDAGGLIRAVPRYWLPAAVKEGGVDAVLVSSATGMLGLPFLTGLPGFTNTKVYVTEVAARIGKPMMEELVEMHREFVRYYGPDTDASPKWMEGEELNELMSMSQKAVIEGRENDLXLWCLYTGPLWNHNPAGSWLAHLWLLFQSSRRAIYMSEXEIKSLIGANNIQPSNQQNLIDMSCPGNVEECMHKVQSVKYGEEVCFNGIFMLKASSSGLELGNSTWTIQSPRASITYLPSSVFVSAHALDFDYSSLKENDVILFSDFSSLNDTDEDNEKLNEHSMDETDSSLCRYSVFRDDGADADERVPFVCNNDDITEEIERISFICSCIFGAVKSGGSVLIPIGRLGVILLLLELISEMLHSSSLKVTVTLESYGGFSDWNILLSHLINLTCVPQLLKQCFWYIFS

SEQ ID NO: 224651 - protein, 140 aa, Zea mays
  Clone ID: MRT4577_13646C.1.pep
MQSSSMKREISEAHDTIRFGINAGVKADLAPPHPLQSTIQSETKFWADKKKFGTDAIYGSALNIRKDLDAQILSRFQRPPGALPSSLLGYEALTGSLDDFGFEDYLNMPHDSDSFRQPDMHHGMEVRLGLSKGPICPSFN

SEQ ID NO: 224652 - protein, 75 aa, Zea mays
  Clone ID: MRT4577_136470C.1.pep
QPPLYLFHPPALVVGLMGEPIIFPKFWPPVVSCPVLSSPSWGSFNSQTLFCFVFPCGPSFQYSIGPCPRSICLRL

SEQ ID NO: 224653 - protein, 42 aa, Zea mays
  Clone ID: MRT4577_136471C.1.pep
HCMLSENVLCLKTVDQHSDRGQESFVLKGIDDLVRGLLEDRL

SEQ ID NO: 224654 - protein, 55 aa, Zea mays
  unsure (1)..(55): unsure at all Xaa locations
  Clone ID: MRT4577_136472C.1.pep
PDLTQMIPKPETSGLGLEDNEXEEVDKTGVKAKDVKLVMTQASVSRPRPVKALKA

SEQ ID NO: 224655 - protein, 43 aa, Zea mays
  Clone ID: MRT4577_136473C.1.pep
KYSGWGTIWGDAQRPKRGMGDKAIKLGFAPGIKFLNRDPKKNY

SEQ ID NO: 224656 - protein, 129 aa, Zea mays
  unsure (1)..(129): unsure at all Xaa locations
  Clone ID: MRT4577_136474C.1.pep
PPPPPPPPPPPAPPXAPRPPPPPPRAAAPPPRPPRQPRAPPPPGPPXPGSEAAQEPPERPPPLDAPRPAPWPNRHPSWPRPITARQPSPVPPPPPPPXPPRLPPRPYPVARWGGMSAAIRTPQEFSSCP

SEQ ID NO: 224657 - protein, 149 aa, Zea mays
  Clone ID: MRT4577_136475C.1.pep
EIDREIRKILHGIIRKRERAFIDSEGTNDDLLGLLVESNMRESNGNAKLGMTTEDIIEECKLFYFAGMETTSVLLTWTLILLSMHPEWQEQAREEVLNHFGMGTPDFDNLNRLKIVTMILYEVLRLYPPVVFLSRRTYKEMELGGIKYP

SEQ ID NO: 224658 - protein, 47 aa, Zea mays
  Clone ID: MRT4577_136476C.1.pep
TKQHLCSFYGKKSKPISVLKRINKCVNDLPIRYRELVNLSTEIGISN

SEQ ID NO: 224659 - protein, 528 aa, Zea mays
  Clone ID: MRT4577_136477C.1.pep
MATLPLLLHLLWEASPWARAGAATAAVVLVWLAAWTLEWAWWTPRRLDRALRAQGLKGTRYRLLTGDVRENARLNREARTKPLPLGSHDIIPRVLPMFHNAVKENGTNSFTWFGPIPRVIIPDPELMREVLSNKFGHFGKPLFSRVGKLLANGLANHEGEKWAKHRRILNPAFHHEKIKRMLPVFATCCADMINRWENSMSSKEPSEMDVWPEFQNLTGDVISRTAFGSNYQEGRNIFQLQGEQAERLIQSFQTIFIPGYWLLPTKNNRRMRAIDLEIRKILREIIGKREKDTKNRETNNDDLLGLLLESNTRQSNGNASLGLTTEDVIEECKLFYFAGMETTSVLLTWTLILLSMHPEWQEQAREEVLNHFGMGTPDFDNLNRLKTVTMILYEVLRLYPPVVFLSRRTYKEMELGGIKYPSGVSLLLPIIFIHHDPNIWGKDASEFNPQRFEDGISNATKHQAAFFPFGWGPRICIGQNFALLEAKMALSTILQRFSFELSPSYTHAPYTVITLHPQHGAQIRLKKL

SEQ ID NO: 224660 - protein, 140 aa, Zea mays
  unsure (1)..(140): unsure at all Xaa locations
  Clone ID: MRT4577_136478C.1.pep
VLVVCLAMSSVSASAMQMPCPCSLLQVLFCASAGLTTIMGACWLYTYAEYLRQSKYSTMAATPYYSXCXGQTNAMYQALRXQCCHQQMRMMDVQYVSHQLEMKIQLERAADVSISLYXPLLMHHQQHLMAAHALNPMAMM

SEQ ID NO: 224661 - protein, 90 aa, Zea mays
  unsure (1)..(90): unsure at all Xaa locations
  Clone ID: MRT4577_136479C.1.pep
VSNSPIVSRCGDKTTMLWNTLGQRKNTIGADLRGIEGHSXCVCCVRLFPNTFQPTIGSRFSDRTVKVWNLTNCXLPCSLDWHGSYRNDDA

SEQ ID NO: 224662 - protein, 197 aa, Zea mays
  Clone ID: MRT4577_13647C.1.pep
MGGGNCNPKDFGAAAYWEARYSSPSTGGKGGGGGGFFDWYQSYSALRPLLRACVPTSSRVLMLGCGNSLLSEDMVKDGYQNIVNIDISSVVIEQMKEKHMDIPRLTYMQLDVRDMSFFGDGSFDCIIDKGTLDAMMCGDDAPHGAYKMLAEVARLMRPGGIYMLITYGAPKERLTLLNQVQCCWEVELYIMPTPEYQ

SEQ ID NO: 224663 - protein, 83 aa, Zea mays
  Clone ID: MRT4577_136480C.1.pep
VSRQRHFSIVHTSWTEQFLGQCRQPAPPLPLSQAPSCFGCFLVHNSAAQLKLNPCRKLPWKGRNSRPQRIEAFSTSKSIPISV

SEQ ID NO: 224664 - protein, 43 aa, Zea mays
  Clone ID: MRT4577_136481C.1.pep
LVESFSVECVSNNVSRIAMGGSVSVSNVLNELLKCKVESIVPK

SEQ ID NO: 224665 - protein, 87 aa, Zea mays
  unsure (1)..(87): unsure at all Xaa locations
  Clone ID: MRT4577_136482C.1.pep
MDAEMVELQTPLMAGLHHLLDVPDGDNKTGGGATRTYNQDTRGLAGTPGSGKELPCTDTFLVDMPNTGXTGDIXVQAEDDRVLMGRG

SEQ ID NO: 224666 - protein, 139 aa, Zea mays
  unsure (1)..(139): unsure at all Xaa locations
  Clone ID: MRT4577_136483C.1.pep
GLQVPVCLQGLEVYGRLQLRPQVFGVASGQVWPPLXRGALSSVCKKATQHGRAPGFLAARVCVCLSMRAKAGACMNESLSISNIFMVPNTRGGVRIFKSVGEVFVLSMQVRSFGECFPPPPHCFDRLVEIPVASMCVIP

SEQ ID NO: 224667 - protein, 150 aa, Zea mays
  Clone ID: MRT4577_136484C.1.pep
MAEQTFIMIKPDGVQRGLIGEVISRFEKKGFYLKGLKLQNVEKSFAEQHYSDLSSKPFFAGLVEYIVSGPVVAMVWEGKSVVATGRKIIGATNPLASEPGTIRGDFAVDIGRNVIHGSDSVESARKEIALWFPEGIAEWRSSQHNWIYEA

SEQ ID NO: 224668 - protein, 86 aa, Zea mays
  Clone ID: MRT4577_136485C.1.pep
MPVPFEALLPYAIMIGMFGISGTGLAVIKGIQNEGKRPRYSVDQWDRQMMDRDRRLTGTLRGQTDKAEAPLGFELNNPWKLETRFS

SEQ ID NO: 224669 - protein, 50 aa, Zea mays
  Clone ID: MRT4577_136486C.1.pep
IEDQGREISSPSTIWALLVRTRVNPYMYDIHLITFLADLCTLTLVLFYFE

SEQ ID NO: 224670 - protein, 88 aa, Zea mays
  Clone ID: MRT4577_136487C.1.pep
GVETSVVGSAAGPDFLYADDDGAASSSGVKAALGALAWSVLVAADSGALAVAAGLPAFGDSAGALAGLPASGASVGAWSVFRSATAWS

SEQ ID NO: 224671 - protein, 43 aa, Zea mays
  unsure (1)..(43): unsure at all Xaa locations
  Clone ID: MRT4577_136488C.1.pep
EGNERLFYKLLIDNIEEXVGEACQKYGSILSRPQCLYISLKDK

SEQ ID NO: 224672 - protein, 56 aa, Zea mays
  Clone ID: MRT4577_136489C.1.pep
PKLGFNRGYDPTRLGPARGRTSYKARGSIKRQRGGGPHCVLLVGPWLGFVEGPGGT

SEQ ID NO: 224673 - protein, 204 aa, Zea mays
  Clone ID: MRT4577_13648C.1.pep
VPPCPLFWTYLNLFLRRRARRLLNVVDPYVTIDISEPGGEVRYSRYGPVSDNDSTYEEVKAYLSGAARSQDARELRVEGAREGNGLVVSMRDGQDVADEFRGVPLWWSSVVAAEREEVAWEWSRLLRSAVGRHRGGSQRRMRRRWYEASATPSRRPTAAIGEGEFWRRERDAGSLPVTAGADPESETEREGARGGRNSDVLLCH

SEQ ID NO: 224674 - protein, 84 aa, Zea mays
  Clone ID: MRT4577_136490C.1.pep
RPRVTLHTFYQLPSSFSFPALARARVKYPKDMPHYYYHYKNTLLYFCKFTTHTRSLNLKHLICRYRKIPKMDLKRDYSFIHLSY

SEQ ID NO: 224675 - protein, 59 aa, Zea mays
  Clone ID: MRT4577_136491C.1.pep
PREILSAANALYGPTAERHVVSGGISVARSSMFRRQKPGCERSLPLYFRPDRSSLQRAP

SEQ ID NO: 224676 - protein, 277 aa, Zea mays
  Clone ID: MRT4577_136492C.1.pep
MAMPFARRDIEAAGAGASSDDSPAAKKGKPELAGARPALTRSEAFAFAAVLALFTAGIFCVFLTAPRGEFGQILRLPRSLADVRLLKDNLAVYARDYQTNFILGYCSIYIFMQTFMIPGTIFMSLLAGALFGVIKGGILVVFTATAGGSSCYFVSKLIGRPLVSWLWPEKLRYFQSEIAKRKEKLLNYMLFLRITPTLPNTFINMASPIVDIPFHIFFAATLVGLIPASYITVKAGRALGDLKSVRELYDFKTLVVLFLIGSVVVVPTILKRKRTYE

SEQ ID NO: 224677 - protein, 64 aa, Zea mays
  unsure (1)..(64): unsure at all Xaa locations
  Clone ID: MRT4577_136493C.1.pep
RIKKKKKKKNFLYYYXKKIGWGGENFXVVXGKTKVEFCGFTTHGGGFMPAYDGALIPLSVSISQ

SEQ ID NO: 224678 - protein, 47 aa, Zea mays
  Clone ID: MRT4577_136494C.1.pep
PDYPIRIIWLIYIHTWDITTLLVRVKMVFRSFDYQRNPPILKFFLLS

SEQ ID NO: 224679 - protein, 72 aa, Zea mays
  unsure (1)..(72): unsure at all Xaa locations
  Clone ID: MRT4577_136495C.1.pep
MAKRRDTLSVTRKRPPAAQARMEVYANQVPKTTDNFRALLTXARRVLASDXSLHYKGSTLKRVIAKFMCHAG

SEQ ID NO: 224680 - protein, 61 aa, Zea mays
  Clone ID: MRT4577_136496C.1.pep
MVADPRINVLYADVPELVGIDGPATGIVDWLVDGTARLKVLSVVGFGGLGKTTLAMEADAW

SEQ ID NO: 224681 - protein, 74 aa, Zea mays
  unsure (1)..(74): unsure at all Xaa locations
  Clone ID: MRT4577_136497C.1.pep
SSGARFGAPPAAGCXXPGRGSPSXLXPXAXXXGRPLPXVXXGCLPXXVACARFSSVLPCVXVLXPCXRVRXRVG

SEQ ID NO: 224682 - protein, 151 aa, Zea mays
  Clone ID: MRT4577_136498C.1.pep
SNRNRHDQSSSTMIEPSIRVRRAIHANDATLLRRILKTHPSYLLNPDSSPSGLSNSNMHLAASLGHHEVCAVLLKLGHEDPCPALNESHQTALMLAAAGGHTEVVQILCEHDKTCILRRDVRGRDAVMEASLGGHDTILQLLLTLRSRWAL

SEQ ID NO: 224683 - protein, 78 aa, Zea mays
  Clone ID: MRT4577_136499C.1.pep
KPGRTHASARSSPPSSLSYSMLKLYSIRAFSPLGGTLLATTSITPLFMHYFHNTHVLILVVYIIYTKPFVYATNYLLI

SEQ ID NO: 224684 - protein, 140 aa, Zea mays
  Clone ID: MRT4577_13649C.1.pep
MQSNSMKREISEAHDTIRFGINAGVKADLAPPHPLQSTIQSETKFWADKKKFGTDAIYGSALNIRKDLDAQILSRFQRPPGALPSSLLGYEALTGSLDDFGFEDYLNMPHDSDSFRQPDMHHGMEVRLGLSKGPICPSFN

SEQ ID NO: 224685 - protein, 65 aa, Zea mays
  Clone ID: MRT4577_1364C.1.pep
AIRNKRTTHRMARATQAQQVFFKPRTEYGNVGAGSPTSRSEQNPKRRTAQFFSPTNKKKKKKKER

SEQ ID NO: 224686 - protein, 208 aa, Zea mays
  unsure (1)..(208): unsure at all Xaa locations
  Clone ID: MRT4577_136500C.1.pep
MCKNLVAGRAVVRGAGDAQARLLEHVCECLEKECCGTFDDCITWARXEFEXFSNRVKQLTFTFPEDAATSMGAHFWCAPKRFPHPLEFSAADSSHIQFIMSASILRALSFGISIPDWAKDTDNLADAVSKVAVPEFKPKKGVNIETDVKADNLSSASVDDAAVINDLLAKLEACTKELPPRFQMKPIQFEKDNDSNFHSIKSPSTFLL

SEQ ID NO: 224687 - protein, 78 aa, Zea mays
  unsure (1)..(78): unsure at all Xaa locations
  Clone ID: MRT4577_136501C.1.pep
PPPPQPHVHVQMPQVPQDKRAELMRGYPPVFAHSTDPMDAEDWLRTVERELHTAXCNDREKFLYGPPCNTPGVPITKI

SEQ ID NO: 224688 - protein, 56 aa, Zea mays
  Clone ID: MRT4577_136502C.1.pep
VYVSFNSARLTLYHKPSSASARQRERQRERHRQRASERARELGRHPRPLPFSILHL

SEQ ID NO: 224689 - protein, 94 aa, Zea mays
  Clone ID: MRT4577_136503C.1.pep
RHAPKPTPKRKSRGAARAPSERRGAPHAPEGSQPQRECNGRGRRATQRAEQAPPPPHNKKALNKKSPARQEPPQNYQRSERTKKKDQEKRKRPP

SEQ ID NO: 224690 - protein, 230 aa, Zea mays
  Clone ID: MRT4577_136504C.1.pep
GRGNPLRRRPSLSQPPPGFHVLRNKKDKDGYAMWMAGNLASGGAAGATSLLFVYSLDYARTRLANDAKNAKSGGDRQFNGLVDVYKKTLASDGIAGLYRGFMPSVAGIVVYRGLYFGMYDSIKPVVLTGNLQGNFLASFALGWIVTTGAGIASYPLDTIRRRMMMTSGEAVKYKNTMDAARQIVAKEGVKSLFKGAGANILRGVAGAGVLSIYDQLQVLLFGRPSSKRFV

SEQ ID NO: 224691 - protein, 312 aa, Zea mays
  Clone ID: MRT4577_136505C.1.pep
MSGKQQDKSFMGMPGFVVDFLMGGVSAAVSKTAAAPIERVKLLIQNQDEMLKSGRLDRKYGGIVECFSRTAKNEGVLSLWRGNTANVIRYFPTQALNFAFRDTYKSMFAYKKERDGYAKWMAGNLASGGAAGATSLLFVYSLDYARTRLANDAKSAKKGGERQFNGLVDVYKKTLASDGIAGLYRGFMPSVAGIVVYRGLYFGMYDSIKPVVLTGNLQGNFFASFALGWIVTTGAGIASYPLDTIRRRMMMTSGEAVKYKNTMDAARQIVAKEGVKSLFKGAGANILRGVAGAGVLSIYDQLQVLLFGKAFK

SEQ ID NO: 224692 - protein, 446 aa, Zea mays
  unsure (1)..(446): unsure at all Xaa locations
  Clone ID: MRT4577_136506C.1.pep
MNLAALTSTAVRPHAHGLMPLNLPSAASSSLRRSLFASLRKKISPMASAPASASAALSTAAPADNGAAKPAEQRPVQVAKRLEKFKTTIFTQMSMLAVKHGAINLGQGFPNFDGPDFVKEAAIEAIKAGKNQYARGYGVPELNSAVAERFLKDSGLQIDPDKEVTVTSGCTEAIAATILGLINPGDEVILFAPFYDSYEATLSMAGANVKAITLRPPDFAVPLEELKAAVSKNTRAIMINTPHNPTGKMFTREELEFIADLCKENDVLLFADEVYDKLAFEADHISMASIPGMYERTVTMNSLGKTFSLTGWKIGWAIAPPHLTWGVRQAHSFLTFATSTPMQSAAAAALRAPDSYFEELKRDYGVKKALLVDGLKAAGFIVYPSSGTXFVMVDHTPFGFDNDIEFCETWIREXVGVVAIPPSVFYLNPEDGKNXLVRFTFCKDDG

SEQ ID NO: 224693 - protein, 123 aa, Zea mays
  Clone ID: MRT4577_136507C.1.pep
WPDHSLLRLCMRCAYLRQSCTASAASRPCVGVRRRQGQPIRRRDGQVQVQSRRLALLLLHGCGTASARCGSSSRHQLLADGARAVDVVAARFLRPQADRQREVASRVLLLSVTWPANRLLCCC

SEQ ID NO: 224694 - protein, 319 aa, Zea mays
  unsure (1)..(319): unsure at all Xaa locations
  Clone ID: MRT4577_136508C.1.pep
MAKGDVVQAEKSFMGMPGFVVDFLMGGVSAAVSKTAAAPIERVKLLIQNQDEMLKTGRLDRKYDGIAECFRRTSQQEGVLSLWRGNTANVIRYFPTQALNFAFRDTYKSMFAFKKERDGYAKWMAGNLASGGAAGATSLLFVYSLDYARTRLANDAKNAKKGGDRQFNGLVDVYKKTLASDGIAGLYRGFMPSVLGIVVYRGLYFGMYDSIKPVLLTGNLXGNFLASFALGWAVTTGAGIASYPLDTIRRRMMMTSGEAVKYKGTMDAARQIVAAEGVTSLFKGAGANILRGVAGAGVLSIYDQAQLLLFGKKFKGGSG

SEQ ID NO: 224695 - protein, 194 aa, Zea mays
  Clone ID: MRT4577_136509C.1.pep
MSMSFLSMVEAELPPGFRFHPRDDELICDYLAPKLGAKPGFSGCRPPMVDVDLNKVEPWDLPVAASVGPREWYFFSLKDRKYATGQRTNRATVSGYWKATGKDRPVVAARRGALVGMRKTLVFYQGRAPKGRKTEWVMHEYRMEPAAPLLDHQPSSSNSKQDEDWVLCRVICKKKLAAGGRAGGGSSRSLVASN

SEQ ID NO: 224696 - protein, 204 aa, Zea mays
  Clone ID: MRT4577_13650C.1.pep
MPCSLPQTATATRPVSWLSLVSSLWTAWVAWTLPVVLATAAPPDRQGAEPCSPTLCGGVNIFFPFGIVADHATETSCGLFGFQVLCSNDTPYVGSYKTPYSFRILNIFYSNASLLVADVHKLGDFVNVSGSASAPSKPCHSPTGNSSSKLGLPFSISPANQNMVFYDCVEPPAQAVRRSRGLVDTACGNRTLVGVARPPDVPGS

SEQ ID NO: 224697 - protein, 82 aa, Zea mays
  Clone ID: MRT4577_136510C.1.pep
GFSLALLPLATSATSTHTSCDCGCQPPPPVHLPPTVHLPPTVHLPPAVHLPPPIHLPPPVHLPPPVHVPPPVHLPSAPCHYP

SEQ ID NO: 224698 - protein, 240 aa, Zea mays
  Clone ID: MRT4577_136511C.1.pep
MSQDKSAFGMPGFVVDFLMGGVSAAVSKTAAAPIERVKLLIQNQDEMLKSGRLDRKYDGITECFKRTAQNEGVLSLWRGNTANVIRYFPTQALNFAFRDTYKSMFAYKKERDGYAKWMAGNLASGGAAGATSLLFVYSLDYARTRLANDAKSAKKGGERQFNGLVDVYKKTLASDGIAGLYRGFLPSVAGIVVYRGLYFGMYDSIKPVLLTGSLEGNFLALFALGLCRVPVIYDPQLILF

SEQ ID NO: 224699 - protein, 142 aa, Zea mays
  unsure (1)..(142): unsure at all Xaa locations
  Clone ID: MRT4577_136512C.1.pep
GREKKGLLIPRGPLAPRAIIPRSPPPVIXKGFQKSSGESQKVTTRVGGGGLKKPNGQMEKKILGNLXTQKTLERKKQKNFRPSRTPQEGGNPAPNWKKKWLESNPLVRGKELTYQKQKQWKKLRPGLGKQARGNPAVNQKWF

SEQ ID NO: 224700 - protein, 315 aa, Zea mays
  Clone ID: MRT4577_136513C.1.pep
MSSAEPQKVLGMPPFVADFLMGGVSAAVSKTAAAPIERVKLLIQNQDEMLKTGRLDRKYNGIGDCFKRTMADEGVMSLWRGNTANVIRYFPTQALNFAFRDKFKKMFGYKKDKDGYAMWMAGNLASGGAAGATSLLFVYSLDYARTRLANDAKNAKSGGDRQFNGLVDVYKKTLASDGIAGLYRGFMPSVAGIVVYRGLYFGMYDSIKPVVLTGSLEGNFLASFALGWAVTTGAGIASYPLDTIRRRMMMTSGEAVKYKGTMDAARQIVAAEGVKSLFKGAGANILRGVAGAGVLSIYDQAQLILFGKKFKGGSG

SEQ ID NO: 224701 - protein, 58 aa, Zea mays
  Clone ID: MRT4577_136514C.1.pep
ITTCSYLCPGYVFTFFCSGYLHDRLQGLITCATTGSTPGRYLLFVLPTLLNRGLAPTS

SEQ ID NO: 224702 - protein, 112 aa, Zea mays
  Clone ID: MRT4577_136515C.1.pep
RIDEELYVVKNNNDLEQIQREPAGQLINEIDNARFYLSNEVNEGGHSPINSDDEGIYVHRSLGVDYVRFDDATMRHPIMDVGTVFTDVEQFRSALRISSHYWNACCFGGFSN

SEQ ID NO: 224703 - protein, 47 aa, Zea mays
  Clone ID: MRT4577_136516C.1.pep
MGRGRGHLLLPAAAACLWALSCALLLHAFPHGAGAGGLLRVGLSKRG

SEQ ID NO: 224704 - protein, 102 aa, Zea mays
  unsure (1)..(102): unsure at all Xaa locations
  Clone ID: MRT4577_136517C.1.pep
QVLSGHEARPHLWRVVRQHPMRFPRNHSLGGPLDHRTRNRSIWCRRRCXKRPSPTTRAIRNSSRTATNRYQLACLRLCSLKRTNRFIWSCMNTHHVSVMRTD

SEQ ID NO: 224705 - protein, 98 aa, Zea mays
  Clone ID: MRT4577_136518C.1.pep
KTGMRHHWLRLPRSSGAPAQMAAAKNVYGSSSAQAIGLDVAALPSTAPPRIQAVRLPLHGRRRAASWTRTWPRHSLSPLPMCGRLCGRVGARVGGRVG

SEQ ID NO: 224706 - protein, 460 aa, Zea mays
  Clone ID: MRT4577_136519C.1.pep
MAISISQEAFDSMVRENMEDLGMDPDEALADAVEALTLQGADLSGIVKRVPGEATAAEVSPVVRVLDELKASLSASGGSEQDLDGLVSLLDELRNLCCSGEGSENAAIAVRNGVVEALVALCASARVEQERLLASALKSLSSVLRDVASTEKFRRSEGPRIVMDLLQGGSENSDLLDAGFSVVAAGSAGNEVVKESFMDLKVDELILRVMKDKSKSNVQSLYDAIRVLLKPDDNRVVASQVYGYSRRFAEIGVAEVLVNALREQVAPSSLPSACAALKSIAVNDEICRSISENGGIDVLLQCIDEAGEQKNKVVARSCCSLLSKLAASDANKSIIIQRGGFDRFLKLTSRFSEDPAIIQEVMSMVTVLTLRSPENAARAMEEGYGTLAIQSMQRFPSSGQTQKQACLMIRNLVARNPENRTVLLNDGAEKLIRKAMALHGSCKDAASSALRDLGLDNYNA

SEQ ID NO: 224707 - protein, 81 aa, Zea mays
  Clone ID: MRT4577_13651C.1.pep
FGSPSPRRVTNLFLMLNVSDQVSYTPLKCWWINQNPGNILFKAWSHRFILQKVPCHVFFFGFSLQKVPCHQMNCLFTRFCY

SEQ ID NO: 224708 - protein, 312 aa, Zea mays
  unsure (1)..(312): unsure at all Xaa locations
  Clone ID: MRT4577_136520C.1.pep
DVGAAARTFLRNREVAEFVSGALAGAMTKAVLAPLETIRTRMVVGVGSKHIFGSFVEIVEHNGWQGLWAGNTINMLRIIPTQAIELGTFECVKRSMASAQEKWKEEGCPKIQLGDLKIELPFHLLSPIAIGGAAAGIASTLVCHPLEVLKDRMTVNREAYPSIAIAFXKIYRTDGIGGLYAGLCPTLVGMLPYSTCYYFMYETIKTNYCRAHKKKSLSRPELLVIGALSGLTASTISFPLEVARKRLMVGSLQGKCPPHMIAALAEVIQEEGAKGLFRGWAASSLKVMPTSGVTWMFYEAWKDLLLSSRLHA

SEQ ID NO: 224709 - protein, 87 aa, Zea mays
  Clone ID: MRT4577_136521C.1.pep
GGRPRVGHVGAGEAPPGAGAATRQSAGAAPAARGRGPHGCRPRFLCSCLALGGHETRRQPGLVAPTHSPAAVRAGVPRCSHASAHAS

SEQ ID NO: 224710 - protein, 62 aa, Zea mays
  unsure (1)..(62): unsure at all Xaa locations
  Clone ID: MRT4577_136522C.1.pep
AHIYTENWXNSPGLHVDNSWHAFVYIHYKDIWEDLKIPLDRYLPTWIGNVIQATLXMNSGRI

SEQ ID NO: 224711 - protein, 88 aa, Zea mays
  unsure (1)..(88): unsure at all Xaa locations
  Clone ID: MRT4577_136523C.1.pep
XKKKKKKKKKKKKKKKKGRNDKKETQRLTNTKHAKGGGPFYSVPTISIPTAPQGLQLSFIWETHVHYPAPDLLTTTSPWVKPLALTPL

SEQ ID NO: 224712 - protein, 113 aa, Zea mays
  Clone ID: MRT4577_136524C.1.pep
GVRIPYTIRTSPDFSRVNLNLDPGGQRPPFFFTNHFPFSPGGIIDGGHDYIYQFTGYYRWLLFYCFVLLKKIFPFVHVPLHLHGSIFFPRCPFIFFLRFSQKKKKKKKKTGFF

SEQ ID NO: 224713 - protein, 175 aa, Zea mays
  Clone ID: MRT4577_136525C.1.pep
ILPRHKKFVGAGKKATTFANRIWLDYADAAAISKGEEVTLMDWGNAIVKEIKVESGVITELVGELHLEGSVKTTKLKITWLADIEELVPLSLVEFDYLISKKKLEEDDDFLENLNPCTRRENPALGDANMMNLKRGEIIQLERKGYYRCDAPFIRSSKPVVLFAIPDGRQQALLN

SEQ ID NO: 224714 - protein, 68 aa, Zea mays
  Clone ID: MRT4577_136526C.1.pep
MFFFLAEVALASLEYEETTCKPMSIKEIYTATENLSPSNVIGQGIAGTCSQYLIHSYGIYTINQEKVY

SEQ ID NO: 224715 - protein, 85 aa, Zea mays
  Clone ID: MRT4577_136527C.1.pep
MILLPALEYSYKKKKKKKKKKKKKKKKKKKKKKGAAVRDLKLVPGAKVGKVCVRFAPKPRGYLHIGHAKAALLNKYFAERYKGRL

SEQ ID NO: 224716 - protein, 236 aa, Zea mays
  Clone ID: MRT4577_136528C.1.pep
MEAALSFSKDSPPISIICAAKIVGLPLTINHSLAAGSAPTLQFASGESLHGVNPIILYIARGASIASLSGKNDIEFGHVVEWLEYAPTFLSGSEFENACLFVDGFLASRTFLVGHGLTIADIAVWSNLAGIGQRWESLRKSKKYQNLVRWFNSIDSEYKEALNEVVAAFVGKRGIGKSPAPSLKEKVHDSKDPSAPEVDLPHCVRFKEKVHDSRNPSAPEVDLPWCKVGKSAFVLP

SEQ ID NO: 224717 - protein, 724 aa, Zea mays
  unsure (1)..(724): unsure at all Xaa locations
  Clone ID: MRT4577_136529C.1.pep
MKIKKKKSMELAFLFYKDSPPISIICAAKLVGLPLTINHSLAAGSAPTLXVSXSGESLHGVNPIILCIARGASIASLSGKNDIEFGHVVEWLEYAPTFLSGSEFENACLFVDGFLASRTFLVGHGLTIADIAVWSNLAGIGQRWESLRKSKKYQNLVRWFNSIDSEYKEALNEVVAAFVGKRGIGKSPAPSLKEKVHDSKDPSAPEVDLPGAKVGKVCVRFAPEPSGYLHIGHAKAALLNKYFAERYQGRLIVRFDDTNPSKESNEFVENLLKDIETLGIKYDAVTYTSDYFPKLMEMAESLIKQGKAYIDDTPKEQMRKERMDGIESRCRNNTVEENLSLWKEMVNGTERGMQCCVRGKLDMQDPNKSLRDPVYYRCNTDPHHRVGSKYKVYPTYDFACPFVDALEGVTHALRSSEYHDRNAQYYRILQDMGLRRVEIYEFSRLNMVYTLLSKRKLLWFVQNKKVEDWTDPRFPTVQGIVRRGLKVEALIQFILQQGASKNLNLMEWDKLWTINKKIIDPVCARHTAVLKDQRVIFTLTNGPEEPFVRILPRHKKFEGAGKKATTFANRIWLDYADAAAISKGEEVTLMDWGNAIVKEIKVESGVITELVGELHLEGSVKTTKLKITWLADIEELVPLSLVEFDYLISKKKLEEDEDFLDNLNPCTRREIPALGDANMRNIKRGEVIQLERKGYYRCDAPFIRSSKPVVLFAIPDGRQQASLS

SEQ ID NO: 224718 - protein, 140 aa, Zea mays; identical to SEQ ID NO: 224651
  Clone ID: MRT4577_13652C.1.pep

SEQ ID NO: 224719 - protein, 66 aa, Zea mays
  Clone ID: MRT4577_136530C.1.pep
ILESFLSILSLSFISCFFNAYSIFSLLNRTSTGNSLLFPLIIVDLNSTLCILLPQDPISIELFPRA

SEQ ID NO: 224720 - protein, 114 aa, Zea mays
  Clone ID: MRT4577_136531C.1.pep
MPTRQKKLIKYKGFQVAPAELEAILLSHPSVQDAAVFGLPDEEAGEVPVSCVVRRCGASESEADIMAYVAGRVASYKKLRLLQFVDVIHKSVSGKILRRQLRDEFVSRTKTAAA

SEQ ID NO: 224721 - protein, 105 aa, Zea mays
  unsure (1)..(105): unsure at all Xaa locations
  Clone ID: MRT4577_136532C.1.pep
AXDGCEKTTEGHTXKELEDMKKRLKEIEEEASALREMQAKVEKEMGAVQDSSGTSATQAEKEEVDARSIYVGNVDYACTPEEVQQHFQSCGTVNRVTXXLTDKLV

SEQ ID NO: 224722 - protein, 29 aa, Zea mays
  Clone ID: MRT4577_136533C.1.pep
ILFTRPHHHCPSLPRFYYRFSATNLLAQP

SEQ ID NO: 224723 - protein, 196 aa, Zea mays
  Clone ID: MRT4577_136534C.1.pep
MPQQAVLVGLTAGMVAAEGKAAGNKTMMQKQQASSCCSDRDQDMADLELALEAVVPVSVQRQDSLYRDATRAGGGGQQQHEGWARTLRLAFQCVGVLYGDIGTSPLYVYSSTFAGGIRDTDDLLGVLSLIIYSFLLFTIIKYVYIALRANDDGDGGTLALYSLISRHAKVSLVPHHQPEDELQTPKRRAAVLGKHG

SEQ ID NO: 224724 - protein, 63 aa, Zea mays
  Clone ID: MRT4577_136535C.1.pep
AISLFKGIKRPGIPILKFPGQKNYKKCNNNAVVFNRLTAEHICILQHPNCIGKFSSVWVHIWE

SEQ ID NO: 224725 - protein, 43 aa, Zea mays
  Clone ID: MRT4577_136536C.1.pep
RYKYNQSNLLGLIGCTCTWSHNIHRGGAHHLINEPYHANLPGS

SEQ ID NO: 224726 - protein, 151 aa, Zea mays
  Clone ID: MRT4577_136537C.1.pep
LSQEASATKCFVTTFKLHGTIQGVSLLVLLDSGSSHSFLNVAHHSLLSGFTVLQQPLHVLVANDSIIQCTQELLDAAWYLQGFQFRSTFKVIPIPCYDLILGMDWLKNHSPMHVDWKHKWMFIKYPDQPPVICYVQPVLPSGTPLEIRHIP

SEQ ID NO: 224727 - protein, 46 aa, Zea mays
  unsure (1)..(46): unsure at all Xaa locations
  Clone ID: MRT4577_136538C.1.pep
RXEGKXXMXSXRXRARGPEAAEDGSPALRTRWRWRTGDGRXXEMGG

SEQ ID NO: 224728 - protein, 106 aa, Zea mays
  Clone ID: MRT4577_136539C.1.pep
QNYSHRTIAAVHHPVHTSTHNPHKTTAHTSQITTPKQQYITQFLSLNGHAHHRVTHNHLSYQRYQQLLHFLPRQWAHQLHPHDLSHLHHHVDLLPHHPAVLHLVPQ

SEQ ID NO: 224729 - protein, 135 aa, Zea mays
  Clone ID: MRT4577_13653C.1.pep
KKNNKKKKKKKKKRKKKKKKKKKKRKQTTIKTNKQAARFLGTASKLLLQGYDSPLAAQLNPWWRAVGFSQSLIGCGLGLSQRLRGPCHYPLFRRLLQPDGPLARPLVHAIHPGIGRVPALVTHTVASALSPALPP

SEQ ID NO: 224730 - protein, 202 aa, Zea mays
  unsure (1)..(202): unsure at all Xaa locations
  Clone ID: MRT4577_136540C.1.pep
AFLDAWVLTEKXVPQRLLEIAGVATFWAWYPLLVASLPNWWERVAFVLFSFTICGIQHVQFCLNHFSSDVYVGPPKGNDWFEKQTAGTLDILCSPWMDWFHGGLQFQIEHHLFPRLPWFHGGLQFQIEHHLFPRLPRCHLRKVAPAVRDLCKKHGLTYSAATFWGANVLTWKTLRAAALQARTATSGGAPKNLVWEAVNTHG

SEQ ID NO: 224731 - protein, 61 aa, Zea mays
  Clone ID: MRT4577_136541C.1.pep
VGLGGHQRHRPLARPTVARTRGQTCRSQGRRQYRRPLGPVLQFEQQNYRMPSWQNSCMIEI

SEQ ID NO: 224732 - protein, 114 aa, Zea mays
  Clone ID: MRT4577_136543C.1.pep
MEKASTAKLTDEILVGLSDDSEDSEDFDFEGDVDDAEKRPWKPSHVVFGMSVVKKGHIEPMKGKYFNDVSLVRPGGDAIVVPLPKKDEVVVYRSFLKGGLCFPLHKMLVEVFKR

SEQ ID NO: 224733 - protein, 52 aa, Zea mays
  Clone ID: MRT4577_136544C.1.pep
VRFQTVLSRLCFFSLRPVSSLILPYFLLVIFKQSSTINIAEVYLMGGGVMTI

SEQ ID NO: 224734 - protein, 70 aa, Zea mays
  Clone ID: MRT4577_136545C.1.pep
GGGGIFGGVAGPPLEFFFFFFFFFFFFLEKCAQCVKQLGRLLPTVCILQLSLLPRKLHSWTHYVPKPSSA

SEQ ID NO: 224735 - protein, 103 aa, Zea mays
  Clone ID: MRT4577_136546C.1.pep
PPSGTWDLTWTIKEAIHNEVFYQRAIPGSMDHKSLEIFGKPRLKSLEISSIPTLSLSPNKLLSVASQLISVFLAWFLSWKQNDFHYHTLFEPINLFFLIANLL

SEQ ID NO: 224736 - protein, 39 aa, Zea mays
  Clone ID: MRT4577_136547C.1.pep
GLGGIMDIPCYLWETVLQVHLRTTCEPETLSEKPGEPKE

SEQ ID NO: 224737 - protein, 91 aa, Zea mays
  Clone ID: MRT4577_136548C.1.pep
FEKRRVVVRVRRVMQKGVRSLDDENDGATMIEAKQHSALGEHGQIAGGVSDRAGHGRWRWSYRDRRTPSAGTVRAGIDVLEAIPAGLEVPN

SEQ ID NO: 224738 - protein, 77 aa, Zea mays
  unsure (1)..(77): unsure at all Xaa locations
  Clone ID: MRT4577_136549C.1.pep
RGGRSLIQSMSSQRLLRGLHMQVEFXMKRREMVFSSMDCINVIIFLCWSCFAFMWIYLANGMWIRSRGNEPCSQFAV

SEQ ID NO: 224739 - protein, 46 aa, Zea mays
  Clone ID: MRT4577_13654C.1.pep
LHPQHSRGGIIPQPFSPKLALMASIIRSAWCVSGPHLSQRPPKPGA

SEQ ID NO: 224740 - protein, 72 aa, Zea mays
  Clone ID: MRT4577_136550C.1.pep
NITLVTAIKKNPPGFLKRECPQIWDSCTPGLNPGPELDGLPCFLLGALFNLGRNQGQSFPRGKIVSRSKFPK

SEQ ID NO: 224741 - protein, 103 aa, Zea mays
  Clone ID: MRT4577_136551C.1.pep
GAPTNGCMSIGPPYNLGSKELGAPENEPPHPGVFGNVPSGPNGVPTINVPDSQIPLIGPNSIFGRAVVVPPAPDVFGKGGPELSKSPGTAGARVPCGIIGPQG

SEQ ID NO: 224742 - protein, 102 aa, Zea mays
  Clone ID: MRT4577_136552C.1.pep
KYIVSKTCNATASRCQPVRHRSHRGEGLLSDGVAREHQLRTDHLSAIHLCLAVEILGTRCVEPTVDIIGFFILQTGCKAHCLWNGSTYHLQDKSTRERSRTI

SEQ ID NO: 224743 - protein, 183 aa, Zea mays
  unsure (1)..(183): unsure at all Xaa locations
  Clone ID: MRT4577_136553C.1.pep
RGKPGERRKKTREKKEKKGGKGEAKGKGPPGRKPQTRRAKKKXKKGKKSAKKGGQKLGKAERFGPKSRXKPTRRKKGKTTAKNKIKGGGSPQGKIQFKTGVKGKAKKKKNPPKKGEKGAPKKGKSERAPKQRRKNFQKMGPKRVVKVQSKNFFYIFIFFFFFFFFFFFFFFFFLFFFFFFFFF

SEQ ID NO: 224744 - protein, 105 aa, Zea mays
  Clone ID: MRT4577_136554C.1.pep
PPSGTWDLTWTIKEAIHNEVFYQRAIPGSMDHKSLEIFGKPRLKSLEISSIPTLSLPPNKLLSVASQLISVFLAWFLSWKQNDFHYHTLFEPINLFFLIANLQAR

SEQ ID NO: 224745 - protein, 58 aa, Zea mays
  unsure (1)..(58): unsure at all Xaa locations
  Clone ID: MRT4577_136555C.1.pep
LKIFLXWEHQPYXNVLSSKSTFGMHRIFRVYSLTYKLQLNSFSLLTVVLFSQCQSICR

SEQ ID NO: 224746 - protein, 250 aa, Zea mays
  unsure (1)..(250): unsure at all Xaa locations
  Clone ID: MRT4577_136556C.1.pep
MDAKSVTPGAVALILANPTPASPDDVPEIVVQVLDLKPIGSRFTFMASDGEAKVKAILSTHFASEVHSGKLQNLGLVRILNYTCNDIPQKTDKMVIITKCEVVSQALDAEIKSEVKIEEPAALMKPKEEAAVLSKPIGAAPAAIMLKPRHDVKSASQIVSEQRGNAAPAARLAMTRRVHPLISLNPYQGNWVIKVRVTSKGNLRSYRNARGEGHVFNVELTDEDGTQIQATMFNXAXAKKVYPVFELGRS

SEQ ID NO: 224747 - protein, 153 aa, Zea mays
  unsure (1)..(153): unsure at all Xaa locations
  Clone ID: MRT4577_136557C.1.pep
MTCDPDGLFLLPCSFMASDGEAKVKAILSTHFASEVHSGKLQNLGLVRILNYTCNDIPQKTDKMVIITKCEVVSQALDAEIKSEVRIEEPAALMKPKEEAAVLSSPLAXPRLXIMLKPRHDVKVASKIXVSEQRGNAAPAARLAMTRRVHPLI

SEQ ID NO: 224748 - protein, 125 aa, Zea mays
  Clone ID: MRT4577_136558C.1.pep
PRHNMVFWGPLEVGFKWSKIPFKVAQCPVGPVAPPQVGPPALKKRGVFWLAPPPLLKKKLRGLCFSFEMLSPLPQKKIFTCSMSPPCFGYIFCPRIFALKISVVPALLGNPCFFFLVVTPRFEGL

SEQ ID NO: 224749 - protein, 59 aa, Zea mays
  Clone ID: MRT4577_136559C.1.pep
LSCAIGAEIYRSWGMTKYNIHSNCTHIAASSSDSTQGVPGSNRSFQDPCIDICHSMLDS

SEQ ID NO: 224750 - protein, 85 aa, Zea mays
  Clone ID: MRT4577_13655C.1.pep
LVAQRSVRTHARAHPGPAALTRPRSLSAWPTSWVANWQRGHVCPAGQHAGHVHGLHLQHAGHVHRNLRDFTQLQCMGSGLTVSIV

SEQ ID NO: 224751 - protein, 72 aa, Zea mays
  unsure (1)..(72): unsure at all Xaa locations
  Clone ID: MRT4577_136560C.1.pep
XVASHQPGHAELRKLAVLLYASGSSLHGCAVAQSSSGQPEIYDPEAEPRRPGRIASDAASAPGEGWQHGAGP

SEQ ID NO: 224752 - protein, 171 aa, Zea mays
  Clone ID: MRT4577_136561C.1.pep
PLFFFFFSFNPFFFFVLSVFHSFCFSAGVFETGRIPLSRKNPQRRAQPQARFLLQKEQNGGEGGGSLIAAGTTAAGDKPGRPWEGPPPGRGAAPSRTRGRPPPGGGREAGEGSGEEGQQWKAALGTTGRKTGGREEGKGLKARGTGWMEKSLLPKRPRRPGRGRGCCGWGG

SEQ ID NO: 224753 - protein, 66 aa, Zea mays
  unsure (1)..(66): unsure at all Xaa locations
  Clone ID: MRT4577_136562C.1.pep
TYVVGGGGGAIXDSCDDACSFCLEAFCEXSDPSALTGFKHEFHXLMHFLXWCLRSXQCLMCWGSLR

SEQ ID NO: 224754 - protein, 54 aa, Zea mays
  Clone ID: MRT4577_136563C.1.pep
DGRSSTVRAISRKETVTVRLFYSVKLAETMYYFLLLCCMAWRMMPFAKTVTESL

SEQ ID NO: 224755 - protein, 79 aa, Zea mays
  unsure (1)..(79): unsure at all Xaa locations
  Clone ID: MRT4577_136564C.1.pep
SHADCAVLIIDSTTXGSEAAIYNDGQTREHALLAFTLVVNHTVCCCNKMDATTPKYSKARYDEIEKEVLSYLKKGGYLP

SEQ ID NO: 224756 - protein, 92 aa, Zea mays
  Clone ID: MRT4577_136565C.1.pep
TTLIQNEMQFCHDNIELISNTTHLGPSKLNQTNLKLAGTNRVPRNFIFVPSTGDKDLGLFLFFLLLLELLILGRGVLVLVILGHQGVNVTLC

SEQ ID NO: 224757 - protein, 48 aa, Zea mays
  Clone ID: MRT4577_136566C.1.pep
SNRRGVLGICHLAPRPGRSQRPAMSWVCENPLVAPYRVQQALTGEELR

SEQ ID NO: 224758 - protein, 82 aa, Zea mays
  Clone ID: MRT4577_136567C.1.pep
AQHQHNLSCRLLIHTLFSIILSVLVLHSPCNNTACHCQLLSSVIVLFRSSHSALFPVLISTCSPQWHGRRWSRPSIAIREMI

SEQ ID NO: 224759 - protein, 218 aa, Zea mays
  Clone ID: MRT4577_136568C.1.pep
MAAPPSRSRGDYDHLIKLLLIGDSGVGKSCLLLRFSDDTFTTSFITTIGIDFKVRTVELDGKRVKLQIWDTAGQERFRTITTAYYRGAMGILLVYDVTDESSFDNIRNWIRNIEQHASDNVNKILVGNKVDMDAKRVVSTAQGQKLADEYGIKFFETSAKTNRNVEQVFFAMARDVKQRLTETVAAAAEPPTIQISRPDPDQADAASSRRWSSSCCNT

SEQ ID NO: 224760 - protein, 208 aa, Zea mays
  unsure (1)..(208): unsure at all Xaa locations
  Clone ID: MRT4577_136569C.1.pep
MAAPPSRSRGDYDHLIKLLLIGDSGVGKSCLLLRFSDDTFTTSFITTIGIDFKVRTVELDGKRVKLQIWDTAGQERFRTITTAYYRGAMGILLVYDVTDESSFNNIRNWIRNIEQHASDNVNKILVGNKVDMDAKRVVSMAQXEAXADEYGIKXWREVFFAMARDVKQRLTETVAAAAEPPTIQISRPDPDQADAASSRRWSSSCCNT

SEQ ID NO: 224761 - protein, 82 aa, Zea mays
  Clone ID: MRT4577_13656C.1.pep
AAGFFFFFFFLSYIYTYATLHFAASKNILKAQIALVGARLAQPIVQRPSDARGLQWQAAVASPPPQKINLISKWTHSPHIRY

SEQ ID NO: 224762 - protein, 218 aa, Zea mays
  Clone ID: MRT4577_136570C.1.pep
MAAPPSRSRGDYDHLIKLLLIGDSGVGKSCLLLRFSDDTFTTSFITTIGIDFKVRTVELDGKRVKLQIWDTAGQERFRTITTAYYRGAMGILLVYDVTDESSFNNIRNWIRNIEQHASDNVNKILVGNKVDMDAKRVVSMAQGQKLADEYGIKFFETSAKTNQNVEQVFFAMARDVKRRLTETVAAAAEPPAIQISRPDSGQAGAASSTRWSSSCCST

SEQ ID NO: 224763 - protein, 118 aa, Zea mays
  unsure (1)..(118): unsure at all Xaa locations
  Clone ID: MRT4577_136571C.1.pep
VLMLLGLAASARTVTILPQCSQAPIALLLTPYLSPTVSAICENPILQPYNIQQAIATCILTLITLVLQQXSSLIQQVPLVQLMAPNXRPHQLQHLFLANLAAYSKNHNFLPFNHFGQL

SEQ ID NO: 224764 - protein, 60 aa, Zea mays
  Clone ID: MRT4577_136572C.1.pep
FFFFFFFFLGRKLSLSWAYVQNKPQQSTTYLIHHKLYKLAYTTHDLIMLANMGEQRLNDM

SEQ ID NO: 224765 - protein, 72 aa, Zea mays
  Clone ID: MRT4577_136573C.1.pep
CICGTKYPLVQILIMTSPGVFRPPKIQPVPGWQAHHFCPPLFFQKLEVAVNCPLCHLARNGSLPLPFCQKSK

SEQ ID NO: 224766 - protein, 78 aa, Zea mays
  Clone ID: MRT4577_136574C.1.pep
WLLGAHYTDGSDVNMQIFACSATYAANYRFIWIKVMLCSDSTASIPQRLSLAMSSKLATVSFLHAGQVIGGDVIPVRF

SEQ ID NO: 224767 - protein, 90 aa, Zea mays
  unsure (1)..(90): unsure at all Xaa locations
  Clone ID: MRT4577_136575C.1.pep
PLFINPKXKKPGRPLLKQKRSXHPPPNWPRVWAFRLQRNTSNRNPAVGYTQHSTQNTNQTTRTNRATTTNLVRGAPARQRLCNQPQKKQN

SEQ ID NO: 224768 - protein, 72 aa, Zea mays
  unsure (1)..(72): unsure at all Xaa locations
  Clone ID: MRT4577_136576C.1.pep
MLRVAGRRLSSSXXWXPXXXXSQGPXXXXXXXDRXHDSAXGRSHXQFSIDSPFFXXXRGFSSTETVXPRNQD

SEQ ID NO: 224769 - protein, 40 aa, Zea mays
  Clone ID: MRT4577_136577C.1.pep
LAIELLGSRAMFLCPPILQDLALHSVRRGRSYFRPHVAKN

SEQ ID NO: 224770 - protein, 99 aa, Zea mays
  Clone ID: MRT4577_136578C.1.pep
PLISITYCSLKQHHMPNIQPPQLASISHQHKIVTRPGASRPPALQTKEPCSRGTPASSKCSSCRTQIFNWAPRPLLITASELSGVKWHLCHKGHRSPES

SEQ ID NO: 224771 - protein, 111 aa, Zea mays
  unsure (1)..(111): unsure at all Xaa locations
  Clone ID: MRT4577_136579C.1.pep
MPRANEMFRADSRMMVVFGALTSKPEQLTFEETLRFVKKVKLQLLFGNHPDLCEELEKFRPPVPTKQAANNIWPWVIVCAVPLVAVSLIPALGNPVXLWFVQQTVGEKMAA

SEQ ID NO: 224772 - protein, 37 aa, Zea mays
  Clone ID: MRT4577_13657C.1.pep
WHLSAVSKLSINLKCLSSLMYRSFVIYTSSNPPLLLC

SEQ ID NO: 224773 - protein, 68 aa, Zea mays
  unsure (1)..(68): unsure at all Xaa locations
  Clone ID: MRT4577_136580C.1.pep
MCPDIQTPYLTISCARIGSLSPDLITKRRTGAPFPTYRMCXITLNLHVFHLRPNASTYPTPVMSFHKH

SEQ ID NO: 224774 - protein, 137 aa, Zea mays
  Clone ID: MRT4577_136581C.1.pep
MPRANEMFRADSRMMVVFGALTSKPEQLTFEETLRFVKKVKARDYMLYLSLFDILGRMELSQLDAYRELQLLFGNHPDLCEELEKFRPPVPTKQAANNIWPWVIVCAVPLVAVSLIPALGNPVLWFVQQTVGEKMAA

SEQ ID NO: 224775 - protein, 36 aa, Zea mays
  Clone ID: MRT4577_136582C.1.pep
NLYHNREGQNLTATNSTKDFKEVYLFRTTTTNCCAY

SEQ ID NO: 224776 - protein, 168 aa, Zea mays
  Clone ID: MRT4577_136583C.1.pep
AAAAGGGGVARVQLKRWVFELSLSVLMETIAHTKTSRAEADADSDMSTEAHEFKQIVDEIVPYIGTANRWDYLPVLRWFDVFGVRKKLLDAVGRRDAFLGRLIDAERRRMDGDGDGEKKSMIAVLLSLQKSEPELYTETMIMALCGDLFGAGTETTSVTTEWAMSLLL

SEQ ID NO: 224777 - protein, 44 aa, Zea mays
  Clone ID: MRT4577_136584C.1.pep
IRYYLVIIIFRYIFVYASYLICILYIYIIFFRKSERTCVRTRGR

SEQ ID NO: 224778 - protein, 208 aa, Zea mays
  unsure (1)..(208): unsure at all Xaa locations
  Clone ID: MRT4577_136585C.1.pep
AERPRTPPPADSRHAARGGGXRPRHAAPRRXAXXXTXRXXIQDXDXAXPGSSAEDXAHALRNHXXEXRXRREAFFFSXRXXLSSDFDDDDDDDSASRGHQGAHATLSSTTSLSDESAHPPPPPYFDATKTMLRSQYVSQTGKQNPGTNQQLEIEMTAEKARRLITSDCGGGGGDAKPEAPVFEGVVNGDKGPGFADPGGMDQGVDQLV

SEQ ID NO: 224779 - protein, 416 aa, Zea mays
  unsure (1)..(416): unsure at all Xaa locations
  Clone ID: MRT4577_136586C.1.pep
HASADACLVLWGLTKGAVSGLYSILFSSQPIFHLQLAAFSLLLSEPFCQLSLVKNYSMGESCSSAQQSGTSQSAELMPDSDKTVHLREELSDLIEFPTSELLKTXXLTARDRVDVFIAWSLLLSHLQTLPASSSIKGDVLQYIQEKVSPCILDCIFQHIPVKAAAPSGKKKDTELAPEAEAAAKASKNAIATCSLLPYLESLWPIGTLQMASLAGSLYGMMIRLLPSFVRTWFTTLRDRSLSYSIESFTKQWCSPPLLLDEFSQVKESVYGDENFSVSVNRSAFEIVATYKKEETGIDLVIRLPSCYPLRHVDVECTRSLGISEVKCRKWLLSLTSFVRSQNGAIAEAIRTWKSNFDKEFEGVEECPICYSILHTSNHNLPRLACKTCKHKFHGACLYKWFSTSNKSTCPLCQTPF

SEQ ID NO: 224780 - protein, 127 aa, Zea mays
  Clone ID: MRT4577_136587C.1.pep
KKTARGFVQKKTYEEADAMFQRRRRMGRRVCLNGDRCPPSCPDANRIMAPPCQSATSGTLSCRCGGMPRYADFGSSQPFCLEACISSTRRRSPVILSRPRPSTEYSRHGGLPSHSIAYFGRSRTRED

SEQ ID NO: 224781 - protein, 59 aa, Zea mays
  Clone ID: MRT4577_136588C.1.pep
RDLKDRANESSLPRLDVQPTLHDIVSFSSITSVGSYVIKSRLHNIILPILNGFRMVLLM

SEQ ID NO: 224782 - protein, 55 aa, Zea mays
  Clone ID: MRT4577_136589C.1.pep
YPSRSPGGGGTSAADCLGDGVSQHVRSDGGGESAISLTGSLLLEAGCINTTHVRE

SEQ ID NO: 224783 - protein, 70 aa, Zea mays
  Clone ID: MRT4577_13658C.1.pep
FSRDVIGGDDRRVIFHRIALFYYYTGELSTSPYANQTEQERSDEDIDSGGERRRSKGQMEWKGAAVCCTS

SEQ ID NO: 224784 - protein, 99 aa, Zea mays
  Clone ID: MRT4577_136590C.1.pep
YRVVELEYFVDEYYSVEKFKKAYDGRIELRGDKSFWPKIALGNEVSAPLGRTAGRQRKNRIKGCLEGGIGKKQSRNVDNHRNKEEVKKAVKEHSKMVPV

SEQ ID NO: 224785 - protein, 53 aa, Zea mays
  Clone ID: MRT4577_136591C.1.pep
SSKTHCNLVLQDNGVVTGPIVNISMNFAIPVIIGAPSVPVPPTILSCKIGRVG

SEQ ID NO: 224786 - protein, 108 aa, Zea mays
  Clone ID: MRT4577_136592C.1.pep
RIEAKGYSLLKELGATAVEEVFTAGGGAQNDQLAALSEHIDPAVPSPLDYYPLPKKGERFPVSDPDMMPRLQPRPGSDAEYLHGILESIARIEAKGPSRLRRPMELHC

SEQ ID NO: 224787 - protein, 276 aa, Zea mays
  unsure (1)..(276): unsure at all Xaa locations
  Clone ID: MRT4577_136593C.1.pep
HWVPRGRPGXLPLHSALKVGYDPELGAYPGWLTSQPYSRMLPAAVRPPGAPVAALRDDVRSQYGFSEDCVVCAGTTDSIAAFLAARRSEPGTAVTSLGSTLAIKLVSRVHVADARFGVYSLRLDDVWLVGGASNTGGAVLRQLFTDDQLAALSEHIDPAVPSPLDYYPLPKKGERFPVSDPDMMPRLQPRPGSDAEYLHGILESIARIEAKGYSLLKELGATAVEEVFTAGGGAQNDRWTAIRERVLGVXVRKAQQTEAAYGAALLALKGAKSLAG

SEQ ID NO: 224788 - protein, 62 aa, Zea mays
  Clone ID: MRT4577_136594C.1.pep
TNDLQHVDVTTFTALFLNLLSESNIKKVVAGHIEILSKMLGSLDKPLLTDYIMKINSSGTSR

SEQ ID NO: 224789 - protein, 56 aa, Zea mays
  unsure (1)..(56): unsure at all Xaa locations
  Clone ID: MRT4577_136595C.1.pep
SPQWSVKYTTSFTTVKLAAATSAGEVKXSANEIITSSPPDKVATPTTSKXXSYISY

SEQ ID NO: 224790 - protein, 87 aa, Zea mays
  Clone ID: MRT4577_136596C.1.pep
NVKAQPSPPCLEHDASLLTYHKVINHRGRVQLKKPLFSPPPLEQGKLVDTEREPTERDLSRLKSFRPRRPKKALKFETHQSGLFPKG

SEQ ID NO: 224791 - protein, 61 aa, Zea mays
  Clone ID: MRT4577_136597C.1.pep
TGRLAAVQPFCSRIGGLVGIHSLGLREPPNARFTVNRTPLTPCISPYKQPMSCAWHFFLAP

SEQ ID NO: 224792 - protein, 126 aa, Zea mays
  Clone ID: MRT4577_136599C.1.pep
VPRPLSRVFFFFFFFFFFFFFFFFFFWIRNSPDSLCVDKKNSFPWGYKDAFEAQKKKKKAPTDLEAHQFKPLKHLVGGDGLQDQTRAKRGEQTDLKKKTRDGQKLQKNTQGSFEFRGKKNLGTQVR

SEQ ID NO: 224793 - protein, 67 aa, Zea mays
  Clone ID: MRT4577_13659C.1.pep
SAQQPTGLFRLTWLESQNWLDSQYWSRHETPEEHYVENTRETAQTLLSLGESQMRAPHMIQQGVLTA

SEQ ID NO: 224794 - protein, 150 aa, Zea mays
  unsure (1)..(150): unsure at all Xaa locations
  Clone ID: MRT4577_1365C.1.pep
PARGXAGGREIKXXKKKKKKKKKKKKKKKKKFVCSWGRHTQPPLQRCACEATVGALVLFHYGGQRAKPPGSGVIFHSGGQISSSLGNTRSSEDAVLVHGSGREKSFSSLFPSGRPDHDLKLGFSPSCSFVPDLHVFGYFLILFLLFLWKC

SEQ ID NO: 224795 - protein, 75 aa, Zea mays
  Clone ID: MRT4577_136600C.1.pep
NTHFLSLNCENKCGAYNKVLCFESTKKTLHTFSLSLTILLFYWLPPELTERRLWTTDSMVGLFFLSSSKHETASL

SEQ ID NO: 224796 - protein, 292 aa, Zea mays
  Clone ID: MRT4577_136601C.1.pep
MEEGNDYYVVRKGDVVAVYKTLSDCQGQICSSVSGPAASAYKGHSWSRGKEEYLSSRGLSDATYVINAAELREDILGPLVPCSFQDILGSSSNQLAPNHIGFHNVIASQTGAQYVDLNHEARSSSSRHISPANFNHTGTVDAQPISKQYMVGILHFDGASKGNPGKAGAGAVLMTEDGRVISRLREGLGVATNNVAEYRGLILGLKYAIRHGFKRIKVHGDSQLVCNQVNGVWQTKQPNMMELCTEARKLKENFHSFEIIHVRREWNAEADRQANIGITLASGAVFEERGDI

SEQ ID NO: 224797 - protein, 105 aa, Zea mays
  Clone ID: MRT4577_136602C.1.pep
KKKNGHLIFAQLFYFSQNFLEGEKNFNQNGPERGIFDMPFSCPNAYRKQKGGNLSRQIFLKNALKEREKVPLQGNRHEAKGYLATAAYRAKRGKIPVFNPPQKMS

SEQ ID NO: 224798 - protein, 142 aa, Zea mays
  Clone ID: MRT4577_136603C.1.pep
WNYFNFNRSSFEHNHLGYQPTRKNHIKLYAKSETNSIRQGSKTNVSKKSSTRSESKPPSRTRSLGTSLSQTKKLPQNMARFWDRVRLLCSNINETQPKRTNICFFWKVVEKLCQPKGPRKSPRVSDPGEFKLARIQSRKMAV

SEQ ID NO: 224799 - protein, 62 aa, Zea mays
  Clone ID: MRT4577_136604C.1.pep
LSNIHAPHMPNFIITYYHGPTSQYVLYPYLDLCDFIDWSSVRAPSSVRPTHHPTLIRTSSPK

SEQ ID NO: 224800 - protein, 76 aa, Zea mays
  Clone ID: MRT4577_136605C.1.pep
TSHELIATSFMLLTLWYLSLTWGQTRATRASNPPRCPVATGHGEAKRWSARSSDAGTTPRDELVQSKCVTEERTQV

SEQ ID NO: 224801 - protein, 48 aa, Zea mays
  Clone ID: MRT4577_136606C.1.pep
LLTENQSLRYRYESVNIVKNKKKHGCHERSYIASAPGYKLHSTVGLGN

SEQ ID NO: 224802 - protein, 66 aa, Zea mays
  Clone ID: MRT4577_136607C.1.pep
HSLARSATSVARLALQSLKLCSSTSTEFISMRLRISMWLTWIERHARSRRRRRNHDGAYQHLTVTA

SEQ ID NO: 224803 - protein, 113 aa, Zea mays
  unsure (1)..(113): unsure at all Xaa locations
  Clone ID: MRT4577_136608C.1.pep
MTMRRLLRCVSTGACSVVRGVVADSMPALPVATXVGHVPVEVDAEGXDTQRLVVPVDLXLLRRVAHEYGYVCQGLLHIPCLVAHFAASSARLYGPSSXNPDGGLTLACFSAFF

SEQ ID NO: 224804 - protein, 55 aa, Zea mays
  unsure (1)..(55): unsure at all Xaa locations
  Clone ID: MRT4577_136609C.1.pep
CDFDLAATFFXCSVVYLVVGGDMPFGLALDTNLRPXQIRTWEGEWNGQVEKLSIG

SEQ ID NO: 224805 - protein, 83 aa, Zea mays
  Clone ID: MRT4577_13660C.1.pep
GGGGDDKDTQNPLQSLVLHTSRLEPNDLAFRKIKKTYTSLCTSIIFLSMARGRGPFFNTPQKKLLSVMAGYLSLHPELCDKRA

SEQ ID NO: 224806 - protein, 57 aa, Zea mays
  Clone ID: MRT4577_136610C.1.pep
IKKATCFKHLIYIKWLNINSLIILICAKNTHFYKYTYLDPASYITGADETNHLGPIA

SEQ ID NO: 224807 - protein, 156 aa, Zea mays
  Clone ID: MRT4577_136611C.1.pep
MVALSAGALAPLAGLSPLPSCSAAPLYCRRSPPLLKVAIAKTRPTVHQSAPASFRKCAAMSEHGRQELRTNEYQLDDDDEPFWLAVVRDLAVGFKGLVAFLAEQPRQLKHLEWPGFLHTLKTATLTLVLVAMFIVALSTIDAALCYMLAWLLRKSA

SEQ ID NO: 224808 - protein, 160 aa, Zea mays
  unsure (1)..(160): unsure at all Xaa locations
  Clone ID: MRT4577_136612C.1.pep
MYRLSWLPRSLLFPEFLSFSGLSPLPSCSAAPLYCRRSPPLLKVAIAKTRPAVHQSAPASFRKCAAMSEHGRQELRTNEYQLDDDDEPFWLAVVRDLAXGLVAFLAEQPRQLKHLEWPGFLHTLKTATLTLVLVAMFIVALSTIDAALCYMLGLLLRKSA

SEQ ID NO: 224809 - protein, 79 aa, Zea mays
  Clone ID: MRT4577_136613C.1.pep
RDEGHIHTLLQVLCWMRATFSSKSTYTCEVWHKVKHLAMYSFSHEIFLKVFARVSGAYFFVPRVYISKKLSIALQSSQI

SEQ ID NO: 224810 - protein, 34 aa, Zea mays
  Clone ID: MRT4577_136614C.1.pep
LAHIKFVEYHVCCPSSDALKSLSQRRVVSNIFTL

SEQ ID NO: 224811 - protein, 123 aa, Zea mays
  unsure (1)..(123): unsure at all Xaa locations
  Clone ID: MRT4577_136615C.1.pep
HAMPNTDLSSKFNFLSYHRGETGWELAADHSMSTGYLSADDADETLQELXSSTYLSVKGAQVIILADTGRSRGIXLDRFGDYDDNSHATVXPNGVYCSTMPILIXPATPRTSSGDPGSXTPGH

SEQ ID NO: 224812 - protein, 213 aa, Zea mays
  unsure (1)..(213): unsure at all Xaa locations
  Clone ID: MRT4577_136616C.1.pep
MRRRWDSCFSGGDVRVGGRVPPEEPEPEVFSFAEPLPSWPTGGGFARGRIRIGGGELELAAATAFQKICTLSSXGVGGGGSATFYRPVGVPEGFSLLGYYCQPNCRPLHGHVLVARAGERPSGASPQPPPPPLCRPLDYTLIWEFQASGDTGYGYGRSDAYFWIPVPPERYRALGCLVTTEPRRPPLEDVVCVREDLXDECXPHGSLLCLEQP

SEQ ID NO: 224813 - protein, 154 aa, Zea mays
  unsure (1)..(154): unsure at all Xaa locations
  Clone ID: MRT4577_136617C.1.pep
QEAEKPPIPQPPPPPGWPIPLIPXGPPGFPPGKRXGPPPHNVGLPPPLAPPAFPLLLPARXLWDCERVTISXPGTPFAPVSPSLGPGPGPLVTPPPVLKYAPCVVPPQGLPPPPFVFFMKDPGPLWPFFFKKKKKKKKKKKKKKKRKKKKKKKK

SEQ ID NO: 224814 - protein, 538 aa, Zea mays
  unsure (1)..(538): unsure at all Xaa locations
  Clone ID: MRT4577_136618C.1.pep
SIRRRILPGGGFARGRIRIGGGELELAAATAFQRICTLSSXGRQTSDEANLPCDASMTNKYXTSSGGGSATFYRPVGVPEGFSLLGYYCQPNCRPLDYTLIWEFQASGNAGYGYGRSDAYFWIPVPPERYRALGCLVTTEPRRPPLEEVVCVREDLTDECEPHGSLLCLEQPRPSSFFTVRGVRPVRRGIREKGVCVGTFCCAADGLPPREHGMACLGNVELDLSAMPTLEQAHAVIRHYGPTLFFHPKEVYLPSSVSWFFKNGAALYRRGGDTAGEEIDGEGSNLPGGGCNDGEFWIDVPSGERGRAVCRGSIDSAELYAHVKPAMGGTCTDVAMWVFCPFNGPARLKLGPISLPLGKTGRHVGDWEHFTFRVSNLTGELMGVYYSQHSGGHWVDASALEYIDGNRPVVYSSRNGHASYAYPGVYLQGSAALGVGIRNDAARSSLFVDSSARYRIVAAGYLGEGAVVEPQWLQFMREWGPTVVYKWRKRMEWVIGRLPPWLRCRAESMLNKMPNELSREEGPTGPKEKNNWEGDERW

SEQ ID NO: 224815 - protein, 153 aa, Zea mays
  unsure (1)..(153): unsure at all Xaa locations
  Clone ID: MRT4577_136619C.1.pep
PGPASFGSRPPPFFFFFXEEPRXTPGPGSSKTPPPPPTFFGPPDPLQAWPYLIPPPIFPKPWKPLGPPPPRXPEGPGFLGPVGVDPPAVAPGAGSGAPPPLPGPPAPGSAXAARRPGGGPPGPVVRPVPPVGAPPPLRGVPGAPPARPPPPPP

SEQ ID NO: 224816 - protein, 42 aa, Zea mays
  unsure (1)..(42): unsure at all Xaa locations
  Clone ID: MRT4577_13661C.1.pep
GYYMYYGILYWKLSLCFVCEFWXCSGYGFFIPTPIFVSKVLM

SEQ ID NO: 224817 - protein, 242 aa, Zea mays
  Clone ID: MRT4577_136620C.1.pep
MASRVVFSRRSLAPLATMALGGLALTPATVFAEGPSDLKRKPIYDDFEIPASKPAPVTPPPAATTPVAEPVEEEERQYSPTPTDRLAVYVGRGRLSLYKYAVAAENKINETMDSAFNLEQSFTSTIASLAPSRESGEQLMPGAIYVLVAAMAGSVITRNRSIILRASLPLAMGIGAGWTVIPVTMRNVSDLTWKYEQRFPVVAQSHIRLRSILNSASFAKAHSQVGVYVDEKVTDAREAVEG

SEQ ID NO: 224818 - protein, 95 aa, Zea mays
  Clone ID: MRT4577_136621C.1.pep
LLLLLQHHHIHFSAYYLMSDYDVEAHTSHADAHAHQPSSTGQLGNGCLSSRSYTSGRVRRELPRRGCAWLATGKRLVLDPQAYNSPPIGPLRESR

SEQ ID NO: 224819 - protein, 49 aa, Zea mays
  Clone ID: MRT4577_136622C.1.pep
RRSSTPRPGAAPQTRLRASFLPWRSLPPPLVVTPPAPLSRRSNRLFTVI

SEQ ID NO: 224820 - protein, 207 aa, Zea mays
  Clone ID: MRT4577_136623C.1.pep
AFKPTNLSNCTQSAIHCRGRSNLLRASSMASSDHGSTTAPKDVPGSYGLPLVGAVRDRLDFYYFQGQDKYFESRVERYGSTVVRMNVPPGPFMARDPRVVAVLDAKSFPVLFDMDKVEKKDLFTGTYMPSTSLTGGYRVCSYLDPSEPTHTKVKQLLFSLLLSRKDDAVFQVRKGEMLFGYQPCATKDPRVFGDTAGDFVPDRFLGE

SEQ ID NO: 224821 - protein, 61 aa, Zea mays
  Clone ID: MRT4577_136627C.1.pep
LFSERVEALSDVERDHFILYVQKELCPCGIFRSYVKCWKSSLRSSTEKSPPTNVLCITTDK

SEQ ID NO: 224822 - protein, 42 aa, Zea mays
  Clone ID: MRT4577_136629C.1.pep
QLNAKNGSTTTSTITYKKNLLELLIHLRHTNFKYCKLHKLPT

SEQ ID NO: 224823 - protein, 40 aa, Zea mays
  Clone ID: MRT4577_13662C.1.pep
ILILYVLVYYFLFKQLSITWFVQFRLCDFLSSRVHHHLLQ

SEQ ID NO: 224824 - protein, 91 aa, Zea mays
  Clone ID: MRT4577_136630C.1.pep
TPAGRGQREPTKFKKVKPRWVWLGCPPAELGQIKRLFLKRGLGCPFAKLRLKFAPTYSKIRKTDPQWSFPMNKGLGWGRVAPPPLQRSWCG

SEQ ID NO: 224825 - protein, 69 aa, Zea mays
  Clone ID: MRT4577_136631C.1.pep
HKAEAQFGPMAPSHCRRDIHDRCAMLSLIHGRPSAISAASTRMTTEWHIASMQAHLTCVSLPYWKASLT

SEQ ID NO: 224826 - protein, 59 aa, Zea mays
  Clone ID: MRT4577_136632C.1.pep
MQVILFKYQGLHTPMARLSTACQVLLCSTSLLGDVIAIVIPWPNMVWKGGSATRFTANI

SEQ ID NO: 224827 - protein, 71 aa, Zea mays
  Clone ID: MRT4577_136633C.1.pep
QFPRAKGKERTHINRADIGHADNGKTTTTGHQTYKLGGPDKPQIERREKEAAAKNKRPVKKARAPGKLKAE

SEQ ID NO: 224828 - protein, 68 aa, Zea mays
  unsure (1)..(68): unsure at all Xaa locations
  Clone ID: MRT4577_136634C.1.pep
VRENGVAXDHALDPFFLSRLKQFSSEERDLYKSALTVISERLSXDDIAGLIQILHALDFHNLGVITFR

SEQ ID NO: 224829 - protein, 94 aa, Zea mays
  unsure (1)..(94): unsure at all Xaa locations
  Clone ID: MRT4577_136635C.1.pep
MSLWLSDRYMTPNMRCPLLMQRIYRPMIGSWMXLCAMIPHIMLNVCMCAXLQPHPKERHYXAAKRILPSLVATPCLGIWYSKGFNFDSIGSYAL

SEQ ID NO: 224830 - protein, 75 aa, Zea mays
  Clone ID: MRT4577_136637C.1.pep
IACLCASLVSRSITPRYRRETSPSFAPKIDTPPHIVLHSRTRHLCYARELPACAFPTGTASQVNWPLANTYSRDE

SEQ ID NO: 224831 - protein, 118 aa, Zea mays
  Clone ID: MRT4577_136638C.1.pep
MATMLSHSGVEGKEAVDHDDKVDDVVDRLIDEQIAAIVFVPACIESTLNDGINAGKTVEAFADHQSAEDDSGLKDKDQKISDISEDGQAEQATPQQELCAMPTNPSDHEIVERLDISI

SEQ ID NO: 224832 - protein, 61 aa, Zea mays
  Clone ID: MRT4577_136639C.1.pep
ATRPGEASRLPSGARAAPSSRVSEQPCLSLALGRAHVRYDINMMTGTVQQQEIGASVIRGL

SEQ ID NO: 224833 - protein, 333 aa, Zea mays
  unsure (1)..(333): unsure at all Xaa locations
  Clone ID: MRT4577_13663C.1.pep
MDQSLSDLCLVNFCSPVQATPIGLEPAGGPRSRAREEGRGEANHRGSCEKKKKKPATARSGARRPARRRWSRRRGDLLARLGLRWEEGRRQRQPAMAASARPGERATSFAVACSLLSRFVRQNGAAPAQLGLGIKGEVEQQRTPATINLLPGADGEETERRKETMELFPQSAGFGVKDAAAAPREQENKEKPKQLTIFYGGKVLVFDDFPADKAKDLMQLASKGSPVVQNVVLPQPSAPAAAVTDKAVPXSPSSACXAAQADAKKPTRTNASDMPIMRKASLHRFLEKRKDRLNANAPYQTSPSDAAPVKKEPESQAWLGLGPNAVKSNLNLS

SEQ ID NO: 224834 - protein, 116 aa, Zea mays
  unsure (1)..(116): unsure at all Xaa locations
  Clone ID: MRT4577_136640C.1.pep
KKQTTRISDLHFRPGAGYLYCHXGNCKHTIVIRDMRLIHPDXTQIQAEFPLQTFQLQRRLQKCSVCQIYLATKVTVDDKWALNNPCYFCIKCYYLLHYKEDSTLLYPHTVYDFIQE

SEQ ID NO: 224835 - protein, 224 aa, Zea mays
  Clone ID: MRT4577_136641C.1.pep
SARGTNGFDDKMKLGQGGYGVVYRATVPGDNGRSMEVAVKQFSGANTKGQEDFLAELGIINRLRHRNLVKLIGWCHQDGVLLLVYDYMPHGSLPRHLQGWRDASARTTTTTTLDWKQRYNVVAGVASALNYLHHEFEQTVIHRDIKPSNIMLDSSFHARLGDFGLARALESDKTSYTDKLGVPGTLGYIAPECFHTGRATRESDVFGFGAVVLETVCGRGPDAP

SEQ ID NO: 224836 - protein, 51 aa, Zea mays
  Clone ID: MRT4577_136642C.1.pep
ERCGTDCYPRARTCRPSSGDPFTIGRVNEHKYKMARTRNLDKNIDVIESQL

SEQ ID NO: 224837 - protein, 104 aa, Zea mays
  unsure (1)..(104): unsure at all Xaa locations
  Clone ID: MRT4577_136643C.1.pep
RAKVWSPAAPAKKGDAKTQALKVAKAVKSGSVKKTKKIRTSVTFHRPKTLKKARDPKYPRISTTGRNKLDQYQILKYPLTTESVMKKIEDNNTXLVFIVDLKAD

SEQ ID NO: 224838 - protein, 218 aa, Zea mays
  Clone ID: MRT4577_136644C.1.pep
MGCLQTKHASRSPHLLDTREAVALAAETSFTVSEVEALHDLFRKISNSVIRDNLIHKEEFQLALFRGKKQQNLFVDRVFDLFDQKRNGVIEFGEFVRSLGVFHPDAPEDQKVAFAFKLYDLKQTGFIERHELKEMVLALLDESDLDIASDAVEMIVDRTFDQADAKGDGKIDQEEWTEYAKDNPYVLRNMTLPYLKDITMVFPSFVMHSEISETDMAV

SEQ ID NO: 224839 - protein, 195 aa, Zea mays
  unsure (1)..(195): unsure at all Xaa locations
  Clone ID: MRT4577_136645C.1.pep
APPIVAVTVSEVEALHDLFRKISNSVIRDNLIHKEEFQLALFRGKKQQNLFVDRVFDLFDQNXNGVIEFGEFVRSLGVFHPDAPEDQKVAFAFKLYDLKQTGFIERHELKEMVLALLDESDLDIASDAVEMIVDRTFDQADAKGDGKIDQEEWTEYAKDNPYVLRNMTLPYLKDITMVFPSFVMHSEISETDMAV

SEQ ID NO: 224840 - protein, 145 aa, Zea mays
  Clone ID: MRT4577_136646C.1.pep
MAPKVSLAAPAKKGDAKTQALKVAKAVKSGSVKKTKKIRTSVTFHRPKTLKKARDPKYPRISTTGRNKLDQYQILKYPLTTESAMKKIEDNNTLVFIVDLKADKKKIKAAVKKMYDIQAKKVNTLIRPDGKKKAYVKLLMHGRRL

SEQ ID NO: 224841 - protein, 36 aa, Zea mays
  Clone ID: MRT4577_136647C.1.pep
VRALGALPRERTGLKPPSGQRRQRPKTGMPWLLVCV

SEQ ID NO: 224842 - protein, 147 aa, Zea mays
  unsure (1)..(147): unsure at all Xaa locations
  Clone ID: MRT4577_136648C.1.pep
VVAPLSLSSAAPAKKGDAKXQALKVVKVVKSGPGKKKTKKIRTSVTFHRPKTLKKARDPKYPRISTTGSNNFDQYQILKYPLNTESTMKKIEDNNTLVFIVDLKADKNIKAAVKKMYDIXAKKVNTLIRPDXKKKAYVKLLMHGLRL

SEQ ID NO: 224843 - protein, 76 aa, Zea mays
  Clone ID: MRT4577_136649C.1.pep
TMCLYNSLPSDYVFDIFSGPGAEFLVFSYFDITVGLSNDWTSSIIYSGLPFKTDSSVDLHRFIRSLAFERVAFCFG

SEQ ID NO: 224844 - protein, 172 aa, Zea mays
  unsure (1)..(172): unsure at all Xaa locations
  Clone ID: MRT4577_13664C.1.pep
MRKAPSGAFPPTHAAAAWRTLLPLTCYDAQKACHLPCYHIYMAGVIHLHNKGNNPYSXLRMNETRDVGTFTSTPPPGFGGVPSYVXTPPGPRTLKSVWGRSLSTKATRRLYTKXSDSTYMALLSCSLHAKDAAAXRVQLSLENMRNYADAIRDLAHTQIEKIKVFYQKRNHL

SEQ ID NO: 224845 - protein, 151 aa, Zea mays
  Clone ID: MRT4577_136650C.1.pep
MAPKAAPAKKGDAKTQALKVAKAVKSGSVKKTKKIRTSVTFHRPKTLKKARDPKYPRISTTGRNKLDQYQILKYPLTTESAMKKIEDNNTLVFIVDLKADKKKIKAAVKKMYDIQAKKVNTLIRPDGKKKAYVKLMPDYDALDVANKIGII

SEQ ID NO: 224846 - protein, 56 aa, Zea mays
  Clone ID: MRT4577_136651C.1.pep
CTIYVTNGYISSTIRDKKICSMLILSISLLRAIRRRQCNRSSNSSVEIDKIIVTSP

SEQ ID NO: 224847 - protein, 182 aa, Zea mays
  Clone ID: MRT4577_136652C.1.pep
MIFYFLLCFFTHLTLWSSFSVSSSGEFREAEMAPKAAPAKKGDAKTQALKVAKAVKSGSVKKTKKIRTSVTFHRPKTLKKARDPKYPRISTTGRNKLDQYQILKYPLTTESAMKKIEDNNTLVFIVDLKADKKKIKAAVKKMYDIQAKKVNTLIRPDGKKKAYVKLTPDYDALDVANKIGII

SEQ ID NO: 224848 - protein, 74 aa, Zea mays
  Clone ID: MRT4577_136653C.1.pep
RLRLPPPPPLVGGPPQIWIFFFSPFPPPLSLFIFFFFSFGPKSKGGSFDLVFLIPGPRGNLFWGGFYIYIPSPG

SEQ ID NO: 224849 - protein, 111 aa, Zea mays
  unsure (1)..(111): unsure at all Xaa locations
  Clone ID: MRT4577_136654C.1.pep
TSSRRXXAPKGDIPSHSIAGALTSTTSAHQRGNPHYRFDGTRWMHTDTPRVGSNGLLPRGALLRSGGEVDGPRRLRAARGCGPAAPRLGQPRGDRRGRTRRDIPPPDTVGT

SEQ ID NO: 224850 - protein, 47 aa, Zea mays
  Clone ID: MRT4577_136655C.1.pep
QSLYQYEKCVKRVDNDDTGHKHCTGQYFDYRSCIHKCGASKLHKKLK

SEQ ID NO: 224851 - protein, 48 aa, Zea mays
  Clone ID: MRT4577_136656C.1.pep
ICRYLIALKAATHNNQNACAADLGDVLPYDVRALLTLNIIKASTEITT

SEQ ID NO: 224852 - protein, 54 aa, Zea mays
  Clone ID: MRT4577_136657C.1.pep
SFLQKQNNVRSHYVSKMVEYTSNHLMPSTTSELTASLFNKHLMGHVCNTFSFQI

SEQ ID NO: 224853 - protein, 169 aa, Zea mays
  unsure (1)..(169): unsure at all Xaa locations
  Clone ID: MRT4577_136658C.1.pep
PPPRRCFAPPVCPPPAPAXIPTXPRSRNPXPPPRTPPXALPPRAPSTPPPPPXPAALPRAQAPTPXYPPLQPPRSPSDRPPPPTLPSPCPPPRRHPPARPSPPPPRRMPAPPCVTPPPRQRSPHPPPTDAPSPPTPPKPLTPAPHTPALPTPGWAPPPPCHPPPPPPPS

SEQ ID NO: 224854 - protein, 130 aa, Zea mays
  Clone ID: MRT4577_136659C.1.pep
PCRVDADADGRMCGEKVRQTITQRASENKLSKITKQAEEYARLIMEELDPDKLGYIEVRNLERLLEDPSQSVSIGTGKDMSQMLRSQSLRPTPEPNPLRRTQYFLEDNWRRVWVVLLWLSICVGLFAWKF

SEQ ID NO: 224855 - protein, 107 aa, Zea mays
  Clone ID: MRT4577_13665C.1.pep
QNRKNGPQITTKKGGAKGGGPNHKTGGTRRGATPPGKTLFKDSQAGTPPAEGPERGRYPTRGGAPRRRGRWAQAPGYQKPPPRAAGPRRPPEDFGGPGATSGAARPG

SEQ ID NO: 224856 - protein, 75 aa, Zea mays
  Clone ID: MRT4577_136660C.1.pep
LGHNVGSHYVSPGLSSASNQGPASLLACSSGLIMTAKEWIIYAMASRKNASLHPESASSCLRQVCLSHMTRYALR

SEQ ID NO: 224857 - protein, 91 aa, Zea mays
  Clone ID: MRT4577_136661C.1.pep
YSALLWLVTITGHDQNMSDSISQPNLHYDSNYVPIYTETSDFFFILVPIPAISWAIVARLLEPGPRRCARWPKKPYGAELDLQSIAAGHWH

SEQ ID NO: 224858 - protein, 117 aa, Zea mays
  unsure (1)..(117): unsure at all Xaa locations
  Clone ID: MRT4577_136662C.1.pep
IGSLEAGRQRKDPEWVWEGVETSNGKARERIQAVVLDMSSVVNXXDXSGLTXAXEEIHKELVSLGLQMAIASPGWKAVQKMKVSQVVDRVGQDWIFMTVGEAVEACLAAHKGTALAC

SEQ ID NO: 224859 - protein, 640 aa, Zea mays
  Clone ID: MRT4577_136663C.1.pep
DTAKLVLNSPSPPSLREELVGVVGKAFRPRAHAGAGAGAGGRPPPRRAWVLTALQCVFPVLQWGRSYTLESFRSDLMAGLTLASLGIPQSIGYANLAKLDPQYGLYTSVVPPLIYAVMGTSREIAIGPVAVVSLLLSSMIQKVVDPAADPATYRSLVFTVTFLAGVFQVSFGLFRLGFLVDFLSHAAIVGFMGGAAIVIGMQQLKGLLGLAHFTNSTDVVSVLKAVCSALRHDPWHPGNFLIGCSFLIFILTTRFIGRRYKKLFWLSAISPLLSVILSTAAVYATRADRHGVKIIQKVHAGLNPSSVKQIHLNGPHTTECAKIAVICAVIALTEAIAVGRSFASVRGYRLDGNKEMLAMGFSNVAGSLSSCYVATGSFSRTAVNFSAGARSTVSNIVMSITVFVTLELFMKLLYYTPMAVLASIILSALPGLIDIKEACSIWKIDKMDFLTCLGAFVGVLFGSVEIGLAVALGISFAKIIIQSLRPQVEILGRLQGTDIFCSVRQYPVACLTPTVLPIRVDTSFLCFINATSVKERITEWVWEGVETSNGKARERIQAVVLDMSSVVNIDTSGLTALEEIHKELVSLGLQMAIASPGWKAVQKMKVSQVVDRVGQDWIFMTVGEAVEACLAAHKGTALAC

SEQ ID NO: 224860 - protein, 101 aa, Zea mays
  Clone ID: MRT4577_136664C.1.pep
SCAHGHDRELLVVDLCSHHIQWRHVPAVSAMSVMLCVPVVQPQVRRPAGVHCCHRQVALRSGKNHAFAEFLRSRSSCLKLEQILLLPRGGFIRNSFPVKPW

SEQ ID NO: 224861 - protein, 210 aa, Zea mays
  unsure (1)..(210): unsure at all Xaa locations
  Clone ID: MRT4577_136665C.1.pep
MATLQESEVKVDGEQKLSKNELKRRLKAEKKLAEKEAKQKELSEKQLNQTASAPNHTADNGVGAEEETLDPNQYYKIRSQAVQQLKVTGEDPYPHKFHVDISLTQFIQEYSHLQPGDHLTDVTLKVAGRIHAKRASGGKLIFYDLRGEGVKLQVMANSRNYKSEEEFVHINNKLRRGDIIGVEGNPGXTKKGELSIIPQEITLLSXCLHM

SEQ ID NO: 224862 - protein, 82 aa, Zea mays
  Clone ID: MRT4577_136666C.1.pep
SSLVLFSQIDHGVVNLINEEDSRITVLLDCHGISPFRFPMQMMRSFITVVQENYPNRLGVLFVIGLPPDVTVNAHTFPSNGH

SEQ ID NO: 224863 - protein, 102 aa, Zea mays
  unsure (1)..(102): unsure at all Xaa locations
  Clone ID: MRT4577_136667C.1.pep
MTLGSFGPGSSVVGPRNFRLLEELERGKKGIGDGTASYGXLDDARDIYMRAWTGTIIGPDNTGHEGRIYQLKVVCDKDYPEKXPPSVRCHSRNNMTCRNYET

SEQ ID NO: 224864 - protein, 123 aa, Zea mays
  Clone ID: MRT4577_136668C.1.pep
GHLQLLADEVVSLTMVNVVLSSDRWSDNVVSGSPRVRSTRASYHRVLHPSTPMSSYMAVNGPLGPAPLAYLQCAESRVPHLRWACPCCQRSAFAFTQVMVHAISSSPPLLSQKKKGHASALYL

SEQ ID NO: 224865 - protein, 83 aa, Zea mays
  Clone ID: MRT4577_136669C.1.pep
RCIVPPSPASKQLAPRRIRTPLGSHPTCSGSAASAKPAPGCPRKSFSPSSPLLGANRILARAPGLALTTRTRRCSGPGPGSCP

SEQ ID NO: 224866 - protein, 80 aa, Zea mays
  unsure (1)..(80): unsure at all Xaa locations
  Clone ID: MRT4577_13666C.1.pep
MAFYGAKLSLLAAMAKNYPTVSAEYSEAVEKARRKLRALIAEKSCAPLMLRLAWHFRGTFDVSXRTGGPFGTMKCPADWL

SEQ ID NO: 224867 - protein, 148 aa, Zea mays
  unsure (1)..(148): unsure at all Xaa locations
  Clone ID: MRT4577_136670C.1.pep
PDRLADAAQTRGGPATAIPADCAGLPAHQRRPPPXSCASPGPACRRLRRMACGGRQPRXRQIQPSARQRRSPXGARSSPPRIRYASTQSRXPPTPEQQRLPSRHAGAATGLASRARTQPQARCLSGRTPPPWVGRTTRQQAPARRLHP

SEQ ID NO: 224868 - protein, 47 aa, Zea mays
  unsure (1)..(47): unsure at all Xaa locations
  Clone ID: MRT4577_136671C.1.pep
PRVRFDLRTETFWTWESLXSVRTNKVGLKGPMATPIGKGPPSFGIFL

SEQ ID NO: 224869 - protein, 79 aa, Zea mays
  unsure (1)..(79): unsure at all Xaa locations
  Clone ID: MRT4577_136672C.1.pep
VFGESFLYTYKHNNKTXPXKFTFLHXGLXWPLQGTWDXSEGXPDXXWLXGSLXDQPQXWESFPXRSQXYXRXQGSXXXX

SEQ ID NO: 224870 - protein, 95 aa, Zea mays
  Clone ID: MRT4577_136673C.1.pep
AADGGGDGDDKEAVKRAVPVFREIALAELRAVTKGFSADLIVSESGEKAPNAVYRGRLDGGRLIAVKRFSRLSWPDPQQLLADAVGVGKVRHKRL

SEQ ID NO: 224871 - protein, 133 aa, Zea mays
  unsure (1)..(133): unsure at all Xaa locations
  Clone ID: MRT4577_136674C.1.pep
FRVRHGDLNVDVTDLEPYPGLHFMLYYKVPVISAGKDFHEEFHVLVIANRTFXETAFMMAKIRAMHDLHIVYCLIYRVVANSTEVHKVVNTIKTKLTIKRAIWGKNCCKSGFNCPAHCQVPSEDLLRDQPAEC

SEQ ID NO: 224872 - protein, 139 aa, Zea mays
  Clone ID: MRT4577_136675C.1.pep
VAPFILWENVPQGGATSFFVGLGPPPKGVAGKFFFFFHVGKTSQLARREGLGKQLWGFTGGLVQFSKLEPKMLWSCLGFSGASYGFFVYSPGGPGRWVAPLVFGDKICLLSALYLAGVATPHLLGRPYLFIYGPVRFAF

SEQ ID NO: 224873 - protein, 60 aa, Zea mays
  Clone ID: MRT4577_136676C.1.pep
QVIKATNDVKFLGVDSVLWVGTRQSLRGAWGCNSDSYGKCVELQRRDSRSEADERCYLGS

SEQ ID NO: 224874 - protein, 67 aa, Zea mays
  Clone ID: MRT4577_136677C.1.pep
GFPSQSIKELLSLTARWVNPTSKQRPSMSSVEVKKQGIREQEISLPPVMGEGTPPVTLGSQFFRTSR

SEQ ID NO: 224875 - protein, 87 aa, Zea mays
  unsure (1)..(87): unsure at all Xaa locations
  Clone ID: MRT4577_136678C.1.pep
MSEYLYEGTFCGTRLEPDGIKRDIVSRAGAXESELHMYMQLDVATDVXYPMPAGEKFNMAIAPTLNLDGTPYTGYYTQGGRTTLEGN

SEQ ID NO: 224876 - protein, 82 aa, Zea mays
  Clone ID: MRT4577_136679C.1.pep
MCCGGDGGDGRECRPLGWLLGLPFALLAVLVSVVGAIIWIIGLPISCICPCCLCVTVVLEAAVELIKAPLHVITWFTSKIPC

SEQ ID NO: 224877 - protein, 139 aa, Zea mays
  Clone ID: MRT4577_13667C.1.pep
STHQHPGALSSQPNIPGVGGPFYPARNLPDGPSSAETNNMGFMNSPAQMHQGGADTNYQKKPVSGHTVPNHVGPSPIRPPMGFDMGNSVGHFERDDPHSYGRFDGAKALQQQPKLAALPTSQNSMVMHNGPLYPRPTAT

SEQ ID NO: 224878 - protein, 41 aa, Zea mays
  Clone ID: MRT4577_136680C.1.pep
PLYPVSRPAVPSFRPNQYLAKFRPVLEPNLSRIGDFMYTPR

SEQ ID NO: 224879 - protein, 80 aa, Zea mays
  unsure (1)..(80): unsure at all Xaa locations
  Clone ID: MRT4577_136681C.1.pep
EKEKRERKXKTRRKKKKKKKTKEKERRRTNDNAEPXRRSGTRGRASYXPRSRRAXRSWARPSPDAPSSSGRPPHPPRARP

SEQ ID NO: 224880 - protein, 273 aa, Zea mays
  unsure (1)..(273): unsure at all Xaa locations
  Clone ID: MRT4577_136682C.1.pep
MASSSSMLAVLATLALLLSPAASALSSTLSPDFHAETCPQLDGIVRAAVQAALTSEIAIAAGLVRIYFHDCFPQGCDASILLNSTSARETALGPNLSIQPRAMQLVESIRSTAHAACGPVVSCADITLLATRAAIVASGGPTFPVPLGNLDSLAPASQDKVFDLPSPATASVAALVQSFGTRGLGDVADLVALSGAHTIGRSQCGSFSDRSQRADDTFSRKLAANCSKNPDRLQNLDVITPDLFDNGYYXALGFNQGXVFTSDMALVKNRPPH

SEQ ID NO: 224881 - protein, 530 aa, Zea mays
  Clone ID: MRT4577_136683C.1.pep
MSRTNTEKITKEILEDLFEDTDDSDSYDVESGDEDSEDRPWRPSHTVFGKSIVKQSHLDNMRGRYFRDISIMRVGGDNTAPVPEENEVVIYRSFFKAGLRFPLSKFVVEVLKIFQIFLHHITLEAIMRMGIFVWAVRSQGLEPSAKCFCSMHELLYEMKATGKEQYHNNFGCYGFIARPNASHLVPTFRKRWPGAWIEEWFYVKNDLKAREDNKDIIQRPIWSRFGLRRSKVEIDDAVEACQRAFSTVCSFIGIRDLIQEHISFRVWPLVKIWEMPKETTTDSSDGGLVRLKYTFRIREKFDEPNDDWLNLRRLGEEKTEQGFDAIDFIYPDYRYPLRGQEKKRKIAALVILAEPVPKSKRVKVLTHRSRYIEPAVVPKFGTGSSSAAEATQTALIAQSTEEATVAPKVPIAERVEAKVDKAKESNIEEIMKVPRILSPLTETKLSKVQKASVATPKRRRMANVLDAMLESTKALSPAPIKKIAEAAIAQTEAETGQAEVEATKTQAEAEAGPSAPAAVKPAAPKEKTAE

SEQ ID NO: 224882 - protein, 131 aa, Zea mays
  Clone ID: MRT4577_136684C.1.pep
TLTRISSRCQWLMVWRKVSRPSSVNITECHGVRQGRQRHLLEPARPPCPFQRSRGPRSDHGFYARCWGIKVSRPPSAHILHSPQRKAHSVTQGERSQPPMPQPDTTKARAPLTRFGRVGRPGNSGPEPAGV

SEQ ID NO: 224883 - protein, 139 aa, Zea mays
  Clone ID: MRT4577_136685C.1.pep
AITNASVCFVCFAHGFLCDAARHGSGLSNCTAIRELYLAGNKISDVEGLHRLLKLAVLDLSFNKITTAKALGQLVANYHSLLALNLVGNPVQANIGDDALRRAVTGLLPSLAYLTSQPVKPQCIAREVVPGSIVRAALS

SEQ ID NO: 224884 - protein, 104 aa, Zea mays
  Clone ID: MRT4577_136686C.1.pep
SADKHKELTSNELCAWTKEDLHRAEGAMLKVLQVVQTGQWVSWRALRGAASKAVDSQELLDYSLRGLGGKQLDNGLCVAVRCNAGTSAIEYRLESSSVRSPANA

SEQ ID NO: 224885 - protein, 76 aa, Zea mays
  Clone ID: MRT4577_136687C.1.pep
KKKKKKKKKKKKKKKKEGKRTKQKKKKVGGHFQGPYLGLELAGKILKIAQGLKGLKKYFKFEPTSPIFSSCPVLPL

SEQ ID NO: 224886 - protein, 153 aa, Zea mays
  Clone ID: MRT4577_136688C.1.pep
FGSRYCKEGNEKKALEVFEEMSQKGVRATAVTYTSLIYVFSRKGQVQETDRLFNVAVKKGIRPDVVMYNALINSHCTGGDMERAYEIMAEMEKKRIPPDDMTYNTLMRGFCLLGRLDEARTLIDEMTKRGIQPDLVSYNTLISGYSMKGDIKD

SEQ ID NO: 224887 - protein, 123 aa, Zea mays
  Clone ID: MRT4577_136689C.1.pep
FLRAGQIAILDMRRAEILDNAARHIQGRFRTFITRKEFVKTREASISIQAYCRGCLARKMFANRRETAAAVIVQKYVRRWLLRRAHLQACLAALLIQSYIRGFIARRYFSVIREHKAATVIQS

SEQ ID NO: 224888 - protein, 87 aa, Zea mays
  Clone ID: MRT4577_13668C.1.pep
GRVGHPVPWPPPKPYHAGTGAILAPQTHTTCTSCLTLFLARLYHTNPYTCPRLVNTYRSIQADPLRRYVFHPYSLHGYSNLPPVSIY

SEQ ID NO: 224889 - protein, 91 aa, Zea mays
  Clone ID: MRT4577_136690C.1.pep
ASALAGSLWVCSWLWTSPARRPWGRSWARTLSRTLWRPPMMRPSMPSCATWRAISKQISDHTPVPSPALTFTLSVSTGACMAAAKITGEIS

SEQ ID NO: 224890 - protein, 56 aa, Zea mays
  Clone ID: MRT4577_136691C.1.pep
EAIIHTTCTNLVHSCVHRLLIVLTHLCIAFMNKRATAIRGSVYHRSDSHLRDERHM

SEQ ID NO: 224891 - protein, 256 aa, Zea mays
  Clone ID: MRT4577_136692C.1.pep
MDEEYDVIVLGTGLKECILSGLLSVDGLKVLHMDRNDYYGGDSTSLNLNQLWKKFRGEDKPPAHLGSSKDYNVDMVPKFMMANGTLVRTLIHTNVTKYLSFKAVDGSFVFSKGKIHKVPATDMEALKSPLMGLFEKRRARNFFIYVQNYDEADPKTHQGLDLTTLTTKELIAKYGLVDDTVDFIGHALALHRDDRHLNEPALDTVKRMKLYSHTLASLYLLFCFFSFSFCLFKIQVGFGVFSHAGLVCDLNFIIDF

SEQ ID NO: 224892 - protein, 99 aa, Zea mays
  unsure (1)..(99): unsure at all Xaa locations
  Clone ID: MRT4577_136693C.1.pep
GDANSGLTATDAHRELAPEGAGEVLQERRWXEEATFLEIAKDYFNQFKEVPAQKHWICFKSYFDQKRGSVFGKQKIIDPAVKDETPEVVKPAAAAVESH

SEQ ID NO: 224893 - protein, 85 aa, Zea mays
  Clone ID: MRT4577_136694C.1.pep
PPSKSKGDTGHPGAHEHPSHPRPKHTRRHHSTGPLYPRPIQLQQTGAGQRLMSKTSFKLKPRRPCHMHTNEIRASYRQLANNLTS

SEQ ID NO: 224894 - protein, 120 aa, Zea mays
  Clone ID: MRT4577_136695C.1.pep
EVPIVGRRWPPGRCASPGSMGWVPHRFPALCLGPLGCVVGASKSLYRPSPLWSKQYSLSAVYVERRYLLSAPPMSARATIWILHPSNVCILWLRPQPWLAPFLGPFLDHHFICMLSVMFS

SEQ ID NO: 224895 - protein, 48 aa, Zea mays
  Clone ID: MRT4577_136697C.1.pep
LGKFFPQKKKKKKKKKKKKKKKKKKKKKKKKKKKKKKKKKKKKKKKKK

SEQ ID NO: 224896 - protein, 47 aa, Zea mays
  Clone ID: MRT4577_136698C.1.pep
YYYNNSSLGEFPCKPWSNFYKTVMLLDMIIRTIPCSDQLYPDRLMCY

SEQ ID NO: 224897 - protein, 88 aa, Zea mays
  Clone ID: MRT4577_136699C.1.pep
KKFFSFNNVGAVNPAGYLQQQILFPFSQVGAANRVFFLKKQQLLPFYQQFGGNPATLLKIQKLWPFVQLVLKDGGASSQKHIMGGALF

SEQ ID NO: 224898 - protein, 69 aa, Zea mays
  Clone ID: MRT4577_13669C.1.pep
AVSPRIDPGQLADLSMVNEPGIHVVLGLHEQLHTFRFFFQISPIYASFQVVIHDGCNNMVLALTGMQLS

SEQ ID NO: 224899 - protein, 61 aa, Zea mays
  Clone ID: MRT4577_1366C.1.pep
KKTGRGVFPVKGHKGGVFPPQKWGGGGTNILGRLSNFVLIFTTIRPSFFKKKGQGLIPAQT

SEQ ID NO: 224900 - protein, 91 aa, Zea mays
  unsure (1)..(91): unsure at all Xaa locations
  Clone ID: MRT4577_136700C.1.pep
MIILGSGGIKRSSAIVKRDVTDLPPSKKRMAXRDTVIFTPFCNHRTSVXSLIDITTLNREPSLETCDENLITTVDAPTEPLDLYMERRDAC

SEQ ID NO: 224901 - protein, 180 aa, Zea mays
  Clone ID: MRT4577_136701C.1.pep
LPGRRAFLSAAASSLRRVARGLLAAACTFAALVAALLVSVLLGFVLVRRCVEGPVTVRQQLFFDYTEAQPSAAVLLGGARGAVLPAGHSVSVSMALLLPDSYHNREVGMFQIKAEAVSASGVTMASATQPHMLRYKSGPVRLAQTALLCVPLTLGMRSEAQAASLRVLQYREGHGRHRRT

SEQ ID NO: 224902 - protein, 660 aa, Zea mays
  Clone ID: MRT4577_136702C.1.pep
ITCLNDLDYEPEHPHDVGDEDDCMHIMNLTDIRVRLLNGVQAAYWGMLEEGRITQVTANILMRSVDEAMDLVSGQTLCDWKGLKSNVQFPNYYRFLQRSRLPRKLVTYFTVERLESGCYICAAFLRAHRIARRQLHDFLGDSEVARTVIDESNAEGEEARKFLEDVRVTFPQVLRVLKTRQVTYSVLTHLSEYIQNLQKTGLLEEKEMVHLDDALQTDLKKLQRNPPIVKMPRVSDLLNTHPLVGALPAAVRDTLLSNTKETLRGQGTTLYREGSRPTGIWLVSIGVVKWTSQRLSRRHSLDPILSHGSTLGLYEVLIGKPYICDMTTGSLVHAFSRVREKIEELLHSDPSIEIFLWQESALVLARLLVPHRFEKMGMHEMRVLVAERSTMNIYIKGEDLEVEQNCIGILLEGFLKIENLTLITPPALLLPWNADLSLFGLESSDYCHTARRYQVEARARIIFFDEAEAAHLHVQTSASLPQGEPARSMSKEHSGLLSWPESFRRSRGSLGLAAEMLPGGLSSRALQLSMYGGSVVSLSSGQQGHRRQRPRHRVQAATTMTNQKKHSSSYPRMPSISKERHLLSVQSEGSNMKRVAALPEVAATAPAPAGAAQGQRRAMNLQEEYNSSEDSAGEEVIVRVDSPSMLSFRESTAVPPPQEQ

SEQ ID NO: 224903 - protein, 275 aa, Zea mays
  Clone ID: MRT4577_136703C.1.pep
IEELGLSCCDMVTDRGLGFLAAGCPNLKKLDLLQCTRLTDQGLINLASGCHKLEEVILYECEEVGDEGLMALCENCPNLQALMLSNTSITDRTLRHIAAYCKNLRVLHLSRCAVSSAGIAEISLECPNLQTLVANSCKNVDDTALEKLSRGCKQLNVLHLSGCPVTDTGIKKVSRECKAIQVLNLNGCARLTDESIQSIALGCPQLHTITLNNIENITDTSFEVLINTCKDLQKVHIMSCPNITSQEVQAVQQKSPKLYIQSQYNLSPVAPSLMK

SEQ ID NO: 224904 - protein, 181 aa, Zea mays
  unsure (1)..(181): unsure at all Xaa locations
  Clone ID: MRT4577_136704C.1.pep
FFFFLLGTHTQPPRSPIPAAQAQDHGKDTXEGEXXDTXDNXKAKXQDKEGXPPDQQRXNXAGKQXEDGRTXADXNXQKESTXHXXXRXRGGXQXXXKTXXGKXXTXEXEXXDTXDNXKAKXQDKEGXXPDQQRXKXAGKQXEDGRTXADXNXQKESTXHXXXXXRGGRQXXXKTXXGKXXT

SEQ ID NO: 224905 - protein, 70 aa, Zea mays
  Clone ID: MRT4577_136705C.1.pep
SIISLTLTTTQRSSTTTLAAILLNFLIRTHLIDILKKDFRKLYILKNIQLYQPTIYSTLKYIIDLNRVPH

SEQ ID NO: 224906 - protein, 156 aa, Zea mays
  unsure (1)..(156): unsure at all Xaa locations
  Clone ID: MRT4577_136706C.1.pep
PASACARGGGGGGFLLALGRLCAARVFPLLLLLALSPCAACPAVLPXCFRAPXAPLFGWGGGPSLVARLCVXAGVRPSPLRLALAARSMPFSPWLLRLSPALSLVLSLVLSVRALLLLLLALPSFVLVALACFSAFSRVRASLPFRRLLSVGPAGC

SEQ ID NO: 224907 - protein, 44 aa, Zea mays
  Clone ID: MRT4577_136707C.1.pep
LNQKSQIAEQKTRWLAPVEMANYGMSELTRIAEKTEMSEKNKQK

SEQ ID NO: 224908 - protein, 67 aa, Zea mays
  Clone ID: MRT4577_136708C.1.pep
TIINNKKVSSYYQKKKKKKKKKKNKNKKNKIKKKKKKKKKKKGNLPGRPLQKGKFKKTECHKNGIRT

SEQ ID NO: 224909 - protein, 36 aa, Zea mays
  Clone ID: MRT4577_136709C.1.pep
TKGYDRSKLQIFPLFESVLKLLRDLQFLPKDMIDQN

SEQ ID NO: 224910 - protein, 104 aa, Zea mays
  Clone ID: MRT4577_13670C.1.pep
LDSLYLVARSPASSPTISLALLSIFTVSWRSVLFFSSSPPFVLPLSFARLPSLAFAISGEPVLRIVLRRARSCSVLPLSHLSSQVLLSGCIRFSLLSPPLRPSF

SEQ ID NO: 224911 - protein, 145 aa, Zea mays
  Clone ID: MRT4577_136710C.1.pep
ARNSARGLHHRGVARPAVSSDYRGPLHGPAGADTQASSSAASFTTCWRCEQLKLHLKLDPTVVPAVLTKNIAGRGQVARIRSDTDGNCTCRARLHYTTEQRRCMEMVRERLYIYAHGARPLQLSSARNHAGPCMLGRACKIKGFT

SEQ ID NO: 224912 - protein, 40 aa, Zea mays
  Clone ID: MRT4577_136711C.1.pep
TYLHFKTRRQRSGTTNSIRFSLATLCMYHFIIVYSLYSKP

SEQ ID NO: 224913 - protein, 328 aa, Zea mays
  Clone ID: MRT4577_136712C.1.pep
MKRKTRNKIIVWTLALAAVAILVGGTIALVLTAGTWKAKIKKSQEKICNKGWECSGSKYCCNDTITDFFKVYQFENLFAKRNTPVAHAVGFWDYQAFITAAALFEPQGFCTTGGKQMQMMELCAFLGHVGAKTSCGYGVATGGPTAWGLCYNHEMSPDQTYCDKTYTQYPCVEGAEYYGRGAIPVYWNYNYGAAGDGIKADLLHHPEYLEQNATLAFMAAMWRWMTPIKKSQPSAHDAFVGNWKPTKNDTLSKRLPGFGATMNILYGESICGKGYVDAMNVIISHYQYYLDLMGVGREHSGDNRDCAEQAPFNPSSPTDDQKQQQSGS

SEQ ID NO: 224914 - protein, 51 aa, Zea mays
  Clone ID: MRT4577_136713C.1.pep
PPKGPPPPPTPRTSGRGTWPPPKAGPEGPPLPHPGKPCLGGSRMTNSPGPE

SEQ ID NO: 224915 - protein, 384 aa, Zea mays
  unsure (1)..(384): unsure at all Xaa locations
  Clone ID: MRT4577_136714C.1.pep
MKRKTRNKIIVWTLALAAVAILVGGTIALVLTAGTWKAKIKKSQEKICNKGWECSGSKYCCNDTITDFFKVYQFENLFAKRNTPVAHAVGFWDYQAFITAAALFEPQGFCTTGGKQMQMMELCAFLGHVGAKTSCXSLLPLWCLGCRRNRLTDXATKLIAGGYGVATGGPTAWGLCYNHEMSPDQTYCDKTYTQYPCVEGAEYYGRGAIPVYWXLAAESIRKLESSRDXNQALNLSLVGHFFXNYNYGAAGDGIKADLLHHPEYLEQNATLAFMAAMWRWMTPIKKSQPSAHDAFVGNWKPTKNDTLSKRLPGFGATMNILYGESICGKGYVDAMNVIISHYQYYLDLMGVGREHSGDNRDCAEQAPFNPSSPTDDQKQQQSGS

SEQ ID NO: 224916 - protein, 85 aa, Zea mays
  Clone ID: MRT4577_136715C.1.pep
SRNGSVSGVPRSVTPPDWGLFPMRDSKVNLGAKMEVLISVDHKSLALARVADLCGGLEIVSADAWKYARFEWLYIDLISVSHRFK

SEQ ID NO: 224917 - protein, 75 aa, Zea mays
  unsure (1)..(75): unsure at all Xaa locations
  Clone ID: MRT4577_136716C.1.pep
HHYHCHVLTQVLPRPPPKTHCPPVPRYGXPWFCCFFNFSIARSPPHCAATRSSSEAATGSREEDATGSERRQLGL

SEQ ID NO: 224918 - protein, 102 aa, Zea mays
  Clone ID: MRT4577_136717C.1.pep
SNRGGEQDKTGSGNPHCLTPADYTIFLKKKQKGPSLPLRSSDNHKETRYPTAYIKKQMHAKNNRQARGANLIAQNGPREPQTGCWLPKTRRGQACRDPQSGP

SEQ ID NO: 224919 - protein, 205 aa, Zea mays
  unsure (1)..(205): unsure at all Xaa locations
  Clone ID: MRT4577_136718C.1.pep
MDAAVGLPDAWSQVRAPVIVPLLKLAVAVCLLMSVLLFLERLYMAVVIVGVKLLGRRPERRYKCDPICEDDDPELGSAAFPIVLVQIPMFNEREVYQLSIGAVCGLSWPSDRLXVVQVLDDSTDPLIKEMXVRMECERWAHKGINITYQIREDRKGYKAGALKGGMKHGYVRECEYMVIFDADFQPDPDFLHRTIPYLXXNPEIA

SEQ ID NO: 224920 - protein, 75 aa, Zea mays
  Clone ID: MRT4577_136719C.1.pep
GVGGLTARGGIRGSRWHCGTSPRLSYQCTALGSSNAVLGTSSASRFITIRKTGAPPAVIRQKRGGLAVDMREYDL

SEQ ID NO: 224921 - protein, 97 aa, Zea mays
  Clone ID: MRT4577_13671C.1.pep
THDDHLNLNETNQTPYKFYSVQFRVHSAAFLSDTYLTYSLDFSAKQRHNHALHNTPLLRLTPACGRGHGNSRRQRLLPDAEKAAAPAAREKQEDTQV

SEQ ID NO: 224922 - protein, 78 aa, Zea mays
  Clone ID: MRT4577_136720C.1.pep
HTLPLASLNLQMYTIIHRHDIPHHYPLRLPLNLSNRIKTTTSLTLSYILLSILIPHNNIDILCVNTHMITLTSSNKHI

SEQ ID NO: 224923 - protein, 57 aa, Zea mays
  Clone ID: MRT4577_136721C.1.pep
MLEHTYTTGMKRNGPKYSSETCILPYAVSVAMLLLAWTNRRARLGTYIYISGGMYQA

SEQ ID NO: 224924 - protein, 92 aa, Zea mays
  Clone ID: MRT4577_136722C.1.pep
MSGSRSACIIAGDFVVEFLEDIVVDVVIVELFVCSQACCQVVLLDALMHMLIRFRISLQSHQQSPQHLDQRQMESQSGDQRMRSWQVRWCWR

SEQ ID NO: 224925 - protein, 82 aa, Zea mays
  Clone ID: MRT4577_136723C.1.pep
AIVYQVFRNGWFLILQVASLVASVILGAFLAQNPVVVPLGSRPHVENISLLGFFWETGFHSLYLYWVVLLTFDFWCGVFPSP

SEQ ID NO: 224926 - protein, 69 aa, Zea mays
  Clone ID: MRT4577_136724C.1.pep
MVRHRFVVWVCTPHRESDPGSTCAHVSASIRTPVCCTVRSPLLKKHIDFTFSFPISTAYPSCNKVLRST

SEQ ID NO: 224927 - protein, 148 aa, Zea mays
  Clone ID: MRT4577_136725C.1.pep
PQVYRAKVVVQTALPWAKSLARGFRWTLCVWVSSSVYAVLAVCWVRPLVLSARTRTRTRRRPSGVEEADGNMASGLGLVVDMGDRPRKEASQDLAARWRARKSERKAQLRTRLHGGDMELEATEDSASSVAVVERERERETGEAVNDP

SEQ ID NO: 224928 - protein, 181 aa, Zea mays
  Clone ID: MRT4577_136726C.1.pep
APLACAAGPRSLRVLQSGRAGRHRRTGAIRVLLQPRAATVSLPQVYRAEVVVQTALPWAKSPARGFRWTLCVWVSSSVYAVLAVCWVRPLVLSARRRPSGVQEADGNLASGLGLVDMGDRPRKEASDCLAARWRARRSERKAQLRTRLHGGGMELEATEDSASSVAVVEREKEPGEAVNDP

SEQ ID NO: 224929 - protein, 85 aa, Zea mays
  Clone ID: MRT4577_136727C.1.pep
SRRSCGTSSPPLPGSATTGPAIAPTVDEMAEQIDAACLLPDDDDRFYYDQLEQGPVAAALRTDSVLKALNMTSPNAIGDARGGSG

SEQ ID NO: 224930 - protein, 88 aa, Zea mays
  Clone ID: MRT4577_136728C.1.pep
MDAGVEKCGDAAAEGGGDLYAVLGLKKECSDADLKVAYRKLAKKWHPDKCSSSSISVKHMVEANEKFPEIQGAYSVLSYANMRLLYDV

SEQ ID NO: 224931 - protein, 52 aa, Zea mays
  Clone ID: MRT4577_136729C.1.pep
PKSDLPNRSQHNVLGRNSLTWYLIYIRGLSHIMLSPCRTMESIEGICTQSHG

SEQ ID NO: 224932 - protein, 74 aa, Zea mays
  unsure (1)..(74): unsure at all Xaa locations
  Clone ID: MRT4577_13672C.1.pep
KNKRLSTTSRPDRAEDEEATGSAAARWRRSRRVGQRRXGEGPSGGXRRKGSGGFGAEGGGNRRGGGTWEEAAAA

SEQ ID NO: 224933 - protein, 181 aa, Zea mays
  Clone ID: MRT4577_136730C.1.pep
SGTRASGAPSLSVLTHSLTRSLHSLIAPISPPRFGACFLSRCSFGSPKPARAPARRDDDSNAGGGQGRRGRRVAPGHPWARRRRGDQQAVATPRWFWLATDVVQSKASTTAKRRRETWGSKSVRASWRWCGCGGAWRWKDKDAMVSRKRSEQGGNEAVRSGSCCRRIHACINTYIYFFVYQ

SEQ ID NO: 224934 - protein, 94 aa, Zea mays
  Clone ID: MRT4577_136731C.1.pep
TLHVYELESTYFSHTSVYLWLPSFAFMSCGYHLTSNHEGGYVVLYTLIGAWFTVSVDSFIQTGHFFSPHDVISPSFFSTPSSGPEPVAPRVPTN

SEQ ID NO: 224935 - protein, 69 aa, Zea mays
  Clone ID: MRT4577_136732C.1.pep
YNSGTAHNDFVDTVTANTFSSNDMRASEVTANSGSGAIYSGIVQQDDDNKKSDPLMKVEALQIKFLRLV

SEQ ID NO: 224936 - protein, 62 aa, Zea mays
  unsure (1)..(62): unsure at all Xaa locations
  Clone ID: MRT4577_136733C.1.pep
MRGWLLALSLLALPASATCTHTSGGCGCQPPRRTXHLPAAVHLPPPGHLPPPGPLPPAGHLP

SEQ ID NO: 224937 - protein, 49 aa, Zea mays
  Clone ID: MRT4577_136734C.1.pep
MFRLIGILHAVWMSQRYHQLYTLLNRQPLHHMYLTADCARKTKKKNLTR

SEQ ID NO: 224938 - protein, 99 aa, Zea mays
  Clone ID: MRT4577_136735C.1.pep
YFHLTTVGVKSAITGICLFKFEASLCVCKDLATVRCVDSGVQLITPIKKFKYLTKYHSAVIRPRRVLGVVAPAIELPPDLDSRCGQLAELKDHVAITHR

SEQ ID NO: 224939 - protein, 124 aa, Zea mays
  Clone ID: MRT4577_136736C.1.pep
TAVRLSPRTRTIHTHVTLDDDGGRRGCAPGLSSCSLRRRASSGTEDQWQVPEARRQSLPSDRLFDGRVDPSGVVMTPRALRPLVVHARVEVTTSLCYPVLLHARSRAMSDLPHLVTTSPTGTFF

SEQ ID NO: 224940 - protein, 120 aa, Zea mays
  unsure (1)..(120): unsure at all Xaa locations
  Clone ID: MRT4577_136737C.1.pep
MPPKKDKAPPLSTKPAKTDGGEHKKKNRSTATLTEKVDNAALLDHDTYDQVLSEVPKXEQITPSILSERLTINGSLARRAIKELMVRGAXIREDSDHSIQHIYTKATNTLKMGLPCLPSL

SEQ ID NO: 224941 - protein, 83 aa, Zea mays
  Clone ID: MRT4577_136738C.1.pep
NPVEMTRARVSHFRMLIETLLQKDDARVWNVFTRVAGLPELEVLRDGIVMFIKQHVIAEAGKDLASKFKIAKKALDNTAGVLM

SEQ ID NO: 224942 - protein, 426 aa, Zea mays
  Clone ID: MRT4577_136739C.1.pep
MACLVGVDFSAKILASIAKSFEDEYSKEDGLSLRNLTLLFCYLCIFGVTSSDLVYDLLSILSKRLTELDVSTVLTILQCCGMKLRGDDPCAMKDFVLSIQNSVNDLKLHSGVGADGKTDIRSRRMEFMLETICDIKNNKKRPKEDPSHHTRIKKWLQKLKAEDVLLRGLTWSRLLDPDKKGQWWLSGDVPSTVAKIEDVAAVISKDVAETKKLLQLAAAQRMNTDIRRAIFCIIMSAEDYVDAFEKLLRLGLSGKQDREIIRVIVDCCLHEKMFNKYYTVLASKLCNHEKNHKFSLQYCIWDHFKELDNMESSRSMNLAKLVAEMLLNFTLSLATLKVVNLANPVEMTPARVSHFRMLFETLLQKDDARVWNVFTRVAGLPELEVLRDGIVMFIKQHVIAEDSGKDLASKFKIAKKALDNTAGVLM

SEQ ID NO: 224943 - protein, 78 aa, Zea mays
  Clone ID: MRT4577_13673C.1.pep
EGLHIGHSPPAAQTHSPPCAQVLQRLGLAATKCLVARYCALRLQAKKAGPPPQPSTPAYPPGSHSKKRSGAFSILSEM

SEQ ID NO: 224944 - protein, 42 aa, Zea mays
  Clone ID: MRT4577_136740C.1.pep
LARYCSEYPRIPIRQSIGKDCCHTGLCAVSSTSQPSVFPSID

SEQ ID NO: 224945 - protein, 110 aa, Zea mays
  unsure (1)..(110): unsure at all Xaa locations
  Clone ID: MRT4577_136741C.1.pep
IYPYIKGQKDGXHRRWAGXXXXXPPGMKXSGQRVKLXSVFVGXXKXXVXXMRXNMWVXSXMKVRNXXRXXNKXXPXNGWEGXTTXTQXFSNGCXPXKXDXXGRVKXAXRX

SEQ ID NO: 224946 - protein, 79 aa, Zea mays
  Clone ID: MRT4577_136742C.1.pep
TSIPKAGFITRGVYKERDHPNGGAKNARAQKGGSKKKAQQKGKGIKLTKILHYHPPGNGKPRARQKASGGGKGQEPNQP

SEQ ID NO: 224947 - protein, 120 aa, Zea mays
  unsure (1)..(120): unsure at all Xaa locations
  Clone ID: MRT4577_136743C.1.pep
MGRVVCAALRKCRVAVPGDLSELHELEPDHYASRKRFRVNPTSSMGFLNRAAVKXGGGGGGLXGWTLCTVTEVEETAAVESRRLSFASRSHGATAGGELPLTIFVLLPQFVLMGAADAFL

SEQ ID NO: 224948 - protein, 47 aa, Zea mays
  Clone ID: MRT4577_136744C.1.pep
DERASKKRPMAPRELLAPLTLKGRCNKILSASWDSQHRQKALKERER

SEQ ID NO: 224949 - protein, 98 aa, Zea mays
  unsure (1)..(98): unsure at all Xaa locations
  Clone ID: MRT4577_136745C.1.pep
QFFXHQXSLNCXXXRATXYHRQQWVSXHLXTAQXAVASAGAKLDLSKAQCPISPCLRPPTKKNTFFGXIFNXNYQEXNLLSIEXXAFLNGKNRRLLQG

SEQ ID NO: 224950 - protein, 37 aa, Zea mays
  Clone ID: MRT4577_136746C.1.pep
VVSIGGRHHSHSLTPIDWRRRMRMRLSPSRPGVGEEA

SEQ ID NO: 224951 - protein, 68 aa, Zea mays
  Clone ID: MRT4577_136747C.1.pep
SHKINFGKSLPLKEILISCRIFLAESPHGNRGGSRRKILAGTALIKVSYVRKERGLLDRDLPPMYILR

SEQ ID NO: 224952 - protein, 82 aa, Zea mays
  Clone ID: MRT4577_136748C.1.pep
RNCSINLPCIIMLLTHKFSFNKVGHLHDNCTHALGKSQSVCHTPVHQEKAIVLTKFDACAPEHCKKWAHQNKSCPSHALEPN

SEQ ID NO: 224953 - protein, 52 aa, Zea mays
  Clone ID: MRT4577_136749C.1.pep
RYRHGIMLFHSPEYISVGLRSSTKKKQGRPPTQELDDPAIYCQDQLPAGVPA

SEQ ID NO: 224954 - protein, 75 aa, Zea mays
  Clone ID: MRT4577_13674C.1.pep
TIQGNWLKRGRPKPKWGILSIGSLCLVNTKLGLEGVLGLHPHYVALPAGLLPIPRGRRPPKSAFSLPGWTNPPPP

SEQ ID NO: 224955 - protein, 104 aa, Zea mays
  Clone ID: MRT4577_136750C.1.pep
ITHRAGVHTKNYPENRKNKNSAITKGGLFYKKRKRVMIHVNEKKLKKIDFFQKLYKSNKLGNKVFLMALFGTTYFQLLHKFKQKFCQTFSFCSSLSVQLLLKIH

SEQ ID NO: 224956 - protein, 43 aa, Zea mays
  Clone ID: MRT4577_136751C.1.pep
CCLFAKMSLFPFNKLNLCLFRPLFLVFAVHDKPPTPSLLKLVW

SEQ ID NO: 224957 - protein, 59 aa, Zea mays
  Clone ID: MRT4577_136752C.1.pep
IKPALFFFQKKRETIPDLIQRKPTGPNLESYPLIKKSRPSGSQIVQAGFGGLSVASYWA

SEQ ID NO: 224958 - protein, 160 aa, Zea mays
  unsure (1)..(160): unsure at all Xaa locations
  Clone ID: MRT4577_136753C.1.pep
SGQAGILFYCRFASTKAIIVXRVLGEXTRDRTYGMCLVSGLAXYPKKVIRXDSAQKTAKKSSVECFVXFGYFTHLMSCRYTIDFNFKDVITAAADAISTLDKKVTACNTRKARLDERIKTGKNRRVFTLLRFYMIGLPNRTALVDELMYRIHSISALVLP

SEQ ID NO: 224959 - protein, 57 aa, Zea mays
  Clone ID: MRT4577_136754C.1.pep
EINVNGAPDTQEPGWFGTRGHLVFSITATVLKGIHKDVALLCFVKNINNQVSILEAP

SEQ ID NO: 224960 - protein, 84 aa, Zea mays
  unsure (1)..(84): unsure at all Xaa locations
  Clone ID: MRT4577_136755C.1.pep
KAPFFFRQKFLGGAPPGGGGKLRKFAVSSPSFQSFSGRDLTPFLGPIVCFCQASYSPPVPXXPPAPRQAPPPRSCFPLHKKISR

SEQ ID NO: 224961 - protein, 97 aa, Zea mays
  Clone ID: MRT4577_136756C.1.pep
NMLIILPPIQRKLQSNKVRKYSLSISCTENNANNPRQSIPPDVDPPKQMKQLYVRCNIKRSAGRGKKESDVSENIDDDDDFMPASKKNQHVRFDEKP

SEQ ID NO: 224962 - protein, 90 aa, Zea mays
  unsure (1)..(90): unsure at all Xaa locations
  Clone ID: MRT4577_136757C.1.pep
PPPVHLPPSVHLPPTVHLPPPVHLTTPVHLTPPVHVPSSVXLSPAPCHYPTXPTRAEPHPQPHPCPCQQPDXSPCQVHGTXGDGRTPMLG

SEQ ID NO: 224963 - protein, 58 aa, Zea mays
  unsure (1)..(58): unsure at all Xaa locations
  Clone ID: MRT4577_136758C.1.pep
KRNICVTCTQGRPQSRKKNXXQMASQRLXXRFNQKGLKHHTFLPLSPIPQPLNIWVDR

SEQ ID NO: 224964 - protein, 156 aa, Zea mays
  unsure (1)..(156): unsure at all Xaa locations
  Clone ID: MRT4577_136759C.1.pep
MEAPSSSPTLQDHLSRPTGPLHLKVWEVVCIALGVFMAVVFFLTVWLTMRSRKRTRRASGNIPVTQIPAISKEIREVRVEQVPATDFGAHDGVLLTIQDKPSDRESDKVMVHLXVSKSRRGDESHSGSFRYMDKDAGFXSAERRGSGTFRQASIHG

SEQ ID NO: 224965 - protein, 478 aa, Zea mays
  Clone ID: MRT4577_13675C.1.pep
MRRARGRRGLLLLLGVALSAAALLRGCAGQQGEDGSDAPAAAAAETAPMEEKERRALYAAIESFVGKGWNGSGLYPDPCGWSPIQGVSCDLFNGLWYPTVMSIGPVLDNSLQCGPDAKFSAQLFDLRRLRTLSFYSCFPASNPTAIPTGSWEKLAGTLETLEFRTNPGLNGAIPASLGRLASLQSLVLVENNLTGPVPAELGALSRLRRLVLSGNGLSGPIPVTLGGLTGLLKMDLSSNLLQGSIPPELAGLRSLTLLDLRNNSLTGGLPQFVQGMASLQDLLLSNNPLGGGLPQSGWGALAGLATLDLSNVGLVGAIPGSMAALTGLRFLALDHNRLTGAVPPELARLPSIGALYLNGNNLTGTLEFSAGFYQRMGRRFASWDNPGLCYNVAAVDAAHAPSGVVVCKDLQEPSVGGGARDGDGDGDAEEDGTKPEAGSSLVASSSSGMPVGSVGGLRYLVVVRGMAAAVLGLVSLLQ

SEQ ID NO: 224966 - protein, 52 aa, Zea mays
  unsure (1)..(52): unsure at all Xaa locations
  Clone ID: MRT4577_136760C.1.pep
HXFVYAVGVRAYFHVNHSSLGRGASVGGDSLSNTQFKSETCAVSLPGVSMSS

SEQ ID NO: 224967 - protein, 61 aa, Zea mays
  unsure (1)..(61): unsure at all Xaa locations
  Clone ID: MRT4577_136761C.1.pep
DLVKLTLFQTFTVVRLCLPXAADAHMQISSFQDQHQSLSICSATDQRQMEAGVEIRHNLXC

SEQ ID NO: 224968 - protein, 262 aa, Zea mays
  Clone ID: MRT4577_136762C.1.pep
MSRARPALAMATAEAALLLLLCASAFVERGAALHLCTDRLFNDTKGRHDDGLPHLTPTEEATWMSLLPRRLRGGGRAEFDWLALYRSLTRGDGPDGGAGKPGPEGLLSPASLHDVRLHGDGSLSSMYWRAQQTNLEYLLYLDPDRLTWTFRQQAGLPTVGDPYGGWEAPDGQLRGHFVGHYLSASAHAWAATHNGTLRKRMARVVDILHACQKKMGTGYLSAYPETMFDLYEQLDEAWSPYYTTHKIMQGLLDQYTLASNEK

SEQ ID NO: 224969 - protein, 60 aa, Zea mays
  Clone ID: MRT4577_136763C.1.pep
PLKPICRGIEVPPYAIGTLKAQASKTTQEPDALAWPGGKLGMLHPVTCCARLAPLGRAGL

SEQ ID NO: 224970 - protein, 214 aa, Zea mays
  Clone ID: MRT4577_136764C.1.pep
METPLSSRRITRSLAAASAQKSAAAGPDSAALFSRAKNAAAGETQPRAALHDITNDSPIVGLAAGALHATDTTPASTAAKTRRRAPRRTPGSGEALLRGQAKALLHKVEEEQGCAAAALVRPARIQALLGVSRSPAQLLAPTPANTPQIEPVPTPREGLLLLDGARVMPCVLDEEELLIPKLQVIAASLPPPHQAEEKLGDCQLNRALVFDDSP

SEQ ID NO: 224971 - protein, 81 aa, Zea mays
  Clone ID: MRT4577_136765C.1.pep
ISQIKQVSIYLCKKKKKKKKKKKKKKKKKKKKKKKKKKKKKKKKKKKKKKKKKKKGGGLFRGPSFPPRAWQGKIFFLGPPK

SEQ ID NO: 224972 - protein, 102 aa, Zea mays
  Clone ID: MRT4577_136766C.1.pep
GGHLSFSPGWGNPGKKGEFSGALPLIFVPKTFFLLGTGLFFDKNFKTFFSRWLGGGEKPFQIFKFFLGGKEKPNFSQSYLFLGGFLFLQRGRGPLFFNLGGG

SEQ ID NO: 224973 - protein, 191 aa, Zea mays
  Clone ID: MRT4577_136767C.1.pep
MLFNNLVTLVASASLVAALPGYGQPAKSSGYEAPPPEKETGTCTASAWTTSSVGEYETTWLSTKTEVVPVTTVTEKLHTTTEPCPYTTTGASTKTLTEYTTHFDTKTYSTVTTIYNTVVESEVKSSTKCETVPFVSTATSYKTSVSTAKETITSSKTATAVITETAKKPTTYISTGTTTVCTTKEGYGGGY

SEQ ID NO: 224974 - protein, 46 aa, Zea mays
  Clone ID: MRT4577_136768C.1.pep
LSVPFSSYPVLSEYFAVIDASENISCYELISYDVSILLCLAVQFDM

SEQ ID NO: 224975 - protein, 127 aa, Zea mays
  unsure (1)..(127): unsure at all Xaa locations
  Clone ID: MRT4577_136769C.1.pep
MKPTEEKQINKKKRKNKKKNKRKEKKKKKNKXKKIXXXXXXKXKKKKKKKKKKKNKIKKKKKKKKKKKKKKKKKKKXXIKKKKNRKKKKENKXKKKKKNKKKINKNKKKIKKKKXKKNKKKKKKIIN

SEQ ID NO: 224976 - protein, 179 aa, Zea mays
  Clone ID: MRT4577_13676C.1.pep
HASATGSWEKLAGTLETLEFRTNPGLNGAIPASLGRLASLQSLVLVENNLTGPVPAELGALSRLRRLVLSGNGLSGPIPVTLGNDRRADELLLIVDLSRNYLTGSLPSSLGGLTGLLKMDLSSNLLQGSIPPELAGLRSLTLLDLRNNSLTGGLPQFVQGMASLQDLLLSNNPLGGGLP

SEQ ID NO: 224977 - protein, 125 aa, Zea mays
  Clone ID: MRT4577_136770C.1.pep
MMCADCHLPGTLCMWTDCTTCFEGCATTAGECGGCLGGAGEAGLPLLLIMGVIVLGLFTVIGIFYSVLVATMVGQRIWQRHYHILAKRMLTKEYVVEDVDGEHTDWCPPPLPAEHISQLRSLGLL

SEQ ID NO: 224978 - protein, 138 aa, Zea mays
  unsure (1)..(138): unsure at all Xaa locations
  Clone ID: MRT4577_136771C.1.pep
IRLEGMLPVFLKGVTDFDLAACSEVSGSAKALVGVGLNPIPAERLTGHDVLCSPWIGDPGAAADHAIDPTALIRMDHXSDEHGLXKISLQAIAESLYVGEIAGVHERFMAKDAHNSRGVSYDIPKEGSRESVITSNAT

SEQ ID NO: 224979 - protein, 321 aa, Zea mays
  unsure (1)..(321): unsure at all Xaa locations
  Clone ID: MRT4577_136772C.1.pep
AERAKSTMNVMRRNGLCPDLISWSILRDIYGSSQNRDGAVQALRRMQRVGMRLNVSAYTVAIKACVENKDLKLALHLFEEMKTHQLKPNXWDVQNSPGSTHQLWITTGGPTVFSDISGDEESRVXANDYYLKELIVEWCEGVLSSRSDNQDFYNLDLQPETERKESFNLFLEKVVTVLQKDTDQNQIVDVRGLSKVEARIVVLSVLRKIKEQYLLGRVVQDDVVIITGHEKTSTTEAETTTSAVDVVQAIVTVLTDDLGLEVLIGPGSCPPVSSKPKAPTKSRSNLEQISKEFTRRPQGMIKIPINSLNHWLRKKAVRIAE

SEQ ID NO: 224980 - protein, 105 aa, Zea mays
  Clone ID: MRT4577_136773C.1.pep
DFLDARLQIRSMDQLNLQIVKYFLLDLFSAGTDSNTIATAVYHDRAGPTTRGVMYKGRSAAASRAGITSRARTKTYSVGCPMLRDVVMHMMRLHPTSPMLVEHLP

SEQ ID NO: 224981 - protein, 184 aa, Zea mays
  unsure (1)..(184): unsure at all Xaa locations
  Clone ID: MRT4577_136774C.1.pep
MSHSGTGPGGGGARHSDSMPAESETGNNNLGLESILPLPPQPQRPPLPPSVRGSSSSSVSAGNKRKTSGSSMGAPIVQSSSSAQAAENKDANKLVVADTSNTGTRAVASVDIAGLDDDDDIQEEMTGTGKRQKRCTSIVWKYFTKETVEVEVNGKKFEQLWAYCNFPXCSRDMCVSVCECDYKI

SEQ ID NO: 224982 - protein, 227 aa, Zea mays
  Clone ID: MRT4577_136775C.1.pep
PCGLCLLPRLLPTPSALSLLCSSLTPVPSPGCTHHPPPFSSWTPPATNLLLVALVACGLPSFWAVAVCTRFLGRQSATCRPSGSTALDLGACCLSTAAPLWNTDVYLYTTTSTHACTPCSSYILTGCATTAGECGGCLGGAGEAGLPLLLIMGVIVLGLFTVIGIFYSVLVATMVGQRIWQRHYHILAKRMLTKEYVVEDVDGERTDWCPPPLPAEHISQLRSLGLL

SEQ ID NO: 224983 - protein, 145 aa, Zea mays
  Clone ID: MRT4577_136776C.1.pep
MYTVLVIYSHRWLYQHLFNFRMCADCHLPGTLCMWTDCTTCFEGCATTAGECGGCLGGAGEAGLPLLLIMGVIVLGLFTVIGIFYSVLVATMVGQRIWQRHYHILAKRMLTKEYVVEDVDGERTDWCPPPLPAEHISQLRSLGLL

SEQ ID NO: 224984 - protein, 65 aa, Zea mays
  unsure (1)..(65): unsure at all Xaa locations
  Clone ID: MRT4577_136777C.1.pep
PPGAYLLRLKXGKRRCRGAMRHGGRPQRHGDPSTVAARPRIWTGRRESKALVGVPSLVGERYLWL

SEQ ID NO: 224985 - protein, 59 aa, Zea mays
  Clone ID: MRT4577_136778C.1.pep
QSLTVMRYSMRSVCRLERRAHHEIHVGPQQHGQDFQPDLTVRISRCSHPGRANGARLLG

SEQ ID NO: 224986 - protein, 68 aa, Zea mays
  Clone ID: MRT4577_136779C.1.pep
RSLSDTLLERLGTCTVCPGSLINLHPCLPVDSSRPHPARQPVALGQARHPAPAPARHTPHKRESGRVE

SEQ ID NO: 224987 - protein, 78 aa, Zea mays
  unsure (1)..(78): unsure at all Xaa locations
  Clone ID: MRT4577_13677C.1.pep
MLDHIIHSLQQRFGVGQRTLPMIILXLTIILFTLKRLMQRFQLLPTRSWTRYHTTDKLRQLSNHIIEHTTIVCKPLYA

SEQ ID NO: 224988 - protein, 96 aa, Zea mays
  Clone ID: MRT4577_136780C.1.pep
KRVEKTKGRIIGKEDALRKIKERLKKTQDEKRAKKLAMAKFQKGETTAPVAHGSPGHEVCHSPFKLCNCLRGGPLPCYWLSIDPPDAPTPPLQFHG

SEQ ID NO: 224989 - protein, 72 aa, Zea mays
  Clone ID: MRT4577_136781C.1.pep
INYKYKKKKKGHPMACRVCVGGGLFRCSFMDVSCIPSRKNYSMQNLAGANRFLLELTYSQISIMSQRTIRAF

SEQ ID NO: 224990 - protein, 139 aa, Zea mays
  unsure (1)..(139): unsure at all Xaa locations
  Clone ID: MRT4577_136783C.1.pep
GLPEKQGPPPPARQGKAPPPPPGGGGPQKGGPSRGVGRFPAQQGKGPLWGXRKVSHPGVGGQGFFFFWGWGELPKRGSLFFSVDQIGFGFFGLFRGLLLSFPFFPGGSPKHGGASLFILGGFCPFQGFQPVFAKCFFFS

SEQ ID NO: 224991 - protein, 106 aa, Zea mays
  Clone ID: MRT4577_136784C.1.pep
MSNNNNSNNRLLFDDFVQILRPIMMGSYNEHELDTAFDLLDRNQSSMINLDELVSFLMIISPDITKDILLRYINQEEIIENERLNFNQFNDLILRGLGKDIVCGHI

SEQ ID NO: 224992 - protein, 130 aa, Zea mays
  unsure (1)..(130): unsure at all Xaa locations
  Clone ID: MRT4577_136785C.1.pep
MARRVRPSHLMLAVAATYLLLISLKFCRVLDLAAADLAATPPXAAAAAAFSSPSSYDHLPPLGSSSSSDATATSTASPFPVRPFWHRYDRVSLPXDLASRNRSALDRMXDDAWGLGLTAWEDAATFAGDP

SEQ ID NO: 224993 - protein, 68 aa, Zea mays
  unsure (1)..(68): unsure at all Xaa locations
  Clone ID: MRT4577_136786C.1.pep
FPCRSRFPIFCSVLASLTLFFSSISSFFSFFHCLCLTHWSFLSFNTIFFFCHFFFSFFFXFPNIPLYF

SEQ ID NO: 224994 - protein, 69 aa, Zea mays
  Clone ID: MRT4577_136787C.1.pep
MDAVDSVVDPLRDFAKDSVRLVKRCHKPDRKEFTKVAARTAIGFVVMGFVGFFVKLIFIPINNIIVGSG

SEQ ID NO: 224995 - protein, 64 aa, Zea mays
  Clone ID: MRT4577_136788C.1.pep
HKRDDSHMNGADHSHLYCSIHLSIQLHNTGFYLHLCTLKTVSDHTCSYIIDPSFTKKNEISFII

SEQ ID NO: 224996 - protein, 63 aa, Zea mays
  unsure (1)..(63): unsure at all Xaa locations
  Clone ID: MRT4577_136789C.1.pep
LQPFPVSMGGGVRLRGEARGRVXGSLRVCRCAPLVLGGXXXWVVPILEIGAGPXXWWCGKGEV

SEQ ID NO: 224997 - protein, 266 aa, Zea mays
  Clone ID: MRT4577_13678C.1.pep
THEEIEDMTNSYRIKIGAGGFGAVYKGELPSGSQVAVKKIEGVGMQGKREFCTEIAVIGNIHHVNLVRLRGFCTEGQRRLLVYEYMNRGSLDRSLFRPTGPLLEWKERMDVAVGAARGLAYLHFGCDQRVIHCDVKPENILLADGGQVKIADFGLAKFLTPEQSGLFTTMRGTRGYLAPEWLSNAAITDRTDVYSFGMVLLELVRGRKNRSEHVSDGGGEASNSSNGTAGSSSRGAKSDYFPLAALEGHEAGQYAELADPRLQGRV

SEQ ID NO: 224998 - protein, 85 aa, Zea mays
  Clone ID: MRT4577_136790C.1.pep
IKPVPNTSSSHLVSLIITHDKFPKIKQTALTLSSSTSQKICPIDVTNHKTFKNQAYSSNSLPFFFFHLTYTWIKRPKKTITTLPH

SEQ ID NO: 224999 - protein, 56 aa, Zea mays
  Clone ID: MRT4577_136791C.1.pep
QAKFLLIIPSHTVTHSQMTIVNQSSKLGANIIYPLFKEMTCCLILTSKRLQQTHII

SEQ ID NO: 225000 - protein, 283 aa, Zea mays
  Clone ID: MRT4577_136792C.1.pep
MRTIDSQLEQILDKSIIPSSYDKKNASEEDQRCIRLYYLAYDILSNSLSKEDYRAFIMRYDEPIHDAHDIWTKIKSKFNESKHVSSYDASTSFSPCETNPLKEKEENERWRPNDESTSPKASKSSFELEFLGIKDDTCQELKEENERLRTSLTQLKGKCTAQPSQDNRDYMVKKFEIGTTVACTKSLEENVKDLRNVKGKEQKKKINTSAKNLNRASMQGNIQGNDQATLHTKKSKKCSECFEKGHFIRSCPYIKENGLILNKDDKRCFKCSKKGHLVKSFPM

SEQ ID NO: 225001 - protein, 67 aa, Zea mays
  unsure (1)..(67): unsure at all Xaa locations
  Clone ID: MRT4577_136793C.1.pep
DQLIDGTXGMPRYSSAVVSAKFNIHGRRYTTVLRGYMLACLNFSRGQLIPVSAAGDLAEQAIYRSFL

SEQ ID NO: 225002 - protein, 463 aa, Zea mays
  unsure (1)..(463): unsure at all Xaa locations
  Clone ID: MRT4577_136794C.1.pep
MARRRSQKNKKTPPKKNNEVTLEVLLSDCSNYASWSTRVINAFRTIDSQLEQVLDKSIIPSNYDKENASEEDQRCIRLNYLAYDILSNSLSKEDYRAFIMNYNEYIPDAHGIWTRIKSKFNESKHISSYDAYTSFSPCETNPLKEEEENERWRLNDESTSPKENLKSQQPHSCTCIQIETILPCANACCSSTSKSSFELEFSGTKDDTCQELKEENEKLRTSLTQLKGKCTAQPSQDNRDYMVKKLETGTTVACTKSLEEKVKDLRIVKSKEQKKKINTSAKSLNHAXCKVTSKVMIKPHFTLRKVRSVXCFENGHLIRSCPYIKENGLIINKDDKHCFRCSKKGHLVKSCPYEEQKCIVLEKKIFTNHVASKKQGKKKSSRYDDRLWYICRKKGHQCKDCPIGNYPAPNLSIDSYVTRQSKIATCARKVMSLPSASTKDIWVPRSLMTNLDGPIKXGDQNMH

SEQ ID NO: 225003 - protein, 68 aa, Zea mays
  Clone ID: MRT4577_136795C.1.pep
YFTDSPARTIPVHSHLTNTCYLILRGSYSTDIDDTSCNDSTETGSVDKNSAKDVRHILNTCDRSFQRT

SEQ ID NO: 225004 - protein, 93 aa, Zea mays
  Clone ID: MRT4577_136796C.1.pep
GGEGGAHPGAPFSSRREFNGGTWGVWVITRVLLRRPPKFCRGFFRGKGKRKNKHHFSLYISPSNTKDQTRTMLTQPPMVMGDKTKHNTEKKEN

SEQ ID NO: 225005 - protein, 32 aa, Zea mays
  Clone ID: MRT4577_136797C.1.pep
PIMPGGDWSLSSWLRERKFIIRPDSHQTNPLS

SEQ ID NO: 225006 - protein, 71 aa, Zea mays
  Clone ID: MRT4577_136798C.1.pep
FTHFISTLGPWPNNLAFGESRKDWTWPPLKKIQWPHTVYTRVIKGLGYERNKVSTFCTTDRSEPKAKHADT

SEQ ID NO: 225007 - protein, 88 aa, Zea mays
  Clone ID: MRT4577_136799C.1.pep
RGFVYLNLPGLFLEKMEWASFFGAPPRVGTLFHIYLPPPLAQPVYAPVFHWDFSLGLGPQNVWVFFPPFFLIYWMTLLFSPPILVFFN

SEQ ID NO: 225008 - protein, 44 aa, Zea mays
  Clone ID: MRT4577_13679C.1.pep
RKFGIWLVALASRLLTRAGAARDGERLKWGTAYSTNRGSESTTR

SEQ ID NO: 225009 - protein, 62 aa, Zea mays
  Clone ID: MRT4577_1367C.1.pep
RALESPFSSHADSNLHHVLLIQGSTAIAGHATCRYTHRAIYSPVFNPQLSTRSCSSQSPSCP

SEQ ID NO: 225010 - protein, 92 aa, Zea mays
  Clone ID: MRT4577_136800C.1.pep
MGTLTKQNLMRDPHRQTPTATNPLRAATAADVAAPHRSTDYAHVRIHQRKGRKKPTTAQGQKKELRCRTTHRQRKKECRCNRTEEQDPQHGQ

SEQ ID NO: 225011 - protein, 43 aa, Zea mays
  Clone ID: MRT4577_136801C.1.pep
PPPRLQRNWKTRVTNLIPAHIPFPPAKRKARPRPQQCHLMQWT

SEQ ID NO: 225012 - protein, 76 aa, Zea mays
  unsure (1)..(76): unsure at all Xaa locations
  Clone ID: MRT4577_136802C.1.pep
GRRHTDYTTPPRFYSARLGSRXLLSVRSRARRWPAPRCRSTRSSTSFVPRSSSSTRSGSTISPGSSASCHASSVGK

SEQ ID NO: 225013 - protein, 66 aa, Zea mays
  Clone ID: MRT4577_136803C.1.pep
RPPLFFFFFFFFFFFFFFFFFMQVRYNKIYVASDIMRWTLITFSADRRKPQLEKTSLFIHISIRHL

SEQ ID NO: 225014 - protein, 54 aa, Zea mays
  Clone ID: MRT4577_136804C.1.pep
PRVRPRVRCSGIVSHHSAASSNFFCTDEVGTVLMIDLIPHACIYVYRLFNMNDL

SEQ ID NO: 225015 - protein, 111 aa, Zea mays
  Clone ID: MRT4577_136805C.1.pep
PGPPKKRGGGPPPLKTEKKNPGGATNGALNGPGMGLALGGGKFKNRVGEGYYRPPFTQTTGGLPGTPHTPKNPPRGGGAKKFSWPRGGPPPLSRAGAKKIFPPPPCLGGPP

SEQ ID NO: 225016 - protein, 96 aa, Zea mays
  Clone ID: MRT4577_136806C.1.pep
EVSPHCNDQPGDERAFYQQPDLHLTLSVAKTITVNLRASGNTQTPLSRALTPITLTSLMPAYTTISAYAKRTNVTYHCTVTSLHQDCLPINLAGST

SEQ ID NO: 225017 - protein, 191 aa, Zea mays
  Clone ID: MRT4577_136807C.1.pep
LYTGPPYYMVSGKQVDGYKSSRSQPHPKISCLSIQDQRRGLHTLFFLSPPSTPISTYLVNQPCVHVRGASSMLHSLQDKLQFLLCMVEQFSADPAMLLQAQIWVCVLCVAPGSQEHDSPYGVLGGRAAAVGATARFTGRRCGGGGAVGAPEFLTEGLLDLVSPGALPGRQLRGFHGRQEKILSYSTETVVV

SEQ ID NO: 225018 - protein, 145 aa, Zea mays
  unsure (1)..(145): unsure at all Xaa locations
  Clone ID: MRT4577_136808C.1.pep
LLXLSACVAYATIFPQYSHAPIAALLSXYLPSTPFFFCXNAXXQPYXLQQPIKTNNLPLSPXFFQQXPXLSXFXSXXQTIXXQXLLHLFLPXVSLVALAFFSSYXQQQQFLPFNQLSTLNPAAYLPPQHLLPFSPLATGYSSQQQ

SEQ ID NO: 225019 - protein, 153 aa, Zea mays
  Clone ID: MRT4577_136809C.1.pep
AESRHMFFFFPHKPRAWVVINHSLMSREQAHDFFFSTQATCMGRHHPFIDEQKAAPMIFFFPPKQRAWVVIIHSLMSREQAHFFFFSTQATCMGRHHPFIDEQRAGPFFFFPHKPRAWVVIIHSFLCYRSGPILFFFFFLNFFFFFFFFVSNT

SEQ ID NO: 225020 - protein, 90 aa, Zea mays
  Clone ID: MRT4577_13680C.1.pep
EGPLPLVFPLRGGIQIFLKTPAGKTITLGVESWAPLPNVKGKIPAKGGIPPDQKGLFFPGKQLEEGRPLAGFTIQKEGPPPLGPRFRGGQ

SEQ ID NO: 225021 - protein, 126 aa, Zea mays
  Clone ID: MRT4577_136810C.1.pep
LTSHAFMFVVQAACSIVYKTSSSSFYVWLSSSLQAQIWVCVLCVAPGSQEHDSPYGVLGGRAAAVGATARFTGRRCGGGGAVGAPEFLTEGLLDLVSPGALPGRQLRGFHGRQKKILSYSTETVVV

SEQ ID NO: 225022 - protein, 372 aa, Zea mays
  unsure (1)..(372): unsure at all Xaa locations
  Clone ID: MRT4577_136811C.1.pep
REIEFLKDELQLLEGVPPVSRSCKEVNDFVGTKQDPLIPITKKTHRSCRLFWWIRSKLCICVPWFCCSCHCMPNCKRPCCLDCSCCSCPDLSCCYPSCKSCNKPCFGPNSCSCCDISCRKPDCPSCTSSCSSCCNRPCGNPDCSSCCTCNPSCCKPSCNSCCRPNCSSCCNLSCCKPSCSSCFSCCKANSSSCCKPKCSCFKALSCCKLQCSPNCCTCSLPSCSGCNPCGSCKQCCSCPSDCFDCKPNCGCFGAQCCSCVGCCSCSCPRCSSCFGCFKSFKCSNLFGCCXPASSASSASPXCCKGAPSCCKCQSSCCEGEDGSSCCRRPCCTFPKPACSGCSCGCVWSCRKCTEWCRCSGCRNPCCATGCLC

SEQ ID NO: 225023 - protein, 255 aa, Zea mays
  unsure (1)..(255): unsure at all Xaa locations
  Clone ID: MRT4577_136812C.1.pep
KAELEAAFFFFFXTEASEESDSSRQEHIDDKKIPTRRESSEPTQLFFFFLGHTKQQDLLMSHSYTQVPLITWFLENKLMATKVPDLSHIPRSHASPSKIRDVDYIPCFFSLSPIHTHIYLVNQPCVHVRGASSMLHSLQDKLQFLLSMVEQFSADPAMLLQAQIWVCVLCVAPGSQEHDSPYGVLGGRAAAVGATARFTGRRCGGGGAVGAPEFLTEGLLDLVSPGALPGRQLRGFHGRLLPVLSKENPIALKRW

SEQ ID NO: 225024 - protein, 386 aa, Zea mays
  unsure (1)..(386): unsure at all Xaa locations
  Clone ID: MRT4577_136813C.1.pep
MPPPPLPEEKPLARRKPEPKPPKPKPKGPRPIGPLPQRDGDPGGGVATSPPLLFCGDGCSGPCAYLPQCQPPPPPSPGATVRLRSSRLPTPLVALSASLLTVSAVLLLALLVHCLVARRRRRAQGAPLVHHAEAGGAQVLAXRGGAAGRRGGGRGGXAGGGVHHVWYIRTKGLDERAISAIAAVVYDAKKRGAGASSDGGGSCAVCLAEFRHGETLRLLPRCAHAFHRACIDTWLRAHVNCPLCRAPVQGXAAAANPNPAPGTSGRREEGNPAAGAVIGGVQTQDPARGGGFPDRAVRRAASSMAALPRRAWPDVPLRAPASSSFRDGEDDVTGLGKIRRLLKLSDALEMAGVGVHRSASFGAATCQRLPPRPGPSAPGVSADETS

SEQ ID NO: 225025 - protein, 88 aa, Zea mays
  unsure (1)..(88): unsure at all Xaa locations
  Clone ID: MRT4577_136814C.1.pep
VFRPPFSSFFNFDFARTKTFALRTLFAPSLVESFGPGGRTCLLXRVFPQKALGGNGPLFFFYPGGVGVKVPRLAPWGFRPPKINVPAP

SEQ ID NO: 225026 - protein, 255 aa, Zea mays
  Clone ID: MRT4577_136815C.1.pep
MVVRRACAIMEGAFSVPYYEWLKPRSSPSTSCWTTTLSTPSSMDRLLAAVAGGHDDDEERDATMCLPLLGRLEGRARTPEYHSPVKEELSNNTTTTTTGAGVHLTIGLPATGGGGYMSSEEAPMDDEDDEQDEDYFELEEEDQKASSEHDNKCKMEAAGEAEQRRPGGDEEGIKSFVGSRGRRYWIPTPAQILVGPQFMCHVCSKTFNRYNNMQMAQGHGREYAARSSVSSIQCCRIFFGLLARHSGRKPHMRVL

SEQ ID NO: 225027 - protein, 440 aa, Zea mays
  unsure (1)..(440): unsure at all Xaa locations
  Clone ID: MRT4577_136816C.1.pep
MSPGFFGHGHTASQFTRRGAQPPRAPARSHKKTRRTAPPSHRPTWPRQSPSTLFPGHRRPGRPRMDRLVLFSRRRRRWILLAAAGAAAAVGAYKIYHHPAVAERRHRLVRLAAALAAIADAATSSADAAALVVSDLADFVRSDADEVPRSVKQLAKLAASPEVSATVSTLSEAVTSGMLRGAGSSSSGPGSGGTVALSDRFVDKLFSDSGERLASAVAGSFARHLVLAYYSAPSPQGGGXSSSPTVWVNVVATGKCRKAISTWVEVFVGTAVREFIDKTIHINTYEQIFEGLTNPKHDAKVKELLVSVCNSAVEILVKTTHHALYNTNGNLDANDSCSGSGNDNGVGEGWVERVSSTLAVPSNRKFVLDVTGRVTFETVRSFLEFVLWKLQDGARKGGDSMVDSGLRVVRYMSDKSMVIATICITLCLHVLNGTRLLVTA

SEQ ID NO: 225028 - protein, 41 aa, Zea mays
  Clone ID: MRT4577_136817C.1.pep
GIYGRPSYQLALTTSLPGSHTTRRFYRLNGPVKCSDRGYGG

SEQ ID NO: 225029 - protein, 143 aa, Zea mays
  Clone ID: MRT4577_136818C.1.pep
THNAGPSIMLLELGQKIGPQTGLPDIGFHCAVWYVKHLRVDTGTRHKAGFDAKSREGYQLLWHERRDDRNLWRVTSWRQHDTSDRMFFLQGTSTTMTLDQVEKVKRKRNKRRTTMEREPTHPARNQNGRDESVSFIYACHMSW

SEQ ID NO: 225030 - protein, 112 aa, Zea mays
  Clone ID: MRT4577_136819C.1.pep
PHPRQSPNAAAPSPDSAPKTPPVSGAAAGDMDDGYTPKHKSVPDWLNSPIWSERPPTPLHSSLPRTEPAPTQTPASPLPSHKTRRDPTPIPPPNAPRDTDVSQDEGYGAGTS

SEQ ID NO: 225031 - protein, 53 aa, Zea mays
  Clone ID: MRT4577_13681C.1.pep
VGNWVKRVVGIVTPVLFFRTPVFPINPPGTGVAPAGVFPNPPFKRLKPQPKAV

SEQ ID NO: 225032 - protein, 73 aa, Zea mays
  Clone ID: MRT4577_136820C.1.pep
TMTTKIITHTGPGETITHTGQGRASHTAYTTGRGIRDRHCEATGCLYLGKDSYTKSSSVSAMRPQMLPPWASS

SEQ ID NO: 225033 - protein, 76 aa, Zea mays
  Clone ID: MRT4577_136821C.1.pep
AGRGRASMRTAWGAEATAPTMDTRIFCPKRESSNKPCSTKKQGGGDGQKLPPLLSEGPPNLRETPHRVALLHDYLH

SEQ ID NO: 225034 - protein, 170 aa, Zea mays
  Clone ID: MRT4577_136822C.1.pep
LTKGSPVPATTSDINHIAARSYLSKSTKSTLRNKQSGKLCQLYWQLQGLIQKRERKNENVMMARRARNQKRKRNEDTKSSTPADTPAEATYNMLKRKGLGSKINEGAVGELYKTKDEVESASRKEEMEFDALFGPDNADGETVDDGGYGYGGCGDGGAEAYNGIDDDFDF

SEQ ID NO: 225035 - protein, 79 aa, Zea mays
  Clone ID: MRT4577_136823C.1.pep
ICLAFYRALKIRMLGKGEMKEETEHVATNLINRFNKKVIEQIPLLVSNALWKYKDSLWRYKLMAGPLCLRLKERSARAH

SEQ ID NO: 225036 - protein, 130 aa, Zea mays
  Clone ID: MRT4577_136824C.1.pep
MAGRSNIPANNSALIAIIADEDTVTGFLMAGVGNVDLRKKTNYLLVDNKTTVKQIEDAFKEFTAREDIAIVLISQYIANMIRFLVDSYNKPIPAILEIPSKDHPYDPASDSVLSRVKYLFSADSVASDRR

SEQ ID NO: 225037 - protein, 29 aa, Zea mays
  Clone ID: MRT4577_136825C.1.pep
RGKKPISHSFFPEWVVDHTIQIQGLANVC

SEQ ID NO: 225038 - protein, 64 aa, Zea mays
  Clone ID: MRT4577_136826C.1.pep
GNEHHGWSDHAEVARNEIRPLQPKDTHDTPLVHKMCDLLDMADARMDQHHARQNTKVYVQLGQR

SEQ ID NO: 225039 - protein, 93 aa, Zea mays
  Clone ID: MRT4577_136827C.1.pep
KILSSISFRSKKKKKKKKKKKKKKKTKKEKKKKKKKKKEKEKKKRKKREKKGGGPQRCQVGISLIGGGRELKRGTKMQVQGVLFKSVGRGKTR

SEQ ID NO: 225040 - protein, 54 aa, Zea mays
  Clone ID: MRT4577_136828C.1.pep
VKSKLHLPIVWAYRNHHFSTIFPTTHMRGQLSYMYRDMGIRENISIKIILGYPY

SEQ ID NO: 225041 - protein, 88 aa, Zea mays
  Clone ID: MRT4577_136829C.1.pep
EACPNPIFNYSKPRSGTWDFTTAIGNTSYTLVLVEPQMRMPRLGGPTISQAPQMLSCIKFFRPRGQGTNNLHTIDNRIRLDPVKLHRY

SEQ ID NO: 225042 - protein, 33 aa, Zea mays
  Clone ID: MRT4577_13682C.1.pep
ALKSALSLCTSFRDLGVSYKLHSSQFHTYVPLN

SEQ ID NO: 225043 - protein, 77 aa, Zea mays
  Clone ID: MRT4577_136830C.1.pep
IWRTVLLKLNNLDIDLVMQLLDRYRPFCLMGSILVQHKGNSLGFFYNGFLWFHDGMIVVPHIYRLPRDVVPEVGEIG

SEQ ID NO: 225044 - protein, 76 aa, Zea mays
  Clone ID: MRT4577_136831C.1.pep
GRVGGRVGRIFCKKAGVFTKVLEALCSYNAQVTSLNTITFYGYAESVFTIEVKGEQDVVMVELRSLLSNIVEVPSN

SEQ ID NO: 225045 - protein, 96 aa, Zea mays
  Clone ID: MRT4577_136832C.1.pep
TAAGPLQAAPQRLPSRRSGLPRRRSSSSPGARRPRLVFVPRQPRLLFLPRRQAAVSSPGVRVESYSEEKRLGAKKLAFRFGEWLNSSLWSRTGTTR

SEQ ID NO: 225046 - protein, 189 aa, Zea mays
  unsure (1)..(189): unsure at all Xaa locations
  Clone ID: MRT4577_136833C.1.pep
MSGNDSQAAADRIKAQALSNAKGLSRAQAERAAEAAARNVNAYGQKEEGPSRWQERKEAKWQMYLMSTEKAVRLGVRPNAAPASATAGGQCQKCFQPGHWTYECKNERVYISRPSRTDQLKDPRLKKAWLPAPSQFVNPDLEKEMEEERKLMREKLKKDSLRKEXRSKSKSKSKHRASVSDSDSDSESS

SEQ ID NO: 225047 - protein, 137 aa, Zea mays
  unsure (1)..(137): unsure at all Xaa locations
  Clone ID: MRT4577_136834C.1.pep
MFFMHHSRWRNLPGNRLLSVCFKILLLNLFGHWCFMNMISWLXFTAAKPAYYNYVCAMLLLNGVSLFGCFLVASEAGFGLWYIQNTHVVFYSPSRTIFDDAPYAXLHNLTIVCNHSHYLRLLYVTFLSYFFQDPSCV

SEQ ID NO: 225048 - protein, 110 aa, Zea mays
  unsure (1)..(110): unsure at all Xaa locations
  Clone ID: MRT4577_136835C.1.pep
APPGNKPKSKKRVPLGXSSGKQGGQGXRGRNKGNNSVEPYKIYVFKVLKQVHPDIGISSKAMSIMNSFINDIFEKLASEPAKLARSIKKPSFSSREILTSVRLVLSGELS

SEQ ID NO: 225049 - protein, 67 aa, Zea mays
  Clone ID: MRT4577_136836C.1.pep
PTLTCSSDVSGNGFYLSMITSMQNSLLLQIKVFIFIFFSHSPRAKREARTNGCMPFHPRDAFKAHLS

SEQ ID NO: 225050 - protein, 74 aa, Zea mays
  Clone ID: MRT4577_136837C.1.pep
AFMMIYLRTSYPTFSYYIFLCLIQSKLCLSRRTHVVVQRPAYAYYCTFSICMHMEKCRHIYHVISQHRGKLCIQ

SEQ ID NO: 225051 - protein, 63 aa, Zea mays
  Clone ID: MRT4577_136838C.1.pep
LSTCVSGDVHATVGPSPVPAYHLARVCILRVPYSDTQTCLASQHSTAMCSGMYLCNQGRYEVD

SEQ ID NO: 225052 - protein, 64 aa, Zea mays
  Clone ID: MRT4577_136839C.1.pep
KIKKKGLRLHKTPQRISAFRGKGRATPASWLITRTSSVMIQCWYLYSVFTGNTITFRSLVIFND

SEQ ID NO: 225053 - protein, 56 aa, Zea mays
  Clone ID: MRT4577_13683C.1.pep
MTWCNSFNDVRAVEDNLATADVAKKQHLQACFHVNLIRTCPSCGHRAQYDEQRSDR

SEQ ID NO: 225054 - protein, 84 aa, Zea mays
  Clone ID: MRT4577_136840C.1.pep
NRGVQTFKIKSPSGAGWALSFSWKNQAYWAFGIKKGIKLGREIEPAPINITDAFNLEGEITPGNPGDWVSPCHNQKLSPFWEKG

SEQ ID NO: 225055 - protein, 116 aa, Zea mays
  unsure (1)..(116): unsure at all Xaa locations
  Clone ID: MRT4577_136841C.1.pep
ATPGGTQKARPECLCYIIXQQVHAGRDQVQSLGLRFDRLLALPAACSLPNANVSLCINLLNLKPGSPDYALFANASKITPSAGGSPASDSAVIRLQAGVRGSVALAVVSAIVSSVF

SEQ ID NO: 225056 - protein, 97 aa, Zea mays
  Clone ID: MRT4577_136842C.1.pep
AISSRSPITSPISSSISNFTLQTVSTSVIYSFASPILHDLLKTVLVVSQNRTVCLITNSDDILSAELSLRKLKDTSQAANNLLCFEVRDKAAITSSN

SEQ ID NO: 225057 - protein, 132 aa, Zea mays
  Clone ID: MRT4577_136843C.1.pep
ISVLSGYLVDAIQGASESLNWPVAFISVILLPIVGNAAEHASAIMFAMKNKLDITLGVAIGSSTQISMFVIPFCVVIGWMMGQEMDLNFQLFETATLFITVLVVAFMLQEGTSNYFKGLMLILCYLIVAASF

SEQ ID NO: 225058 - protein, 124 aa, Zea mays
  Clone ID: MRT4577_136844C.1.pep
NNLETAEVWRMYFDGSLKLQGAGAGILFTAPGDEHLRYALQLLFPASNNAAEYEALIHGLNIAISLGIKRLMVYGDSLVVISQINKEWDCSNDSMGKYCTAVQKLEDKFKGLEFHHVERDRNTV

SEQ ID NO: 225059 - protein, 91 aa, Zea mays
  Clone ID: MRT4577_136845C.1.pep
IPPFSNNCSGILFHDLQIPFCVVIGWMMGQEMDLNFQLFETATLFITVLVVAFMLQEGTSNYFKGLMLILCYLIVAASFFVHVDPDATGDN

SEQ ID NO: 225060 - protein, 100 aa, Zea mays
  Clone ID: MRT4577_136846C.1.pep
LKALKCCILCHKRANMLKTDRSFYQDHHFTELEIGALKGSVICLRRSQLGSDGVRVQTVFLVHALIHCLYCIACECACVYKNVLLIACRRVHTLQSISSR

SEQ ID NO: 225061 - protein, 113 aa, Zea mays
  Clone ID: MRT4577_136847C.1.pep
SGDSEGHKNTGRVRRRGGESARVGGGVGHDGEGEAEEAHGEGDRREDRRGDDEPGRRQPQEVAGWLACLTAWGNSLRFQSHPPTRSTINQSTARPPACGVLLVCCCFLSLLYC

SEQ ID NO: 225062 - protein, 140 aa, Zea mays
  unsure (1)..(140): unsure at all Xaa locations
  Clone ID: MRT4577_136848C.1.pep
KKVRPYFPFNSFILKDEKQIRFWEDTWTGNKPLMLKFPSLYNIAHKKSDTVANVFNRIPLNISFRRALVGGNLLCWNRLVLRFAHTHLSTGRDEFKWNLLTSRXFYVRSMYNALINNAKIFYFNPLWKIKIPLKIKIFMW

SEQ ID NO: 225063 - protein, 144 aa, Zea mays
  unsure (1)..(144): unsure at all Xaa locations
  Clone ID: MRT4577_136849C.1.pep
RQMAYGLCPVIAKCDMRDAYHTAIRHMVDVPPSAETLNXKGGNMEMLHALFSLQKVLQLTTDNAALCTXVHCMRDGFPINQEMENENDISNDETSYKLQISALXPHAPCNCQVLGSADPPHTKDHCSKQEAPSTLYNRENCLMP

SEQ ID NO: 225064 - protein, 53 aa, Zea mays
  Clone ID: MRT4577_13684C.1.pep
SQPSQAASYPAQVRLSCPGRHQAKLSYEPQNSAVECPHSHQAPPASPHLAPNK

SEQ ID NO: 225065 - protein, 108 aa, Zea mays
  Clone ID: MRT4577_136851C.1.pep
MTGKAKPKKHTAKEIAAKIDAATTNRGGGKVGQADRLGQDKGGHAKLACPLCRTPAPDIKSMQIHHEARHPKLPFEPEKLVNLHSSTPAAAEATTSKPKPGVRGSLKK

SEQ ID NO: 225066 - protein, 77 aa, Zea mays
  Clone ID: MRT4577_136852C.1.pep
RGPFFCFLSARCTTVIRAAAGYYSDELISTAISAVSPERGTLAMDEPYATCVKRPSSIWLGHHGGEPPGLQAAFADI

SEQ ID NO: 225067 - protein, 73 aa, Zea mays
  Clone ID: MRT4577_136853C.1.pep
KKKKKKKRKRKFKKNNNPSKKIQNLQTHTYNKIKSSILSPKSNSLPLFLQLHNFKNPPLTQLNPLTLHPPFTN

SEQ ID NO: 225068 - protein, 49 aa, Zea mays
  Clone ID: MRT4577_136854C.1.pep
YIVVAIIGVKLNLLTPQRSGFYCIKMDRQKHLGLSRKDRMRNDASDPSK

SEQ ID NO: 225069 - protein, 117 aa, Zea mays
  Clone ID: MRT4577_136855C.1.pep
NNNPTGIFCILILLSLSSCISNTTISTQYSQPPITSLLTPYLPSITTSISKNPSLQPYKLQQANTSINLPLSPPFYQQSPNLSFLHSFLQTIKTQHLQQLALPIINQTNSSNLTPYY

SEQ ID NO: 225070 - protein, 188 aa, Zea mays
  unsure (1)..(188): unsure at all Xaa locations
  Clone ID: MRT4577_136856C.1.pep
RARLSAGSSDPSVIEDCYLVGKTVDGGLMCDAVIILFVGYCFGGEGHIIRGAYRDYYGEELVCSITDEIYGEFERTVSMXTLDPAEREXVLTNEATRTRKTENRVVAKIVXTRTSVHIFLIRQADDERFKRXLEEDIDEHVTGDLHKLLMPLARTYRYDGPEXHTRVAHSXAQLLDEESHHTANSDDE

SEQ ID NO: 225071 - protein, 96 aa, Zea mays
  Clone ID: MRT4577_136857C.1.pep
NFRVRQANMSGAALFFFFCFFFFFFYFFFFIGDVLILFWEAKGAKGRHYFIYILQNLGFRRCLFMSMYTRDLFYLYERLKSDPLDQLGRKLFFLVD

SEQ ID NO: 225072 - protein, 80 aa, Zea mays
  Clone ID: MRT4577_136858C.1.pep
ENPAPNCSGTMAPAVPNLGALKTLGHKATGLRRQTFEQIRGVLTTPQSARARLVISDTLSRQRALSSLWIARPRERIHPG

SEQ ID NO: 225073 - protein, 49 aa, Zea mays
  Clone ID: MRT4577_136859C.1.pep
EMHTTLSTNKVSHCLHRMLTPDKHEFLLPCSICKLWNYFTLKPENSFVD

SEQ ID NO: 225074 - protein, 159 aa, Zea mays
  Clone ID: MRT4577_13685C.1.pep
MLAKTLLQDEAKVLRHEPKWTSIKSPIMVSNLDAENGTDGGTINNSRPLGRKAEKENLQARKREDNDYDPFIEEMKKIRESRVQTDNNRKARDDMFLELEKHKLELEKEMEKQKLDLERDQHDKKVMETDTSGMDDEAKQYFKLLKQEILARRFGSPQP

SEQ ID NO: 225075 - protein, 77 aa, Zea mays
  Clone ID: MRT4577_136860C.1.pep
MACPRGRTPFPLCFFLMICLMAQLGASNVVLMANNTTLSVDDVEATFTPAVEGSGVSGVLYAVEPKDACSPLRAKAI

SEQ ID NO: 225076 - protein, 456 aa, Zea mays
  Clone ID: MRT4577_136861C.1.pep
MACPRAPAVEGSGVSGVLYAVEPKDACSPLRAKAIQGSVSPFALIIRGGCQFDDKIRNAQNAGFKAAVVYNNEDNDILVSMAGSSLGVQIYAVFISKASGEELKKYSGQTDAELWIIPTYENSAWPIMAISFVSLLAMSAILVACFFARRHQIRRDRARLPRAQESHGMSSQLVKAIPSLIFTKVQEDNCTSATCAICLEDYSVGEKIRVLPCRHKFHAACVDLWLTSWRTFCPVCKRDASAGTSDPPVSESTPLLSSSATRLPESTVLASLRSTAAASPPRTISRHPLLRSISRNYSVSGSSILRTPDSRFDANSSICTSGSNLDLANVPSPWSGTWHRASAHSLCRGYLSPPIGIRNTSAHVSRSANGSPSRYVGSSRMSHGSSGQQHPHLRHCTLSGPSLFTMVPQSPQQNQLQHGGYSETNLSAAASAQSFRQLYLQHCPDSDTSSQSLPGC

SEQ ID NO: 225077 - protein, 108 aa, Zea mays
  unsure (1)..(108): unsure at all Xaa locations
  Clone ID: MRT4577_136862C.1.pep
MACPGGRTPFPLCFFLMICLMAQLGASNVVLMANNTTLSLDDVEATFTPAVEGSGVSGVLYAVEPKDACSPLRAKAIQGSVSPFALIIXRGRWPFDDKIRNAQNAGFK

SEQ ID NO: 225078 - protein, 498 aa, Zea mays
  Clone ID: MRT4577_136863C.1.pep
MACPRGRTPFPLCFFLMICLMAQLGASNVVLMANNTTLSLDDVEATFTPAVEGSGVSGVLYAVEPKDACSPLRAKAIQGSVSPFALIIRGGCQFDDKIRNAQNAGFKAAVVYNNEDNDILVSMAGSSLGVQIYAVFISKASGEELKKYSGQTDAELWIIPTYENSAWPIMAISFVSLLAMSAILVACFFARRHQIRRDRARLPRAQESHGMSSQLVKAIPSLIFTKVQEDNCTSATCAICLEDYSVGGTRRVLPCRHKFHAACVDLWLTSWRTFCPVCKRDASAGTSDPPVSESTPLLSSSATRLPESTVLASLRSTAAASPPRTISRHPLLRSISRNYSVSGSSILRTPDSRFDANSSICTSGSNLDLANVPSPWSGTWHRASAHSLCRGYLSPPIGIRNTSAHVSRSANGSPSRYVGSSRMSHGSSGQQHPHLRHCTLSGPSLFTMVPQSPQQNQLQHGGYSETNLSAAASAQSFRQLYLQHCPDSDTSSQSLPGC

SEQ ID NO: 225079 - protein, 65 aa, Zea mays
  Clone ID: MRT4577_136864C.1.pep
KPPNFKTKTSKFKTEFFPNRLSKLLNRPGMLLGTPFGTSPDNFGPVILLPNQGCAVQVKTAQALP

SEQ ID NO: 225080 - protein, 41 aa, Zea mays
  Clone ID: MRT4577_136865C.1.pep
IMYRTSSWVFASFQASEGLCIEAVYGMLVLITSHPLRVRIK

SEQ ID NO: 225081 - protein, 208 aa, Zea mays
  Clone ID: MRT4577_136866C.1.pep
MAASALHQTTSFLGQALVSRAAGVDAGGRITMRRTVKSVPQSIWYGPDRPKYLGPFSEQTPSYLTGEFPGDYGWDTAGLSADPETFARNRELEVIHSRWAMLGALGCVFPEILAKNGVKFGGPLGEGLDKVYPGGAFDPLGLADDPDTAAELKVKELKNGRLAMFSMFGFFVQAIVTGKGPIENLFDHVADPVANNAWAYATNFVPGN

SEQ ID NO: 225082 - protein, 157 aa, Zea mays
  Clone ID: MRT4577_136867C.1.pep
MSKTNMKFCNSYFLVDPTKARFLDLLLLLFSSNLTSARFIDSPPDTLKGFRRSFASRWILALAIFLQKVLMLLSKPFAFIGQKLTYWLNLLTANGGFFNLILNLMSGKLVKPDKSSATYTSFIGCSDRRIELDEKINVGSIEYKSMLSIMASKISYE

SEQ ID NO: 225083 - protein, 145 aa, Zea mays
  unsure (1)..(145): unsure at all Xaa locations
  Clone ID: MRT4577_136868C.1.pep
QTRHRFVLSTMYWRGLPRSPARNNPQKDKRXRVSSSLSVLPPKDPPPPRGVGEKPLSPRVSVHIRGPFLEVFQHRLSKRLRATGWGHAIRGPKFFFFQDTVPPWYTFFRGKVGHGSSLINLPQVLLLNNIQKDQKKNNKAKKPQN

SEQ ID NO: 225084 - protein, 160 aa, Zea mays
  Clone ID: MRT4577_136869C.1.pep
MAASALHQTTSFLGQALVSRAAGVDAGGRITMRRTVKSVPQSIWYGPDRPKYLGPFSEQTPSYLTGEFPGDYGWDTAGLSADPETFARNRELEVIHSRWAMLGALGCVFPEILAKNGVKFGFFVQAIVTGKGPIENLFDHVADPVANNAWAYATNFVPGN

SEQ ID NO: 225085 - protein, 83 aa, Zea mays
  Clone ID: MRT4577_13686C.1.pep
IGSYLDLNRLCRRPVAIDDSDTARSYSVGSISSSVVCPVTSWIGRNKSVCSCIMTVYLNTLTLGTFICTVLEMQGIRSISAGY

SEQ ID NO: 225086 - protein, 260 aa, Zea mays
  unsure (1)..(260): unsure at all Xaa locations
  Clone ID: MRT4577_136870C.1.pep
MAASALHQTTSFLGQALVARAAGVDAGGRITMRRTVKSVPQSIWYGPDRPKYLGPFSEQTPSYLTGEFPGDYGWDTAGLSADPETFARNRELEVIHSRWAMLGALGCVFPEILAKNGVKFGEAVWFKAGXQIFSEGGLDYLGNPNLVHAQSILAIWACQVVLMGFVEGYRVGGGPLGEGLDKVYPGGAFDPLGLADDPDTAAELKVKELKNGRLAMFSMFGFFVQAIVTGKGPIENLFDHVADPVANNAWAYATNFVPGN

SEQ ID NO: 225087 - protein, 66 aa, Zea mays
  Clone ID: MRT4577_136871C.1.pep
SYEYISPTNKSQQHPKHKNSMVLRKITKRRKGRTQEQKTLKIQQGYKLTKLKPTDKCGPIRRSFLK

SEQ ID NO: 225088 - protein, 61 aa, Zea mays
  Clone ID: MRT4577_136872C.1.pep
LVLELFSNLLDKLLGRGPALRSNQVLRLNHIRADGRLELQLGTTFLKIVIPTVRKESLKTG

SEQ ID NO: 225089 - protein, 227 aa, Zea mays
  Clone ID: MRT4577_136873C.1.pep
ELTCVLAACCRYGPDRPKYLGPFSEQTPSYLTGEFPGDYGWDTAGLSADPETFARNRELEVIHSRWAMLGALGCVFPEILAKNGVKFGEAVWFKAGAQIFSEGGLDYLGNPNLVHAQSILAIWACQVVLMGFVEGYRVGGGPLGEGLDKVYPGGAFDPLGLADDPDTAAELKVKELKNGRLAMFSMFGFFVQAIVTGKGPIENLFDHVADPVANNAWAYATNFVPGN

SEQ ID NO: 225090 - protein, 261 aa, Zea mays
  unsure (1)..(261): unsure at all Xaa locations
  Clone ID: MRT4577_136874C.1.pep
MAASALHQTTSFLGQALVARAAGVDAGGRITMRRTVKSVPQSIWYGPDRPKYLGPFSEQTPSYLTGEFPGDYGWDTAGLSADPETFARNRELEVIHSRWAMLGALGCVFPEILAKNGVKFGEAVWFKAGAQIFSEGGLDYLGNPXNLVHAQSILAIWACQVVLMGFVEGYRVGGGPLGEGLDKVYPGGAFDPLGLADDPDTAAELKVKELKNGRLAMFSMFGFFVQAIVTGKGPIENLFDHVADPVANNAWAYATNFVPGN

SEQ ID NO: 225091 - protein, 64 aa, Zea mays
  Clone ID: MRT4577_136875C.1.pep
MGWKVKNKARSTEDVDRINLSQKQGIQSVSFSWTRDANRSVEDMEVLGKLEPPDTLKCYELTTT

SEQ ID NO: 225092 - protein, 172 aa, Zea mays
  Clone ID: MRT4577_136876C.1.pep
ESSLRLPLKSVEMTLVALCRPRRRRRLSQRVRGGSVAAVFATEAAVVAVTQTTGRAAIAAHAAEQLPRSRMQAAIDASVAADLVEGWDGYLARDKHLARVETWIRACQQAAAEDPRHRLDTTSTAVLSRLGRREDGVGRARTSQPGSGRAGAGRRRGVAGAGGRLPAGLEVP

SEQ ID NO: 225093 - protein, 371 aa, Zea mays
  Clone ID: MRT4577_136877C.1.pep
MDPFHGIVKEEFDLDFDFTCASAAAAAAASWAVALPEMPRPMEGLGEVGPTPFLTKTYDVVDDPNTDTIVSWGFAGTSFVVWDANAFALVILPRYFKHSNFSSFVRQLNTYGFRKVDPDRWEFANEGFQRGQRELLRTIKRRRPPSSPSAQQGQAPSACLEVGQFGLDGEVHRLQRDRGILLAEVVKLRQEQQATRAQMQAMEKRITTAEQKQQQMTVFLARAMKNPSFIRMLVDREGLGGCRRELEDALSRKRRRPIEYLPRDGERSGTATESAVSDYISGLPVGVNGVAEADDDERRWERRGGGGGGEDTESFWAKLLNLGLEEKHREGRCDGEEGNGADVDNDVDDDVDVLVQSIYHLNPNPGSPGGK

SEQ ID NO: 225094 - protein, 52 aa, Zea mays
  Clone ID: MRT4577_136878C.1.pep
NSNEAFVCCPHRLAIWDAGDNSTSQFSGTTRSPLQSGSAENIACSVMATDKV

SEQ ID NO: 225095 - protein, 68 aa, Zea mays
  Clone ID: MRT4577_136879C.1.pep
RVAGVAAGCCPLGGAACALVCVVPASPCGFRAVSPGCLLLQLGLLAGGGLGGSLWRPPLLAACVLAAS

SEQ ID NO: 225096 - protein, 157 aa, Zea mays
  unsure (1)..(157): unsure at all Xaa locations
  Clone ID: MRT4577_13687C.1.pep
MAHRVLLLLSLAAVAALPAAAPVKDPMIREEVPGGDDHDLXLNERVHFLSFVQRSGKYYQDADEYAYRXLFVFKVNLLRARHHQLLHQSAEHEITNISDLTHADLRRELLRTSSGHSEILLRELQGAFLTTGQNSTTMVLPQGFTMNRIAADRDLRP

SEQ ID NO: 225097 - protein, 89 aa, Zea mays
  Clone ID: MRT4577_136880C.1.pep
QANRLMHQTTVRYGPRPSPSRGDSQTRPKCIFLCHTSTLIATTVIDYQCMCCCNISASNRDNITYAIVISRACISRHPQCANNRTAQQV

SEQ ID NO: 225098 - protein, 96 aa, Zea mays
  Clone ID: MRT4577_136881C.1.pep
THTHKNPRTKSFLFWNSALHLHHHQWVPRVLHFAATCIAWGQKKHQLPPTKEKKMAAFFFWGLAWLPPKKKRPSPLAQGSADPFSCRGSGWAKKEL

SEQ ID NO: 225099 - protein, 48 aa, Zea mays
  Clone ID: MRT4577_136882C.1.pep
QMFLPFGFVSFDNPASAQTAIQAMNGFQIGMKRLKVQLKRPKDANRPY

SEQ ID NO: 225100 - protein, 217 aa, Zea mays
  unsure (1)..(217): unsure at all Xaa locations
  Clone ID: MRT4577_136883C.1.pep
RLLGYCVXEGVNRMLVYEFVNNGNLEQWLHGAMRQHGVFTWDNRMKVVIGTAKALAYLHEAIEPKVVHRDIKSSNILIDDEFNGKVSDFGLAKMLGSDKSHITTRVMGTFGYVAPEYAXTGMLNEKSDVYSFGVLLLETVTGRDPVDYSRSSNEVNLVEWLKMMIANRRAEEVVDPILEVRPTIRALKRALLIALRCVDPDSEKRPKMGQVARMLES

SEQ ID NO: 225101 - protein, 154 aa, Zea mays
  Clone ID: MRT4577_136884C.1.pep
MPLAPPQGIPTAGADPDGDVDDNDAGGSSSHNTELSEEQHRRGLYPDHWEASSLVHHPDNDLRGAEAFSEHYSITERDTAEVAMQDAARHALSQYCSLFSGAADGLDLKYYPRRSTGSAGGVIVSPVGEDNPRLNSMVNLVVVLNTELDHALTS

SEQ ID NO: 225102 - protein, 155 aa, Zea mays
  unsure (1)..(155): unsure at all Xaa locations
  Clone ID: MRT4577_136885C.1.pep
TALLPQYMLTRMASICGENPKGDPYRIQQAVEPGLLPLXTRALQXTSALLHEWTLWCSLVAQNIKAHHLQQLELTNLAAYSQHHQLIAYNQLAASNYASXDSQQQLPFNQLGADYHHSLLXSNQLASWNSAAYAQQQQLLPCSQLADVSPATLLT

SEQ ID NO: 225103 - protein, 99 aa, Zea mays
  Clone ID: MRT4577_136886C.1.pep
YIESGRHGVCLFQDVTEIVCWALTAAMTRATYAKHCHNAGCADSVLDIIGVYLSCNVCFMGGHTELKDVVSGHRSCYTHNIHHQFNRNLDIDLLWHVHN

SEQ ID NO: 225104 - protein, 146 aa, Zea mays
  unsure (1)..(146): unsure at all Xaa locations
  Clone ID: MRT4577_136887C.1.pep
RSPYKEERSVGSQKICGTSXKDVYKCXVDQYPIVLMEDPLDQTRXLHYPKMTNAIGEKAQIVGDDLVLTNPTRVTQAITEKSFNALLLKANQIXSATESIDGVKTXRRAPWGVMTSYRSXDLXDTFIADQADWLNTLQINTGAPCT

SEQ ID NO: 225105 - protein, 58 aa, Zea mays
  Clone ID: MRT4577_136889C.1.pep
NVWLGLPLFKGILAVFFFPPDYWYSIRVSLAQGSFGIFVSYKVSMLSRCGYIFFVFRV

SEQ ID NO: 225106 - protein, 66 aa, Zea mays
  Clone ID: MRT4577_13688C.1.pep
IFLHEEHLLIFLPDHMPVKVYVLRWSWGGSGRMHFPPMLGQNVLTIFWIYDYLASHYPVHKKPSIL

SEQ ID NO: 225107 - protein, 166 aa, Zea mays
  Clone ID: MRT4577_136890C.1.pep
MASSTASSGPVFDNPPFPRHHSHRRVTKPPASRFVALHPRLSSATSPGTVVGVRTRTTTLKTGQVLVLWLKATIVSSSADGSGYGVVYDGNWPQDDPKSTVYVAPLQVRLFSPSPSPTTPPPSLPPPTATVAATTRKKDRPRPTTAGKSLRLMRSLFPEMEFPTRA

SEQ ID NO: 225108 - protein, 74 aa, Zea mays
  Clone ID: MRT4577_136891C.1.pep
IHFTPSPHGFCPPLVKKGHLPLAPNNSSPPQGGPFFQRKGEKNLEYLPLRGPRFFFFSSPGNCVSRFFYQGRPL

SEQ ID NO: 225109 - protein, 232 aa, Zea mays
  Clone ID: MRT4577_136892C.1.pep
MVMHLYSRSSSAGMRSIRRELQRRRSKPLAPTGSVAKMPSASRHASSGGGVRDPWPRPPHRAAPSSTIRHLRGTTATDASPHRRPRASSRCTPASPPPPRSAPSPGVPAHLKPGTVVGVRTRTTTLKTGQVLVLWLKATIVSSSADGSGYGVVYDGNWPQDDPKSTVYVAPHQVRLFSPSPSPTTPPPSLPPPTATVAATTRKKDRPRPTTAGKSLRLMRSLFPEMEFPTRA

SEQ ID NO: 225110 - protein, 78 aa, Zea mays
  Clone ID: MRT4577_136893C.1.pep
VTPIFLVPHSVDDKQASLSFKGSGICLGQLSAEMISKPITPLFLGFSLMATDTNDSHPTSTPGCKSFEQLNDSAGHHF

SEQ ID NO: 225111 - protein, 88 aa, Zea mays
  Clone ID: MRT4577_136894C.1.pep
SGHTGGCFLCPGRARSSAGSRWSNGSSWVCVQTGVLESFIRCVPGHRYQPAYWIAISADGSPASFLDLLCPCWKQKKLFPVDYYAYDA

SEQ ID NO: 225112 - protein, 78 aa, Zea mays
  Clone ID: MRT4577_136895C.1.pep
ADGENDRTVKSITQLLFETSLLVSGFTIEEPASFAERIHKLVSLGLNVDEDAETAEEKAAEEAPAAEATGESAMEEVD

SEQ ID NO: 225113 - protein, 199 aa, Zea mays
  Clone ID: MRT4577_136896C.1.pep
MFRNNYDNDSVTFSPQGRIFQIEYAAEAVKQGSVVVGIASKTHAVLCAVKRNAEELSSYQKKLFTVDEHAGIAIAGLTSDARVPSNFMKQQCLGHRLTYGRAIPLRSLVDMIGEKAQMNTQMYGKRPYGVGLLVAGVDERGPHLFEFQPSGMTEEMLAFAIGARSQMARTYLERNIDAFADCSKEELIQHGLKALERES

SEQ ID NO: 225114 - protein, 51 aa, Zea mays
  Clone ID: MRT4577_136897C.1.pep
PCRAAIDHLNKAVQTTSSLTWRRYFMYKNSPAIRYLPPWENRTPRGDYLDG

SEQ ID NO: 225115 - protein, 226 aa, Zea mays
  unsure (1)..(226): unsure at all Xaa locations
  Clone ID: MRT4577_136898C.1.pep
IRHEATATLRLQGCIQGLPLLILLDSRSSHSFLNAALSSSLHGVSSLHQPLSVRVANGNILHCTSQLYKAVWSVQNIQFQSDLKLLHLPCYDLILGSANCYIWSATFGPFWLSVGDQATRNFGSYITTAVCLCTLSEAEVPVPVHQILCTFQSLFEEPTSLPPSMFCDHTIPLIAGVRPVNIRPYWFSPVMKDEVETQVSDMLRSGLIRPSXSAFYSPVILVKKKD

SEQ ID NO: 225116 - protein, 83 aa, Zea mays
  Clone ID: MRT4577_136899C.1.pep
HHLKMALRLPCHPMHWERYHTPPIGLSHVKPPLFLTPHPQYDCPTGAVVSCHKIMDLPSLHCWNSNITRQKLTSFLLPENSNE

SEQ ID NO: 225117 - protein, 88 aa, Zea mays
  unsure (1)..(88): unsure at all Xaa locations
  Clone ID: MRT4577_13689C.1.pep
HSLFFTXYIYYIKVLFLSGSYKSHELLFIFLHLHLHLRLCLDKIQIPSVLIHFIFIYKKPQXCSISLLMLTLSHSVLINPPKLTLSHL

SEQ ID NO: 225118 - protein, 44 aa, Zea mays
  Clone ID: MRT4577_1368C.1.pep
KLHRFTGENFKTRWKREHAFDFLTQLLLVSICTWEDQLGGGSGT

SEQ ID NO: 225119 - protein, 74 aa, Zea mays
  Clone ID: MRT4577_136900C.1.pep
FAGGINGERSEIAEIEPASPYEVARLKPPLEDIKGELAHLKGEHVCASRILFIRAPSRNPRIRIGQLDLFISVP

SEQ ID NO: 225120 - protein, 44 aa, Zea mays
  Clone ID: MRT4577_136901C.1.pep
SYLLRHLAKDGSCPKRFSLVTPWFWQPQRCTSPASEMHLAVTIN

SEQ ID NO: 225121 - protein, 76 aa, Zea mays
  unsure (1)..(76): unsure at all Xaa locations
  Clone ID: MRT4577_136902C.1.pep
MAFAPKTFSFSSLSSALEAAQSSPLLLMRMFSTATPRLRYYSVVVVTTTTTARAAAAAVTVPTSPAYAXLRRLCHQ

SEQ ID NO: 225122 - protein, 416 aa, Zea mays
  Clone ID: MRT4577_136903C.1.pep
MAFTTLGGCGAQASVRLAPQNGILGSNSKPFAGIILKKPQQVGSLPLRARGSIFSSPRRLFSPKAAAPKSGDSIRIAVLGASGYTGAEIVRILANHPQFHIKVMTADRKAGEQFGSVFPHLITQDLPRLVAIKDADFSDVDAVFCCLPHGTTQEIIKSLPRHLKIVDLSADFRLRDINEYAEWYGHSHRAPELQGEAVYGLTELKRDDIRNARLVANPGCYPTSIQLPLVPLVKAKLIKLTNIIIDAKSGVSGAGRGAKEANLYTEIAEGIHAYGITSHRHVPEIEQGLTDAAESKVTISFTPHLMCMKRGMQSTVYVELASGVTPRDLYEHLKSTYENEEFVKLLHGSNVPCTSHVVGSNYCFMNVYEDRIPGRAIIISVIDNLVKGASGQALQNLNLMMGLPENMGLQYQPLFP

SEQ ID NO: 225123 - protein, 171 aa, Zea mays
  unsure (1)..(171): unsure at all Xaa locations
  Clone ID: MRT4577_136904C.1.pep
PASAPRPLSSLPPVTTTVGVGPGWPRPPHCSAXSPGITLLLINLSGNATARVSVTAQGAAAAHAHRHRHGARKHGGGRKFRHVHVHVPGFAGGGEAAAGAVRHEYHLTPKDGDLTSQVVMLNGRALATDAAGEXIPALEAVEVDAARPIAVTPYSIVFARVPHFSAPPCRV

SEQ ID NO: 225124 - protein, 153 aa, Zea mays
  Clone ID: MRT4577_136905C.1.pep
IGYLEAGRSAVVVSSPPSPSLSPSPSLSPPSPSCSPSRGSRAPLPPTKTSRGSHTRRVLHDLDLVLFAFLVGLLLGEAAAGAVRHEYHLTPKDGDLTSQVVLLNGRALATDAAGNIPALEAVEVDAARPIAVTPYSIVFARVPHFSAPACRVE

SEQ ID NO: 225125 - protein, 51 aa, Zea mays
  Clone ID: MRT4577_136906C.1.pep
SFSYVPTILPSLLSMPTYTTSGRVLLHARPSFTSNTKYLHADTDYTTITMI

SEQ ID NO: 225126 - protein, 175 aa, Zea mays
  unsure (1)..(175): unsure at all Xaa locations
  Clone ID: MRT4577_136907C.1.pep
MPPLVPSQLLPPIPTLILPAPPRLSCRRRRHPPAPXPRRRPPPRPRTPGXIPPPPPPXAQRQTPTPAPRPSSQPKPPPRHANXPRPALGARRSWRRRSATSCAAPPSREPSPPARSSSRRAAPTSRMPSRPAGAGSPSAGPPPPRRGPRRWLRRAHRAGATLTTRLRRACITVVT

SEQ ID NO: 225127 - protein, 51 aa, Zea mays
  Clone ID: MRT4577_136908C.1.pep
WITRPPLQPYRPISFFPLTLGRCRTGDATEASLLWRSMTYIQGDNDATLED

SEQ ID NO: 225128 - protein, 103 aa, Zea mays
  Clone ID: MRT4577_136909C.1.pep
MATHALDKQRQTANRTVGTTPRLHPSATRSNDGARAESSHGQRQPPRRGQAAPDDPSPASFTPRDTGCQVTAHGFLSLFLLIVSRLAHKKTFRKIASSQQRIP

SEQ ID NO: 225129 - protein, 108 aa, Zea mays
  unsure (1)..(108): unsure at all Xaa locations
  Clone ID: MRT4577_13690C.1.pep
RHKKHTKLPTLAAKIYRLLMRRGLSASAVTFNISPQWPQSFITAHLLPDLSPTRSSRWENPSLQXYQIHQATGYCMLPLXALYIHQSSNLLHQPPLMYILAPYIRAQH

SEQ ID NO: 225130 - protein, 78 aa, Zea mays
  Clone ID: MRT4577_136910C.1.pep
MGLWTLLEGFLLLANALAILNEDRFLAPRGWSMSEVSGNGQTKSLKGQIVGLIYATQFLRMPLIALNVLIIVVKLVSG

SEQ ID NO: 225131 - protein, 157 aa, Zea mays
  Clone ID: MRT4577_136911C.1.pep
MALTVLETTEQQLLPCQQSVEHGAGDGGNGKAAAAGAEKATVMLKETGHGGDVDRPDRDDIWSMIQAQKPPPAAPRQAQAPAPYVHPLARRSSGLLTQKSLETCTESLGSETGSDGFSDADDSATDRSCTGCGDDERGEEEEVGGPARGPAQVVPAA

SEQ ID NO: 225132 - protein, 46 aa, Zea mays
  Clone ID: MRT4577_136912C.1.pep
DNDIRPAGPEAAHKIMITTLRVGQRCMVEPKDNLVSKDPAIIAMKG

SEQ ID NO: 225133 - protein, 126 aa, Zea mays
  Clone ID: MRT4577_136913C.1.pep
TLVLFFLLGWRQPQGPPTEINAKMAGKRALPIRGAARKTSEKKDQKKGPLGDKKTRRKRHRARNKRKKKPRGKVRNIFTPTKAKKLVLRPPRFHYEGANAAPTKFSKPPTISRAHHPSAFFRAPPL

SEQ ID NO: 225134 - protein, 57 aa, Zea mays
  Clone ID: MRT4577_136914C.1.pep
RASLSSKVTDCTSQRATMCPSHPVLTLYLSYLTPTATEFLMTKIYTNSLFLTTAMLL

SEQ ID NO: 225135 - protein, 89 aa, Zea mays
  Clone ID: MRT4577_136915C.1.pep
VNDQAVQIYEDAVTFHIRSHQRLSTSCQDSAASSLCYLNMEQLTKCLLSLYDMYHVLHKCDSHSKKEAEYYSFYVLLHLGCKIHKMIDS

SEQ ID NO: 225136 - protein, 122 aa, Zea mays
  Clone ID: MRT4577_136916C.1.pep
AWNHWADLCSLLMCNVYAPVRCVLTYTYRCTTVLQCTSNEPNDPHNDFILRRNICFVAEDTPYRKIPTTAFFDSLHVGCAYPHNTYPYGYHIAQYLKALPKMNVPYINTNIDGSTLADTTQD

SEQ ID NO: 225137 - protein, 267 aa, Zea mays
  Clone ID: MRT4577_136917C.1.pep
MEKTSESAIPPAASPLMLFGSWASSYTHRVQLALRLKGLEYDYVEEDLGNKSDELLRHNPVHKKVPVLVHGGRALPESVIILQYLDDAWPETRPLLPADAFDRALARFWCHFADDKLGPAVGAVFASTGEGQEAAVRQVHENLALIESELRDGAFRGRRFFGGDEVGLLDVVLGCGSYWLAVFEEVTGVRLVDADAFPRFHAWLRDFEALDEVRETIPAVDRLLEYARGLRHMLLGLAGAGAGAGADAPSTDAPAAPPASADIAVDI

SEQ ID NO: 225138 - protein, 70 aa, Zea mays
  Clone ID: MRT4577_136918C.1.pep
SVTVQTNEFVGPVGKGFYLASRNCCFQIFLPSSFFSRNRVSLNTIFYSAHLTTKSLFPAIFSEKTNSSHL

SEQ ID NO: 225139 - protein, 74 aa, Zea mays
  Clone ID: MRT4577_136919C.1.pep
SVLRRERRPFCFFFAGITGTIVYMLIKNRLLIYTVREKEHACESYALPTFLCVYYYRYIGRIIRLRLTTTLPYL

SEQ ID NO: 225140 - protein, 85 aa, Zea mays
  Clone ID: MRT4577_13691C.1.pep
PLLPPFLNKARVWQKEPVSYMQICCPKNQVARCFRFLKKFLNPLFPSDLLQFFLLEFFSFLFLTQSTHFCINSNQKRKSCVVLTK

SEQ ID NO: 225141 - protein, 47 aa, Zea mays
  Clone ID: MRT4577_136920C.1.pep
MVWLDYGREGKYRESFNLKLVSFNIAWIVLLSDCMKYSDCMKYRKTS

SEQ ID NO: 225142 - protein, 46 aa, Zea mays
  Clone ID: MRT4577_136921C.1.pep
GVNLLPSNSSSNESSSANSILSINNLPTVAAFQSLAKVQRGAGKKA

SEQ ID NO: 225143 - protein, 102 aa, Zea mays
  Clone ID: MRT4577_136922C.1.pep
GEQKPLLIFFLARFLGGATQADHRGPTPFPKGKTAPAPFSEATGPRAFHRKKSSPNPRRGQTSIPSRGRGPPRPSPPRNLFPPRGNGNGPPLPPPLPPPPSG

SEQ ID NO: 225144 - protein, 44 aa, Zea mays
  Clone ID: MRT4577_136923C.1.pep
GTGPHQKNVNICTKGKCFYSQGLGLNTPPTCGKGGLTPQQQGEI

SEQ ID NO: 225145 - protein, 50 aa, Zea mays
  Clone ID: MRT4577_136924C.1.pep
RGNPRYGFLHISFNVALPSQRFQPVYASSLMWAESMRKLVFINTAARVKL

SEQ ID NO: 225146 - protein, 183 aa, Zea mays
  unsure (1)..(183): unsure at all Xaa locations
  Clone ID: MRT4577_136925C.1.pep
MVQASEVLSRETGVIVGDDILALFKHAQSEGYAIPAINVTSSSTVVAALEAARDAKSPIILQLSNGGAAYFAGKGVANGKQEASIAGSIAAAHYIRSIAPAYGIXXVVLHTDHCAKKLLPWLDGMMDADEAYFKAHGEALFSSHMIDLSEEPKEWNIATTKKYLERAAPMKQMIEMEIGITGG

SEQ ID NO: 225147 - protein, 165 aa, Zea mays
  unsure (1)..(165): unsure at all Xaa locations
  Clone ID: MRT4577_136926C.1.pep
ATIPTKEAVGDEDDPPRTSRYAEGGPIPPLSXAAGTAVENMYHVEAAIMGPSDTPYSAGDLLXTLHSTAHSSCKPPTVXLASMVHHSNIIEGXAIRLDMLKDSWNPALSLSKALLSILLLVTDPDHYTPLLPKIADISKTDRTKYDITVRTWAQRAAMYYFVYLA

SEQ ID NO: 225148 - protein, 124 aa, Zea mays
  Clone ID: MRT4577_136927C.1.pep
PGPRSHSQAHHTPSPSITPTRAHGRSAGPHVRRAAGELRPPEPALDPLEFLSRSWSASGRAPTPTPPPPPVALAVSPIAEDAACELDDGGVVAAASGSSFSFASAATSQLIMERILAQSVRALP

SEQ ID NO: 225149 - protein, 121 aa, Zea mays
  Clone ID: MRT4577_136928C.1.pep
TTAHVLFYPQRAWHMRCTLSSPAPAPDSTHICNEATVREPRFSNELLILHDQRALGKQSSEPKLPHSPYYRAQITVLHTSWILSNIHPRYLWLTVRLHWTWLPEAGILCPPRQPLLGKHSL

SEQ ID NO: 225150 - protein, 85 aa, Zea mays
  Clone ID: MRT4577_136929C.1.pep
GLAAKKYLNFFGFDFGICSKQGKNYPFFFGPNYQNLPWGTGETKSGNETEKEKGKEEGDLNRYCFRPKHPNFKSCKKHGSRGSSS

SEQ ID NO: 225151 - protein, 523 aa, Zea mays
  Clone ID: MRT4577_13692C.1.pep
MAGKGKEVYVAAIDQGTTSTRFIVYDRHAKPVASHQLEFKQHYPEAGWVEHDPMEIIETVKVCMKEAVGKAKAGKHNVVAGLKAIGITNQRETTVMWSKSTGRPLYNAIVWMDARTSPVCRRLENELSGGRTHFVETCGLPISTYFSALKLLWLMENVDAVKDAVRTGDALFGTIDTWLIWNLTGGVAGGQHVTDCSNASRTMLMNLKTLDWDKPTLAVLGVPVEILPKIISNSEKIGVVAKEFPFAGVPISGCLGDQHAAMLGQLCQKGEAKSTYGTGAFILLNTGEEPTQSSHGLLSTIAYKLGPAAPTNYALEGSIAIAGAAVQWLRDSLGIIQSAAEIEKLAETVPDSGGVYFVPAFNGLFAPWWRDDARGICIGITRFTNKGHIARAVLESMCFQVNDVLSSMHKDAGEAGEVKSAEGEFLLRVDGGATVNNLLMQIQADLLGSPVVRPADIETTALGAAYAAGLAAGVWTKEKVFAGLHKENTTVFRPKLDEAHRKKRADSWYKAVSRSFDLADLSL

SEQ ID NO: 225152 - protein, 49 aa, Zea mays
  unsure (1)..(49): unsure at all Xaa locations
  Clone ID: MRT4577_136930C.1.pep
HTFVHAFXNTDAVRSHTAYYPELSTISASRAPTANQAVDMCLYKRATMG

SEQ ID NO: 225153 - protein, 90 aa, Zea mays
  Clone ID: MRT4577_136931C.1.pep
VPWASGRMAKPLRNKTKLLCLKLSSMERTIARLRSRIRFVKDGDANTSFFQAHARFSKKEKLYSFFGDGGAVANFSGRQFYNGTTETITE

SEQ ID NO: 225154 - protein, 177 aa, Zea mays
  Clone ID: MRT4577_136932C.1.pep
MHLTETRERKCVLDKTTAHSVTNSIRATGAPNGFCGHKIFVTDAIPSGDVYVTACMKTEKTLDDSHVTFITMPDVAHGEVKQLRIGVQSKILMYNHEDKDATLADLSPEGIDDSENIPVKQRQCHKNHLSPDGTIATWFSDSAVKGLGYKPNDAASYSDGCKNSKPEPKIQGRLLRL

SEQ ID NO: 225155 - protein, 85 aa, Zea mays
  Clone ID: MRT4577_136933C.1.pep
LVPGSLLCLAFVVSGPACLSPSPFSLVSPSVCGFFVPLLFWLWFLRSGCSCVPFASLLVLSPRVPGRGSVLFSTLCPLGRVCVID

SEQ ID NO: 225156 - protein, 172 aa, Zea mays
  unsure (1)..(172): unsure at all Xaa locations
  Clone ID: MRT4577_136934C.1.pep
QNGHVSHALKVMDLMLXEGHDPDVFTYNTVINCRGKNGELDEAKGIVNQMVDRGCLRDTTTFNTLIVALCSQNRLEEALDLARELTVKGLSPDVYTFNILINALCKVGDPHLGIRLFEEMKSSGCAPDEVTYNILIDHLCSMGKLVNALDLLKEMESNGCPRSTVTYNTIID

SEQ ID NO: 225157 - protein, 41 aa, Zea mays
  Clone ID: MRT4577_136935C.1.pep
FDHTYCDEVIKLYFYLLNKIHFSPLFSWFYFQVRLWILWIH

SEQ ID NO: 225158 - protein, 130 aa, Zea mays
  Clone ID: MRT4577_136936C.1.pep
VIGILKSKVIRGTKLAVRDLMSSDPYVVLTLGQQKAKTSVSKRNLNPVWNEELKLSVPQQYGPLKLQVFDHDMLSKDDEMGDAEIDLQPMISAATAFGDPDLLADMQIGKWLKSPDNALARDSAVNVVCG

SEQ ID NO: 225159 - protein, 319 aa, Zea mays
  Clone ID: MRT4577_136937C.1.pep
MTRKLRELLQKSDNRVCADCGAPDPKWASANIGVFICLKCSGVHRSLGTHVSKVLSVTLDQWTDDEINSMIEVGGNSYANAIYEAFLPEGYQKPHPDSSQEERADFIRSKYELQEFLKPSLRLVSSNKGSLEATSTSSRKHKDNTVSLSASFSSEAGMVEFIGILKVKVIRGTKLAVRDLMSSNPYVVLNLGQQKAKTSVSKCNRNPVWNEEFKLSVYQQCGPLKLQVFDHDMLSKDDEMGDAEIDLQPMISAATAFGDPDLLADMQIGKWLRSPDNALARDSAVNVVGGKVKQEVSLRLQNVESGEVELELEWIPLNQ

SEQ ID NO: 225160 - protein, 58 aa, Zea mays
  Clone ID: MRT4577_136938C.1.pep
PTGSKSRQSYPSWLIALLQTQSGRRRTRTGSRPHNLSPGKSGFKVSLWAPLVAARKPT

SEQ ID NO: 225161 - protein, 157 aa, Zea mays
  Clone ID: MRT4577_136939C.1.pep
PFLWVLREDNRRSEGAGADAATLDGGGRGMVVGWCDQVRVLSHPAVGCFVTHCGWNSTLESTACGVPVVCVPQWTDQGTNAWLVERIGTGVRAAVSDKDGVLEAGELRRCIDLATSDMVRDKAAVWREKARAAASKGGSSERNLKAFVAKQIAGGNN

SEQ ID NO: 225162 - protein, 65 aa, Zea mays
  Clone ID: MRT4577_13693C.1.pep
WGLGGLDQFITKNATLTYGNETFPCSIRSMNFSVFLCCACCFSMQGCLFPYQASFKFLAHNIVLF

SEQ ID NO: 225163 - protein, 86 aa, Zea mays
  Clone ID: MRT4577_136940C.1.pep
SASCCDCSLCLAIFPCEFVPVLRSVCQSAVMPLFMYFLYRILAGILQFAIPPSAGVAVRCEVDGFLADVGLLSFCVYFAFLWVICQ

SEQ ID NO: 225164 - protein, 119 aa, Zea mays
  Clone ID: MRT4577_136941C.1.pep
ISSQFLSSVLMASNFVDTGAEEGRFHGHPPSSTPTSAAGLPKTLRRSLLSALNPGHGAPPKWVWAPATHAGSFKCRLPRSSFPGHGHGSKRGSPPFPAPFASGPPPAAAGSSFRPVAGQ

SEQ ID NO: 225165 - protein, 226 aa, Zea mays
  Clone ID: MRT4577_136942C.1.pep
MAAAARRAIPLVLIFLVSAPLYAADASAAAAGAGANSSSFLLAAEQTQRKDPLDGLRYYTGGWNISDEHYWASVGFTAAPVFAAAAVWFVVFGIGLFIAGCCFCCCPGAGDAYSRACLCVSLVLLLVATAAAAVGCAVLYDGQGRFHGSTAATVDYVVRQSGDTVANLQRFTGFLETAKAAGVGPVALPDDVKGRIDDAGRKRGGAASDELAARTASNAAKIRAAL

SEQ ID NO: 225166 - protein, 39 aa, Zea mays
  Clone ID: MRT4577_136943C.1.pep
WWGLEGLRSLSTSGAKHLKQPKPIRPEQARCCPRRVFLL

SEQ ID NO: 225167 - protein, 115 aa, Zea mays
  unsure (1)..(115): unsure at all Xaa locations
  Clone ID: MRT4577_136944C.1.pep
RVAMDCKEPKTYKVCLVSHVKCFAIILVRYSAIMVGGVKYLRGFVGFVPVYVHLGMGYVNTRKWDDPLLGIFLVCLLKNSGWFGVFKLKESDMIHVLVFFLXXKQKTFKFNSFKF

SEQ ID NO: 225168 - protein, 42 aa, Zea mays
  Clone ID: MRT4577_136945C.1.pep
RNHARQPIGNRFKISLAETGRQTVTVGSTLTPIVALGESYLI

SEQ ID NO: 225169 - protein, 153 aa, Zea mays
  Clone ID: MRT4577_136946C.1.pep
ICPRSQSLCRPCYFQQVSQQSHAPQGSSHAQSARRQGAPPSPCSRTAAGVCRRHGATRGQRGEAGQKEQGDEETARLRGGSRRPTAQTPRRRPAQARARVRALRRDQGSVGLSRGGAQRRGGTVMWDATRRERRLARPSRSRGSSSKRMRISE

SEQ ID NO: 225170 - protein, 101 aa, Zea mays
  Clone ID: MRT4577_136947C.1.pep
VGKGLSKDDKAQKLALQHWLEAIDPRHRYGHNLHYYYDCWLRCESKEPFFYWLDVGEGKEINLERCPRLKLLSQCIKYLGPKEREEYDVVIEDGKFMFKKS

SEQ ID NO: 225171 - protein, 91 aa, Zea mays
  unsure (1)..(91): unsure at all Xaa locations
  Clone ID: MRT4577_136948C.1.pep
QRFGSTKPRRTSDNTSMNGHSMLLSHGPSYGISHLSXRSPFGYYHXLNVASHSYLGLGMGTQYIECSIHPHVCIVGYQYPGFKSLDRTPSL

SEQ ID NO: 225172 - protein, 122 aa, Zea mays
  Clone ID: MRT4577_136949C.1.pep
HSSGFCPTLTMFCSPINPLWLLPRKAKIKISPRRPLPPNRPKRCPLGRSLATLMPCLHLSSLSEKAHSFSYRAWQVLFNAHLSGRSVRKMLPFALFARPGQGPPGLGFQCCEHLLTYNESHM

SEQ ID NO: 225173 - protein, 102 aa, Zea mays
  Clone ID: MRT4577_13694C.1.pep
LVARPPQWVSLRPRSPPEFRGRARNRGPSLTRGGRNRHPRKTGGFKRFSKSPGEPKGRLRAANRGGGPKSYVPDVWGVMGLPCMSGSPPCFESRPSFFGLPL

SEQ ID NO: 225174 - protein, 64 aa, Zea mays
  Clone ID: MRT4577_136950C.1.pep
KKTGHQGTGSFLPITQAPTNYSSSQGTKTNPQRKTTLLRCLLLNLTNLQHFGGSLNGNQNSTHK

SEQ ID NO: 225175 - protein, 68 aa, Zea mays
  unsure (1)..(68): unsure at all Xaa locations
  Clone ID: MRT4577_136951C.1.pep
PSPRAHGPVGXRLRERRTRHHLAGGCGGGCGCYCWVQWRQRRVAIRACSTSGTLWRTRATTCTSMATT

SEQ ID NO: 225176 - protein, 77 aa, Zea mays
  Clone ID: MRT4577_136952C.1.pep
FISMWAFTHKSFHDRHQSLFKVVKAKVIFQLPSNVVISHLRRSRKSSSARSGHEAPKGRSVAGKETQPVRREASSGG

SEQ ID NO: 225177 - protein, 462 aa, Zea mays
  unsure (1)..(462): unsure at all Xaa locations
  Clone ID: MRT4577_136953C.1.pep
YINFMRDSFRREGFSLNGQTEGNVENRTAEPESASVLGLHNASLLAEIXHSTRQIIVEQAGALLSQLSTQLGDLENVTDSAIRRDIQSSAVRTGSLFQNLGSLLLELGRTTMLLRINPSSSEAVVNSGPALYISPSGPNPLMVQPVPFPGRSVQMGTLFSSLGSQGSVLHPRDVDIHVRTSGSVPGASTNPSDSAGAQAHQNVNRPGDASHANIGEAFSGVAGGTPFSVESGVRLLPLRTVVAMPAGISRAPSGSSSGGLGIIYPFLTRVRQRANTNGNDERNGQSPNESARSSTHLNQQSIPQSSQTHEAGNLRSPVDVNVGDGSETSPGQQNGLVTLSQIMDFFGSMLPGENVRGNTSSQQPPMASTEQGEGRNLATPEVSGASEEALRFAGMVRQIMPFISQVETQNQSAPPDSSSTPAQAASGSADRARDVPNDSTSSRQHNRDQIDEPNSKRQRTSD

SEQ ID NO: 225178 - protein, 105 aa, Zea mays
  Clone ID: MRT4577_136954C.1.pep
FTPADYKNKDLRQMVAVLRQKWISCSIYLALRALDEAPMPFFEGAHLISCYFFSATSIHAAGIQSPICTSFNQSLRSGHCRSIRRTDAINHIVTRMYSLRLYAFF

SEQ ID NO: 225179 - protein, 45 aa, Zea mays
  Clone ID: MRT4577_136955C.1.pep
EILMDRLLNFWWFRWENRPFRKNLPIKVLNFQFNYCLEKNWNSCW

SEQ ID NO: 225180 - protein, 96 aa, Zea mays
  Clone ID: MRT4577_136956C.1.pep
YRHVRILAYDSYGIENLVVRVSVPADSTCRWGPQGCVLVVMHSLQHQLALVGQAVLLQGGPQRGSSSHIHIRSSVVVDEHPNLGVVRPLGLLLIRS

SEQ ID NO: 225181 - protein, 151 aa, Zea mays
  unsure (1)..(151): unsure at all Xaa locations
  Clone ID: MRT4577_136957C.1.pep
SPLRCRFSVSVLPPXCFPPLFSXXAVVCPVRLSXPFRXCGPCAPGLSGSLPWGCAPSVLPCAVPSLGSALLVFASLSAGXSASVFLPGSSFRXPVGVSGXGAXAAALAGPALVRRAPRAGLGRFGXXGRARXRPRVALXWRPRVLPXCGGG

SEQ ID NO: 225182 - protein, 89 aa, Zea mays
  Clone ID: MRT4577_136958C.1.pep
ALTFDAVVVRSRSADVSAFWVWVAFWLAVFMFRLALHPAGWSCLFSWPVRFSLAFGWVIPRICLSSPPRVFGSGGGTIAGEPGGLEPNS

SEQ ID NO: 225183 - protein, 88 aa, Zea mays
  Clone ID: MRT4577_136959C.1.pep
GGTKKKRLILGRSYREQPASVFWGPREEYTPRASPILAVKYKFHLLHRINHPTRLKIKFRGRLIKKIYFSGVKKIKIKNYVKKYVNLP

SEQ ID NO: 225184 - protein, 226 aa, Zea mays
  unsure (1)..(226): unsure at all Xaa locations
  Clone ID: MRT4577_13695C.1.pep
AAATAGAHVSAVVPGSARPPILARFRPIAPKPTPAATGEGRDVPVERDLLRKLLEPRVISPRAVRPVWSAIHVGCIHXPTTRPAPTPXVSKTAVQVEAELEVDALPAVVSDSGNRVRLVNDAYKEMVGQPECPWLDAVAATSRRISGEVALVVADRSSLPDSYGAFTCTAKIEWEDDGKVTSIAAPCDVSRLQCESRDYLFAWRFRTAAADADASVGHSSEEISES

SEQ ID NO: 225185 - protein, 65 aa, Zea mays
  Clone ID: MRT4577_136960C.1.pep
RYSYPSVWGAHVGSRLSGVRSPFTPVKPYFGCGARKYAGLPFFSPWSPAPKKNDKENKTMEDQPE

SEQ ID NO: 225186 - protein, 159 aa, Zea mays
  unsure (1)..(159): unsure at all Xaa locations
  Clone ID: MRT4577_136961C.1.pep
IFSXRDLRFHGMFVNGSGSLKDCKNHITSAVNGTILGHPGSLTTAQNSGIITCPGSLMSAQNSRIVTVKARYKEDLLRFRFPCSGSFITLKDEVAKRIQMDGVLFDIKYLDDDHEWVKLTCDTDLEECMEISRASGSNVLRLLVTDIAPVLGSSCGSTG

SEQ ID NO: 225187 - protein, 75 aa, Zea mays
  unsure (1)..(75): unsure at all Xaa locations
  Clone ID: MRT4577_136962C.1.pep
QDITYLEAWLPPFRXVAXXXPXSFXTQQXXFXXYXHXXPNPFTLLQXQQXLPFNQLXXTNPTXFYQQPIIXXPLF

SEQ ID NO: 225188 - protein, 175 aa, Zea mays
  unsure (1)..(175): unsure at all Xaa locations
  Clone ID: MRT4577_136963C.1.pep
MEHTPRILALILLLALLXAVVGPAAGQNCGCNSNCYCNKCCYWGTTYDYSDDYCQYGRRRSPCRWGGGGGGGRGGANVANKVSNAFFNGIKNQIKSECEGKNXYTNSETLSAVNKDPDLYHGFTHVETKLEIXAXIAHFIHHTRHXATLAXINKRHNYCDACYKQCPSAWAHEYY

SEQ ID NO: 225189 - protein, 185 aa, Zea mays
  Clone ID: MRT4577_136964C.1.pep
MAGYKASGGTALGVVLAVAALLAAAAMAVDDEHMYHWKCFNSCTGKCRDEDAFDDGHRSGDSNVSSVVSGGKCNNRCLSECFEDLPAICYHQCVVSKCLCFPPFSKEKTMCMKSCCNKCFHHGPPAPGPGPKPRPPMPGPPKPPAPKPKPRPPAPKPPTPKAPPPPKKPCPCPPGSDEAKADSKN

SEQ ID NO: 225190 - protein, 104 aa, Zea mays
  Clone ID: MRT4577_136965C.1.pep
SYVVKIGYRDASSGIKASVATVGFFTLSYIYFVFVLSTKKTIKYFCHSLFFQSVVPVSFVKFQSLESLFSCWSLYPLCFPLSLLYIYENIHKKKNLKTLKKKKK

SEQ ID NO: 225191 - protein, 81 aa, Zea mays
  unsure (1)..(81): unsure at all Xaa locations
  Clone ID: MRT4577_136966C.1.pep
ECKSNASSRXCRECKKXRNSQGCXNLFLXQYIMLDVLRQEEFELMIASSIAHVLSMLISVKTFITSQLKQYISITYLQTPK

SEQ ID NO: 225192 - protein, 102 aa, Zea mays
  Clone ID: MRT4577_136967C.1.pep
WGLFPICLVGLHGAPLPPLFFSLGEFLGFFAFSAPLKFPLCFSFSGFRQARPPLPCGGCGCFCSLILHLVSMFHFRRFFSSFGLPLLYKAPLFWFGADRCFF

SEQ ID NO: 225193 - protein, 83 aa, Zea mays
  Clone ID: MRT4577_136968C.1.pep
PPPIGGMGIPPMGGIGNPPMGPGPMPAFGIPPMGSYLNIFFGKKLKLLFYMVLCKQRRKPHWSCKWLHFGINIFYGPRKFLAS

SEQ ID NO: 225194 - protein, 58 aa, Zea mays
  Clone ID: MRT4577_136969C.1.pep
ELGFFDRGLEVFACAPRERPLNIERSRGGPATYAKRVIDKNCAEQITRNVKGKGLQGP

SEQ ID NO: 225195 - protein, 36 aa, Zea mays
  Clone ID: MRT4577_13696C.1.pep
DTSVEHYYRIESFLVGGSKTHACSIARGTDDLFMFV

SEQ ID NO: 225196 - protein, 58 aa, Zea mays
  Clone ID: MRT4577_136970C.1.pep
IGQEYHTRRRPIQGGATPGAPEPHHHQVIAIALEGRHRPWQDLGLSWARWSILIFGPG

SEQ ID NO: 225197 - protein, 1523 aa, Zea mays
  unsure (1)..(1523): unsure at all Xaa locations
  Clone ID: MRT4577_136971C.1.pep
MARMEARLTEATVGRCDVLEQRVAATEEKTEARLISLEMDQAQIESWHPAVEKRLDNISLELSRVNKFMERESFINDFAKPGILPNAKTMGERLPPRCPNIDGLDGHHFDNCNQDRGFGPVFTQPRGLVKGTLYDSHPAPFNDDLDPWRGNEWDGGHEGGRSGQGNLPRVNFPQFNGDNPQLWKTRCENYFDMYDVDPSKCIRVAYMHFEGRAACWLQSVKRRVRYWSWQEFCAQIHDRFGREQHESLIRHLFRIRQTTSVADYVERFSTLVDHLSTYEANADPLYYTMRFVDGLHEEIKVVIMVQRPSTLDIACVLALVQEEALEMGRGVHDVTLSRQHSKMGVSSSGPPKWDQPAQLKTAGSTDEKLASLRRFRRAXGLCEKCAGKWSPGHKCDATAQLQAMEEVWELLPTEEDAEQETDSVEPVSDTVLMSISQATWLGSDNVYTLXSSMVVPIPLHVRLANGDMLHCQDKWVQVQWQVQGCTFFSDIPFLPLTCYDMVVGMDCLQQFSPMKVDWNKKWLSISYQGSSVVLYGRSSVIPDCTVVEICLVSDNSSSAANNSVPPQIQSLLKQYVVLFEDPTGLPPSRDCDHAIPLVLGAHPFTVRPYHYPPLLKDEIKTQVADMLKQGVKKKDNTWRFCVDYRYLNALTVKSKYSVPVFDQLMDELAQSQWFSKLDLKAGYHQILLKQGEEYKTTFQTHMGHYEFRVMAFGLIGAPNTFLAAMNATLQPVLRKCALVFFDDILVYSKSFQDHLSHLSTILQLLLRDNWKVKLSKCDFAKQSISYLGHVVSAQGVATDLAKIQDIEQWRTPSNTKELRSFLGLAGFYHKFVRHFGIISRPLFNLLKKHTLFVWTQKHQKAFDLLKTALVTAPVLALPDFSKQFYIYIDARQYGIGAVLMQQGHPLAFLSCALGPKNQGLSTWRSTLRVGPQLETYHQSGAEAARYTQRSKSMVQQPHARLGTGVTLTRSAITFSEKQQISKGMGCSPCEITFMPFTFANDYKKITKEILEGLSEDTDDSDNYDVESGGEDSEDCPWRPSHAVFRKSTIKQSHLDNMRGRFGDQFIEPDDDWLKCVENTSDELLGAYSKFEDNALSAAFRSRKKKRLNRVFDAIGFVYPDYRYPPRGQKRKGATSGKAATSAASSEPAPKRKKLKVLTHRPRYIEPAIVPEFGGETSSAIEAKGPAPTQRIEELAAMPKTDKIEEPRIEGMKTLEVLSPSAGVEIETKTKLTEAEATMSQADAEAGPSEPTKEKSSETGEKTAEEEAIEQILPEKAAAPTPEAPSEVLDYIIQHASGKRLSEEEIFEAKHYARELKYPKGALVFNGTDEDDFLYCLPDNKELSVCREMARSMGFPKLEAGLCAMTKDDLADSLAYNSLKGLILSNALRAQKNAEDESCTIALNNLRTEVIKLRNEALEKDKILLTLVDKVKGDEANFKAHSEIQRNEIENLQKQLAEAKLKCAIAKADRDATELSPPPEPFDPLADPETKKAIEIINMAEAIRDEVVTKLLTEAAEKVLKEEE

SEQ ID NO: 225198 - protein, 42 aa, Zea mays
  Clone ID: MRT4577_136972C.1.pep
LLLSWERSSHKQCAPPIFMEWPIGGIHCGLTSSPLLGLDRLR

SEQ ID NO: 225199 - protein, 72 aa, Zea mays
  Clone ID: MRT4577_136973C.1.pep
GARHDETLSCLQVEHIEASSRQNAIRRLWIYRLKVVWTDNYVDTVIATLQDQLVLYPAPDDVHYVSTVGPIT

SEQ ID NO: 225200 - protein, 149 aa, Zea mays
  Clone ID: MRT4577_136974C.1.pep
MASVLDVLETIKTSSHTPGKIAKASKTQIETETKLTEAEAILSQADTEAGPSVPAKEKSSETGEKAAEEEGIEQILPEKAAAPAPEASSEVLDYIIRHASRKRLSEEENFEAKHYARELKYPKGALVFNGTDKDDFLYCLPDNKELSVC

SEQ ID NO: 225201 - protein, 98 aa, Zea mays
  Clone ID: MRT4577_136975C.1.pep
GRPVRALVGRSVIAQIQCSVQAKTLCPAFGQFTSHITIQFLIIPLSNSTQQRFSLVTIQCHVSIHSVLLPSSSVQSAVFYSRPAGPSPVPPNQITSPP

SEQ ID NO: 225202 - protein, 167 aa, Zea mays
  Clone ID: MRT4577_136976C.1.pep
MVNTGRFVVLVLAYRLLVPLLSGSAEPDHTTKESYVVYMGSPSGGGDPEAVQAAHLQMLSSIVPSDEQGRVALTHSYHHAFEGFAAALTEKEATALSGHERVVSVFKDRALQLHTTRSWDFLEVQSGLQSGRLGRRAVGDVITGIVDTGVWPESPSFNDAGMPDVPA

SEQ ID NO: 225203 - protein, 111 aa, Zea mays
  Clone ID: MRT4577_136977C.1.pep
DPRVRPRVRELICSFLNFNIHHLTRLTGLLNRATKTRQHHHKLKKFICPNRSYIFLLTLLKKISNLLKQPHIQKHTFNPKSKLRLLLKHVTQLVLLNILHHYILLHITKTL

SEQ ID NO: 225204 - protein, 50 aa, Zea mays
  Clone ID: MRT4577_136978C.1.pep
ARPHVLRMLQKCGPWRDPKDTWHRPGRGRPRLVSAPFHGQTGLLSFTINL

SEQ ID NO: 225205 - protein, 94 aa, Zea mays
  Clone ID: MRT4577_136979C.1.pep
MHGPRTCIISLCGCCKITARWSSCSFYNCVSITVMTPLRSVLHVVITTRTAVWFPWLTESFHRRHILNLNCSMFDSCPVYRHLKKKKKRGPLAI

SEQ ID NO: 225206 - protein, 203 aa, Zea mays
  unsure (1)..(203): unsure at all Xaa locations
  Clone ID: MRT4577_13697C.1.pep
MPRRKLRKVRGSRPAPHAAPVRNPPQPARXARPPAPVRDGGGGSILGGIGSTIAXGMPFGTSSAMAHRAVDAVMGLRTVRHEIVISEAAAAAPPAPVMNANACSIHSKAFQDCLNNYGSEISKCQFYLDMLNECRRGVVCLSFCSNWDYSWILFSLPCISLIRHRETFNPLHECTMASRVHLVESVVTFSLSCVVGTDFCLFW

SEQ ID NO: 225207 - protein, 92 aa, Zea mays
  Clone ID: MRT4577_136980C.1.pep
TTFTFTYILISKFFSTTKDISYWPIPQGKETWAGANLGFGRVKPGHRHTFVERKSLAKNISGNRHAEKKQPVPILLQVFRHVQGDFKSKIVS

SEQ ID NO: 225208 - protein, 40 aa, Zea mays
  Clone ID: MRT4577_136981C.1.pep
IPPLTDERSCSTAPIPKAMISYPLLPIILYTLPKYDNHVL

SEQ ID NO: 225209 - protein, 45 aa, Zea mays
  Clone ID: MRT4577_136982C.1.pep
RQKINLKGSSELDAKLYLLTIYMYQCPNKMRREERSHIYNKTLVH

SEQ ID NO: 225210 - protein, 60 aa, Zea mays
  unsure (1)..(60): unsure at all Xaa locations
  Clone ID: MRT4577_136983C.1.pep
MVAGLRSPTLLSLVVXNPVYSNKEIFLRELISNSSDALDKIRLERLTDNSKLDEQPELSI

SEQ ID NO: 225211 - protein, 70 aa, Zea mays
  Clone ID: MRT4577_136984C.1.pep
SVQLTCSMITCLWQARLTVAHVGNTENVEKGVSYHPFLNLTNISTTLLTVFHTKHINSIREVLALLQRTY

SEQ ID NO: 225212 - protein, 89 aa, Zea mays
  Clone ID: MRT4577_136985C.1.pep
SIERDKRVLLTCSMSHLCEVVKLFFSFLALDIAMPPDWHSACQGSPVSMVPPQCSLHGLVVCAVKPFQVTDPPFMRSVVDSTVRACIRE

SEQ ID NO: 225213 - protein, 318 aa, Zea mays
  Clone ID: MRT4577_136986C.1.pep
RYKEKVILKKIKVMTVGAKECGDYEEWFNYRVSRAAPESCADFLGSFVADKNKAEFVKGGKWLVWKFEGDRTLANYLSERGFPSNLERLMFGRVLQGLGPLEREALVVKQVMRQLITSLKRIHATGIVHRDIKPSNLVVTRRGQVKLIDFGAATDLRIGKNYVPDRALLDPDYCPPELYVLPEETPEPPPEPIAAILSPILWQLNSPDLFDMYSAGIVLMQMAIPTLRTQSGLKNFNAELRSAGYDLNRWRQSARRRPDLQILDLDSGRGWDLATKLISERGANGGGRLSAAAADCHPYFLLGGDQAAAVLSKFSLSK

SEQ ID NO: 225214 - protein, 64 aa, Zea mays
  Clone ID: MRT4577_136987C.1.pep
ERDFCVHLSSYRLDCLSFFLIHSQLCKRGKRHQVCGGPCEVLVTREIKEEGSLGPSDHLREGKG

SEQ ID NO: 225215 - protein, 40 aa, Zea mays
  Clone ID: MRT4577_136988C.1.pep
IVTTNCTVATGAKHGMFLATTLKSPQKRPFDISRGWTRPK

SEQ ID NO: 225216 - protein, 89 aa, Zea mays
  Clone ID: MRT4577_136989C.1.pep
MNALKSALYEFVKGCVRPLWEDGLLSREVHKFVVKKAVDKVLDVWAHSTEINVPRILSDEAEGIRTLVKDYLKIYVGSEALRKSIPTSS

SEQ ID NO: 225217 - protein, 58 aa, Zea mays
  Clone ID: MRT4577_13698C.1.pep
CIYASVSYLLVLKSELFGLPACTVQNRALCNGDVSSPQPRYVDDRCRPLFLVAFTLPG

SEQ ID NO: 225218 - protein, 116 aa, Zea mays
  Clone ID: MRT4577_136990C.1.pep
EMHPRGTIMTQSRRRPIQYDSDGFIARWIPNSLLCHCAILYRGRNLHDRSHDGTGMSCCMTNRSGTHCSSETDYLNERSEHQVCTAMTNHRWYSGLVNADHARRGQDFLEDETQCL

SEQ ID NO: 225219 - protein, 141 aa, Zea mays
  unsure (1)..(141): unsure at all Xaa locations
  Clone ID: MRT4577_136991C.1.pep
KTPGGGPFFFFGGKGEPAHPPRLTPKPPQFPLGEWPQKGPRGAPRKPQGPNPGPKGAKNPGKKKPPWPRKLVSPXNPXGPFWGPHPCPPGGTPGLFFPPGNRGDRHFKGKKPRPAPIKPPPLKKLKKRNLGGKSFLKRGPF

SEQ ID NO: 225220 - protein, 104 aa, Zea mays
  Clone ID: MRT4577_136992C.1.pep
MTRALQTIAASTTSTHTNSCCGCHPPPPVHLPPTVHLPPSDHLPPPVHIPPTSHLTTPDHLTPPVHVPTPIHMSAAPCHYPTQPPPPEPNSQPHPCPCQQPHTN

SEQ ID NO: 225221 - protein, 121 aa, Zea mays
  Clone ID: MRT4577_136993C.1.pep
VHKCKSAGFGGKDGNQRAGGLERCGEMYRGGLDRFKKAQTLEPFSVKSESGTKKAPAAAGTAKAPPAPLTLPQNSNFVLGQNNQSLQGTNTKGGWARWCCPRACWDQAGGRQSTWQPPDWA

SEQ ID NO: 225222 - protein, 59 aa, Zea mays
  Clone ID: MRT4577_136994C.1.pep
LESSATNRTNFENGGRDPFTHERKEASATMARLGKTKRVLRHSWRGGCFLSEIYKGGGP

SEQ ID NO: 225223 - protein, 110 aa, Zea mays
  unsure (1)..(110): unsure at all Xaa locations
  Clone ID: MRT4577_136995C.1.pep
VDNGNGIQGFIVYNTVGGGRGYGIGSIILERLYVDYGKKSKLGLNVYPYYQVYNXVVETXKSVLSKHYLLEQNDVAILLDNEAIXEINRXSLAIERPTYKNLNRLVSQVR

SEQ ID NO: 225224 - protein, 94 aa, Zea mays
  Clone ID: MRT4577_136996C.1.pep
DPKWFLGGHVHIRELGLRWKPETLWCLGHYLAFSLRTIIVAVVSGQRRAALGCPESGYLSVFVMWAATKVGNDGKVSLKTSEVIIVVWSGGGPT

SEQ ID NO: 225225 - protein, 37 aa, Zea mays
  unsure (1)..(37): unsure at all Xaa locations
  Clone ID: MRT4577_136997C.1.pep
FINCLGFXTDNYHYEPMRWYNVLPHIARGMLYTSLSV

SEQ ID NO: 225226 - protein, 79 aa, Zea mays
  Clone ID: MRT4577_136998C.1.pep
FKIASSRPFIYFIYFFLSIIFDPEYKTCTAGCSIWTWYINIMSVLSLLMLKQTRRAWNIMRNLNLQHSLTYIEYTVHYV

SEQ ID NO: 225227 - protein, 75 aa, Zea mays
  unsure (1)..(75): unsure at all Xaa locations
  Clone ID: MRT4577_136999C.1.pep
ASSGKPXERKVAXLGACGGIGQPLSLLMKLNPLVSSLSLYDIAGTPGVAADVXHINXPALVKGFMGDDQLREGAQ

SEQ ID NO: 225228 - protein, 79 aa, Zea mays
  unsure (1)..(79): unsure at all Xaa locations
  Clone ID: MRT4577_13699C.1.pep
KQVHPEIGISFKAMSIMKSFIKEIFEKLAGEAAKMAXXNKKPTIKSREIQTSVGLVLPGELAKQAVFEGTKAVTKFTSK

SEQ ID NO: 225229 - protein, 192 aa, Zea mays
  Clone ID: MRT4577_1369C.1.pep
RLPRLPVSSSLLPPPPTTQPPRSRALILSGSSSSPSVRPSPEMEPKRSSPQAQPQPRAATKKSPPRAAAADAAIADSPLSSLFHPAPHGVNGKEQDLYAILFKGQNGNAQASMTDGKSQWSPARGRTTYTKDIKYDSVGTSSCFGSSVHYGGREYYGSSAPKQSAEYSDYKVDKKDPVADSHGDWWQGSFYY

SEQ ID NO: 225230 - protein, 52 aa, Zea mays
  unsure (1)..(52): unsure at all Xaa locations
  Clone ID: MRT4577_136C.1.pep
MSGGTPAASSSLRTSLSYYVRQVRAYDYHHYLCLLHLAPAXRKAAFTXRTFN

SEQ ID NO: 225231 - protein, 84 aa, Zea mays
  Clone ID: MRT4577_137000C.1.pep
SYDALLLEIKVQGYRHHGRWSLVSLCAQDSAWCTGSVSMPCVWLHHHVCVAHVLSCSHIHSQVRAAPFGCCAAWSLYIISGWIN

SEQ ID NO: 225232 - protein, 68 aa, Zea mays
  Clone ID: MRT4577_137001C.1.pep
TRLQPKKICEKKKLHPLIYVGVGQIAPPLPKKPLHKKINVPPLKTHSFKPPPWPIQGSSLPITLEGGG

SEQ ID NO: 225233 - protein, 168 aa, Zea mays
  unsure (1)..(168): unsure at all Xaa locations
  Clone ID: MRT4577_137002C.1.pep
AQNTRAQQVLQLVLANFAAHSQQEQFLPFXRLVALNSASYLQQLQVPFSELXVAYPQQFLPFNQVTALNSLGDLQEHQLVPFSQLAGVSPATFLTQPQLLRFYQRGAPNAGTLLQLQQLGPFKKPPXPHPGALYQQTIIGGASFRFLMSYSSIIKFLIMFSGLKKTPQ

SEQ ID NO: 225234 - protein, 173 aa, Zea mays
  Clone ID: MRT4577_137003C.1.pep
YNAIRLPLDILIFRLIKAYIRSSSLRKAALRFSLLEPDRNGCITLDNIRMALTREATDAMKESRVQDILVSLSALQYRRMDFQEFCAAAVSVHQLEALDRWEQHARSAYEYFEKEGNRAIVIDELASELGLSPSVPLHVVLQDWIRHTDGKLSFLGFVKLLHGMCSRSLSKMR

SEQ ID NO: 225235 - protein, 252 aa, Zea mays
  unsure (1)..(252): unsure at all Xaa locations
  Clone ID: MRT4577_137004C.1.pep
WPSLTXRAMDFVKRLLCKDPRRRMTAAQALSMLPFILFWWLLLNIALLCVFMFFSXHPWIRNYNAIRLPLDILIFRLIKAYIRSSSLRKAALRALSKTLTVDELFYLKAQFSLLEPDRNGCITLDNIRMALTREATDAMKESRVQDILVSLSALQYRRMDFQEFCAAAVSVHQLEALDRWEQHARSAYEYFEKEGNRAIVIDELASELGLSPSVPLHVVLQDWIRHTDGKLSFLGFVKLLHGMSSRSLSKMR

SEQ ID NO: 225236 - protein, 186 aa, Zea mays
  Clone ID: MRT4577_137005C.1.pep
HITIAKAVAVAASKEADSSEASMTNEQKLKAERLRRAKMFTSIIKGGGNKSDLVTSEITNESARAAPANSNLPVPPEPLATEREGSSVRFEREGSSVRFEREGSNMIKQEKDSDDEQNRARKYRKHHPESDEDKDYLEEESYKHSRKRHRSERSRGHSKDAHKRKHKQHSKEREYRHDHSSSEDEL

SEQ ID NO: 225237 - protein, 379 aa, Zea mays
  Clone ID: MRT4577_137006C.1.pep
PRVRPRPTREGGELLDRILSRGGKYSEDDAKAVLVQILNVVAFCHIQGVVHRDLKPENFLFTSKDDDSHLKAIDFGLSDFVKPDERLNDIVGSAYYVAPEVLHRCYSTEADVWSIGVIAYILLCGSRPFWARTESGIFRSVLKADPSYNEAPWPSLTPEAMDFVKRLLCKDPRRRITAAQALSHPWIRNYNDIKLPLDILIFRLIKAYIRSSSLRKAALRALSKTLTVDELFYLKSQFSLLEPDRNGCITLDNIRMALTREATDAMKESRVQDILVSLSALQYRRMEFQEFCAAAVSVHQLEALDRWEQHARSAYEHFEKEGNRAIVIDELASELGLSPSVPLHVVLQDWIRHTDGKLSFLGFVKLLHGMSSRSLSKMR

SEQ ID NO: 225238 - protein, 81 aa, Zea mays
  unsure (1)..(81): unsure at all Xaa locations
  Clone ID: MRT4577_137007C.1.pep
XXLKKKFTSSNKDXNKERLYPQTVPSFPTXKPLQPIKKTNPHDKTYNTRPGNAKHYTNSPVLFSNTPTPPEETNSPKKTTP

SEQ ID NO: 225239 - protein, 121 aa, Zea mays
  Clone ID: MRT4577_137008C.1.pep
SLWYFHFEQQRYLPRGGSSLRVQLHAPCCTLDGHTWTLPSQHVEKLSPRTPRPPVAGHVGGYLLMAPTTDDGGRHGYGQSGVSADAVPLISTVIRQVRMGGSWKRLDMAVHKEGESPALPA

SEQ ID NO: 225240 - protein, 118 aa, Zea mays
  unsure (1)..(118): unsure at all Xaa locations
  Clone ID: MRT4577_137009C.1.pep
MAARSLGSPESRWLRPSALVLLDDCAVLSAPSTARALRCDLEAGHTKCASDEIKVNAMGDGQNHRDGPDPNSPVSQLPETYRICLRVTCSFRNSMHYSENVQSVHXNFTEAGAGHYLA

SEQ ID NO: 225241 - protein, 104 aa, Zea mays
  unsure (1)..(104): unsure at all Xaa locations
  Clone ID: MRT4577_13700C.1.pep
LXXXKTSSFIIHSFNXKKKSISHTVEGFXLLSSFFIQIXYFNYTITNFLLLIHSTLSFFHLNFIINFSNTLLYYILYYIINNLLHINFIYISYIQFITPSFFLF

SEQ ID NO: 225242 - protein, 59 aa, Zea mays
  Clone ID: MRT4577_137010C.1.pep
MPGADVGTKQEQAGTRGQETDGSVYTEVPITIFYGVRGAVWANSPCEKADEVMRLAAGL

SEQ ID NO: 225243 - protein, 33 aa, Zea mays
  Clone ID: MRT4577_137011C.1.pep
SAYQQYKWRATVTETRGTYRPEEDLPRPRVEVV

SEQ ID NO: 225244 - protein, 46 aa, Zea mays
  Clone ID: MRT4577_137012C.1.pep
VKKTLIIGQRIFGKGKMEIIRKKLGSLICYFKPPFGIMVLGKKNSF

SEQ ID NO: 225245 - protein, 51 aa, Zea mays
  Clone ID: MRT4577_137013C.1.pep
SSGLIFLETPSFPNPAWFLQETLIRSQNLTPNFFGCSTIRQQTMLKCPRTS

SEQ ID NO: 225246 - protein, 88 aa, Zea mays
  unsure (1)..(88): unsure at all Xaa locations
  Clone ID: MRT4577_137014C.1.pep
PFPFIFFXLFFFFFFFFFFFFFFFFFFFFFSQEKQLVDFAMRHLYQASNRLPFTKQTLITTRALHTEEQARKRQALFISTGSLSLGQG

SEQ ID NO: 225247 - protein, 64 aa, Zea mays
  Clone ID: MRT4577_137015C.1.pep
DIHIHNKGKGLSFYYTKGKVLRQAAPLKDNSSAAGKKHEIYSWKLGPREVKLFPRIGPAMIKLF

SEQ ID NO: 225248 - protein, 78 aa, Zea mays
  Clone ID: MRT4577_137016C.1.pep
ITRRRKTQLNHIHSDLSLCTSARGGVPVAFGFLEWVRVSCWNSATSVMSDLDCFAAAIVLLIFCYPCKLVSREINLEH

SEQ ID NO: 225249 - protein, 54 aa, Zea mays
  Clone ID: MRT4577_137017C.1.pep
MTNSGIKNFLEEVNWSNRWGNHRKAISNMLRINNAFINIPNAYFWQNITNRHFR

SEQ ID NO: 225250 - protein, 185 aa, Zea mays
  unsure (1)..(185): unsure at all Xaa locations
  Clone ID: MRT4577_137018C.1.pep
FGTRFRSADALGVQSVHVISCDSSKRXYRDNRHVSMGAEKWLDIEIWNSPAECFSALKKRGYRIATTYLGTDSVCVYDMDWSQPTAIVVGNELRGISDDALELSDLHCSIPMKGMVDSFNVSVAAGILMHHAVCDRVSRLGHHGDLLPEENRILLAEFYLRHRESTATIVHEYAKMKAGKIMTRL

SEQ ID NO: 225251 - protein, 103 aa, Zea mays
  Clone ID: MRT4577_137019C.1.pep
GPQEGPSRLPNTLPPMFPKELKPPPGWKPGDPITLPLDEILPGIKGEEREAQAPVPQAPVSVRPVAPMGPETIQVKPVQLDFGSSSSDEYSSDVGSSEEDDED

SEQ ID NO: 225252 - protein, 115 aa, Zea mays
  unsure (1)..(115): unsure at all Xaa locations
  Clone ID: MRT4577_13701C.1.pep
PRVRTLLQGYSGIRFEILEAITKLMNTAVSPCLPLLRTITGSGDLMPIYYIAGLITGRPNAHAGTADGRKADAHEAFKIAGIXGGFFKLNTHGGPRHRHGTSVGSELEGTGCATP

SEQ ID NO: 225253 - protein, 403 aa, Zea mays
  unsure (1)..(403): unsure at all Xaa locations
  Clone ID: MRT4577_137020C.1.pep
MMQSHLPSPARLGLTTSSPSLPPNPVPLNPTSSPSHGSLPSSAAAGTSAAPTLITSPSLLPLLPPLPRAQSLLQLISSLATNLFELSPNRAAWILSYRGSLPTFLPSASXPPXPPLPTSISSTKDALSLLTTLQTQLFEAVAELQETLDLQDARARLVREARAKDASLVTFAKKLHEAHQVLDRLVDDYADYRRDPKRPRGAAAADDPEPASEGDFGTSLHSSLKLDDILTYAHRISYTTFAPPEHGAGLPLRVSLPPVPQENQMRASQLYLFADLDVGVPKKPLDAKEGIAPEVEAAPLYEPPQEGPSRLPNTLPPMFPKELKPPPGWKPGDPITIPLDEILPGIKGAEPQPPVPQAPVSVRPVAPMGPEPIQVKPVQLDFESSSSDEYSSDVGSSEEDDED

SEQ ID NO: 225254 - protein, 56 aa, Zea mays
  Clone ID: MRT4577_137021C.1.pep
RHTTSYAYVVAMHHSACDTHDAGYYTDRRVPSLELPSGWRPDLQPPGLHLAFLSLM

SEQ ID NO: 225255 - protein, 112 aa, Zea mays
  Clone ID: MRT4577_137022C.1.pep
HTVYVGYQCISSFSITVGSLSQVMLCNLDFYPHLRMPFSRPPIVLQASQSVYTTGDARLLPPHRVLLLDGAGEGISALGDEYSDAALVSLHQPREVRQLYVGSVGPVWSRRA

SEQ ID NO: 225256 - protein, 180 aa, Zea mays
  Clone ID: MRT4577_137023C.1.pep
MEAIRKQASKLREQVARQQQAVLKQFGGGYADSVFADEGEAQQHSKLEKLYISTRAAKHFQRDIVRGVEGYIVTGSKQVELGNKLCDDGKKYGVENTCTSGSTLSRAALSFAKARSLMEKERANLLKAFGTQVAEPLRAMVMGAPLEDARHLGPRYDRMRQEAEAQAIEVSKRQMKLRET

SEQ ID NO: 225257 - protein, 93 aa, Zea mays
  Clone ID: MRT4577_137024C.1.pep
YSTNTLGVPKLIGWKDGESSLLVDPEEIGCLDRLRSLNEEADCVHELYADGQPTGGSSSAWQDLLVMSPSRVSAQRELKAAIERNEGRFVKPA

SEQ ID NO: 225258 - protein, 61 aa, Zea mays
  Clone ID: MRT4577_137025C.1.pep
KILYTHTTRAAQKVDPARPSRDPWRRYETPEQACACLINFGLVRRQRCMHFHQVMVWENKT

SEQ ID NO: 225259 - protein, 62 aa, Zea mays
  Clone ID: MRT4577_137026C.1.pep
KNCVRFQYRIQPNEGRLEKSQTQEVGKGTIRPGTFQGKSPPPVVMSMIIRGQPCAELAWVPP

SEQ ID NO: 225260 - protein, 74 aa, Zea mays
  Clone ID: MRT4577_137027C.1.pep
TATVCFCEHDIEITVEEITYALPHPPIVVISICHHTLSPEHDARVGKAETHNHPALYVGNQFAAHGFFPEEPFV

SEQ ID NO: 225261 - protein, 178 aa, Zea mays
  Clone ID: MRT4577_137028C.1.pep
ARNSARAARALFLYDAYTSFSGQPVYNDWAMASFNVFFTSLPVVAMGVFDQDVSARFCLKFPMLYQEGPQDLLFQWRRIIGWMVNGVASAVIIFFLCTASLQHQAFRSGGEVADMATLGATAYTCIVWAVNLQMYITVSYFTLVQHVCIWLSVGLWYVFLPVYGAIAPSFSTTYYMVF

SEQ ID NO: 225262 - protein, 179 aa, Zea mays
  unsure (1)..(179): unsure at all Xaa locations
  Clone ID: MRT4577_137029C.1.pep
MASWGGAGGEPFLGTRLGGPAPQNGRMVGRVGFGLGGKGXPAPKKGGXTSTSSDRALGGPGAVAPHYLDGSLGGDYGFDPVGLGKPVECLQVEWDXLDQNLGKNEGGGVIGTRFEASEVKATPWQPYSEGCGLQRFRECELIHGXRWAMLATLGALSVEWATGVTWQDARKVELGDGSS

SEQ ID NO: 225263 - protein, 83 aa, Zea mays
  unsure (1)..(83): unsure at all Xaa locations
  Clone ID: MRT4577_13702C.1.pep
TGFDPTSYLSVSRLLLHYVLRAIPQPRTRDRHPIPLSIVPLPPPSQSSCFALPSSPAASGCLVPLHTXPGVSIGVTCRSGRCS

SEQ ID NO: 225264 - protein, 326 aa, Zea mays
  unsure (1)..(326): unsure at all Xaa locations
  Clone ID: MRT4577_137030C.1.pep
ARALFLYDAYTSFSGQPLYNDWAMASFNVFFTSLPVVAMGVFDQDVSARFCLXSYSTVYLILLARIDRYXMMVESSTGFDMWRKCVRXPMLYQEGPQHLLFQWRRIIGWMVNGVASTVIIFFLCTASLQHQAFRSGGEVADMATLGATAYTCIVWAVNLQMYITVSYFTLVQHVCIWLSVGLWYVFLPVYGAIAPSFSTTYYMVFVEALAGAPSYWVVTLLVSAASLVPYFTYAVVKSVFFPDYHNRIQWLRHRERAKAHPDPETSADVELSQVLRQFSVRSTGVGVSARRDATAVLRRLNSTTQRADYSQSPPTPGVAVVVAADR

SEQ ID NO: 225265 - protein, 66 aa, Zea mays
  unsure (1)..(66): unsure at all Xaa locations
  Clone ID: MRT4577_137031C.1.pep
QNLHLRKKKKKTKKIKIKKCEIKQKIKRRKXKVKQKEYRKRNKKMNNKRKEIXKNKKKKKRWIKRF

SEQ ID NO: 225266 - protein, 106 aa, Zea mays
  Clone ID: MRT4577_137032C.1.pep
RAFFRSTHLVYYASVALAAERAEGPICPPTEGAAVVAHRRYSQQVLPVIPSLRRRPGSATLRRHDHAHGSLHECIIRGCPDTGDIFYALPGSKRAISLISSYPRAA

SEQ ID NO: 225267 - protein, 102 aa, Zea mays
  Clone ID: MRT4577_137033C.1.pep
LVLSISLCCIFSVTQCLHWHMLSTSSFQGPLLCSLCWFRFVEHISQLSYAAVTFNKLLAVAGWFLDQLVFAKPMPFALCQKNGEILYPYSNFTENLVCHHCS

SEQ ID NO: 225268 - protein, 73 aa, Zea mays
  Clone ID: MRT4577_137034C.1.pep
VWVPLKTGWTKGVEEAQNGLPKWKANKTGEPLLPGGSNAKKKRKMRADNRSIQKNKQYRAFPPLMKNVGNWCL

SEQ ID NO: 225269 - protein, 95 aa, Zea mays
  Clone ID: MRT4577_137035C.1.pep
PGGPPSSGVQKRSPPSRPGRSNPRGPLGSRGGSQSTPFFRAPGPSPSSPPPRVGRPPFVGNPWVKVPPGGVKWRGVLGRPPRELGHVTPQGLVYL

SEQ ID NO: 225270 - protein, 88 aa, Zea mays
  Clone ID: MRT4577_137036C.1.pep
PPPFFFFFFFFFFFFFFLGGQHKGGGLDKILNGWGPTTPGLMGCLLWGGTQKTHLTVFQKPPWGPGGDTTPSYAHIIILNSEIPWAPT

SEQ ID NO: 225271 - protein, 144 aa, Zea mays
  unsure (1)..(144): unsure at all Xaa locations
  Clone ID: MRT4577_137037C.1.pep
TSSSDVAAVDDLEMLAAHIRLMIYDXCVLMNKDDIVVVHESEYNCRLLDYIGSPILLHRVFSGILFXSXYELLLQSGCAXKVLFPLLLTITCCMHPLYLVSELILKNYLXGVXNAAPTMLLARSGHPNXDVLRDHVSPLMRMSH

SEQ ID NO: 225272 - protein, 137 aa, Zea mays
  unsure (1)..(137): unsure at all Xaa locations
  Clone ID: MRT4577_137038C.1.pep
HPSYNSDRHYAGVSAXIVVLLATLLCAAAAVASSWEDYNHHHHGGHKSWRCLLRCEDRAWHQRPRGLEQCXEEEREKRQKRSRPXAHHRSGKGSSEDXPQPQPEEEEKPKDRGADLFXRPTFPSVXRNQQGSLEVLP

SEQ ID NO: 225273 - protein, 66 aa, Zea mays
  unsure (1)..(66): unsure at all Xaa locations
  Clone ID: MRT4577_137039C.1.pep
XFDRWYDAVEXGYEIDDTQMTVVMSGLMVWCXXENGCSPNINGNPPPSPWRLLFLKISRDLRMKVV

SEQ ID NO: 225274 - protein, 57 aa, Zea mays
  Clone ID: MRT4577_13703C.1.pep
CEEPVALWRVWLGLYTISYAFLSRELVLLSAGPFFARCLLHSGSLVSLAKLGSFRFS

SEQ ID NO: 225275 - protein, 53 aa, Zea mays
  unsure (1)..(53): unsure at all Xaa locations
  Clone ID: MRT4577_137040C.1.pep
RNIIISWYSGLSKRSDPCICMNQRLLLRWIELYVPRQWPWVTIRRXMXXXXSX

SEQ ID NO: 225276 - protein, 132 aa, Zea mays
  Clone ID: MRT4577_137041C.1.pep
ASADVKKLNKNKKLIKKLARKYDAFVASDSLIKQIPRLLGPGLSKAGKFPTPVSHNEDLSAKITDVKSTIKFQLKKVLCMGVAVGHVDMTDEELVGNVMLSINYLVSLLKKGWQNVGSLTLKASMSPPKRLY

SEQ ID NO: 225277 - protein, 98 aa, Zea mays
  Clone ID: MRT4577_137042C.1.pep
FKLDHDDACPKEKSHCYPHHTPLLMVYVSALMTLVKGAPLAQQFSSLAASSKNFVAHPFSILIVPHCHACLRCYYVIDSVKKRRIQISCTDESPPTEA

SEQ ID NO: 225278 - protein, 99 aa, Zea mays
  Clone ID: MRT4577_137043C.1.pep
LDMLEYCFLHHASLPDHLSWVDCISCPPVRDLLILFPSTPVSREQIGTTSSCTLVGVLFESLPTVKASCPLCMNTFYYNSSSSLVRVRLDPTEWMQHIV

SEQ ID NO: 225279 - protein, 59 aa, Zea mays
  Clone ID: MRT4577_137044C.1.pep
VFLLNCSSNSDLCVQAERSWCGVLQDERLAVYVKHLRRGQVRLLHAAEVGHRVDGCSDG

SEQ ID NO: 225280 - protein, 168 aa, Zea mays
  unsure (1)..(168): unsure at all Xaa locations
  Clone ID: MRT4577_137045C.1.pep
GLPLSLLAPLEANRRAAPSAPVVRLGSLLAPPSSAPSLVARPPATTAPLPHARLLPAPFRVSRLGGEAAFVGKLGHDEFGRMHAAILHNNGIDYYVVVFDVGARTALVFVTLCADGERXNPSADMVLNANELIMRIFVGKGHNTSHAHMTLEAHGSFLCLLKLRYMKG

SEQ ID NO: 225281 - protein, 65 aa, Zea mays
  Clone ID: MRT4577_137046C.1.pep
ANVRLVADVRLLLDLTKRNWVPFPRLDSSFVKYRPGATVPGVDVSEWLALTPVCFGKKTKTFAAF

SEQ ID NO: 225282 - protein, 94 aa, Zea mays
  unsure (1)..(94): unsure at all Xaa locations
  Clone ID: MRT4577_137047C.1.pep
GGTSYFSERFRSCSIESLERKKNRRGVRDQELXPISRPNASGVSTQYGWVGVPKVEEQNMIYKTLIFNSMLPSDKVVTNSYATDSMYTVDCWCI

SEQ ID NO: 225283 - protein, 120 aa, Zea mays
  unsure (1)..(120): unsure at all Xaa locations
  Clone ID: MRT4577_137048C.1.pep
KNQADASIQKHTQANLITNNLTTTATKTLGGFALLALFSSSTKAAIIPQSSLAGSVIITQRAINKYXMVLQHPGVHTYRVQQTKGASVLQQPTFHVQQQSWAHLTIQTIATQQQQQCLPA

SEQ ID NO: 225284 - protein, 169 aa, Zea mays
  unsure (1)..(169): unsure at all Xaa locations
  Clone ID: MRT4577_137049C.1.pep
PFSSFFFFFFFFFFFFFFFFFFFFFFFFFFFFFFFGAPVKQKNPKGKPKEKTGPPAKPXSGHPGGPHPRKKVTPXGKKQPXPCPINPREPPXKPSPPLGQPPPXGPPWPGTPPPXPRLRARKNPPRPPPXIPNPPPPXGFGKAPPXARGPGFPPPFLPFQGPTGPSPKK

SEQ ID NO: 225285 - protein, 94 aa, Zea mays
  unsure (1)..(94): unsure at all Xaa locations
  Clone ID: MRT4577_13704C.1.pep
RASVSASALAVXPSAAGSXVCWSGVFPXVLVLXXXAGVRVGALXXXXXGXLVPCVGVXVSAPAPAPAXXSLLLALAAAAAPAPAAAAVVVAPAP

SEQ ID NO: 225286 - protein, 46 aa, Zea mays
  Clone ID: MRT4577_137050C.1.pep
LFSMYELFFTVVSTALCIAVMCVFRCRIRIGKTITTNICTNSKYTL

SEQ ID NO: 225287 - protein, 255 aa, Zea mays
  Clone ID: MRT4577_137051C.1.pep
MRPWRRRWAAQPPPLAWTLWAMSMATFTRTKPHVNVGTLGHVDHGKTSLTAAITKGISTTRNLLADDAMVPISSPLTPPLGDSEETDKKGAVVKRLKVQAIKKDIKQSPKKVNLVAKLVRGMRVEDALLQLQVTVKRAAKTVYQVIHSARANASHNHGLDPDKLIVEEAFVGKGLFLKRVSYHARGRSGIMVRPRCRLTVVVREATAEEEAKIAKLRVSNYKKLTRKEQQLMPHRLIEVSPRWIRKRKAEAGATA

SEQ ID NO: 225288 - protein, 51 aa, Zea mays
  Clone ID: MRT4577_137052C.1.pep
FLILAVETSSLSPLSEMNNRTNYLLFTLLLSLKQLSPVGSDSLVRGSPSKA

SEQ ID NO: 225289 - protein, 136 aa, Zea mays
  Clone ID: MRT4577_137053C.1.pep
LYDARIQEKYGQWGKIEGKTLQGVLYRVYISLGLSLRGSSGCAAAAGFVFVFVRQAVGDVGNTAGGRRLWRREWQRLLSSHVFRLLLPPPPPSGGAVSQSFAAGVPVRPVLQEDPAHDPLPWLSNAALQSLATARI

SEQ ID NO: 225290 - protein, 41 aa, Zea mays
  Clone ID: MRT4577_137054C.1.pep
YLLACAHDGDCLRQQGYAIPRSAIIHSSFGCETCLIFSHPL

SEQ ID NO: 225291 - protein, 86 aa, Zea mays
  Clone ID: MRT4577_137055C.1.pep
KKNLLSFQNWGLGPFPRGLFFAPLGEKMVLVIPPWAPNFPEGGDLPHFPPRGGGAPGENWRIKFGPLGPPLFPGRVGTNTRAPFPP

SEQ ID NO: 225292 - protein, 73 aa, Zea mays
  Clone ID: MRT4577_137056C.1.pep
SLACGPRRSRYQSRGNSGRWHKAKSRCMSDGAPFYGGYGGASQIPHPNMYATASEAYPYYGNHQLVSLCSDVA

SEQ ID NO: 225293 - protein, 41 aa, Zea mays
  Clone ID: MRT4577_137057C.1.pep
CVVKLIRLLPNSPGHPRKQLPTRIQKGDPPNAWLKSAPTRL

SEQ ID NO: 225294 - protein, 37 aa, Zea mays
  Clone ID: MRT4577_137058C.1.pep
SIEVSFLGHTSYLHAATGFDMVPGFNVATDSTCTYFR

SEQ ID NO: 225295 - protein, 192 aa, Zea mays
  Clone ID: MRT4577_137059C.1.pep
STMTMHATRTTYLSFEILLYNISFLDQPLSLSLSLSKHFVDGARAAGRFHAPVHVRHRQGWLWSCAPMELCCREGPDGGTGPLGKNPRKRLALPGSSSGLPRNGCMPRARAVAWQQLGATSIRIKKASTSRHGGFLASNNGRRRPRRRGVARLPLLASPASKQPAAAMDRSLTLRRRRTSYTSLPSCGGRVA

SEQ ID NO: 225296 - protein, 73 aa, Zea mays
  Clone ID: MRT4577_13705C.1.pep
LIWFGSAANSPNCNFGLIELWSIHKFTTNCHSIFLLVVCFGTRISSLVRRVARIELCYVHAQQNKLRHGKNRW

SEQ ID NO: 225297 - protein, 261 aa, Zea mays
  Clone ID: MRT4577_137060C.1.pep
PFIYQISVHILIMSCTSIFNVPFTSFFDDTSSYKATPDESFKKPFEENLSTTFLSNQANEIILQQGFSAPVDIPKPQFYSFNAPLDHGYYEGKLNCVCFNQWINVNNTINVDDYPSILSAKDLVSFAEHFSQQQQPKPICQESSLYYNNSPPSPLLQQFSDSDYTPSQVLAGSSSPSSLGSPNLQLNYLSPVSLSTLPDSESLESSDLLFGNYQVDSLFPDVNQKKKMKATRTKVHKCPYCDHTSNRANNMREHTQIHNPN

SEQ ID NO: 225298 - protein, 625 aa, Zea mays
  unsure (1)..(625): unsure at all Xaa locations
  Clone ID: MRT4577_137061C.1.pep
MDAAKLVTPGAVSYILAHPSTGSDGAVSDLVVQVLDLKSIGMGSRFSFTATDGNDKIKAMLPTYFASEVHSGNLKNFGLIRILDYTCNSVKGNADKVLIVVKCETVCEALDAEINGEAKKEDPPIVLKPKDEGSVVAEETNSPPLVMKPKQEVKSASQIVTEQRGNAAPATRLSMTRRVHPLITLNPYQGNWVIKVRVTSKGNLRTYRNARGEGCVFNVELTDEDGTQIQATMFNEAAKKFYPIFELGKVYYVSKGSLRIANKQITPVKNANHWSLSSTSMXERIIGGSVDSPDRIRKEEEDXQLGSTAQGSHLCTSPGAGQRHTASITIRRKGRESTIRVRHSAGTDDSGSTGTISHXTDCLLVEDPDLLDVGDSSPVVVFQXVKVSXRYTYLFEFLDVSTLVINPDLHEAKNLKSWYDSXEGKDTSLAPISAEVGATRAGGFKSMYSDRVFLSHITSDPAMGQEKPVFFSLYAIISHIKPDQNMWYRACTTCNKKVTEAFGSGYWCEGCQKNYSECSLRYIMVIKLSDPTGEAWVSVFNEHAEKIIGCSADELDRIRKEEGDDSYVLKLKEATWVPHLFRVSVTQHEYMNEKRQRITVRGEAPVDFAAESKYLLEEIAKLTAC

SEQ ID NO: 225299 - protein, 121 aa, Zea mays
  unsure (1)..(121): unsure at all Xaa locations
  Clone ID: MRT4577_137062C.1.pep
GPPQAPARTYWLDRPTRTYGGVHHHANFILDNVAIPRSTFVEETAVRLLCTRLSNRHYCPAGNIDRYSTVGPCNKAVVALVHKAPQINVTQFGYFKVLGKGXLPTKPIVVKAKLISKVAEM

SEQ ID NO: 225300 - protein, 371 aa, Zea mays
  Clone ID: MRT4577_137063C.1.pep
VSKGSLRIANKQFKTVKNDYELSLNENAIVEEAEGETFLPPVQYNLVKIDQLGPYVGGRELVDIVGVVQSVSPTLSVRRKIDNETIPKRDIVVADDSGKTVTISLWNDLATTTGQELLDMVDSSPVVAIKSLKVSDFQGVSLSTIGRSTLEINPDLPEAKNLKSWYDSEGKDTSLAPISAEAGATRAGGFKSMYSDRVFLSHITSDPAMGQEKPVFFSLYAIISHIKPDQNMWYRACTTCNKKVTEAFGSGYWCEGCQKNYSECSLRYIMVIKLSDPTGEAWVSVFNEHAEKIIGCSADELDRIRKEEGDDSYVLKLKEATWVPHLFRVSVTQHEYMNEKRQRITVRGEAPVDFAAESKYLLDEIAKLTAC

SEQ ID NO: 225301 - protein, 56 aa, Zea mays
  Clone ID: MRT4577_137064C.1.pep
RTRARTRARQHQNVKFNEARMERGHDSCTKLQLTTLTTHARTSSYIILSSTSEEYA

SEQ ID NO: 225302 - protein, 88 aa, Zea mays
  unsure (1)..(88): unsure at all Xaa locations
  Clone ID: MRT4577_137065C.1.pep
MANSRQAQRTRKGRVMEKVAKTGDSDELTGEERNLLTVVFKNXIGARHASWRIIYSIEHKEEGRGNDDRDTLIKDYRGKIETEHTKDC

SEQ ID NO: 225303 - protein, 298 aa, Zea mays
  Clone ID: MRT4577_137066C.1.pep
MERELERLSSHAVVVWLGRDRPDISPERVMRAFCSRFGVRTEDIKVARSPPGDFLVTFTHRHHREAAVAARDFLHSNLDFRIRPWQLVALGERHDLYFHVRLCLEGIPPHAWNENIAKRSVAHACVLDYVEEDCLSSNKADARCLNLWAWTGNPSDIPKIVWLTITGQRRFLPDRVYRRRARSAPPEPGQHSPATITMDATPGVAVGSETTLVTGMETAQQATTVFPELGEPATTTVASFISNHTCPVAPPLLQELHQAPPNLKTKKKQAARATRKSMRLAAMHGRVGTSRNAHARSC

SEQ ID NO: 225304 - protein, 92 aa, Zea mays
  unsure (1)..(92): unsure at all Xaa locations
  Clone ID: MRT4577_137067C.1.pep
ADSALTFRCKLCIPLGATPQLLRLLLRRYKLCIPLGTSLNELSFVLFGSSQVRSHSLTFTSFGRHAPHDYDDMLXXVMLKLXPAYSALLPLL

SEQ ID NO: 225305 - protein, 56 aa, Zea mays
  Clone ID: MRT4577_137068C.1.pep
TEVPSPRNTGPYCSTGNTLTVQCATRRMTGCREGSECLGTRAGGSRYGQPISTCPS

SEQ ID NO: 225306 - protein, 65 aa, Zea mays
  Clone ID: MRT4577_137069C.1.pep
VIPWRVCGTLPVHQCIVTIQAILIDRRTDFELGMLESYASSILSSSADAKDVVIQLAKLISSRMG

SEQ ID NO: 225307 - protein, 73 aa, Zea mays
  Clone ID: MRT4577_13706C.1.pep
IYHYFYQILKNKVADIGVAGSKKGLGDGTAEMLSRLGMAAVAVTINVLLTKPIWVLATPMHDTYSNPPKPIGL

SEQ ID NO: 225308 - protein, 113 aa, Zea mays
  Clone ID: MRT4577_137070C.1.pep
KLPQLGAMASSTKSDLVSGSPDGHGYFNAQRGSYAAASLERSGSFREGGDGYAMFSASNSSRSAAVNSINLVQSLALDLRLATVDHKTSRLDLEKSISSIFGTSAEDQHHFHL

SEQ ID NO: 225309 - protein, 108 aa, Zea mays
  Clone ID: MRT4577_137071C.1.pep
MWLALAARAQTGTTLIEHSTVMDKRFGPAIIAPARIATFDSSNAMVRAIVYDLVLVSLYLACHWQRPMADRREPQYPSGIALARTSMVCARAASRAGSLCLSPAMMPD

SEQ ID NO: 225310 - protein, 50 aa, Zea mays
  unsure (1)..(50): unsure at all Xaa locations
  Clone ID: MRT4577_137072C.1.pep
CGVVGGFVLEGGRXXIKATLFLFHLISFQSLLFFRFTCRSLFTYNXGPEV

SEQ ID NO: 225311 - protein, 58 aa, Zea mays
  unsure (1)..(58): unsure at all Xaa locations
  Clone ID: MRT4577_137073C.1.pep
EIISGRMTFALCCYSLTFMRFAYKVQPRNWLLFACMLSIXSAQLIPGGRLINFEMSKR

SEQ ID NO: 225312 - protein, 443 aa, Zea mays
  Clone ID: MRT4577_137074C.1.pep
MDSGTSGRSCPLAPASAHSWAAPAPAPAPAPVPAPTVVEWPEGGALTRDWVAGLASTLDWCSRHLPADRLPAVLPPALVQRLVLAAAAILHREPNLVRVDPRPGQAVVVVGDVHGQLHDVIFLLRDAGFPSEDRIFVFNGDYVDRGAWGLETFLLLLAWKVLLPNCVFLLRGNHESKYCTSVYGFEKEVMTKYKDQGPQIYRKFLRCFEDLPLATIIAGCVYTAHGGIFRGTIVVPSKKSKKGKKGHKYKANFTVDLTSMKLGSLDELLKARRTVLDPPWEGSNLIPGDVLWSDPSLQMGLSPNKERGIGLLWGPDITQQFLRTNHLKLIIRSHEGPDARDKRHDLLGMDKGYTIDHEVECGKLITLFSAPDYPQFQASEERYNNRGAYIVLSPPDFATPVFHSFGAVKPRPAAHPFYDFEQVIDSDEELDLIAMDSGTSSLS

SEQ ID NO: 225313 - protein, 59 aa, Zea mays
  Clone ID: MRT4577_137075C.1.pep
PCFGPVQQGQFVRHEALPRSVRPLEGGAVQPVLLHESLLGTLSDHLFMGLRCMRMVNNM

SEQ ID NO: 225314 - protein, 118 aa, Zea mays
  Clone ID: MRT4577_137076C.1.pep
RLGPAPYGARKRHSPSSVDGSRERCLASGSTGVCPFFRQLNNGSSIHWPRHSLACFPYGEVTRWRPYEPDLARLGHAPPSKGCWRSAFSSKLEAPPSNHKPRAVCVHRHAAVLHVPGV

SEQ ID NO: 225315 - protein, 79 aa, Zea mays
  unsure (1)..(79): unsure at all Xaa locations
  Clone ID: MRT4577_137077C.1.pep
RLAKWYMQFDDDEKQKLIEEVHAVVTVMDAKHTNFVELRNFXIIYRRYAGLYFCICVDVNDNNLAYLEAIHNXVEVLNE

SEQ ID NO: 225316 - protein, 122 aa, Zea mays
  unsure (1)..(122): unsure at all Xaa locations
  Clone ID: MRT4577_137078C.1.pep
FXSGKKRPAHAKTCPYFDELDRLYSRSGHSAAAARDGEANAGGGEAKQASSELLDAVVKYPDVRYGPPGFGMDREQVSGGNNNANNEGGEDDGDGEEDGIGKGRAGDDQDDDEVDSHGHDDE

SEQ ID NO: 225317 - protein, 178 aa, Zea mays
  unsure (1)..(178): unsure at all Xaa locations
  Clone ID: MRT4577_137079C.1.pep
CAAIAEIVRGAAGPGDQVPQEQEGWVICRVFKKKNLVHHGAAQSGGGGGTAAAASKMESSPTSTTIIGDHASDDALDHILQYMGXRHQAGAAEPPQPXLAAAADATTTTTAACPAAATSAGLYGNNKFMKLPPLEHAGGGLPPSPGPCEYGASGIADWDALDRLAAYELNGLSDAFKN

SEQ ID NO: 225318 - protein, 47 aa, Zea mays
  Clone ID: MRT4577_13707C.1.pep
FASGSFVYLSLTCMLSINAVCHPAGSLSIHLQLRAPTYPSDPLRSQL

SEQ ID NO: 225319 - protein, 128 aa, Zea mays
  unsure (1)..(128): unsure at all Xaa locations
  Clone ID: MRT4577_137080C.1.pep
VTATIFPHCSQAPIAHLLTPYLSPAVPSMCVNPGAQPYRIQQALXTGILPLSPLWLQQPPALLQHLPWVHLLAQHIRAQLLQQLVLANLAAYSEQHQLLPFNQLAALNCAAYLQQQLPFSQLVAAYPQ

SEQ ID NO: 225320 - protein, 141 aa, Zea mays
  Clone ID: MRT4577_137081C.1.pep
VTAIPALHCPGSLMYLFRGDLGCMLYTGDFRWELGCDEARRAKQDLLDALDGDTIDVLYLDNTYCHPSLNFPPRPVVAEQVIDIIRSHPDHEVIIGVDTLGKEDLLLHISRALQTKGSCLLLFLVFGRAVKERPNPRVGYL

SEQ ID NO: 225321 - protein, 96 aa, Zea mays
  unsure (1)..(96): unsure at all Xaa locations
  Clone ID: MRT4577_137082C.1.pep
XSKLTQILSDSLGDGSKVVMVVHVSLSEDDVGETVCSLNLAKRARSIESNREIPQDLKTLKQKRLAELDREIRAAEEELKRLDEEIRRAEEKEISL

SEQ ID NO: 225322 - protein, 62 aa, Zea mays
  Clone ID: MRT4577_137083C.1.pep
WGTRTLSPAEFADSVATAAFFTHLHFLEALSDGLPLKTFTSCESLAARPLWLQACYSSTVTR

SEQ ID NO: 225323 - protein, 438 aa, Zea mays
  Clone ID: MRT4577_137084C.1.pep
MEEGLVSVDKFSGGSQAYFLTHLHQDHTRGLGAVGGWRHGPLYCSPTTARLLPIRFPGIDASLLRPLAPGASASISLFSPSSGQSLSLHVTAIPALHCPGSLMYLFRGDLGCMLYTGDFRWELGCDEARRAKQDLLDALDGDTIDVLYLDNTYCHPSLNFPPRPVVAEQVIDIIRSHPDHEVIIGVDTLGKEDLLLHISRALQTKIWVWPQRLQTIHLLGIDENRDIFTTQTSLTRIRAVPRYSVTIDNLEALNTVCPTIGILPSAIPCLWKSSEGKAKSKGRSSVKSIRSSGRGEGLTEMDCNPLSPPKLFDKDSYTLPYSEHACFSELEDFMHTVRPWTVSGIVSSSFCYVNPRHHFRHLCLDNNVNDETDMTPIKNKGRDNDKLTPKRWRNGSVTPKERKVRISSSSLYRSKVTMKRKECCGARINDTEEHIGVT

SEQ ID NO: 225324 - protein, 79 aa, Zea mays
  Clone ID: MRT4577_137085C.1.pep
ETDGSGRTARTMTHHTTNNMAMPAPSHTQACALIHEPLTHYTAPNNDIARKLHYNDIPMTESIGTDAESILANPDMPPI

SEQ ID NO: 225325 - protein, 48 aa, Zea mays
  Clone ID: MRT4577_137086C.1.pep
TTGRDHPSQKGSPPDQGDQKPDRPIRRQLIAISPPTKTGTNSLAWFVT

SEQ ID NO: 225326 - protein, 80 aa, Zea mays
  Clone ID: MRT4577_137087C.1.pep
TPIRTPNKTLGSPTNQPPIEELHLHAGGTTPRKPSQTLLSQPQTDHYTPQKRKYLSNTQPNHTHEPPLNTPQTLPFPKHH

SEQ ID NO: 225327 - protein, 62 aa, Zea mays
  Clone ID: MRT4577_137088C.1.pep
YRVPDSEPYILPFGAHNTVMMVGLDGSFYRCSFDQVNGGQMLQKEYFRFLKSDSPPLRSAAI

SEQ ID NO: 225328 - protein, 35 aa, Zea mays
  Clone ID: MRT4577_137089C.1.pep
VETLPHPKTFPFQTLSVFPSRLSHLLVRCFPLMPW

SEQ ID NO: 225329 - protein, 104 aa, Zea mays
  Clone ID: MRT4577_13708C.1.pep
GYEYDAFGSTYYVLTWAVNSGCPPPRRASAFPGSCRLEQGDTPRSAPAARPLHRPYMWLGRGAMPGRFADRGRRHETPSGSRHVRTTTRKVGALPLRVKTASSP

SEQ ID NO: 225330 - protein, 197 aa, Zea mays
  Clone ID: MRT4577_137090C.1.pep
GRVGTAVGALGDVGAVPDLVEEEEVPVDTPAKCLMRVLNRSDYYVSNRGDYYGPYTSSTVDAAAVLLADAAEARLDWRFAKLPQPQAEEVDEPFRDVANPPSHPSIVYESYRDAAEARLDWRFAKLLQPQAEEVDEPFRDVANPPSHPSIVYESYRDEAMAGASARALAGRCNERSARGRNSSLRRQIRAILPHAHL

SEQ ID NO: 225331 - protein, 417 aa, Zea mays
  Clone ID: MRT4577_137091C.1.pep
MSSQVSTSHGLHPPGKLGTFESPHAWPLSAPTAQPEAGRGDDQEVRLLSVAWNQDCGCFAAGTSNGFRIFNCDPFKETFRRDLKSGGFGIVEMLFRCNILALVGGGSNVQYPPNKVMIWDDHQSRCIGEFAFRSDVRAVKLAKDYIVIVLERKIFVYNFTDLKLLYQIDTLSNPKGLCCLSHNSNTSVLACPGVHQGHVRVEHFGLKMAKTISAHDSHISCMSLTMDGLLLATASTKGTLIRIFNTMDGTRLQEVRRGLDRAEIYSIAVSPNVQWLAVSSDKGTVHIFSLRVRVAGEDAINEQRTAESPRMDHQSSSSSIDPLIQANTGSNASSSLSFMRGILPKYFSSEWSFAQFHLPEVTRYIVAFGAQNTVMMVGLDGSFYRCSFDQVNGGQMLQKEYFRFLKSDSPPLRSAAI

SEQ ID NO: 225332 - protein, 104 aa, Zea mays
  Clone ID: MRT4577_137092C.1.pep
AGRSGIRLGVELWRRRPYPPELLPRRRPVLYRRLPSGYPVGGRDSQDAARLPPQAPGGRGSCSSPGSHASCSSPGVRRPCPPQPSVLDFIGFLWTSCAWLLADF

SEQ ID NO: 225333 - protein, 110 aa, Zea mays
  unsure (1)..(110): unsure at all Xaa locations
  Clone ID: MRT4577_137093C.1.pep
LTLTFFASFSIKGPIPSLFFFLFIIFNSIFLPSNINYNHISQTSHTTFYKYSYSTFTIXNLSXYLNLYNQNYITITTTFITSLFNNNSNYISFYYLPFNNYPQFFINLTI

SEQ ID NO: 225334 - protein, 72 aa, Zea mays
  Clone ID: MRT4577_137094C.1.pep
YAQLAVAHGIDATQYPDKNLQNGFPVISLINIKNKISTGYQLNHNTKFSPVKICCVHGLMPVQHDEVLELSR

SEQ ID NO: 225335 - protein, 472 aa, Zea mays
  unsure (1)..(472): unsure at all Xaa locations
  Clone ID: MRT4577_137095C.1.pep
MVERHYKGSSSLISYLEAGRVPVRPSRLPQSFLRSMSTQNLLTGACTSSAPAPSEAEEGDRTPLADAANAAEELYRLRDTFFPRDPSEKVAALRARADAALALLDAFPSEQKKSRQLRGVYEFLRGKILDVFPDYHKEAEDHLSKAVKLNPSLVDAWLCLGNCIWKKGDLSAAKNCFSLALSKGSDKKILCQISMLERSMAQGSVDQALLVEESIKHAKEAIMLDIRDGNSWXIIWAMLISLASLWEEPGITLSFXHSVKAYQNAEKDKTMNLNPDLYYNWATADKYLENYERALRGFEVAALKDPGLGANTEVQKIISLLDKLDNAMKGQLRSKRLASFVSSLSGVKLKSSHKKATISTLSVGLNKAVAVLGKVILFIRHDNVAPLYYLICDLERSYFILSVYGLHNDAIKDGDQVVLFEPYYRILDASCKDKHYQFKSIRVDFPEQILVNERVPAPHHVARASIHAHNKS

SEQ ID NO: 225336 - protein, 213 aa, Zea mays
  Clone ID: MRT4577_137096C.1.pep
LSCSLKDPGLWSNTEVQKIISLLDKLDNAMKGQLRSKRLASFVSSLSGVKLKSSHKKATISTLSVGLNKAVAVLGKVILFIRHDNVAPLYYLICDLERSYFILSVYGLHNDAEYAGERQVDERNRREIARRRGKGNHRHRPGCDDQPGRSKIKDGDQVVLFEPYYRILDASCKDKHYQFKSIRVDFPEQILVNERVPAPHHVARASIHAHNKS

SEQ ID NO: 225337 - protein, 86 aa, Zea mays
  Clone ID: MRT4577_137097C.1.pep
KGLKVQNQGGAHAKPKPSPLMQPPYFWKGGNKFSQTKVRLSKGVLSPRKTKKSVSVPQVFFGGGEKAGLTLPLGKLKRKIFLGWAK

SEQ ID NO: 225338 - protein, 37 aa, Zea mays
  Clone ID: MRT4577_137098C.1.pep
VNMHKRHTAGPGSQKCDARSTASSNHGQSPCLTSLPP

SEQ ID NO: 225339 - protein, 46 aa, Zea mays
  Clone ID: MRT4577_137099C.1.pep
LTQHVLALHAMRCYLTGSRSSHRRPYVRTCRVIIVIITKGEIDQVI

SEQ ID NO: 225340 - protein, 102 aa, Zea mays
  unsure (1)..(102): unsure at all Xaa locations
  Clone ID: MRT4577_13709C.1.pep
QSKXEHTEPGEAGRGHHKQKTPEARDPKADEAQHKRNPGPRGXRAPPTPPRKRGXHTKKKSSXAPSGAXARNIIQARRRRNQEKESTPPPGRPLALVLARER

SEQ ID NO: 225341 - protein, 105 aa, Zea mays
  Clone ID: MRT4577_1370C.1.pep
SQPWTAEPPEYLLLLPLITIPLIDFLVLTRRRYDQRRFPPELWAMPVIGHLHHLAGAPQHRDLRDIVRGHGPLMTLRFWELRPRGRLVAGRREADVEEPQPGLPR

SEQ ID NO: 225342 - protein, 179 aa, Zea mays
  unsure (1)..(179): unsure at all Xaa locations
  Clone ID: MRT4577_137100C.1.pep
PGLVYSIVRLLSGPVGVRARSDPASAHHLSALRSNPWPAGDEKTMITLXKSYDGHEFEVEEAGGMXYQTIRHMIXDDXSICGISVPNVNSNILXGNLXYCNKLVHARXAGPPAPXGRSATWVLATITAPRVSGVDLKNCDAHLVKGEQPTLFXXLCRXGHYLNIKGMLRLSCHTVAHMI

SEQ ID NO: 225343 - protein, 543 aa, Zea mays
  Clone ID: MRT4577_137101C.1.pep
ANNPELNWISRVLKLSLNDLPSYLRSCFLYCSIFPEDYKIRRKMISKLWIAEGLVEERGDGTTMEEVAECYLMELTQRSLFEVTERKTCGRARTFLMHDLVREVTSIIAKKEKFSIALAHGGASTTQVAHEARRLCIQRGAQTINSLRSSRLRSFILFDAEVPCSWIHDTVSCFRLLRVLCLRFVNVEQVPSVVTELYNLRYLDMSYTKVKTVPASFGKLVNLQSLDLRETYVEELPLEITRLTKLRQLQVYALYDILQRSSKFLSATKIPGNICHLKDLQTLHVVSANKVLVSQLGNLKLMRSLAIAEVQQSYIAELCNSLTKMTNLKTLFISTCNVNETLDIEMLKPLPNLTSFLLSGKLERGLPPSIFSMNLKQLKLFGSSLKKDPVSSFSHMLNLVNLFLTGAYDGEQLTFCTRWFPNLKYLQLADMEHLNWIELEDGTMMNLQYLSLAGLRNLKAVPEGIKYIRALHEMLLTDMPNEFMLKLHGSDNHIVQHIPNIKKYDSSDSQAVNNLAYLPWLANKFGPGAAIKYASINCGSSGS

SEQ ID NO: 225344 - protein, 76 aa, Zea mays
  Clone ID: MRT4577_137102C.1.pep
KAIGFICLVLIGIISLVLIRIIHGLAASRAQARTRSAGRDEADAEPERDAAQLLVVVPDNLHVDRVGALFGSSVIS

SEQ ID NO: 225345 - protein, 420 aa, Zea mays
  Clone ID: MRT4577_137103C.1.pep
MPATDLQGSSPFSSFGRTLLSLRRDAPASASAAAAMPPPGVDPELEEFHAHVAAHLADLSGPGAAGEEEFMSIAWIRRLLEAFLLCQEEFRVAVAEARRRRAGATPPAAERLVAEFGDRAVKVLDVCNAARDGVDQARRWERLAGIAASALLAPADGQIHEGQLRRARKALSDLSVLLIDDAAAAAATGPAGGLASILASHRNRSFGRARASPSRAASSSSSSSSPSAHFRSLSWSVSRTWSAARQLQAIGAGLAAPRASEASWSLAAPAYAMGCLLHLAAWALVAAVPCPDRAAALQAHHLPAAPPRAAFPWAPPLLALQERLAEEGKRKDRRNSCGLLREIHALEKCAQRLAEAIDAAPVPLTGEREAEVREAAAQLAAACSAMKDGLDPLERTRGEVFHRIVRSRMEGLDSPMPNAD

SEQ ID NO: 225346 - protein, 219 aa, Zea mays
  unsure (1)..(219): unsure at all Xaa locations
  Clone ID: MRT4577_137104C.1.pep
RFAQRRGGPGNKKKKKKKKKKKKKKKKKKKKKKKKKKKIPPFFGNQLSNVKKQNLGPQKGPPKYFGPLMPLGXSGKGAKGTIFPXWPQTPKSSLFPSDQTQGGVSGGENPIFQPXRNQKGIGAGILPLSPLVPQKWCPLLHKLPWGDFLAQKFWGKKLQKLGEKNLFAYSQKKEFFPFNQLSGLNLASYLQKQIPFNQLGGANTQKFLPLNQLGRFNSP

SEQ ID NO: 225347 - protein, 73 aa, Zea mays
  Clone ID: MRT4577_137105C.1.pep
LHPQHRRSYRRRTRSSSTSSSRISRTTEAGAPSSSSSTGLIESICSVLTRFKLARDVYYGCLVISGCIITHCV

SEQ ID NO: 225348 - protein, 297 aa, Zea mays
  Clone ID: MRT4577_137106C.1.pep
RYPYDPRSTLPSLRMPYLNYSSSLSSESSESLKDANELLKQEVQKLQAEVNSLRQEREQQDAELQKADAKAREAMNLATEEASKLKTAKDVINSLTAQLKEMSERLPPGACDVKNNGRVMGDLAPEMGREKQMRYGDRFSGLPAQVYQTSNYSETAMVPPQGSSRSEHVDGVREFFSPVQQMANGGGSTTIGYRYRSDDHDRRETDRFQINLQSLNTRSSNSPSNQVDAEWIEQYEPGVYLTLVSLRDGTKELKRVRFSRRRFGEHQAESWWKDNCEKVYDKYNVCGTDRLSSVTTA

SEQ ID NO: 225349 - protein, 105 aa, Zea mays
  Clone ID: MRT4577_137107C.1.pep
NIGGCFFFKTNHQNYGDFSNPFHTQKLQQAQGEKNDPNNYILKKKSPLKQLKSCKAQLLLKSKNHDPFYSIKSLFSSRKGCSFSAKNSNSCCCCITMFKGTFRGL

SEQ ID NO: 225350 - protein, 174 aa, Zea mays
  unsure (1)..(174): unsure at all Xaa locations
  Clone ID: MRT4577_137108C.1.pep
MMSFVTRGSMXDIDSRWLYHGSSAERRSMLNMQGAGRTNSRCLXAMIVTVLGGVMEQNSHXTVSIFGLGLACXASLMTTSLXMHATCQXLADAACDNRCFGDTELRVHVPTSITLGTRGRLQSIRHXLGLIDREDDEYXYNTVRALYADNIPHASCMIEEEINSLSVLKLKFRH

SEQ ID NO: 225351 - protein, 91 aa, Zea mays
  Clone ID: MRT4577_137109C.1.pep
MAVSFLLVPAVSIEMCVGSLILFMWNRADKKDAQVFARVLASGLICGDGLFSIPYALLARYNVTPPICVRFIGRVQNKMLDDYMEKVAASQ

SEQ ID NO: 225352 - protein, 221 aa, Zea mays
  Clone ID: MRT4577_13710C.1.pep
EIALLGQFEHENIVQYYGTDKEESKLYIFIELVTQGSLSSLYQKYKLRESQVSAYTRQILNGLVYLHERNVVHRDIKCANILVHANGSVKLADFGLAKEMSKINMLRSCKGSVYWMAPEVINPKKMYGPSADIWSLGCTVLEMLTRQIPFPNIEWTNAFFMIGRGEQPTIPCYLSKEAQDFIGQCVRVDPESRPSASQLLEHPFVNRPLRASFESSSPPAI

SEQ ID NO: 225353 - protein, 183 aa, Zea mays
  unsure (1)..(183): unsure at all Xaa locations
  Clone ID: MRT4577_137110C.1.pep
TRGVSPSFPAGYTVTTAVEMQQHMKQPADHFSFAPFRKTFDQEVGIGGDQVPSNQLGRSEPHHAGLGQQPHGPVLATKTAVPATAFLISRPSNPVSTIVPPAMQHASVVLDHDQFHVPAILLHHHDKFQHQQHQQSQPQQKLDRRSAGLEELIMGCTSSTSTKGXCFHCSPPRDRMALHVLAT

SEQ ID NO: 225354 - protein, 133 aa, Zea mays
  Clone ID: MRT4577_137111C.1.pep
AGRVPPRHFPRPLSLWFSAGAGPPWRHPFPRLHYRRDAQPGHLLLAMATTSSSTSSPRIAAPLLLPLPSCMPTFTRRAWPSSPLWPLPAMKHSIAVPRSSPAPSLRSTSLSSGVAWFGLDKNANPLSPVVRDA

SEQ ID NO: 225355 - protein, 460 aa, Zea mays
  unsure (1)..(460): unsure at all Xaa locations
  Clone ID: MRT4577_137112C.1.pep
LELRAARRRNKNHPSPYRCYSCTRALPPGAAAYDPDMNRAHSSSSKLINEKLVEHRISTAKHCPHCGEKIDSKPDWVGLPAGVKFDPTDQELIEHLEAKVKDEGSRSHPLIDEFIPTIDGEDGICYTHPEKLPGVTRDGLSKHFFHRPSKAYTTGTRKRRKIQTECDVHKGETRWHKTGKTRPVMVNGRQKGCKKILVLYTNFGKHRKPEKTNWVMHQYHLGDLEEEKEGELVVCKIFYQTQPRQCSWSSDRGAAATALAATAAAAAAQEQHRRDSGSGSCSSRDHEVSATSFPAGYTVTTAVEMQQHMKQPADHFSFAPFRKTFDQEVGIGGDQVPSNQLGRSEPHHAGLGQQPHGPVLATKTAVPATAFLISRPSNPVSTIVPPAMQHASVVLDHDQFHVPAILLHHHDKFQPQQKLDRRSAGLEELIMGCTSSTSTKGXCFHCSPPRDRMALHVLAT

SEQ ID NO: 225356 - protein, 87 aa, Zea mays
  Clone ID: MRT4577_137113C.1.pep
VCPPALFGHPKITVCIPGIQDFFVRGSLLGPLIITPGSLNKNGYIGFKITMALDSFVAGPPALPIIPPPRFFFQGPGKFLVLYTPRS

SEQ ID NO: 225357 - protein, 90 aa, Zea mays
  Clone ID: MRT4577_137114C.1.pep
KMVKDHHKETLAHALIAQPVPSQISSVPSLPQSTEWLLDSGASHHVTGDLLRTCPLILLMLVQILSPLEWSGDGTGMKISHIGSSPAALS

SEQ ID NO: 225358 - protein, 117 aa, Zea mays
  Clone ID: MRT4577_137115C.1.pep
MADQLTDDQIAEFKEAFSLFDKDGDGCITTKELGTVMRSLGQNPTEAELQDMINEVDADGNGTIDFPEFLNLMARKMKDTDSEEELKEAFRVFDKDQNGFISAAELRHVMTNLGETK

SEQ ID NO: 225359 - protein, 149 aa, Zea mays; identical to SEQ ID NO: 215200
  Clone ID: MRT4577_137116C.1.pep

SEQ ID NO: 225360 - protein, 149 aa, Zea mays; identical to SEQ ID NO: 215200
  Clone ID: MRT4577_137117C.1.pep

SEQ ID NO: 225361 - protein, 136 aa, Zea mays
  Clone ID: MRT4577_137118C.1.pep
IDLKLLPAVHRTGCITTKELGTVMRSLGQNPTEAELQDMINEVDADGNGTIDFPEFLNLMARKMKDTDSEEELKEAFRVFDKDQNGFISAAELRHVMTNLGEKLTDEEVDEMIREADVDGDGQINYEEFVKVMMAK

SEQ ID NO: 225362 - protein, 347 aa, Zea mays
  Clone ID: MRT4577_137119C.1.pep
MAPPAAPTALHHRTPLLLPRRTVALGATATARAARAASLAVRAQPDTTAAAVSTSAPEPTPEFKPPPGFKAPEPKRYEVKSGQVGSVLGASLAIPLRLGTGVFVLGYSPSLVSPSEIPSDQYALEFGAWKVKEESKIGQCKRPEKPIEIYEFEGCPFCRKVREMVTVLDLDVLFYPCPQKGPTFRPKVLEMGGKKQFPYMVDPNTGVAMYESDDIIKYLADTYGDGTVPIMLSLGLLTAITAGLATLGRIGKGNSYIASKVPPQPIEIWAYEGSPFCKLVRETLVELELPHLLHSCARGSPKRQEFFKKKGLFQAPYIEDPNTGVQMFESAEIIDYLKATYALYPSS

SEQ ID NO: 225363 - protein, 41 aa, Zea mays
  Clone ID: MRT4577_13711C.1.pep
VYWQWSKYEEIRVIGVRVGIGGLEVGVEENEGWVDQRVKSI

SEQ ID NO: 225364 - protein, 323 aa, Zea mays
  unsure (1)..(323): unsure at all Xaa locations
  Clone ID: MRT4577_137120C.1.pep
MAASVSASCLIGLSSLAVVLVALASAASAQLSSTFYDRSCPNALSTIRSGVNSAVRQEPRVGASLLRLHFHDCFVRGCDASLLLNDTSGEQSQGPNLTLNPRGFVVVNSIKAQVESVCPGIVSCADILAVAARDGVVALGGPSWTVLLGRRDSTASFPGQTSDLPPPTSSLRQLLSAYNKKNLNPTDMVALSGAHTIGQAQCSSFNDHIYNDTNINSAFAASLRANCPRAGSTALAPLDTTTPNAFDNAYYTNLLSQKGLLHSDQELFNSGSTDSTVRSFAXQHVGLQQRLRHGHGQDGQPQPPDRNPGADQAQLLEGQLVNY

SEQ ID NO: 225365 - protein, 53 aa, Zea mays
  Clone ID: MRT4577_137121C.1.pep
ADYSSMTFYTKALNNKIHSRNYICECKFISLQFTQSITTTVISNAAGQGPGVS

SEQ ID NO: 225366 - protein, 179 aa, Zea mays
  Clone ID: MRT4577_137122C.1.pep
GSVLGASLAIPLRLGTGVFVLGYSPSLVSPSEIPSDQYALEFGAWKVKEESKIGQCKRPEKPIEIYEFEGCPFCRKVREMVTVLDLDVLFYPCPQKGPTFRPKVLEMGGEKQFPYMAITAGLATLGRIGKGNSYIASKVPPQPIEIWACEGSPFCKLVRETLAELELPHLLHVFSDPEL

SEQ ID NO: 225367 - protein, 161 aa, Zea mays
  Clone ID: MRT4577_137123C.1.pep
MSGRNFGDSMELSSSGRSSGSRRGKRGGGGGGGTDRPKQPQRGLGVAQLEKIRLQSEMVEYFHPLGQHPSLIHRTGSLSLMPYGERDVRYSEFQAPIIRSPSSSAVHGTPHYAQHPNNITLSLFEPQESARLKGHHDRSQSADSTSLNSDDPQDVDLELKL

SEQ ID NO: 225368 - protein, 87 aa, Zea mays
  Clone ID: MRT4577_137124C.1.pep
MAPPAEPTALHHRTPLLLPRRTVVLGATATARAVRAASLDVRAQPDTTDAAVSTSAPEPAPEFKPAPGFKAPEPKRYDVKSGQVGSV

SEQ ID NO: 225369 - protein, 395 aa, Zea mays
  unsure (1)..(395): unsure at all Xaa locations
  Clone ID: MRT4577_137125C.1.pep
MAPPAAPTAPHHRTPLFLPRRAAATARAARAASLAVRAQPNTAAASTSAPEPPEKFKPPPGFKVPEPKRFEIKSGQQSSVLGALLAIPLRLGTGVFVLGYSPSLVSPSEIPSDQYALEFGAWKVKEESKIGQCKRPEKPIEIYEFEGCPFCRKVREMVSVLDLDVLFYPCPRKGPTFRPKVLEMGGKKQFPYMVDPNTGVSMYESDDIIKYLADTYGXDGSVPIMLSLGLLTAITAGLATLGRIGKGNSYIASKVPPQPIEIWACEGSPFCKLVRETLVELELPHLLHRYPKYFKTTSHXGIRIQNSLQAVAKLNLVELSLXQFFWTEICALQEXVTRSYSCSCARGSPKRQEFFKKKGLFQAPYIEDPNTGVQMFESAEIIDYLKATYALYPSS

SEQ ID NO: 225370 - protein, 71 aa, Zea mays
  Clone ID: MRT4577_137126C.1.pep
ILVYCLHLFVAGLHFQQFKKKGGGHFRNLHALLRTWYKILGIFTGMSSAVYLVKASKKKKKKKKKKKKKKL

SEQ ID NO: 225371 - protein, 89 aa, Zea mays
  unsure (1)..(89): unsure at all Xaa locations
  Clone ID: MRT4577_137127C.1.pep
GSSPLVFVAEDLHVRAPDLVLLRCTRRPLEPHRLAARSSPRSQPLVLVDLRFXIMCVLARSYLSVAGYPTGRVSVQAARRVYATSLLVV

SEQ ID NO: 225372 - protein, 83 aa, Zea mays
  Clone ID: MRT4577_137128C.1.pep
VEELAVGPSHCTSSTANGLEVDKYNSGLCVFRARSTHIDVSVLKSIIFTPRNGLVTRHLAVQHESHAQVQYSCLARVLEVHSC

SEQ ID NO: 225373 - protein, 87 aa, Zea mays
  Clone ID: MRT4577_137129C.1.pep
MGRGGLSARSATAVVVDGGDNKELKSSWPETVGKHMVEAIAIIKSERQDVILELHTADDPQPPDYNDQRVCLFLDDSLIVVRTPVVG

SEQ ID NO: 225374 - protein, 629 aa, Zea mays
  unsure (1)..(629): unsure at all Xaa locations
  Clone ID: MRT4577_13712C.1.pep
MFSWNRKQSSSSGSPSPSSSSGRRRGGADASMDSSSRGGGGSGSGSRGRSPRLDRRNAVKRVDYEAGAGAGASVSVAASWSSSSSADQQRSPGPGLQPSRSLDVAPGADLRISGSVEGEVDELCRSLGLSGPEDFAIPVAAWEARKSRSNSDLLPRSHPDPSTPADEPSPIARVVSAPDVQPTRFVPAPIPATVAAPEESPKAAPAVAVAAPVGGLPLPSPRRGGGEVGIRGARPPLLSPPPPIGALAPPPVRRSFVDDDMTRSAWDIVQSFAPREQGSEPGERLDTRCNSDTEEESEAEDGVAAVEGELKELRIGETFEGLTGTSSLSTTNDDDASSTTTEAMFIISPNGKFKRKIKSWMRGALLGSGSFGMVYEGISDEGAFFAVKEVSLLDQGSNAQQSIVALEQEIALLGQFEHENIVQYYGTDKEESKLYIFIELVTQGSLSSLYQKYKLRESQVSAYTRQILNGLVYLHERNVVHRDIKCANILVHANGSVKLADFGLAKEMSKINMLRSCKGSVYWMAPEVINPKKMYGPSADIWSLGCTVLEMLTRQIPFPNIEWVKAFXMIGRGEQPTIPCYLSKEAQDFIGQCVRVDPESRPSASQLLEHPFVNRPLRASFESSSPPAI

SEQ ID NO: 225375 - protein, 668 aa, Zea mays
  Clone ID: MRT4577_137130C.1.pep
SRARAIEDNEARALMAAQAIMSCEDTLVNLQDQKNKLTEEAEVELRRANEAIEKLKTFKNECGLPHVQMEWHDHHEIELVHALPFEDSDDSALNESRLDLQEICQRVKEIIESYPELSVAELADKVDRLVEKVISLELATTSQNAQIDRMKTEIDGLHERLHALEQDKVALVVDSSNLADGLRKAEEMLQEVQQIWKSVQNGFENICKQMTEAAHELTEFVETLHAPEQESSDFVDSSRDSKHDTSLEDYSGLTSLSVQNEPSKSLHGTTNETDKHEETLEDQAQKELVPKESEVEGKILLEDYASVLQSYKDTEQKLSEIEKINQDYHLEAMSELKELKSANATKDEEIQSLRRMLRSLRKKMSASIIESIEKAEETSKISSSPTTEDKEIAKSEETSKISATPSTEDKEIAEIEEYIKQWQINDSLASSVAEEKFGAEIDRVLGENLDFWLRFSTSYHQIRNFQICFDMLKTEMYRLTDEQEDGGNYGFAGSYQVAKLESAVLEKKFRDLNTDLQVWIEKNVLLKGEVENRFSSLCCIQEDISKITTLDKCDEVHFNPFQAAKFQGEVLNMKQENNKVAKELEAGLDHVRGLQVEVGRVLLKLRENLEVSIARSHRAQQNFRNLSTKAGVPLRTFLFGSKTKRSSFFSCMSPGVHKQHSGSKVGRR

SEQ ID NO: 225376 - protein, 86 aa, Zea mays
  Clone ID: MRT4577_137131C.1.pep
MHAQALTLAVLGGAALAHHYHGKSTNAGKRQQQEDLDYGFYSQLPPATDADGNENERLLFDFHGLLSISLRFFSCTTTTCTISSID

SEQ ID NO: 225377 - protein, 157 aa, Zea mays
  Clone ID: MRT4577_137132C.1.pep
RPHIQRSHRISPIPRPSICRMHNRQQHRRSCPCSQETRCRSRSLSYAQLTEEEIAVLHLYTQQTEFYVFLNRRARDEVRANFAPYLPVMKLLLSALYKVDRRNSPLLTPFFFSVTTSTRNLLSRSETQPKRQISQRSRICLVGEYKCCTFSQNIGKR

SEQ ID NO: 225378 - protein, 98 aa, Zea mays
  unsure (1)..(98): unsure at all Xaa locations
  Clone ID: MRT4577_137133C.1.pep
RVRTRVRCYQQEVTALNQLAAGNYGAYLQQQLPFSQLGAAYPQECGPFNQLAGLNSAAYLQQEQLPPFSQLADASPVDFLTQHQSVAFXLXAGPNAGT

SEQ ID NO: 225379 - protein, 70 aa, Zea mays
  Clone ID: MRT4577_137134C.1.pep
MRLIHARMHAQALTLAVLGGAALAHHYHGKSTNAGKRQQQEDLDYGFYSQLPPATDADGNENEKKEKPIN

SEQ ID NO: 225380 - protein, 112 aa, Zea mays
  Clone ID: MRT4577_137135C.1.pep
MERMSSSLQYWVEEHKLSTIGAVWATAVGASVAYSRRRAPARATGMRLIHARMHAQALTLAVLGGAALAHHYHGKSTNAGKRQQQEDLDYGFYSQLPPATDADGNENERWSW

SEQ ID NO: 225381 - protein, 61 aa, Zea mays
  Clone ID: MRT4577_137136C.1.pep
QKCWILINSYANPVFSKEFGKDFFHFQSSKVDRLAYNTADSKTTQHLSTNRRTSLSRDIKA

SEQ ID NO: 225382 - protein, 69 aa, Zea mays
  Clone ID: MRT4577_137137C.1.pep
PRVRAFLYQFHDTVCNPGHRHANRRGLPRGPKETEISASVPDAKNAKSGAASYWAHERQVWVHESSQAR

SEQ ID NO: 225383 - protein, 162 aa, Zea mays
  unsure (1)..(162): unsure at all Xaa locations
  Clone ID: MRT4577_137138C.1.pep
MSLTYRFPQHVQTTALRPDIPALLTRTNELTPRHLIFIHNDKNLQLLXISCLQYINLNDXKNKYKFSDYSITFTVVQWFWQMVRISAXQTITDCFSFVTSTLKGSDHKDVSXLRRICSPPRFQIHILYGCTNHMTSDHTXFNQLKLXPEYXAKTQLQYRLLP

SEQ ID NO: 225384 - protein, 75 aa, Zea mays
  Clone ID: MRT4577_137139C.1.pep
EASTHPLLQRDVAEERPIYRRSASGRGPKTQTRCRRCWTSLRRSTTCWIYKEPTSHPPWRLPSTASSSSLMVIVP

SEQ ID NO: 225385 - protein, 132 aa, Zea mays
  Clone ID: MRT4577_13713C.1.pep
MVVVFLFKFQMSKINMLRSCKGSVYWMAPEVINPKKMYGPSADIWSLGCTVLEMLTRQIPFPNVEWTNAFFMIGRGEQPTIPCYLSKEAQDFIGQCVRVDPESRPSASQLLEHPFVNRPLRASFESSSPPAI

SEQ ID NO: 225386 - protein, 70 aa, Zea mays
  Clone ID: MRT4577_137140C.1.pep
RSTFMQSFCEAMVFGEALIAPNQQLPLGLRLGKGDMVSRLVVLKSTEVAPLGGLYWCPLEHLHLVSCREV

SEQ ID NO: 225387 - protein, 291 aa, Zea mays
  Clone ID: MRT4577_137141C.1.pep
MGGAQLVGRWVESYTGMSTDNIKGLLLALSSSLFIGASFIVKKKGLKKAGASGVRAGVGGYSYLLEPLWWAGMVTMIVGEIANFAAYAFAPAILVTPLGALSIIISAVLAHIMLREKLHTFGILGCILCVVGSTTIVLHAPPERQIESVAEVWDLATEPAFLCYAAVVLAAAFVLIFHFVPEYGQTHIMVYVGICSLVGSLSVMSVKALGIALKLTFSGMNQLVYPQTWVFSSDVTLCIVTQMNYLNKALDTFNTAVVSPIYYTMCTSLTILASVIMFKDWDRQNPTQIVT

SEQ ID NO: 225388 - protein, 64 aa, Zea mays
  Clone ID: MRT4577_137142C.1.pep
MARKCSSCGNNGHNSRTCSGHGAGGGGVRLFGVQLHVGSSPVAMKKCFSMECLSSSASAAPAYY

SEQ ID NO: 225389 - protein, 54 aa, Zea mays
  Clone ID: MRT4577_137143C.1.pep
LHQAHRTLTKITQTISNYIKQFKLTQLTLKTRSTLIKINRPTILTIHTTQRSYI

SEQ ID NO: 225390 - protein, 82 aa, Zea mays
  unsure (1)..(82): unsure at all Xaa locations
  Clone ID: MRT4577_137144C.1.pep
MAPLLAAAMNHAGAHPGLRSHLVGAGNEGISRHHLPPSSPRXSQRRRRLSFTTRAARGGSQNGVQMLSPSEIPPRDWPPLWL

SEQ ID NO: 225391 - protein, 143 aa, Zea mays
  Clone ID: MRT4577_137145C.1.pep
IWRGPRQGQLGVLSEGGSGCCRGEFAGILVRPGRARCCIGASVRALLQMPELEGATTRALEAKPRRGRLAWGEAGAPCHGDEQHHSGEKPIGAADVAAGDGDDNQSGEVRPDDAPDGHEGGARGDMGESWRRHADGVMVTRPR

SEQ ID NO: 225392 - protein, 64 aa, Zea mays
  Clone ID: MRT4577_137146C.1.pep
NTGHYSGEMLPIGPVIIGVRFILKDRFIHHNKRVLMKHLRDHHSVLHRHLLLHFHLLFSIGREV

SEQ ID NO: 225393 - protein, 58 aa, Zea mays
  Clone ID: MRT4577_137147C.1.pep
LKRVTEVQATVERGPEVTGPHATAPRGTLVVQGQRLGGATPDLSHLQTGAGTVRTVKG

SEQ ID NO: 225394 - protein, 50 aa, Zea mays
  unsure (1)..(50): unsure at all Xaa locations
  Clone ID: MRT4577_137148C.1.pep
QQIWINLKDLTXKKKKKKKKVLCVCYHCLRASSGALSVAGGGSGLGSVLG

SEQ ID NO: 225395 - protein, 85 aa, Zea mays
  Clone ID: MRT4577_137149C.1.pep
GPSRPAGILSILNHNHSHKENFFSVIEVNEQYNQGIVLHPLHVIFRYQSKQALDRFSFSFSDPVCNIQASCNHLYSSYTCSCTCF

SEQ ID NO: 225396 - protein, 630 aa, Zea mays
  unsure (1)..(630): unsure at all Xaa locations
  Clone ID: MRT4577_13714C.1.pep
MFSWSRKQSSSGSSSGRRRGGADASMDSSSRGGPGSGSRGRSPRLDRRNAVKRIEYEASAGASASWSSSSSAEQQRSPGLRPSRSLDLAPGADLRISGSVEGEVDELCRSLGLSGPEDLAVPVAVWEARGSRANSDQLPRAWXLGIHTRRRNLTDCAGGLGARCSADSLLPCPHSRGVTPLFACFHRHRVGGGAYRCGARGVTQRCPCLCCRGSRRGFXLPSPRRGGGEVGIRGARPPLLSPPPPIGALAPPRVRRSFVDNDMPEAKWDIVQTFAPRDQGSELGLGGSVDSRCNSDKEEENDVXMGSQTKKASYNNXVALEQEIALVGQLSTTNNAVXQYNHGGHVXISPNGKFKRNIKSWMRGALLGSGSFGMVYEGISDEGAFFAVKEVSLLDQGSNAQQSIVALEQEIALLSQFEHENIVQYYGTDKEESKLYIFIELVTQGSLSSLYQKYKLRESQVSAYTRQILNGLVYLHERNVVHRDIKCANILVHANGSVKLADFGLAKEMSKINMLRSCKGSVYWMAPEVINPKKMYGPSADIWSLGCTVLEMLTRQIPFPNVEWTNAFFMIGRGEQPTIPNYLSKEAQDFIGQCVRVDPESRPSASQLLEHPFVNRPLRASFESSSPPAI

SEQ ID NO: 225397 - protein, 346 aa, Zea mays
  Clone ID: MRT4577_137150C.1.pep
MVTNVVDLRSDTVTKPSDAMRAAMAAADVDDDVLGADPTARRFEAEMAALLGKEAALFVPSGTMANLVSVLAHCDVRGSEVILGDASHIHVYENGGISTLGGVHPRTVPNNPDGTMDLARIVGAIRNPDGALLYPTTRLICLENTHANSGGKCLSVEYTDKVGEIAVNHGLKLHIDGARIFNASVALGVPVHRLVKAADSVSVCLSKGLGAPIGSVVVGSEAFIDKRASRKLNSSRWIHLRSRPIWCSSISWIHTFHRASYAKSWNNAMFLQCQQVQKVAISQDRRGPIGNGDALNEVGGPTNPTSSSRRGVDAPARRVLAPRIRSLDKCVLLTIVYSVIITVLYS

SEQ ID NO: 225398 - protein, 95 aa, Zea mays
  Clone ID: MRT4577_137151C.1.pep
WPEAITRTPRPRTSLLAKSVINGEWRFTTQPPDLGASFAVLARLRNCILRASKRRDGTPVATRYDRFELECGGIVGQCHQRWVEVSVESRKERFV

SEQ ID NO: 225399 - protein, 36 aa, Zea mays
  Clone ID: MRT4577_137152C.1.pep
WASFNLFLPVYNAKADLASLGLYVPNKFLFVCVSAL

SEQ ID NO: 225400 - protein, 75 aa, Zea mays
  Clone ID: MRT4577_137153C.1.pep
MRTYKLREQHASAHDLMPQDEQGYAIARGALKLHGERFQTAVNDNDLNPVWNERFYFHGSDPSNLPDMPHAAYVY

SEQ ID NO: 225401 - protein, 87 aa, Zea mays
  Clone ID: MRT4577_137154C.1.pep
VGSFYKSMYRNSQCQMKVKARRQKGRIVMGCIWLCSPKPYPSSIAPRPVPPLGSNRANKLRILDDASLFSLSQLMSCARGIVVIQLL

SEQ ID NO: 225402 - protein, 238 aa, Zea mays
  unsure (1)..(238): unsure at all Xaa locations
  Clone ID: MRT4577_137155C.1.pep
MVTNVVDLRSDTVTKPSDAMRAAMAAADVDDDVLGADPTARRFEAEMAALLGKEAALFVPSGTMANLVSVLAHCDVRGSEVILGDASHIHVYENGGISTLGGVHPRTVPNNPDGTMDLARIVGAIRNPDGALLYPTTRLICLENTHAXESHELNXLNXPSQAARTCIFVNVNTPRTTVSXSGGKCLSVEYTDKVGEIAXEHGFELHIDGARIFXASVALGGPVHRLCKAADSVSVCLS

SEQ ID NO: 225403 - protein, 69 aa, Zea mays
  Clone ID: MRT4577_137156C.1.pep
GFGVYPLLETVAFEYFDTNASGPSIVLPAALLAYLSFTRQTQSLLGSRHGPVFVSLACTPCDFYEHDDL

SEQ ID NO: 225404 - protein, 71 aa, Zea mays
  unsure (1)..(71): unsure at all Xaa locations
  Clone ID: MRT4577_137157C.1.pep
RARWGTKWISFSRNDPTRLLDPAGEEVPRSLRGAIWWRLLVVARWTRLXERQSERRERRAGGEGKARPDVW

SEQ ID NO: 225405 - protein, 339 aa, Zea mays
  Clone ID: MRT4577_137158C.1.pep
YIGLVVDLRSDTVTKPSDAMRAAMAAADVDDDVLGADPTARRFEAEMAALLGKEAALFVPSGTMANLVSVLAHCDVRGSEVILGDASHIHVYENGGISTLGGVHPRTVPNNPDGTMDLARIVDAIRNPDGALLYPTTRLICLENTHANSGGKCLSVEYTDKVGEIAVNHGLKLHIDGARIFNASVALGVPVHRLVKAADSVSVCLSKGLGAPIGSVVVGSEAFIDKARILRKTLGGGMRQVGVLCAAAYVAVRDTVGKLADDHRKAKALAEGLTKIKQFTVDSSSVETNMVFFDIVDPHISPSKLCQVLEQRNVLAMPASSKSRCFARSSWPYCERRCS

SEQ ID NO: 225406 - protein, 372 aa, Zea mays
  Clone ID: MRT4577_137159C.1.pep
MVTNVVDLRSDTVTKPSDAMRAAMAAADVDDDVLGADPTARRFEAEMAALLGKEAALFVPSGTMANLVSVLAHCDVRGSEVILGDASHIHVYENGGISTLGGVHPRTVPNNPDGTMDLARIVGAIRNPDGALLYPTTRLICLENTHANSGGKCLSVEYTDKVGEIAVNHGLKLHIDGARIFNASVALGVPVHRLVKAADSVSVCLSKGLGAPIGSVVVGSEAFIDKARILRKTLGGGMRQVGVLCAAAYVAVRDTVGKLADDHRKAKALAEGLTKIKQFTVDSSSVETNMVFFDIVDPHISPSKLCQVLEQRNVLAMPASSKSVRFVIHYQISDSDVQYALTCVEKAVEELLKGGTKLEHLTNGTAKNSYWH

SEQ ID NO: 225407 - protein, 99 aa, Zea mays
  Clone ID: MRT4577_13715C.1.pep
TRPDQCDERTRAIFFDPQQVTSRARAMIFDPKPNPKKPDSMCPSGRHGPTRPTRHYARVRRGPSQMTHDLTLTRPEPDLSRRLNRSKPNRKQGCLTPPL

SEQ ID NO: 225408 - protein, 289 aa, Zea mays
  unsure (1)..(289): unsure at all Xaa locations
  Clone ID: MRT4577_137160C.1.pep
MVTNVVDLRSDTVTKPSDAMRAAMAAADVDDDVLGADPTARRFEAEMAALLGKEAALFVPSGTMANLVSVLAHCDVRGSEVILGDASHIHVYENGGISTLGGVHPRTVPNNPDGTMDLARIVGAIRNPDGALLYPTTRLICLENTHANSGGKCLSVEYTDKVGEIAVDHGLKLHIDGARIFNASVALGVPVHRLVKAADSVXTFSSRWVLRSIRNRHAYEMTDLQVVTYAGGDSTHFSETLXQVCLSKGLGAPIGSVVVGSEAFIDKARILRKTLGGGMRQVGVLCAAA

SEQ ID NO: 225409 - protein, 71 aa, Zea mays
  Clone ID: MRT4577_137161C.1.pep
WPILVCSRACLVLGCLDNSAYWVPVLVYKSSGAVFAQTMLTVLHNACTAWWSVVYLKLVHVPVCTMVISMC

SEQ ID NO: 225410 - protein, 208 aa, Zea mays
  unsure (1)..(208): unsure at all Xaa locations
  Clone ID: MRT4577_137162C.1.pep
SKEQLSRILPIVDATSSDSGAFDNVLELLVRGGRSLPEAVMMMIPEAWQNDVNMDPEKKALYEFLSALMEPWDGPALISFTDGRYLGATLDRNGLRPGRFYVTHSGRVIMGSEVGVVDVPPEDVLRKGRLNPGMMLLVDFENHTXVVDDEALKAQYSKAHPYGEWLKSQKIYLKDIVESVPETDRVAPSISSSLSQKNENIDHVGISG

SEQ ID NO: 225411 - protein, 106 aa, Zea mays
  Clone ID: MRT4577_137163C.1.pep
DAWVHYKFISDKKKKTGGGTNAVGGLTKPWCPASIPSSLLSLFYSNESLFDSQYEVPDRATLYVQTLSCEPAIGYDEKAVKDFLFKSLDVPLANLDTGLTTYEPSE

SEQ ID NO: 225412 - protein, 208 aa, Zea mays
  unsure (1)..(208): unsure at all Xaa locations
  Clone ID: MRT4577_137164C.1.pep
MSWTLLEXYSXXRFEXLEXXXKXXXXGVRPCLPLRXTIXAWGDLGPVSYIGXLITGXPNGXAVTXDGRKVDAXEGLKIXXIEXGFFKLNPKEGXGMXXGXXVGSGLAGTVMXTANVLDVLSEDLSAVFCEVMNGKPENTDHXLTHKYKNHPGTIKAGRHHERTSLERTPFHERKDKKVKEXEPLLKPQRKERGRAPARWPQGFRPPRK

SEQ ID NO: 225413 - protein, 70 aa, Zea mays
  Clone ID: MRT4577_137165C.1.pep
GPPCPLIELNSQQALLQVAKVSAPPPPKTPKSKGGRTSIFLFLRVGSHNQKPSFKKAYKKKNMFPLEHRP

SEQ ID NO: 225414 - protein, 174 aa, Zea mays
  unsure (1)..(174): unsure at all Xaa locations
  Clone ID: MRT4577_137166C.1.pep
MPYSTDKGGYSTHDTLVLLAIGFCATAVSVLIIVLCECLCCRRRRRGPGGTVVYVAARPFFLPSTTDDGDGGLSPSAVSTLPSFVFRRGLPVGGGSGRGEGSGSGSGRGWAQCAVCLSLVQEGXEVVRRLPACTHLFHVCCIDMWLHSHSTCPLCRATVPPTKEVPSNDPQPPV

SEQ ID NO: 225415 - protein, 78 aa, Zea mays
  Clone ID: MRT4577_137167C.1.pep
MGSRNRGVFLLFLGPPRAPPNLFCPPEFFGIPRSATKTQVLKKRERPLFFKKKKKKKKKKKKKKKKKKKKKKKKKKKK

SEQ ID NO: 225416 - protein, 87 aa, Zea mays
  Clone ID: MRT4577_137168C.1.pep
FLGARVFLRGRGFPCGCAFLSWSCRFALSGLGVTPRSHFCLSVLRVLLGLVFGITLFLFFLLCALLSLNVVLFCLVLVCVLFCGLVV

SEQ ID NO: 225417 - protein, 228 aa, Zea mays
  Clone ID: MRT4577_137169C.1.pep
TKHPFLHPVSAAGESTQPRGSVPRPSIPCESRSALKGSQASSSLSFQIGFVCSSCKDDKSDADCLNKPFEHFDEMQTIFGNTMATCKFAKDSSAGLGEDDETENEEVTARAFTKRQFACDDNVATSSASKSNKKAKKRDSEEELIAAFKSVADKLSNAIEKVATWDTDVPDDLFDNLLNLPGFEQTHISLYFNYLVAHPHIARAFNKLPFDHKLIWARNFASEKFSRV

SEQ ID NO: 225418 - protein, 126 aa, Zea mays
  unsure (1)..(126): unsure at all Xaa locations
  Clone ID: MRT4577_13716C.1.pep
HPHQNKKTSTHPTKDNTKRGRERQKRRHRGSTHKNRRQXHHXGNHRPAPARTPPPARPDPTTKKRAPHPPKXPRKKKKKKREGERAATQDRGAEPPRGHTREGGRAXRHGPRXXGGTPPPGDFKGK

SEQ ID NO: 225419 - protein, 111 aa, Zea mays
  unsure (1)..(111): unsure at all Xaa locations
  Clone ID: MRT4577_137170C.1.pep
SGRANVLDLHLDRRSPGSATTKHGVRHRPRTRSRTCARRRLSSRRRRRRRSSLATLAASAGLLPRLRGGPXGGGGQVEWCPXLPSRALRGGSMPGDGGLELAGTGRRTRKA

SEQ ID NO: 225420 - protein, 220 aa, Zea mays
  Clone ID: MRT4577_137171C.1.pep
MDKRTKVAVCVAAAHNLLSMMAVIIASRKRKRNARSAQITYAPLHDDKSDADCLNKPFEHFDEMQTIFGNTMATCKFAKDSSAGLGEDDETENEEVTARAFTKRKSTCDDNAITSCTSKTRKKAKKRDSEDEGLIAAFKSVGDTLSSAIEKVATGDTDVPDDLFDSLINLPGVCALFLTSDVVTYFLFICLSNKNYCNLKPENYCNIFFDNLPKKKKKKR

SEQ ID NO: 225421 - protein, 68 aa, Zea mays
  Clone ID: MRT4577_137172C.1.pep
MMPPPPQQQQAALMGGHGEYDDGPSSRQHLQPSPLSPIEKWLFEEAAEQVGDLMDLSEDCCSSVPMMF

SEQ ID NO: 225422 - protein, 242 aa, Zea mays
  Clone ID: MRT4577_137173C.1.pep
MDKRTKVAVCVAAAHNLLSMMAVIIASRKRKRNARSAQITYAPLHVSGTGWDEDNFVITLDEEHYNGYVKDDKSDADCLNKPFEHFDEMQTIFGNTMATCKFAKDSSAGLGEDDETENEEVTARAFTKRQFACDDNVATSSASKSNKKAKKRDSEEELIAAFKSVADKLSNAIEKVATWDTDVPDDLFDNLLNLPGFEQTHISLYFNYLVAHPHIARAFNKLPFDHKLIWARNFASEKFSRV

SEQ ID NO: 225423 - protein, 286 aa, Zea mays
  unsure (1)..(286): unsure at all Xaa locations
  Clone ID: MRT4577_137174C.1.pep
MAVQAQHLFAPAFLPHDVGHALRALEGAAAVGGSALLDELGLGGCAPAPAPAPLGDAAIGGAQPRSELTCNAAGDNSVFLPRKRARVVPGFLLDDVQNRCGAASTSGRAAASSGVLSQLYHQGVEVDALVRVETDRMRAALQEARRRHARAVVAAVGRAXAELEERLRQLAAEGQAWLGVARSHEAVAAGLRATLDKVLQQSPAAGCGGGGGGGEAEDAQSCCFVASPSGPVSTGSSPSCKACGGGDACVLVLPCRHLCLCRACEAGAEVCPVCGAVKNASLQVLL

SEQ ID NO: 225424 - protein, 164 aa, Zea mays
  Clone ID: MRT4577_137175C.1.pep
LERRKDELKQDNEGVKNSTVMVYLVHHLWVLDVSVVYCSRVDYVLGVHCSNACCQRGMDLRRGQRILEHLTLGGGSCLVVNSSPKVKTKAKAVGWRPIISGSDDLGEAQSIFRPYAFHVIKHKNDINVHKYIPCQIIPCKPNIQNNRRSSSMLRFTKIIGAQKG

SEQ ID NO: 225425 - protein, 100 aa, Zea mays
  Clone ID: MRT4577_137176C.1.pep
MAAIRRLIPSFNRVLVEKVVQPKKSAGGILLPETSKQLNSGKVIAVGPGSRDKEGKLIPVALKEGDHVLLPEYGGLEVKLAPEKEYLLYRDDDILGTLHE

SEQ ID NO: 225426 - protein, 80 aa, Zea mays
  Clone ID: MRT4577_137177C.1.pep
APQVTPLFHGISTKIPLLRFPVGENKGGPQRFKTRNLVPRGGRKRLLTLFYEPVFLFPPPVFFPLPGPGGPFPFCLTNPQ

SEQ ID NO: 225427 - protein, 108 aa, Zea mays
  Clone ID: MRT4577_137178C.1.pep
VETPKKVVIIDVVIQVAVQVGPRQVPRLVAGRSGGRRRLRCRLPSHMATHSASLVDLLVRRRRVRRMVVLLLGLGRHCPFLLLMWRRMLHHGGPQARLGLGVKQGGET

SEQ ID NO: 225428 - protein, 95 aa, Zea mays
  Clone ID: MRT4577_137179C.1.pep
TPNPPRTLFGWVPVEGLSRKGPVTFPQNHFSLMRFLEKLIFCSLPKGGAWEVFKWGEMVPKGGETSSPLSSPGVGGGVPFWTGFFFPPVSAPGEC

SEQ ID NO: 225429 - protein, 88 aa, Zea mays
  Clone ID: MRT4577_13717C.1.pep
KPRGILKFLVSVDSPPNIFTFLILNIFVLAALQAQLNIIFTFGQSSYKHSHCISTENGDVLGQANLTFDSLIINSYQGLDTILGHLFY

SEQ ID NO: 225430 - protein, 126 aa, Zea mays
  Clone ID: MRT4577_137180C.1.pep
DELAPSKIIEEYVAEQNILDSFARKIAMKIKSTLGRVTQRQYGPRKTIRRDHQGAHDRLVEDYFAEEPLYPASMFRTRFRMNRPLFLRIVDALGRWSPFFTLKSDCARRIGLSPLQKCTAAMRMLA

SEQ ID NO: 225431 - protein, 195 aa, Zea mays
  Clone ID: MRT4577_137181C.1.pep
SLDGASVPHFSLQDGILRYKNRVWVGSDVPLHHKLVAAFHQSPVGGHSGVPVTYRKIKQVFAWKGMKTFVQNWVASCLTCQQAKPDRSKYPGLLQPLPIPKTAWHTISMDFIEGLPRSQRYDCILVVVDLFTKYAHFVTLSHPFSALTVAQSFFKHIYKLHGLPSAIVSDRDKIFTSHFWKQLFKLAGVSLRMSS

SEQ ID NO: 225432 - protein, 91 aa, Zea mays
  Clone ID: MRT4577_137182C.1.pep
EIAFSNGTETNKIQLDKVAVDGFSPRGLICSHAWPSSRYRDAHNLIERCSHGVVSPLGWWTAQIAIQCSFVPRVSPLPRISEGSGRPAVVP

SEQ ID NO: 225433 - protein, 70 aa, Zea mays
  Clone ID: MRT4577_137183C.1.pep
TFCSYAIFCPSPIQLAKGKRNPPSLQFLSLKFVEREAWESVALSNYKDAKSQGLHPGTKGKLIVGSGGKA

SEQ ID NO: 225434 - protein, 44 aa, Zea mays
  Clone ID: MRT4577_137184C.1.pep
ALSIGSRGSSSYALSSRSQAEVHNGAAGYAACILVCSTFGRTLG

SEQ ID NO: 225435 - protein, 60 aa, Zea mays
  Clone ID: MRT4577_137185C.1.pep
RLTSYKCLWSCQCNTLGVLHTHTLHMHHESIIMSIINHSLPILESRTISIHCEVNSCLNQ

SEQ ID NO: 225436 - protein, 90 aa, Zea mays
  Clone ID: MRT4577_137186C.1.pep
PGRSANRPGCPPGLQVVCKLGSHGSGCPLLVAAMASCIQCMDVNGDHLRGGGGGFGGFIKAMAACAEEVTLADQSSPACTQRSRPDPRCT

SEQ ID NO: 225437 - protein, 68 aa, Zea mays
  unsure (1)..(68): unsure at all Xaa locations
  Clone ID: MRT4577_137187C.1.pep
GFRAXAAGRXSXQXKXXPSGFSRLGAARLAISRLEVAPIEEKLCQRMRLLVVLHRRWSHIYRETQGKP

SEQ ID NO: 225438 - protein, 89 aa, Zea mays
  Clone ID: MRT4577_137188C.1.pep
KNFFFLPGGKGPYVLSPKIRGGFPPGNRGGFFLGANLKPRWSGGVYPPGGVIPKCSLGAGHSPMGAPIFFFMFTPPEFFFSSAHWLPSM

SEQ ID NO: 225439 - protein, 55 aa, Zea mays
  unsure (1)..(55): unsure at all Xaa locations
  Clone ID: MRT4577_137189C.1.pep
PGGKSCPPACFPPAAFGFRNPKXTPKKKRKPPNPRGFYQDRNGLSHSGLLGFRFR

SEQ ID NO: 225440 - protein, 98 aa, Zea mays
  unsure (1)..(98): unsure at all Xaa locations
  Clone ID: MRT4577_13718C.1.pep
LVQWQEFAGQNPDCLEHLAASSGTGSSDFEQLEQILXCIPQVKYICLDVANGYSEHFVEFVKDVRKRFPQHTIMAGNVVTGEMVEELILSGADIIKCG

SEQ ID NO: 225441 - protein, 168 aa, Zea mays
  Clone ID: MRT4577_137190C.1.pep
MAATTTASMMARVDRLDLLLGYLEEMHRNGNGNGNASPPSATTASSPSTLAAGGVHVISSDDDVDVDSSTGPSTPTWRRPRPAKEVLEEAQAKGSLIDRIASLEHRVLKMEEDMEVTPANTEKASHQPRATMMMSKNDDPSSRKKKKKKGLKSLVKSCLRHQRQPQTF

SEQ ID NO: 225442 - protein, 347 aa, Zea mays
  Clone ID: MRT4577_137191C.1.pep
MSTSTLKEPNVSQSKDVENGKDNSVKSCISKPVLNGNKCANKEQNVLSCCPGAVTNGNEAGNADVEYIDSENLVDLPDVDATLCTLVKRLDSKDWVMTCEALNNVRQLAMYHKERLQELLEPLVPLIVKSVKNPRSAVCKTALMTCADIFKAYGDLLVESIDPLLVQLFLKASQDKRFVCEAAEAALTSMTSWISPLLLLPRMQPYLKNRNPRVRAKASVCFSKSVPCLDMQGVREYGMDKLVQIAATQLSDQLPESREAARNLALELQVLYEKSQASTSDENEGEPSVSQDAESWEAFCQSKLSALSAQAILRVTSTTPKEGVASTSNATKEGVTAAPKEGLDVDC

SEQ ID NO: 225443 - protein, 191 aa, Zea mays
  Clone ID: MRT4577_137192C.1.pep
MAATTASMMARVDRLDLLLGYLEEMHRNGNGNASPPSATTASSPSTLAAGGVHLISSDDDVDVDSSAGPSTPTWRRPRPAKEVLEEAQAKGSLIDRIASLEHRVLKVILLFIQSSVVVVPPTYYIATLLLLLQMEEDMEVTPANTEKASHQPRATMMMSKNDDPSSSRKKKKGLKSLVKSCLRHQRQPQTF

SEQ ID NO: 225444 - protein, 93 aa, Zea mays
  Clone ID: MRT4577_137193C.1.pep
LGLFCHPIGPPFILFFLWGFGSKIRSRAANFFDEGYWGVLRGFCFVNLGGGFFLVGCQNPKGNWSSRGGWVQKKKIKNNLKTQKEIKKNKKQK

SEQ ID NO: 225445 - protein, 136 aa, Zea mays
  unsure (1)..(136): unsure at all Xaa locations
  Clone ID: MRT4577_137194C.1.pep
SPRSAVCKTALMTCADIFKVYGDVLVESIDALVSIAIHLKFLVLAKRSLKTSFCQLLHSQLVQLFLKASQDKRFVCEAAEAALTSMTSWISPLLLLPRMQPYLKNRNPRVRAKASVCLSKSVPCLDVXGIREYGMD

SEQ ID NO: 225446 - protein, 137 aa, Zea mays
  Clone ID: MRT4577_137195C.1.pep
YFVFCCLMTFTDDSAYIYISSSPHAHLLHMTYIYISSSPHAHLLHMTIAHNPHNISNRTRTTPVALIRRDQPHGTEEFPNREIAICLGWGAPRPASSAIAGRRVRAPNGKPLVVDPPPQKNKFNIEVSTWPTYQILN

SEQ ID NO: 225447 - protein, 38 aa, Zea mays
  Clone ID: MRT4577_137196C.1.pep
ANTTTHLIVVIQLIFVAASGWMRRWIPRSPLLVAQERT

SEQ ID NO: 225448 - protein, 119 aa, Zea mays
  unsure (1)..(119): unsure at all Xaa locations
  Clone ID: MRT4577_137197C.1.pep
EAHVKDKVLTDLKAIICAHDASYSEDIEGCIRNSLLWLLHELQIHPCTYKCRQDAVADLLQLYAYIXCFFRVRDYHTVTSPSVHITPLDLRPTYAXYCEHSFHEYCMTYSXNYCLAHHI

SEQ ID NO: 225449 - protein, 41 aa, Zea mays
  Clone ID: MRT4577_137198C.1.pep
ASFTLTVVPFKIFVPLDLYMLSILPLMSRGTSRPLSHISCP

SEQ ID NO: 225450 - protein, 88 aa, Zea mays
  unsure (1)..(88): unsure at all Xaa locations
  Clone ID: MRT4577_137199C.1.pep
MMEDIPMVSSKVKGPNPRRIGGFLSRSKKGEDVRIVWVCHGSFLPPPEFVKPPGGGDVLNPLXHIVVNPAPFLLKKRVTLLLLVSIVL

SEQ ID NO: 225451 - protein, 47 aa, Zea mays
  unsure (1)..(47): unsure at all Xaa locations
  Clone ID: MRT4577_13719C.1.pep
SFLVCQGNISSQLHSTVKSVPRGTNASTAPPRPEIDEPQRXRTLGRP

SEQ ID NO: 225452 - protein, 286 aa, Zea mays
  Clone ID: MRT4577_1371C.1.pep
PRVRAELGTVYRYELSGSLHGLFRVRGFTQDDAHIFCLEDQIKDEIRGVLDLTEQILGQFGFRYYEINLSTRPEKSVGTDDIWEKATIALKNALDDKGWEYKVDEGGGAFYGPKIDLKIEDALGRKWQCSTVQVDFNLPERFDITYVDSNSEKKRPIMIHRAILGSLERFFGVLIEHYAGDFPLWLAPTQTRILPVTDNELQYCNEVASELKSRGLRVEVCHGERLPKLIRNAETQKVPLMAVVGPKEVQARTLTIRSRHNGEIGTMPVDEFITRLQLAVANKSSL

SEQ ID NO: 225453 - protein, 86 aa, Zea mays
  Clone ID: MRT4577_137200C.1.pep
GPSRIRAINLKVSYGVLELIKVGVRQKERCCPFLEGLVDLDHAVCLCNGIKVNVVDIHLNDLRSVSVILWHLRRGVYTRGLHLAAD

SEQ ID NO: 225454 - protein, 79 aa, Zea mays
  Clone ID: MRT4577_137201C.1.pep
QTPRVALSNHKKSVFGIPLIISHNSVVFFSLLHPPPLLRDGKIIYLVTGFSQSALQTYKMRPSQIGRKVQSPCSRDIRC

SEQ ID NO: 225455 - protein, 117 aa, Zea mays
  Clone ID: MRT4577_137202C.1.pep
NCRLCKSLREGTALDAGGNESLYSEIELYESSTLLDERQKAALRYVDALVWTSSRIPAEVAADVRAHFSDAEATEITLDVMRNAINKIAVALGGDAPRVAEGTERYLLGADGQPVFS

SEQ ID NO: 225456 - protein, 147 aa, Zea mays
  Clone ID: MRT4577_137203C.1.pep
FLDFRARLREGRCTRTLRDPAAGRPHTSSSLPSLLFKQSLRAQPCNPGGGQRSLGYLSASGEPSIAAEPASCTCSTCCLRRSSCSQTTCSKASSHILIMPLGLPAKPTTTTRSMDSNTVYFLTDRPSTKVQAGPGGAFFPGIPAMVA

SEQ ID NO: 225457 - protein, 124 aa, Zea mays
  unsure (1)..(124): unsure at all Xaa locations
  Clone ID: MRT4577_137204C.1.pep
MANLPVFLKMTDGGAPQGRIVMELYANEVPKTVENLRALCTDXKGVGKSGKPFHYKGSIFHRVIPEFMCQGXDXYTLENSTGGQSMYGEKFRDEKFXRKHSDPGVLWMANAGPNINGYQVFICT

SEQ ID NO: 225458 - protein, 74 aa, Zea mays
  Clone ID: MRT4577_137205C.1.pep
PFFLGKLDQQRATYIRQYRKPTRHILWQQQKQGKWGHLARRPLGVPTEAKSTGYLGQSQKVNPRYGHRAITWWI

SEQ ID NO: 225459 - protein, 187 aa, Zea mays
  Clone ID: MRT4577_137206C.1.pep
MKLSMPFFGSSSSSSGKKRKGSKTGGSSSFVSTASSSSSDECASPSAVTTTPRTVLQSQPSAPNPKPPAVVAAAVTREDLEVALRRVVRSEDELAAVLAEAEAAGLAPEQAASAEAEDEAELRDAFAVFDADGDGRISAEELRAVLAALGDAACSVEDCRRMIGRVDGDGDGFVCFHDFSRMMMQGA

SEQ ID NO: 225460 - protein, 200 aa, Zea mays
  Clone ID: MRT4577_137207C.1.pep
MKLSMPFFGSSSSSSSGKKQQETTGKKRKGSKTGGSSSFVSTASSSSSDECASPSAVTTTPRTVLPPPPSAPNPKPPAVVAAAVAAAVTREDLEVALRRVVRSEDELAAVLAEAEAAGLAPEQAASAEAEDEAELRDAFAVFDADGDGRISAEELRAVLAALGDAACSVEDCRRMIGRVDGDGDGFVCFHDFSRMMMQGA

SEQ ID NO: 225461 - protein, 61 aa, Zea mays
  Clone ID: MRT4577_137208C.1.pep
CPHVGLVLCEKVHIIISGEVRTTSYNALTFFLKDRIKLCTIMTSTVMTVLVAYKHTCPLSS

SEQ ID NO: 225462 - protein, 78 aa, Zea mays
  Clone ID: MRT4577_137209C.1.pep
KILLKTLHAPLSCFLRPLYYPHLPSFNNAVTGKILVSPYLNASLNNLFSTPYVIATLPIPISLPSKPSTLMAKLPPPI

SEQ ID NO: 225463 - protein, 244 aa, Zea mays
  Clone ID: MRT4577_13720C.1.pep
VIAFRPSRRPFDAVVQVSLSAASGASFHCLSSSFRRIGLRRLLYLDKLRTNSDRVRLNYTARLAFSFRLLASLVAPCFAAEAAYKAWWYATSADRLPFFANDVLSDVLACSLEMASWMYRSAIYLLTCVLFRLICHLQGLRLEDFAGSLLVEVEEGRMGVERVLREHLDIRKQLKVISHRFRRFIVAALLIGTASQFASVLLTTRHDSIDDLLHTGELALCSVVLMSGLIIILSSAAKITHQAQ

SEQ ID NO: 225464 - protein, 141 aa, Zea mays
  unsure (1)..(141): unsure at all Xaa locations
  Clone ID: MRT4577_137210C.1.pep
GGGGGQKPXKPGXEXPNAARGXETXXAAXAPRNXXKAXXANLPAGTAPGGGGVFSPFEXXXDXXRGGEEXDAXHEAAXEXAAXAKAXXKKKERGKXXXXXXXKPXDEEXXXKKXEEXXRXXPEEXXXXGAXKXXXXGXGXK

SEQ ID NO: 225465 - protein, 59 aa, Zea mays
  Clone ID: MRT4577_137211C.1.pep
VVRPVPARYKSCSTAHGWCRCIEEAVAVDRARHSTRAMTILMLFCLPINLKHCRCVDLD

SEQ ID NO: 225466 - protein, 186 aa, Zea mays
  Clone ID: MRT4577_137212C.1.pep
SVVSAAAASGAKTLDIFILGIANLIGGLPVLYHNIADLRNTGDIAESSEQVGHYWLELGRRSKYQLHMVIAILSYILFGLLPPVIYGLSFRTSDNRENKVLVVAAASLLCIALLAIGKAHVKRHRTYLTTLLYYLSIGFSSSGLSYVAGVLLTKVLAHFGIIDQGGASAPAPPGLSFPEAAAWASY

SEQ ID NO: 225467 - protein, 126 aa, Zea mays
  Clone ID: MRT4577_137213C.1.pep
MADESAKTFTLRVRKFMTNRLLNRKQMVIDVYHPGRPTIPKKDLSQVLAKKFKTTHDVVFCFGLKTHFGGGKTTGFALVYDTLDFAKKFEPLHRLCKAGLATKTTSSRKQRKERKNRMKKVRGTAK

SEQ ID NO: 225468 - protein, 90 aa, Zea mays
  Clone ID: MRT4577_137214C.1.pep
GATFNLSLVPEHIINLRKTCYKVAVVSIFLLSIENPHDIILHSLLPYIQRAFLKIAQYTGAHAIAGRHTLGTFTNQFQTSFSESSLLMHT

SEQ ID NO: 225469 - protein, 43 aa, Zea mays
  Clone ID: MRT4577_137215C.1.pep
KKKKKNKKKKKKNKKKKKKKKKKKKKKKKKKGGRRLVSSSTRE

SEQ ID NO: 225470 - protein, 41 aa, Zea mays
  unsure (1)..(41): unsure at all Xaa locations
  Clone ID: MRT4577_137216C.1.pep
RSEKPREHEGNQSTLPSWXVGSGLLXELLEVDKDIMRHADG

SEQ ID NO: 225471 - protein, 104 aa, Zea mays
  unsure (1)..(104): unsure at all Xaa locations
  Clone ID: MRT4577_137217C.1.pep
DFELYGLKAIKKVFKSGINAEPVIQCSKGPFDKYMLYQLYFCANGNGTFIDCPAPAKYTCSNSVLFHPYKKWMLKQQLNDESADFYDSADPFVLPGLAXWTTDL

SEQ ID NO: 225472 - protein, 93 aa, Zea mays
  Clone ID: MRT4577_137218C.1.pep
KQKSPPPFGGGRGNPFPYKKNRETPPPTGGGPGSKLRFTPPPGDFGKGDPGPKNYASGGVKRKSPFLEKYTPPPLNFRGGGEKLENVAGFHKA

SEQ ID NO: 225473 - protein, 364 aa, Zea mays
  Clone ID: MRT4577_137219C.1.pep
MEASSRLELQQAHTELWNLTFSYLKSMALECVVQLNIPNVIHNFGGNATLPSILSAIQVPEHRKPYLPRLMRFLVVSGILSFDSPTLGEEGTYHLTPLSRLLVDDTHINGYGSLGPFVLSQTTKYHVSSATYLSEWFKGEDGAGPMAAEMPFKMAHGTGPWGALGHDQQFNRVFNAGLGSNSRLVLDFVVAEYGDVFDGVSSLLDVGGGDGSTARTIRKAFPHIKCSVLDLPNVIIDIQPGDGMVDYIAGDMFSSIPPTDAIMLKYVLHDWNDDDCVKILQQCKKAICSCKPAGGKVLIIDVVVGSPLKEMFEAQVTSDLLMMVIAGGKERDKKEWHKIFVESGFKDYKISPVLGYLSIIELYS

SEQ ID NO: 225474 - protein, 129 aa, Zea mays
  unsure (1)..(129): unsure at all Xaa locations
  Clone ID: MRT4577_13721C.1.pep
DAWADAWVGSCNKMLEGLCSSXEVRKANNLLTAMMDKGLLPDKDTYLSLINGYGKVGDAQCIVNIYHEMEHKRLDPGVEVFTALIKGLCRCGNLKEAEKLFAAMKKKTLASTSDLDDMLIKRYCEKRNA

SEQ ID NO: 225475 - protein, 97 aa, Zea mays
  Clone ID: MRT4577_137220C.1.pep
GGRRPVPRLVSGFPSFRSLCFWPTRCWLLAVTRGFVTVWPLVSKPVVQALRPVIQFSRGLFLFCPSLSWSSDGSPLCTGYADGSVGVWKISGSGCAG

SEQ ID NO: 225476 - protein, 44 aa, Zea mays
  Clone ID: MRT4577_137221C.1.pep
SHGPRQPVVSHGILDNAGPKMWLNGLKFLFQSPRFSRGTNFLFT

SEQ ID NO: 225477 - protein, 87 aa, Zea mays
  Clone ID: MRT4577_137222C.1.pep
NPAPFIKFPKNQNFFYKTTQKHFFFPKKNQFLKLTLKKTFFNSAHFPKKNPALNFGSLTPPKTFPKAPHFLSKKQKQLSLSYTIGQT

SEQ ID NO: 225478 - protein, 256 aa, Zea mays
  unsure (1)..(256): unsure at all Xaa locations
  Clone ID: MRT4577_137223C.1.pep
PRKGIFWPCSACQARKQVGSNHPTKNIMTTSRPLELLHMDXFGLVAYLSINGKKYGLIIVYDYTRFTWVFFLQDKSETQXTLKKFLKRAXKXFNLRIXKIRSDNGNELKNTQVMDYLEEGIKHGFPTLYSPQQNGAIERKNQTLIVVARXILDKYKTSDRFGVEAVNTTCRAINRLYLHRLLKKTPYELLTGNNSNISXFRVFGSKCFSRCLAPATHYEIYYIMILRSTKSTIARWFVRSMLGLNDIYRFGLLRCV

SEQ ID NO: 225479 - protein, 41 aa, Zea mays
  Clone ID: MRT4577_137224C.1.pep
LLRLLIESLVILSNAYRLAFYSVECRHVKRAFSSKSVMELS

SEQ ID NO: 225480 - protein, 326 aa, Zea mays
  unsure (1)..(326): unsure at all Xaa locations
  Clone ID: MRT4577_137225C.1.pep
IRHEAFPSTPLVSNPQSCPEFCTSSSSPPPSAPSPAAASRSPQXNATDSFLVCLVGAGVPPRLLQTPASPSYSATLLSSVRNLRYVTSDIQRPVAIVAATEPAHAQAAVRCGRRHGVRVRARSGGHDYEGLSYASLDPRERFAVLDLAAFRDVRVDSARAEAWAGSGATLGEVYYAVAAASRVLAFPAGICPTVGVGGHLSGGGFGTLMRRYGLAADNVIDAVLVDADGRLLNRTTMGEDLFWAIRGGGGESFGVILSWKLRLVRVPETVTVFTVRRSINQSASQLITKWQAIAPALPSDLILRGAVRKQHARFGALFLGRCSPPP

SEQ ID NO: 225481 - protein, 138 aa, Zea mays
  unsure (1)..(138): unsure at all Xaa locations
  Clone ID: MRT4577_137226C.1.pep
GSFRIITSPAREAKHPTNKAGGEKGGKNKEGVQTGGGPXKGGKGGGKGGKQGGKKRRGGGTGGPKKKRGGGGKGGKKADQRKPAQNAGKKGGAKLRKRAQGGKGGTERTPPGQKGGPHPKRHPPEKHHVGTELHRGGG

SEQ ID NO: 225482 - protein, 344 aa, Zea mays
  unsure (1)..(344): unsure at all Xaa locations
  Clone ID: MRT4577_137227C.1.pep
WVLTPPPLSLSSPFFRRKEKRKTHTLFPSSLAVSHPAATMSGLYNQGFSPARTLSPQIRSNPDADSQYLAELLAEHQKLGPFMQVLPICSRLLNQEIMRVSSMVHDHGFSDLDRRRFRSPSPMSSPIVRPNLHGNGFGPWNGMHQERLGFPPPGTSMDWQGAPPSPGSYIVKKIMRLEVPVDSYPNVLPSKTCAIYPSVLNDILVLFFXXFNFVGRILGPRGNSLKRVESSTGCRVFIRGKGSVKDTEKEDKLKGKPGYEHLNEPLHILIEAELPANIVDTRLRQAQEVMEELLKPVDESQDLYKRQQLRELAMLNSTLREDSPHPGSVSPFSNGGMKRAKPSQ

SEQ ID NO: 225483 - protein, 63 aa, Zea mays
  unsure (1)..(63): unsure at all Xaa locations
  Clone ID: MRT4577_137228C.1.pep
KDTAIVIYGGTTEHTWMATTLLENTSIENMLILYGLYKQATVGDGNTDRPAIFXQKDWAKWDA

SEQ ID NO: 225484 - protein, 703 aa, Zea mays
  unsure (1)..(703): unsure at all Xaa locations
  Clone ID: MRT4577_137229C.1.pep
LPTYCSKWNFGGFPVWLKYVQGNRFMTDNEPYQTAMQGFTEKIVGMLKIEKLCTSLNGQVPLALGGYEYGPGGRECGAAVLAYINWAAQMAVGLGTRVPWVMCKEEGAPGPLPGAGSPFCCGALSPAKPXVEGSFWRSACPGXSASARPLRRGAVACLAKKRYMHFATAGIRLDLYLDRIVWVKPGSVFGGDAKVPVANERPLVXSGYPPLTSFCNRQXGGVYLSRCSCSSFVSLTTFLXYGKIIFYKERXPLXPWXLSVLXDYINVVFNMDRVGVLSINLQKSEDGASSMTLKRDDAQVXSMATAPLLTTTGFAXRQDVGRDSVDXVXFISCVDICPSETYQQGGGQLVPVRIEESSIAVQVIFDGVLPSSDXLSVDCRRIRFNGNAKLRGGPEKIVLLSVACGLPNVGVHYETWNAGVGGPVVLHGLAEGSRKLTWQTWSYQVGLKGEPMALGSIEGSSSVEWMRGSMIAEYKQHWARCTPYFNTPIGDDPXCWEDPLQFRPERFMPGXRRRHGPQGAAHAAHAVWKECSNGEILRALKCQSGCGQPTPRWYHVPKCWLQPARNLLVVFEELGGDSSKIALVKRSVSSVCADVSEDHPNIKNWQIESYGEREYHRAKVHLRCARGQSISAIKFASFGTPTGTCGDFQQGDCHSANSHTVLEKKCIGLQRCVVAISPESFGGDPCPSVTKRVAVQAVCSPVA

SEQ ID NO: 225485 - protein, 157 aa, Zea mays
  unsure (1)..(157): unsure at all Xaa locations
  Clone ID: MRT4577_13722C.1.pep
MGSWVGVVVSTFLGTRLADPAPQXGRIEARFGFGLGGKAKPAPXQVANTSTXTDRPLWFPGAVAPDYLDGSLVSDYGFDPYGLGKPEECLXTELDSLDHNLTKDEAGAIIGTRSESXEGKSTPXQPYREWVXLQRFRXECELIHGPXSMLATLVALF

SEQ ID NO: 225486 - protein, 175 aa, Zea mays
  Clone ID: MRT4577_137230C.1.pep
QRLGFPPPGTSMDWQGAPPSPGSYIVKKIVRLEVPVDSYPNFNFVGRILGPRGNSLKRVEASTGCRVFIRGKGSIKDTEKEEKLKGKPGYEHLNEPLHILIEAELPANIVDTRLRQAQEVMEELLKPVDESQDFYKRQQLRELAMLNSTLREDSPHPGSVSPFSNGSMKRAKPSQ

SEQ ID NO: 225487 - protein, 65 aa, Zea mays
  Clone ID: MRT4577_137231C.1.pep
SYQIQTDRGPEKKTGPKPPKQPSQAGTALPLCIAAPTDPFRGPGRYQLLARQHPAQSLTVYRRPA

SEQ ID NO: 225488 - protein, 101 aa, Zea mays
  unsure (1)..(101): unsure at all Xaa locations
  Clone ID: MRT4577_137232C.1.pep
ILXETARPWGGLFFFFFFFFFFGAAQLAELFCYSFIHIWKGLFDQKQKRLKRTGLNIFRGGGFQDHVFGGHEAFKPERTHCALGELRKTAHFQLFSGCANC

SEQ ID NO: 225489 - protein, 78 aa, Zea mays
  Clone ID: MRT4577_137233C.1.pep
GDFSEALARFDDVGDLGRNSGEHNTDSLHDGELGVGRLLCSCKNAAFYEIEVGEIMCQSFKYGRLGDRLWRPRVRHAS

SEQ ID NO: 225490 - protein, 147 aa, Zea mays
  Clone ID: MRT4577_137234C.1.pep
HHRRRAGGWSMHGKRSGETDRFVHRWAAPGPRTPASYPGEPARPGESHTNSARWCPFPAGAVTNTLVVRVMSRCACVCDVSICLGPGAAGGRGWWSPSCQELGKGFYLLALPGLVWTVWGPKQMWMLCTCPSPTAHRRPCGAAQLVK

SEQ ID NO: 225491 - protein, 57 aa, Zea mays
  Clone ID: MRT4577_137235C.1.pep
QLSYLVTVYPLIKTYSPPFPSLLYNFHHNLSTKKIYTFHKPHTSTFHKWIINQIITN

SEQ ID NO: 225492 - protein, 57 aa, Zea mays
  Clone ID: MRT4577_137236C.1.pep
HFVAARARIDDDEKPSVLSGAVHVVGVVGDGIVRAHSYSVGDGPVLVHHGLQLIIDT

SEQ ID NO: 225493 - protein, 444 aa, Zea mays
  unsure (1)..(444): unsure at all Xaa locations
  Clone ID: MRT4577_137237C.1.pep
TTVETSKFKQAPPRSGVSSVLPSPSSELISKWGVYGNICRIDKPCVVDEIHLRRFDGMLEHEGAHRCVFASITVKAPVREVWNVLTAYENLPEFVPNLAISRIVLRDNNKVRIMQEGCKGLLYMVLHARVVMDLREKHEQEISFEQVEGDFYTFKGKWRLEQLGDQHTLLKYMVETKMHRDTFLSESILEEVIYEDLPSNLCAIRDYIEKAGAKSSNSTXILMCPQIQIQMLIMMKAXSEQTCVSCSSSTMKQRPKVPGLQKDIEVLKSELDNFIAEYGQYGFMPKRKHLRSHGRVDIEKAITRMGGFRKIASIMNLSLSYKNRKPRGYWDNLENLQEEISRFQKIWGLDPSYMPSRKSFERAGRYDIARALEKWGGVQEVSRLLSLELRYPRRQADPDDERQSESPSGMMKKHGVKPDEGNVSPNAQKWLLKLKDLDVNWVEY

SEQ ID NO: 225494 - protein, 244 aa, Zea mays
  unsure (1)..(244): unsure at all Xaa locations
  Clone ID: MRT4577_137238C.1.pep
TRCSLYFSFSLFSFFCRDTRLICLTSPTNHSTTIMALPLTGKLAIVTGASRGIGLAITKALAARGANLVLAYTSANSAASTADIASELASKHSIKAVPIQADLGTVEGPASLIKQAADAFHPLRIDILVNNAGVALNDKVPDIKPGDFTTSYNVNVLGPLLLVQAAVPYLPTDRSGRIINLSSVSXQLGXVGQSVYGGTKAALEAMTRTWARELSERATVNXINPGPVRSEMYSRNSDEFKRLI

SEQ ID NO: 225495 - protein, 194 aa, Zea mays
  Clone ID: MRT4577_137239C.1.pep
VLKDLTSCSRSPLKALSPRALTAPPNQHNWKYSSLDRSLWHIWRVCERSQHNNARVIRSVEDGKHSEQSGGAEAQRAERISSVGMARVIRAAEAREHIEQSQGAGAQRAFHQRMIRRPRRRDQSGGAVLGAGAQKSEPRRAAIRAKARDHIGVTGLRFSFSEVGGDYGGGGMDRRYRVRDILQVAPAGWRGRTP

SEQ ID NO: 225496 - protein, 75 aa, Zea mays
  Clone ID: MRT4577_13723C.1.pep
FPLNKIGQRPVILFPFPLKKTSRIMTLGFAKIGPGYCIQNPPPKNVGRGPTSPGKCYPQPKAKFRLRPNSTVFSS

SEQ ID NO: 225497 - protein, 40 aa, Zea mays
  unsure (1)..(40): unsure at all Xaa locations
  Clone ID: MRT4577_137240C.1.pep
VGRVWSRTSNDMGEGFGSRPPFVKSXCRVXLVLIKGRVRR

SEQ ID NO: 225498 - protein, 74 aa, Zea mays
  Clone ID: MRT4577_137241C.1.pep
WRQLSNGSTSDNYHLLRLVSCNAKAMVDKRKNLCCRSMKNHLTSVHIKTSSFECAHNRSLFTTSSLLNDSAFIW

SEQ ID NO: 225499 - protein, 49 aa, Zea mays
  Clone ID: MRT4577_137242C.1.pep
PLQNRCLHLGQLGSATGVYSTLVTYLVRVPQVLLGFIRHLRDDNGPMEA

SEQ ID NO: 225500 - protein, 42 aa, Zea mays
  Clone ID: MRT4577_137244C.1.pep
MDYMTHGLRVPAMQATGDINVHDMNNTVCETARAEERATSFM

SEQ ID NO: 225501 - protein, 87 aa, Zea mays
  unsure (1)..(87): unsure at all Xaa locations
  Clone ID: MRT4577_137245C.1.pep
ALTPCALTRRKSLTPVFEVIXDREPKLDPDDTTGLXPPSVYRSIEYKSVDFSYTVLPDILVLSNFNLKGSGGQTLAVXVAVSGSGIS

SEQ ID NO: 225502 - protein, 232 aa, Zea mays
  unsure (1)..(232): unsure at all Xaa locations
  Clone ID: MRT4577_137246C.1.pep
VTGGIGADVWCAPGIPFAAEASSVNCVVARHQMLXXXXXXXXXXXXHRERPCLSRRVTVQEQISSSFMDXXXXXXXDVALFGADLXXXXXCQGTRGSRXAPXGLEEEIRMFQTRVLLGGMNMYDRYQDWRLDVDNMTYEELLELGDKIGYVNTGLRDDEITRNLRKVKHPSFSSLRFATEMERKCSICQEEFETNEEMGRLDCGHSYHVYCIKQWLSQKNICPVCKTAVSKN

SEQ ID NO: 225503 - protein, 53 aa, Zea mays
  Clone ID: MRT4577_137247C.1.pep
RAISSQAPGAELGIRLGALFKGTMLAVGFKSCLGVMERTWVLELRFQRKMGML

SEQ ID NO: 225504 - protein, 108 aa, Zea mays
  unsure (1)..(108): unsure at all Xaa locations
  Clone ID: MRT4577_137248C.1.pep
PQCPWIRPCIDKSIERDLIWAPNXPLSIWSNSYQAHPGLRAFTSPSRTALHAGSAGSVLKRRNTYKASSSSPISERTMTSTPRQRSRLVEVEDRPVNPAPAPGAVSSQ

SEQ ID NO: 225505 - protein, 290 aa, Zea mays
  unsure (1)..(290): unsure at all Xaa locations
  Clone ID: MRT4577_137249C.1.pep
ALRGQGRRRKRGRDKGHKREGRRGGGRVTGGIGDDVWCAPGKPXRRRVYCVNCEVARYQMVWRCGRGAEGDRSHRERPCLSRRVTVQEQISSSFMDSPPPPHLDAPLFGADLIPSGRLRRMRGWRHSPGGLEEEIRMFQTRVLLGGMNMYDRYQDWRLDVDNMTYEELLELGDKIGYVNTGLRDDEITRNLRKVKHPSFSSLRFATEMERKCSICQEEFETNEEMGRLDCGHSYHVYCIKQWLSQKNICRALPEPQRPCMSRRRPCRSRYPRPSWTRRRRTSTPPSSGPI

SEQ ID NO: 225506 - protein, 145 aa, Zea mays
  Clone ID: MRT4577_13724C.1.pep
MASMAIIRRRKYFLDHVNTPTISSSAFFTFQHGRLGLEVEPRTEQRFLEHSSGDSKCEKEQHNMNLIKKDLLGLGNGFWQRPSYVISLSHGGFGRNEFRLPLSLGARSLLQSVRTASTATARQPKMDTDDEQSEDHKQKKKKKSG

SEQ ID NO: 225507 - protein, 70 aa, Zea mays
  unsure (1)..(70): unsure at all Xaa locations
  Clone ID: MRT4577_137250C.1.pep
PPPAPPPPRAPXHQIPAQXRGTSGPSTSXSKSXXVKTRVPVXPFPRRNGGSGREAAMVGDGERGARGSAD

SEQ ID NO: 225508 - protein, 108 aa, Zea mays
  Clone ID: MRT4577_137251C.1.pep
SARGKCETLWPIFKVSHQRSRYVYDLYYRREEISKELYEFCLDQGYADRSLIAKWKKSGYERLCCLRCIQPRDHNYGTTCVCRVPKHLREEKVVECVHCGCQGCASGD

SEQ ID NO: 225509 - protein, 59 aa, Zea mays
  Clone ID: MRT4577_137252C.1.pep
FNLGIKMGKVRGCTDAYVVKERLERWPLFPSIVFFFSPYVLCLLVWIFYICLLFIGRVG

SEQ ID NO: 225510 - protein, 85 aa, Zea mays
  Clone ID: MRT4577_137253C.1.pep
RTKETSVSRTPAPAPAPAPTPPPPPVAATPKIRRFISSASAPFATPAANGSPAATPPPPTIPPAYPPVSLSMPLLPPPPPPQLLV

SEQ ID NO: 225511 - protein, 191 aa, Zea mays
  unsure (1)..(191): unsure at all Xaa locations
  Clone ID: MRT4577_137254C.1.pep
GRDTSWHIILSTHFIMQLTSIISFWALALFSLVLAAEPVPRGQLTQVNSYGNNPTGTKMSLYVPKNLKANPAVVVALHYCGGTSQAYYQGTKWASNAEKYGFIVIYPQTPYSGGCWDVSSKMTLTHEGGGCSTSIANMAKYVLNQYNGDAKKVFVTGESSGAMMTNVMLATLPDVFAAGSAYAGVXAGCFV

SEQ ID NO: 225512 - protein, 75 aa, Zea mays
  unsure (1)..(75): unsure at all Xaa locations
  Clone ID: MRT4577_137255C.1.pep
WRSHIMLTHDVAIDTAAPLANDSSTAGYIDTMNLYRAYXSMRSXRRFCGGLDYNYCYGRSNGSSKSRYDRQYPPY

SEQ ID NO: 225513 - protein, 125 aa, Zea mays
  Clone ID: MRT4577_137256C.1.pep
IRSIAETQVSSGTCGFNSYSKVDVINNQTTCVCVPQYTFKGGSKGCTPDFQQPSCDLDEAGATKQFQLVTMSNVDWPQCDYEQHDNIPNNQCQQLCLTDCLCAVAVFRDSDNTCWKKKVPFTNNI

SEQ ID NO: 225514 - protein, 122 aa, Zea mays
  Clone ID: MRT4577_137257C.1.pep
GEQGPKKKNWGGVLTQKHMFCSKGSPLNQKLFAFWARGTRGKELFLEKPVGPIIFRLGPFSKEGLFEFLQGGPGPPPWEGKGFPQGVGGTFPGFTNTPTFAKGGWGEPPRFRNQIWAFDNFF

SEQ ID NO: 225515 - protein, 159 aa, Zea mays
  unsure (1)..(159): unsure at all Xaa locations
  Clone ID: MRT4577_137258C.1.pep
MQSYTYVNCRSQTNEGCAPTPRSSSPHSSTKRHARQLHSSAAARPLSSRQPPTEAPIQAGSRAAHRRHNTHRLIPMYIRIQNRYYLNSPLSDIAMSRYIHGPFAYSGGAAAXAPAAPHRFRLSRGGVGVGVGRPWDSTRIAHSTCTSSHWHDLTSSYRM

SEQ ID NO: 225516 - protein, 55 aa, Zea mays
  Clone ID: MRT4577_137259C.1.pep
VDVVVIVDYVVVYYVAALGFVVDLIFQSSVSFIYYSDPFQWFVQVIAHTAMHVDG

SEQ ID NO: 225517 - protein, 57 aa, Zea mays
  Clone ID: MRT4577_13725C.1.pep
RLPWAKVIIQSFDVYVPQKSMYALMGCTDPYVGHICNFKNQAPGQEPFFFRWEGFRF

SEQ ID NO: 225518 - protein, 85 aa, Zea mays
  unsure (1)..(85): unsure at all Xaa locations
  Clone ID: MRT4577_137260C.1.pep
MYIRIQNRYYLNSPLSDIAMSRYIHGPFAYSGGAAAEXPXAPLSSLRLSRGGVGVGVGRPWDSTRIAHSTCTSSHWHDLTSSYRM

SEQ ID NO: 225519 - protein, 93 aa, Zea mays
  Clone ID: MRT4577_137261C.1.pep
CAHAYGVETDRCRWRDRAPRPQGDERKSLRRVRRLRGAGVDEDRPAIAGAEPMPSAPFRNSTPSGFLRSSRQPSCAPPQRIDRTSDERVTYEW

SEQ ID NO: 225520 - protein, 117 aa, Zea mays
  Clone ID: MRT4577_137262C.1.pep
SLSRRRRLRRRGSCRHLSTISGEIIHSNPSTKILVQKIMDNTSVKKGLCSHLLMYHLHNKNAPHVDNKAHFDLLSSNVSSCSEPHYKKKPSYMNAFDIIILLTGLEHSGLFVESYNK

SEQ ID NO: 225521 - protein, 122 aa, Zea mays
  Clone ID: MRT4577_137263C.1.pep
EERDGRGTPPRHRNHSLRRRHRASRAGSLETVDPARDSVGIRSVHRGASKERASSQFTPCHGQRPPRHYSWREDTCHLKGKLVPGISSPRQVVPLTTSYPIMFFDVTCSCIGLILMEPNKLL

SEQ ID NO: 225522 - protein, 77 aa, Zea mays
  Clone ID: MRT4577_137264C.1.pep
RGRVGGRVGSSYLRPPPLTPPASIHSAVSLTQFNIAGEGSNIRSSGENPHLRLSPGDKMGSVGAVTYGEQKGSHMER

SEQ ID NO: 225523 - protein, 918 aa, Zea mays
  Clone ID: MRT4577_137265C.1.pep
MTASPYPTTPWLRPPPPMAFLSLLLLLGCLSPSISLAGAEAAGVLRQVVGGDDGGTFFEPFNVTYDHRALILGGKRRMLVSAGLHYPRATPEMWPSLIAKCKEGGVDVIETYVFWNGHEPAKGQYYFEGRFDIVRFAKLVAAEGLFLFLRIGPYACAEWNFGGFPVWLRDVPGIEFRTDNEPYKAEMQIFVTKIVDIMKEEKLYSWQGGPIILQQIENEYGNIQGHYGQAGKRYMLWAAQMALALDTGVPWVMCRQTDAPEQILNTCNAFYCDGFKPNSYNKPTIWTEDWDGWYADWGESLPHRPAQDSAFAVARFYQRGGSLQNYYMYFGGTNFERTAGGPLQITSYDYDAPIDEYGILRQPKWGHLKDLHAAIKLCESALTAVDGSPHYVKLGPMQEAHVYSSENVHTNGSISGNSQFCSAFLANIDEHKYASVWIFGKSYSLPPWSVSILPDCETVAFNTARVGTQTSFFNVESGSPSYSSRHKPRILSLIGVPYLSTTWWTFKEPVGIWGEGIFTAQGILEHLNVTKDISDYLSYTTRVNISEEDVLYWNSKGFLPSLTIDQIRDVARVFVNGKLAGSKVGHWVSLNQPLQLVQGLNELTLLSEIVGLQNYGAFLEKDGAGFRGQVKLTGLSNGDIDLTNSLWTYQIGLKGEFSRIYSPEYQGSAEWSSMQNDDTVSPFTWFKTMFDAPEGNGPVAIDLGSMGKGQAWVNGHLIGRYWSLVAPESGCPSSCNYAGTYSDSKCRSNCGIATQSWYHIPREWLQESGNLLVLFEETGGDPSQISLEVHYTKTICSKISETYYPPLSAWSRAANGRPSVNTVAPELRLQCDDGHVISKITFASYGTPTGGCQNFSVGNCHASTTLDLVVEACEGKNRCAISVTNEVFGDPCRKVVKDLAVEAECSPPSVNQEPRYDI

SEQ ID NO: 225524 - protein, 106 aa, Zea mays
  Clone ID: MRT4577_137266C.1.pep
ALFVWADAWADAWAYPWADAVNLSTGHNWMLMGSPPSKDLRLRLHHVDQVPSPCQLVGPKPITHDHEPGPAPVQDRTGQNTGRWRQCRKAQEGHRERYAQALSLRL

SEQ ID NO: 225525 - protein, 45 aa, Zea mays
  Clone ID: MRT4577_137267C.1.pep
MNQSMFMLKYTIVLIPLNYDQLISYIILNYFTNTITINIDPINIL

SEQ ID NO: 225526 - protein, 64 aa, Zea mays
  unsure (1)..(64): unsure at all Xaa locations
  Clone ID: MRT4577_137268C.1.pep
PKGKPKKAGFFSGRKKKGLFKSPVAPKGKVGVPGSGKALPXLQKEXKNLPLKGGSGNPTDNSKE

SEQ ID NO: 225527 - protein, 106 aa, Zea mays
  unsure (1)..(106): unsure at all Xaa locations
  Clone ID: MRT4577_137269C.1.pep
GGVFFGKEVGGVPFVEVVVLEAIVKEEGATAIIAAEVGVVVAIRAAEVIRAAEAGTIVEIAKASPLPRRRNDFALPWIFLSFSMLLVVLFRSWTALGSMSLVACXG

SEQ ID NO: 225528 - protein, 111 aa, Zea mays
  Clone ID: MRT4577_13726C.1.pep
RRHQRQRQRHSQREPVRATLRQLARPRGRHRWRPALRCPRRRLRRGRQRGSSSSPSRSCGGGGTSTADCLGDGVGWLVRSDGGGESFISFSGWLLLQAAGSPLRTRGRTRG

SEQ ID NO: 225529 - protein, 72 aa, Zea mays
  Clone ID: MRT4577_137270C.1.pep
CLWGGNMGATALVTDEGPCPCKCAAVTWDQATEVGCMRHTHICPDSRPVILLTNWPSTGSPLDATWLPCIVS

SEQ ID NO: 225530 - protein, 85 aa, Zea mays
  Clone ID: MRT4577_137271C.1.pep
MSPERRPVEIRPATAADMAAVCDIVNHYIETSTVNFRTEPQTPQEWIDDLERLQDRYPWLVAEVEGVVAGIAYAGPWKARNAYDW

SEQ ID NO: 225531 - protein, 134 aa, Zea mays
  unsure (1)..(134): unsure at all Xaa locations
  Clone ID: MRT4577_137272C.1.pep
TTQGAAHPPGGRYLLALIATAISVAYASASRALDYGKEMERNLDFSEASXVTLDRSQALMIPLASSCSLLLVFYLFSSVSHLVTAFTAVASALALFFCLSPHITYLKARFNLMDPFMSRCWSKSFTRVQGLLVL

SEQ ID NO: 225532 - protein, 29 aa, Zea mays
  Clone ID: MRT4577_137273C.1.pep
QIKYPTPLFTIAIFPSGGGLKFYQPSPTP

SEQ ID NO: 225533 - protein, 114 aa, Zea mays
  unsure (1)..(114): unsure at all Xaa locations
  Clone ID: MRT4577_137274C.1.pep
MESLWKLTYLLDPASVALIATAISVAYASASRALDYGKEMERNLDFSEASITLDCSQALMIPLASSCSLLLMFYLFSSVSHLVTAFTAVXSALALVFCLSHTSPILGTIHLMDP

SEQ ID NO: 225534 - protein, 75 aa, Zea mays
  unsure (1)..(75): unsure at all Xaa locations
  Clone ID: MRT4577_137275C.1.pep
GSRNSRLVPTRLAPTSNCTQEIHXRGSSTGAINGRRRLAAAHPASYSRRRRSGLRALGCQSQRPDLLRAPVGHTA

SEQ ID NO: 225535 - protein, 97 aa, Zea mays
  Clone ID: MRT4577_137276C.1.pep
MESLWKLTYLLDPASIALIATAISVAYASASRALDYGKEMERNLDFSEASITLDRSQALMIPLASSCSLLLMFYLFSSVSHLVTAFTAVASALALVF

SEQ ID NO: 225536 - protein, 139 aa, Zea mays
  unsure (1)..(139): unsure at all Xaa locations
  Clone ID: MRT4577_137277C.1.pep
NTQYGHGGAAVDLMXYSLYKKLGKQDDELVKTNMMLSGVGTDSSIKAKGVTSVELTIGTKTLAAAFFIADVEGNYILILGRDWIHANQYIPSTLHQMLLQWVSDDVDQVHADASACIAMADAPVLWTYETATCLTGVDL

SEQ ID NO: 225537 - protein, 372 aa, Zea mays
  Clone ID: MRT4577_137278C.1.pep
MESLWKLTYLLDPASIALIATAISVAYASASRALDYGKEMERNLDFSEASITLDRSQALMIPLASSCSLLLMFYLFSSVSHLVTAFTAVASALALFFCLSPHITYLKARFNLMDPFMSRCCSKSFTRLQGLLMLFCIATVLAWLVSGHWMLNNLLGISICIAFVSHVRLPNIKICALLLACLFVYDIFWVFFSERFFGANVMVSVATQKASNPVHTVANKLSLPGLQLITKKLELPVKLVFPRNLLGGIVPGSNPGDYMMLGLGDMAIPGMLLALVLFFDNRKLKDVNVVPSDVSPLRRRNYVWYALTGYGIGLVAALAAGILSQSPQPALLYLVPSTLGPVMYLSWLRNELWELWEGSGTILNEKARLLEV

SEQ ID NO: 225538 - protein, 511 aa, Zea mays
  Clone ID: MRT4577_137279C.1.pep
LLVVPLLLLLLSPLLCLLSSGRRRRREQGAAERRRAPPGPPKQLPVLGNLLQVGSRPHRYFQAVARRYGPIVEVQLGRVRTVVVSSPDAAKEVLRTNDLHCCSRPNSPGPRMLSYDFLDVAFSPYSDYWREMRKLFILELLSMRRVQSFAYARAAEVDRLVSSLASSPPGAAVDLSEKLYALSDGVVGTVAFGKMYGSAQFERSSFQRVMDETLRVLGSFTFEDFFPASRLARFADVLTGAAGRRSRIFRQIDRFFDSVIDKHLEPERLQAGVQEDMVDALVKMWREEQADGYEAPHGLTRDHIKGILMNTFAGGIDTCAVTMIWIMAELMRNPRVMQKAQAEVRTLVGNKPRVDEEDVKSLSYLKMVVKENFRIHPPGTLLIPRETMRSCVIGGYDVLPGTRIFVNVWAMGRDASIWDRPEEFSPERFEGSHVDFRGSSFELLPFGSGRRSCPAIAMGVANVELVLANLLHCFDWELPDGMVEEDIDMEETGQLAFRKMVPLCLVPIKRV

SEQ ID NO: 225539 - protein, 45 aa, Zea mays
  Clone ID: MRT4577_13727C.1.pep
LFFPVCSDFDSMVIAACSSRRLVPTFPLIAWDLNSISPYIVICSC

SEQ ID NO: 225540 - protein, 372 aa, Zea mays
  Clone ID: MRT4577_137280C.1.pep
MESLWKLTYLLDPASVALIATAISVAYASASRALDYGKEMERNLDFSEASITLDRSQALMIPLASSCSLLLMFYLFSSVSHLVTAFTAVASALALFFCLSPHITYLKARFNLMDPFMSRCCSKSFTRLQGLLMLFCIATVLAWLVSGHWMLNNLLGISICIAFVSHVRLPNIKICALLLACLFVYDIFWVFFSERFFGANVMVSVATQKASNPVHTVANKLSLPGLQLITKKLELPVKLVFPRNLLGGIVPGSNPGDYMMLGLGDMAIPGMLLALVLFFDNRKLKDVNVVPSDVSPLRRRNYVWYALTGYGIGLVAALAAGILSQSPQPALLYLVPSTLGPVMYLSWFRNELWHLWEGSGTILNDKARLLEV

SEQ ID NO: 225541 - protein, 47 aa, Zea mays
  Clone ID: MRT4577_137281C.1.pep
ILADKYMNKELELDKFITHEVGLKDINQAFDLLLQGKSLRCTIWMDK

SEQ ID NO: 225542 - protein, 150 aa, Zea mays
  unsure (1)..(150): unsure at all Xaa locations
  Clone ID: MRT4577_137282C.1.pep
PFAYLAQQVVGSNPLFLGNGVGYPPPPPLAQFFPGVSXLAMGDPFAFLQRENFFFFXPLALGKGPKNLEQRLLPPQVLPPIGPGFFQLGVGNPFGFLGQLFSFYPLVGGEFGGGLPQGPRFFYPLGGGNPLGGAFFQQQQFLPYHPFFFL

SEQ ID NO: 225543 - protein, 75 aa, Zea mays
  Clone ID: MRT4577_137283C.1.pep
FQKNPFFLFGGGNPKRGCSLLKAPPFFTKRPLGGIARGKQKTALFLRKPGLCYPVSPGKIKILVWGPPPPLRGAR

SEQ ID NO: 225544 - protein, 36 aa, Zea mays
  Clone ID: MRT4577_137284C.1.pep
YSSTSQITWQSAYNWCIVVNPRLYYLYTPKSGIGAT

SEQ ID NO: 225545 - protein, 54 aa, Zea mays
  Clone ID: MRT4577_137285C.1.pep
STMTVKDIEQDNSLSISCSKISIIAIIQCSTLPTNTLVSPPQFTVLSVTIFILC

SEQ ID NO: 225546 - protein, 65 aa, Zea mays
  Clone ID: MRT4577_137286C.1.pep
VHDCPCLDSIHLHTYTGIPWAPEQRQADRVRTSKSSESGPKRSRTLNQMNFGAELAVRFGPVCIC

SEQ ID NO: 225547 - protein, 67 aa, Zea mays
  Clone ID: MRT4577_137287C.1.pep
TVVNATDVSTAYKDEVLFVSRVILSYIGVMPLQRRFGSIPYLYCKLCVITAMRHLWMDLLLHSYCKL

SEQ ID NO: 225548 - protein, 65 aa, Zea mays
  Clone ID: MRT4577_137288C.1.pep
GRLPRTSWAVSDAASSSTSPMRSSRRSTRSHSPEPISTTTTMVTTADTASFCARPVLRKTSFPAP

SEQ ID NO: 225549 - protein, 87 aa, Zea mays
  Clone ID: MRT4577_137289C.1.pep
AHAIERLFAISGRSHGGSVDLDAQHDPSLQATGEEDAISLYEHGQPEVVRCQRGDDIGGAEDQHDLNELGDIAGDLAPVKEQRAPTA

SEQ ID NO: 225550 - protein, 766 aa, Zea mays
  Clone ID: MRT4577_13728C.1.pep
MASMAIIRRRKYFLDHVNTPTISSSAFFTFQHGRLGLEVEPRTEQRFLEHSSGDSKCEKEQHNMNLIKKDLLGLGNGFWQRPSYVISLSHGGFGRNEFRLPLSLGARSLLQSVRTASTATARQPKMDTDDEQSEERERNKRKKEASPEECDQAVEGLSTAKAKAKAKQVQESLKVGQSIIQKFWARVLGVGPALRAVASMSRADWAAKLKHWKDEFVCTLQHYWLGTKLLWADVRISSRLLVKLAGGKSLSRRERQQLTRTTADIFRLVPFAVFIIVPFMEFLLPVFLKLFPNMLPSTFQDKMKEEEALKRKLKARMEYAKFLQDTAKEMAKEVQTSRSGETKQTAEDLDEFLNKVRRGGRVSNDEILNFAKLFNDELTLDNMNRPRLVNMCKYMGIRPFGTDHYMRFMLRKKLQDIKNDDKLIQAEGVESLSEEELRQACRERGHLGLLSTEEMCQQLRDWLDLSLNHAVPSSLLILSRAFTVSGRMKPEEAVVATLSSLPDEVVDTIGTVLPSEDSVSERRRKLEFLEMQEELIKEEEKKKEKEEKAKQKKEEAKMKEPETAEEDLALKEMTDATAREELRKAKEHDKEKLCNISRALAVLASASSVSKERQEFLSLVNKEIELYNSMLKKEGTEGEEAAKKAYIAAREDPDNDAEAAAEEKVSSALIEKVDAMLQELEKEIDDVDAQIGNRWQLLDRDHDGKVTPEEVAAAAAYLKDTIGKEGVQELITNLSKDTEGKILVEDIVRLASQTEEHNDDEEQSRQ

SEQ ID NO: 225551 - protein, 61 aa, Zea mays
  Clone ID: MRT4577_137290C.1.pep
VCFLCARLVCFSGGKLVYQYTKKRASGPKCPVTGKKIQGVSDHFLIITYLILVARSSRLFG

SEQ ID NO: 225552 - protein, 66 aa, Zea mays
  Clone ID: MRT4577_137291C.1.pep
IALILSRKQNLRCTMHCFKRSVGSPLRLYHITATISARNTRLISTSGKAASSKVSKVRPGGPEVPT

SEQ ID NO: 225553 - protein, 165 aa, Zea mays
  unsure (1)..(165): unsure at all Xaa locations
  Clone ID: MRT4577_137292C.1.pep
QQQQGRPTQSHXAXXNXXTXXQQQXXAXNPXAXANXXAGQQQQQRQQFVPEHREXARGNXAXXXQXXXXSPRAXGXAXTXXQQQXXQQKGPXXXQGAGANPXAXXQQKXPNNQXXXXNXXAXXQQRQQXPKPKAGANPKXXTXRQQQQQXAPDNQXXXXNXAXQQ

SEQ ID NO: 225554 - protein, 109 aa, Zea mays
  Clone ID: MRT4577_137293C.1.pep
AAGAGRDAEEEMKRRNAELERAVAEAAAREERLRRELEAALARLAVAEEAEERLCVQLGELEAEAVEQAIEYQERVRALSERLAFADGVLRSSGIRGFAAAGASTSRMD

SEQ ID NO: 225555 - protein, 116 aa, Zea mays
  unsure (1)..(116): unsure at all Xaa locations
  Clone ID: MRT4577_137294C.1.pep
APALVSACPRRRPAWXSXWSGPSVVAASCSCAGCRSSCSAVSASCPGACRPRASAAVAASASPAWLLRXRPSCAAAWFGSCGCAXGPLGGGGGXLFLPVCRLGWVVLLXAXSXRVR

SEQ ID NO: 225556 - protein, 62 aa, Zea mays
  Clone ID: MRT4577_137295C.1.pep
LGPLAADLSSQSECIFAHEWSSRIMHCDGRHSFGVFIQATKLCLMHPPIGQAKHGSVTSTQF

SEQ ID NO: 225557 - protein, 123 aa, Zea mays
  Clone ID: MRT4577_137296C.1.pep
GVILALGTNLLCVKRLLLPCSSTWSRLIAVIPSFCKQFRTLPSSSGVRRRLVLRGAPLDLYGPRWRVVALCLDSRLRVLVATTTFSSCSSLTRPSIAHMFASADVVRFPAYQSLPPERPPTRP

SEQ ID NO: 225558 - protein, 60 aa, Zea mays
  Clone ID: MRT4577_137297C.1.pep
PNQHTGSLSCHPAQLPIHAIGKITHIHSSLFNNVIMQKNDTHSNVWYDQYYMLHTKGVVA

SEQ ID NO: 225559 - protein, 65 aa, Zea mays
  Clone ID: MRT4577_137298C.1.pep
YFLKEKKNVQQYPLLFTLPCNVGLQKPLNFLENGGSKNPYFMENEIKILAAPFGYGLMVNKALPF

SEQ ID NO: 225560 - protein, 80 aa, Zea mays
  unsure (1)..(80): unsure at all Xaa locations
  Clone ID: MRT4577_137299C.1.pep
MAPLGDGGAAAAAASNNLVVSFGEMLIDFVPNVDRLSLAESGGLVKAPXAQPANVACSIAKLGGSIRFAGKFGDDKFGHM

SEQ ID NO: 225561 - protein, 111 aa, Zea mays
  Clone ID: MRT4577_13729C.1.pep
GRTFWGQARYNYSPNHWRNTFTKGAHALFIENNKDLCWQPHVERKQPNTRFFFIIDRQGRLSLSAKAITCWKPLTPLCLRQWMPVPKITARAVERTSYQTKALVGCHPHAS

SEQ ID NO: 225562 - protein, 195 aa, Zea mays
  unsure (1)..(195): unsure at all Xaa locations
  Clone ID: MRT4577_1372C.1.pep
LRVLGWYYTVDLSVRWSFVFYRCRFRRVVRDEQGSCRCSAALDEVXRFLRGIWXYLVAGLELXPHSFGVSIHTRHALNHATCVEGEGVGTTTYYGXRLAYTMXQGPHISVGPPLVMRRYPGTTLDGXKKLGILKILHTISAPGEFQVFFCPGGRNREFFLSSFSMSIHRAGYKISSERVKKLFWRHEQDKGIILR

SEQ ID NO: 225563 - protein, 244 aa, Zea mays
  Clone ID: MRT4577_137300C.1.pep
TSRSANTTVGRAGNTGKQRSARIKAKHRRTHERELDMGSGSRPRRAGWARRWRSCREKHPASQQETQAKSRPANAVKMARPSAVSGASRTPSRGSRRTEKPARSHGGRNLAGRGHERSLVWSRDQGHTMANWNRRAEGRWQMTGLRQQRNRRPRTRPEHHVDTPWRHGPSRKLRGEQRTPASMAGTGRAEGRETAVGETQRKLGTRKMGFASSRLGRDGVLNCWKGKGWVGARAMRRRLLWARA

SEQ ID NO: 225564 - protein, 562 aa, Zea mays
  Clone ID: MRT4577_137301C.1.pep
AVDHSVVSSGTLETLSQSQRAGPDLPPPPLNPLLPLLHTSRFRETSPPFPSKPTGSGGFDRIESDRIGSMEISLEASWVGVQRHGQDLADRLAQGFSGLLLHAQPPQLPPWSPAALLPPKLVIPFDLDLPVVPFVAGMRRGVGTVDLPAVAVSSLVEIGGRLGQAGSELGAAVQHLARQVPVPVPFRKWEAAQPPTVVTGDVALAVGTVGSANVALERAVDIGSLEVAAAAAAAATGSATAGSVGAVGAMDDDRLDDEEDGFDCEIGTLENIKKAKGTVNVSATYNTRHHDFESSVVARGDLWRLESSRGNLTSGNDSSPLFLVQLGPLLFVRDSTLLLPVHLSKQHLLWYGYDRKNGMHSLCPAIWSKHRKWMLMSMMCLNPVACSFMDVQFPNGQMTYVAGEGITASGFIPLFGGLLQAHAKCPGDTRVSFSFKNKQGTRFSPTFQWPDNSVSFGVAQAVAWKRSGLMVRPSIQISVCPTFGGTDPGICTEFVHSLKEEVSVMCGFSCSRHPSAFTALSLGRSKWNGQVGSSGLVITLETPLDNMARPSLSVQLNGGFEF

SEQ ID NO: 225565 - protein, 53 aa, Zea mays
  Clone ID: MRT4577_137302C.1.pep
NLRTCALGWGRQGDFFNLRYSDPLTQSGRGPFGKSRHFHFAPLCPVRIKGVRG

SEQ ID NO: 225566 - protein, 55 aa, Zea mays
  Clone ID: MRT4577_137303C.1.pep
GKTGNGGGAIIGSLLREFNRLFNVKSRILGRRFSSLVEKQGLLLVLVLGCILKKA

SEQ ID NO: 225567 - protein, 77 aa, Zea mays
  Clone ID: MRT4577_137304C.1.pep
GSLTFQKCKRVFCPRMGSSMRYYKPHFLRARMTGQLKRYLSQSHRHVMDTPRTPPNNHLCSKTRMQCTSTKALTIFK

SEQ ID NO: 225568 - protein, 270 aa, Zea mays
  Clone ID: MRT4577_137305C.1.pep
MAVSNNITACINFLVLLCTIPIAATGLWLASRHGSEDCARLARWPVAVLGALLLLVALAGFAGAYWNRRGLLACYLFAMAALITFLLAFLVFAFAVAHDSGAYPAPGRAYQDYRLQGYSSWLRGYVADDPRRWEGVRACVAASGTCRKLAMDRSFIVPEQFYMSHLSPIESGCCKPPTVCGYAYASPTAWTGPAADADCAAWSNDPGQLCYACASCKAGVLGGLREQWRRATVPLLVATVALIFVYVVGCSAFRNAQTEDLFRRYKWGNY

SEQ ID NO: 225569 - protein, 98 aa, Zea mays
  unsure (1)..(98): unsure at all Xaa locations
  Clone ID: MRT4577_137306C.1.pep
IQCLGVCRVLESKGYKWFIWAKRLWVNKRPFFVNKFWETRDPCEAFSDSVPKGIALDQKKLFCGLRPSEPIFLFCAKKKKKKKKKKKKKKKKKXKGGR

SEQ ID NO: 225570 - protein, 274 aa, Zea mays
  Clone ID: MRT4577_137307C.1.pep
MAVSNNITACINFLVLLCTIPIAATGLWLASRHGGEDCARLARWPIAVLGALLLLVALAGFAGAYWNRRGLLACYLFAMAALITLLLALLVFAFAVAHDSGAYPAPGRAYQDYRLQGYSSWLRGYVADDPRRWEGVRACVAASGTCRKLAMDRSFIVPEQFYMSHLSPIESGCCKPPTVCGYAYANPTAWTGPAASPAADADCAAWSNDPGQLCYACASCKAGVLGGLREQWRRATVPLLVATVALIFVYVVGCSAFRNAQTEDLFRRYKWGNY

SEQ ID NO: 225571 - protein, 55 aa, Zea mays
  Clone ID: MRT4577_137308C.1.pep
FCCKSVNPVLLRLNMTQTCLQIAVKKFGLFPPGQGGGGPPKIFKNPPFFYGRPPG

SEQ ID NO: 225572 - protein, 42 aa, Zea mays
  Clone ID: MRT4577_137309C.1.pep
KLGSITVIKVTWVAPVMILQHLLSNGVCVLNTVPTPRSYNSA

SEQ ID NO: 225573 - protein, 34 aa, Zea mays
  Clone ID: MRT4577_13730C.1.pep
DEYITHNMNLADINDAFHLLHEGGCLRCVLAMQI

SEQ ID NO: 225574 - protein, 245 aa, Zea mays
  Clone ID: MRT4577_137310C.1.pep
MRVKKRSKHRKAVKFYATCFGFREPYKVLIDGTFVHHLLTQRLLPADEALRDLLSASRTPALFTSKCILAELRRLGKSHAESFDAAQLLTTTKCEHDKVVGAVNCVQSLIGDKNPEHFFVATQDPGLRENLREIPGVPVIYGLKNSLCIERPSMQQRKFAQLDEEKRLNMDISEYKKLLKAASEGKTIASENGSGEEQHEMPISSLVKNALHVTDKTKFKRNKAKVIFIAIGISCYAIDYTMFII

SEQ ID NO: 225575 - protein, 172 aa, Zea mays
  unsure (1)..(172): unsure at all Xaa locations
  Clone ID: MRT4577_137311C.1.pep
MRQRRSVAAPLHSNPLATPSGERERGERRHQTPPVSMRQRRHQTSRYPPHPPPVGFVRCENSRVAHRRQLSGCCKPPTVCGYAYASPTAWTSPAADADCVAWSNDPDLLCYACASCKGGVLGGLHEQWRRATIALIFVYVVGCSXVRNAQTEDLFRRYKWGKLLRSLPLIYC

SEQ ID NO: 225576 - protein, 96 aa, Zea mays
  unsure (1)..(96): unsure at all Xaa locations
  Clone ID: MRT4577_137312C.1.pep
SRSAVSNSTWLSLVPGGGGRNWASTPMTVEDVNPHEFLKAYSGHLXRFGKIELLSRXDIVKTARFKEXPPYDPDWYYIRAASVARKIYLRQGIGVG

SEQ ID NO: 225577 - protein, 276 aa, Zea mays
  Clone ID: MRT4577_137313C.1.pep
MRVKKRSKHRKAVKFYATCFGFREPYKVLIDGTFVHHLLTQRLLPADEALRDLLSASRTPALFTSKCILAELRRLGKSHAESFDAAQLLTTTKCEHDKVVGAVNCVQSLIGDKNPEHFFVATQDPGLRENLREIPGVPVIYGLKNSLCIERPSMQQRKFAQLDEEKRLNMDISEYKKLLKAASEGKTIASENGSGEEQHEMPISSLVKNALHVTDKTKFKRNKAKGPNPLSCKKKKPKLPTAIQKQAGTADGEAKRKRVRKRKRGQKDNKQLEAAN

SEQ ID NO: 225578 - protein, 34 aa, Zea mays
  Clone ID: MRT4577_137314C.1.pep
MHARKLHKAFPTGCPTLPCKHSYSFRLVCFGPCT

SEQ ID NO: 225579 - protein, 81 aa, Zea mays
  Clone ID: MRT4577_137315C.1.pep
TKGKTSLPPLYGHFIAHKLKNWNRTPKKQPEKTFPLKKKALIAHPLFKKKLSQRKLAIGGHPNLGAHKKAGPALKKPLRKP

SEQ ID NO: 225580 - protein, 111 aa, Zea mays
  unsure (1)..(111): unsure at all Xaa locations
  Clone ID: MRT4577_137316C.1.pep
LPXALRGRXXRXXGGGFLEAXLQXXRAPVGGGVLAXRFLRVPCTPLQXRXAEGAGTPCXAGVXXRAGGAMGGSFTCXRRVMAXAXRGVVXXAAXXGSSXPRGPPPATXAXG

SEQ ID NO: 225581 - protein, 208 aa, Zea mays
  unsure (1)..(208): unsure at all Xaa locations
  Clone ID: MRT4577_137317C.1.pep
QRYYYCKIXLPNKLVLDFVTIAHIRVITLLNTKFFHMNIFGTNNVTIDKATIMAPGETPNTDGIPLVDSSNLTISGTTIVLGDECVFIXPNKTXIRVHRVNGGPRQGISVSSLCRNTDEXYMYDPNQNGCTLVGTTDALRFKSYXDSKSSLEGSKFLYQNGTMDNESYPIIIYQKYXPNNICVKSRASQVTDIDDIXFXNILGTSNTA

SEQ ID NO: 225582 - protein, 293 aa, Zea mays
  unsure (1)..(293): unsure at all Xaa locations
  Clone ID: MRT4577_137318C.1.pep
GTDPATGVVSKDVVVHPATGLWARLFLPAGSHGKKLPVVVYYHGGAYVIGSAADPMTHGYLNALVAKAGVLAVALEYRLAPEHPLPAAYEDXGRDFKWVATHASASAAAGGGPAAEPWLTEHGDFSRVFLAGASAGATIAHFVAVRAGEQHKSGGLGMRIRGLLIVHPYFSGAADIGDEGTTGKARKARADAFWRFLCPGTPGLDDPLSNPFSEAAGGSAARVAAERVLVCVAEKDDLRDRGVWYYESLKASGYPGEVELLESMGEGHVFYCMNPRCDRAREMEERVLGFLRK

SEQ ID NO: 225583 - protein, 45 aa, Zea mays
  Clone ID: MRT4577_137319C.1.pep
LRKSSTFTASDLHSRHSIPSLQRHIHIYSMSMRAGMQGFLENNWT

SEQ ID NO: 225584 - protein, 173 aa, Zea mays
  Clone ID: MRT4577_13731C.1.pep
HIGEQALSAAVGDVVARTMSAVAGRYDAHASVDGQLERLATLLVMVHSAVDEAERVHVANWWLRRWLWRLRYAALDGDEVLRSMRQQRAADEAAEATATTHSAGGRLWNAATRVVVRSAKSLLVSSRSGGDVDRLRRTVERLEQACARLGDFLKLLELEIMRSQAPPAAAAAA

SEQ ID NO: 225585 - protein, 84 aa, Zea mays
  unsure (1)..(84): unsure at all Xaa locations
  Clone ID: MRT4577_137320C.1.pep
FDNTPLAVLPAVLKVLGXRAMSQSLGVDIGTATCITTGPDFLAXQAVTDLTKWDCLWITVAWGFLFRILFYISLLLXGARNKRR

SEQ ID NO: 225586 - protein, 58 aa, Zea mays
  Clone ID: MRT4577_137321C.1.pep
QLDPAPHISAKVNNSSLIGLGYTQPLKPGIKLTLSALLDGKTVNAGGHKLRTGLDFQA

SEQ ID NO: 225587 - protein, 75 aa, Zea mays
  Clone ID: MRT4577_137322C.1.pep
WQCNALILFWGESERADLCRQARRPADLTLRQSDEGIPRLRRVDLAWHVCGGGGGRIVLVKNEEEDCGGVYYAGR

SEQ ID NO: 225588 - protein, 134 aa, Zea mays
  unsure (1)..(134): unsure at all Xaa locations
  Clone ID: MRT4577_137323C.1.pep
GGWVGSGKVFGVELRQGRPPPPPRISSWMVGARGRWGGLSSACGRNGSRCEGSLSWTTNVWVAAEPLAAEAIAGGGDAAGDAAGEVXIVRRGERGGVGGAGLGKRGRRGEEGSCRGRRRTRXSLSASPIAKRLA

SEQ ID NO: 225589 - protein, 161 aa, Zea mays
  Clone ID: MRT4577_137324C.1.pep
MSVGSCCIRAIPGAAPPARVGLLGSAFLQVSAARTRTRTRAGRCRAAQHGLVRLGGRVVARAGAAETPVAGTDEDAGAAFSETFPLRRCQAVEGKAWVRVDAEPDSEGKCKVVVGCNVAGKWVLHWGVSYDDEHGREWDQPPSEMRPPVSVAIKDYAIETP

SEQ ID NO: 225590 - protein, 73 aa, Zea mays
  Clone ID: MRT4577_137325C.1.pep
PSTGKTVDSMGMILPKRAAIIRHFIYGQRLQRDPQIHTKSDYLENQLTRLGKMGPAKAIVGQTVCALASVMLR

SEQ ID NO: 225591 - protein, 33 aa, Zea mays
  Clone ID: MRT4577_137326C.1.pep
ACMVGTFPRCVAPVQMSCRSTRFESLRFGMQLF

SEQ ID NO: 225592 - protein, 56 aa, Zea mays
  Clone ID: MRT4577_137327C.1.pep
WTHPGPRKLHLNLILTTERRIPFIFLITPHIQIRLQLTQRSKIHIKQPDRSVLIWA

SEQ ID NO: 225593 - protein, 63 aa, Zea mays
  Clone ID: MRT4577_137328C.1.pep
RLPGYGPTPNIINGGLEFGEDRSPHGAKTPKDRVGFYKRYFGMLRIGYGDNIAFGNQKPFGGL

SEQ ID NO: 225594 - protein, 378 aa, Zea mays
  Clone ID: MRT4577_137329C.1.pep
PLTCQKKGRAKSRSRDRRLIRHGEAGGGEEALCGVDRRTDTGSGPGFGCPPLPPAPLLSLLPVPQPAPAPPPPPPPPRACAPPPDPIRPCRRGAIHGCAPVPEDLTDGEVDADEDYINDAARFNVTLRVEALFPKIDVDPADGAVTGAELAAWNLANARREVLHRTARELELHDRDHDGRVAYGEYERPSWAWRFDDHNSTDDVFYNGKEEHFSAAVTGRAPLVPNSTFNNFIHSAVTTNPKLIHWLCKEEVRERDKDNDGKLNFQEFFNGLFYSIRHYDDEGLTDDTGGSDAPAKKSFSHLDLDNDGLLSADELKPVIGNLHPSEYFYAKQQADYVISQADTNKDGQLSMNEMIENPYVFYNALFTEDDYGFHDELR

SEQ ID NO: 225595 - protein, 55 aa, Zea mays
  Clone ID: MRT4577_13732C.1.pep
TDLLHHHVLFTYEPYSTGSLYKVSAYVQCCFHHTYHLFYFFHHPPSPNYLNPLFC

SEQ ID NO: 225596 - protein, 146 aa, Zea mays
  unsure (1)..(146): unsure at all Xaa locations
  Clone ID: MRT4577_137330C.1.pep
MAGLVSLRGYCDGQEECFLVYELCINGNLPWIQRLQIALXSACGLWFLHIYPEGLSMTAXNILLGVDMEPKLSDFGLSRVIDLGVSHVSSEVRGTFGYVDPEYRHNHRVNAAGDVYSFGMVLLQLLSGRRAINIMNTAMPMSLCSQ

SEQ ID NO: 225597 - protein, 311 aa, Zea mays
  Clone ID: MRT4577_137331C.1.pep
MNYDLSPVKRKDGQRAGAATDDSSDMAKPAAARKPSAASTVALTLVLALASAVLLFLLLRFSPSSPSPNPHPHRRLRLRPRAHAHHHQIPFDPVVADIERRLEDREWERLAAAGLHAPGMEAAPVPEDLTDGEVDADEDYINDAARFNVTLRVEALFPKIDVDPADGAVTGAELAAWNLANARREVLHRTARELELHDRDHDGRVAYGEYERPSWAWRFDDHNSTDDGVGWWKEEHFSAADMDGDGFLNLTEFNDFLHPADTTNPKLIHWLCKEEVRERDKDNDGKLNFQEFFNGLFYSIRHYDDEGLTDD

SEQ ID NO: 225598 - protein, 38 aa, Zea mays
  unsure (1)..(38): unsure at all Xaa locations
  Clone ID: MRT4577_137332C.1.pep
FHVLRTQXKKKKKKKKKKKKKKKKKKKKKKKKNKKKKI

SEQ ID NO: 225599 - protein, 53 aa, Zea mays
  Clone ID: MRT4577_137333C.1.pep
MAASFGTRSVRLLMLVLCLIGFCVALSHQVSAVDSCARATVTVVRLVPLDSTF

SEQ ID NO: 225600 - protein, 84 aa, Zea mays
  Clone ID: MRT4577_137334C.1.pep
EQGDADSPLDSQSHKKADNNAGDITSLFPKNCEYSHNITISSYDCYSPKMCFQVIYLAPNNLATSLIQKKKKKRGPRAPFFSPL

SEQ ID NO: 225601 - protein, 66 aa, Zea mays
  unsure (1)..(66): unsure at all Xaa locations
  Clone ID: MRT4577_137335C.1.pep
LKQNYTFSVALQLCYCDHLQIAYISKVMKIQRQLLDIVSSHXNLRSKKLIFEFSPLLPIKHGNIYT

SEQ ID NO: 225602 - protein, 60 aa, Zea mays
  Clone ID: MRT4577_137336C.1.pep
GTWNNRRSKNAFLFTNPRLKRHARFTPAKHNQFSTTFYRSNNGQNLSKNLVFGGQKPKIL

SEQ ID NO: 225603 - protein, 80 aa, Zea mays
  unsure (1)..(80): unsure at all Xaa locations
  Clone ID: MRT4577_137337C.1.pep
DVHDWXLGAGTRPTLFIFRPIVLSSASAPAGMLDGGAVVPAATTGFCLCLYAWKLDFFCWALLRGAALLLFAGSPLPPAG

SEQ ID NO: 225604 - protein, 50 aa, Zea mays
  Clone ID: MRT4577_137338C.1.pep
FFFFFLWTNVIRSRLKRTNGTKCINTREASDLAAGERLWLLTGTRNQNSC

SEQ ID NO: 225605 - protein, 83 aa, Zea mays
  Clone ID: MRT4577_137339C.1.pep
MSNIVAIKINNIQKLGQAAYCPMFQLSHMINFPLPPPMHACMLGVKMQEETCAAFRRNLRLLRCFPCLLSQWINYYTFTSVSM

SEQ ID NO: 225606 - protein, 61 aa, Zea mays
  Clone ID: MRT4577_13733C.1.pep
LSGKVGPAKTDFKPTSRGGGRPPLKKQCAVENPLASKQVKSLSANNWVIMCHASPWVPVSV

SEQ ID NO: 225607 - protein, 100 aa, Zea mays
  Clone ID: MRT4577_137340C.1.pep
GWFMQQQIYPWWVRPFRKTPTFKCMGRRSPVRFCSNKACFKAPPHGCFMFKGIKKPGVREPGKKGGCFIYVFCWPKKGEKHVGWGPKKKTKKGKNEENPP

SEQ ID NO: 225608 - protein, 397 aa, Zea mays
  Clone ID: MRT4577_137341C.1.pep
MEADSARKRLALLALLLLAAPVRPASAAPVEDGLLSNGDFETAPSGGFVKSASVAEGASSIPGWTINGTVELISAGQHQGGMILIVPQGDHAVRLGNDASVGQVVDVEKGSEYAITFSAARTCAQLEALNVSVLGGVSQTVDLQTLYNIEGWDAYALAFQATEEQAHLQFMNPGMEDDPTCGPILDNVAVKKLFTPDKPKDNVVLNGDFEEGPWMFPNTSFGVLLPTNLDEQTSAIPGWMIESNRAVRYIDSDEYKVPQGKRAIELLSGKEGIISQMVETTPQKVYSLTFTLGTAGDSCQPPMAVMAFAGDQAQNFHYSPMGNATSQAANVTFTARAERTRVAFYSVYYNTRSDDHSSLCGPVIDDVRVWALNAAAGLKASIGLVLGIVGVVGMVLF

SEQ ID NO: 225609 - protein, 127 aa, Zea mays
  Clone ID: MRT4577_137342C.1.pep
TDLTLPEISKRLAPTIVMTENLRRWKRTPDCVPSMVHRLTTYQDTLSMLREVRSQEQLCATLHIRTLTLIPGDIVTTCAISRTYKHSVDLWNARDATDTVAANVDVRLDRMNYKHLLGRHNNGYEGY

SEQ ID NO: 225610 - protein, 246 aa, Zea mays
  unsure (1)..(246): unsure at all Xaa locations
  Clone ID: MRT4577_137343C.1.pep
MAHVHVDEMLHEAAAAAPRSLLIATAVLFSLVVLPLLLRIIAKQGAASDAKLLSLLPSPPTRLPIIGHLHLMGDLPYVSLAGLAAKYGPELMLVHLGAVPTAVVSSPRTAEAVLRTHDHIFASRPRSMVFDIIMYGQTDSCFSPYGEHFRKARKLVTVHMLNARKIRSQRPAREEEVRQVIGKIAKAAAAREAVDMSELLHSYVNDLVCRAVSGKFSQEEGRNKLFRELTDINAAXLLGGFNILDY

SEQ ID NO: 225611 - protein, 269 aa, Zea mays
  unsure (1)..(269): unsure at all Xaa locations
  Clone ID: MRT4577_137344C.1.pep
LNVSVLGGISQTVDLQTLYNIEGWDAYALAFQATEEQAHLQFMNPGMEDDPTCGPILDNVAVKKLFTPDKPKDNVVLNGDFEEGPWMFPNTSFGVLLPTNLDEQTSAIPGWMIESNRAVRYIDSDEYKVPQGKRAIELLSGKEGIISQMVETTPQKVYSLTFTLXTAGDSCQPPMAIMAFAGDQAQNFHYSPIGNATSQAANVTFTARAERTRVAFYSVYYNTRSDDHSSLCGPVIDDVRVWGLNAAAGLKASIGLVLGIVGLAGMVLF

SEQ ID NO: 225612 - protein, 107 aa, Zea mays
  Clone ID: MRT4577_137345C.1.pep
TAYRGSGILGGGLVDYEEERWSSSTSCGTTPSHSLCPDTCLGRLRKLPVRPAVVKISDPGLYAVSFVPPSPGLVSEDTPVIVTRIIMIKLLSWYPLLAYVRGMTLAF

SEQ ID NO: 225613 - protein, 397 aa, Zea mays; identical to SEQ ID NO: 225608
  Clone ID: MRT4577_137346C.1.pep

SEQ ID NO: 225614 - protein, 105 aa, Zea mays
  Clone ID: MRT4577_137347C.1.pep
PGVRPGFRPGFGEGFRIGELQRVFFFVFWGLGPHLVQLIWNHPGQACFFLSHLDWRDIRRSPWRETPPSFSRGMVAPTMGNLPQLIHIVSHFCSKPFLFILGSPG

SEQ ID NO: 225615 - protein, 80 aa, Zea mays
  Clone ID: MRT4577_137348C.1.pep
IGFKALYSYFPCMLSPCKICDLRKAILSCSKYIVPINTNPSPSRNSISDCRNVVAYILTSQAIGFLRELLECHILNSSMY

SEQ ID NO: 225616 - protein, 49 aa, Zea mays
  unsure (1)..(49): unsure at all Xaa locations
  Clone ID: MRT4577_137349C.1.pep
ASQSMDSDLHQMIRTSHALSDEHCQQFLYQILPGLKXIQSANVLHRALK

SEQ ID NO: 225617 - protein, 238 aa, Zea mays
  unsure (1)..(238): unsure at all Xaa locations
  Clone ID: MRT4577_13734C.1.pep
MAELLRPADFFDLRAAAPFLAAAVALYFLAEQLSYLRKKGPLPGPSLVVPFLGSAVRMIRDPTGFWDAQAARARRSGAGLAADFLFGRFIVFIRDSELSHRVFANVRPDAFHLIGHPFGKRLFGDHNLIYMFGEDHKDLRRRITPNFTPRALSTYAAIQQRVILAHLRRWLDRSGGGGGAFPIRVPCRDMNLETSQTVFVGSYLAEEAQXRFAKDYPLFNLGLMTVPLDLPXGFAFRS

SEQ ID NO: 225618 - protein, 240 aa, Zea mays
  Clone ID: MRT4577_137350C.1.pep
MRPVFVGNLDYDTRHSELDHLFYRYGRVERIDMKSGFAFVYFEDERDGSDAIRALDGYPFGPGRRRLSVEWSRGDRAARRDGNKPEVNTKPTKTLFVINFDPMDTRVSDIERHFAPFGNISSVRIRKNFAFVRFETLEEARKALEATHATMLLDRVISVEYAFRDDDERSDRYDSPRRGGGYGRRGDSPAYRSRPSPDYGRPASPVYGSYGRSRSPVRDRYRRSPAYRSRSPPANRRAYD

SEQ ID NO: 225619 - protein, 60 aa, Zea mays
  Clone ID: MRT4577_137351C.1.pep
SSHRTSISIRTLLVGIWNLWSRVIRGLQKVPSQRQVYGQRRSRVRQWNNKKHKESVELEA

SEQ ID NO: 225620 - protein, 46 aa, Zea mays
  Clone ID: MRT4577_137352C.1.pep
ITTVNILFLNSNLFKMEILLFFFFFFLSPNVHIIYESCNADRVKGY

SEQ ID NO: 225621 - protein, 135 aa, Zea mays
  unsure (1)..(135): unsure at all Xaa locations
  Clone ID: MRT4577_137353C.1.pep
GVRAGTMGVPEGPASPARDKASPTSRATNPAPVVGGELALKLDCPASPPAATTCKACFAAAAAPMPLDRCGDALLRVRVAAAPASSFSFVACELCWFVGDDAAGACSSTKTRNRGEXXTLCSFFRATDSPRLLAP

SEQ ID NO: 225622 - protein, 105 aa, Zea mays
  Clone ID: MRT4577_137354C.1.pep
WGVFFFFFFFFFFFFITIRKKGLFSLSFIYTRGHCTFFIPSHTGFYPGEVKDGMPQPMTWHCSAGWRPPLQARRPFGGSGDFCELVFSQGVSVVLFEVLLVAFAV

SEQ ID NO: 225623 - protein, 212 aa, Zea mays
  Clone ID: MRT4577_137355C.1.pep
MMEAARYGPWSDLPPELLGLVLKRLPSLADRVHLRAVCHPWRSNGLLQQLPVPFPWLTLPDGTFFSIPGGEVHRMPIPDGASCCGSIDNWLFLMGSDDTCTLMNPFSKTTFELPDLVTVWRHEAHYESDHKQLLYKLVTPSPLDISPDSLIAALIKDGGNGTLCISQPPIAPYLVQGNRKPLQHLFDVAFFDGKLYAVSVFGSWSPLKFAQL

SEQ ID NO: 225624 - protein, 772 aa, Zea mays
  unsure (1)..(772): unsure at all Xaa locations
  Clone ID: MRT4577_137356C.1.pep
MPALASTAMARAAAPILLHLLLLLLLLTDHGPGPAAAVRFDYASLTLGSLRLLGDAHLKNGTIRLSRDLPVPTSGAGRALYATAVPLRGGFSTQFAFTVATLNPSSVGGGLAFVLATDGATLGDAGAYIGVSVATDAAAVEFDTLMDVQFGDPNGNHVGLDLGSMVSAAAADLGGDDAGVDLASGRTINAWIDYRPSSSPSGSAAGILEVFVSYAPKQPPKPVLSAPLDLAEAVKDAAFVGFSASTQGSTEVHAIEWWSFSTASPAPSPRSAAPAPESQALPPPVATPVLPSPLLPGGTTTAPAPPSGSAGAPAASIAPSSGATVGRNAAGSGTPRPPAAVAGAATAGAFVAASFAGVALWALARRARARKRQAALAVGTRRDSSVASAAALARSPREFSYKELSAATRGFDASRVIGNGAFGTVYKGIVPDTGAMVAVKRCSSTGARGGGNASGEQARSEFLSELSIIAGLRHRNLLRLQGWCYEKGEILLVYDYMRNGSLDRALFDASAPVLPWRHRREALAGVASALAYLHHECERRVVHRDVKSSNVMLDEAYRARLGDFGLARQAEHGESPDATAAAGTMGYLAPEYLLTGRASECTDVFSFGALALEVACGRRPIGATPEGVGGCCSNLVEWVWSLHAEARILGAVDXRLGGEFEEGEARRALLVGLACSSPEPALRPGMRAVVQVLGGEADPPFVPAARPSMSLGSANQQLLLSLQDSVSDYHAMLGLPLSDSSSSGSLSSSSLTSTLRRGGHDIRVSSTAGEAR

SEQ ID NO: 225625 - protein, 39 aa, Zea mays
  Clone ID: MRT4577_137357C.1.pep
PVATPEMTRGSHVSRHLVESEARKTMTWANYTTAKLELL

SEQ ID NO: 225626 - protein, 71 aa, Zea mays
  Clone ID: MRT4577_137358C.1.pep
RLVPKGLHLCNVPTSGSPVVISIVAFWGYFDYYFGPVWFIITERLVSWPSISNLVFRTHVEPLARKRKMVL

SEQ ID NO: 225627 - protein, 69 aa, Zea mays
  Clone ID: MRT4577_137359C.1.pep
MGTCAGIVSQSPLSVLIGPVSCGTVDSHFFFFFFSFFFFFFFFFFFFFFFFFWSSGRIYAFFFLGRELC

SEQ ID NO: 225628 - protein, 69 aa, Zea mays
  Clone ID: MRT4577_13735C.1.pep
PAGTSIFTPSAKHTNHHTSSHSYYSSRQHFNCCEYTLFIMTSTDPKTTDDKPVEQKPEQKPAALGEDDE

SEQ ID NO: 225629 - protein, 83 aa, Zea mays
  Clone ID: MRT4577_137360C.1.pep
GSWYLSVPHRWLPFSCPGVFGSVQGSCCSPLSFLCGRDCVLRFASSSCPLLVTLCLFAGSFTFVVLGFSPPGRSCICPGHFFF

SEQ ID NO: 225630 - protein, 68 aa, Zea mays
  Clone ID: MRT4577_137361C.1.pep
MPFRLLHKGMFLESRNIVNLSAEVKTEQAYGGGGGGYGGGGGYGGGGGGYGGGNRGGGYGNSDGNWRN

SEQ ID NO: 225631 - protein, 56 aa, Zea mays
  Clone ID: MRT4577_137362C.1.pep
KPGRPRVRNTCRLWSTIALFLAGKYTSEASKQHEWCHGHSTSRVTHHTTYIHLSLS

SEQ ID NO: 225632 - protein, 81 aa, Zea mays
  Clone ID: MRT4577_137363C.1.pep
KSKNAISQQQQKHKHITQTTNAPPHQNPSIPPHQPTYSFQKMHPLNPSHSPSLHTLYKPKNQQLPKHHKSLHLPLLPTFYI

SEQ ID NO: 225633 - protein, 71 aa, Zea mays
  unsure (1)..(71): unsure at all Xaa locations
  Clone ID: MRT4577_137364C.1.pep
AVVPXQKXFFFFFFFFFFFFFFFFFFFFFFFNVKSLVIYSNSGGHTILHIPAVKDASSYTKFDTGQVRNRD

SEQ ID NO: 225634 - protein, 46 aa, Zea mays
  Clone ID: MRT4577_137365C.1.pep
FLVTKKTLYDRGLPLNTHGEKQPHRIFFNTNITILWIHTTRCLVKA

SEQ ID NO: 225635 - protein, 72 aa, Zea mays
  Clone ID: MRT4577_137366C.1.pep
KCKHVDLASVELLEIATPRKELQVVNESETLVSLEEEENGTVAHPASGPHPPCCLSTSVDLSWSVHEHVVLV

SEQ ID NO: 225636 - protein, 210 aa, Zea mays
  unsure (1)..(210): unsure at all Xaa locations
  Clone ID: MRT4577_137367C.1.pep
SQGDXTVRLCDPVWCYDACREHPELNYNQCVNDCYAENMPDAAWLAALGGTGGEEARGGVVDVPMVVVQHEAAAGALSRGNCDEYCRKHYDEGSPGYRHCQYMCPHLRVHGVAEGEEARGGAVDGPTVVGKPHCDWFRDCSVTPCVWRCGKRVQEKDNEGTRTGALNVLAAARHEVAVGACSSTVYVQSCYACCQREVTRDPDFDWYACI

SEQ ID NO: 225637 - protein, 96 aa, Zea mays
  Clone ID: MRT4577_137368C.1.pep
SLIILKITLSDNRPLCNALLCTNISSKHVDLAAVELLEIATPRKELQVVNESETLVSLEEEENGTVAHPASGPHPPCCLSTSVDLSWSVHEHVVLV

SEQ ID NO: 225638 - protein, 99 aa, Zea mays
  unsure (1)..(99): unsure at all Xaa locations
  Clone ID: MRT4577_137369C.1.pep
HASAEAWTDACADTVLTVPVLLGFRLVHGGVQLLKFLMDVFYYCYAQRLGQVLSVDAPWVCQPMXHVVKPFVKLYAYLVRFCDTKTLWKEYFKEDTVPP

SEQ ID NO: 225639 - protein, 113 aa, Zea mays
  Clone ID: MRT4577_13736C.1.pep
MASGVTVVMAVAATNPAMVSHGDELRQRPEQLDPRPETHDVVGGTEEQALGRHRRGAGHQPPELANFPPQSHLPKPPPAASVARRPTPPSLHVSGNGECQKKIDRAYATTWCR

SEQ ID NO: 225640 - protein, 1903 aa, Zea mays
  Clone ID: MRT4577_137370C.1.pep
MRDRVRCMAGPPPPSHVHDGSLCPQGQRPCIDQRCAKEEMERYEFFSEFSKLGAQKVWNAVDSYWQTPTTALRDIGDPAKDLRVTGSLSRFWANGGDDDECDIDQDSGVYPSALTANRLANKTAFTVEQLVQKIEGLPDQKFQEQATVIDTYKKEVKNFLAFDQTVPPSSKLKPWHGPLPPKRISPSLTLADCPVLTDLRHKKKGHRRLRDLGGALRRSWGRNGEFQILNRDPRFPGRVSDAVQRKGVVTDNGPLLGSKGTSPRIHFIPKQALGRLMSRRGRLARSELDCAEASLFPVTCIAIRNQNFSTPTPPPTSITHNATTFADIVRFGRTRMDGEGQRRGGFRAPGVIGRSGGGFGFGNRVEGFTSGGFGQAYGPNGAGRISGQHLGPQFGFGAVGHNNRVPQNSQQTIVFGHGQQQPASFSVGGAQHGTQQVGVGGQKHDYHNQRYKDNSGSGRQVERGFWPKQHANRGRAPFSKGPSFNHIAASGSEGLQKGLGRHLQHNSDGGSSGIGDNMILMDKTASKRSFQEVEENRPPSKKVEVLVETKKEASKPQGELFEVAEVSAKGRGKWCFRCRTKGHVSVECTTILFCQLCESDDHVAAICPIKKKPRLMAYSVGYAMDGLGFYHIPHGPISMSKKDNTLALITFMGGELKEAELVAHMERLIPGKHGWDVQLHAPNTWVANFPSKAELKRTVTFGSADLKNGLLLKFEEFEEEEYCGEELPRVWMRVLNLPKGLRTYEVLWAIGTMFGATTKVDMITTRKNTFGRFEVAVLNASIVPNQMEVVIGTRWFELVFEIEGEIGEAMEPITHRENGNEGDHGNADRRDTTMEENNSKAKDTNGNSWAAPSFASNRRDVGKGVQMDDGALDDFDEDDLLEDEVMEQSPAVSPKYAVLSAVLDAGLGEQAKQPSGQHDCEMQEGCNSKPGLVEHSKVPRDDCSKMKEATATLGHQLKCDGQQSDASFSSEVALPVIPKPVKVLNKISAALPKRRSKRREAEVDEDMLERAKRVVAKKNLDGPEGNSFKNSVLSFTDELVINNLRSLGISLGASENSVQNSVDHLKILEKERIKESSVKIGQDNHVELGESDVEDDDLYTLGDLSGDLSEEIMEYLTDSNRGLRDLAKLRFLFDASNDHNLDFIALLETHRKGYSEAELSTFCGSREFSWQWCPSRGRSGGILLGVNLETFDMVKSCKGEFFLKIHFKNRSDGFQWVLMAVYGAAQPEHKVRFLTELVNVISIETMPILVGGDFNIIRNPTEKSSDRFDNRWPNLFNACIESLNLRELELSGRKFTWASSGPNPTYEKLDRILVSTEWERKFPLSVVEALSRDISDHTPLLFQSENASYRGNNQMFRFELSWLYMEGFHELVAKVWNKENRGSSSLVRWQNKLRALRRYLRDYYKKLFGSPNLNHFSLDEDTRDDIPQVSNIENELLIGSFSEAEIKKVVFQLEHNKAPGPDGFPAEFYQNFWEVIKKDLLALFEDFHNGILPLHSLNFGVVTLVPKKEAIKVENFRPICLLNVSFKIFTKVLTNRISIVAKKIIQPTQTAFIPGRYLLEGVVILHETIHEMHKRKKNGVILKLDFEKAYDKIKWPFIQQVLRIKGFSQTWCKWMQQVVEKGSVSIKVNDDYGHYFQTKKGVRQGDPLSPILFNIVVDMLAILINRAKDLGQVVGVIPHLVDGGLSILQYADDTIIFMEDDLEKANNMKLVLCAFEQLSGLKINFHKSELFCYGAAKGLELEYSDIFGCGVGSFPFNYLGIPIHHRKLSNTEWRVVEERFQKKLSGWKGDGTQIQFWEDKWLGSVPLKDQFPDLYNIVRKKKATVANVLQHNQLNVAFRRSLNVNNLAALNKVTFRGTHWTRFWTLLQKEEDRPQNVRFRSNVEPHVCEFDSRMYQPIQKLEY

SEQ ID NO: 225641 - protein, 115 aa, Zea mays
  Clone ID: MRT4577_137371C.1.pep
NFPFSKRWPAWEICKSYYEGPVEKAKLRCFCWPFFPPLKVSLPDSSLLKVWPSSFSTFWGSFPAIPSFSTFLGPLTAFFFTSAFFDFLPAEFFLVFTSLEPFPGFFVSPCLDFFP

SEQ ID NO: 225642 - protein, 70 aa, Zea mays
  Clone ID: MRT4577_137372C.1.pep
LYPPCAPPARASKIKKFCLSHVYVSEMGDQRMVEAFVRPKLSSMQAPVLPEPLIDCKTKCVFLAGGFFFF

SEQ ID NO: 225643 - protein, 93 aa, Zea mays
  Clone ID: MRT4577_137373C.1.pep
MAPLLAAAMNHAARHPGLTSHLRRPRNESFSRVHLAPSSPQSSKTTWNLSFTTRSARVGTQNGDQMLSPSEIPQRDWIPSEPTFGDSTSPYQI

SEQ ID NO: 225644 - protein, 59 aa, Zea mays
  Clone ID: MRT4577_137374C.1.pep
YVLMFTLNLRLTRRYWLTQLPYITSLRICAATCFWHQDSHYNVYVGVIILKNKIIYKII

SEQ ID NO: 225645 - protein, 140 aa, Zea mays
  unsure (1)..(140): unsure at all Xaa locations
  Clone ID: MRT4577_137375C.1.pep
RPRGRALSPFFPLIEELIEKLNKGELPLKGDPFMKGPRSAXFLRSHTNWIXTGPPAQNPQPMSIKSRRTPTWAKSRNSHDSSSESSILKHASSDFKRLGNRIFGFMDGGAPRSEVRPCAYTTGLKKTNSQSGWHIIYWIY

SEQ ID NO: 225646 - protein, 40 aa, Zea mays
  unsure (1)..(40): unsure at all Xaa locations
  Clone ID: MRT4577_137376C.1.pep
GMAMISSLGSGELLYXAGTFLEATVAVIXDGVGKMKVGLG

SEQ ID NO: 225647 - protein, 221 aa, Zea mays
  unsure (1)..(221): unsure at all Xaa locations
  Clone ID: MRT4577_137377C.1.pep
MSPAEPTRDESVYMAKLAEQAERYEEMVEFMERVAKATGGXQKEEGRGNDAHAATIRSYRSKIEAELAKICDGILALLDSHLVPSAGAAESKVFYLKMKGDYHRYLAEFKSGGERKEAAESTMNAYKAAQDIALADLAPTHPIRLGLALNFSVFYYEILNSPDRACNLAKQAFDEAISELDSLGEESYKDSTLIMQLLRDNLTLWTSDTNEDDVDEIKEAP

SEQ ID NO: 225648 - protein, 125 aa, Zea mays
  unsure (1)..(125): unsure at all Xaa locations
  Clone ID: MRT4577_137378C.1.pep
AHLSGKSYVSRYCXANDDGGVFSXVPSXPGAEFSNAARCYETVFAAVASRFPGKAVGXVNLPAXSSXAVAAPADEAXDDDDLYLFVDETEDDKNASYERSVSAIAFSKYKERGKSSCPMDVIPRD

SEQ ID NO: 225649 - protein, 119 aa, Zea mays
  Clone ID: MRT4577_13737C.1.pep
WLEVFGLTFTQPRSSFTRHMYSACTSLETMADNCSQSQMLDAVTSRAALACMAAGCTKVFGGDLLRSSRRRDSASLKTVIGFLFLFLTNTLETLLTSSYLVTASAFKYIVKKSFTLLLP

SEQ ID NO: 225650 - protein, 58 aa, Zea mays
  Clone ID: MRT4577_137380C.1.pep
PEEDKHVTPCPSKVVIAAVAIGLLAAATRVAAVPGYIIQLILNTHPLNMDRHLFFSRV

SEQ ID NO: 225651 - protein, 108 aa, Zea mays
  unsure (1)..(108): unsure at all Xaa locations
  Clone ID: MRT4577_137381C.1.pep
SQAAKXIVVSVLIRRCLMQVWYAIGVPYPLSVFXHWNGSXSIRDKEILKIEKENXDXFMPEMISIXNLYLKKGGHRLIKTGDYGHMGRYDTDFTWRGLKPLMLDKALL

SEQ ID NO: 225652 - protein, 99 aa, Zea mays
  Clone ID: MRT4577_137382C.1.pep
ALLILISRLVICLCELWCYISRSRFHLFIGMNIISCRKMIINDIFILCNCALLLLVNIFHESYLCTLALAQQLTLPFVHQDEHYRFKNHAYQDLHPLYP

SEQ ID NO: 225653 - protein, 132 aa, Zea mays
  Clone ID: MRT4577_137383C.1.pep
LLEELQHGEHQVAVHLRLPLSSALGRFPTATGTASAFSSRESSTYDSTSSGSSSSLLGSWRCLGHPCRWRVFVSASCSRRSTSFKACVKAAAPKLACDTGGVSRGRGAGWGRRRAAGWGRDGAEVTAAALVV

SEQ ID NO: 225654 - protein, 166 aa, Zea mays
  Clone ID: MRT4577_137384C.1.pep
MKRWGSSGQAADSFYQVRPDCSQNVPNTKFKIKAGKTLSVRKWHAAFTRDGCLDIASVLSRIQRGGVHPTIRGEVWEFLLGCFDPGSTFDERDQIRERRRMQYARWKEECKEMDSHVGSGKIITAPIITEDGFPIKDPLVLLEATSDTQGTSIATGNSGNGIDDGD

SEQ ID NO: 225655 - protein, 38 aa, Zea mays
  Clone ID: MRT4577_137385C.1.pep
PCGSRSSVCLPFSVIQRIRFMYPVMQQLTFASSYSVQW

SEQ ID NO: 225656 - protein, 438 aa, Zea mays
  Clone ID: MRT4577_137386C.1.pep
MKRWGSSGQAADSFYQVRPDCSQNVPNTKFKIKAGKTLSVRKWHAAFTRDGCLDIASVLSRIQRGGVHPTIRGEVWEFLLGCFDPGSTFDERDQIRERRRMQYARWKEECKEMDSHVGSGKIITAPIITEDGFPIKDPLVLLEATSDTQGTSIATGNSGNGIENRVLDKQIIDWKLTLHQIGLDVLRTDRTMVFYENKDNISKLWDILAVYAWIDKEVGYCQGMSDLCSPMIVLLHNEADAFWCFERLMRRLRGNFRCTQQSVGVENQLQHLASIIQVLDPKLHGHLERLGGGDYLFAFRMFMVLFRRELSFGDSLYLWEMMWALEYDPGICSTYEEDNTGAVVHKIEGKVKSIRQFGKYERENMKKRANDGDGPVPISVFLVASVLKENSTKLLQEARGIDDIIRILNNVNGNLDAKRACVVALKLHRKYHKKEKKS

SEQ ID NO: 225657 - protein, 51 aa, Zea mays
  Clone ID: MRT4577_137387C.1.pep
ARVIDSHRRIGSSRRPGFQLLNDLKPLHHFPGVSFPESGSAIPICTILRKT

SEQ ID NO: 225658 - protein, 140 aa, Zea mays
  unsure (1)..(140): unsure at all Xaa locations
  Clone ID: MRT4577_137388C.1.pep
MLADHTLDLHWCLLIITIFIRIQQTMVPRLACLLALVMAAIDVXPCTDHNSPXDYWYPYNAWRADEGVGAESCDNTDPMYAXSYAEQRLRDCQMIHSGDSYLENLFWGSVVAKWLLCDVFVLLSVRQVLVHSTNHKLSAT

SEQ ID NO: 225659 - protein, 86 aa, Zea mays
  Clone ID: MRT4577_137389C.1.pep
IQKKLSCFCFQRPNTFLRGSDYTDSDTLGLLQNASQLKSLECFDKVATVCLHRPNCVGCCLHHRSQALHPLPYRHCSCTVSHDKLN

SEQ ID NO: 225660 - protein, 113 aa, Zea mays
  unsure (1)..(113): unsure at all Xaa locations
  Clone ID: MRT4577_13738C.1.pep
AKPRLQSSYQLSGRGGAPIGPLATAGGGAGLLKLLGPWPTPFWNRVPLALNLRGLESKTVEEDLTNRSDLFLASNPVNKLVPVLLHGDRPISKXLDMGEYLDNAFPGVGQAVF

SEQ ID NO: 225661 - protein, 176 aa, Zea mays
  unsure (1)..(176): unsure at all Xaa locations
  Clone ID: MRT4577_137390C.1.pep
MIFIQGCSFVTEDHAEPINPIATSADITTSMDMRLMMNKIKIVEFISVLLSIGSAAAKTRLIQLGAIKHAIDLFFEYPFNNFLHHRXENIIGSCLESKQDRLIDHVLDDCKLVTRILEAEKNSALSSDLTKHTLSSEGRFPPWIGIVGHMTQIANRLLQLVNTNIMVQSHLQVWVR

SEQ ID NO: 225662 - protein, 465 aa, Zea mays
  Clone ID: MRT4577_137391C.1.pep
MALLRLLAFSLLFAVATPVRDIADDACSSQVKDFQHLNNSSGLHLTLHHPQSPCSPAPLPADLPFSAVLAHDGARIASLAARLAKTPSSRPTLLDESRAGSSSSSPDDESSLASVPLGPGTSVGVGNYVTRMGLGTPAKSYVMVVDTGSSLTWLQCSPCVVSCHRQSGPVFNPKASSSYASVSCSAQQCSDLTTATLNPASCSTSNVCIYQASYGDSSFSVGYLSKDTVSFGSTSVPNFYYGCGQDNEGLFGQSAGLIGLARNKLSLLYQLAPSMGYSFSYCLPTSSSSSGYLSIGSYNPGQYSYTPMASSSLDDSLYFIKMTGIKVAGKPLSVSSSAYSSLPTIIDSGTVITRLPTGVYSALSKAVAGAMKGTPRASAFSILDTCFQGQAARLRVPEVTMAFAGGAALKLAARNLLVDVDSATTCLAFAPARSAAIIGNTQQQTFSVVYDVKNSKIGFAAAGCS

SEQ ID NO: 225663 - protein, 468 aa, Zea mays
  unsure (1)..(468): unsure at all Xaa locations
  Clone ID: MRT4577_137392C.1.pep
MALLRLLAISLLFAVATPVRDIAHDACSSEVKDFQHLNNSSGLHLTLHHPQSPCSPAPLPADLPFSAVLAHDGARVASLAARLAKTPSSRPTLLDESRAGSSSSSSSPDDESSLASVPLGPGTSVGVGNYVTRMGLGTPAKSYVMVVDTGSSLTWLQCSPCVVSCHRQSGPVFNPKASSSYASVSCSAQQCSDLTTATLNPASCSTSNVCIYQASYGDSSFXVGYLSKDTVSFGSTSVPNFYYGCGQDNEGLFGQSAGLIGLARNKLSLLYQLAPSMGYSFSYCLPTSSSSSSGYLSIGSYNPGQYSYTPMASSSLDDSLYFIKMTGIKVAGKPLSVSSSAYSSLPTIIDSGTVITRLPTGVYSALSKAVAGAMKGTPRASAFSILDTCFQGQAARLRVPEVTMAFAGGAALKLAARNLLVDVDSATTCLAFAPARSAAIIGNTQQQTFSVVYDVKNSKIGFAAGGCS

SEQ ID NO: 225664 - protein, 266 aa, Zea mays
  Clone ID: MRT4577_137393C.1.pep
MALLRLLALISLLFAVATPVRDIAHDACSSEVKDFQHLNNSSGLHLTLHHPQSPCSPAPLPADLPFSAVLAHDGARIASLAARLAKTPSSRPTLLDESRAGSSSSSSSSPDDESSLASVPLGPGTSVGVGNYVTRMGLGTPAKSYVMVVDTGSSLTWLQCSPCVVSCHRQSGPVFNPKASSSYASVSCSAQQCSDLTTATLNPASCSTSNVCIYQASYGDSSFSVGYLSKDTVSFGSTSVPNFYYGCGQDNEGLFWQSAGLIGLAR

SEQ ID NO: 225665 - protein, 74 aa, Zea mays
  Clone ID: MRT4577_137394C.1.pep
SFEGQFGCLKKVGKKRLCCVICSNFYHGNYRYLCTHKVCSVHVVPYSIWPEGGLAFALVRKGYGMPRYGRSESI

SEQ ID NO: 225666 - protein, 60 aa, Zea mays
  Clone ID: MRT4577_137395C.1.pep
AGLYSPRVRQKLKQVVDGHPGQREVLKRLGVEENKSVRGRKFFDVEKKKGGFDAALPLFG

SEQ ID NO: 225667 - protein, 113 aa, Zea mays
  Clone ID: MRT4577_137396C.1.pep
VLLTRKGKRAQKANPLFPGLGRFFKKTGPPFFPFLKGALSPPPLNFFGPPNGPPRLFNLFFRVLFLGELGGKPFFPRKKFFPILTQNWFQTGNPYNPPPVWWDFPLRPPPRGV

SEQ ID NO: 225668 - protein, 65 aa, Zea mays
  Clone ID: MRT4577_137397C.1.pep
TRERASPPNYKLFPQALGTRFNLGFKWQARLIFNKGGGDGLLLATSQVLGPVRGVDKTWLNGALF

SEQ ID NO: 225669 - protein, 106 aa, Zea mays
  Clone ID: MRT4577_137398C.1.pep
FSLFYSFFFFFFSFFFFYFFLGFFFFSPKRSAASHIRPHNPIHWFLQKTPPPGDPKHMGRQQRDLPFNKPKQSHRQTSLVQTQEHKPRPSTGRNKEIHFHPTRAHP

SEQ ID NO: 225670 - protein, 99 aa, Zea mays
  unsure (1)..(99): unsure at all Xaa locations
  Clone ID: MRT4577_137399C.1.pep
ERPPYDPGRWYIRAAFVARKXVSLIKGIGLXGFQKIFGGNQRNGXXPTHFCKNSGGLCTDILQKRQEMGSINVDSKGGRRLPSQGRRXDLDQVAGRVPV

SEQ ID NO: 225671 - protein, 106 aa, Zea mays
  Clone ID: MRT4577_13739C.1.pep
HEKTAAVASRLTKASAPSSYSHHQMPSICQKRRPPHLKLGGPRKITSPQLQADRSSNKKIEAAGVQKVADKKSRIEELIGLDEFDGNEGIGSGSSDYQFSLWISPR

SEQ ID NO: 225672 - protein, 99 aa, Zea mays
  Clone ID: MRT4577_1373C.1.pep
VISIVSMLQSSRVTTYEQPIELFIGYSLEGPLEDRLRLQVEGEGEDFASKISGEAGDVVQGVHGYRTKWDICLFTLVLSEVVTKKPPHIFVAGAAKRQE

SEQ ID NO: 225673 - protein, 45 aa, Zea mays
  unsure (1)..(45): unsure at all Xaa locations
  Clone ID: MRT4577_137400C.1.pep
SGQVAGLLAGQIRQQLSADLWLSKTIYCPTCLRVXGMRTMAEIAW

SEQ ID NO: 225674 - protein, 333 aa, Zea mays
  Clone ID: MRT4577_137401C.1.pep
MATTPAEDPEPGLPPPKALCEQPRRRRPCVLLSFSAARDRFLRGRFLSAGLRPFSVRLPSPAGTSTVVHLWAPPRSARRPVLLLHGFGASATWQWAPYLRSLLAAGLDPIVPDLLFFGASSSTVPDRSDTFQARTVKAAMDGMGVRRFAVVGVSYGGFVAYRLAAMYPEAVERVVLVSSGVCLEEGDLAAGLFPVADVGEAAELLVPRRPAEVRRLVKLTFVRPPPIMPSCFLKDYINVMGSDHLEEKAELLHALINDRKLSDLPKINQPTLIIWGEQDQVFPMELAHRLERHLGESSRLVVVKNAGHAANLEKSKEVCKSIIDYFQEPGSSD

SEQ ID NO: 225675 - protein, 42 aa, Zea mays
  Clone ID: MRT4577_137402C.1.pep
RGLKLVEHPNPLFKGLTFPFFKVNWLIESYFFVRRLILKEFF

SEQ ID NO: 225676 - protein, 317 aa, Zea mays
  unsure (1)..(317): unsure at all Xaa locations
  Clone ID: MRT4577_137403C.1.pep
MPRATEAASQFTPGPGRPVAMNSRSSSGGVRSESSLSLGERLCAVFFPVIAIAEAVFFAFTDCLADLCTDSGSSHSRRFGAGASSSAARNSRSNHCQPHHRPFLRRATAGGWTSPNLRQLARLADESRCFSVNEVEALFELXSLXYKKISCSIIDDGLIHKEELQLALFKTPSGENLFLDRVFYLFDEKKNGVIEFDEFIHSLSVFHPLAPIEDKIDFAFRLYDLRQTGFIEREEVKQMVIAILMESDLKLSDDLLEAIIDKTFEDADADKDGKINKEEWKEFALRHPNLLKNMTLPYLRDITTVFPSFVFNTAVED

SEQ ID NO: 225677 - protein, 288 aa, Zea mays
  unsure (1)..(288): unsure at all Xaa locations
  Clone ID: MRT4577_137404C.1.pep
YARLHTLDCCPPKGGRVGRRVGWDSTWELFCSGQRECTPYKGRPELTCLGDSRFSSARGVRSESSAPLGERLCAVFFPAIGSGEGGFFAFTDCLADLCTDSGSSHSRRFGAGASSSAARNSRSNHCQPHHRPFLRRAAAGGWTSPNLRQLARLXDESRCFSVNEVEALFELYKKISCSIIDDGLIHKEELQLALSKTPSGENLFLDRVFYLFDEKKNGVIEFDEFIHSLSVFHPLAPIEDKIDCMYANCRNGGQYNNNMEGFFIFIFAACISCGSVAFRVYDLRQTGL

SEQ ID NO: 225678 - protein, 218 aa, Zea mays
  unsure (1)..(218): unsure at all Xaa locations
  Clone ID: MRT4577_137405C.1.pep
MVLQEELQLALFKTPSGENLFLDRVFYLFDEKKNGVIEFDEFIHSLSVFHPLAPIEDKIDCMYANCRNGGQYNNNMXFFILIFAACISCVSVAFRLYDLRQTGFIEREEVSSQRCSVSMHTFYVDSFLVKWLIALPCLXVKQMVIAILMESDLKLSDDLLEAIIDKTFEDADADKDGKINKEEWKEFALRHPNLLKNMTLPYLRFTSDLLIFMKSRLA

SEQ ID NO: 225679 - protein, 53 aa, Zea mays
  unsure (1)..(53): unsure at all Xaa locations
  Clone ID: MRT4577_137406C.1.pep
RVLLDVRFLLSDYHEFNEFGADGGPSAKALRTKFNVFXKNVSAHLGVAXVPHI

SEQ ID NO: 225680 - protein, 60 aa, Zea mays
  unsure (1)..(60): unsure at all Xaa locations
  Clone ID: MRT4577_137407C.1.pep
FFLFYIVFAVAVYPNIWLRLFLLNGRTLVSFFFCIFFFLSTPFLIYPTFGLXLXNKNNSQ

SEQ ID NO: 225681 - protein, 121 aa, Zea mays
  Clone ID: MRT4577_137408C.1.pep
MEAAAPAPARGLGRQEYAVLALTFASYASFHASRKPPSIVKAVLSADWVPFSGPRGPHRLGELDVAFLSFYALAMFAAGHLADRADLRCLLGTAMLASGAACAALGAAYFLDIHALAFFAA

SEQ ID NO: 225682 - protein, 126 aa, Zea mays
  Clone ID: MRT4577_137409C.1.pep
APWPSIPFLRRSSVVDFQRERKDVLLPGTWRLRLGLTTACYSVKLKGLGCVVEVRCPRVWFAVVGKARGYWGFLAGGHFRRDVEDSLAPTVSFGKISPPILFASTSYSRCIINSRSCGSESVLAAR

SEQ ID NO: 225683 - protein, 52 aa, Zea mays
  Clone ID: MRT4577_13740C.1.pep
VYYKNGHSIKLSSNKCASVTMYNRIHSQVVNKADGVHSSKFATECFSHYVCG

SEQ ID NO: 225684 - protein, 79 aa, Zea mays
  Clone ID: MRT4577_137410C.1.pep
PGHGPRAGRNFHQVREGEAIRKALIALNFETHFPIPARPVSMFPHQVPMLRNFPRLPLWSSRVVTPLPYLFIHKLEGPK

SEQ ID NO: 225685 - protein, 61 aa, Zea mays
  Clone ID: MRT4577_137411C.1.pep
PGPFLKHLKFLIKKGANPLVEVWWWRIGIMKPIMCALKDWLRTREVYKNGQTKKQGGPVPI

SEQ ID NO: 225686 - protein, 63 aa, Zea mays
  unsure (1)..(63): unsure at all Xaa locations
  Clone ID: MRT4577_137412C.1.pep
GRAARLGVRRDSRRPXHVARARGQRXSFPGLGQQLTSSAVSGRSGGWQFRRSGAWIGAPPLLT

SEQ ID NO: 225687 - protein, 61 aa, Zea mays
  Clone ID: MRT4577_137413C.1.pep
AWLPGSEGQGVANVLFGDYGFTGKLSRTWFKSVDQLPMNVGDKHYDPLFPFGFGLTTKGAK

SEQ ID NO: 225688 - protein, 125 aa, Zea mays
  Clone ID: MRT4577_137414C.1.pep
QVSQFSTPPQTDGLQPALFRRPRQGRTKSKAHPSLFVITSPGTHQSLQLLHLLQETHLVVGRGLATVANKLKSSNNLTDGEKAEDLSCDNTTSGELSRADIPYLLDGVLRGLDDGTVLDGLDDAL

SEQ ID NO: 225689 - protein, 75 aa, Zea mays
  Clone ID: MRT4577_137415C.1.pep
FLSLLLLPLGFVATHRAFSGVVSAASTPAAKRVLLEDDGRASAGAEHAAAVERHCAGTLHRDVCASTLGSIPDKA

SEQ ID NO: 225690 - protein, 450 aa, Zea mays
  unsure (1)..(450): unsure at all Xaa locations
  Clone ID: MRT4577_137416C.1.pep
MRRPPKAKRVAAAAKLPLPLTATFLSLLLLPLGFVAIHRAFSGVVSAASTPAAKRVLLEDDGRASASASASANANGSAGAEHAAAVERHCAGTLHRDVCASTLGSIPDLARKPAREVISAVVARAASAVRASASNCSAYLRRPAGALRVRDRLALADCVELLGHTLAQLGTAEAELSAGNFTAAEAEVESESLAAVQTVLSAALTNQYTCLDGFAGPSASEDGRVRPYIQGRMYHVAHLVSNSLAMLRRLPQRRRRRQGRGALELEGYGRVRRGFPSWVSGADRRRLQQQQVVPXGPVVAKDGSGNFTTVGEAVAAAPNNSETRFVIYIKAGGYFENVEVGSEKTNLMFVGDGMWRTVIKASRNVVDNSTTFRSATLAVVGTGFLARDLTVENAAGPSKHQAVALRVNADLSAFYRCAFAGYQDTLYAHSLRQFYRDCDVYGTVDFVFGD

SEQ ID NO: 225691 - protein, 108 aa, Zea mays
  Clone ID: MRT4577_137417C.1.pep
RCNFHCCESRALFYFILLFLQGGRVFFGEKETVLLTNGQHLDDLHTLVNNLHTTSTCQRERMLGTLVFYTIKVETLRVTLHTFFFLLQKKPAPPQGPFKKWHRPATEL

SEQ ID NO: 225692 - protein, 39 aa, Zea mays
  Clone ID: MRT4577_137418C.1.pep
LIIFIKPHSGDYEQLHISQRKYALRHPTLRSYFTYPPPT

SEQ ID NO: 225693 - protein, 68 aa, Zea mays
  unsure (1)..(68): unsure at all Xaa locations
  Clone ID: MRT4577_137419C.1.pep
GDGAPLQREEHGRASRXRXRAAGRXRGCSGGVGGXRHXDXRXRGXXXVGRKVAVXGEESCCAGRFLYP

SEQ ID NO: 225694 - protein, 72 aa, Zea mays
  Clone ID: MRT4577_13741C.1.pep
SHNRSHSIAITFNKPQLPLGTDSLYKRLTHSLPSDPIIHDNLTDHTDFIPITHHSNYCPINFQWYNIALPYY

SEQ ID NO: 225695 - protein, 125 aa, Zea mays
  Clone ID: MRT4577_137420C.1.pep
MLTGCFCASLVLVGTFAEIVLRFLFQKQNYRGMPLDAHFMPLIGGIPMAMPTFFYLALALGSVRLCFLGIASRGTVALEDLASVDVILFNMAGTLTCNQPCFVRDKIEMFADSVNKDHAIVLAAR

SEQ ID NO: 225696 - protein, 168 aa, Zea mays
  Clone ID: MRT4577_137421C.1.pep
MAAAGKLLLLAAAILAASFVADARPCGHAQTLLVSFSSVLRPNPDPTNPTPLTTTVVTVLRVRRLGPHQIRRPVALPSVESEVAASSAQDRAKDILVVVSGLLFGFGCGALTAASMYLVWSLLASTCASGYDDDVYSDDEDRLSDSESPKNAGYVIIHDADEYGAGKN

SEQ ID NO: 225697 - protein, 93 aa, Zea mays
  Clone ID: MRT4577_137422C.1.pep
PPSTHAGRKHGEATKGANKHKVRGGQCPKKLGRIGPLRSCTMPFLEAPKQNSPPPHLEKKRTMGQVKRKNQLCQSHGCLRQHCQTEYLGRTLT

SEQ ID NO: 225698 - protein, 56 aa, Zea mays
  Clone ID: MRT4577_137424C.1.pep
KKKKGKKEKKKKKKKKKKKTDKQKKKKKKKKSKKIKKKKKKKKKKKAKKKKKTFTP

SEQ ID NO: 225699 - protein, 47 aa, Zea mays
  Clone ID: MRT4577_137425C.1.pep
TRMFLPAWLRLCPALFVISHFSPVMVRWYLLQLKKMAKNRHLIHAIH

SEQ ID NO: 225700 - protein, 95 aa, Zea mays
  Clone ID: MRT4577_137426C.1.pep
SSRPGRSRSFLFSSPAARIVSSRQEAWPTAPFSSFLCFCSCTARPCPFPLVMASSSTGPYRQRVRPHVRVRGRRSVAGESSASPKKNKNMSAIAF

SEQ ID NO: 225701 - protein, 76 aa, Zea mays
  unsure (1)..(76): unsure at all Xaa locations
  Clone ID: MRT4577_137427C.1.pep
LLFVTLYVTHWISNEKSADHIDGKVHNWFLPRESRLLFGKVHLTIWNYCKTLISRSPFSLVKLVGGRXPRVNESKP

SEQ ID NO: 225702 - protein, 80 aa, Zea mays
  Clone ID: MRT4577_137428C.1.pep
SPPHPAPPSTGTHIHTPKGLLPVTGEQNVKKSIQVATDTRNNQMHLHSQHQSTHMHKEKRLQSELRAKNYKWQRLKLSIR

SEQ ID NO: 225703 - protein, 344 aa, Zea mays
  Clone ID: MRT4577_137429C.1.pep
MMDVEYHEEYVRNARGVQLFTCVWLPAPSSAPTKALVFLCHGYGMECSDFMRACGMKLATAGYGVFGIDYEGHGKSMGARCYIHKFESLVADCDMFFKSICDMEGYRNKSRFLYGESMGGAVALLLHRKDPTFWDGAVLVAPMCKISEKVKPHPVVVTLLTQVEEIIPKWKIVPTKDVIDSAFKDPVKREKIRKNTLIYQDKPRLKTALELLRTSMDVEDSLSEVRMPFLVLHGEADAVTDPEVSRALYERAASADKTMKLYPGMWHGLTAGEPDDNVELVFSDIVSWLDKRSRHWEPDERVRRAPPEPENKRRVTSSSSQRPGSFLCGLGCRCRQHQQQCSRM

SEQ ID NO: 225704 - protein, 91 aa, Zea mays
  unsure (1)..(91): unsure at all Xaa locations
  Clone ID: MRT4577_13742C.1.pep
MGRVIPGQRNGAGSVFRAHVXHRKGAARLRAEDFAKHTGHIIGIVKDIIHDAGRGAPLARVVIRDPYRSQKRTELHIAAXDIHTGQFVYCG

SEQ ID NO: 225705 - protein, 32 aa, Zea mays
  Clone ID: MRT4577_137430C.1.pep
SSHTLSINLLLVVPTVGLAAGTPLGDSSSDQY

SEQ ID NO: 225706 - protein, 48 aa, Zea mays
  Clone ID: MRT4577_137431C.1.pep
VKGGKKEWWKFFLKKKKKKKKKKKKKKKKKKKKKKKKKKKIKKKNTPN

SEQ ID NO: 225707 - protein, 372 aa, Zea mays
  Clone ID: MRT4577_137432C.1.pep
MSSVQEELNNTQDMLQGYVELYNYSLSYVKTMAIGCAIQLGIPSAIHRRGGAATISDIITETGVDPSKLPYLRRLMRVLTVSSILATTGTDETETESDDSTVYKLTPASRLLVSGAGAPTSCDISPMLDLLMRPTTSVATYFSLEEWFKDAGATATLFEVAHGMSPWSLTKNDALYNKTLNDGCAADSNFAMDTLLREPRAAGIFRGLGSLVDVGGGHGAAAMAIARAFPHIRCSVLDLEQVVSGAPDDGTVKFIAGDMFESIPAADCVLLKYVLHCWDDESSVKILRQCKRAIPARDAGGKVVIMNMVVGYGSSDRFVKETQVMCDMWMMRYVGVEREEHEWKRIFLEAGFSDYRITPTALGFQSVIEVFP

SEQ ID NO: 225708 - protein, 125 aa, Zea mays
  Clone ID: MRT4577_137433C.1.pep
ADGTVKFIAGDMFESIPAADCVLLKYVLHCWDDESSVKILRQCKRAIPARDAGGKVVIMNMVVGYGSSDRFVKETQVMCDMWMMRYVGVEREEHEWKRIFLEAGFSDYRITPTALGFQSVIEVFP

SEQ ID NO: 225709 - protein, 57 aa, Zea mays
  unsure (1)..(57): unsure at all Xaa locations
  Clone ID: MRT4577_137434C.1.pep
XASLXVPXXFXLXLXXFXXXVPXXXGLRPRSSAXMXPXDQTLIYVPSQASAXARSTR

SEQ ID NO: 225710 - protein, 42 aa, Zea mays
  Clone ID: MRT4577_137435C.1.pep
DITLIWLGVRKTGVFVAPLRHCYSVGESMIINLRVARRRLVV

SEQ ID NO: 225711 - protein, 68 aa, Zea mays
  Clone ID: MRT4577_137436C.1.pep
EGLGFQRVEGRDMQVSRMRLSLGEKDEFNREESGARGVRFGSGLESQRLLGSDTSIYRIRDGSRDHRQ

SEQ ID NO: 225712 - protein, 142 aa, Zea mays
  Clone ID: MRT4577_137437C.1.pep
FFRFFFWGSPPMLGHPLFALFVDLDPLPPPCPPFFRVFSLEMGKAPLPPFPFLGGWRFFYSRGPPVFSFGKGGVGPPPIFFVWALLGAPRLLPFWFSPLFCGQFCAVLIFFPGIPLLPFFAPTLCPAGFPLCGPPGGWQFPL

SEQ ID NO: 225713 - protein, 117 aa, Zea mays
  Clone ID: MRT4577_137438C.1.pep
KGRENGPLLYRGGGLPPPKRKEGKNRGEPPFGVTPPKPPTKKGKGGSPFFSPPIGGGGGLFPWAPPSLGAHPPRPIENCLGPRGLSNNRPRPPRGFFPCPAPNLKGGLGSLGNRAFF

SEQ ID NO: 225714 - protein, 100 aa, Zea mays
  Clone ID: MRT4577_137439C.1.pep
MSATLLHIVEDSVDTDVEADDQLLYGCHNDADPLRSIFTHKDQKEGTTIADHDDQQEIMNALVPQANCILDYFGETNTGNNLDLDEECYDTKQVGMTEPH

SEQ ID NO: 225715 - protein, 39 aa, Zea mays
  Clone ID: MRT4577_13743C.1.pep
ERARAHGLRLFDAHEVLMRRTYHAIHRVQISHCMAFMIA

SEQ ID NO: 225716 - protein, 131 aa, Zea mays
  Clone ID: MRT4577_137440C.1.pep
ANGIRLRALLQGDDRAGNGTSDDGGDGATNGDNGGGGSSLRVTEQQVARLMEEDMGTAMQYLQGKGLCLMPISLASAISSSTSSPPPPSLLPRPSVGSVEGARGPLHDDSGGAGGDDGSRTIKYAGAGGKQ

SEQ ID NO: 225717 - protein, 91 aa, Zea mays
  unsure (1)..(91): unsure at all Xaa locations
  Clone ID: MRT4577_137442C.1.pep
THCRQAPRRTRQRAPPAMRKATIFLMALALTLIPXANGGDAAAASSPAXLQLRRSRFLAANNVNFSPPPPSFYDCSKKPPSICLSPGRPGA

SEQ ID NO: 225718 - protein, 87 aa, Zea mays
  Clone ID: MRT4577_137443C.1.pep
HVRAHRTFRAPYLAVGSATCRVRIPRPTVGSADRWLTVSVRCTPECPVNCSRTPSANSRERPYHAESAVRTGHCPVHHRTVRCARLS

SEQ ID NO: 225719 - protein, 73 aa, Zea mays
  Clone ID: MRT4577_137444C.1.pep
MASEVVRPSDAELLKVQPDIWRLSLSYLTPLSLRGAEEPPRPRASPRPRRPQPSHNNEKHAPPLQRRHRGLTI

SEQ ID NO: 225720 - protein, 194 aa, Zea mays
  Clone ID: MRT4577_137445C.1.pep
RGSFGNLKNLTTLFLYNNQLTGTIPVSIGLLPQLRDIRLFQNELSGELPPELGKHSPLGNLEVCLNNLSGPLRGSLCANGKLFDIVAFNNSFSGELPAALGDCVTLNNLMLYNNNFSGDFPEKVWSFPNLTLVMIQNNSFTGTLPAQISPKLSRIEIGNNMFSGSFPASAAGLKVLHAENNRLGGELPSDMSKL

SEQ ID NO: 225721 - protein, 126 aa, Zea mays
  Clone ID: MRT4577_137446C.1.pep
RNLVKLVGWYRQDGVLVVVYDYMPHGSLDRHLFGGKDAPALDWRQRYNVVADVASALNYLHHEFDQTVIHRDIKPSNIMLDSSFHARLGDFGLARALESDKTYYTDKVGVPGTLGYIAPECFHTGR

SEQ ID NO: 225722 - protein, 109 aa, Zea mays
  Clone ID: MRT4577_137447C.1.pep
TCPCRTSCTSSRSARTSRPPARSFTWRYKSAANAYPGSAGSRDGARFSRACNSRTCWSVSSASRSPVIRCHRIRYSVRLRGRSGPCPSSSGGTCPRRTRSSRTPRSTNK

SEQ ID NO: 225723 - protein, 274 aa, Zea mays
  unsure (1)..(274): unsure at all Xaa locations
  Clone ID: MRT4577_137448C.1.pep
LHPLRCARFPRAVRNLTWPCRRWWSTXVVFPPVARPPGSAGSHFLGGAGVRGLEIGGNFIKFTAIGVYLEDAAVPALAKKWGGKTADELASDAAFFRDVVTGDFEKFTRVTMILPLTGEQYAEKVTENCVAFWKAAGLYTDAEGVAVEKFREVFKPETFAPGASILFTHSPAGVLTVAFSKDSSVPAAGGVAIENKRLCEAVLESIIGERGVSPAAKLSLAAIGASARRKKATRRLGGTASHTCRLRLRAPESGLERRRAGAVHPSRLVCRAMA

SEQ ID NO: 225724 - protein, 225 aa, Zea mays
  unsure (1)..(225): unsure at all Xaa locations
  Clone ID: MRT4577_137449C.1.pep
LHPLRCSRFPRAVRNLTWPCRRWWSTXVVFPPVARPPGSAGSHFLGGAGVRGLEIGGNFIKFTAIGVYLEDAAVPALAKKWGGKTADELASDAAFFRDVVTGDFEKFTRVTMILPLTGEQYAEKVTENCVAFWKAAGLYTDAEGVAVEKFREVFKPETFAPGASILFTHSPAGVLTVAFSKDSSVPVAGGVAIENKXAARVSELLAKETAAPADAPXAEPVSITA

SEQ ID NO: 225725 - protein, 189 aa, Zea mays
  Clone ID: MRT4577_13744C.1.pep
VPRRVATRADKIGSESPAADGVGDAARKRPSGDDGPTPGPADKRRRPEHPSSSSAGSRDRHHHHHGRRPPSSADEKVRASHILIKHEGSRRKASWRDPEGVAISATTRDDAADLARALRDQIVSGDREFEDVAAENSDCSSAKRGGDLGSFGRGKMQKPFEKAAFALKVGEISDVVDTESGVHIIKRTG

SEQ ID NO: 225726 - protein, 248 aa, Zea mays
  unsure (1)..(248): unsure at all Xaa locations
  Clone ID: MRT4577_137450C.1.pep
LHPLRCSRFPRAVRNLTWPCRRWWSTXVVFPPVARPPGSAGSHFLGGAGVRGLEIGGNFIKFTAIGVYLEDAAVPALAKKWGGKTADELASDAAFFRDVVTGDFEKFTRVTMILPLTGEQYAEKVTENCVAFWKAAGLYTDAEGVAVEKFREVFKPETFAPGASILFTHSPAGVLTVAFSKDSSVPAAGGVAIENKRLCEAVLESIIGERGVSPAAKLSLAARVSELLAKETAAPADAPQAEPVSITA

SEQ ID NO: 225727 - protein, 147 aa, Zea mays
  unsure (1)..(147): unsure at all Xaa locations
  Clone ID: MRT4577_137451C.1.pep
HTQQIIKVFTDSNPIHVCRVAIINRGLREEPTRXGXRGLVRRHAEDIXPIKRVNQAMYVLTTDTRESAXLNMKIIAYCLAYKLXITAAQGXCNNYALKKTDEDDRVAKVNQKTKLVSWSTLRLKLLCCWQTHRVLFYQCLESHETYM

SEQ ID NO: 225728 - protein, 85 aa, Zea mays
  Clone ID: MRT4577_137452C.1.pep
IKTGLAKVFISISLLILTPYIKGLAIGTSLDTPDLSKGTELKKRSVGITCEATRTQVGWLSSRRLEHTFVVCGGPVSKLEKRCAL

SEQ ID NO: 225729 - protein, 133 aa, Zea mays
  unsure (1)..(133): unsure at all Xaa locations
  Clone ID: MRT4577_137453C.1.pep
QPVIALHIFASPMYGFLDTQYGSGRGGPFEIPNVGFRVAVRGGSLPVASLVAPVLPFLGAFMSLXGAFSPFPLTFVLAGPMCLLVKGPKLGAIPESWLWLDVFGFPALAVAPAVSPIRLLLRDSRPSPFFVDL

SEQ ID NO: 225730 - protein, 180 aa, Zea mays
  unsure (1)..(180): unsure at all Xaa locations
  Clone ID: MRT4577_137454C.1.pep
HRQQAGQGGQRRHRRRQPKARXRGPRQERRAPQGPSQSQPSPAKPHQEQRKASHHKXREDRKSKQLRHKDTSPRPPYPSRQRRKQXHRAXGSRRRNEQPSPTGEKERENEKRALRTPERRERNLMRRRPRASDGRSERKGKRGGGEHEERRATERRQAEAEKGPRASGGRQKEENSGTRR

SEQ ID NO: 225731 - protein, 508 aa, Zea mays
  Clone ID: MRT4577_137455C.1.pep
MDPKEKGMVVNDKEESLFNEPRDNKPTDSGSSHKKRDGKKKRRIKKIIYYDSDASSSSPRDDDDEDSSSKKRTVNQNYSFDYSRIPYNSNAHLLSIPLGKPPHFDIEDYSFWSHKMHSHLFSLHPSIWEIVENGMHFDSTDNSVIINEQIHKNAQATTILLASLCRDEYNKVSGLDNAKQIWDTLKISHEGNDATMITKMELVEGELGRFTMIKGEELTQTYNRLKTLVNKIRSYGSTRWMDHDVVRLMLRSFTVIDPLLVNLIRENPRYTKMTPEEILGKFVSGCMMVKEARYVDDAVYKKAKDRLLEKQEDILYEERDKFVSVQKSLALEIKRNEMLSFELSTCHESISSLKNLNDELNAKLEEVNKINSCEEPVVICNRCKDFNVDACDEHLASITKLNNEVASLNAQLKTCKVDFDKLKFVRDAYTVGRHPSIKDELGFRKETKNLTSQRTPVLNKEKGKAPMASSPQRNHAFIYDRTIASRSHYIFFIATHKYLSSNISYLSI

SEQ ID NO: 225732 - protein, 95 aa, Zea mays
  Clone ID: MRT4577_137456C.1.pep
RWAFLEDTAERLPQGLPSRRVGWIPYRAPQPGFRPLGQLQLRSLYEALLIKGQRIACYWSPPPPTELLQTHAYVGISSSSAHKSSNSVSFFSPVM

SEQ ID NO: 225733 - protein, 56 aa, Zea mays
  Clone ID: MRT4577_137457C.1.pep
KVQDRTFGKLYSGMQGNGMKIKMVRNESILYILPIAMPNGFKRDTSSTSLLRTIYV

SEQ ID NO: 225734 - protein, 613 aa, Zea mays
  Clone ID: MRT4577_137458C.1.pep
MASPRRRSLPLRFLIFIPAPLFLVLLFHRSSHSTAPLLHTAGSGSGPSSDPRRFSLLIKLLAYDRPAAFRRCLRSLAAADYDGDRVALHVLLDHRPPNSSLPPLATSHEILDFVDAFPWPHGEKRVHYRASNAGLQAQWIEAWWPGSDDEFAFVVEDDLQVSPLYYKFLKRLVLRYYYDRENYSPYLFGASLQRPRFVAGKHGNKIQLDSETRLFLYQMVGTWGQLLFPKPWKEFRLWYDDHKAKGLKPILQGMKTTGWYKKMGERIWAPWFVKFVHSRGYFNIYTNFLKERALSVSHRDAGVNYEKSVGPDSTLLDGKNLDFNLWELQPLKKLKWYDFCFNEALPGRIVRKNSELGSMLKSLQLKSTVVLVTLYSIEERFARNLICHLDKAGMKNTIFLGDNSEFLDDLAHRGYPVIDGVNFLQSIRLSSLQGSDGVVQETLVKSYVIKACLDLGYNLWLLNGNMISLGNKLIEPSDQSVDFFTADEGLMFIRSSLDMKNKWNELAMSRVKAMCTSSDLSVSIKQKSFVHMLTEVMASSAGVRLGKLDEAMRVIELGPNTSNRSILEDKSNVLFWSRSRASDSVQKQLENMDLWLVDSDSSCSSVVCHQKQK

SEQ ID NO: 225735 - protein, 61 aa, Zea mays
  Clone ID: MRT4577_13745C.1.pep
TRLQVQPIRHLPRHKVVMGLPVNRQVRTRLQTGHHYSSSLSLCVGRQLSLTLPVFPGLASD

SEQ ID NO: 225736 - protein, 151 aa, Zea mays
  unsure (1)..(151): unsure at all Xaa locations
  Clone ID: MRT4577_137460C.1.pep
MPCEAAGGCAGMPKKAQLHRSVLSLNPGYAALHVAXRLALNMGIMEARLPRLPNIIALCLLVPFSYILHKKDRPNMTLNYXARSMFLVLCGITXNQGFYLPGXLDNTXRAFASXIHNSGPAXIPFCMARXCRIEKAXRLDRRDRRTKVAGT

SEQ ID NO: 225737 - protein, 82 aa, Zea mays
  Clone ID: MRT4577_137461C.1.pep
REKKKKGKVLKGEKGGKHKEIRGQKVGKRGGINRIKGLKKKVNNFELPLNKYWIILKPPPFNNIFIFYIFPPLLFYFPPPFF

SEQ ID NO: 225738 - protein, 47 aa, Zea mays
  Clone ID: MRT4577_137462C.1.pep
CVYHLSFVMMYIDAPFSVFQCAPMNRCSVTLYCSLWPLFNHPSSHVF

SEQ ID NO: 225739 - protein, 198 aa, Zea mays
  Clone ID: MRT4577_137463C.1.pep
MAANKGMVAGSHNRNEFVMIRHDGDAPVPAKPTKSANGQVCQICGDTVGVSATGDVFVACNECAFPVCRPCYEYERKEGNQCCPQCKTRYKRQKGSPRVHGDDEEEDVDDLDNEFNYKQGNGKGPEWQLQGDDADLSSSARHDPFLKGLMGRQNRTPTIVIVWSILLASIFSLLWVKIDPFISPTQKTAALGQCGVNC

SEQ ID NO: 225740 - protein, 93 aa, Zea mays
  unsure (1)..(93): unsure at all Xaa locations
  Clone ID: MRT4577_137465C.1.pep
PPTIIFFLFFYSPQKPPGFIIKNKKKKKXKKKKKKKKKKKKKKKQKKKKKKKKKKKKKKKKKKKKKKKKKKKLKKKKKKKKNKKLYKKKKKKA

SEQ ID NO: 225741 - protein, 60 aa, Zea mays
  Clone ID: MRT4577_137466C.1.pep
KKLAGEKNLHFVKTVALKPPEVQIDMAIHHQQKVEFEVAVAQPLPNKENDLIEKKFHGPC

SEQ ID NO: 225742 - protein, 71 aa, Zea mays
  Clone ID: MRT4577_137467C.1.pep
APRGRRRQCGQAGAQQHGLVVSLVVLDQVRRARAFHLLDGSPLSIGLRADVDVHVLSSLELWAAALLVVVL

SEQ ID NO: 225743 - protein, 106 aa, Zea mays
  Clone ID: MRT4577_137468C.1.pep
TLFCVHQRSYLGGGGICLHYSYIITTLYLHYSNLQILRWREHLLHDLWSIVYPCAGMQNGSGSSVHQVQPPTIEGSMSSPVASCTVDGCRWSRLGGNVVLISMDTT

SEQ ID NO: 225744 - protein, 94 aa, Zea mays
  Clone ID: MRT4577_13746C.1.pep
SRQSQPVRESDDFCVILDRPPTEVLVVLFLLHDGGGGHASADSLSMSGLIVMLYFVVLLLFEFDYILVVVVVGLSLVGAWSPLRSPRNKKPSKL

SEQ ID NO: 225745 - protein, 82 aa, Zea mays
  Clone ID: MRT4577_137471C.1.pep
AFLISYLQITILVAAEGVHKLPVINSSNDLKTALQKMGAIPSSKILVFLVRFFFSLVISSSLNSSPTIPTQESFHVDCIGVK

SEQ ID NO: 225746 - protein, 105 aa, Zea mays
  Clone ID: MRT4577_137472C.1.pep
RKLEDSAAPHQLEDWKQSEGLEKPRAHHKITRSRARGQRILARITRGQALRTGPNWRRPKYGRAGAGATSNGCDSGESKRGLRLTSATDRATGVRASDASPPPSP

SEQ ID NO: 225747 - protein, 58 aa, Zea mays
  Clone ID: MRT4577_137473C.1.pep
PLRVWPGSRGLFSAGGAFPNRPRALVSPGTVGRAPGLLGGPSSIKKMGPSLEGLIYAL

SEQ ID NO: 225748 - protein, 83 aa, Zea mays
  Clone ID: MRT4577_137474C.1.pep
MSDRLTSEVPVVHVDLEGDDDGMDVYNTKDRRTCILHDSAEPSEDDDNDLRHGDTNNNALMVPVPARSKRGDDTVIGPDISGC

SEQ ID NO: 225749 - protein, 147 aa, Zea mays
  unsure (1)..(147): unsure at all Xaa locations
  Clone ID: MRT4577_137475C.1.pep
FLVPQGGANLQDYQLRLGRAHNPAHYVQHHVRGVRCQDTVSITSLLNPSNVGDALAHEQLLVHGMCLSFLEGTRLHRSTHNQVGKQVGRHAPHHLFSVHVITHQNLXTSITASRRVLRPRDNVQRRRSLSCPTLASQQSHTSAGPHP

SEQ ID NO: 225750 - protein, 111 aa, Zea mays
  unsure (1)..(111): unsure at all Xaa locations
  Clone ID: MRT4577_137476C.1.pep
CFGSIITIIGGPGXSSVSDXXHATYQEFSVRMHADLHINPYYGKTLSKGIISLYEVDLAIATNMIYYVLSSSAQYIHAEVILAIDGYTNMSNVIECVVHANAKHFADDGIT

SEQ ID NO: 225751 - protein, 235 aa, Zea mays
  Clone ID: MRT4577_137477C.1.pep
MRPPGRRRVLAAGACALLLAATFLAAGLLTTSSLAPYLLPPLALSLPCLPAVTAPAGSGYGAAPGVAALAEAAVAYATSETVPQQSVDEISLSLAVLRRRAPLRLLVFGLGHDSRLWHALNPGGATVFLEEDPAWYRVVRAQSPFLRAHLVAYRTRLDQADRLLATYRRHPACLPGGGGGNDTLQLPRVRGNWACPLALYNLPPEVYETEWDLVMIDAPKGYFAAAPGRMAAIWT

SEQ ID NO: 225752 - protein, 58 aa, Zea mays
  Clone ID: MRT4577_137478C.1.pep
LALLPSHGCPFWCSPSVDRGWGAVGGGVEVLGASEGAECPRRAAASTSAPISSADLAC

SEQ ID NO: 225753 - protein, 103 aa, Zea mays
  Clone ID: MRT4577_137479C.1.pep
GRAHFKKSKRERGNIIRILLIQAKRRGRDFNQQLKGTREAHTHPLLGDGQGPRGWPSHSFGRLKPHPGGGAPGTGSTKMRPRGGGKSRVTGGPPGRPTMSGLG

SEQ ID NO: 225754 - protein, 73 aa, Zea mays
  Clone ID: MRT4577_13747C.1.pep
LHQHILRNRVIQRLFVRVHLIYNLICFCLVCRTNNFVSIVRSVESCGTSQDIGNSNLASRLITVSDLAFSSRS

SEQ ID NO: 225755 - protein, 62 aa, Zea mays
  Clone ID: MRT4577_137480C.1.pep
GGDPLFFSPTSLGSPLFGPLATAPLSCGALYFPPFQGKRVLYSSPSICPWGFGFPVGIPRFS

SEQ ID NO: 225756 - protein, 41 aa, Zea mays
  Clone ID: MRT4577_137481C.1.pep
KGHPIVDMVPHPPLRSDFDPIRVDGRAFRGFSTLWYLSMPK

SEQ ID NO: 225757 - protein, 87 aa, Zea mays
  unsure (1)..(87): unsure at all Xaa locations
  Clone ID: MRT4577_137482C.1.pep
MHVRSSRPETGKGKTKISRKSINYAYHLMNTTSNSPMQDYIVSYDRQDDEHDLGLIAIFDGHSXHTDAYLFGCHLFNRIMSDPELLE

SEQ ID NO: 225758 - protein, 284 aa, Zea mays
  unsure (1)..(284): unsure at all Xaa locations
  Clone ID: MRT4577_137483C.1.pep
MEDSSLFLQWAMSTLRHEQQPAAAVNDDCSSEATFPSLQALREASHAAEMVQELIGEAPANSWSSGDTTDGSIGGNSNSVPGPAAAAMEHDVWPAASSKTSPARRALSRSSSDTNPPVSWNFSAAASAQLAGSADGMLPEFAPKSALPPDQAYGSPRARRAGLKSLAGSMSSAAYAQDHIIAERKRREKINQRFIELSTVIPGLKKMDKATILSDATKYVKELHGKLKDLEAGGSNXARAXETVVLVKRXALMLRPRRTTMPSXSASSGTPAETKTQLPEIEAR

SEQ ID NO: 225759 - protein, 63 aa, Zea mays
  Clone ID: MRT4577_137484C.1.pep
VISRENFIAVFKSGKSAFIYKPVNSKFYLDVSFHKILFASLIIIPASCHQISGCIILLKKIKL

SEQ ID NO: 225760 - protein, 112 aa, Zea mays
  unsure (1)..(112): unsure at all Xaa locations
  Clone ID: MRT4577_137485C.1.pep
QKNKSVQLYPGGPPKGPXPPRGPSKAPPGXGPPPPGGQLPDSXFGPPLDDPGPGEPNRRSWVPPPRRPPRWGLPFPGGPPRGDQPAPGPQKAPQRGXRPPGGXAPREGPNPP

SEQ ID NO: 225761 - protein, 70 aa, Zea mays
  Clone ID: MRT4577_137486C.1.pep
NFTSGPAAGRFCWDRQPEYSAYREAIAYQRRRRQGLHRQGARQVPRQDGQIVGLLIDPSLLATPTLVAAY

SEQ ID NO: 225762 - protein, 47 aa, Zea mays
  Clone ID: MRT4577_137487C.1.pep
AFGLAVILVFASRKSFINFFRLNVMECSNLRPLPLTTFHHFPSPLPY

SEQ ID NO: 225763 - protein, 58 aa, Zea mays
  Clone ID: MRT4577_137488C.1.pep
TIMSTVFCIQERFDCKHSVYVHHMKESWFINRCFSWVNLCWAVQCIFSERNIHPPLPA

SEQ ID NO: 225764 - protein, 147 aa, Zea mays
  Clone ID: MRT4577_137489C.1.pep
RVEMEELLYAYGVDVVFTGHVHAYERSNRVFNREKMATAHADEAGHCPDPASTPDPFMGGRLCAANFTSGPAAGRFCWDRQPEYSAYRESSFGHGVLEVRNDTHALWRWHRNQDLHAAAAANVAADEVYIVREPDKCLAKTARLLAY

SEQ ID NO: 225765 - protein, 159 aa, Zea mays
  Clone ID: MRT4577_13748C.1.pep
AGRAGILFLSLSLTFHLPCKMDLPAVAAMVRSSPSYDRGCYNTSSGAPSPKEIPLPGARPPFIHGGSAAGERRPPFIHGGLATGERRPFCNTFCWCIQFSLCTFCWYIQFSLTVSMPILSVLFSSSITGAFSSIFMPIVSVQLSSSFTELVYSVQFLCQ

SEQ ID NO: 225766 - protein, 159 aa, Zea mays
  unsure (1)..(159): unsure at all Xaa locations
  Clone ID: MRT4577_137490C.1.pep
TSARERTFPLRSSNFLPRDTSPSSSYRTNTRSMTPSRPSFARSVARRTSATSSTSLRLGPRPTTPRPSRRRPFSVRATRRNLSLTSTRRXSRSQQAPALVPQRAREGHEIQWVGRRLLEGSTKRARAVRKGSGRFGRQVEGVLREEALGEWQLDRHVRG

SEQ ID NO: 225767 - protein, 542 aa, Zea mays
  unsure (1)..(542): unsure at all Xaa locations
  Clone ID: MRT4577_137491C.1.pep
MRRGSLSLLLLAAVAAVAATAVPAEPASTLSGPSRPVTVAIGDRGHAVDLPDTDPRVQRRVTGWAPEQIAVALSASPTSAWVSWITGDYQMGGAVEPLDPGAVGSVVRYGLAADALDHEATGESLVYSQLYPFEGLQNYTSGIIHHVRLQGLEPGTRYLYRCGDPAIPDAMSGVHAFRTMPAVGPGSYPGRIAVVGDLGLTYNTTSTVDHLVRNRPDLVLLLGDVCYANLYLTNGTGADCYSCAFAKSTPIHETYQPRWDYWGRYMEPVTSSIPMMVVEGNHEIEQQIHNRTFAAYSSRFAFPSEESGSSSPFYYSFDAGGIHFVMLASYADYSRSGAQYKWLEADLEKVDRSVTPWLIAGWHAPWYTTYKAHYREAECMRVEMEELLYAYGVDVVFTGHVHAYERSNRVFNYTLDACGPVHISVGDGGNREKMATAHADEAGHXPDPASTPDPFMGGRLCAANFTSGPAAGRFCWDRQPEYSAYRESSFGHGVLEVRNDTHALWRWHRNQDLHAANVAADEVYIVREPDKCLAKTARLLAY

SEQ ID NO: 225768 - protein, 83 aa, Zea mays
  Clone ID: MRT4577_137492C.1.pep
KLYGRQCYSSSMFTACCGEELVGPSGDVPGAGEFGVDREWLGPDCVPLQIFGVLSAYFRDCVVIFSLLCVLLLWLVLPYCNIK

SEQ ID NO: 225769 - protein, 99 aa, Zea mays
  Clone ID: MRT4577_137493C.1.pep
LLSLFFFLVSFNLLSIPSFISTRIIAVINLLINSSTTGGEQHRPPNYNKDRTTTQWQQKATPQTMDHRSIPPGPKKKPTRALPRGSRKQSLKKQKQGHT

SEQ ID NO: 225770 - protein, 121 aa, Zea mays
  unsure (1)..(121): unsure at all Xaa locations
  Clone ID: MRT4577_137494C.1.pep
MLTRLHEPWRPRRLAGRALPSRAHSLPPKPLLLARPGETGEYPVILFQHGYLACNSFYSPLFXTAPSLGFVVVPPHLYTISGGDPTDEINAXSSAIDWLAPALSVTLPLGDRSNLTQVSIS

SEQ ID NO: 225771 - protein, 157 aa, Zea mays
  unsure (1)..(157): unsure at all Xaa locations
  Clone ID: MRT4577_137495C.1.pep
LVRLVKFTNAKFGIVKVLMPPVHPFILTQKPVNGPSFKAXRVERLVSFTFIPTSPELVKLVAKVLLFFNEKLLEISFVVPPVKVSVVDLPVSLKNFPPYNKIKLPAKSKPKGTFKAILVYVKKALVSPNFQGSARLSFFNAKAGIPLTAXFVELVSG

SEQ ID NO: 225772 - protein, 137 aa, Zea mays
  unsure (1)..(137): unsure at all Xaa locations
  Clone ID: MRT4577_137496C.1.pep
TPQDVRLREKSLTFEIGETXRLPEETDTLQGAKCPTMSTTERDFKLHXGEGQYSERQIVAVLGEDGTWRGTFISMLGALXWPGPEGGTVCEMSGFNVSHRPQEIRPXLQNTARHLLHHKISYSYRHPQVVSDVVKPL

SEQ ID NO: 225773 - protein, 75 aa, Zea mays
  Clone ID: MRT4577_137497C.1.pep
MNHNNAAYQSPEAPILCINNCGLFCTASTMNICSKCHKEMITNQDQAKLAASSIDSILNGIYAFMYPFFASNNTL

SEQ ID NO: 225774 - protein, 117 aa, Zea mays
  Clone ID: MRT4577_137498C.1.pep
SFGRQFNCVSGPFSLSSDIASSGHRRSCGCMSAAAWLRCRPRISSRVRSRGLRRLGGVGGGAVLSHAARLRTRIATASPCHQPPQRVRTDGLFLDRQVETLIATILRFLGVTGWPHL

SEQ ID NO: 225775 - protein, 169 aa, Zea mays
  unsure (1)..(169): unsure at all Xaa locations
  Clone ID: MRT4577_137499C.1.pep
MLVYQDLLSGDELLLDSFTYKELENGVLWHAXGKRVAQGPVDVDIGAYPSAEGGEDESVXTHPRKVIDIADTFRXLQEPPPFDKKSFVSYIKXYMLILTAVLNAEKVXEIRKAVKGATKCLLMKLXDLRFFAGESHDTTNRTTRFAYYKDGATXPRFLYFSHGLTEIEC

SEQ ID NO: 225776 - protein, 73 aa, Zea mays
  Clone ID: MRT4577_13749C.1.pep
TGERSRSIKRAVGCLLHSAFRICGGVGRAGVSPGGDYMSLDGLRASLRGDLDSDWSLDRIVAVLTPHGSPRVL

SEQ ID NO: 225777 - protein, 185 aa, Zea mays
  unsure (1)..(185): unsure at all Xaa locations
  Clone ID: MRT4577_1374C.1.pep
MRANTWSMLRLPALSACAAYATMXPQYSQATMAALLPPXYFPXMTATGRANPALXRYRVQQATASCYLPLSPLLFQQXPALSLVQPLVLAVRAQQLQKLMLPGIRQTTWANLCPYAETQQSIPYHQLSALNPAAYLQQQQLLPCCQLVTAYSQQRRLLPCNQFVGLNGCGYLQQPILLPFGQLAT

SEQ ID NO: 225778 - protein, 214 aa, Zea mays
  Clone ID: MRT4577_137500C.1.pep
MGLRDKKRNQRRVLSRRSAGPKTGEGKDFLPLEGKEQRVREKKQPEEPESTATVLYIGHIPHGFYEDQMQGFFQQFGAVKRVRVARNRKTGKSKHYGFIEFENPEVAKIVADEMNNYLLFEHTLQIAPVPPEKVHAKLWKGVRKGFIPVDRVAIERKRLSKDKTVEEHKKMLEGIVKRDEKRRKRIKAAGIDYECPALIGSVQPSAKKIKFDED

SEQ ID NO: 225779 - protein, 91 aa, Zea mays
  Clone ID: MRT4577_137501C.1.pep
PAGCSQAPPATTTALLPTLPFTLTLPSPTFPLFHQARWPAPCLRPAYPYSRPCLRCCPFRCSRCPGRWSRHGRFRSVSGVTHLIFGSSVAS

SEQ ID NO: 225780 - protein, 235 aa, Zea mays
  Clone ID: MRT4577_137502C.1.pep
MSPELTGKMAAKAAAAAAAVKPATRAYVTFLAGDGDYWKGVVGLAKGLRKVGSAYPLVVALLPDVPESHRRILVSQGCILREIEPVYPPENQTQFAMAYYVINYSKLRIWEFVEYERMVYLDADIQVFENIDELFELEKGYFYAVMDCFCEKTWSHTPQYRIGYCQQCPDKVAWPTTELGPPPPLYFNAGMFAHEPSMATAKGLLDTLRVTPPTPFAEQDFLNMFFRDQYRPIPN

SEQ ID NO: 225781 - protein, 347 aa, Zea mays
  Clone ID: MRT4577_137503C.1.pep
MAPELMTAKMTAKAAAAAAAAAAKPATRAYVTFLAGDGDYWKGVVGLAKGLRKVRSAYPLVVAVLPDVPESHRRILVSQGCVVREIEPVYPPENQTQFAMAYYVINYSKLRIWEFVEYERMVYLDADIQVFENIDGLFELEKGYFYAVMDCFCEKTWSHTPQYRIGYCQQCPDKVAWPAATAELGPPPSLYFNAGMFVHEPSVATAKALLDTLRVTPPTPFAEQDFLNMFFRDQYRPIPNVYNLVLAMLWRHPENVQLEKVKVVHYCAAGSKPWRFTGKEANMDREDINALVNKWWDIYNDETLDLKGLPSLSPDDDDEVEAVAKKPLRAALAEAGTVKYVTAPSAA

SEQ ID NO: 225782 - protein, 107 aa, Zea mays
  Clone ID: MRT4577_137505C.1.pep
DNNNNNIIIFNNRQLPSGNDHFFTMSTYDPLTPHSPTASFYPLSITNFPTAMQQGSYCYFPLRQLPPLQLRQRRLQRGLGRRHGVQRPLHSQHRQHLQLQQQQRHLH

SEQ ID NO: 225783 - protein, 45 aa, Zea mays
  Clone ID: MRT4577_137506C.1.pep
MKMVSVVFMCLALSTANASAMHMPCPCTGLQGLYCAGSGLTTMMG

SEQ ID NO: 225784 - protein, 66 aa, Zea mays
  Clone ID: MRT4577_137507C.1.pep
ILAHLATCTSSRIERIGSDFLTLLPRFSAAFDPFCSMSLCAAAIQGQLCISPESKPLEFRSKGALA

SEQ ID NO: 225785 - protein, 91 aa, Zea mays
  Clone ID: MRT4577_137508C.1.pep
QAVLSVQMEGMPWAASKHEPVEDGIEDMRIMLALAADRVSSSTVSGAHHIHRAQRMRTSRVVTFWLPACFRDRFLSLGPCSRAQLVEFCCE

SEQ ID NO: 225786 - protein, 48 aa, Zea mays
  Clone ID: MRT4577_137509C.1.pep
KINFFPSECLKQCWGHPSGWLSINGPYFDRSMSPRQTFKQISSLFCPR

SEQ ID NO: 225787 - protein, 49 aa, Zea mays
  Clone ID: MRT4577_13750C.1.pep
ISPLGCNLGCSTVPALFKKKKKKKKKKKKKKKKKKKKKKKKKKKKKKKK

SEQ ID NO: 225788 - protein, 54 aa, Zea mays
  Clone ID: MRT4577_137510C.1.pep
KTRIPVPRGIVGSVEGGGPLAPSFGVHGGFHPIEHPHFRGFFWGRFVFPRVTRN

SEQ ID NO: 225789 - protein, 225 aa, Zea mays
  Clone ID: MRT4577_137511C.1.pep
MSSENKEVDYSLANPDTLTKYKTAAQISEKVLAEVSKLVVPGAKIVDICQQGDKLIEEEISKVYRGKKINKGFSHPTTVSPSSYVTPYTPLTSDEAEAGAEIKDGEAIKIQLGAQIDGFGSIVCDTIIATPEDKAGDKITGRTADLILANYYINEVLLRLMIPPGTLAQGSDEEKAKAAAQKAPTQGKITSLLEKVAKTYEVNIVESTTSWLFDHNEIEGSKKIV

SEQ ID NO: 225790 - protein, 44 aa, Zea mays
  Clone ID: MRT4577_137512C.1.pep
TGRSVTSESVAIRQRQDEAAMNRSMIGPELHTLLMKYSRCILPS

SEQ ID NO: 225791 - protein, 35 aa, Zea mays
  Clone ID: MRT4577_137513C.1.pep
RLFVSPLTGLCPGLAVCPRPPFNGNNPTWGFCSRG

SEQ ID NO: 225792 - protein, 256 aa, Zea mays
  Clone ID: MRT4577_137514C.1.pep
GRGRAFCCQLVKKKKKKKKSFGLLSTLVLYSSTASPLDTRSPIGKVGAMEQPQHVNSPSHMPTWHENKSEKATAMPSRPQFSSSSKCLEPLDADRMDLRYIFANRLMPVAFALPWVASMVISCIPFTRISLIDAPDFLILAALISVIEVLSIVAVFIYASLRSDDDTNSTFKEKCLRVWFWFLFISPFVTGTMVVLMASDISCDPEDDLDMHQPICQVGIRLIKATALCRAGIIASFLFATSSWLERRPDSPPLLL

SEQ ID NO: 225793 - protein, 109 aa, Zea mays
  unsure (1)..(109): unsure at all Xaa locations
  Clone ID: MRT4577_137515C.1.pep
LRCTGPVPGWPHASYSRPDPIPGPXPVPGRGPNPAPQSDPKPGPQPAPEPDPNPTPXRAXPLPQPVPEAIPKPAPQTDPKPEPKPTAQPDPNPGPQPDPNPESKPTPHP

SEQ ID NO: 225794 - protein, 89 aa, Zea mays
  Clone ID: MRT4577_137516C.1.pep
PDTHLSPLYNNAHHSLINTVALFLYTTLHILIAPHTKQKHLACRSAPYNNLFTIVHIPPEGFWFLKNTKSTISTPSISLFILYNPTPSL

SEQ ID NO: 225795 - protein, 278 aa, Zea mays
  Clone ID: MRT4577_137517C.1.pep
QTPPSAKSDRASNGNTVGGSPLRRTTSTPPSAKSDRASNGDTVGGSPLRRTTSAPRPGHRRQGLLQKSGSSRQLGRSPRSLSQLSPEDISPAHGLGNLTPVPVPPVDSPVRLWPTKSSFRANSASVHADTAASGSGSSKSGRGFPLTPPALTAAATTSIPGGKTAAATASGQTLWQKGSRPQRTRTSHSSQGDGGPEVQAELAISSAEKPSLAAATSTPQQRAPAAPKRTGRSLLPPSPRPPQNMSTALAAHDVLGNPLARLSARGRPGHGRPVRDAT

SEQ ID NO: 225796 - protein, 85 aa, Zea mays
  Clone ID: MRT4577_137518C.1.pep
CPFFLYHLFLLLQKRARTQTVKSLLLWSVRPMHKRHGLRGQKPRHNKVLHTCQLTCPQKGERRLTVQGENRAHSECGAQTKEYYG

SEQ ID NO: 225797 - protein, 76 aa, Zea mays
  unsure (1)..(76): unsure at all Xaa locations
  Clone ID: MRT4577_137519C.1.pep
SHXHSAVISVCDLLAVSDAEHASDSDAERPSPYGDRLTSHRYAASXPRDAVRERSEGRERQGGGVAMGGKAXGLLS

SEQ ID NO: 225798 - protein, 81 aa, Zea mays
  Clone ID: MRT4577_13751C.1.pep
PSKPHAHSGRSLAGCNCKAPAPTAAIIGVLNRQAEHGRQGRLHHIQRHQLAAAEAGWPHTSTPRLATLLGLQAARVTAVER

SEQ ID NO: 225799 - protein, 75 aa, Zea mays
  Clone ID: MRT4577_137520C.1.pep
MVVGRLTHYAFDAVLLSAFLAGVKRSTGLTFKSDKVAGENKEVSKWIDKYLGVGKWVMDQSVAIAGSSGFFERKR

SEQ ID NO: 225800 - protein, 90 aa, Zea mays
  Clone ID: MRT4577_137521C.1.pep
QSVGFEYNPSDALELQELRTAKNQAGAYGTRWIMKKKQLTVAAHISSGLTQHNVPDQATQKPTDRSCLLKRTQDEPHWSYKESMYENKLQ

SEQ ID NO: 225801 - protein, 115 aa, Zea mays
  unsure (1)..(115): unsure at all Xaa locations
  Clone ID: MRT4577_137522C.1.pep
MTEGISIHIGQAGIHSGXNACWELYCLEHGIQSDGHTNGDKTIGGGDDALTPSSRETXPSSTRPVRTFDDLSXTVIGEVRTRDYRHFVHPEELMLGKEDDANNCARGHYTIGKEI

SEQ ID NO: 225802 - protein, 175 aa, Zea mays
  Clone ID: MRT4577_137523C.1.pep
MALAHLPFVLLLVSSVAAFAAADHGLTHIHLYVHETYTGANATAAAVLQSPLGANSSFGSMGVVDDEIRVGPDRSSQLVGRYQGVFFGTSVQLGAGYLSSITLVFTAGEYNGSTLSVQGPLLGFTGTIERAVVGGTGKFRLARGYMLFKMISKPTPETDVNEINLFVLMHPAGKY

SEQ ID NO: 225803 - protein, 173 aa, Zea mays
  Clone ID: MRT4577_137524C.1.pep
RTRGFLMVTCFGFRSANKYSVGRLLPSRASKFLPRQQIHVQRKKEPKNECQHSYLHWIELYYTNKVAMPIRGQSYAMLPFKAQCLHISNALLLAQGSSPFSSRGKRMLHWRWQYSIVSGWRVGCLNLCYCRNRALMSPRTPQKCGGTHPRSPSLLFPSIHLCSNTSRPRCLAR

SEQ ID NO: 225804 - protein, 70 aa, Zea mays
  Clone ID: MRT4577_137525C.1.pep
PPVRRPSFFFFFFFLHQVRLGGRTTSTLSSSLPDLTGSRLEAQHTCRKQLYTDLHGQRVTDTMQLIQPGF

SEQ ID NO: 225805 - protein, 97 aa, Zea mays
  Clone ID: MRT4577_137526C.1.pep
INYIPPPKRGYLTCPTKTTQRAKNHPFGPPPKKGGIQSLKGPLISQITGKPPKKQKQHPMNPFAIVAPKKIAHGLKTQPRHFLHFKTTEKERETPHL

SEQ ID NO: 225806 - protein, 267 aa, Zea mays
  Clone ID: MRT4577_137527C.1.pep
MRTQQDLKLALGSGPSTDLADEKGNFPEIECGTKCISATCSEVKTVSQIISATALLDLHDSDENLGRKQRTNAIPLDSRTTVEDYHNYSKMIIIQNFNRKYEAPGGFRCLEKWRKDVVNNQTALDCTAPIKHENPQKTDGMLVDGYGLIELNPVDEYICSEGNHECVQPVFTMPIKEPSSADRVIDCGRDGTEINYSINEKDGGSIEKTSSPDEISKCKNSMMETAHNVNGKGTTAQFETKMDQAEPARSGVRSKICNSVVPANESE

SEQ ID NO: 225807 - protein, 130 aa, Zea mays
  Clone ID: MRT4577_137528C.1.pep
SPRHDLRTKLGRLLSLPKTGGRSFAFYTNSPWTAIAIFCPCQIRYHFGQVKQDILDRYNLSLSPDKGEGLKCAASCCSQQCQPPNESGNTGEFFFPQCSLKSEMVRQQLGAQGSSHGRARHPSTKMAGGQ

SEQ ID NO: 225808 - protein, 32 aa, Zea mays
  Clone ID: MRT4577_137529C.1.pep
LKVRFSVTVCCNQKLDFDGLGFCGILIYQFYW

SEQ ID NO: 225809 - protein, 95 aa, Zea mays
  unsure (1)..(95): unsure at all Xaa locations
  Clone ID: MRT4577_13752C.1.pep
FFXNGCLXKXCNIXHSLIGVCSRLSSGCKLKDSVMMXAXIYKTKXEASKLLXAGKVXVGIGRXTKXRXCFIXMIARFGKTVVFXXRKGIHXAXXP

SEQ ID NO: 225810 - protein, 170 aa, Zea mays
  Clone ID: MRT4577_137530C.1.pep
MGGAKIAPPMLSSDFANLVSEVERRARQGADGLHRDIREGHFVPNRTMGAPGIQSLRKHTKAYLDCHLMATKPSNYEKPFGKAGASGFTFHIKVAKNNWQDLFQSIKSKGMRPGESLRPGTPGEEVFPRGEAKNPEKLVLGMTAKPGFGGQKFMPKMMDKVRTLKKKNPS

SEQ ID NO: 225811 - protein, 111 aa, Zea mays
  unsure (1)..(111): unsure at all Xaa locations
  Clone ID: MRT4577_137531C.1.pep
IRLEGCCGCSCDRGFPAEAWEVLRQHLYKNLSEDVRRVNPTVPKEEARNIFGRLLKTLSDHGPLTFINTXLHATDAGMAGLNSKTNMKILLQWMTVEKCIHTDLSARGQRR

SEQ ID NO: 225812 - protein, 97 aa, Zea mays
  Clone ID: MRT4577_137532C.1.pep
AGVPLIEWLSRVLVGFYLLLHYWLQLTTAVATDGLHEQQGGTRQKKKPRHLHEESSPPSRSVIGRAWRCGRWRRAWTRDGHRHRRSETGGAARYRLG

SEQ ID NO: 225813 - protein, 108 aa, Zea mays
  Clone ID: MRT4577_137533C.1.pep
GLNRFAPVIISLHYLTPRPCSTVTDYLHCASDNQIVPCLRALYILSSYHSARIMPGDRNRVQDARKGVEPDGSLLASTNDEALGLTDYDNRLINTVQLEDACVILLLL

SEQ ID NO: 225814 - protein, 366 aa, Zea mays
  Clone ID: MRT4577_137534C.1.pep
THKIAELTMRRSDTSLFKEALGSLAKDSGLHPLVPYFSYFIADEVTRSLGDLPVLLALMRVVQSLLRNPHIHIEPYLHQLMPSMITCIVAKRLGHRLSDNHWELRDFSANLVALVCQRFGHVYHNLQNRLTKTLIHAFLDPAKSLTQHYGAVQGISALGPSAIRLLLLPNLVTYMQLLEPELQLEKQKNEMKRKEAWRVYGALLCAAGKCLYDRLKLFPGLLSPSMRPLLQSNKRVLTNNPNKRKSSTDLSATQPPLKKMATDATANSMASASMGGNMQGAMDGFPNQLGNPGMMQASSSGQTVESIPSAAVRRDQGSDLAQRVSAVLRQAWKEDQDTGHLLGSLNEVFGEAIFSFVQPPEISLFV

SEQ ID NO: 225815 - protein, 57 aa, Zea mays
  Clone ID: MRT4577_137535C.1.pep
IKFGMQTSLTRNSSSQTSPWIMPCHAMLVQGPFSWVLSFKRRPFVLLLYCYCGTLLL

SEQ ID NO: 225816 - protein, 68 aa, Zea mays
  Clone ID: MRT4577_137536C.1.pep
NNCLGAPKVFSFRPPKRHWKFNRHTLQPLVFCSVIVRSTFHQDCVSGFFWGLKIEPPQIFWSPCCLIP

SEQ ID NO: 225817 - protein, 90 aa, Zea mays
  Clone ID: MRT4577_137537C.1.pep
ASPQPFFPFNPLAALNFPAYVQQPIVPFSQVTSVSPAAFFTQQQLVPFYLDPGPNVGPLLQVQQLLPFNPHVFTNPTGFYPQPIIGGALF

SEQ ID NO: 225818 - protein, 166 aa, Zea mays
  Clone ID: MRT4577_137538C.1.pep
RWTTRLLLKGKKTFIRPKSGHGTERKKKSLVFTRGPGLGGGKKRRVQTILPVWGGGGTIYIPGPREMEKTAGAFKKPWPSKPPKTKKTFLGPWSKKHLGTNTTMLCPFSNVDPARTSKTLGKDWSGAPPEPSKPWGRKLITGKDKPKVHRKRLNLSRSRGPLTERK

SEQ ID NO: 225819 - protein, 55 aa, Zea mays
  Clone ID: MRT4577_137539C.1.pep
PQNKKKIQRQQQKGATPQGITSISTCPCSLTLLQSCPLNSLHGPSFKTFVLGKTL

SEQ ID NO: 225820 - protein, 290 aa, Zea mays
  Clone ID: MRT4577_13753C.1.pep
MAAPTTLRSAAARARARAAELVRGRWPQRRLGTTSAAETESKKNKDEEEEGAGWELSAAREYYDYRKSIYGDVTHRALLVDAVGTLVVPAQPTAQVYKSIGEKYGVKYSEDEILMRYRRAYEQPWGGSRLRYVDDGRTFWQHIVTSSTGCSDAQYFEELYQYFMTEKAWKLCDPDAESVFKALRKAGVKTAVVSNFDTRLRPLLQALKCDHWFDAVAVSAEVAAEKPNPIIFLKACELLGVKPEEAVHVGDDRRNDIWGARDAGCDAWLWGSDVRSFKEVAERIGVEVTK

SEQ ID NO: 225821 - protein, 47 aa, Zea mays
  Clone ID: MRT4577_137540C.1.pep
NTVACTGAYITPILIFLYHMRHSHIQTYHSFYLCNFKELMLSPPLKA

SEQ ID NO: 225822 - protein, 66 aa, Zea mays
  unsure (1)..(66): unsure at all Xaa locations
  Clone ID: MRT4577_137541C.1.pep
SRLIRCTDSLFYICSLVSXVIRCYSSYHCVESWLDESSQSCSAVAKIGYADGSSMIYHVATKITYK

SEQ ID NO: 225823 - protein, 74 aa, Zea mays
  Clone ID: MRT4577_137542C.1.pep
EDGGHKSPPGFFFGNFLGPPGGGPSSGGGPAPFFFRGIFGPPLRVCLWFAQRAKGIYLEPFINTVLVGTVFTWK

SEQ ID NO: 225824 - protein, 60 aa, Zea mays
  Clone ID: MRT4577_137543C.1.pep
LFSPPAQLARSVLRGGAAVVALEPAVGYGALGRLGKMAAVPGRVGGRLIGRVGPTNSSGP

SEQ ID NO: 225825 - protein, 122 aa, Zea mays
  Clone ID: MRT4577_137544C.1.pep
ALITNKRNTSRMIDQIVKTKKKKKKKRRELARTHENAFLLLITLPKVSSSCWHFQWSLLIGPRQSPPPLQQGQPVVLAAGNLQRAVYATNDGRPEAERLLRPGAAPALHAHDAAQAGAGGIH

SEQ ID NO: 225826 - protein, 81 aa, Zea mays
  Clone ID: MRT4577_137545C.1.pep
PADLSLNILSSCYFISYAISLTLGHCKRSTTSCFFCACIPSKALAHGYCCVFLAALQPILMKYLNTVFSAFMPVRHSLLAT

SEQ ID NO: 225827 - protein, 121 aa, Zea mays
  Clone ID: MRT4577_137546C.1.pep
PKFPSLRGGSFLLLWAKPNSRAGVFHLQAWENLILPQPKLLAVHPHSPCCRNCKKAGPVPLSQQYPILIGNGNWPCPGPLTPRAVVVTPTVPFPFAMALSPVPLLYFLYFSAHSPVFPFKV

SEQ ID NO: 225828 - protein, 129 aa, Zea mays
  Clone ID: MRT4577_137547C.1.pep
ASASVKIGDRRLPLAPLERRGYGYLLDFVVIWLFSSLATGWVQLLIFLVGWFALRVVLVSANQGQSLGGWAFDTRVVHLKMKRLPGILELSQREGILGAASYLAMVGLNINFANGVSFLLLVAPLFGDL

SEQ ID NO: 225829 - protein, 127 aa, Zea mays
  Clone ID: MRT4577_137548C.1.pep
CRSTPCARTDARSPDAVVATAADRGSEDRMVAFTYLRMGPDLFQPDNWRRFAAFVKRMTEPGAREACREQVEREAEGVAHATQPLVHEAAVSSVRAPRSSVRTAEAATASEVGCGVGDWVPGVGYGT

SEQ ID NO: 225830 - protein, 593 aa, Zea mays
  Clone ID: MRT4577_137549C.1.pep
MMALNLSAPAPAPALQLQTMTVDPAPAHAPDAVKPDLAMACQALVEAAPEAEHADVAAELRSRAGVPVFVMMPLDTVRKDGNSLNRRKAVPTRPAALKSAGVEGIMVDVWWGIAEADGPGQYNFNGYMELMEMARKTGLKVQAVMSFHQCGGNVGDSVTIPLPGWVLEEMDKDQDLAYTDRSGRRNYEYVSLGCDAMPVLKGRTPIQCYADFMRAFRDHFATFMGNTIVEIQVGMGPAGELRYPSYPESDGTWSFPGIGEFQCYDRFMLSSLKAAAEAVGKPEWGNAGPGDSGSYKDWPEDTGFFRREGGWSTEYGEFFMSWYSQMLLEHGERILSAATGVFTGSPGVKISVKVAGIHWHYGTRSHAAELTAGYYNTRSHDGYAPIARMLARHGAVLNFTCVEMRDHEQPQDAQCRPEALVQQVAAAAREAGVGLAGENALPRYDDTAHDQVVATAADRAAEDRMVAFTYLRMGPDLFQPDNWRRFAAFVKRMTEPGAREACREQVEREAEGVAHATQPLVHEAAVALPAGPDRPAFPVACVRSLDGAARCDDYLYGESSLYLLIHKLRRRVVGARVHRAVVCVQRKLRLRAR

SEQ ID NO: 225831 - protein, 80 aa, Zea mays
  Clone ID: MRT4577_13754C.1.pep
ACKHYVFILVLQCCKWCSTKCALSLVFCKARYSLKIKKTLCSGPNEVWVCGFNRLVGICLKPGLHAIGIQAQMAQKFPPK

SEQ ID NO: 225832 - protein, 81 aa, Zea mays
  unsure (1)..(81): unsure at all Xaa locations
  Clone ID: MRT4577_137550C.1.pep
PVTPIRFNNAYYPNLQNGLGLFTSNQVLYANKTTRPIVNMFXASQKNFFNAFVPAMLKLGRLGVKTGKXGEIXKVCTAFNH

SEQ ID NO: 225833 - protein, 140 aa, Zea mays
  Clone ID: MRT4577_137551C.1.pep
VEHASAHDVRPRVRRDHEQPQDAQCRPEALVQQVAAAAREAGVGLAGENALPRYDDTAHDQVVATAADRAAEDRMVAFTYLRMGPDLFQPDNWRRFAAFVKRMTEPGAREACREQVEREAEGVAHATQPLVHEAAVALTN

SEQ ID NO: 225834 - protein, 511 aa, Zea mays
  Clone ID: MRT4577_137552C.1.pep
MTVDPAPAQAPDAVKPDLAMACQALVEAAPEAEHADVAAELRSRAGVPVFVMMPLDTVRKDGNSLNRRKAVEASLAALKSAGVEGIMVDVWWGIAEADGPGQYNFNGYMELMEMAKKTGLKVQAVMSFHQCGGNVGDSVTIPLPGWVLEEMDKDQDLAYTDRSGRRNYEYVSLGCDAMPVLKGRTPIQCYADFMRAFRDHFATFMGNTIVEIQVGMGPAGELRYPSYPESDGTWSFPGIGEFQCYDRFMLSSLKAAAEAVGKPEWGNAGPGDSGSYKDWPEDTGFFRREGGWSTEYGEFFMSWYSQMLLEHGERILSAATGVFTGSPGVKISVKVAGIHWHYGTRSHAAELTAGYYNTRSHDGYAPIARMLARHGAVLNFTCVEMRDHEQPQDAQCRPEALVQQVAAAAREAGVGLAGENALPRYDDTAHDQVVATAADRAAEDRMVAFTYLRMGPDLFQPDNWRRFAAFVKRMTEPGAREACREQVEREAEGVAHATQPLVHEAAVALTN

SEQ ID NO: 225835 - protein, 139 aa, Zea mays
  unsure (1)..(139): unsure at all Xaa locations
  Clone ID: MRT4577_137553C.1.pep
LLLQFFELMLPFAIIGEXWLKLPLWGITSCTFWNLLSDSPAIFMTMLSFVXPITLLTMALSMLSAYGLCAHARVCGSIAEGTCREQSPSNSXHMYLALKDAXVTDGIHSQNVNLSLLNIXTILLSGQPFVTSQVVFCST

SEQ ID NO: 225836 - protein, 116 aa, Zea mays
  Clone ID: MRT4577_137554C.1.pep
GQKCKRASFRDVIHRKRVVSAWVCRTSSNFNFKRASAFNGMLKRRRIPCECEDGCQQHEHNSSGGEQSCGLLFPTKQQAPYDKGVDVESQHPFSKFQVAQGTQNPVSRGPRNVTCL

SEQ ID NO: 225837 - protein, 330 aa, Zea mays
  unsure (1)..(330): unsure at all Xaa locations
  Clone ID: MRT4577_137555C.1.pep
LLSDFNRAKEDRLTALENSCAEFDNWRPKVDAAMEDVKLELHKMNKQWDHAARYMAGADSGILGXAGSTAXDPRQQAPTHDGPIGHRDESRHREQGYGSVTFTPGPVKGMHHVPHLPPSPRYHGPVFDHMGSRTRNSDMPMSSLGKLPKLPFPIFDGDNPRLWIYRCESYFDMYEVEPEAWVKVASMYLAPHVACWFQSVERKQPRLSWPLLCRLLHERFGRDQYQSLLRQLFRIHQQSSVTDYQDRFVTLVDQLAVYESVPDPVFFATRFVDGLRTDIRAVVMLQRPLDLDSACSLALLQEEVALPSGRHEHRKEAYQPWLKSAQQVPD

SEQ ID NO: 225838 - protein, 105 aa, Zea mays
  Clone ID: MRT4577_137556C.1.pep
GGYPDWPTGFFKQTVAPPKLNIQNDAPDMFNKASQLKKKRQKNPKPPKRLVPGPGVGKETGGGCSKTPRWEQPGLAFLSTSFFWGPGTCYIPKRRNRQKARGFFF

SEQ ID NO: 225839 - protein, 60 aa, Zea mays
  Clone ID: MRT4577_137557C.1.pep
LDLRRALPNVGSLDAHALDEHLALIPSVPFSWPLHCSTGMRSDVSERSAREVRGRNEVPP

SEQ ID NO: 225840 - protein, 57 aa, Zea mays
  Clone ID: MRT4577_137558C.1.pep
GTQKFEMPKQGMKISVVFGAMEQAKSSLHILAWGLADTTLEDVFVRVAKQSDMSTVT

SEQ ID NO: 225841 - protein, 257 aa, Zea mays
  Clone ID: MRT4577_137559C.1.pep
METRPAPCDLEAAVPAGSGAATAAAAQQEAPAAKKVAEEEDPRLRWAFVRKVYAILSLQFALTAAVAATACLVRPIPRFFASGPPAAVWSTYIAILLSPLIVMFPMLKYREKHPRNLVLLAVFTLCCSLSIAVSASTTLGTVVLQATILTAAAVLGLTLFTFWGVKRGYDFTFTFPFLFACLVVLLVYIIIQVCFPLGRVAMTIYGVLATVVFSGFIVYDTNKLLKRHAYNQYVVAAISLYLDVINLFMAQMAISFQ

SEQ ID NO: 225842 - protein, 94 aa, Zea mays
  Clone ID: MRT4577_13755C.1.pep
QRPFVQPPLSGPFPLRFPAASLPLPLRPQSRAGLGCAPCPSFSCLPPFVFGASLIGFIGPVGRCCPRLLFPGGISGRPCLIPRRGPRVRFLHTK

SEQ ID NO: 225843 - protein, 87 aa, Zea mays
  Clone ID: MRT4577_137560C.1.pep
LWKFSPLSINLFLSQGNGSLHTLQIYRGSYICPLEGKSLKGTIQFQIHNPILHDTWPRRVPRWGALYRSPMGCCPNFLRTCPHFLKV

SEQ ID NO: 225844 - protein, 91 aa, Zea mays
  unsure (1)..(91): unsure at all Xaa locations
  Clone ID: MRT4577_137561C.1.pep
GGNNFPQETTFALILPRFYKPPFKKKWDPPRVPAGIXGPLLRGFLKGIPKKNFLEKGRGPPQKKNFLFPEKKKKKKKKKKKKKKKKKKKXT

SEQ ID NO: 225845 - protein, 59 aa, Zea mays
  Clone ID: MRT4577_137562C.1.pep
TNLIRHTTGRLHHETILQDVCERTGHIVRQPEGEVLPHRHACLEHQEPQGIPDDQAHAQ

SEQ ID NO: 225846 - protein, 200 aa, Zea mays
  Clone ID: MRT4577_137563C.1.pep
PICTYKRSLVTSDAIYPIYYFVSWFIYNLLHPALSSSNLDKFLISIGKQPAYVDLEAAPAVGKDNPPDLAHLVPTGVPNSSEQPVENTAPTNVLKETEVKAKPKVQSKGAETSSKVDKPTIDTSVDKFVNDVFEIISPLFLSEALKKLDIKKEDLSLILEGLRGRADPDLKSIAMTLKNASYTSGFHAGYKTMQNRGLNG

SEQ ID NO: 225847 - protein, 63 aa, Zea mays
  Clone ID: MRT4577_137564C.1.pep
SFPQQRATAAESAQPTSQFLMIHHPESHVTQFCTTRSRRIISPCSGPTCHPDQRGNCIRCAMV

SEQ ID NO: 225848 - protein, 309 aa, Zea mays
  Clone ID: MRT4577_137565C.1.pep
MGYTKDQLLAHLQKLKIDFTCYDHPVVLTVEEQAKHVGHLGGALSKNLLLKDKKHRLYVISALAGTKVDMKILSQRLGLGKGGLRMAPEENLLEVLQVPLGCVTPFALINESASAVSLLLDQGFKSKQSCYFHPLTNDVTIALSSSNLDKFLISIGKQPAYVDLEAAPAVGKDNPPDLAHLVPTGVPNSSEQPVENTAPTNVLKETEVKAKPKVQSKGAETSSKVDKPTTDTSVDKFVNDVFEIISPLFLSEALKKLDIKKEDLSLILEGLRGRADPDLKSIAMTLKNASYTSGFHAGYKTMQNRGLNG

SEQ ID NO: 225849 - protein, 69 aa, Zea mays
  Clone ID: MRT4577_137566C.1.pep
MMLLAAGCSTMGTFFLLLSMVDAIQLKFGILSCGIPLAVAATFALSALVVGGLIFYGATVAYALTHYLP

SEQ ID NO: 225850 - protein, 88 aa, Zea mays
  unsure (1)..(88): unsure at all Xaa locations
  Clone ID: MRT4577_137567C.1.pep
AAXLXXNFFFXTRTKIQQSGFVSTTQLHFCFPFLSQLHIINPIEEDLWFKAIHSVTTDVGPQPRAITYQSSPTIFYYSSSSIFRFQPF

SEQ ID NO: 225851 - protein, 47 aa, Zea mays
  Clone ID: MRT4577_137568C.1.pep
LISFLKRVSLLHTYSLYNFAPNCGLKTLAREYYQILTCIPTIMIVFK

SEQ ID NO: 225852 - protein, 47 aa, Zea mays
  unsure (1)..(47): unsure at all Xaa locations
  Clone ID: MRT4577_137569C.1.pep
GHCSSYYFAEWIHFPRGPXRLPSGKFIPGNNNSYDKCRRRFDLVNFL

SEQ ID NO: 225853 - protein, 120 aa, Zea mays
  Clone ID: MRT4577_13756C.1.pep
DAESVFKALRKAGVKTAVVSNFDTRLRPLLQALKCDHWFDAVAVSAEVAAEKPNPIIFLKACELLGVKPEEAVHVGDDRRNDIWGARDAGCDAWLWGSDVRSFKEVFLYFFLTPRFRGLS

SEQ ID NO: 225854 - protein, 63 aa, Zea mays
  Clone ID: MRT4577_137570C.1.pep
QVSFPPEGRPGAPVVVVYRCPASSPEALPPHPREHRHTSPFSSRERYHDALPTGPPGVGGVCA

SEQ ID NO: 225855 - protein, 63 aa, Zea mays
  Clone ID: MRT4577_137571C.1.pep
KYVTRGGKPIRMRKGRTVIEYHDDYTLTIRDNFTTFTGKASQQIHDRTGTHGKLHTSSQSACY

SEQ ID NO: 225856 - protein, 67 aa, Zea mays
  Clone ID: MRT4577_137572C.1.pep
RVVVWVSFAGCPRCVSSMCLALRLGDSPCGSLRSLFSPPCGPWSDSRSACAAVSSPAGLVLPWQKTL

SEQ ID NO: 225857 - protein, 231 aa, Zea mays
  unsure (1)..(231): unsure at all Xaa locations
  Clone ID: MRT4577_137573C.1.pep
MDSALASAAAIADQRQKIEQYRHILASVISSSPPDIPQAKRFLNHMVSDEVPLVVSRQLLQTFAQELGKLEPDSQKEVAHYALTQIQPRVVSFEEQVVVIREKLAELYESEQQWSRAAQMLSGIDLDSGIRMLDDTNKLSKCVQIARLYLEDDDAVNAEAFINKASFLVTNSNQEVLNLXIQVCYARNLDLKRXFLGAALRYYGISQIEQRQIGDEEIXDXNALEQALSAA

SEQ ID NO: 225858 - protein, 42 aa, Zea mays
  Clone ID: MRT4577_137574C.1.pep
ADPAITTSGISNSTGYSNNGTVPLFLCLLNLSLSPYGTYIAP

SEQ ID NO: 225859 - protein, 70 aa, Zea mays
  Clone ID: MRT4577_137575C.1.pep
NVLRYQMSVVIAVYGALTYVVVVAYAELFIIHIDGQVGLYNVVVVLDAEVAGEVEVDVGDDVLVMHWKRR

SEQ ID NO: 225860 - protein, 59 aa, Zea mays
  Clone ID: MRT4577_137576C.1.pep
MDPCPFVRVLIGNLTLRMPVAPPAVGAGADVHPCTSACYCKIRLMKMPVHSVQAPLVVS

SEQ ID NO: 225861 - protein, 50 aa, Zea mays
  Clone ID: MRT4577_137577C.1.pep
EGTRQRLHTPPQNSRSHLFFLTDTQSNCDCYTTNIARQQKHFIMSLCYNE

SEQ ID NO: 225862 - protein, 42 aa, Zea mays
  Clone ID: MRT4577_137578C.1.pep
GRVSKNHFKVRVIKDSLSRSPHLPNRVSQTLPTRASSMDDSA

SEQ ID NO: 225863 - protein, 36 aa, Zea mays
  Clone ID: MRT4577_137579C.1.pep
VRTASETIARKQPAREQVGPTQPRLATECEIALFYH

SEQ ID NO: 225864 - protein, 71 aa, Zea mays
  unsure (1)..(71): unsure at all Xaa locations
  Clone ID: MRT4577_13757C.1.pep
HILCLHSRLNRNLGXEAQRYYTVMSLLVNKTFFFFNLGLNKRHWRXHKGVPTCPFCVALAQLEPFAKGHSF

SEQ ID NO: 225865 - protein, 181 aa, Zea mays
  unsure (1)..(181): unsure at all Xaa locations
  Clone ID: MRT4577_137580C.1.pep
MNRKPGDWDCRSCQHLNFSRRDLCQRCGEPRSAADRGSVGGALGGDYANFGGRGVGGSSFGTGFGAGSDVRPGDWYCTCGAHNFASRSSCFKCAAFKEEATVNGGAGGFDGDMSRSRGFGFGAVGGMGGGMGAGAAGGRASRPGWKSGDWICTRSGCNEXNFASRQECFRCNAPRDSGTEV

SEQ ID NO: 225866 - protein, 142 aa, Zea mays
  unsure (1)..(142): unsure at all Xaa locations
  Clone ID: MRT4577_137581C.1.pep
QGKSRTKAGCEQGXPGRGAPNERGQKGEKGPRGHEQGGGWEESPTGGPGSKGRATRGAKGGRGGSATRGPGGPGNXGPSAPRELGLRGNREPGXKRGKGAXGEGTGGERGIKGPDPGGDPGTPGGVRAGPRGGTNLAETGGE

SEQ ID NO: 225867 - protein, 96 aa, Zea mays
  Clone ID: MRT4577_137582C.1.pep
APQNTNQLSSPTTSSSIPPMQPLDTQPQEAEPSDSQSSVQKILQDLMSSCVGHSGNDTKTPNGLTHGVNGVNCLVGNAVTNNSGMGGMGFGAMNGF

SEQ ID NO: 225868 - protein, 143 aa, Zea mays
  unsure (1)..(143): unsure at all Xaa locations
  Clone ID: MRT4577_137583C.1.pep
LARAHAWGGCSCRPVGSGMTLLVRARAHXTDCTLIRGSGXESFQYNIGKGXSGCVAELXVSQDEHAXPSIIXHMTEXTLSGYDRLEXATGNAYREYQRTMLELVNDLDDCDNSNKNNVXIMQNXIQLRYQDILRTIRLDRKIE

SEQ ID NO: 225869 - protein, 177 aa, Zea mays
  Clone ID: MRT4577_137584C.1.pep
GIGIRLFLFLFFFHPAVNLYRFGFSPAGANQPGPPAPTVSGPSGVAPFSVALLTGPIPPRPGPLSPRFLSLFVALFFSAFPPSRFPVGPPPLISFLLLFFRSLLWPFCLFFLCFVDLWAVDLFPHSPFPPAPALALLTPRSNPTRYSGRCHAYRNRKKKTKKKKKKKKKKKKKKKKK

SEQ ID NO: 225870 - protein, 56 aa, Zea mays
  Clone ID: MRT4577_137585C.1.pep
HIAQKVRLVLKSQWRSCPLLAAQNKFQAHRLSFVRSCLRFKAPLSDVWYSLVSLLP

SEQ ID NO: 225871 - protein, 208 aa, Zea mays
  Clone ID: MRT4577_137586C.1.pep
MTMKQSRFKRICVFCGSSQGKKASYHDAAVELGNQLVARSIDLVYGGGSIGLMGLVSQAVYGGGRHVIGVIPKTLMTPEISGETVGEVRAVADMHQRKAEMARQSDAFVALPGGYGTLEELLEVITWAQLGIHHKPVGLLNVDGYYNSLLTFIDKAVEEGFINPSARRIIVLAPTAQELMDKLEEYEPYHDRVASTLNWETTMDHLAY

SEQ ID NO: 225872 - protein, 74 aa, Zea mays
  Clone ID: MRT4577_137587C.1.pep
TSNPALYPSTPIYQLYRGHSTLLRTYKNYYLNPKTPTYFISSKLTKHPYSNSKTTITIYKNNLNTTIIHYPKFH

SEQ ID NO: 225873 - protein, 61 aa, Zea mays
  unsure (1)..(61): unsure at all Xaa locations
  Clone ID: MRT4577_137588C.1.pep
MDDEKHHHHHLIHHKKDEEHAAAAGYRXSAEYTDATVTEVSSTGDNDYYEYNKEEKQHKHK

SEQ ID NO: 225874 - protein, 67 aa, Zea mays
  unsure (1)..(67): unsure at all Xaa locations
  Clone ID: MRT4577_137589C.1.pep
KIKKKKKKKKKKKKKKKKKKKKKKKKKKKKKKKKKKKKKKKXGGPPFKKPKFFPPGFGKKNFFFLGP

SEQ ID NO: 225875 - protein, 123 aa, Zea mays
  Clone ID: MRT4577_13758C.1.pep
INPHPFLTFLLQIHDFSLINSHPTTPHHNNFFNLILLQLPSSLTQLMIQIKFFSHIFPLSSSSSISINIINHSLIYIFVSIISFFLSYHTSFSFNFITFSFHFLHNLPPNITISTYSFYFHTF

SEQ ID NO: 225876 - protein, 131 aa, Zea mays
  Clone ID: MRT4577_137590C.1.pep
GRWFRWFFFFFFFGLSCSLNYSKCGFNVLLWDLYLLLLNMSKIDMYKRTTKPLIGDGRSMQLWFDSLGNKVHQELYPELFSYAINKNITIQQTKKPGFLRTSSTLPLSAAEAFARFQLLGNELQNTPLLDG

SEQ ID NO: 225877 - protein, 41 aa, Zea mays
  Clone ID: MRT4577_137591C.1.pep
STNPSLELIDLSFLPLIFMLTSSEMFKQYLLPQQNHPKNFL

SEQ ID NO: 225878 - protein, 63 aa, Zea mays
  unsure (1)..(63): unsure at all Xaa locations
  Clone ID: MRT4577_137592C.1.pep
XTVLHFSADISFRTLPDMIVEFHTAAQSLLDSNNPSAHQRQVLHRLRKDIIPLLAVSEPPLPT

SEQ ID NO: 225879 - protein, 108 aa, Zea mays
  unsure (1)..(108): unsure at all Xaa locations
  Clone ID: MRT4577_137593C.1.pep
RXWFPLXXAVXXXXGLRAGHAGPGVPHPQEDLAPVQHGVGHPLLVVVHVXVKKKKVAPPTPAEVAAAWAARGHRRRAVRGDGHGRPRARAALGGQARAPASWIAAPRP

SEQ ID NO: 225880 - protein, 181 aa, Zea mays
  Clone ID: MRT4577_137594C.1.pep
GKDSISSNARSKARSRSGELYGVDCSTARTAAATHTTSLRHNTTTARNRGAHRELHDAGDRRAQQGEMPASQGAEGSSELGEQGGRRPGRAPGNIAGRRSWRPSEKTWLRAMGKRAPSRGSSGERGRRESGKRWPAGRQEGEGRELEELNWTQTLGRVAEQEPGHATQGAAAREEMHAGKL

SEQ ID NO: 225881 - protein, 76 aa, Zea mays
  Clone ID: MRT4577_137595C.1.pep
ILFTLPFVLLLPHQIIFGFFKNSGERQQRLAYPNGGQPPQKKKFFGGKEKDKKNHSVHNTPNNYGVLLESNNILYP

SEQ ID NO: 225882 - protein, 178 aa, Zea mays
  unsure (1)..(178): unsure at all Xaa locations
  Clone ID: MRT4577_137596C.1.pep
FMKFLEENGVNLKEIEMRPFKKGDYHNDSMPNETXKHHCWYQSSTXILSSDTKEGDEGKDAPIERAKVTYHRTLSGGLHNPKGTDAPQKAILERIKSKSETESYQLGLKLSLKWSTGAGPRIGCVKDYPTKLRMQALEMVHLLTGASTIPHSSLLAEAQECHDPDRRLEDLVKRAQAN

SEQ ID NO: 225883 - protein, 103 aa, Zea mays
  Clone ID: MRT4577_137597C.1.pep
FQGPRRGTNWLYSKNKNKGGENTNSQTDPWEQLIYIPPQEGKLRKPKKGGLKKGLNNLIPPLKKISQFTIQKGDRQCHGKNYTGGAGNHHLVSFGDPPGGEVQ

SEQ ID NO: 225884 - protein, 117 aa, Zea mays
  unsure (1)..(117): unsure at all Xaa locations
  Clone ID: MRT4577_137598C.1.pep
MHHFGFNMLIIELDRSGKQLQRWRGNLITRASRRDRAXFVLIGMLIYFAITTDIASCDCKAIERIRQQFLVKRMKDDIGGHXRVTRKGSSPPRXLVGLGIXSLLELSRALRMKWLLL

SEQ ID NO: 225885 - protein, 104 aa, Zea mays
  Clone ID: MRT4577_137599C.1.pep
DDVAEIWKERSMRDIRSGKVQIPAQTVLGTRHAGDHAIPRQFRLITSFRKGSILLGVNMLDHNGRLSRETPQRSSSEELEASKCKSEITRRYGRYVPTVLEVRN

SEQ ID NO: 225886 - protein, 59 aa, Zea mays
  Clone ID: MRT4577_13759C.1.pep
ISMINTATGLLASPLLFHKAIAIHDLTSQTMKMTLLYQMQLCSKHKLPLRCGLFIGKRR

SEQ ID NO: 225887 - protein, 72 aa, Zea mays
  Clone ID: MRT4577_1375C.1.pep
NTGNLFYFWCPKKKIIICKDREGKFGSLKRGAPFIYPSPFFLFTFFSFFFFFFLKLKIFFFFFFFSDGLVGP

SEQ ID NO: 225888 - protein, 186 aa, Zea mays
  Clone ID: MRT4577_137600C.1.pep
AAIRTMRWEIRGIRSKIGSNECLLCCIDFLFHIVETLVRFFNKYAYVQIAVNGQSFNRSARDAWELFQSTGIESLVAYDCSGAILLMSTILGGLITGTCMGVWTYFKQSDKAVMVGSTSMLMGMILVGLTVVVVESAVTSIYICYAEDPLLIQRWDPEFFEQMSEALHQRLQYRSARARQILNGAV

SEQ ID NO: 225889 - protein, 165 aa, Zea mays
  Clone ID: MRT4577_137601C.1.pep
LLISCYRINALKIVCHFQIAVNGQSFNRSARDAWELFQSTGIESLVAYDCSGAILLMSTILGGLITGTCMGVWTYFKQSDKAVMVGSTSMLMGMILVGLTVVVVESAVTSIYICYAEDPLLIQRWDPEFFEQMSEALHQRLQYRSARARQILNGRLDHLPHTSSI

SEQ ID NO: 225890 - protein, 86 aa, Zea mays
  Clone ID: MRT4577_137602C.1.pep
WSVKPSSPAFIHATPGVQMVAGGDDLGQQYNTPESVSTVCLCGHWNIGVYSRILMLLVCYTCVHTCSFLGLVTPLHSTIFKASVCW

SEQ ID NO: 225891 - protein, 82 aa, Zea mays
  Clone ID: MRT4577_137603C.1.pep
MVHIVEHHDFMPEDFMVEEVTASSTPRATNLPVPGAAVAHSTRHHTPAQTFRASRAARGALSATRELLCHPPSSTASPGAMK

SEQ ID NO: 225892 - protein, 39 aa, Zea mays
  Clone ID: MRT4577_137604C.1.pep
YINYRYTLDHNELGSSTEKTSSSHSLRLVRVSYDNSCSL

SEQ ID NO: 225893 - protein, 111 aa, Zea mays
  unsure (1)..(111): unsure at all Xaa locations
  Clone ID: MRT4577_137605C.1.pep
CRVLSRSATALGVCTMAISYTAIVGXPRKVASFGEGRITXMRKTVGKPNVAACGSRXYGPDRVKYLGPLYGEPLSYLTGELPGYYGWDTAGLSAHPETFGKNRELEVIHSR

SEQ ID NO: 225894 - protein, 65 aa, Zea mays
  Clone ID: MRT4577_137606C.1.pep
LEQRQHLYDSITMSPEVSCQHILFIVNNMLNEGIPTFPTRRAGKQEIVSRKITMNPLIQVEIQKK

SEQ ID NO: 225895 - protein, 132 aa, Zea mays
  unsure (1)..(132): unsure at all Xaa locations
  Clone ID: MRT4577_137607C.1.pep
NHPPLLLLYHHHQSPPPDKDTAALARRGSARVSKTEYGRGYAAATVSRAQRRAASAARRSTARSSCGCPSCRGSSSPGPATAXRXGGGXXXGGAAAGAQRSSARRGSATAPGPSAAAGTASAAPASTSLLCY

SEQ ID NO: 225896 - protein, 236 aa, Zea mays
  Clone ID: MRT4577_137608C.1.pep
MDPETDSFFDFSQLPSPTPSSISRQPSNAGPSTIASPTNSALEEDQKPAKPSHEYERFKQQTGLPSGSINGLYQPFNGGQQMFSSTGLDEMSMMGVDGMDYGMNSGIGMSDMDMSTPSQPAYFYPSQSDEFVDPSAIQEEVPQVRVWPGMHQQQAAMAKAQAQAQQQRQQQLAQQQQRQAAQQQQQNRLHPNRRNGSSPISDARTEETIARVVNQIQNSQNGLLGLPGQQPGPSSP

SEQ ID NO: 225897 - protein, 169 aa, Zea mays
  Clone ID: MRT4577_137609C.1.pep
MASAAHRSMGSALLSLNLIMYVVVAVIAGWAINYSIDESRNSLKGATPPVRLFPIYFPIGNLATGFFVIFALVTGVVGISTSLAGLHEVSQGYPASMMSAAASALVTWTLTVLAMGLACKEISLSVRPGSLRTLEAFTIILTATQLLCAVSLHAGAHAVILETPIGGRV

SEQ ID NO: 225898 - protein, 174 aa, Zea mays
  unsure (1)..(174): unsure at all Xaa locations
  Clone ID: MRT4577_13760C.1.pep
MALGSASGAGNNNDFKALISCXYTSGSTADLTIDFVMLVSIHTPDLLKMNPLGKXPVLQTPDVPAFESNDIAHYVALLKDDTPXLLGLPVIEQDHPHQWMDYAATKLDPGXMNXLHPMSQYLHYAMTTAETAISSSKTALDALNTHLASHTYLFGHAATLTDIVYTCYLYHGIA

SEQ ID NO: 225899 - protein, 78 aa, Zea mays
  Clone ID: MRT4577_137610C.1.pep
MGADRFLSEALYFAVILWLSVMSWIIFTWVGDGGEDGRRGRKRRGSRGSPVFVGASGICDGTGPECSGGYGICGTCLD

SEQ ID NO: 225900 - protein, 86 aa, Zea mays
  Clone ID: MRT4577_137611C.1.pep
MGADRFLSVAEGGLGGEALYFAVILWLSVMSWIIFTWVGDGGEDGRRGRKRRGSRGSPVFVGASGICDGTGPECSGGYGICGTCLD

SEQ ID NO: 225901 - protein, 49 aa, Zea mays
  Clone ID: MRT4577_137612C.1.pep
RLCTFKILFSLWHNDLLHMLRLHRYNAYAVSFLTLSMLPLNNLIIYALV

SEQ ID NO: 225902 - protein, 63 aa, Zea mays
  unsure (1)..(63): unsure at all Xaa locations
  Clone ID: MRT4577_137613C.1.pep
NRSKKFKANQVIFRGTHWFRFWRLLXKKETHQQILDVCQAFEVVAMEVFVNHGWXSNARLECG

SEQ ID NO: 225903 - protein, 52 aa, Zea mays
  Clone ID: MRT4577_137614C.1.pep
LLSFKGQKRQLYGDNKITTHPLSGLGHFEKGSLLNRMREKGYPGLGYYSSFT

SEQ ID NO: 225904 - protein, 167 aa, Zea mays
  Clone ID: MRT4577_137615C.1.pep
MYPATTPYDTASGVGVAPVAGLFPVAGEAREWSSRLLDCFDDFDICCMTFWCPCITFGRTAEIVDHGMTSCGTSAALFALIQWLSGSQCTWAFSCTYRTRLRAQHGLPEAPCADFLVHLCCLHCALCQEYRELKARGYEPVLGWDFNAQRAAAGVAMCPPASQGMGR

SEQ ID NO: 225905 - protein, 40 aa, Zea mays
  Clone ID: MRT4577_137616C.1.pep
GLPTGPPRMLSQSLVRDPRAQAEQFHQQQQLVLHVPKFRN

SEQ ID NO: 225906 - protein, 542 aa, Zea mays
  Clone ID: MRT4577_137617C.1.pep
MYNRLKTMVNQVRNLGSTKWDDYEMVKVILRSLVFHSPTQVQLIRGDSRYKQMSSKEVIDKFVSFELMLKDSKHIVNSNQGATSTPDVQPVAFKPTKEKKEEPTPTSRFPIDASKLDNEKMTLIIKSFWHVLKQRKGKDYKPRSKRVCYRCGKSGHFIAKCPYTSDSDRDDDKKGKKEMTKKRYYNKKKGGEAHMGRKWDSDKSSTDSSFDEDAANIVINKGLLFPNVGHKCLMVKDSKKKKVHSRDTTKYTTSDDEGNSSDDNDDLTSLFANLSKDQKKKINELIETINEKDDILEYQEDLLIKENKKFVKLKDVYALEVEKCENLSKELNICNDSISCLITENVSLIYKIKELNACKPSTSTIEHVTVCTKCRDVNIDAMNDHLAMIKEQNDHINKLNAKIVEHELENENFKFARSMLYNGRRPSIKDVIGFQQGSQSNVKLNAPKNMLSNFVKGKAPMVQDREESSQASKAEHILGLTNVHFEKDRICSACQAGKQVGAHHPHKNIMMTERPLELLHMDLFGPIAYIIIGGRKSQTQET

SEQ ID NO: 225907 - protein, 75 aa, Zea mays
  Clone ID: MRT4577_137618C.1.pep
SDLGLGVILFLFFLNKRIWFALNGTFCAVGTAWDHFLGILRTILPVRTGCFYEPRALTGVCIALVDCGQNQKICF

SEQ ID NO: 225908 - protein, 124 aa, Zea mays
  Clone ID: MRT4577_137619C.1.pep
SDRPSPTPPFFFFTPPPNPRNGVNFFSFKNPTPSPKIQFFLSISKPQTCFLQTHKKNGQIYNKNPMPLQKKKKSPFVKNTIFNPYITPFIRQKHLPDPRFKPQNPNPARGAAHLSPKITLITTY

SEQ ID NO: 225909 - protein, 132 aa, Zea mays
  unsure (1)..(132): unsure at all Xaa locations
  Clone ID: MRT4577_13761C.1.pep
HSSIAMVYPLGQTYXVRQXLTGARXQQPFXQLQQQLLAHLTIHNILSQQQQHFLPSLNQLSTFNPFSYFQQXLLSFNPLSLANIAAYQQQLQLQHLLPSLNQLSIKNLFTYLLQQQLLSSNPLSLNNAATYL

SEQ ID NO: 225910 - protein, 69 aa, Zea mays
  Clone ID: MRT4577_137620C.1.pep
RVKSDPPFFLKNIFKGSPPLGKGKSFPWNCQKSPPVLDPPEKGKKSCLLVKRKDPISPPRSCPPPKDFL

SEQ ID NO: 225911 - protein, 503 aa, Zea mays
  unsure (1)..(503): unsure at all Xaa locations
  Clone ID: MRT4577_137621C.1.pep
MDAAAAGAVVSLNGKVGAEERKAQKSYWEEHSKNLTVEAMMLDSRAADLDKEERPEVLSLLPSYEGKSVLELGAGIGRFTGELAKTAGNVLALDFIESAIKKNESINGHYKNASFMCADVTSQDLVLQANSIDLIFSNWLLMYLSDEEVEQLVQRMVKWLKVGGYIFFRESCFHQSGDSKRKVNPTHYREPSFYTKVFKECHTFDQDGNSFELSLVTCKCIGAYVKNKKNQNQICWLWQKVHSTEDKGFQRFLDNVQYKASXGILRYERIFGEGYVSTGGVETTKEFVDKLDLKPGHKVLDVGCGIGGGDFYMAEKYDAHVVGIDLSINMVSFALERAIGRSCSVEFEVADCTTKTYPDNTFDVIYSRDTILHIHDKPSLFKSFFKWLKPGGKVLISDYCRSPGKPSEEFAAYIKQRGYDLHAVEAYGQMLKSAGFRDVIAEDRTDQFLGVLDKELAEFEKNKDDFLSDFTQEDYDDIVNGWKAKLQRSSAGEQRWGLFIATK

SEQ ID NO: 225912 - protein, 46 aa, Zea mays
  Clone ID: MRT4577_137622C.1.pep
LAYLALSWIGGQLAEREKTTKGDVGGAESLVSQSRRRSRCCCLSVK

SEQ ID NO: 225913 - protein, 245 aa, Zea mays
  Clone ID: MRT4577_137623C.1.pep
MLGTLPPSYLRWVAAELDYGDTAPWAGLARAVLDDPVYVDRVEWEHAHRFLRGDADGYDYAYDADGDGPLQEMAERFGWDLSDEEGWGRLDLRLLGTSYGGRIPRKGARTKQSNSNSNSSPGGAKKGGSLFGAAAGADPGGAVGKRDKRRERVRTRREEQVRTAKMDMLGVHAGVADGGVLGSSSARKQAQIRMASKEILGLGQSSRAGETLDEKRTPGKGGKGANPFPGRQAFLDKVRKLKGDD

SEQ ID NO: 225914 - protein, 106 aa, Zea mays
  unsure (1)..(106): unsure at all Xaa locations
  Clone ID: MRT4577_137624C.1.pep
ALNLALVLALSGANWXGDSLSALSRIFRDPRXVLQTMDPTLMKPCTCLHVTCDPDNRFSRLXVRNLNLSDHLGPDLGNLHHLKNLQLYKKNIQRTLPSELSNSKNL

SEQ ID NO: 225915 - protein, 156 aa, Zea mays
  Clone ID: MRT4577_137625C.1.pep
RIRGNQWSAHQDPSCRILHIMVDGRFSATSGQMEDLISFEPLTTMVHNERRRQQLIYTTPLATNLKLGAATDRPGHRAGCATRLCCTGRRKRMGEAPGPTSRRVGKWTEAPGTVCRYAGRQGWGWSLDAEPGCLDLDEHMHTRRSQEGKKWQQLDN

SEQ ID NO: 225916 - protein, 95 aa, Zea mays
  unsure (1)..(95): unsure at all Xaa locations
  Clone ID: MRT4577_137626C.1.pep
EKVLNNFCRKAFQDYKKNAFLEADKQCSNAXHNMEKKIRAACTAPGVKVSXLIQVLETALAEYETSCTGPAKWRMLAAFLRQCLEGPILDLCLKL

SEQ ID NO: 225917 - protein, 77 aa, Zea mays
  Clone ID: MRT4577_137627C.1.pep
VHNFTCKHYKTSQIIYMQIGSSLFIQFSVGKGFQVCSQYSVKNHKMLHSLQPPFIRDAFANVFSLCPNPLVDERLMI

SEQ ID NO: 225918 - protein, 374 aa, Zea mays
  Clone ID: MRT4577_137628C.1.pep
MPLRSEAGTAGEGDEEQRLRAALRHLQAEAGVLERLVYKHRNQHRGAAYFQYLLKVRRDLKLLLGAGLAEVLNAVFPVLACRKPANTILVPNKQTKKKPGANHSHHQRLLGVARLLSQMSEPVMKAAIQITFLLARSFFVDLCTAVLSLLARVRVLIQQMLLDVVSIYNKVTDLTERKQAVKISISGVQAFREYYPSMNDACTVLECVWIKDKFVLHEKVKDISQETQVENQKCCGPESTVQYETLALISEDMKILEETNLPDRQTDTALAEQPDKMIHCNDAGDSQKGRQLENESSARSVPDTLSTRKHLKPESRKRVAFVAVGNSKVTGAASEIKSSEVNKKQRLDMISPSNIQSGLYNKLLDCEFAEKSLL

SEQ ID NO: 225919 - protein, 132 aa, Zea mays
  Clone ID: MRT4577_137629C.1.pep
VVKSDAAPAACATKAYREEALPHSRNHDKPVVLKDLRWVGANLAATEETEWATRGHGGDGPCSGTMEAAHSRKGLCGNRRRDVAAIERASRDARCNDRTRERERQREEVRLVRPAASRTMGFAGRQRCHRRE

SEQ ID NO: 225920 - protein, 88 aa, Zea mays
  Clone ID: MRT4577_13762C.1.pep
MSALTLGEDDLNGKKVFVLADVNVPLDDAQKITDDTLIRAFVPTIKLLLEKGAKVILVRHLGPRKGVTPKYRLTPLVPRLSELLGVSV

SEQ ID NO: 225921 - protein, 137 aa, Zea mays
  unsure (1)..(137): unsure at all Xaa locations
  Clone ID: MRT4577_137630C.1.pep
MPFTRIALGSHQEADHPSALKAVIAEMISTLIMGLGVQGSSMGFSKLTAGGPATPTALIADAVAHAFLLFLAASVGANISRRHVNPAVTFGALVGGSITLLWTLLYXAAHLLGFTVACFLLLFSTGGQDTDTFRHDG

SEQ ID NO: 225922 - protein, 55 aa, Zea mays
  Clone ID: MRT4577_137631C.1.pep
FSVIRHSGGHQPSPIPPASAALVTASAHTRRSPHRRLFTAKGLPLFRLASGSRSA

SEQ ID NO: 225923 - protein, 57 aa, Zea mays
  Clone ID: MRT4577_137632C.1.pep
VVMISVRAYAPVVVHVVVVRTSSLIQGASPLSSSSSSRQMLLERAQGLAISHEDAWA

SEQ ID NO: 225924 - protein, 68 aa, Zea mays
  Clone ID: MRT4577_137633C.1.pep
RLGPLDEPVQVLLGRQRAADAELLRLLLNRGSSFIRTSCGTAPPLVGHSRGVASRARPELATSLLAFL

SEQ ID NO: 225925 - protein, 27 aa, Zea mays
  Clone ID: MRT4577_137634C.1.pep
PIIWHKHIIMINNLIRKRITRHGPDAG

SEQ ID NO: 225926 - protein, 38 aa, Zea mays
  Clone ID: MRT4577_137635C.1.pep
PHLSVARGSNVGLLRGPLGLDTVDACAPRESARYCRRT

SEQ ID NO: 225927 - protein, 63 aa, Zea mays
  unsure (1)..(63): unsure at all Xaa locations
  Clone ID: MRT4577_137636C.1.pep
SSQIPIHCPLLYNVVSGKTLAFPNLISLXHIPLSPSGXNKKKAXPISLPNKFSSLIGKLNPPF

SEQ ID NO: 225928 - protein, 70 aa, Zea mays
  Clone ID: MRT4577_137637C.1.pep
HVATVQAQLQSHKSIRSLPQSHLSPGAAMSSHRREITRLQTMQPKQPTKAREPHARALPAAAIGSAAILL

SEQ ID NO: 225929 - protein, 319 aa, Zea mays
  Clone ID: MRT4577_137638C.1.pep
MDLVVESVVHGRFPVRPSRFPLLPGSLPSTTVALSAAFSGCPCPPIVRRNAPAVVPFAKKKRNEYIEDPPDEEVADDFTDELEEDFDDAKEDEGDVMDDDEEYEDDYDFEDDFESDDEQDLYAGDGGAGGGISLAGAWWDKEALALAEQVSASFNDDLKIYAFKTAANLTIRVRIEKMSTRYGSPTIDDIEAYTIAYRAKLDEAESAGKIPKNISLEVSSPGVERVIRIPEELERFKERAMYVRYTTASDEATTPQEGDGVLTLISYDMDLRECTWGIADVKINRQQSGKGRPLSKKQREWRLQTPFESLKLVRLYSEC

SEQ ID NO: 225930 - protein, 72 aa, Zea mays
  Clone ID: MRT4577_137639C.1.pep
VGAHSSNAAEVRQRIDQIQLWQEGRKFYFCFRTNTPTKNIVPLYSYNPCHSIISTFFGSTSMTTTLSIPLKV

SEQ ID NO: 225931 - protein, 130 aa, Zea mays
  Clone ID: MRT4577_13763C.1.pep
MAKTLPPAFVYRISTADEWAEFQRTGATLGGFLDSSSGCIHLSDLNQVKMTLKNFFLGRNDLYLLQIDTFKLADGLIYELSDGDKYFPHFYGPGRSFAPLQLDTVVKADKIKFADNEFTCGLLDGSDLPS

SEQ ID NO: 225932 - protein, 71 aa, Zea mays
  Clone ID: MRT4577_137640C.1.pep
VASVSGVEVRLSRRAEGIGEQLDLRLIAVRACVWIGLRNGQGHHGPILAESSVRLQDWFCGCGIIWPIGSR

SEQ ID NO: 225933 - protein, 47 aa, Zea mays
  Clone ID: MRT4577_137641C.1.pep
IFPRHSSLSAPKFCPFARVNKIPRCIVWCDVSLSFLNMLELGTPCFA

SEQ ID NO: 225934 - protein, 271 aa, Zea mays
  unsure (1)..(271): unsure at all Xaa locations
  Clone ID: MRT4577_137642C.1.pep
MPMTIERDLHMATGNGETSYTKNSRIQEKVMFQIKPVLEEATRAAYSALLPRTMVVADLGCSSGPNTLRFVSEVIGIIARHCKEHDRRHDYPQLQFFLNDLPGNDFNNLFLLIQQFNKSMARNHKGEAAEALPPCYISGLSGSFYTRIFPSESVHLFHSLFSVHWHSQASEQLKDTKNKCLDIYITKNMPPSMVKLFQQQFEKDFSLFLKLRYEELVSGGQMGLTFIGRKHEDVFTREPNHLSGLLAQSLKSLXLMRSCGERKLESFYLPS

SEQ ID NO: 225935 - protein, 43 aa, Zea mays
  Clone ID: MRT4577_137643C.1.pep
LFYGQKPFGWRIPYMQNQKVESASVANKNPAYGIPVSVLEVDG

SEQ ID NO: 225936 - protein, 126 aa, Zea mays
  Clone ID: MRT4577_137644C.1.pep
MPEHSKNAGGDLMGNIMETIGENLPRQKSGGFNNGDGSSISEKAKKLFGGGENRKKSVHHGVGGGKSPDVLLGGNKKISSSGLGGATLGGVFFEGVDYHFLTILWFGLGLGMAVQFAWSIFSSRVP

SEQ ID NO: 225937 - protein, 109 aa, Zea mays
  Clone ID: MRT4577_137645C.1.pep
TTTGSSDLIFIYSRAEKNPIDTIRVLLVALALLAFAESATSTHTSGGCGCQPPAPFHLPPPEHLPPPGGGPPSVHLPPPVHLPTPEHLPPSVHVPPTVHLTSGRCHYPT

SEQ ID NO: 225938 - protein, 61 aa, Zea mays
  Clone ID: MRT4577_137646C.1.pep
ETPFEPQVLLLTPMLFSIVRSKCFPGLKPACISPAFFSGKKCAFFWYLRYFFWGGYIAAFP

SEQ ID NO: 225939 - protein, 129 aa, Zea mays
  unsure (1)..(129): unsure at all Xaa locations
  Clone ID: MRT4577_137647C.1.pep
MSSKIQVSAVRESVRTVKLQSEEKKRNFVETVELQIGLKNYDPQRDKRFSGSVRLPNIPRPKMSVCILGDALHCDQAKEIGMEYQSVDDVKKLNNDKEQIRKLRKKYDAFLRSEGLXISQFPRLLGTWS

SEQ ID NO: 225940 - protein, 150 aa, Zea mays
  Clone ID: MRT4577_137648C.1.pep
FKGRPTRPPTRPAWQDWSTGRVMASISGMLPTEITALRDGRLIHLPAKDLVNGDIVQVSLGNKLPADLRFVDVSSDLRLDRSVLTGESEPIQGTIEQTDSNFLESKNVGLQGTLCVGGSGTGVVIQTGDLTVFGRIAKLSSSGAPSMTLC

SEQ ID NO: 225941 - protein, 77 aa, Zea mays
  Clone ID: MRT4577_137649C.1.pep
MAALPMLWTGLVLLGLLGFPQTPAQGHDTVQPNFQQDKFLGRWYSAGLASNSSWFREKKELLFMCQTVVAPSTEGGL

SEQ ID NO: 225942 - protein, 37 aa, Zea mays
  Clone ID: MRT4577_13764C.1.pep
ACPKLTSRSPRLPPGLTVHSQSSVHTSRLVSSNLIAN

SEQ ID NO: 225943 - protein, 50 aa, Zea mays
  Clone ID: MRT4577_137650C.1.pep
LVSSYSVDHKSSWILFAAAAWQLPAALVFIASATCGALPASSARASSKST

SEQ ID NO: 225944 - protein, 51 aa, Zea mays
  Clone ID: MRT4577_137651C.1.pep
VPSSWLPQWRAYITTTAKKYSINYQNLIASKLLHSLLISEKHSRLLQKPLD

SEQ ID NO: 225945 - protein, 51 aa, Zea mays
  unsure (1)..(51): unsure at all Xaa locations
  Clone ID: MRT4577_137652C.1.pep
FYENNIKIIVIRYIIYSKSVGKSISVNTCGLPSVLDRVQNTSNYTPSVYXX

SEQ ID NO: 225946 - protein, 66 aa, Zea mays
  Clone ID: MRT4577_137653C.1.pep
ITDKLKNIDIDMLVDDTEFDSDKYDEKMAALFNDEFIKNMKMMKSLNLNTILKLTIKNLTNLETKV

SEQ ID NO: 225947 - protein, 205 aa, Zea mays
  unsure (1)..(205): unsure at all Xaa locations
  Clone ID: MRT4577_137654C.1.pep
MKPPLERNPTKKRHSWWWDSHISPKNSKWLAENLEEMDKQVKEMLQLIEEDGDSFAKKAQMYYQRRPMLVTHVENFYRMYRALAERYDNVTGELRKNIPTRLQTTGFLTSSEYGSELQRSPSPSPEPLQRSWTREQSPRAAGFDFFLSNRSNDSPPVYRKEPEDAASQSESDAKSADGEDDGIAYTLHPESLELEDEXHATNQKL

SEQ ID NO: 225948 - protein, 148 aa, Zea mays
  unsure (1)..(148): unsure at all Xaa locations
  Clone ID: MRT4577_137655C.1.pep
LKPKPARGGGGGGETGETGGGGKGGRGGGQGGRXGEKGAPGGKGETRKTPPKGQTRGKKGKAGGGKGGNKXNMKKKGRTGGFQRGKTGEPRGXGNGQTAGRGGRGIGGFCGSSPTDLXGPGGGGGAGGLRGPKGGKTGIPESGEKEGK

SEQ ID NO: 225949 - protein, 408 aa, Zea mays
  unsure (1)..(408): unsure at all Xaa locations
  Clone ID: MRT4577_137656C.1.pep
MKPPLERNPTKKRHSWWXWDSHISPKNSKWLAENLEEMDKQVKEMLQLIEEDGDSFAKKAQMYYQRRPMLVTHVENFYRMYRALAERYDNVTGELRKNIPTRLQTTGFLTSSEYGSELQRSPSPSPEPLQRSWTREQSPRAAGFDFFLSNRSNDSPPVYRKEPEDAASQSESDAKSADGEDDGIAYTLHQRVLELEDELNATNQKLQDANEKLEVLEEKSLRCHCDYKENGNGAQRTTEVSGKEGELEAEIVNLQEEADSARRRFEEALSERDGEISKLKQELAGASEKLQREKYANGVQVSELQRSVEHIRSELERVSEEKLLSENKIKELEAANAEADKYGHELTRAAEKISEEKFALEAEILTMRQNIEDLKSRIESLAREKSLLKSWFEDLEQVVGRGRGIFAD

SEQ ID NO: 225950 - protein, 73 aa, Zea mays
  Clone ID: MRT4577_137657C.1.pep
RQSNKKDHRLPAQNITLKGGRQPLVEGPPDLREDLGQLLYHHDFANAVYTGSLDRLTNTWAMDKWRLLTKESE

SEQ ID NO: 225951 - protein, 371 aa, Zea mays
  Clone ID: MRT4577_137658C.1.pep
MESLWKLTYLLEPASLALIATAISVAYASASRALDYGKEMERNLDFSEASITLDRSQALMIPLASSCSLLLMFYLFSSVSHLVTAFTAVASAMALFFCLSPYVTYLKMQFNLMDPFVSRCCSKPFTRLQGLLMLFCIATVLAWLVSGHWLLNNLLGISICIAFVSHVRLPNIKICALLLACLFVYDIFWVFFSERFFGANVMVSVATQKASNPVHTVANKLSLPGLQLITKKLELPVKLVFPRNLLGGIVPGSNPGDYMMLGLGDMAIPGMLLALVLFFDNRKFKDVNFPPDVSPPKRRNYVWYAVTGYGIGLVAALAAGILSQSPQPALLYLVPSTLGPVMYLSWLRNELWELWEGSGTILNEKAHLLEV

SEQ ID NO: 225952 - protein, 66 aa, Zea mays
  unsure (1)..(66): unsure at all Xaa locations
  Clone ID: MRT4577_137659C.1.pep
RXXRPSCRXXIIXIXALXTFXXRXXDYXXXIGXXRVAGXIIGXPXTLYDGCYSXQXXLFXNXXNRP

SEQ ID NO: 225953 - protein, 74 aa, Zea mays
  Clone ID: MRT4577_13765C.1.pep
MTKTTPPAFVYRISTADEWAEFQRTGATLGGDLDSSTGCIHLSDLNQVKMTLKNFFLGRNDLYLLQIDTFKILL

SEQ ID NO: 225954 - protein, 45 aa, Zea mays
  Clone ID: MRT4577_137660C.1.pep
LVTTNMLKSQETLGLQIRVFRWKNFGSRVNPNQLSNLRFNYPDPW

SEQ ID NO: 225955 - protein, 192 aa, Zea mays
  unsure (1)..(192): unsure at all Xaa locations
  Clone ID: MRT4577_137661C.1.pep
MESLWKLTYLLEPASLALIATAISVAYASASRALDYGKEMERNLDFSEASITLDRSQALMIPLASSCSLLLMFYLFSSVSHLVTAFTAVASAMALFFCLSPYVTYLKMQFNLMDPFVSRCCSKSFTRLQGLLMLFCIATVLAWLVSGHWLLNNLLGISICIAFVSHVRLPNIKICALLLACLXVMIFFWVSS

SEQ ID NO: 225956 - protein, 66 aa, Zea mays
  unsure (1)..(66): unsure at all Xaa locations
  Clone ID: MRT4577_137662C.1.pep
MESLWKLTYLLEPASLALIATAISVAYASASRALDYGKEMERNLDFSEASXTLDRSQALMIPLASS

SEQ ID NO: 225957 - protein, 117 aa, Zea mays
  Clone ID: MRT4577_137663C.1.pep
MCSSPARTRKKALNNRQWVADIRGVLTVQVLEEYVQVWDQVKGTILHHDLTDTYKWKLSQTGDYSSKSAYAAFFNGSIKFAPWKRIWKSWAPLRCKLFIWLVFKNRCWIADRLAKRE

SEQ ID NO: 225958 - protein, 350 aa, Zea mays
  Clone ID: MRT4577_137664C.1.pep
MESLWKLTYLLEPASLALIATAISVAYASASRALDYGKEMERNLDFSEASITLDRSQALMIPLASSCSLLLMFYLFSSVSHLVTAFTAVASAMALFFCLSPYVTYLKMQFNLMDPFVSRCCSKSFTRLQGLLMLFCIATVLAWLVSGHWLLNNLLGISICIAFVSHVRLPNIKICALLLACLFVYDIFWVFFSERFFGANVMVSVATQKASNPVHTVANKLSLPGLQLITKKLELPVKLVFPRNLLGGIVPGSNPGDYMMLGLGDMAIPGMLLALVLFFDNRKFKDVNFPPDVSPPKRRNYVWYAVTGYGIGLVAALAAGILSQSPQPALLYLVPSTLGPVMYSLRCTKN

SEQ ID NO: 225959 - protein, 69 aa, Zea mays
  Clone ID: MRT4577_137665C.1.pep
MSGSRSKKSWPEVEGLPSEVAKQKILADRPDVQVVVLPDGSFVTTDFNDKRVRVFVDNADNVAKVPKIG

SEQ ID NO: 225960 - protein, 115 aa, Zea mays
  Clone ID: MRT4577_137666C.1.pep
MSTPARKRLMRDFKRLQQDPPAGISGAPMDNNIMLWNAVIFGPDDTPWDGGTFKLTLQFTEDYPNKPPTVRFVSRMFHPNIYADGSICLDILQNQWSPIYDVAAILTSIQSLLCD

SEQ ID NO: 225961 - protein, 46 aa, Zea mays
  unsure (1)..(46): unsure at all Xaa locations
  Clone ID: MRT4577_137667C.1.pep
TXXHXHTQQSGXXPXRVIXQPLYTHLDHVIKATNSIRTTNKQTTTA

SEQ ID NO: 225962 - protein, 86 aa, Zea mays
  unsure (1)..(86): unsure at all Xaa locations
  Clone ID: MRT4577_137668C.1.pep
FRFPCGGSFVASGWAVCFWGFRALSLGLCGSLFSWGPLXWWRPLGPPGLVPAPLLCVLLLVPFPPGSPACLVLFPPRVPGWFGFLT

SEQ ID NO: 225963 - protein, 130 aa, Zea mays
  unsure (1)..(130): unsure at all Xaa locations
  Clone ID: MRT4577_137669C.1.pep
LDIRARTRITSSKSMLTLRNTKGEXELDETKSAPMAIFFFMXEFRKDYRXRHAIVKLVSLSAEAVDDISKAMLDDENVPYKTKEEKLFADDTKKIXDAYXNCNQGGDPTMCGDCDKYRYHANDHDDHWDE

SEQ ID NO: 225964 - protein, 130 aa, Zea mays
  Clone ID: MRT4577_13766C.1.pep
MAKTLPPAFVYRISTADEWAEFQRTGATLGGFLDSSSGCIHLSDLNQVKMTLKNFFLGRNDLYLLQIDTFKLADGLIYELSDSDKYFPHFYGPGRSFAPLQLDTVVKADKIKFADNEFTCGLLDGSDLPS

SEQ ID NO: 225965 - protein, 250 aa, Zea mays
  unsure (1)..(250): unsure at all Xaa locations
  Clone ID: MRT4577_137670C.1.pep
MAPPPELISDAVAEVFLRLPPDDPAGLLRASAVCKSWLRALTEPAFVRRYRDFHGTPLVLGFLHNPVNRRLARFVPTTAFRPPAAADHRTSVVLDCRHGRALLYDYRSSEFVVWDPVTGRERRMPDDVPDRYTNHVVLCAAGAGCDHSACSGGAFLMASAGGHVMDLVQADARLYSSETGVRRGPDGIYLDYNDGQFDEXAHTASRLIGPACLAGGTLYFVCQSGALLRYGFLGKQSLSLIKPPPGKFHG

SEQ ID NO: 225966 - protein, 85 aa, Zea mays
  unsure (1)..(85): unsure at all Xaa locations
  Clone ID: MRT4577_137671C.1.pep
SDAQSFYRKMSGTVDALARAVPGXLKIAVFXDIYXPLYDLARXPQSQGFGEGPXGCCGTCTVDTTVFVCNTKSVGTCTSAGSWIF

SEQ ID NO: 225967 - protein, 85 aa, Zea mays
  unsure (1)..(85): unsure at all Xaa locations
  Clone ID: MRT4577_137672C.1.pep
PARPHQPGPQEHQQAQGAHHQPXXRGPARXDKTPPPPDCSXQLGKKHNPPPAEWAGKDSVKQKPPLLGGWLGXXLSLPQGRLLFF

SEQ ID NO: 225968 - protein, 373 aa, Zea mays
  Clone ID: MRT4577_137673C.1.pep
MATMSAALAISLPSLTRVAVASTPSASSRIKRATQFRCCADSSSQEQEISGAPPAPPLDKSARSPPSSLLGISTSTWSAGVAGLGFLETGYLTYLKLTGSEAFCPITGAGCGDVLDSDYSVVFGIPLPIVGLVAYGLVTALSLQKNGKDLLQGSDDLDVRLILLLVATSMATASVYFLYILSTKFIGVSCSYCLLSAFLSFTLLFIRVKDIGFERIQKFAGIQLAVAVIIALALTNSYSSATTQLKGTDDFVLQPYETEISTESSPFAIALAKHLHSIGAKMYGAFWCSHCNEQKQMFGHEATKILDYVECFPNGAGKGKKMTAECAAAGLEGFPTWFINGKILSGDQELEVLAEASGFVGEGTEQPKGISQN

SEQ ID NO: 225969 - protein, 142 aa, Zea mays
  Clone ID: MRT4577_137674C.1.pep
MVMRGGKSSVKTMAVMLAVVGLVALQQTQRVQASVCCCLDLAVPVYYTCRGSSGTMSQCCPTCGGYVSVGGCRPPYVPISGYRTTTVNYCKVGCTASVCNKLIPSAVIGSGNEGKDAMERCTSGCHDLCTKSSTDIAKVHNA

SEQ ID NO: 225970 - protein, 215 aa, Zea mays
  Clone ID: MRT4577_137675C.1.pep
LGTSRPAGFKKKKKKKKKKKKKKKKKKPEKAGGRGDKEQGEEEFGQAKRGFSGDSMDKGRAPGGKQKAWRKKRKFEFGPQPANTKLSSKKKGRRVPVPGGNGKWRALPLETGNYSWGREVVTPKTRILHGVYNGSKNELGRTQTLGKKAIGQVDAAPFKQGDLPPYGVDIGRKKKTPAAKKDNAEGQKVEAPPGETKKSNLVPRKLEKRKEGRTL

SEQ ID NO: 225971 - protein, 93 aa, Zea mays
  Clone ID: MRT4577_137676C.1.pep
ACRLYGRRMLRRQGDEGGQELVEGLQKQNVLRRNAHGSASFWSHASNCLRPAACTCCAWRRKQAIDWMDPRPARNMIGKHHSLHGLQLQPPHR

SEQ ID NO: 225972 - protein, 56 aa, Zea mays
  Clone ID: MRT4577_137677C.1.pep
HKKSVHQQERSHQRDSEVTQLVVRTGPNSADRSKKRNMDERRSLPAEGCAPAWVHP

SEQ ID NO: 225973 - protein, 100 aa, Zea mays
  unsure (1)..(100): unsure at all Xaa locations
  Clone ID: MRT4577_137678C.1.pep
ALPYGGRFGCHLGREGKGRGGTGARSCRVLSLSRPSFVGRQRRDPILQLTTSCFXHGCDASILLDTAHSXKTEAPNLSVGGYEVIDAIKAHVESACPVVV

SEQ ID NO: 225974 - protein, 73 aa, Zea mays
  unsure (1)..(73): unsure at all Xaa locations
  Clone ID: MRT4577_137679C.1.pep
SNYSRXXIGDLXQDDDRSVARLIAHHSPCQSLHPHLLIKKIKKRVSSXTVGAQQVRGICKVNMVRLKFSAVSI

SEQ ID NO: 225975 - protein, 35 aa, Zea mays
  Clone ID: MRT4577_13767C.1.pep
RAAGGSPRLRWWWRTGRSRRLAAEVPWESLGAEEE

SEQ ID NO: 225976 - protein, 337 aa, Zea mays
  Clone ID: MRT4577_137680C.1.pep
MAFLNMEQQTWAFTFGILGNIISLMVFLSPLPTFYRVYRKKSTEGFQSTPYVVTLFSCMLWIFYALLKSGAELLVTINGVGCVIEAAYLAAYLVYAPKAARALTAKMLLGLNVGVFGLAALATMVVSSAGLRVRVLGWICVSVALSVFAAPLSIMRQVVRTKSVEFMPISLSFFLVLSAVIWFAYGALKRDVFVAFPNVLGFVFGVAQMALYMAYRNKEPAAVTVEVTVEEAKLPEHAKEVVVAAAAAEARASCGAEVHPIDIDIEATPTPVEEVHEPQVVVVVDVDVEPVTCAGAAEAAAGAGADASGVADGGVPGPMAPPEQLAIKPDMAISVEA

SEQ ID NO: 225977 - protein, 72 aa, Zea mays
  Clone ID: MRT4577_137681C.1.pep
NNKAIFYSNACFIIIFMLGPLLSTCGGVWPTSPGRWATASRAPPIEDNSEGRDGLLWWRDLARCHTGEVSIV

SEQ ID NO: 225978 - protein, 180 aa, Zea mays
  Clone ID: MRT4577_137682C.1.pep
METEEETTPKAKKRSQSLLGSLREAITKVRFLLSSSATRWMLLRSLARGGGGGGAPARRLSFDARPGLLDTIAASPDSSSCSSRTSRSASLGTATTRTLSRASSAASPEALTRASSSSGGRSPASSAGDDDVDQRAELFIANFYRQLRMERQVSLQLRYVRGNSWDRTPGATPSPASSRG

SEQ ID NO: 225979 - protein, 48 aa, Zea mays
  Clone ID: MRT4577_137683C.1.pep
VLMFSLQPPPPRAWVTISFAFIRLILAKLYPPFSSTFYIDLAQTFDPV

SEQ ID NO: 225980 - protein, 70 aa, Zea mays
  Clone ID: MRT4577_137684C.1.pep
RIRGQSLREIMNQEDDRNNMQRHRGRYPARVGMKRTITLASSRVLVPCFLPSIHAPPWLPFLQRFGQDGE

SEQ ID NO: 225981 - protein, 113 aa, Zea mays
  unsure (1)..(113): unsure at all Xaa locations
  Clone ID: MRT4577_137685C.1.pep
MAAKIWGLLMLLGLSVNAATETIFPQCLQASIAFVIAPYLSPASVFRYCENPXLQPYMIQQSKGSGILPXMXPLFLQQTSSLFQDLPLVHLLAYNIWELLLLQLGLTYFEANF

SEQ ID NO: 225982 - protein, 81 aa, Zea mays
  unsure (1)..(81): unsure at all Xaa locations
  Clone ID: MRT4577_137686C.1.pep
HLAMVTPVXIIXQEVIAYKTLDIEKVKTNQQQQQLQQFLXALSQLAMVAPAANLQQQQLRSSSPLDVAKAHTYGQQEMGNR

SEQ ID NO: 225983 - protein, 85 aa, Zea mays
  unsure (1)..(85): unsure at all Xaa locations
  Clone ID: MRT4577_137687C.1.pep
SCGGSRTGTPCPRTKHRPSPSSPGTPXRSCGTASPVIPXSTCRPHNRGTSPARRSAXLPPTPQKRRRAVGSSNRRPHVRRLHVVG

SEQ ID NO: 225984 - protein, 56 aa, Zea mays
  Clone ID: MRT4577_137688C.1.pep
HYSYLTWLWTTSMTCKRAAKSLPMHSNSQDSHSGYADTKSCVWTVRPACLGEDWIT

SEQ ID NO: 225985 - protein, 71 aa, Zea mays
  Clone ID: MRT4577_137689C.1.pep
SSCISFSKHDVAKVSPISFGVDKTPDPEYHAPIERNPGCKFPLHRLRPSLEGVHILPPMCSYIFPSEGPIP

SEQ ID NO: 225986 - protein, 47 aa, Zea mays
  Clone ID: MRT4577_13768C.1.pep
SNGWIPLTLRPSKTTITLINPRNYLNASNRDIILLSRPPSKDSRFFI

SEQ ID NO: 225987 - protein, 255 aa, Zea mays
  unsure (1)..(255): unsure at all Xaa locations
  Clone ID: MRT4577_137690C.1.pep
LGPSRPARAASRGGWALYELYRTTSRVAAPAVLLWRRLQGLEHPTRWPERLGRPSAARPRPGSPLVWFHAVSLGEGMAALPIVRHCVRLRPGLPVLFTTTTLSSSEVIMDLLPDGVIYQFAPLDCPTAIDSFIGYWKPSLVLLLESELWPNLIMSAAAKGIAVALLNARISLKSFNHWSMPLMFPLVSLMLSKLSLVVPLSTIQAVRFQLLHTPPGIIHXXAGDLKYVILRIHERVVNVYPXLLLILVPRHPERL

SEQ ID NO: 225988 - protein, 42 aa, Zea mays
  Clone ID: MRT4577_137691C.1.pep
PPKQIIRLHKFPFQRRPRRRRMECYMNNQKGFEVIRKQPEIG

SEQ ID NO: 225989 - protein, 177 aa, Zea mays
  unsure (1)..(177): unsure at all Xaa locations
  Clone ID: MRT4577_137692C.1.pep
MEYHDNQPTVLHKLDGQIHLRXSSYSECVRDRNIWPSVSSYERRFXTKNYXMTQRLLSPSMSASGGINVPLMPIPLCVNATAEKGGKNFMIKFMMGGVSYADSKTAAAPIKRAKLLIHNQDDMIKTDRVSESYKGIGDCFTRSINDEAVSSMWICNTANVIAYFPTQDLNFAFKDYF

SEQ ID NO: 225990 - protein, 316 aa, Zea mays
  unsure (1)..(316): unsure at all Xaa locations
  Clone ID: MRT4577_137693C.1.pep
MVFSVTKKETKPYEGQKPGTSGLRKKVTVFQQPHYLANFVQSTFNALPADQVKGATIVVSGDGRYFSKDAVQIIAKMAAANGVRRVWVGQDSLLSTPAVSAIIRERISADGAKATGAFILTASHNPGGPTEDFGIKYNMGNGGPAPESVTDKIFSNTKTVTEYLIAEDLPNVDISVIGVTSFTGPEGPFDVDVFDSATDYIKLMKTIFDFESIKKLLASPKFSFCFDGLHGVAGAYAKRMFVDELGASESSLLNCVPKEXFGGGHPDPNLTYAKELVDRXMGLGKTSNVEPPXEFGAAAXDGDADRNMXVLGKRFF

SEQ ID NO: 225991 - protein, 179 aa, Zea mays
  Clone ID: MRT4577_137694C.1.pep
MGTKMKKGILKPFRYISNMMDGKEPEMQIGLPTDVKHVAHIGWDGPGSTNSGSSNNNNAGGAPSWMKDYHSAPLDSSSFRSESGGTAAANPWASQEIVMDGASIGETSFRDTKSEAGGGDDSPPSPATRRTRRQHRSRGSATSSMDDTTGGEGGAEEKEKRKEKGKKGARKNRKKDKPA

SEQ ID NO: 225992 - protein, 233 aa, Zea mays
  Clone ID: MRT4577_137695C.1.pep
GTSRPAGSSISDLDSDDGPRVSQPRTNIAKLIHPPTPTMTDEQTAARRRSSSLAGATLPTKTDLKKHRRHRSDHIAEEGEESSSGADRSDSDSDSDDSDLDDMSADGLEDDEETGLTKRDRRRRRRRKRRNTLLDQRIVPDDTYTKEEKKLADQNLLKSMLVNGALIGLWYLFSISISVYNKWTFKEAKGDGETKNIFPFPLFTTCLAYDRPIHACVARSIPNTLLSTSTRFP

SEQ ID NO: 225993 - protein, 86 aa, Zea mays
  Clone ID: MRT4577_137696C.1.pep
MGTKMKKGILKPFRYISNMMDGKEPEMQIGLPTDVKHVAHIGWDGPGSTNSGRSNNNNAGGAPSWMKDYPLAPVDSSSFMSESGGT

SEQ ID NO: 225994 - protein, 87 aa, Zea mays
  Clone ID: MRT4577_137697C.1.pep
PTLVRFIRKSVCFMLCTLTSDCCIQNLTRLNRDRTERPQQTRAVSCINLEKFLSQLPRHHSGHTASHATMPESFAISWSADLLHLHG

SEQ ID NO: 225995 - protein, 79 aa, Zea mays
  Clone ID: MRT4577_137698C.1.pep
FSFKELNKPSFPSLQVTLIIPPRGRWVTLPCTVPVLMNSPVPLKSLSPGPDVRGLSESDWSLAQGLGITSQVDISVSRS

SEQ ID NO: 225996 - protein, 85 aa, Zea mays
  Clone ID: MRT4577_137699C.1.pep
CDRLWPISPLNICFRWLVKKCHFKFSVTPSGYSLSLLTCRAKATSLSTLVTFQQRFLRTPLLIIPLKPLPAPRNRPSTPNMAAES

SEQ ID NO: 225997 - protein, 130 aa, Zea mays
  Clone ID: MRT4577_13769C.1.pep
MTKTTPPAFVYRISTADEWAEFQRTGATLGGDLDSSTGCIHLSDLNQVKMTLKNFFLGRNDLYLLQIDTFKLADGLIYELSDGDNYFPHFYGPGRSFAPLQLDTVVKADKIEFADNDFTCGLLDGSYLPS

SEQ ID NO: 225998 - protein, 187 aa, Zea mays
  Clone ID: MRT4577_1376C.1.pep
TRVKQNRRKKTPNQSNRIGKKKERKINLLLGEAQVRACVRSSGAPGCAGRAIDRRWRRRRGTTGSASSAARGTTSSTPSRRPSPSPHPTTRPPSGSAATASPSASSPRSWSPAPRQRRRGRRPREEEQRGEPPWLGRPLRHSSTPRAPPACPASAAPTAPRPSPTTPRRAATILFSPRRTASRASSS

SEQ ID NO: 225999 - protein, 263 aa, Zea mays
  Clone ID: MRT4577_137700C.1.pep
MEESAEVIQHPTHWLIHTPAQTLQMIPPSSPFAIWGVDILGPFPKAVGGYRFLFVAIDKFTKWPEATPYGQYHPRSNDQAERENAEILRGLKTRTYDCLKKHGANWVNELPSVLWANRTTPSRATGETPFFLVYGVKACLPLEIIMGSPRVQSFDGSMQEQLRREDVDFIDERRWQAAIRNARYNLVLRRYHQRFVHSRELKVGDLILRRVLNREGLHKLSPSWEGLFKVTEICRPGCVRLARTERVPLPNPWNIEHLCKFYP

SEQ ID NO: 226000 - protein, 89 aa, Zea mays
  Clone ID: MRT4577_137701C.1.pep
ICSLLTLSWNLVSHPFHLKNLLSIAIIVLFRDYKQNWPANHHIDYCKQMHIVSYPGYHRSVQGQAWPALASSYMTAWQTLSLRFQRILH

SEQ ID NO: 226001 - protein, 81 aa, Zea mays
  unsure (1)..(81): unsure at all Xaa locations
  Clone ID: MRT4577_137702C.1.pep
PKHPXEEGVKKTEAPTQERKLETDVEIKASADKFHHMSAGKPHHVSKASPGNIQGCDLHEGDWGTVGSIVFWNYVHDGEAK

SEQ ID NO: 226002 - protein, 74 aa, Zea mays
  Clone ID: MRT4577_137703C.1.pep
VPHIHGNKMKSCLTWLCSSINRMANRCDCRYVRWWVPPAMRQNEKPDLRFAKKNLAFPLLEALIKQIPRLLANG

SEQ ID NO: 226003 - protein, 121 aa, Zea mays
  Clone ID: MRT4577_137704C.1.pep
RARRAAAITEEERRRNRMASNRLSARKSRMKQQQHVDDLTAVAERLRRENEAMRAGVGGVVRQSIELEQENRVLAAHARQLCATLLLRNSQLRLLGDVAGLPLDVPLVPDHLVQLYGMLEF

SEQ ID NO: 226004 - protein, 146 aa, Zea mays
  unsure (1)..(146): unsure at all Xaa locations
  Clone ID: MRT4577_137705C.1.pep
NSPTTTGERGEKKTGGAKTGKSGKEIPGGGPTAKGLGIWGPKGGLWEAGAXGPKGGMGFKGSMGXPGNWGPFGRGGTFPTWGGRLKNEKFWGERGGKAXQGKKGIPIKARGAMGGXIAWPKPGKGRGQKRTGGQRGRGGKKKQKPP

SEQ ID NO: 226005 - protein, 91 aa, Zea mays
  Clone ID: MRT4577_137706C.1.pep
CCSELHNRPTGGDKHLIQALRVGLIMQGISSAYHGWRLSELATSSSLSLKLFITYHSSSVCFVWPEFSVKPALIRWHAKHPKHCGAYVYIC

SEQ ID NO: 226006 - protein, 75 aa, Zea mays
  Clone ID: MRT4577_137707C.1.pep
GHHLKGQRRRLMPPPSPPSTSRVRRSTGPSLPPRTNLWHSSSSVAPTSPRKPSPSPGALQRLHLTVARALLHSPA

SEQ ID NO: 226007 - protein, 193 aa, Zea mays
  unsure (1)..(193): unsure at all Xaa locations
  Clone ID: MRT4577_137708C.1.pep
MSGFISSSPFQNTKRFPQIQSLAPGIARRSSGRFQLRRQLRRAITPNPCIVCRIRGYRCVRLVEGFVAARSVRRLDPRISGNRRISPRLRPAPSPPAPXPPGGAPPPSVSPPRRRPFLPPRRRRRWPAVAPASRAPAPARTPPRRLWPRPARPVRPRPPRPAQPRPPLRSPLPFLSSLFHGWEEEDEERKKKM

SEQ ID NO: 226008 - protein, 84 aa, Zea mays
  Clone ID: MRT4577_137709C.1.pep
HILLYFFLTHTFPHSRLILSKIRQPTYLILPTHLIPNSSHLSNNPHLTHIKSNNSTISLSTTHTTIYHNHNSIPQTPQNTLTSI

SEQ ID NO: 226009 - protein, 245 aa, Zea mays
  unsure (1)..(245): unsure at all Xaa locations
  Clone ID: MRT4577_13770C.1.pep
MAPPPTEEQLLRGSEETEVLRLSVDGGGHPSVCTDQPSAIGGPAAQTTEEPRDDQALVSTESDQFSLRAPELVSTQVDSDDQRDAQVMEEDSDDKEGSDDEEDTDEYDAQMVDEDSDEEEAGDEYYAQVIDKDSETNCPGKNYSKEEADEVVSRWLHSFNKAYHDCLNLRLEILARGDKNARLPSFPLKVLPVVTSLCIESNICYHREYITHDTSTTASFLGYSNPRTMLQIFSLRLSTMXSHPI

SEQ ID NO: 226010 - protein, 132 aa, Zea mays
  unsure (1)..(132): unsure at all Xaa locations
  Clone ID: MRT4577_137710C.1.pep
KGFSTPPVGKGASRRPIGERWPFGLIQCHWPLGRERPNVGRSGRRAKAPFASLNFDLKAFSHNPAHGSFVPLAFXPIAMTNXVNQRFLSFXVELLXRSXHQLSKTYLSYYYLIRVYVLYWCMNNTILCVFMF

SEQ ID NO: 226011 - protein, 96 aa, Zea mays
  Clone ID: MRT4577_137711C.1.pep
LLYLGFVHSLQPSSRDLGGMYPLTMIHLRVAPPLSGNFGLDMSFMVPVNRVGAFRLGQLARLGWASQSFLYFGVLLWLVKCNFGSVCIFPYCSYML

SEQ ID NO: 226012 - protein, 60 aa, Zea mays
  Clone ID: MRT4577_137712C.1.pep
VAEERAGTKPGGLMDPNSYSVDDESSYKYFAIILVDVAHTDIRNDSSISWLYNPVHKHSE

SEQ ID NO: 226013 - protein, 52 aa, Zea mays
  Clone ID: MRT4577_137713C.1.pep
VSSAFDANSSIHHTTSYSALNFSNYVLIVESWSTYSHLDIQSIETYGFLNCA

SEQ ID NO: 226014 - protein, 64 aa, Zea mays
  Clone ID: MRT4577_137714C.1.pep
DPNSVRSQNWGGLLSELYIYTPGYEVTALLIILINLHVRKQCMIYARQTKRRGGAIRKMGTLKT

SEQ ID NO: 226015 - protein, 95 aa, Zea mays
  Clone ID: MRT4577_137715C.1.pep
GPMYQAESLQWGPCYPCPLEAPRSTACNSAVSTSVWQYPERLVPRISAVGAKPVPFMPSVHISSNGLFLSSCESVATFRVANKSCHRQKLRQRLT

SEQ ID NO: 226016 - protein, 112 aa, Zea mays
  Clone ID: MRT4577_137716C.1.pep
RLFFPAAALGPDTAELVATKAKGLPRITLSLDRVAASALKDVIADFSLALYESYKTRQEHASREQERVSQLMENLDSERVCYPTITAYISTNLVLVLSFMLVLDEYSWVHNV

SEQ ID NO: 226017 - protein, 44 aa, Zea mays
  Clone ID: MRT4577_137717C.1.pep
GVQTRVLLLTLHQFEKNNTGAGYLKKIIPGGAIHASNNRKNQGA

SEQ ID NO: 226018 - protein, 57 aa, Zea mays
  Clone ID: MRT4577_137718C.1.pep
NFDIEDLKAQASLIHDDEPPEIKEDDDIPRNIEDLSSRNHLAKSSANECNSSQRAFA

SEQ ID NO: 226019 - protein, 162 aa, Zea mays
  unsure (1)..(162): unsure at all Xaa locations
  Clone ID: MRT4577_137719C.1.pep
MCVEGFEDAQIERPADFAMERVCENTVSIDFKQAKMVTAMGESWHNFVPAIRSGDWSDIGGRDYMEDPHVCIPNLAKNFGYNMVGXDEVISFYGVFDGHGGKDAAQYVRDNLPRVIVEDAAFPLELEKAVRRSFMQTDSQFAEKCSLQDGPSSGTTALTAMN

SEQ ID NO: 226020 - protein, 183 aa, Zea mays
  unsure (1)..(183): unsure at all Xaa locations
  Clone ID: MRT4577_13771C.1.pep
MPAWAEAALVLASPSPATASSTTSSCGARPRAAVGSVRLFCKGFPCSIRSKAGFQIHNYRTRMFKIKAKAESGDGYTRLAPLRFESPSGQLLIQILQSHPHLIPATVDQQLENLQSEKSAQSEEASKVPQDLLYKGXGPVRDISALPNQEDKLRNIHSADAFEMIQNHLNLIMGRKDSITARY

SEQ ID NO: 226021 - protein, 420 aa, Zea mays
  Clone ID: MRT4577_137720C.1.pep
MLAMGTEEWELYPCSYSGSQVIEYRPVSEDEDEDGDDDQNGADVAVSLDAVLPDDLLEKVLSLLPVASVIRSGSVCRRWHEIVHAQRHAWSKTVPEKPWYFMFTCSQDAVSGFAYDPSLRKWYGFDFPCIERSNWATSSSAGLVCLMDSDNRRSVLVCNPITKDWKRLPDAPAAGGRTADYSGLAFSVDRSTHRYTVAVARSSQVPSEYYQWEFSIHLYDSVSGTWATPFTGVLLGWRGGDECVICDGVLYYLVYSTGVVMNDSEHRHCLVMYDLDARHSSSSSSHTSLLSMAIPAPCALTCGRLMNLSERLVLVGGIGKQDRPGVIKGIGIWELRRKEWHEVARMPHRYFQGFGEFDDVFASCGARDLIYIQSYGSPALLTFEMNHRSWRWSAKSPVSKRFPLQLFTGFSFEPRLDIAL

SEQ ID NO: 226022 - protein, 131 aa, Zea mays
  Clone ID: MRT4577_137721C.1.pep
FQREERRERNQQQIPHPPPPSLPFPAPDRNRELARDIPANLLLRFQARPGLGRAPLLLQSFFTGTCGGSSSRIAPPPSSSSWRGRATEAGRKKKSSAAANRTCAWRDSRTRRSRGRRISRWRESVKTQWSL

SEQ ID NO: 226023 - protein, 161 aa, Zea mays
  unsure (1)..(161): unsure at all Xaa locations
  Clone ID: MRT4577_137722C.1.pep
MCVEGFEDAQIERPADFAMERVCENTVSIDFKQTKMVAGIGESWHNFVPAIRSGDWSDIGGRDYMEDAHVCIPNLAKNFGYNMVDDEVISFYGVFDGHGGKDAAQYVRDNLPXVIVEDAAFSLELERXVRKSFVXTDSQFAEKCSVQXGLSSGTLHLQQMI

SEQ ID NO: 226024 - protein, 100 aa, Zea mays
  Clone ID: MRT4577_137723C.1.pep
GRECRPLLPRRRWRRLHLCVIQGATVDRAVPRVHTYERQGKARELARRRARAIDGAHDVRYGPALPVPPLSFSSYSPGAPPGFMHAALSAQSPSLSTARA

SEQ ID NO: 226025 - protein, 96 aa, Zea mays
  Clone ID: MRT4577_137724C.1.pep
EKKLIFSGVMRSPRGESVYFVWQVVVSPVQIVELYKGKENRVVLPDGSLTRSTQLVLAMGFTIHPGHAGFRHIRRGGGFDGVLPVGGSRRRSLSWG

SEQ ID NO: 226026 - protein, 124 aa, Zea mays
  Clone ID: MRT4577_137725C.1.pep
MAPAKRKRASAAAAAAAAAAAKWKVGDLVLAKMKGFPAWPAMISEPEQWKMPSTKKKPLVYFYGTKQIAFCNYADLEAFTEEKKRSLLAKRHGKGADFLRAVDEILEVYDSLKEEGSNKDDLAA

SEQ ID NO: 226027 - protein, 62 aa, Zea mays
  Clone ID: MRT4577_137726C.1.pep
VTRGIFSSTIDDLALVKHVVEGYSFPLLLAEEIFHMPLGIRHMLTLYQDMSRRRRAALASRS

SEQ ID NO: 226028 - protein, 25 aa, Zea mays
  Clone ID: MRT4577_137727C.1.pep
SLWFLSYRMFGLLGVICGRHFKIPP

SEQ ID NO: 226029 - protein, 44 aa, Zea mays
  Clone ID: MRT4577_137728C.1.pep
EVFLQGSSGRMWKVKRVNTLFLRKNHTGLNFCESCSHSLLQLRA

SEQ ID NO: 226030 - protein, 97 aa, Zea mays
  Clone ID: MRT4577_137729C.1.pep
PTRPPGVLSKYSSFLNLLQASCAYRTFHKYTHHQPTHHLTQTQHLLRSPRVKDLHKIRAPPDANAERMAHRLQHLNRIRPFLLNRKLFFSGTLNTTT

SEQ ID NO: 226031 - protein, 400 aa, Zea mays
  Clone ID: MRT4577_13772C.1.pep
MPAWAEAALVLASPSPATASSTTSSCGARPRAAVGSVRLFCKGFPCSIRSKAGFQIHNYRTRMFKIKAKAESGDGYTRLAPLRFESPSGQLLIQILQSHPHLIPATVDQQLENLQSEKSAQSEEASKVPQDLLYKRIAEVKEKERQNALEEIIYCWVTYRFMENDIYMTPALSPGGGPVRDISALPNQEDKLRNIHSADAFEMIQNHLNLIMGEKIASPPDTVVEISNLNLGKLYAASIMYGYFLKRVDERFQLEKTMKTLPPKPNQQIVFENLQPNPFWDMESLVQITPDGEEISLDDEKSNPNKLRSYVSQLDADTLQRYATIRSKEAVSLIEKQTQALFGRPDIKVLDDGSVNAKDGRMITITFTELNHLVLEAVAFGSFLWEAESYVESKYHFVNS

SEQ ID NO: 226032 - protein, 76 aa, Zea mays
  unsure (1)..(76): unsure at all Xaa locations
  Clone ID: MRT4577_137730C.1.pep
LFIFCEPSGSXXLRPTDLHPHERITNSQCCKNPRPTRAATSDHKPHAVRFTLMKATPPCKLPYTHQQHWLELQSPT

SEQ ID NO: 226033 - protein, 132 aa, Zea mays
  unsure (1)..(132): unsure at all Xaa locations
  Clone ID: MRT4577_137731C.1.pep
VALGLSSFRCWGWFALVFCAVFWLGGSLLSWVWRLLLAPGCFACASWWAWVGAACGLXPPPVSLSXAFGAGVVGXXASSGCFWAWWAARFSXWAAPGSLAVPGXXLVGFLSSPFFVSXXXRVCPXXLGLPRP

SEQ ID NO: 226034 - protein, 117 aa, Zea mays
  unsure (1)..(117): unsure at all Xaa locations
  Clone ID: MRT4577_137732C.1.pep
KDVNLDELPYDPADRRRITDDPGLKLQDQIRRRYLVKGPHRPQPSFKYXKKIIVGKPRRFNPAWFDEYSWIEYSEKVDRAFCLYCYLFRDCIEGQAGNDAFVTKGFSSWNKKDRLDV

SEQ ID NO: 226035 - protein, 93 aa, Zea mays
  Clone ID: MRT4577_137733C.1.pep
VLVVYVWRSSNYNCALVTIHVRMLLKSNVRYCMLLDWQLSELLHKLIHIHNIVPDLSLDRHLSCQTNCDDTQHPVDIINCVNYALNLPSYDVL

SEQ ID NO: 226036 - protein, 64 aa, Zea mays
  Clone ID: MRT4577_137734C.1.pep
LQSKRCVPLLPFHTIYKDGNMNARPSRSWNPTKHLMAMTVASVLYFLGKPRHVPHRYSTCDFPN

SEQ ID NO: 226037 - protein, 86 aa, Zea mays
  unsure (1)..(86): unsure at all Xaa locations
  Clone ID: MRT4577_137735C.1.pep
IINLRACCMHRKKKRGGGGGGGXXXXXXVQKSIHIFRCLVLPFFFCSKSIKKSITGGIVHNNKAPFSLDGAGYLTAFLTIFLRAGT

SEQ ID NO: 226038 - protein, 56 aa, Zea mays
  Clone ID: MRT4577_137736C.1.pep
SYYPAAGLSFFWGVCEQKNDYACMKHAIICKVASGHMQEKNKEEKWLLRRSWMPGP

SEQ ID NO: 226039 - protein, 267 aa, Zea mays
  unsure (1)..(267): unsure at all Xaa locations
  Clone ID: MRT4577_137737C.1.pep
AAVLSSSAEESPVKPLRLWVVGYAAQCLVHVGLVCADTRGETRGARRSAYDCASXCAGTDSSDADSEDDERGLGRSSYTGRGESMNTLISFLXDAIGCYCLSSYGDGAELAALPCRHHFHWSRITTWCFAVFCVAVACLLGIALCCCLPCVIAILYALAGQEGASDADISVLLRYRYSDPSEDGEKGVDEGLMIPILNNSGMSTSERILLREDAECCICLSSYEDGAELSALPCNHHFHWPCITKWLRMNATCPLCKYNILKGSDSA

SEQ ID NO: 226040 - protein, 93 aa, Zea mays
  Clone ID: MRT4577_137738C.1.pep
ITRTPQTEEKHNTNTLHTTTFLLKKQMGNNKNHTNEDKPPRLRKTTPCSNKKTLPQHAPPINADSYSSNSPIPLHTIHRQNHRHQHLKLLQPP

SEQ ID NO: 226041 - protein, 134 aa, Zea mays
  Clone ID: MRT4577_137739C.1.pep
EKSTPRKATTRCLTQRREPPCRRTSRFRSLWTMCLLISDLRLLATLSVHTSSAPVQASYLRAHPQSDIGPGVHAGPAGMKNASRIDTPNGVWAGFEVVSATATPCAMFILSPACYIVEQDGYRGVYKGERRQVI

SEQ ID NO: 226042 - protein, 120 aa, Zea mays
  unsure (1)..(120): unsure at all Xaa locations
  Clone ID: MRT4577_13773C.1.pep
VYKVFFRAHXXPHSYTLCSKGQTENPPFCPLYISPRRALNKHRQKQPPSQNLLGGHPKPPSFPLPRETPFKNIRKKTAPPILKLNTKAPPIFKGIPPFKKREKPPPGPLPFFFLPKPKPP

SEQ ID NO: 226043 - protein, 347 aa, Zea mays
  Clone ID: MRT4577_137740C.1.pep
MGKKIRSTDGTSTPARSMNQAVSLREETSGRTRVDDASLLRVKHLQRLAAWAGPEAGVRPIGALLGRRLAASAEAAGVPLNAATFLCQRCETILKPGFNCTVRIRNKRNKAKRRKKSNCCQNSVSYACHFCGDQNLILGSGKGVVQSLLLSRGHATMNSSHIIVRGNGSNTRAHDKKEVLELSQAAILQVESSSLLRQSTTESDEHGERLNCNLDEQMRETSHIFPEKVRICEATLQAELAPGSSFVTPQKMKPPVVTVAKDSAGLLKTGSGMISGSAIDALSGSSKSASNGSRNNVKYAARDSSQVSGSSRKRARKGWTTLKQMAEKDELERKEKMGNFVIPFFMQ

SEQ ID NO: 226044 - protein, 82 aa, Zea mays
  Clone ID: MRT4577_137741C.1.pep
LKYRPSMIAPVCENPTLQPYRLQQAIAASIIPLSPSFQQSPALSLVQSLVQTTAAHHLQQLVLPVINQVALANRSTYSQQQQ

SEQ ID NO: 226045 - protein, 45 aa, Zea mays
  Clone ID: MRT4577_137742C.1.pep
LPQSCVVISDELPDTSQEFMPLGSDAHDPPSCPLCNSMTTGHVCL

SEQ ID NO: 226046 - protein, 90 aa, Zea mays
  Clone ID: MRT4577_137743C.1.pep
DPTTLSLTHAYCGTPTRRATLKPAHTKHNTGARPNQPDPPNQRPNTKKQSPAHTGQTQGGNPPGKTPKKISQTQGPAPIPPRAPRSNPLH

SEQ ID NO: 226047 - protein, 42 aa, Zea mays
  Clone ID: MRT4577_137744C.1.pep
LIHHQTHEIEAMPTLSGEGYEVMLEDAGGFYDNMADAPAGVN

SEQ ID NO: 226048 - protein, 129 aa, Zea mays
  unsure (1)..(129): unsure at all Xaa locations
  Clone ID: MRT4577_137745C.1.pep
MTVDSIKTNDMDTTVEESETIRYDYRKALLATNACARXAEADKDLCSLQTIXTKKNNDELYIKLGSDNDKKKENAVLHDAAHKPLSNKELLQPDERERTYGCRASXRGQGHTPGLRGGYGRRYSAPPSA

SEQ ID NO: 226049 - protein, 105 aa, Zea mays
  Clone ID: MRT4577_137746C.1.pep
SLFTRSCIANNGRLCRLYLHTHTTHRCTTQSLCTSRHLMHGLVAYHVSFDPFVFSWPSILPPHWGSYHLKPHTNQPFSASPPYNRHPEKIPPRTKICTRIILVLY

SEQ ID NO: 226050 - protein, 54 aa, Zea mays
  Clone ID: MRT4577_137747C.1.pep
WIGGVSSDSTVSMPARLGRRSFKYIHTSHTALRTVHCNVIILTQSTCAWNVVHI

SEQ ID NO: 226051 - protein, 100 aa, Zea mays
  Clone ID: MRT4577_137748C.1.pep
GQKNPLKKKKFHNSFSGVVGSPYFSGPKNKSLFSKTKKNLKPLKGRPFTGQTGSKNFKHFRIKNSRPQPWKGGGEHKTRNGWSPPFNPQTKTQKLAPHSP

SEQ ID NO: 226052 - protein, 35 aa, Zea mays
  Clone ID: MRT4577_137749C.1.pep
WIVSRNCGCCTLRRDPAVKKRSNQRGQAKVGGTIL

SEQ ID NO: 226053 - protein, 84 aa, Zea mays
  Clone ID: MRT4577_13774C.1.pep
ILVTGSSWIDHLPLCWRLVQRLILYMFKCTRDGLVGIGPQGTGVRSSGLQACACQSSCTWAANCRFLSTSSTEGLCAQASAHAC

SEQ ID NO: 226054 - protein, 67 aa, Zea mays
  Clone ID: MRT4577_137750C.1.pep
LHGVQRDFVRDPLNARVEVRNVFPCDRHVRFDVYLAVDHLIGRPIGPASGTGAMHTNTHTHTQKISP

SEQ ID NO: 226055 - protein, 46 aa, Zea mays
  Clone ID: MRT4577_137751C.1.pep
SSHLSTAQIPKAARSLGSTTAYSWTRTGRRTTRLTTRPRTSVRTRG

SEQ ID NO: 226056 - protein, 63 aa, Zea mays
  Clone ID: MRT4577_137752C.1.pep
CACCLGRPGWFAFFRSYVVHSLYIRSFFPLLSSMEWLAMDERGVCSPSIQFALSGFLAFDFLL

SEQ ID NO: 226057 - protein, 107 aa, Zea mays
  Clone ID: MRT4577_137753C.1.pep
RDVTDAHLGYPDGVCKNGTVGPCVAQDAVAVVMVSVSVKEVRNETSDNGRRSCCNNHDGRQGAGVQNHRIWWGWGRRVRQRRRCGTAARRHPVGMRPLRRVPRGEAG

SEQ ID NO: 226058 - protein, 44 aa, Zea mays
  Clone ID: MRT4577_137754C.1.pep
APARHEGRPPKKKSPAPGASLDRCPWWPRVRGPLFCGPVQFRKL

SEQ ID NO: 226059 - protein, 136 aa, Zea mays
  Clone ID: MRT4577_137755C.1.pep
RDPGLHRTACHWSLHSAASNTACHRHRASSRVACVENPGVRMALSNTASPWSPGYSDEWDQRVFGLDPDRVLGVHLVLVQAVHDGEGVPVVEQVLDGAVQRFLVASEVVDGHPVSALAVFRSGGHLEQEALVTVGW

SEQ ID NO: 226060 - protein, 386 aa, Zea mays
  Clone ID: MRT4577_137756C.1.pep
YKKLGQSKVSDPSECGSTTAATAESESHRKWREMKRNGFLSSSHGNAVVPRPRGRPPKRKKDDEFKRSTSTQHGQANKSVKVAAPSGLLSGLNPGIINHVRNSKQVYSIIKAMVHSERLENEKQPAFTSQTGGRGREASEGIQDEKYGAGFKKCHMLMKDNNAVFHQALPTTSQFLAQDGDRLKLQLSSAVTMSSDRACSTSADDPTTNHDYMTVLSVKAATVASQWLELLHQDIRGRLAALKRSRKRVRNALHTELPYLISTEFSSNQENESSIANTCDAGCTEKAVSEAHVARWRSLFVQMDRALQEEGKQLENRLKQVQEMQSNCDKGLKHMSCEAPLLGPIPELWKLKNPDISESEWAVQAAAASIYSTCNMAMRTENVPCF

SEQ ID NO: 226061 - protein, 57 aa, Zea mays
  unsure (1)..(57): unsure at all Xaa locations
  Clone ID: MRT4577_137757C.1.pep
SENVHTIAVTKMVSRRAVXGFGAILLILLSIVGKVVPFIASIPDVMVAALLCFMWAM

SEQ ID NO: 226062 - protein, 78 aa, Zea mays
  Clone ID: MRT4577_137758C.1.pep
QKFCPPSCESIQKGSPSLFPYELFEILWAHAQVVETFAKFALLMNLKRGPKGEKFKPGVPKSLEGAFLLNQPHPGEHY

SEQ ID NO: 226063 - protein, 88 aa, Zea mays
  Clone ID: MRT4577_137759C.1.pep
SGSVQGALITHSPSNQDHCRCCLEGRHADTSLILRPHLSFFLMQCYTSGFGYVWFMLRKRSCQNCVCKPRLAWGLVLYGACLRKCVIR

SEQ ID NO: 226064 - protein, 82 aa, Zea mays
  unsure (1)..(82): unsure at all Xaa locations
  Clone ID: MRT4577_13775C.1.pep
GRRAAGHGHILHEDVGHAGDLLLMLELAVALLFXRVGPAGRAETSSAPWQSQKMTFWCLDHVERERRPTRRLSRDTGGDTGR

SEQ ID NO: 226065 - protein, 108 aa, Zea mays
  Clone ID: MRT4577_137760C.1.pep
PQIFFFFFWKKDKSLHFSNQTHHKRFKGVRTHLVVLLITSKAMDIHRSTYARTQPAYVHTYAGGSHVRAVYPSSDGRPCGAGPPPPGTCPSTKVRTCESVRRRRGSAR

SEQ ID NO: 226066 - protein, 58 aa, Zea mays
  Clone ID: MRT4577_137761C.1.pep
LVFCRHLLAFLVWGGPSVFCLHSWYSSRGLVLWLVGGVGSSCGVLPADGFTTLVKSVS

SEQ ID NO: 226067 - protein, 105 aa, Zea mays
  unsure (1)..(105): unsure at all Xaa locations
  Clone ID: MRT4577_137762C.1.pep
LALANRRMWRTVHLLCTFDAVRWRYPCVILPXSKVPKHDNRVVLMGLPDRGMLLDSSASPSGAEALVEGVVVLVPAKAPYETTVLSIQRSHLDTPSRKRERRRSS

SEQ ID NO: 226068 - protein, 85 aa, Zea mays
  Clone ID: MRT4577_137763C.1.pep
KSLHFRVLDVGKSVVAGLSTGDADHGVLSGLHGVRLHDLSLVVTEGTVVNATATEVLDRKDGCSADLLAAASRRLRRTTSSDPVC

SEQ ID NO: 226069 - protein, 90 aa, Zea mays
  unsure (1)..(90): unsure at all Xaa locations
  Clone ID: MRT4577_137764C.1.pep
LRFLPGKQLLQLVHLQIFLFFVFLFVNRKITMLSTSSGSNNKKSKKERRFSQQTLYEQFIADASSPXPKPKASNPPKRSLSNSAPPTYEA

SEQ ID NO: 226070 - protein, 109 aa, Zea mays
  Clone ID: MRT4577_137765C.1.pep
VIGLESPTYSDSLEWERQKQLAALPGDEADALAHEPGCGLSHVDAGAGEVMTAAAKAKSHWYVCSSPLGSQIQRNGSGGAPSGDPPVHLPLPLPIAHPRRRWGRGVPPF

SEQ ID NO: 226071 - protein, 148 aa, Zea mays
  Clone ID: MRT4577_137766C.1.pep
MPANHVASFHPWQSRSLYALPSMAADPCAPRFFPYAPSAPFHPWPRILDVEIRELKREISRVRLTELEREQGLMKQQGRMRGGDGGGGWGGGEHGRAFLASLSRGIDSITMFGGPAAADRRRKKSGGRSSQCSDGKTRRRQKASFAYD

SEQ ID NO: 226072 - protein, 48 aa, Zea mays
  Clone ID: MRT4577_137767C.1.pep
FVNTFVLCYRFLFLLMVLCRVVRHLYRMRFSFKFGTMACPVHWWSNVK

SEQ ID NO: 226073 - protein, 94 aa, Zea mays
  Clone ID: MRT4577_137768C.1.pep
RCCRHSEAATLNVGVILNLQSLVGKMARTSILMAMEDFYAVHRNYTTKLVLHIRDSSADSVQAAFTPNPNKLGKGEATSIHQLLKIPSTDLCLL

SEQ ID NO: 226074 - protein, 62 aa, Zea mays
  Clone ID: MRT4577_137769C.1.pep
YSPHQSHISYHVQQYIYSSLPFMKTTHKPYHHTLFLQCTNSAQHYHFHYPDYCNKSLEQVSQ

SEQ ID NO: 226075 - protein, 106 aa, Zea mays
  unsure (1)..(106): unsure at all Xaa locations
  Clone ID: MRT4577_13776C.1.pep
RVRSGVVRDVGVNNXVGRRTGLRRHGIREESKGRHPHRAIERGARVDSSEHADDGHGWWRRQGLKRYGDNLDTAEHERSKSVATLLRVEGGERGGRARCSHGEQVS

SEQ ID NO: 226076 - protein, 63 aa, Zea mays
  Clone ID: MRT4577_137770C.1.pep
MYKKGSNILLFENQCKLVPSMDCFFFWYKLQRCKIVRKVVLPRKGCCQYNKEMVKIHTFFLVC

SEQ ID NO: 226077 - protein, 131 aa, Zea mays
  Clone ID: MRT4577_137771C.1.pep
MRWKLNSSVYKRVPSRETAMEPDVETPMRMTDGGGSGAGPSWRMSLPHVCVATLTSFLFGYHSGVVNEPLEVISADLGFAGNTLAEGLVVSICLGGAFVGCLFSGSIADGIGRRRAFQLSALPMIIGAAIR

SEQ ID NO: 226078 - protein, 205 aa, Zea mays
  Clone ID: MRT4577_137772C.1.pep
MELKSLANPFPWASPSPICRRPPDPKKKIRPARRSRAPYLKATCALSRRRAVSDMAVVGALALSTPTPARAEQPDVTRYRKLGSGVILEDVVEGEGPEAREGDLVQFNYVCRRANGYFVHSTVDQFSGESRPVTLALGGEEMIRGLRDVLIGMKSGGKRRALIPPEAGYVSETLKPIPEEFGPRRSLLSHAKEPLVFEVQLLKVL

SEQ ID NO: 226079 - protein, 114 aa, Zea mays
  unsure (1)..(114): unsure at all Xaa locations
  Clone ID: MRT4577_137773C.1.pep
GFSIPPEKIAPFLKPANLKVESXWRALFAKLLKKRNFEDLILSLGSGAEAAPVAVSAPLGGSPPYGAPAVXXKKEKANKEFGEEIVFSLFDLEVPLPHPLANFTCSVKDYLVLG

SEQ ID NO: 226080 - protein, 220 aa, Zea mays
  Clone ID: MRT4577_137774C.1.pep
LDKIELIQSELGLPNNFKSNMIPRYPDFFSIRDVKGLDHLCLENWDSSLAVTIREEKMNFEGFQIGCRGIPKDGNVLGPFAFKLKYPTGFRPNRKYLEEVVRWQKMAFPSPYLNARRVESATPQSRKRAIAVLHEILSLTMERRLTSDKLDIFHNEYRLPCKLLLCLVKNHGIFYITNKRARSTVFLKEAYENSDLIYKCPLLKFHDQFASLIGRPSDTM

SEQ ID NO: 226081 - protein, 78 aa, Zea mays
  unsure (1)..(78): unsure at all Xaa locations
  Clone ID: MRT4577_137775C.1.pep
MRVPLGAPALTALAAIAXTFTHTERCCVCQPPTATNIPPTGHEPPCVHTATTVHIIPSVHLATHGHLPETAHVRGDCT

SEQ ID NO: 226082 - protein, 46 aa, Zea mays
  Clone ID: MRT4577_137776C.1.pep
FFRAFSTQKRFLGAISLLKKKKKKKKKKKKKKKKKKKKKKKKKKPH

SEQ ID NO: 226083 - protein, 47 aa, Zea mays
  Clone ID: MRT4577_137777C.1.pep
YHMRPATFSIVRLELEFSKSNELHMVHVLRVSALMLRVVFPPMNQIP

SEQ ID NO: 226084 - protein, 55 aa, Zea mays
  Clone ID: MRT4577_137778C.1.pep
PTPTSLPILFFFHCSYSYVPGIIQQYYNSLQECASYKKYYCYLLNPPPLCLVIST

SEQ ID NO: 226085 - protein, 36 aa, Zea mays
  Clone ID: MRT4577_137779C.1.pep
EQFESCVPRSIGRRTLGQAGDARYDASNRTGKRRVP

SEQ ID NO: 226086 - protein, 121 aa, Zea mays
  Clone ID: MRT4577_13777C.1.pep
MTRGVNSAGTSRYDDDLENQWGFFSWCEYIFTVIISSVLLIGASVLTLFWVIYYRDGFAWSENPKIQFNLHPVMMVIGFITLSGFSILLYRLCRCLKHIYAKLAHSLFHTLAIPCIAIGFL

SEQ ID NO: 226087 - protein, 98 aa, Zea mays
  Clone ID: MRT4577_137780C.1.pep
VSAGGWAFPWGRAIPTRCWCPVRRSWWERTPRLLVVSPLRALVARLRVSPQPPQFPYSVSPPPPPGPFPPFGLALPLCFACALPRRFACSCFCVKHFQ

SEQ ID NO: 226088 - protein, 108 aa, Zea mays
  unsure (1)..(108): unsure at all Xaa locations
  Clone ID: MRT4577_137781C.1.pep
MCLVNFKAYHEIIGLETREDLKGKADTSTGGTGIGGITLGVGCPSKEKNLGTKATGTEFLESNTSLGGKFGLYKTXGTGVGPALRNPDSDTSDEATETLSDEVAEIVK

SEQ ID NO: 226089 - protein, 95 aa, Zea mays
  Clone ID: MRT4577_137782C.1.pep
SLRQQRQQQQGGETRVKMSRRRREREREETRSLEVGGINGCSTMTNCFCRLQSPVAKHGADFCGPGGEMTRREELYAGGGAGVGGGDGATSSTVH

SEQ ID NO: 226090 - protein, 757 aa, Zea mays
  Clone ID: MRT4577_137783C.1.pep
DDGLDENINASISTVILENCLVDEQDKKAALFTECQKYAVENHSANMLVSQLMGEARYHGEERKTLLRHNEKLRQGISKQMKVLNICKDLAPADLAEDEVLLQTVLDETINTLRLKDETEDVNRLMNTEFSVLSVVLLQLGMELRDLHLQKCAIEKEVESGETELLCLQNKNQQMLEQNEQLRNGLQESSEREEVLKTEVFITQEKLSCLRESYQTSQDVIFNLTEKNESLSKEYQSLSEKYNSLEDENDTVLEECMMLENLCLFFRGHNNEIASALASLTNEMALLSLAKSDLDLQVDELSRRSVAHESENSHLKEYIIYLVEILRTRLVLSEFDLDTNQSVCQELVVKLENCMTQLAQKDGELMEAEEEVQLLQEKNQELCGVVRSLQVATEGAKVVEGELEKKITRLIEQCSCKDVEILLLHQDNEALQSEVEQCEREFVVLMDDAITSSVNSAVYEETAFKLMMNGKATENRAISLKELLMKEVSSRDAHIEELQKKLAGIQDEHAELKAELNTHLALVASLADHVSVLEEDCRSLSKPCSTEDKEETACVHHVQEGNDGLESHCLPKGTPELQGLIARIEALQVVVSNAKDRQDQESAESAAKLAAVSAEIQDLKARGGSRMEGKEIYSDHEKQDVEISKGKQVQIMKDIELDQISTCPPYGARAALYPLGTGANAELDDDMLQLWEAAERSCKNQTAKSSSSEHDIQAVEDLKSEHPSSELARGRDLGTNKLEVPKGAAEPHEAWSKNVLE

SEQ ID NO: 226091 - protein, 236 aa, Zea mays
  Clone ID: MRT4577_137784C.1.pep
MMHPLRRILVLFLVGLLPAAAWSLAPPRFPRPQPRSRPGANGVGDYEYETRYFRQRLDHFSFPGVGDEDEDEAAAFFQQRYLVGRGGGWAGPGGPIFFYCGNEGDIAWFAANSGLVWEAAPRFAALVVFAEHRYYGESMPFGSKAKAYSDSKSLAYLTAEQALADFAVLLTDLKRNLSAEGSPVVLFGGSYGGMLAAWMRLKYPHIAIGALASSAPILQFEDIVPSTIFYDLVSDD

SEQ ID NO: 226092 - protein, 67 aa, Zea mays
  Clone ID: MRT4577_137785C.1.pep
SGRPFFFFFFFFFFFFFLARLGIALSLIFPTQKTNCLEFAHALLVCINHLKKILKLVKAGCLFFKSP

SEQ ID NO: 226093 - protein, 134 aa, Zea mays
  unsure (1)..(134): unsure at all Xaa locations
  Clone ID: MRT4577_137786C.1.pep
KERLARHIAQLRIPXGEACWELNCLDDVLRVAPLMPVDKTIGEGHDASNAFFGDTAAGKNVHRAVXVELEHNVVDHAQTVTXRQLFHPEDVVTATDDDXNNCVRDNYTFADYSVQLALARVRKLAGNCTGLQRF

SEQ ID NO: 226094 - protein, 108 aa, Zea mays
  unsure (1)..(108): unsure at all Xaa locations
  Clone ID: MRT4577_137787C.1.pep
LCLIDCFFLQNITKVLENFGSNIIFFNGLLDPRXGGGVLKNISESVVAIVAPLGAHHIDLRPATRDDPDWLVALRESELEIISGWLWDYYGAGGALFQPVAVKGSSSY

SEQ ID NO: 226095 - protein, 532 aa, Zea mays
  unsure (1)..(532): unsure at all Xaa locations
  Clone ID: MRT4577_137788C.1.pep
FDDASAPPHARALPRRAVPAAAWSLAPPRFPRPQPRSRPGANGVGDYEYETRYFRQRLDHFSFPGVGDEDEEDAAAFFQQRYLVGRXRWVGWTRXGAIFFYCGNEGDIAWFAANSGLVWEAAPRFAALVVFAEXSFFRGLTRLVVHRYYGESMPFGSKAKAYSDSKSLAYLTAEQALADFAVLLTDLKRNLSAEGSPVVLFGGSYGGMLAAWMRLKYPHIAIGALASSAPILQFEDIVPSTIFYDLVSDDFRRESLSCFLTIKDSWKELDDQANEQDGLLKLSKTFHLCQTLKTSGDLSDWLSSAYSYLAMVDYPLPSEFLMPLPANPIKEVCRNIDSQPKGTGTLERIYAGVNVYYNYTGTVDCFDLNDDPHGMGGWDWQACTEMVMPMSYSEQRSMYPPYKFDYASYAEDCIKSYGVRPRPKWITTXEFGGHNITKVLENFGSNIIFFNGLLDPWSGGGVLKNISESVVAIVAPLGAHHIDLRPATPDDPDWLVXLRESELEIISGWLWDYYGAGGALFQPVAVKGSSSY

SEQ ID NO: 226096 - protein, 147 aa, Zea mays
  Clone ID: MRT4577_137789C.1.pep
MRYTTALASLFAAAMAAPTAVQPVARQADTSAYFTVISQRSASPIHFQNLNARGGSFYLGGKGGPSSYCPSEVIGAENCPPGNTTTLAGGNNTLSLGVAAPGGQQVYVCPDGSLSYTTAHSAYIPNGSTVTGFRRTPATNSDETGLS

SEQ ID NO: 226097 - protein, 71 aa, Zea mays
  Clone ID: MRT4577_13778C.1.pep
FAESAFYRVRCTAAFLRFRNALERERVRERRELVRHKSRPVTMAAALHTRGEEHETPVILSDSMCASIGLV

SEQ ID NO: 226098 - protein, 122 aa, Zea mays
  Clone ID: MRT4577_137790C.1.pep
TPADPVRNSRVDPRVRSARIQPQDTPPEAEEEVIRAAPARGREQLNEDEPAAGQDPWKLLKEQEERKKCVICQDQSKTVLLLPCRHLCLCQACTEILMRHPVYHRNCPLCRRSILQTLNVYL

SEQ ID NO: 226099 - protein, 36 aa, Zea mays
  Clone ID: MRT4577_137791C.1.pep
SYSRIFLRAIATEGRFWKVGDWRWACRVKKNKGLVF

SEQ ID NO: 226100 - protein, 59 aa, Zea mays
  Clone ID: MRT4577_137792C.1.pep
QSLKQLTNFLHPYSMDLAQAITLNRRPLYERRLPITISNPTLTINSYPPYTLPTITHNQ

SEQ ID NO: 226101 - protein, 139 aa, Zea mays
  Clone ID: MRT4577_137793C.1.pep
KGKNKKTIKSLFLKNQKQNKKGFPPPPGGSFKGGISTPLAAVLRGPPLGPKLGVLWALVVPWGNFFSVPFPPPFSTRNLYVPPRGCLWGGPPPIIGVVLLALFQFGNLSGPLGLLILPPPGGGRLWVWGPFPFPRCLPP

SEQ ID NO: 226102 - protein, 34 aa, Zea mays
  Clone ID: MRT4577_137794C.1.pep
SKIYAKYVITVKMGYHVLTVLFNISVFFFLVSTF

SEQ ID NO: 226103 - protein, 41 aa, Zea mays
  Clone ID: MRT4577_137795C.1.pep
TTRSQASRLHAFNNRICFESRQPVQIALEGPNFNTQGTDRY

SEQ ID NO: 226104 - protein, 55 aa, Zea mays
  Clone ID: MRT4577_137796C.1.pep
SRSRTRSGIGYILLIIVLYLESFPAEIQLSNTETTNIFFLLVHCAFQKVPAVLKL

SEQ ID NO: 226105 - protein, 57 aa, Zea mays
  Clone ID: MRT4577_137797C.1.pep
LNRLSQFPPVCFQNIFHYSSSPAFISKPNVSNCHVFFGIAFHNVSKFVPGYKLCYYF

SEQ ID NO: 226106 - protein, 193 aa, Zea mays
  unsure (1)..(193): unsure at all Xaa locations
  Clone ID: MRT4577_137798C.1.pep
VLIYSSDYTSHDEVYVRSFVYISSLNTSMLALFTSSNLIHIXFFWDLVGLCSYLVIAVWFTRPLAASACQRAFVAYRVXACGLLIGVLGCFRIAGSLXYRXMFPISNSRIHNYCIKSXISHLCXASLPVLGAEAXLARFPPHVWSQDGTEVPFLYSAPIRAAFTVASAVLLITRLLPLFISXLRWIISFISFI

SEQ ID NO: 226107 - protein, 77 aa, Zea mays
  Clone ID: MRT4577_137799C.1.pep
KYVCECRSHVLADSCTHGYGYCVNDLCQRHILPLCQEVDWLKHHNHLLKLMYGHYYDIVLQVDKYPYRLQLRDLLIQ

SEQ ID NO: 226108 - protein, 175 aa, Zea mays
  Clone ID: MRT4577_13779C.1.pep
KIEVLFLCSTRPDRRHCFAVSIRRCKCGLLHYDNRTTMPHPHRQQQQQLVRDCVADRCQCEAAARRRKESKRDDSIAAHGPARRHTLLRLFFPAAHRMKGKLGGKSKAHRTESRSPRLGSRRLTPTGTAKPRRRINHPRTLSTSRLPPTPTMRDRSRMNGNASCAVLDPVQINKP

SEQ ID NO: 226109 - protein, 247 aa, Zea mays
  unsure (1)..(247): unsure at all Xaa locations
  Clone ID: MRT4577_1377C.1.pep
MAADDTNSASPHTYSVPLADKLMWTYIKALIIVAVLALFLLHVLGSLRRRSSNKALHAIVLGVYTLSYTLVSYTIGLMQRSDMYVREFSVWAVCLLMLLGGTDNLMAYGLNDVDNWKSFHVRHLIQGAFVVFIVAVYGTASRVQGPLWAILAVNALQSCVRIKSMKMASKSHLLSKSVKPIVDHMQMQREXTACGFWXRTNPDTMEGYRYVVAGEHLWKNMPDXPSNQSKDGNVDGITTVDQVWQCK

SEQ ID NO: 226110 - protein, 99 aa, Zea mays
  unsure (1)..(99): unsure at all Xaa locations
  Clone ID: MRT4577_137800C.1.pep
MGAPSIIFIDENDSITPKREKTNGEVECRIVSQLLTLMDGLKSRSHVIVMGATXTNRPNSIDPALRRFGRFDWEIDIGVPDEVGRLEVLRIHTKNMKLA

SEQ ID NO: 226111 - protein, 74 aa, Zea mays
  Clone ID: MRT4577_137801C.1.pep
KILSRQSILATPRWYLDACLKKPQTMLPCLVGPSGQEDAMAQVLPADLPYWAGAPKGSSCSEECWEPADAPADG

SEQ ID NO: 226112 - protein, 86 aa, Zea mays
  unsure (1)..(86): unsure at all Xaa locations
  Clone ID: MRT4577_137802C.1.pep
MPMILGYCDIRGLAHAIRLLLEYTDSSYEEKKYTMGDAPDYDRSQWLYEKFKLXLDFPNLPYLIDEAHKMNQSIRHLXYIARKHNL

SEQ ID NO: 226113 - protein, 73 aa, Zea mays
  unsure (1)..(73): unsure at all Xaa locations
  Clone ID: MRT4577_137803C.1.pep
KVVFVCLQVFSXLLGFSAELMPKGHEKESQAKIKWYMTMMDSMTDEGNLWCKDVPIYINLLILVVCYNFNLDA

SEQ ID NO: 226114 - protein, 54 aa, Zea mays
  Clone ID: MRT4577_137804C.1.pep
AWQLLAVRRAGSAVHLVVIVLSHIHDGHQRKHELRVPMFLLTSSFKDLVCDSQA

SEQ ID NO: 226115 - protein, 54 aa, Zea mays
  Clone ID: MRT4577_137805C.1.pep
CNVSRDIRVCFQNLCYGYGQIPCDCAIMIGRLLPLLKLEFRVRSCYVNSECHEL

SEQ ID NO: 226116 - protein, 125 aa, Zea mays
  unsure (1)..(125): unsure at all Xaa locations
  Clone ID: MRT4577_137806C.1.pep
MQRGVSFPGGMAKECPPAELWLPDEFLDDDFFSEEEKAAVAAKSESDEEEGMDGLSRRAAGLVVGGGGDGSPAKAQVLAGSPQSILCGLHASGEDSPNGAASQVSSPPSSPLEKTPADPXDLLKE

SEQ ID NO: 226117 - protein, 65 aa, Zea mays
  Clone ID: MRT4577_137807C.1.pep
GFGAAAAAAAEGEPLPWTRTFRIKKNLAKKMPQNRPIPYWIRLPPAITIRSNAKRRPWRRTKLGF

SEQ ID NO: 226118 - protein, 106 aa, Zea mays
  Clone ID: MRT4577_137808C.1.pep
WACKWWGTLFFSPFFVMLPPGPLFFFPPRAWGGSPLVFPGPPVFKRRPFTCPPPPDGGPGAFYRHAPPATCVFFIQIFPLLERPAPAGTRHLCPQTGMCFLKIFHI

SEQ ID NO: 226119 - protein, 108 aa, Zea mays
  unsure (1)..(108): unsure at all Xaa locations
  Clone ID: MRT4577_137809C.1.pep
TTLIPPPKNNQSTRPCSRVVNLTWFFPVHXNPKGQKRNPSNNASSKEPACKLKWPAWLLVISKKGGVPCPSSFRANIICLVPPPKVSTPPPLRXMDFFGVGAGYPPMV

SEQ ID NO: 226120 - protein, 43 aa, Zea mays
  Clone ID: MRT4577_13780C.1.pep
THTNKSMNCGLPSINTVRPSERIQKLLMHHPTVNSVDKVHANF

SEQ ID NO: 226121 - protein, 109 aa, Zea mays
  unsure (1)..(109): unsure at all Xaa locations
  Clone ID: MRT4577_137810C.1.pep
MLHLGARVRIVPAAGLFLVNEKEFDAYFPILDHRAELSIXXWDPTVKGGGVSGQVGAIRLGISRALENWEPGWRPYLKAAGYLTRDSRVVERKKPGKAKARKSFQWVKR

SEQ ID NO: 226122 - protein, 119 aa, Zea mays
  Clone ID: MRT4577_137811C.1.pep
GFYRPPEGKSARTLGPPPGRGPNGRGGGYRPRERPFFPKRSPPSYRPPLDPSLGPGVPPPSGGGPPLFLAPKKRGAFPSMAKKKKKSGVANGQDSRVFKIFLGISKIFGPNLKKRPRLS

SEQ ID NO: 226123 - protein, 71 aa, Zea mays
  Clone ID: MRT4577_137812C.1.pep
VKFEDRGVVARALTLVILMLHVDLPKGHGFVQLVHECVPCGTEATIVMVHAEATQLAIELDQENEESCLMV

SEQ ID NO: 226124 - protein, 56 aa, Zea mays
  unsure (1)..(56): unsure at all Xaa locations
  Clone ID: MRT4577_137813C.1.pep
MEILKGQVGAIRLGISRALENWEPXDGRPYLKAAGYLTRDSRVVRREKPWKAKARK

SEQ ID NO: 226125 - protein, 209 aa, Zea mays
  Clone ID: MRT4577_137814C.1.pep
MEILKGPNRAFGDLIEASGITDGMIDSLILLKDVRDVPGLPPLREIEDEAIQNMSVTSSRAEVERQNQEAIAKARVRQVDEKGRAYGTGKRKCSIARVWIKPGDGKFIVNEKEFDAYFPILDHRAELLRPFNVTDTLGRLDVTCTVKGGGVSGQVGAIRLGISRALENWEPGWRPYLKAAGYLTRDSRVVERKKPGKAKARKSFQWVKR

SEQ ID NO: 226126 - protein, 34 aa, Zea mays
  Clone ID: MRT4577_137815C.1.pep
NIRTVASFVYEDEIIKKAELSLQEPLRITKIESM

SEQ ID NO: 226127 - protein, 161 aa, Zea mays
  unsure (1)..(161): unsure at all Xaa locations
  Clone ID: MRT4577_137816C.1.pep
HGCTGGPHVNAVAPTRMLAEPTDWITALHLVMKKTSAHDRGVKGFFFASNAIQNHATQICMHPEDWLHSYYXQMXKALCAXHIEHLNTDTADNTIEKVSPAFXINYDDKPRNATCCSCXIVVNYYGEQSHGLNIVQEYVKSHYMSDMSSDTLDLDHGLKLC

SEQ ID NO: 226128 - protein, 223 aa, Zea mays
  unsure (1)..(223): unsure at all Xaa locations
  Clone ID: MRT4577_137817C.1.pep
MDEQRIARISVTWRGRQLDVDADPSCTVKEFGQLLQVLTNVKPETLKLIVPQSVNKGSKLISPFSDPHSSLTLKEAAVSEGKPIRMMGVFEDEIEEVSDNGKRSDLRIIGFEEEEQRLRQRSSGRPRVSLKLPQGQYIFCDFRTLHLPGVELNPPPSEALKRMHILACDPGIIAIMNKHRWRVGIMTEMAPVGYVGVSPKCILGFNKNMGEEISLRLRTDDXK

SEQ ID NO: 226129 - protein, 207 aa, Zea mays
  unsure (1)..(207): unsure at all Xaa locations
  Clone ID: MRT4577_137818C.1.pep
AFGRRPRGRVGTPAIWLCTCVARGAGTRELLQSLQKSIRSRPGAGAGAADSSPFAGFFSFPQYSATTTSAHGGCSGNNNNNTGSGGXAATRPALPPEQEXAGAGAGAAGSAVADVEVTMVEGHASLKVLARRRPKQLLKLVAGLHQLRIPPLHLNVTTVDAMVLYTFSLKVEDDSNMGSVEDIAAAVHEIIGSIEQQQQEEGEPAVM

SEQ ID NO: 226130 - protein, 76 aa, Zea mays
  Clone ID: MRT4577_137819C.1.pep
PMVYLLYVQVGGPVPHLMQGLQIVVDPCHLERLTSSVHLLDQVMLVTFNQCSSSVLLNPTTHIVVSLSVPFLKRVF

SEQ ID NO: 226131 - protein, 68 aa, Zea mays
  unsure (1)..(68): unsure at all Xaa locations
  Clone ID: MRT4577_13781C.1.pep
KKKKKKKKKKKKKKKKKRKKKKKKKGKKRKKKKKKKKKKXXGRGHPGGKIIKKTKKGLGAGPPLGGNF

SEQ ID NO: 226132 - protein, 72 aa, Zea mays
  Clone ID: MRT4577_137820C.1.pep
PTRTRTRHPHHCDPILLLTPTLTEQLTLQSDSIHPPLYLTVPDLSLAHPILILTYCHLNKPLLLVPVHHSSS

SEQ ID NO: 226133 - protein, 70 aa, Zea mays
  Clone ID: MRT4577_137821C.1.pep
ILTLFFVLQVAQEYSECPSGKKGGDLGWFPRGKMAGPFQEVAFNTPEGTVSAPFKSTHGYHFILCEGRKN

SEQ ID NO: 226134 - protein, 163 aa, Zea mays
  unsure (1)..(163): unsure at all Xaa locations
  Clone ID: MRT4577_137822C.1.pep
RVQSIPSAYSPPPTSGAPHGSPPASSAAPRPPPPAGXPPLPPPRGPRPPPRRQLRRATRLPPPSSPAPAPASSSSPLPASGDGEGVAAVPCSRPPRGSSRPGAPSGRRSRRPSQWCSSLCRLQAPICPSSSSMRLTWWSPPTSVPPYCCISLVDLYSSLILLA

SEQ ID NO: 226135 - protein, 77 aa, Zea mays
  Clone ID: MRT4577_137823C.1.pep
KVKINGNCPSNMVKCPHPNEQLGQAETGQASSARRVYWSMPERVSPHVSAPGRNSNSSGAVAARVDQSTLTMLPRGY

SEQ ID NO: 226136 - protein, 73 aa, Zea mays
  Clone ID: MRT4577_137824C.1.pep
QSDSFSRVFLSSPDHFLILGNPTTGVGIVAYLKKKKSPGDLFKKNNFTLNPTLETYGCVFPQYFSGKKQGPPF

SEQ ID NO: 226137 - protein, 62 aa, Zea mays
  Clone ID: MRT4577_137825C.1.pep
ITLEGQIKIEPYISSKITSLFCRVQLRNKFIGARAPLRLKQNAQAQLAQRQKHFGKATKPCP

SEQ ID NO: 226138 - protein, 157 aa, Zea mays
  unsure (1)..(157): unsure at all Xaa locations
  Clone ID: MRT4577_137826C.1.pep
XCPLLLAVXXLXXXPPGGPPGXXPXRXARRGSRRSCRXXXFSXXRLSPSXXLRFXRXSPXRLXLLXSRLRXXAWXPXAASPXXXRCXXGXRRXSGXXLPXRXXXGWRXGPPRXXRGCXXGFSCXAGRXAFPXRXAPCCLGLPXXPPGCXRXFLXXAP

SEQ ID NO: 226139 - protein, 102 aa, Zea mays
  Clone ID: MRT4577_137827C.1.pep
HWPRPARRHRHTRYCLHRRQPRHAGDATDGTTTTTGTCGRAGQPPRSPPLVAGQERARYDHGHHEARTATHTATTTLNLSRNGLTYPPLVTLLLQEEATSGL

SEQ ID NO: 226140 - protein, 161 aa, Zea mays
  Clone ID: MRT4577_137828C.1.pep
FSFGLPWGGPARLFFPRDIFFCSHRFGGWGCFFFPPWPSFCCPWVAGRAPFQPGPGLLSPPGAFRFFSGRFGGCFGWVPPFLPAQPPPFVCLPFFSRSFSPFFCLFGLVVLAVLLAFFCASLSPPRACLFFSPPGPALVLYCGFLISFSPLIYFTPLDGRI

SEQ ID NO: 226141 - protein, 123 aa, Zea mays
  Clone ID: MRT4577_137829C.1.pep
AVVTTQSTFFFFFFFFFGLTDTRTVATPMDLHLSLRPTDGTPLEDPSRYRHLVGSLVYLTVTRPDIAHAVHILSQFVSAPTSVHYGHLLRVLRYLRGTKAQCLFYDSNSPLQLPRAPRPVTTA

SEQ ID NO: 226142 - protein, 93 aa, Zea mays
  Clone ID: MRT4577_13782C.1.pep
GAPSGEYMVVGVHLADRSERSGHEPRLSFNMRSLFGQRSHLALRIGARSGGGDVHCPELVLRRYQVLLECHVRDRVLSASGPVRGCMRWRTRG

SEQ ID NO: 226143 - protein, 54 aa, Zea mays
  Clone ID: MRT4577_137830C.1.pep
PAVSRNSTDLAPDCWHEYLRGVRGGATEVLSTSISSQPPGHTYHPHRGSSLDAF

SEQ ID NO: 226144 - protein, 65 aa, Zea mays
  Clone ID: MRT4577_137831C.1.pep
NVHVYKLQQSKKIANINLGRKSWEQDAELPSVQTAVNEGDEAAPRSCKPQAHLKHFSLSHDLFFF

SEQ ID NO: 226145 - protein, 242 aa, Zea mays
  Clone ID: MRT4577_137833C.1.pep
CPKRSTQHAGFPGGGGEERRRRLSMDPGGAAAAKLAVWCWMWGMHDNSDDAGDGNKQFHLVASADFSHDTRMPGEFGSHLMNITPESDLVKLVAHDEPISDSNQCEANGGSASDTDMQLEVTLSTLAIQFFCRFYENVHMRGLTWQDDEYMQWVSGYHHIERTKGLSARFMNELIGVGCYSYFPFGPFGPGSTVITIPESAWAEISVGLQSMLITMLDSFLRSEHSNAMGLNNSACTLPLNL

SEQ ID NO: 226146 - protein, 234 aa, Zea mays
  Clone ID: MRT4577_137834C.1.pep
HSLPDLSSLPSPLLAHLALGHDHRLASPPTHASAHVQPLPSSDPVHRPPRISAERCSPAAGSRPVAHDISTSVWHDAHLRDVLLRCGIMGAADGATNVCLVGGDGDNCKYGTSLQRISDLGFFCHQSASAAGGSRAGDGAVLVLLPVPKAAMLGSPPTAQLMLAPQLLLQSVPILTVEDSLHFLWRLESAFRGRPLPQAKSRGAPRLPVAVAGAPPMFPRHMLRRFVLPRRMPQ

SEQ ID NO: 226147 - protein, 180 aa, Zea mays
  unsure (1)..(180): unsure at all Xaa locations
  Clone ID: MRT4577_137835C.1.pep
RGAVFYKHKNQGGDFRGLAKPWGLVGGDXNPPGPVVGKLKGGPEKPLGLXGFLGGGFFXKDGFRGVFFSPGGGSPPGVNPGGFGGFFVWEKPALAEIFGEGSGFPFGGGILGPPWGKGPGATEIWGGLKAGGQVCNKGGVFVWGGNXIFKPGCKRGGELPAGWGIWGGVHFWGFKGGGPL

SEQ ID NO: 226148 - protein, 240 aa, Zea mays
  Clone ID: MRT4577_137836C.1.pep
DPRGRPGREPAAQQAPRALSPCSLHSPLPVKQRRAARGVLGFLVLHPPEFDTLPPRPPVPAIALAGPPRPGARPPTRFAADPRVDSCSTVAHFGSCPAPSPHPSQPLLSRRRLPSGGPRSPRTATGGKPLAAHDISTSVWHGAPLRDVLLRCGVMGAADGATNVCFVSGGGDNCKVGLQGETAPQAKKSWGSEIASSGGRSSSDVSKPYATMSCASTPDATVDKVRSRCFSFPYWRLIIN

SEQ ID NO: 226149 - protein, 117 aa, Zea mays
  Clone ID: MRT4577_137837C.1.pep
PAGIALPAFRPTVALPSQAPVRWPALPTNGGKPLAAHDISTSVWHGARLHDVLLRCGVMGTVDGATNVCFVGGGGDNSKYGTGLHRISDLGFFPLISKRGRREQSRRWGGAGADVGA

SEQ ID NO: 226150 - protein, 97 aa, Zea mays
  unsure (1)..(97): unsure at all Xaa locations
  Clone ID: MRT4577_137838C.1.pep
PSLREGFAPLTWGGSQQHRAVTGPELTQHMWDAKNMMCAADPWHGRDLTAWCMLPGTTSTKAVDEHMIYGQNKNLCXLVEWMPNNVKSSMCDIPARG

SEQ ID NO: 226151 - protein, 75 aa, Zea mays
  Clone ID: MRT4577_137839C.1.pep
IFWVRPFLGACLFYKALSSVSKGEAFKEEVFKLSYALCCFETESVLKACSVECFRIIHVFVSWSLIPLSRSGIWC

SEQ ID NO: 226152 - protein, 593 aa, Zea mays
  unsure (1)..(593): unsure at all Xaa locations
  Clone ID: MRT4577_13783C.1.pep
ARGIIAHIDHGKSTLADKLLELTGTVQQCEMXEQMFDNMDMEGEYQGKRRCWRSRLHYVMNNEPYXLKLIDTPGHVDFSYEVSRSLAACEGALLVVDASPGVEAQTLANVYLALENNLEIIPVLNKIDLPGAEPDRVAQEIEEIIGLDCRDAIRCSAKEGIGITEILDALVTXIPLPKDTSKDPLRALIFDSYYDPYRGVIVYFRFFDGSMKIVCMQIMRFVMFYTVDRIVYKVQFKXRWDGRQHCLQSKIQSMRCDRXAGDKRFPGGRQMXFKSCFPGXYPEDTXLLLLSSLPKGAGKPTLQVPHVLEPRVHKVCRREPGSVSRVATHNDDIILPALRSQFLYKVWVLLQYFLRLIITAPSVVYPVRCADGETVECSNPSLLPEPGKRRSIEEPYVKIEMLTPKDYIGSIMELTQDRRGEFKEMNFITESRAKLIYELPLAEMVGDFFDQLKSRSKGYASMEYSVVGYRESQLVKLDIQINGDPVEALSTIVHRDKAYAVGRALTQKLKELIPRQMFRVPIQACIGTKVIASEALSAIRKDVLSKCYGGDISRKKKLLKKQAEGKKRMKAIGRVDVPQEAFMAVLRLEKEVL

SEQ ID NO: 226153 - protein, 104 aa, Zea mays
  Clone ID: MRT4577_137840C.1.pep
GDWARMPGRGGRRCVSPVRVWQAVEAESLTGSNYAAVDRPAPWVMVIMAQSPIKRPSSSSPMYRLRIEYRRSELSARDRWLVQLNHGASTVGVPPPWSVSGERR

SEQ ID NO: 226154 - protein, 138 aa, Zea mays
  unsure (1)..(138): unsure at all Xaa locations
  Clone ID: MRT4577_137841C.1.pep
MMMHGRYICTCAGLSLEPLIGAIAAGNAVALKPSELAPATAKFLEENIGEYLDATAVKVIQGGPAVGEQLMXSTDGXQVLFTGCPRVARVVMAAAAKHLTPVALELGGKCPCIFDAIAGRRNLQTSVNRVIFAKWSSC

SEQ ID NO: 226155 - protein, 69 aa, Zea mays
  Clone ID: MRT4577_137842C.1.pep
PDPHGERTFPTSSKRHYSQCIKMMSIGDSIGAIYGVPRHTSQPRIDVEKPSALALNWHGAPPARVILGG

SEQ ID NO: 226156 - protein, 155 aa, Zea mays
  unsure (1)..(155): unsure at all Xaa locations
  Clone ID: MRT4577_137843C.1.pep
MDASATVATGKGKKGVAGRKXGGPRKKSVSRSVKAGLQFPVSRIGRFLKKGRYAQRVGSGAPVYLAAVLEYLAAELLELAGNAAKDNKKSRIIPRHLLLAIRNDEELGKLLAGITIAHGGVIPNINPVLLPKKTAEKSPKEPKSPKKTAKSPKKA

SEQ ID NO: 226157 - protein, 64 aa, Zea mays
  unsure (1)..(64): unsure at all Xaa locations
  Clone ID: MRT4577_137844C.1.pep
MSVHLNRFTRTCLEGSSSHNERIDHNSDSEGSEDEKNTRIIPLKKKTINASTNTXHSVQKTRRE

SEQ ID NO: 226158 - protein, 59 aa, Zea mays
  Clone ID: MRT4577_137845C.1.pep
FWLRQWLFLCLYINVGFFFLYLSWSLYGLAAAGRGHVCLYLSFLSLATQEIKNEYPGIS

SEQ ID NO: 226159 - protein, 105 aa, Zea mays
  Clone ID: MRT4577_137846C.1.pep
IPDMIADSSKYIKLQNVYRETAKKDAAAVGNHVAKLLQSVGQAPESISEIELILLCSNSAFLRVVRCRSLAEEYGLHTVNKDDIISSMDNPDNEIVLYLMLRAAD

SEQ ID NO: 226160 - protein, 130 aa, Zea mays
  unsure (1)..(130): unsure at all Xaa locations
  Clone ID: MRT4577_137847C.1.pep
MVICSLLCALVSXAASAQCXMMMPCPYHGVYRTLYGAYAGLTTIMGAGGLYPYAKYLXTPXCNPVPAVPYYAGCEQPNAMFQPLRQNCXRTKMRMMELHTVRHNAQDMITIDRTIHASRSLYEPTMIHTE

SEQ ID NO: 226161 - protein, 64 aa, Zea mays
  Clone ID: MRT4577_137848C.1.pep
PMTSSAGPQSSGLPYLCGYDRTVTASDSYPWTVTSHIDSHTSTPGKLCKGLCRSHRSITALQYQ

SEQ ID NO: 226162 - protein, 61 aa, Zea mays
  Clone ID: MRT4577_137849C.1.pep
PGMATRQDPDRRPGSDRASDPPRRSSGLRANACGCPPRYCCRQFGSCGTASTPAMPTRASP

SEQ ID NO: 226163 - protein, 89 aa, Zea mays
  Clone ID: MRT4577_13784C.1.pep
MRGDFHKAHAPGARNVPYYLSVTPQGKEKNPHFVEEVAAFCGKADVFIVGCNTGNRSRFATADLLNAGFKNVRNLQGGYRSFQQRAQQQ

SEQ ID NO: 226164 - protein, 106 aa, Zea mays
  unsure (1)..(106): unsure at all Xaa locations
  Clone ID: MRT4577_137850C.1.pep
GGGLFIKRTITRDTIELSAGCQTRCRSRGTARNGMEGEPRRRSRWTSRRGRRPGLRRRSRPGGRRRKFSAAAGTWRTGRGDADRFGRSPQGVSRXIIDFIAAKSRK

SEQ ID NO: 226165 - protein, 208 aa, Zea mays
  Clone ID: MRT4577_137851C.1.pep
MVRAAEVATTMAAALVVVIALSTTPAASAIDYTEHNLASEESLWALYERWCAHYNMARDLGEKTRRFNLFKENAHRIYEHNQGNATYTLGLNRFSDMTDEEFSRSPYGRCLFAPVQRISDGENEELQQHEDVSFNLTHGGATAALGLPPSVDWRGRSVPRVKDQGLTCGSCWAFAAIAAVEGINAIRTWSLVTLSEQQLVDCDNVDHG

SEQ ID NO: 226166 - protein, 49 aa, Zea mays
  Clone ID: MRT4577_137852C.1.pep
SALTRSNRVMCVSSDIYLRMCGSHPTLLTHIPPLCYWVIKHRVTVKMIS

SEQ ID NO: 226167 - protein, 86 aa, Zea mays
  unsure (1)..(86): unsure at all Xaa locations
  Clone ID: MRT4577_137853C.1.pep
AKRVLKINPRPPIIKNLLHKVPQATETENFKPPARLFSHPALMKTGFPPPPPKKFASSIYKSVQKGLALSPNXALEEGQAQEPPEV

SEQ ID NO: 226168 - protein, 177 aa, Zea mays
  Clone ID: MRT4577_137854C.1.pep
MAGGHPAPLRPVVVAMKGHPGSGKSTSARAIATALCCPLLDKDDVRDCMLPLEGLAAAGLLNDLSYAVLWRMAERQCRPGDNEEWRRRLESRGSAVANGGGGDGWHKPKTWAELERLLEGYQGCTDYEIGDVPRIVVDTTDPTVDEQVVAEKVVVFIRSHLACSQPSCGRQDSPVCH

SEQ ID NO: 226169 - protein, 142 aa, Zea mays
  Clone ID: MRT4577_137855C.1.pep
DVEGGQRRRLETPFSLSIIRGLSVFFSQAKKKWHSDAADSAGNKLKQQARRPTLASPDSGSGSGTGMVFPKSLMRKSPPPWHSATIFFSLRSKQTQKLPACCCCCFKRKPRQLARRQTDEVDVPQVGSRNRRRRGGRQKEGH

SEQ ID NO: 226170 - protein, 211 aa, Zea mays
  Clone ID: MRT4577_137856C.1.pep
MAGGHPAPLRPVVVAMKGHPGSGKSTAARAIATALCCPLLDKDDVRDCMLPLEGLAAAGMLNDLSYAVLWRMAERQVRLGLSVVIDSPLSRRSHLDMLTRLAGVLVVVVECRPGDNEEWRRRLESRGSAVANGGGGDGWHKPKTWAELERLLEGYQGCTDYEIGDVPRIVVDTTDPTVDAQVAAEKVVVFIRSHLACSQPSCGRQDSPVCH

SEQ ID NO: 226171 - protein, 128 aa, Zea mays
  Clone ID: MRT4577_137857C.1.pep
AHPSSAQRPPSVRHASAILSQHILQCMAILMQHILHRPILMLITLIRLTCTLVPVPITRVNHFPMDNTRASTPISKDDCRHKIALTRLPSHSRCKRIVAESTGLSMLEKSVASERWNSSWSCLLFFSG

SEQ ID NO: 226172 - protein, 95 aa, Zea mays
  unsure (1)..(95): unsure at all Xaa locations
  Clone ID: MRT4577_137858C.1.pep
SDRHYGQTLEFGSISFTREIIMRHTSFXKXHLNXQDPVAMLCETEAVHAHCGFRAIWVAPSCIRHRIASQLMDVAKSTFCICKTLGISQSAFARP

SEQ ID NO: 226173 - protein, 108 aa, Zea mays
  Clone ID: MRT4577_137859C.1.pep
LSGAFWQSPCPPSRSAGSSKVISNLIKGKLPSCLTTRLSSFNSKQVSGPGGVQLPARGSWQHAAPGPVWPDTGSALWHRASAGPRFDIEPRPCPNQWLAPWQPKTSEL

SEQ ID NO: 226174 - protein, 187 aa, Zea mays
  Clone ID: MRT4577_13785C.1.pep
MICGNHVRARPPAVSAPPADRLGPLMPPINLRQASPESGNTSIVLIIILTGRSANTNSSSSSSLASLLYFCYCKCKSATTSAEMRTAVSRASLDQKLALAEPWSREAAALPELARQRWRLSAPRPHQPLGSGRMLPWANGNINFPAPAGANLSLAGRDSFVEPPEHVDTVAVQGPVGPRPPLCTATS

SEQ ID NO: 226175 - protein, 128 aa, Zea mays
  unsure (1)..(128): unsure at all Xaa locations
  Clone ID: MRT4577_137860C.1.pep
LLIGTTVRPTTTDDASATLWGTSISDAEPRLHGLXRSYAAPMSXAQRPASLRXARSRAGSQGILSDYMGCITNLNMATTTTIXLCAKRLRLGPFVTHMATAALKLDARYSGLYTGDPIGYTLYYTLDC

SEQ ID NO: 226176 - protein, 183 aa, Zea mays
  unsure (1)..(183): unsure at all Xaa locations
  Clone ID: MRT4577_137861C.1.pep
ASAATXXXKPQXAQQXXXPXTAAGXQYRNVXAXXXQEAXQASXXRAXAXTXQQPXXXXQQPXPXXXXXQRXAAQQPQQQXXPTXXQXXAANPXXNXQQQQXXPXXQLAGXNXXXXXQAQQXXPXNQXGGSXXAXXPQQQXXPXHLQAVANIVAFLRQQHLLPFYPQVVXGNINAFLQQQQLLP

SEQ ID NO: 226177 - protein, 97 aa, Zea mays
  Clone ID: MRT4577_137862C.1.pep
IRKCQVNNDNLFWVVKYFNKWIFVPLPCEAKPRVLRALNLTADTKNVQWPLVGCKHNLPCDKGLYTLIKCIYVNDNTEVLKTTDPPHTHRSKLIFPA

SEQ ID NO: 226178 - protein, 96 aa, Zea mays
  Clone ID: MRT4577_137863C.1.pep
DLPSTSKGNWDSTPQSSSTEIYLFRQLSFSCPLFLLRKKEALSSVSPRISPQTVIPADLLLYLFILFFGMLWQQVTKENKGTECSAATTSSCRGAV

SEQ ID NO: 226179 - protein, 42 aa, Zea mays
  Clone ID: MRT4577_137864C.1.pep
MVGCSSRRLSSVATLFCQSFHCIPTASDPASFASLLRELVFS

SEQ ID NO: 226180 - protein, 61 aa, Zea mays
  Clone ID: MRT4577_137865C.1.pep
WSVHRSGVLQAHERGREDLDTKFVALFIILPTRLLLYFALSETVQSGRLQLTLACTGPDHS

SEQ ID NO: 226181 - protein, 85 aa, Zea mays
  Clone ID: MRT4577_137866C.1.pep
KFGMLRHSVTGANKGRPATRGVLCRSPTTPPPPSYARCGGLCWSLRRRRTPTSSCCRCAHSSPFTGSAPGAYHLTAVATTALVLL

SEQ ID NO: 226182 - protein, 73 aa, Zea mays
  Clone ID: MRT4577_137867C.1.pep
FTSYPNRKGIVEWRVYQTSGGENVGICTPCCVKAGGVFSKHTPLRGYRPRKNIVFSTPASLGPFGWILNPRGD

SEQ ID NO: 226183 - protein, 48 aa, Zea mays
  unsure (1)..(48): unsure at all Xaa locations
  Clone ID: MRT4577_137868C.1.pep
APDHXHPKILILLQAPRWHTRTVISNPETVEFSCKXLSQISEQSEEGP

SEQ ID NO: 226184 - protein, 156 aa, Zea mays
  unsure (1)..(156): unsure at all Xaa locations
  Clone ID: MRT4577_137869C.1.pep
AVVSGFQGGLRXLFSPVADSPLPLFWLGQKAFGSGVFLQKGFQPMVLSFAGSQGPPLGVPPXSVLLVPGNGDVGLGIFDXTAAQFRFYGVGGVPLRGPVVIFSSGPSPLGWAFWACLWGAQFFLSSFPCGQFSGLVVAVGASPPPVFLAMGFFFFF

SEQ ID NO: 226185 - protein, 103 aa, Zea mays
  Clone ID: MRT4577_13786C.1.pep
MYVCVCVSAEATLAGAKAAAVATIASAIPTLASVRMLPWAKANINPTGQALIVSTVAGMAYFIAADKKILSLARRHSFEEAPEHLKNTSFQGTGRPHPAFFRP

SEQ ID NO: 226186 - protein, 55 aa, Zea mays
  Clone ID: MRT4577_137870C.1.pep
ESSYLFRFLLLFSQPGLPTRCRLSRVARRIPSLVCAMAEEHSNPHSQLAAEREVM

SEQ ID NO: 226187 - protein, 62 aa, Zea mays
  Clone ID: MRT4577_137871C.1.pep
EGASMWHEALLLELKVHVLMDAVPLRTQLRMRIPDQEPTIPLTFYELLRISVDGRPDHLPVL

SEQ ID NO: 226188 - protein, 331 aa, Zea mays
  Clone ID: MRT4577_137872C.1.pep
MQSEHNGRTDVDNDHCNGSSQTSIVVTSNMVPEEMMGDCPVDNCNEDSSLCRKVLSGSTEPCPGAKMTGCGNLSEDQVAAGSVLQRVESISPVITDIDDLLVDPYDSEAEDEEKSGEQNGQIDVHAEQCFGSSQTIIEVISDMVPDEVMETCSADNCEEHSSICRNVLSGSMAPCPGAEIPTSEKMSELAEDSRLQCMEFASPVLANFASKECGETPEPQVLNEIVEDSRLQCIEFNSPAHTNLPDKTGAENFASPSFDVVAKDSKPPSLEFTSPAHTVATFQPYADGIPTPKFTASERSFLLSVLELTSPGSRPETSQQPSCKRALLNSL

SEQ ID NO: 226189 - protein, 111 aa, Zea mays
  unsure (1)..(111): unsure at all Xaa locations
  Clone ID: MRT4577_137873C.1.pep
LMLHRTMLYDINSELLGEDSHFAVVLLSTCSKKKKKKSGAARDLXLVTRCRSRAAPFHQWIVTDSVTWLDLACAIANTIAGVAVRHARCDFHYLWIHSDPRLHCARVPATF

SEQ ID NO: 226190 - protein, 141 aa, Zea mays
  unsure (1)..(141): unsure at all Xaa locations
  Clone ID: MRT4577_137874C.1.pep
ITSYFFPSDPAFATKTTTGGLSIAFKAQNKPLLTKPAEDEPAVXKAPARKKPIAENRVPAGKSAAKEGPEGKRRKKNGKKSAETYKIYIFNVLKQVHPDIAXSSQAMSIMNSFINDIFEKLASDAGKLARYNKKPTITFRR

SEQ ID NO: 226191 - protein, 298 aa, Zea mays
  Clone ID: MRT4577_137875C.1.pep
MSSDKGQFEQGFQPDVQHQQVPGLQSKLDPTPKVDELPTPEGGAEKYKAAGKLKGKKAIITGGDSGIGRSIAVLFAMEGADSFIAYLPEEEKDAQETKKMVEEKGQKCYTLAIDLKPKENCKKVIDEAVKAMGGIDILVNNHAYQMMVNDISDLSEDQWLHTFNTNIHPFFFLSKYALPHMKRGATIINNASINAYIGRPNLLDYTSTKGAIISFTRGLSNQYVGKGIRVNAVAPGPVWTPLIPATMNDEAIKQFTAPIGRPSQPSEIATCFVFLASNDSSSISGQTIHANGGTIVNG

SEQ ID NO: 226192 - protein, 90 aa, Zea mays
  Clone ID: MRT4577_137876C.1.pep
TRSAGAAADGAAEAHYRPSDGRDQAVAVCTRPPALPVIAYTISGAPRCCPYEGSWHAVCLHSARRPPACGVDTLLPRAHRQPNSALSNTD

SEQ ID NO: 226193 - protein, 76 aa, Zea mays
  unsure (1)..(76): unsure at all Xaa locations
  Clone ID: MRT4577_137877C.1.pep
TRFASRGFIMFIHGTSFLWHEIXXXETLGLDSYSATLTNSYSIRDRLLSSFTVKXXXXXXXXXXXXXSRCCILISK

SEQ ID NO: 226194 - protein, 459 aa, Zea mays
  Clone ID: MRT4577_137878C.1.pep
MDRFKLIKEVGDGTFGSVWRAMNKQNGEVVAVKKMKKKYYSFEECMSLREVKSLRRMNHPNIVKLKEVIRENDILYFIMEYMECNLYQLMKERVKPFSESEVRNWCFQIFQALAYMHQRGYFHRDLKPENLLVSKDVIKLADFGLAREVSSLPPYTEYVSTRWYRAPEVLLQSSAYDSAVDMWAMGAIMAELLTLHPLFPGTSEPDEIHKICNVIGSPDEQSWPQGLSLAEAMKYQFPQTKGSQLAEVMTTASSDAIDLISSLCSWDPSKRPKAAEVLQHTFFQGCTCVPLPVRPKASSLPRTPPCVGSKGNSENSVARRFSTGTLSTMKSHSNAPAKSNGLSRTGVQRKLHLDRQPPQKSTKPTENSNKLATNRVPARNSPGNPVLRHSRSLPETGRRAVQKVSSITEKLSQMSVTSRTRSAVKPAAPTMKAGHGKSDFLGKSDDIPPAKRLTRKLVS

SEQ ID NO: 226195 - protein, 234 aa, Zea mays
  unsure (1)..(234): unsure at all Xaa locations
  Clone ID: MRT4577_137879C.1.pep
MFSRAIRQSSRRVAAIPATSRIASTRAPAFTNATRFYASDAKATPTEVSSILEQRIRGVQEETSLSETGRVLSVGDGIARVHGMNNVQAEELVEFASGVKGMCMNLEAGQVGVVLFGSDRLVKEGETVKRTGQIVDVPVGEALLGRVVDALGNPIDGKGPLKTTXERRRAQLKAPGILPRRSVNQPVQTGLKSVDAMVPIGRGQRELIIGDRQTGKTAVALDAMLNQNRWNKGT

SEQ ID NO: 226196 - protein, 36 aa, Zea mays
  Clone ID: MRT4577_13787C.1.pep
CVLLIHEISARSSPSELAPCLLWPQPAPILVFSVEI

SEQ ID NO: 226197 - protein, 211 aa, Zea mays
  unsure (1)..(211): unsure at all Xaa locations
  Clone ID: MRT4577_137880C.1.pep
MAAAAEEEGRAPTKYVLITGGVVSGLGKGVTASSVGVVLKSCGLRVTCIKIDPYLNTDAGTMSPFEHGEVFVLDDGGEVDLDLGNYERFLDVTLTRENNITTGKIYQSVIEKERKGDYLGKTVQVVPHVTDEIKQWIQSVSSVPVDGQTRPADVCVIELGGTVGDIESMPFIEALRQLSFSLGKDNFCLIHVSLVPVLGXVVGEQXTKPTH

SEQ ID NO: 226198 - protein, 81 aa, Zea mays
  unsure (1)..(81): unsure at all Xaa locations
  Clone ID: MRT4577_137881C.1.pep
MDRFKLIKEVGDGTFGSVWRAINKQNGEVVAVKKMKKKYYSFEECMGLREVKSLRRMNHPNIVKLXEVIRXNDILYFIMEY

SEQ ID NO: 226199 - protein, 113 aa, Zea mays
  Clone ID: MRT4577_137882C.1.pep
AFAYRWLCGFAITTVSLRRDILEWVCKFLCEVLEPSSSLPHFRAVDLLFSCVKHAPMFLINMTVLLIWFGLPCNVILHQSCCHKLYAHLTACKSLIPTRDGHFTFGLNAYLTQ

SEQ ID NO: 226200 - protein, 33 aa, Zea mays
  Clone ID: MRT4577_137883C.1.pep
MDRFKLIKEVGDGTFGSVWRAMNKQNGEVVAVK

SEQ ID NO: 226201 - protein, 72 aa, Zea mays
  unsure (1)..(72): unsure at all Xaa locations
  Clone ID: MRT4577_137884C.1.pep
SGPGGTSACARSGSASGSPRTFSRXRNGGSGPDDAAVGDMSSRQAQVRSKQSTHQSEGSATRSSTAVXNPAG

SEQ ID NO: 226202 - protein, 459 aa, Zea mays
  Clone ID: MRT4577_137885C.1.pep
MDRFKLIKEVGDGTFGSVWRAINKQNGEVVAVKKMKKKYYSFEECMGLREVKSLRRMNHPNIVKLKEVIRENDILYFIMEYMECNLYQLMKDKVKPFSESEVRNWCFQIFQALAYMHQRGYFHRDLKPENLLVSKDVIKLADFGLAREVSSLPPYTEYVSTRWYRAPEVLLQSSAYDSAVDMWAMGAIMAELLTLHPLFPGTSEADEIHKICNVIGSPDEQSWPQGLSLAEAMKYQFPQIKGSQLAEVMTTASSDAIDLISSLCSWDPSKRPKAAEVLQHTFFQGCTCVPLPVRPKASSLPRTPPCVGSKGNSENSVARRFSTGTLSTMKSHSNASAKLNGLSKTGVQRKLNLDRQPSQKGMKPTETSNKLTTNRVPARNSPGNPVLRHSRSLPETGRGAIQKVSSITEKLSQMSVTSRTRSAVKPAAPMMKAGHGKSDFLGKSDDIPPAKRLTRKLVS

SEQ ID NO: 226203 - protein, 130 aa, Zea mays
  Clone ID: MRT4577_137886C.1.pep
MRVLLAALAVLGLAASATSTHTSGGCSCQPTAPADLPTTVHMPTPDKLTATEHLTPPIHLPTPVHLQPAEHVPTPAHLTTQLCQYPTEPSRREHDPQAHTCARQQPDPSACQMHGTCSVGRTPTLRQCEE

SEQ ID NO: 226204 - protein, 358 aa, Zea mays
  unsure (1)..(358): unsure at all Xaa locations
  Clone ID: MRT4577_137887C.1.pep
MDRFKLIKEVGDGTFGSVWRAINKQNGEVVAVKKMKKKYYSFEECMGLREVKSLRRMNHPNIVKLKXVIRENDILYFIMEYMECILFGVAILSVMFLISLFSEPYEIHKICNVIGSPDEQSWPQGLSLAEAMKYQFPQTKGSQLSEVMTTASSEAIDLISSLCSWDPSKRPKATEVLQHTFFQGCTCVPLPVRRKASSLPKTPPCVGSKRISENSVARRFSTGTLSTMKSHSNAPAKSNGLSRTGVQRKLHLDRQPPQKGTKPTENSNKLATNRVPARNSPGNPVLRHSRSLPETGRGAIQKVSSITEKLSQMSVTFRTRSAVKPAAPMMKAGHGKSDFFGKSDDIPPAKRLTRKLVS

SEQ ID NO: 226205 - protein, 105 aa, Zea mays
  Clone ID: MRT4577_137889C.1.pep
LRIPLHKMYAVYLRSLFPCIISPLRTYLSNVAIKVYARRTHLSSVSITCMQIWCASVIRSLSAGTPAVASVIRSLSAGTPAVGGSAMVIAPTYFTDTEPPLLELV

SEQ ID NO: 226206 - protein, 60 aa, Zea mays
  Clone ID: MRT4577_13788C.1.pep
MPTPTETAETNRWGPPVQVILFPSVMFTLVHRVYMRSSGKLSPTCVFDSKDLMCKLLARC

SEQ ID NO: 226207 - protein, 36 aa, Zea mays
  Clone ID: MRT4577_137890C.1.pep
LTDIQAVFLKHQPRARAEREASRTKSPHQDPASPEA

SEQ ID NO: 226208 - protein, 82 aa, Zea mays
  unsure (1)..(82): unsure at all Xaa locations
  Clone ID: MRT4577_137891C.1.pep
MARNPGCTXVICNVVEKVPXKVLYEILIQVGRVVDLHIPVHKVYYPPTGNAFAEYEIKEIRKLALKLFFGLVRLSNKTPYIC

SEQ ID NO: 226209 - protein, 467 aa, Zea mays
  unsure (1)..(467): unsure at all Xaa locations
  Clone ID: MRT4577_137892C.1.pep
MAAAEARAAWQRAANRCLVQEDAKRAPKLVCCPPPLRPHDTSDGNPPSPQDLHAPTFVPINWNLMNSSLPMETQWWLQLQPSFGCQAALAREHLNYVGAEAAEKKTEGLAPVPKLEDVQANKAADPFEPPWIISAAVMKQTSGTGLEELKNLACYTPVSLDCKGSANKCIYEDKEFTEFKAFDPLFPNKPQKEHCEMHAPWEETKKSQPWWQVADVDGLASLVAERAMENIVNNDLPRPTQTVRVHGPQVKGPENKDDYGMSVVSGGQEPDPVHDTMECSYSVSSTTNDMNSSDGGRWQHHERNNVSGDARGSYSSTNSTPGSKPTYQDASERAKLLDALRHSQTRAREAEIAAKKAYDEKDHVIKLLFRQASHLFACKQWLKMLQLENICLQLRFKEXDSNHVPGPSMXCWXEKVAPSQEHNEGARKKGKRPNRKGGLCDAVAFAVGVGIVGAGLLLGWTLGWLLP

SEQ ID NO: 226210 - protein, 72 aa, Zea mays
  Clone ID: MRT4577_137893C.1.pep
MGKTPVRIKTVVYALSPFQQKVKPGLWKDIPPKIPPKVPEKWIFSPLLLTPVVGAYQYPMWFKEQEKLSPKY

SEQ ID NO: 226211 - protein, 89 aa, Zea mays
  unsure (1)..(89): unsure at all Xaa locations
  Clone ID: MRT4577_137894C.1.pep
MGDINYLTPKTMKLVLVVLAFIALVSSVPCSHTCVCSCCQHQIHEHXHHPQQHHPQKQQHQPPPHHHHAHHLQQQQVHMLPQIHQLQHD

SEQ ID NO: 226212 - protein, 99 aa, Zea mays
  Clone ID: MRT4577_137895C.1.pep
YSPVLWLISTSSEHSMNARPSGPVATTDALVSIIIPINSNCDDVSVNVCQSGAHELNLAHGMNSIPICAMHPYDTYRCDYVLTNFMEITCPHMPASSGA

SEQ ID NO: 226213 - protein, 161 aa, Zea mays
  unsure (1)..(161): unsure at all Xaa locations
  Clone ID: MRT4577_137896C.1.pep
LRFLASRSKAEVVDMLRKHTYFDELAQNKRAFAAASAATASSLANNPSSYASLSPATATAAAAAAREHLFDKTVTPSDVGKLNRLVIPKQHAEKHFPLQLPSAGGESKGVLLNLEDAAGKXVWRFRYSYWNSSQSYVLTKGWSRFVKEKGLQAGDVVGFYR

SEQ ID NO: 226214 - protein, 118 aa, Zea mays
  Clone ID: MRT4577_137897C.1.pep
RPMLTSHYDDLLRSRVALNPSQVIQRSNLSTTIFFLISSFPFMRNLHKLKSLTPYTNDLNQSTRVRGSSNTHKNSNRSNTRTRVKKRAQETTHRSYNSTTCSNLYLANQQCGREVSVL

SEQ ID NO: 226215 - protein, 150 aa, Zea mays
  Clone ID: MRT4577_137898C.1.pep
SLSSPSAPSSSSGTTSASSSSSSAAASSGVTRYAPGCGGARRRVREGRMLLRSTSAIGSSTSSSSSLLPPPPPSSSSLLSSLSSSSSSSSSSSSSTTILPLPLSAARALALAASATAAASSSTSGRAALGGARLASASTSASGLRLAGEG

SEQ ID NO: 226216 - protein, 70 aa, Zea mays
  unsure (1)..(70): unsure at all Xaa locations
  Clone ID: MRT4577_137899C.1.pep
ILILHGSPPRLVYISTAQSLLQLPXXDPTCLLRASLVCKAWRELLSIPIFLPRYRKFHSAPPLLCFLYNI

SEQ ID NO: 226217 - protein, 67 aa, Zea mays
  Clone ID: MRT4577_13789C.1.pep
EYHHDGGRLIPGYYTQSLASPGTVRTGAGGSLGRGILLHHALLRLDIVFHRIIRRASLQVRLGDAWG

SEQ ID NO: 226218 - protein, 66 aa, Zea mays
  Clone ID: MRT4577_1378C.1.pep
KHSFVYKMLLVQEAQPRTGINEAFCLIYTNSDLLLEILVSFIFYLISKTVDSIQSQIVGGSHSISF

SEQ ID NO: 226219 - protein, 86 aa, Zea mays
  Clone ID: MRT4577_137900C.1.pep
ATQQNYLNLITHRDSLIARKAPNTTMNKCMGGEQREQHYRWFASINGTTVHTCRGSKKAIEHRKNVGRLNSSLYCSKILASGSMAG

SEQ ID NO: 226220 - protein, 54 aa, Zea mays
  Clone ID: MRT4577_137901C.1.pep
SSEVSSLNKQKKFGYVNWPHYCRLNPFSLFRGQTPIGFPNGSFDSPACPASSKK

SEQ ID NO: 226221 - protein, 259 aa, Zea mays
  Clone ID: MRT4577_137902C.1.pep
MIRFRASRNRRSSFGDQVTWFFEFCKVEDPEHLFGEEIVAVTWEHGCLAGLCGLALENAGPLRLSLAIVDNTVKGVVCPVSDHFGGLPLDVLAFVDRKVDDTVHEVDKHLPGALKAASAHVYAVVRGVPEVARELAAEAQRSGVRGAARAALAMTEPVARDVYGRVEPVAKDLYVRYEPAAEHLAVSAWRSLNGLPVFPHVAEIVVPTAAHWADKYNRAVAAAAEHGYAGAKYLPAIPTERIAKVFSSAPEAEPLAEGQ

SEQ ID NO: 226222 - protein, 88 aa, Zea mays
  Clone ID: MRT4577_137903C.1.pep
LKWTEYTPDPNHGFYVSPSVLSALVPSMVAAKPVDWEESPLFNSLFPVSDGSNYFVRLYTEPLLVNLPTPGFSMPYNVICLTCTVVAV

SEQ ID NO: 226223 - protein, 97 aa, Zea mays
  unsure (1)..(97): unsure at all Xaa locations
  Clone ID: MRT4577_137904C.1.pep
IRPTKALDTLSSYLKLPHTDVKILMLAWIMVFDKXCYFTLNECRTGLKALAICIISNLNTALPXLFKSYRASFADFYIYSSXFCLTEIIINVYEIPA

SEQ ID NO: 226224 - protein, 50 aa, Zea mays
  Clone ID: MRT4577_137905C.1.pep
SHLTTSIGSIAAVCRSSISCRGRFLKCHNSSPQHVNVGRVQQLASTCGRA

SEQ ID NO: 226225 - protein, 74 aa, Zea mays
  Clone ID: MRT4577_137906C.1.pep
VPGPPPRVSPPPPPPPPPPPPPPPPPSSLFFFLPPEQLDSLNYNLQHSTICFYNGFDKNPKSEGAPSSSQLLVS

SEQ ID NO: 226226 - protein, 108 aa, Zea mays
  unsure (1)..(108): unsure at all Xaa locations
  Clone ID: MRT4577_137907C.1.pep
SPXEEYLGNFGNPSWLEEPLFKAAFQKFAPRIKEIEGFFXKCTPNPELKNRFEPGFFPFKLLNPFPNPGVPGGGLPPTSPFFPPRPPPPMGVSPFGPPPPTFFELKII

SEQ ID NO: 226227 - protein, 191 aa, Zea mays
  unsure (1)..(191): unsure at all Xaa locations
  Clone ID: MRT4577_137908C.1.pep
MAISQISPHXSWPSLLLADDFAAAPAALVYGDDLVSLTESTFYNEVLKDRGALVEFYAPCCGYCNKLAPEHDRLGGSCNKDSXLHFANVDCDEHKRLCRKYEVSVHPTIXCFPKGSLEARKYEGQRTXKSLLNFSMTEGGTXNVQLIIIPSSVAVLNPETFDSIVRDDSKDDLAELYDPXCGHCNSLAPIH

SEQ ID NO: 226228 - protein, 99 aa, Zea mays
  unsure (1)..(99): unsure at all Xaa locations
  Clone ID: MRT4577_137909C.1.pep
PAGSPDRCVACCSCACRXPPTSCASPLPRPPRRMRGPRPPTTHPLYPPSSECPPPPAPHAATLALTRGDHNGRGERGCVRPFAANADWPGRGPVTLDNL

SEQ ID NO: 226229 - protein, 69 aa, Zea mays
  Clone ID: MRT4577_13790C.1.pep
MCCCPSKACCICTLIVLVLVAVGLVFGFGVYTRGFHKLTSNMHLQDDAYGRGGAGGSFRAYGHFAPPPY

SEQ ID NO: 226230 - protein, 52 aa, Zea mays
  unsure (1)..(52): unsure at all Xaa locations
  Clone ID: MRT4577_137910C.1.pep
ALDFXIIVIYVKNMSPSAXLNKLLFXCNFPSICIHSGMFQEERFTRYKGFQG

SEQ ID NO: 226231 - protein, 109 aa, Zea mays
  Clone ID: MRT4577_137911C.1.pep
MERMSSSVQSWVEEHKLSSIGAVWATAVGASVAYSRRRAPARATSLRLIHARMHAQALTLAVLGGAALAHRYYGSSERRQRQEDLDYGFYSQLPPATDAEGNENERWSW

SEQ ID NO: 226232 - protein, 54 aa, Zea mays
  Clone ID: MRT4577_137912C.1.pep
KKNVWIIPPFEKGVLKNRKLYFVNLPKGIQKNKWSKIVVTLGPNKNCMFCKPFL

SEQ ID NO: 226233 - protein, 57 aa, Zea mays
  Clone ID: MRT4577_137913C.1.pep
CRVGKNRQSLALLNLEASSGFFNINSLFEDTVELLASTGGEIQPLYCVLKDNYTALL

SEQ ID NO: 226234 - protein, 96 aa, Zea mays
  Clone ID: MRT4577_137914C.1.pep
MLLAGRTGAVWATAVGASVAYSRRRAPARATSLRLIHAGMHAQALTLAVLGGAALAHRYYGSSERRQRQEDLDYGFYSQLPPATDAEGNENERWSW

SEQ ID NO: 226235 - protein, 118 aa, Zea mays
  unsure (1)..(118): unsure at all Xaa locations
  Clone ID: MRT4577_137915C.1.pep
ILKKKKKKKNRTDKKKKTKTPPPPGGPHKRNNPNPPGHARNNPRIGEPKTNYPGRPIKRPDGEKPGGHPTKTPGGTPPXSPAGGKKKRPPPSPLPKHGPPRGGRGTPPLTAQKTRGGG

SEQ ID NO: 226236 - protein, 122 aa, Zea mays
  Clone ID: MRT4577_137916C.1.pep
QRDEYERTVEEERKRKELEPEVPEITFNLLRAKYNDLKRGIDNTDYIKKALEISSNRKQEKEYLDAKYDYKNKRVVKEPTEEDKANPDVILGFKSGILEQLNTGRYKISQNEVLRSQLETGK

SEQ ID NO: 226237 - protein, 36 aa, Zea mays
  Clone ID: MRT4577_137917C.1.pep
HAFAISFLHTSNKTCGLTLIIYVVLYIRNGDGRSSR

SEQ ID NO: 226238 - protein, 79 aa, Zea mays
  unsure (1)..(79): unsure at all Xaa locations
  Clone ID: MRT4577_137918C.1.pep
XQKFGVEGVFFFXGXGRRVLGEEKHRGLEEEKQWGATFTFSLFSSCVFLLSVNWSGLYRILILFRSIGGGGAGAPGGAV

SEQ ID NO: 226239 - protein, 64 aa, Zea mays
  Clone ID: MRT4577_137919C.1.pep
LNTLLRVPSAPGTFFFLTPKGYSSAEAPVLPEYKSRSNLPRLIPPALNRQSPLDKKPGRNPPEP

SEQ ID NO: 226240 - protein, 39 aa, Zea mays
  Clone ID: MRT4577_13791C.1.pep
FSRCHRIWAALECWMTFRRVILSTVEVCFFRALLQCLIS

SEQ ID NO: 226241 - protein, 49 aa, Zea mays
  Clone ID: MRT4577_137920C.1.pep
KHPACSAHIEGNKYVYHVVKQSRPLERRQMKQLVEYVIHCVYEAAQSAA

SEQ ID NO: 226242 - protein, 51 aa, Zea mays
  Clone ID: MRT4577_137921C.1.pep
AQETAMSMFFNSKTCILFMREGYNQGAVYEITSVNSNWKRTWCLYLTAMIV

SEQ ID NO: 226243 - protein, 118 aa, Zea mays
  Clone ID: MRT4577_137922C.1.pep
VCLSRLCLFPCWAAVARSCWACFSVVVVASIGGLGGVCCFCLGCSPWWVVLRLGRSFWLISAGCLRLLPALLPMSVGVSVPPPAVGAGSERWAGRGAAGVRGLRVRALGSPVARPCRL

SEQ ID NO: 226244 - protein, 54 aa, Zea mays
  Clone ID: MRT4577_137923C.1.pep
TLTSFFKVTICQKHFRRKLQNLITQNKYALARKRYMVQTVQCTCLLFSKNYIIF

SEQ ID NO: 226245 - protein, 96 aa, Zea mays
  Clone ID: MRT4577_137924C.1.pep
KYNPGVGLYRQKITPHTQTYKPKKGERLMPPLTNRKYQPDTLREHHQRANESAIPKQVTYWANNDLTRTKQCHASYTNEEGHAPKEAYHLKRARDA

SEQ ID NO: 226246 - protein, 89 aa, Zea mays
  Clone ID: MRT4577_137925C.1.pep
PAVSAEIQRLLWFKGNETLTPRFSHFRRPALCPSQISGIVSIWLQPPLPLPKGSPTSTCISPSWAASIASHSAVEINPMLLSRNLEDVV

SEQ ID NO: 226247 - protein, 72 aa, Zea mays
  Clone ID: MRT4577_137926C.1.pep
MSYNYSPSPPRGYRRMRRRASPDDHYGIRSMDLPTSLLVMNLRRDCMPQYLRLPFGQFGRAKDIYLPRNYYT

SEQ ID NO: 226248 - protein, 80 aa, Zea mays
  Clone ID: MRT4577_137927C.1.pep
VVLVPLVYFTLSCCFAQGKYSTTNLSQKITVSYYSYALLCPLKITKYENKIHVIWFLIEGNNIMKHITIISSETTALVAL

SEQ ID NO: 226249 - protein, 366 aa, Zea mays
  Clone ID: MRT4577_137928C.1.pep
MSRAPRIVSVLFLLLGPLPVSLVHVTADGPVTATVHRQDGTAWRSFKQLLDARRGSHVEGLGELKRYLARFGYMPGAGAEHEPTTDAFDAHMEAAVRRYQSMLSLPVTGQLDSTTLDRIMAPRCGVGDGGHAVPVSLSGSAAASPDGAVSRFTFFKGEPRWTQPDPLVLTYAISPTATVDYLPAGTVRAVFRRAFARWARVIPVGFVETEDYEAADIRVGFYVGSHGDGIPLDGPLGVLGHAFSPKNGRLHLDAAERWAVDMDTETVHSAVDLESVATHEIGHVLGLGHSSSPKAVMYPSLSPREKKAELTVDDIEGVQWLYGSNPGFSLSSLYQQDSSMASGGSSWLPASARLVCAVLVMLVTHL

SEQ ID NO: 226250 - protein, 119 aa, Zea mays
  Clone ID: MRT4577_137929C.1.pep
MALRGVWQLQKLVVNYCDWGGSSRGIRAFMEAHLPAFKEKNPHLEVVTELVRGQHPNLKGIYKNHNERVVCVRNLPPEEILLQATRLRNSLGRKVVKLRTRHVTKRPSVQGTWTTELKM

SEQ ID NO: 226251 - protein, 122 aa, Zea mays
  Clone ID: MRT4577_13792C.1.pep
SQKSPLPPTLLNPNPRGRSLALYGGRVRKPMWRRTTSSYRTTTSWTDTPGRIQQRAPPRVSDPPLRGCTTGRVLPGHAACARTLLLLRAPMLMHWRDGDRRSLVFRGAAYHQMNVNDGLRWL

SEQ ID NO: 226252 - protein, 1674 aa, Zea mays
  Clone ID: MRT4577_137930C.1.pep
MEMVLRSQSPLCLRSGPVLIFRPTVAGGGGGTQSLLRTTRFARRRVIRCVVASPGCPNRKSRTASPNVKVAAYSNYAPRLLVESSSKKSEHHDSSRHREETIDTYNGLSGSDAAELTSNRDVEIEVDLQHISEEELPGKVSINASLGEMETVDEAEVEEDKFEVDTSGIVLRNVAVREVDPKDEHNAKDVFVVDSSGTAPDNAAVEEVVDEAEVEEDMVDVDILGLDLNNATIEEIDLMEEALLENFDVDSPGNASSGRTYGGVDELGELPSTSVDCIAINGKRRSLKPKPLPIVRFQEQEQIVLSIVDEEGLIASSCEEGQPVVDYDKQEENSTAFDEQKQLTDDFPEEGISIVHFPEPNNDIVGSSKFLEQKQELDGSYKQDRSTTGLHEQDQSVVSSHGQDKSIVGVPQQIQYNDQSIAGSHRQDQSIAGAPEQIQSVAGYIKPNQSIVGSCKQHELIIPEPKKIESIISYNEIDQSIVGSHKQDKSVVSVPEQIQSIVSHSKPNQSTVDSYRQAESIIGVPEKVQSITSYDKLDQSIVGSLKQDEPIISVPEKIQSIVHYTKPNQSIVGLPKQQQSIVHIVEPKQSIDGFPKQDLSIVGISNEFQTKQLATVGTHDGLLMKGVEAKETSQKTEGDTLQATFNVDNLSQKQEGLTKEADEITIIEKINDEDLVMIEEQKSIAMNEEQTIVTEEDIPMAKVEIGIDKAKFLHLLSEEESSWDENEVGIIEADEQYEVDETSMSTEQDIQESPNDDLDPQALWSMLQELAEKNYSLGNKLFTYPDVLKADSTIDLYFNRDLSAVANEPDVLIKGAFNGWKWRFFTEKLHKSELAGDWWCCKLYIPKQAYRMDFVFFNGHTVYENNNNNDFVIQIESTMDENLFEDFLAEEKQRELENLANEEAERRRQTDEQRRMEEERAADKADRVQAKVEVETKKNKLCNVLGLARAPVDNLWYIEPITTGQEATVRLYYNINSRPLVHSTEIWMHGGYNNWIDGLSFAERLVHHHDKDCDWWFADVVVPERTYVLDWVFADGPPGSARNYDNNGGHDFHATLPNNMTEEEYWMEEEQRIYTRLQQERREREEAIKRKAERNAKMKAEMKEKTMRMFLVSQKHIVYTEPLEIHAGTTIDVLYNPSNTVLTGKPEVWFRCSFNRWMYPGGVLPPQKMVQAENGSHLKATVYVPRDAYMMDFVFSESEEGGIYDNRNGLDYHIPVFGSIAKEPPMHIVHIAVEMAPIAKVGGLGDVVTSLSRAVQDLGHNVEVILPKYGCLNLSNVKNLQIHQSFSWGGSEINVWRGLVEGLCVYFLEPQNGMFGVGYVYGRDDDRRFGFFCRSALEFLLQSGSSPNIIHCHDWSSAPVAWLHKENYAKSSLANARVVFTIHNLEFGAHHIGKAMRYCDKATTVSNTYSKEVSGHGAIVPHLGKFYGILNGIDPDIWDPYNDNFIPVHYTCENVVEGKRAAKRALQQKFGLQQIDVPVVGIVTRLTAQKGIHLIKHAIHRTLERNGQVVLLGSAPDSRIQADFVNLANTLHGVNHGQVRLSLTYDEPLSHLIYAGSDFILVPSIFEPCGLTQLVAMRYGTIPIVRKTGGLFDTVFDVDNDKERARDRGLEPNGFSFDGADSNGVDYALNRAISAWFDARSWFHSLCKRVMEQDWSWNRPALDYIELYRSASKL

SEQ ID NO: 226253 - protein, 74 aa, Zea mays
  Clone ID: MRT4577_137931C.1.pep
PAGKKNYILSIREEEEYARLAHTPQTKSKTPPLTYILLRSLVLLVGPTFCGDVTSCLYCFQVSYYIFMFVQLLV

SEQ ID NO: 226254 - protein, 41 aa, Zea mays
  Clone ID: MRT4577_137932C.1.pep
CFLATSTPGIAIDRLNNELLYQQSKTNHYTFQDNFRRGRFF

SEQ ID NO: 226255 - protein, 109 aa, Zea mays
  Clone ID: MRT4577_137933C.1.pep
NSRIPLAAGLPHEGGLKTSCIETAGQLAKAHIDYTSRPAIVFTISAKNEKGYGPATQVRRLQGNNKKAPLNRIGFCTEAIAMMIIYYKLAMKISYIKEYSLAGFPAEMN

SEQ ID NO: 226256 - protein, 101 aa, Zea mays
  Clone ID: MRT4577_137934C.1.pep
LFFFSDGRNRQLKGGRCRDGRNLRLSRGAEDYARGAPPCHTARLSGRGGGGDYNGRLQRGQRSTGAPSGLAAGRVPQRLEPGARAGAAGGGGPGRGGGGGR

SEQ ID NO: 226257 - protein, 157 aa, Zea mays
  unsure (1)..(157): unsure at all Xaa locations
  Clone ID: MRT4577_137935C.1.pep
WLHEYPGNYGPKPAGGPARPRGRGSTGGRKKGHRGRRGERGSRGKGHTAQEPETEKARRRGQKSERTKKKRKEPKGQKPGGKTEKPKTQKKRPTHGKRQSGERGPGGGFKKKGKRAKEENPKPPGPEXVHQAEKPGKPQRAKTPSAGEKRGNITRAG

SEQ ID NO: 226258 - protein, 53 aa, Zea mays
  Clone ID: MRT4577_137936C.1.pep
SPEQRIKISQEKDGSRVVVVVSAATPWLRRRRRQGNEGHESVEMQRLAREVRP

SEQ ID NO: 226259 - protein, 106 aa, Zea mays
  unsure (1)..(106): unsure at all Xaa locations
  Clone ID: MRT4577_137937C.1.pep
RTDVETQTPNYQPTRLLAIELKRLGHATTKGKGDDKAFTPESRCLCSSPHPPLLTCASSPLQSSSPPAESALSSSTTTTSAAPARSTSSRRAGRPARPRDELVXEA

SEQ ID NO: 226260 - protein, 101 aa, Zea mays
  unsure (1)..(101): unsure at all Xaa locations
  Clone ID: MRT4577_137938C.1.pep
MVRMNGLADALKXSIYSAEYRGXRQVLIRPCSKVIVRFLTVMMKHGYIGEFESIDDHRAGKIVVNLTGRLNKCGVISPRFDVQLKDLEKWQNNLLASRQFG

SEQ ID NO: 226261 - protein, 252 aa, Zea mays
  unsure (1)..(252): unsure at all Xaa locations
  Clone ID: MRT4577_137939C.1.pep
IGTSSRPDGQSGRRGGYYYCAVEHVVNELRALASGGSLCWLLGFGTYQAYTKCRVGQPSLESLWGLQTLTVPAGSLALSLTCAFDDSALGTVNQSLKAGSDADGNGPASCWPLLGGSQLSSRCCGAGDCSAARIDTKAALSRPFVSSSSLPSWLQHCRDHQEPATSHLTDLSKSKTWSSICSRPSQRMKLHFXSAPVSPASSISSYEHGGDQSSQTPPQHSGXXLLGLDAXXNRWEPKRETSGNKAASRSHD

SEQ ID NO: 226262 - protein, 49 aa, Zea mays
  Clone ID: MRT4577_13793C.1.pep
AEDVHHNSHHPPPRLCQRALTNTSPLERVPLLPGSVSASCGPFTHCTWG

SEQ ID NO: 226263 - protein, 50 aa, Zea mays
  Clone ID: MRT4577_137940C.1.pep
ITREGGVQLAGSVSCRYRLICTWGEPLDRLHCLTGWSNINFLVLGEQNIN

SEQ ID NO: 226264 - protein, 79 aa, Zea mays
  Clone ID: MRT4577_137941C.1.pep
INLKAPEKAKYYHGESVHIVALTHNEKKTSQGHHHLCLTKKKNGRGHASLQSHSLQQTITLDKCEHEGTKLHIQQFRFK

SEQ ID NO: 226265 - protein, 38 aa, Zea mays
  Clone ID: MRT4577_137942C.1.pep
MASSTMALSSTAFAGTAVNVPSSSAMREARVTMRKTAA

SEQ ID NO: 226266 - protein, 49 aa, Zea mays
  Clone ID: MRT4577_137943C.1.pep
EFRVATCFNGFEVKSSSGIISCNSSVVCHTYRTYVGYPLEKKDPCKHKV

SEQ ID NO: 226267 - protein, 98 aa, Zea mays
  Clone ID: MRT4577_137944C.1.pep
MAESKARVALFLAALAAASLLALAPAGAATTCAPTQLTPCAPAIVGNAAPTAACCARLKAHPATCFCQYKRNPSMQRYVNSPNGKKVFAACKVSLPRC

SEQ ID NO: 226268 - protein, 98 aa, Zea mays
  Clone ID: MRT4577_137945C.1.pep
MAASKACVALFLAALAVASLLALAPAEAATTCAPTQLTPCAPAIVGNAAPTAACCARLKAHPATCFCQYKRNPSMQRYVNSPNGKKVFAACKVSLPRC

SEQ ID NO: 226269 - protein, 72 aa, Zea mays
  Clone ID: MRT4577_137946C.1.pep
YQQQIYLYICFQHDLSTHGNACFSSLFISLEPINHRGGPAVFTLWRFPTRRLRSQCTDERPPPEVVTATRAH

SEQ ID NO: 226270 - protein, 261 aa, Zea mays
  unsure (1)..(261): unsure at all Xaa locations
  Clone ID: MRT4577_137947C.1.pep
GKGNXXSFQQEWFDDFGSWLEYSESKDRAYFFVXFLFREKKDTXYKDFVVECWNGYHRKERLKIHVGNVGGSHFIPIKKSDDLLXRYQHIDVILHKKSETSKRAYFTRLNGSINTARLLFEQGLPFHGHDESKESLNKWNFLEXFLIXLAEHDSNLGKAVGLAGNSCMVAHETQTNIIDCFANEILQFILEELGDDVFCLXLVDESRDVSCKDQMAMVLRYIEKCRMAKGRLXILAEFKLGLKQVRGQGYDGASNMRGEFT

SEQ ID NO: 226271 - protein, 261 aa, Zea mays
  Clone ID: MRT4577_137948C.1.pep
MEDDNEVTGESPVADEWDMLSLTSSIYASPLFRRGFDPINLPGYGNVINIQEGTQTGLVMSDGFVFPPSEHENLPIEPEHEDLPIEPGHDESNTNSVEKESSCAGNNDDDWCHVSPEEIDDVSNENLADNSDLPTASEATVPDSQPTEINAKREKDHRTCKADHTCERWWKKKTTYLFHHIKGVTTLCSVVAAGAVVGFVVMGQRWQQDHWHLHQFKFSVSGESMNRVIGAFSRLKDGLPGSEQLRSMLPTRVLPQQPLSA

SEQ ID NO: 226272 - protein, 87 aa, Zea mays
  unsure (1)..(87): unsure at all Xaa locations
  Clone ID: MRT4577_137949C.1.pep
GLARADXAXNAAAGXQRGAEGRGRRLRAHQXPXERERRGHPPRQXXDAPGRRAGGXXXNPHXRGAXGGGXKKXNXXRAXGKXDXXRG

SEQ ID NO: 226273 - protein, 111 aa, Zea mays
  unsure (1)..(111): unsure at all Xaa locations
  Clone ID: MRT4577_13794C.1.pep
FLYAVDAPNVFVFPYLYPITPFSIFFCSTVFLFQRDQEEEFFFIKSTHNKVQVLKKPARXTPISAVGPXLLKPPRNEQXLALGTRLSXKNKINYQSHRVVPNGQEQYLHPK

SEQ ID NO: 226274 - protein, 106 aa, Zea mays
  Clone ID: MRT4577_137950C.1.pep
RSHGVEPVIIRWSRGSWWIGVACGSAFILVVACSVSAGSRTVVFSYCVRNLALSFSRLCFCVCAQTPATRLGAGAPASCRGAPLAGKNDTRRAEGDTAELPLGKAQ

SEQ ID NO: 226275 - protein, 84 aa, Zea mays
  Clone ID: MRT4577_137951C.1.pep
FSSFPFGPSPSCRSYVVYAINTSSYKLHLPHRCVWVKNPSTTLAVVVAVHYIATVFTSTECSLRIPLQKKKTLYVFTGLAEPHL

SEQ ID NO: 226276 - protein, 53 aa, Zea mays
  Clone ID: MRT4577_137952C.1.pep
RSAERSVDHVHLVSVFLILIAGDTYRSGRSVKKRRRCPQKAKALHVESPYSSN

SEQ ID NO: 226277 - protein, 84 aa, Zea mays
  Clone ID: MRT4577_137953C.1.pep
AGIQPGPEHKNFLVVYGGRLYLQISPFFFPGLMRCPPGRFYSHGSFEDKGGVHISGVLTRKKGKIKKKEIKKKKKKEKKKKKSG

SEQ ID NO: 226278 - protein, 41 aa, Zea mays
  unsure (1)..(41): unsure at all Xaa locations
  Clone ID: MRT4577_137954C.1.pep
MPKQIHEIKDFLLTARRKDARLVKIKRSKXVVSXKVRCSKY

SEQ ID NO: 226279 - protein, 167 aa, Zea mays
  unsure (1)..(167): unsure at all Xaa locations
  Clone ID: MRT4577_137955C.1.pep
QFDAPGVSIHDLAALMARQLHRRVEFPLMKILHERELYTMQDILQFNIRLLSFTNMRDYNLYINKALFGSDHVLNDLAHRMVKVLTRLISFDEGAGPLXAYLQNADLVLECKLDIEYIIHMLHXRYDIYYDHMWALYQYAXFRLSEVHYSGAVDDLYQHRCLSTNSE

SEQ ID NO: 226280 - protein, 54 aa, Zea mays
  Clone ID: MRT4577_137956C.1.pep
SSATVTRHCFGFVIYCGKISTICKGLLLYSLMYRNHMNKSSILSAKNKKKRERL

SEQ ID NO: 226281 - protein, 47 aa, Zea mays
  Clone ID: MRT4577_137957C.1.pep
TFSSKMMVDLSLPAVYCSQFIWKGPQFTCGVNKNEESFMKLCVLQNV

SEQ ID NO: 226282 - protein, 43 aa, Zea mays
  Clone ID: MRT4577_137958C.1.pep
IIGSTRVSCSVEIMLLRVVLIIVACVRLSIYKEPLPVRFRNFT

SEQ ID NO: 226283 - protein, 126 aa, Zea mays
  unsure (1)..(126): unsure at all Xaa locations
  Clone ID: MRT4577_137959C.1.pep
MHIWTLSEKHSDISCLGXTVNYSGWXVYHYSXLQAPTHGDKLKLELRRDLTXDTGWESCMRITCRKRXRLTTYDGHFMLRSTQLLALPAEDSDNDSAMHXSIEETFMTTQSAYFQVRLLYTSSCGE

SEQ ID NO: 226284 - protein, 114 aa, Zea mays
  Clone ID: MRT4577_13795C.1.pep
NIQIKSSRTEATSSLLPRPNPRTSARSQSHCAHVFKSHVVQRHWRECQNQIRRARGCITAASTCFYKYRVWEQERLSAPQLIVPSGCRFASLKPNTARLLCFQSNNAGGVQAGC

SEQ ID NO: 226285 - protein, 115 aa, Zea mays
  Clone ID: MRT4577_137960C.1.pep
MAAAAAGEDDAAWERAISAATLRHLDLGNNRFAEVQELAPLAGVRVESLDLFQCPVTKVKGYRDEVFALIPSLKYLDGADAEGNERLETDDDDDEEEDDEEGEEGPEGEEEGDED

SEQ ID NO: 226286 - protein, 266 aa, Zea mays
  Clone ID: MRT4577_137961C.1.pep
MAAAAAGEDDAAWERAISAATKSTSAPKTLTLDGAVKSSMGGLPSAALLERFAASLEELSVAGARLSSLAGLPRLPALRRLSLPDNRLSGAAALATVAEACGATLRHLDLGNNRFAEVQELAPLAGVRVESVDLFQCPVTKVKGYRDEVFALIPSLKYLDGADAEGNERLETDDDDDEEEDDEEGEEGPEGEEEGDEDDGEEEDDEDGEGDDEEEGDEEAEDEDGEAEDDELDADAEDKENIESKAGSSLPNKRKRNNEDDANGYK

SEQ ID NO: 226287 - protein, 69 aa, Zea mays
  Clone ID: MRT4577_137962C.1.pep
METYEVIEDIGSGNFGVVKLVRDVRTNELFDVNFIERRMKIDENVQRDIMNLMSLRHPNIANFKEVVLA

SEQ ID NO: 226288 - protein, 404 aa, Zea mays
  unsure (1)..(404): unsure at all Xaa locations
  Clone ID: MRT4577_137963C.1.pep
GTPRAGRGFLHSGLARRSPAVLQSNYQPNAISALPLPTGVTAQQIPTQIHLPAPHRHGSPTNPALPRTQTRADGRPLRRRAAALQGELRRLREAAAAHADSDKVEEDLDRAACLIAEGDVASLLPSKTQGAFLKMFLGPVNLRATRKEGQLKVKEEYNSYRDRTALLFQVPVQGEDEEIQGQTGPRHMPLANRFIIAWIDXQRPPKHEQGQEEKVPVFNXGCVTTVKHFSVFFSWPLAXIMSVVCATAHCSVXSSSVELFLCWAIMQGFVMMMQNRYQRQRLYTRIALGKAKRMDVVWGETAGVEGQLLLLCPLLFLLQGFEGYVGFLLLRTAHTGVVPEWQVVVCGILLIAMAIGNFANTVDTLVTKSRFKAKMKKSKGRRDLDTCPSPTGSSSPIDSATTKA

SEQ ID NO: 226289 - protein, 254 aa, Zea mays
  unsure (1)..(254): unsure at all Xaa locations
  Clone ID: MRT4577_137964C.1.pep
RKRKEKRKRKEKRKSKEENVIXLDSTNDTVISEEMPEYNLDEPTMEEKLATLNLINRENEIHGSEKQSLSVAPPSADSVHILLKQALRADDSVALLTCLYNRDEKVITKSISLLTPADVVKLLKFFVLQIQSRGAVLVCLLPWLQTLLNRHMSSIVSQESSLSLLNSLYQLIDARTSTFKSALQLSTTLDYLFSEIADDEADEEVPPPIIYEDKDTDDDESEVDAMETDREEAEELGAVTDASENSDGSEIMSD

SEQ ID NO: 226290 - protein, 100 aa, Zea mays
  Clone ID: MRT4577_137965C.1.pep
TTLELHDDQHERPIRLSLTQHNRMTAEDRAPEKPPTAVPLLLPPHAQSTTKYYEGCPRRLLDEAPTTSDRRLPTSISSTSDPAASTTNCRTGHCALIYTP

SEQ ID NO: 226291 - protein, 111 aa, Zea mays
  unsure (1)..(111): unsure at all Xaa locations
  Clone ID: MRT4577_137966C.1.pep
RKRKEKRKRKEKRKSKEENVIXLDSTNDTVISEEMSEYNLDEPTMEEKLATLNLINRENEIHGTEKQSLSVAPPSADSVHILLKQALRADDSVALLTWLYNRDEKVITKSI

SEQ ID NO: 226292 - protein, 93 aa, Zea mays
  Clone ID: MRT4577_137967C.1.pep
SSKLRNRIDLQFAIGQILRSCTTIMGKKNFPTDFIPTQVAFHIWVHLDMGAKHDFSGLTPEKWLLGAVGAVRVAVRGLSASGSLLRPPSQYQF

SEQ ID NO: 226293 - protein, 62 aa, Zea mays
  Clone ID: MRT4577_137968C.1.pep
MIQIADDEADEEVPPPIIYEDKDTDDDESEVDAMETDREEAEELGAVTDASENSDGSEIMSD

SEQ ID NO: 226294 - protein, 129 aa, Zea mays
  unsure (1)..(129): unsure at all Xaa locations
  Clone ID: MRT4577_137969C.1.pep
IAHFLITGIHDDWMYDDIENADTMQFEGRIYRIXNWAHIVHAHTVPGPGNEHRLKANDLSKGRGVLVLTYMSSSVNLAHVDYTAGVVMIAKQHSDFVKASIYSNTEYCATEPTITTLIHATPGGHNATR

SEQ ID NO: 226295 - protein, 47 aa, Zea mays
  Clone ID: MRT4577_13796C.1.pep
NRFILLLNTHLDCPNPYKWIHSIQPFHIIFSHYNTRGGKHNINLGTL

SEQ ID NO: 226296 - protein, 166 aa, Zea mays
  Clone ID: MRT4577_137970C.1.pep
PAGTLYQSTLTSPTAAAVSPSSSQRRHYIFRSHPDSRSTRRRRRQRSGSGSQGRRGSPRLGVVVSGYPSRLSPIASRPRLRSSAHRPATLRTRLALPSRLRWTVDGARPRRLHCAPRAAGGQREPAATVSPRRPHHFGGAYVPNEALPVRSTMKHALSVVFWNPGH

SEQ ID NO: 226297 - protein, 63 aa, Zea mays
  Clone ID: MRT4577_137971C.1.pep
LKEHFFEKKKGERGKFSWGEISLPLKPQPGGALSGDGPGRKKTRTYRGQNQRLAKQTLCRISA

SEQ ID NO: 226298 - protein, 80 aa, Zea mays
  unsure (1)..(80): unsure at all Xaa locations
  Clone ID: MRT4577_137972C.1.pep
KVEKANSPNPRSTRGPSPQKNKEGGGGPAFYIAIFFKVPPQRRKPPSRLTRPLPLIFSIKGGARSLCCFCAXGRPYPVSS

SEQ ID NO: 226299 - protein, 61 aa, Zea mays
  Clone ID: MRT4577_137973C.1.pep
IQSNIPKHSNYLTIYILTLLNYNYHFISYHFTLSNLYFLHILIDYPYNLFYSLTIFRNTPF

SEQ ID NO: 226300 - protein, 95 aa, Zea mays
  Clone ID: MRT4577_137974C.1.pep
GDEGQVVLQAAIESSSAKASAVNQYQLYTVRARQAEGCERAEVGAQGLVHLALRSRESGGVAAGESEPEKQSAASNARTALSWMDDLIVDYLGWL

SEQ ID NO: 226301 - protein, 211 aa, Zea mays
  unsure (1)..(211): unsure at all Xaa locations
  Clone ID: MRT4577_137975C.1.pep
RVRPRVRIERKLAESDKKAERWLSKVSQLQDSADLSSLAEDEDFPEIMPMRKGVNKFVVSMHKTPLERRLTNAQYRSNNSPPASDPKISQTLDRILGRSTPTTAPNNQSVTSDAPTEXSEEINRXLGGIDPVPFVPLSADLFAKPQTNNGQSNQNGKINAEDDSSMVNNAVPLPERQSTGSLDTAEIWSEKVAEPDNAKDSPSAVSDENFP

SEQ ID NO: 226302 - protein, 76 aa, Zea mays
  Clone ID: MRT4577_137976C.1.pep
LQIKKIKDHKKVLILCFRTKCRWGSLSGAAGRRHGLAPVDTSRCPLVGVQNLEVGEKAMAIIHPMRLWEESENDLV

SEQ ID NO: 226303 - protein, 68 aa, Zea mays
  Clone ID: MRT4577_137977C.1.pep
ARGPFVLLVALTQLHVLHSLSLIMYPSSVIIFADNNLVRPPGHCIGWQALYHQFMCYLPSNLYYNCYY

SEQ ID NO: 226304 - protein, 240 aa, Zea mays
  Clone ID: MRT4577_137978C.1.pep
RGRPGFPHTSSPPGSLPGRAPQNRINNRHRSPHRTEAAAMSAEKPAPVRVLYCGVCGLPAEYCEFGPDFERCKPWLRAHAPGVYPDDLVAASSSPGGGDKDVDKVGDRLQGVGISDGSTGAAGDASASKPQEAKRLPGGKLKKKEKQEVVIEKIVRNKRKCVTVVKGLELFGVKLSDASKKLGKKFATGASVVKGPTEKEQIDVQGDISYDIVEFITDTWPDVPESAIFFIEDGRKVPAA

SEQ ID NO: 226305 - protein, 203 aa, Zea mays
  unsure (1)..(203): unsure at all Xaa locations
  Clone ID: MRT4577_137979C.1.pep
MAAEKPAPVRVLYCGVCGLPAEYCEFGPDFQRCKPWLRAHAPGVYPXDLVAGPSSSGGAGGDRDVDKVGERLQGVGISDGSSSAAGDASASKPEEVKRLPGGKLKKKEKQEVVIEKIVRNKRKCVTVVKGLELFGVKLSDASKKLGKKFATGASVVKGPTEKEQIDVQGDISYDIVEFITDTWPDVPESAIFFIEDGRKVPAA

SEQ ID NO: 226306 - protein, 78 aa, Zea mays
  Clone ID: MRT4577_13797C.1.pep
PGGGNIWFLTPPFCSFKGWREKKNLPPPKTAWGGIGKEKKGFVAKRFGCLFAPLTSQKRNYSVCNNVKIMSTTCKSHQ

SEQ ID NO: 226307 - protein, 264 aa, Zea mays
  Clone ID: MRT4577_137980C.1.pep
INLRLLRTGPGPAFEESDGCRIQTLFPKNQNNRHRSPHRTEAAAMAAEKPAPVRVLYCGVCGLPAEYCEFGPDFERCKPWLRAHAPGVYPDDLVAASSSPGGGDKDVDKVGDRLQGVGISDGSTSAAGDASASKPQEAKRLPGGKLKKKEKQEVVIEKIVRNKRKCVTVVKGLELFGVKLSDASKKLGKKFATGASVVKGPTEKEQIDVQGDISYDIVEFITDTWPDVIHLYSLLCFTSFICFHVCKISDTVSAQTIWCHSTQQ

SEQ ID NO: 226308 - protein, 146 aa, Zea mays
  unsure (1)..(146): unsure at all Xaa locations
  Clone ID: MRT4577_137981C.1.pep
MAAAENGGGGESKAAFARIYDALKAELLRDPAFEYTESSHEWIDRMLDYNVLGGKCNRGLSVVDSYKLLKGVDVLSEEEMFLASTLGWCIEWLQAFFLVLDDIMDDTHTRRGQPCWFRVSRVGLIAVXDGILLRNHISRMLRLHFK

SEQ ID NO: 226309 - protein, 114 aa, Zea mays
  Clone ID: MRT4577_137982C.1.pep
RVSSRLRRGEAARRVCRSLTPRSSSTVATGRDSGIRADVHLQGCEGRIRVLQRSRTSLAWMGDSGSTATAPVTQPSVQIRFILEAFGDRHIKCAGGVDEQERVDWGIGRWAEFN

SEQ ID NO: 226310 - protein, 59 aa, Zea mays
  Clone ID: MRT4577_137983C.1.pep
PLSRAAYICSFSKSLAAVSTVLGPSPSIESSYSPHMYDTLSLSMSYDQTICPVTHGLIS

SEQ ID NO: 226311 - protein, 56 aa, Zea mays
  Clone ID: MRT4577_137984C.1.pep
YDYSETYGWCGRPAMISFAGGLGPNQYQAMRQVLNTNPPLTRGDTLLRASCWTPPA

SEQ ID NO: 226312 - protein, 79 aa, Zea mays
  Clone ID: MRT4577_137985C.1.pep
SLGFWDTPSTPSQGMPAIYWARWVHSGPGHFFFTWSPFFQVKKKSARFVLNVKAQRKVLFPFNVFIWSPKSSCFWLPLC

SEQ ID NO: 226313 - protein, 143 aa, Zea mays
  unsure (1)..(143): unsure at all Xaa locations
  Clone ID: MRT4577_137986C.1.pep
FFRTPSGLTHHAFFCFYPXRAEGGQGEGASXSSWTLSPQRQPMXPRRGPMHYCSRWYPDTRTXHLGSSPXXAISRWPDLQXXGXISRXRDTSGRSLHVLSGNRAQRRSMXLRACARPHTSARXLRLXFDTFXXSXXHSSVSLL

SEQ ID NO: 226314 - protein, 47 aa, Zea mays
  Clone ID: MRT4577_137987C.1.pep
FFSASGSRPTRCSWSASATTSSSPSSPSSLVVIKVHNDPRDLIHHGG

SEQ ID NO: 226315 - protein, 85 aa, Zea mays
  Clone ID: MRT4577_137988C.1.pep
KQHLKRRHYKDQSEDQQVLSKVQETKKYVATGGLSDQGHRTVRSHTLDCPMHQGTVAQRLVSSGSRERSHLTAGMTPDSDYPVSI

SEQ ID NO: 226316 - protein, 79 aa, Zea mays
  Clone ID: MRT4577_137989C.1.pep
IPVTSTLLWIYYQDVLQGGHHVGDSKWINRATSQISPDRRGAPTFVTIAPLTKCLCFKSPAVFFTPFLPKIPSIKKTNT

SEQ ID NO: 226317 - protein, 101 aa, Zea mays
  Clone ID: MRT4577_13798C.1.pep
KGPRPPRRPWSVKKKAVYYFEPCVFPLFFFRLGLAALGGNPLPPGFAILNQNLLYCLGRLSPNLKAMGLFLLKKKKKKKKKKKKKKKKKKKKKKNSKGARY

SEQ ID NO: 226318 - protein, 266 aa, Zea mays
  Clone ID: MRT4577_137990C.1.pep
MSQGQPRRRQGEEGMHAQDKPVKFGDVLDVSGELADQPVAPRDAARLQAAEQSVLGGTQKGGPAAVLQSAATVNARAGHVGRAQTACPVADAGATVTETELAGRRVVTESVGGQVVGKMVSPAPVAMTDPPGALEKDAVTIGRALEAVGAMVGDRPVEQSDAAAVQVAELCATGSDSTVPGGLAAAAQSAADQNARATRDEDKVKLRNVLSNAREKLPADKGATREDAERVVSAEIRNKLDMATTPGGVADAVTTAARLNQERPRP

SEQ ID NO: 226319 - protein, 89 aa, Zea mays
  Clone ID: MRT4577_137991C.1.pep
LNKRFCRDQIKHTGHRAPRGATRKKNGRWPFNQAGGGAKGSNKKGQKVGVPSFTAGGGVCCCHGLLGSHGRGAGPPPPPFARGRAQTGG

SEQ ID NO: 226320 - protein, 41 aa, Zea mays
  Clone ID: MRT4577_137992C.1.pep
KKKKKNFSKKKKKKKKKKKKKKKKKKKKKKKSKKKKKKKLV

SEQ ID NO: 226321 - protein, 115 aa, Zea mays
  Clone ID: MRT4577_137993C.1.pep
HSLKDNGTRMKEGQNAIFYIIVKSKKVVENSRFFEKLKKRGFEGLLMGDAIARFFMGQLKEFGGKKLVFATKEGLKLDKSEDEKNPRGELRGKFGGLCKVIKEGLANKVEKGGGF

SEQ ID NO: 226322 - protein, 78 aa, Zea mays
  Clone ID: MRT4577_137994C.1.pep
KIPPEGGPAQVLNWGGETRPFCLKYAWEGLSFSFFDKNSIYRVNFWIMLNRILALQSLVFYSHSQQVSISPHYTLYSR

SEQ ID NO: 226323 - protein, 50 aa, Zea mays
  Clone ID: MRT4577_137995C.1.pep
RSIPGSYVGHRKDAEIVIHGSRMIAYHGLALNIQPDLAPFRMIRSLLHKG

SEQ ID NO: 226324 - protein, 63 aa, Zea mays
  Clone ID: MRT4577_137996C.1.pep
LCYSREGAGGGGPYLMVVYKARNLGHDTPHNHDPDHRSPHRAILHSVPILREVMDEAVFIVFS

SEQ ID NO: 226325 - protein, 261 aa, Zea mays
  Clone ID: MRT4577_137997C.1.pep
SGYHTFVPVTRKGYWQFNMGDVLVDGKSTGFCAGGCAAIADSGTSLLAGPTAIITEINEKIGAAGVVSQECKTVVSQYGQQILDLLLAETQPAKICSQVGLCTFDGTHGVSAGIRSVVDDEAGKSNGGLKSDPMCNACEMAVVWMQNQLAQNKTQELILNYINQLCERLPSPMGESAVDCGSLASMPDIAFTIGGKKFKLKPEQYILKVGEGQAAQCISGFTAMDIPPPRGPLWILGDVFMGVCHTVFDYGKLRVGFAESA

SEQ ID NO: 226326 - protein, 179 aa, Zea mays
  unsure (1)..(179): unsure at all Xaa locations
  Clone ID: MRT4577_137998C.1.pep
IDDALQXIRHSXXCLSDEQPTXERVQREAQSADMIKLLDVVPEEADARXSSSSNTLLPARSPSVTATSQVSEANVATKALAASDNTKSSAASSGTSNGVQEEASPTKEVLDVTSFRQRAEALEGLLELSAELLETQRLEELAIVLKPFGKNKVSPRETAIWLARSFKGMMTDEAGRTSL

SEQ ID NO: 226327 - protein, 94 aa, Zea mays
  unsure (1)..(94): unsure at all Xaa locations
  Clone ID: MRT4577_137999C.1.pep
MWYLCVFYHMLLDYRRPDVEAXSELFCRXAGAREFVVWXMPENHHVDCPXTSFASMETSALPFRSTTAAGLLKGNYELXSYGTTYEELEKSVTE

SEQ ID NO: 226328 - protein, 101 aa, Zea mays
  Clone ID: MRT4577_13799C.1.pep
FRLCRRSIIRVHALLVLHVDGLHDQFKLLARTDSVLHEVRLARHHRVLAESDDHGRRYVLWRMLRAIESTCQGARALVWTVHSIQRTRPLDVLRGSIRSFR

SEQ ID NO: 226329 - protein, 74 aa, Zea mays
  Clone ID: MRT4577_1379C.1.pep
PTPHLLDLNIRTTAQKRVLRSFIYNPDKQFDALNNLPSPGIISSWSTLMEMLSCSAISSPHGVRRVAFWTCPRC

SEQ ID NO: 226330 - protein, 103 aa, Zea mays
  Clone ID: MRT4577_137C.1.pep
LGGKSGVLNQKKGPVFQETQRPGTPLPNIKAFLPVNESFGFPSQLRAATSGQAFPQCVFDPWDIMGSDPFEAGSQAAHLVLENPKRKGLKKQMTPLFEFEAKL

SEQ ID NO: 226331 - protein, 62 aa, Zea mays
  unsure (1)..(62): unsure at all Xaa locations
  Clone ID: MRT4577_138000C.1.pep
LVCLAATHYTAYDNLSPPVRALRPXXTNRRSPYTRIPDELGEESIWIFEESAMVDFVRPFGS

SEQ ID NO: 226332 - protein, 510 aa, Zea mays
  unsure (1)..(510): unsure at all Xaa locations
  Clone ID: MRT4577_138001C.1.pep
MAATAYPTVVLIPLCVPGHLASMIEAGKRLLGRSRCPMSLTVLITQMTMSANLXPTSTTSCGGKPTPAWTSASSTSPPWSSPPSTTASRXMMRFIQLHATHVKEAVSGMSSPVAAVVVDYFCTTLFDVARELALPAYAYMPCGASMVALMLRLPALDGEVSGDFEAMEGTVDLPGMPPVPARLMPSPLMRKDPNFAWLVYHGKRFMEADGVIVNTVAELEPSILAAIADGLCVPRRRAPAVYPIGPVLPLKPPSAPGDGEQVVAQRHECVRWLDAQPPASVVLLCFGSMGGSFPSPQVREIADGLERSGHRFLWVLRGPPPPDGSKYPTDANVHELLPEGFLERTKGRGLVWPTWAPQKDILANPAVGGFVTHCGWNSILESLWHGVPMVPWPQFAEQHLNAFELVSVMGVAVAMQVDRKRGNFVEAAELERAVRCLMGGSEEEGRKAREKATEAKALSQNGVASGGSSDASVQKLAREILHKHDDKGCATASGESMGSVVVPASPAGII

SEQ ID NO: 226333 - protein, 116 aa, Zea mays
  unsure (1)..(116): unsure at all Xaa locations
  Clone ID: MRT4577_138002C.1.pep
TTSFVYSRAHNNPTDTTRVLLVAMPLLALAASATSTHTSGGCRCHTPSLVXHYTPPXILPPSCHLPPLVHFTPPVQLPSCVLLPSPLHVPPSVHLSSAPCLYHTIPAQPHPHPHAH

SEQ ID NO: 226334 - protein, 64 aa, Zea mays
  unsure (1)..(64): unsure at all Xaa locations
  Clone ID: MRT4577_138003C.1.pep
MLSRREKATNFKPDYDIDIHMKVLAMSGQESSILTGYKLKCXDTVVGNEMMMGIFGASFACPVP

SEQ ID NO: 226335 - protein, 179 aa, Zea mays
  unsure (1)..(179): unsure at all Xaa locations
  Clone ID: MRT4577_138004C.1.pep
RGGLMCELLXEGPSPPAGKGPKKRGVXFSFGANVYKKFLQEKNRGFIVRSQKKKEEGPKISHGGKVITVFFGPXFCGQMGNKGAFICFPAPKMKPKIVSFSAGPHPDVKPMAYAKNFPRMFQRQKITTLFSHFFQKSLLFVSSPIPFLGRVKEKVPWATNQKKQGVPPSIYLEGTPPFG

SEQ ID NO: 226336 - protein, 52 aa, Zea mays
  Clone ID: MRT4577_138005C.1.pep
ALTSVVSLVLEMLSRREKATNFKPDYDIDIHMKVLAMSGQESSVLTGYKLKC

SEQ ID NO: 226337 - protein, 71 aa, Zea mays
  Clone ID: MRT4577_138006C.1.pep
QPLNSFCFPPALWLLYFSSHPKVLFLLYLPVDDKLPFGLILKKKKKSPIFKFFKGLPVCLNFPFELWGSNL

SEQ ID NO: 226338 - protein, 190 aa, Zea mays
  Clone ID: MRT4577_138007C.1.pep
MARTRVSSHLSILLLLAVLSMCAHSSASAGDDGSSGTGVDDGEGRHARAAATVAELLSAHNAARQAVGVPPLTWSPQIAGFAKDYARSRRGDCTPRRSPLFYFGENLFVGRGRHWNATAMVASWVAEAQWYDYGSNSCAAPPGAGCLRYTQVVWRNTTQLGCARIVCDSGDTFLACDYFPPGNYGTGRPY

SEQ ID NO: 226339 - protein, 91 aa, Zea mays
  unsure (1)..(91): unsure at all Xaa locations
  Clone ID: MRT4577_138008C.1.pep
MRRSPKGHAPNSAWSERIARRSCVHFEELICLHLLSYTPDILHGTIYHWSTATACRDIDYLRTIAGHRTVPVEIXKNYVCTEWKHELITFY

SEQ ID NO: 226340 - protein, 47 aa, Zea mays
  Clone ID: MRT4577_138009C.1.pep
LCRHLGNFVVSFRINCGSVFCGVTDLAILTPIGPQSNKRAAARDLEL

SEQ ID NO: 226341 - protein, 123 aa, Zea mays
  Clone ID: MRT4577_13800C.1.pep
MSRGGSSGGGRSSLSYLFEPEETVLYRTRTSNQETEKAPDTNSGCVKQDDDEKKTVGTEAVHSPPKREVSNPILSSHKPPCNIYHTGQLSSGLLITDRPSTRVRCAPGGASSLGFLFGEEHEK

SEQ ID NO: 226342 - protein, 69 aa, Zea mays
  Clone ID: MRT4577_138010C.1.pep
FYFSKVDHKVAMNSLPTAIYEPLNWGLKNMRPHLKAVDFPTNFWRQLNYYPVVKDFLFVFPHGLEDPKP

SEQ ID NO: 226343 - protein, 346 aa, Zea mays
  unsure (1)..(346): unsure at all Xaa locations
  Clone ID: MRT4577_138011C.1.pep
VPPESAGXNAICEAFGSIPPXLITSLPXGEISVYTVFSCAFLCLLRLWKFYRPPQEYCLAGRGGSVKLELTLDYLLLMHNNHIEFSNSSASNRDSCNDMGSVNEVPAQLIYIDSFPKLRAWYFQNQACIASPLSGLCNKNPVHQVANKILNMICRKMNKGVVSSSTLSSTSSSSVSGSSVSASDDPCQRPAVSGWEFLEAVPFVLEAVLTACAHGQLSSRDLTTSLRDLVDFLPASLAAIVSYFSAEITRGIWKPVPMNGIEWPSPGASLHSIEAEVKEILASAGVQIXQLLSTLTITFKLDRSLEYIQGVIGQALENCAGGMFWPSMPIIGALWTQKVRRWHDFI

SEQ ID NO: 226344 - protein, 221 aa, Zea mays
  unsure (1)..(221): unsure at all Xaa locations
  Clone ID: MRT4577_138012C.1.pep
SVVSSSTLSSTSSSSVSGSSVSASDDPCQRPAVSGWEFLEAVPFVLEAVLTACAHGQLSSRDLTTSLRDLVDFLPASLAAIVSYFSAEITRGIWKPVPMNGIEWPSPGASLHSIEAEVKEILASAGVQINSCYPRGVPPMLPLPMAALVSLTITFKLDRSLEYIQGVIGQALENCAGGSSWPSMPIIGALWTQKVRRWHDFIVLSCMRSPFXQRQRAVAQL

SEQ ID NO: 226345 - protein, 871 aa, Zea mays
  unsure (1)..(871): unsure at all Xaa locations
  Clone ID: MRT4577_138013C.1.pep
RAPALCCFSAALLASSCGAATIASRGVGAAPADSLSGPALGRPWAPRVLVVSTGRTLLAASLPSDSSTSTPGSMSHYLAHMSTLNEILLGVSYGDVIHILSLYGMVPDVAVALMPLCEAFGSIAPPPNXSLPXSGETSVYLVFSCAFLCLLRLWKFYRPPQEYCLTGRGGSVKLELTLDYLLLMHNNRIEFSNSSAANRDSYNSMGSVNEVSAQPIYIDSFPKLSAWYFQNQACIASTLSGLCNKNPVHQVANKILNMICRKMNKGGVSSSNLSSTSSSSVSGSSVSASDDPCQRPAVSASGNFLSLLGGXVGEKLTGFVLWVLDGHILLGCDPGTWKAYVSQFMFLVVKFVPSWLPDIKLDTLKKIAAGXGVGMNVSSRNLLLTYKGSKSGSSVSASVDSYPRPAVPASEFFAAVPFVLEAGLTACAQGRLTSRDLITSLRDLVDFLPASLAAIVSYFSAEITRGIWKPVPMNGTEWPSPGASLHSIEAEVKEILASAGVQINSCYPRGVPPMLPLPMAALVSLTITFKLDRSLEYIQGVIGHALENCAGGSSWPSMPIIGALWTQKVRRWHDFIVLSCMRSPFGRDKDAVAQLIQSCFSSFLQSSSSGSDIIANRGVGALLGDSITDQGLRLPMAPGFIYLRTCRTFHDTYFVSEVILKQVIEWAHKLANGWSFNEPPQLKSGRTPLSCAASMAHQVAMLGGGLLCIAGGPLVVQVLYEDTLPTLLLSAREQSLKNPGPVSSTLQGYAMANMLFYCGSLLWGADRSSPVMKLSFLSRRPRVVRNHMDFIAGVLDGHILLGCDPGTWKAYVSQFMFLVVKFVPSWLPDIKLDTLKKIAAGLRSWHEHDLALSLLERGGPQAISVVVETFL

SEQ ID NO: 226346 - protein, 70 aa, Zea mays
  Clone ID: MRT4577_138014C.1.pep
LVVMDGHGATLGGAHAPAASIPPSHACAKHDVHIEGIYLCARSMCVIRNVWSMLLSRPASKNPIAPRSRI

SEQ ID NO: 226347 - protein, 87 aa, Zea mays
  Clone ID: MRT4577_138015C.1.pep
MPVDSFLAFLCTEWCLSHSNSLDSQSMIIFLIQQANFFLVFQEMGLLETKHGLLQVAETLDFLHNNAHLAHRAISPEVPHTTILLHL

SEQ ID NO: 226348 - protein, 59 aa, Zea mays
  unsure (1)..(59): unsure at all Xaa locations
  Clone ID: MRT4577_138016C.1.pep
RVTKQFTDMFSRKAFLHXYTGKGMEKMKFTXAESKINDLVSEYQQYQDENADKYKEAEY

SEQ ID NO: 226349 - protein, 61 aa, Zea mays
  Clone ID: MRT4577_138017C.1.pep
GVDWSGVCSIGEDISWIYLPIALHIIKFLSAAILISYIGVMVFSSNSIKWMDGLEASFDPA

SEQ ID NO: 226350 - protein, 75 aa, Zea mays
  Clone ID: MRT4577_138018C.1.pep
DRSTRHLLRRRRGSCRKSHAKSRLIRSTTYEAGSTAHRRRRRRPRTNMVGREAASKPMHSVLSGRRPKQLYSTGA

SEQ ID NO: 226351 - protein, 88 aa, Zea mays
  Clone ID: MRT4577_138019C.1.pep
TAFYHPVPGGNSLKKTAPFYYRRLYQTASPGRKNMIHFLPAQVYEMGNRVGGPAVMCNIGSPGFFNGWFLWLSWPFSILFLGGGGRNS

SEQ ID NO: 226352 - protein, 235 aa, Zea mays
  unsure (1)..(235): unsure at all Xaa locations
  Clone ID: MRT4577_13801C.1.pep
MTVLDAESRFHVLAVDDSIIDRKLIEMLLKSSSYQVTTVESGNKALELLGLRDNGAEDASPPSSSXSSSSSSSPDHQEIDVSLIITDYCMPGMTGYDLLKRVKGSSSLKDIPVVIMSSENVPARISRCLQDGAEEFFLKPVKPADMKKLKSHLLKRKQPKQKNKPQAQAVESPEQQLDPHPQPVHELELEEAAADRNGVNKRKAAAMEEGLTVVVTAPESTKPRRLSTSSLTVET

SEQ ID NO: 226353 - protein, 136 aa, Zea mays
  unsure (1)..(136): unsure at all Xaa locations
  Clone ID: MRT4577_138020C.1.pep
PPPPPPPRPPXPXPRPSAPSPSPPGXVPPWPCLRRPSPVPPCPLPRXSPLSXLCPPVXAPVFSCCRSWPRRLAPVLSAFPVCWWFLPLGPRALAVFAVFLSLPLSLPPLGALFRCLPSAVAPVRRCAASSCPGCAV

SEQ ID NO: 226354 - protein, 586 aa, Zea mays
  Clone ID: MRT4577_138021C.1.pep
MLDKVLIDSDAVSVLKGVYNHLLKFRDFLSWEAAVAMAVIEADSSIEKPQAAVENEAASVTEKPLAGGDKAKGDKKSKKKKTLGKGTSAVLMLLRDHVTNGSTVAAMNSASVAEWATSLSLLFDPKCPGLESLVEKVKEIVESNEVRRLPKIPKGTRDFGKEQMAIRERAFSIITSVFKMHGATALDTPVFELRETLMGKYGEDSKLIYDLADQGGELCSLRYDLTVPFARYVAMNSISALKRYQIAKVYRRDNPSKGRYREFYQCDFDIAGVYEPMEPDFEVIKVLTELLNQLDIGTYEIKLNHRKLLDGMLEICGVPPQKFRTVCSSIDKLDKQTFEQVKKELVDEKGISNETADEIGNLVKTRGPPLEVLMELRKEGSKFMNNVGSVAALNELEILFKALDKANAISKIIFDLSLARGLDYYTGVIYEAVFKGAAQVGSIAAGGRYDNLVGMFSGKQIPAVGVSLGIERVFAIMEQQEKERNEKIRPTETEVLVSILGKDLTLAAELVSELWNAGIKAEFKLTTRVANHIKYALQSSIPWMVLVGESELQKGTVKLKDVEANQEEEVDRKDFVRELKKRLSKS

SEQ ID NO: 226355 - protein, 125 aa, Zea mays
  unsure (1)..(125): unsure at all Xaa locations
  Clone ID: MRT4577_138022C.1.pep
PPPSTCSSSAGDDDVVSALDDDDEVDVPPALPPRNDMTITGKLNAEEDTIFLKVQIADEASGHARNIYFPFDMASDTAAEVAXEMVKELDITDRHASEIAAMIQQEIGRLLPGRAQQHEYTYASR

SEQ ID NO: 226356 - protein, 112 aa, Zea mays
  Clone ID: MRT4577_138023C.1.pep
MQVNYVEPLLSSPIVSDAAFCTMLRLARCTAPPLCKWALDIAAAIRVISVGDFEMVLDLTPVIMEDDSKKPSSGIFEQIVNGLTIACKAGPLPADSFTFVFPVCPPLSLVQP

SEQ ID NO: 226357 - protein, 158 aa, Zea mays
  Clone ID: MRT4577_138024C.1.pep
GKQIPAVGVSLEIERVFAIMEQQEKERNEKIRPTETQVLVSILGKDLTLAAELASELWNAGLKAEFKLTTRVANHIKYALQSGIPWMVLVGESELQKGSVKLKDVEANQEEEVDRKDFVQELKKRLSKPNIHLRQNQLRQRRRMILQHCSLKCWGCFC

SEQ ID NO: 226358 - protein, 246 aa, Zea mays
  unsure (1)..(246): unsure at all Xaa locations
  Clone ID: MRT4577_138025C.1.pep
MLDKVLIDSDAVSVLKGVYNHLLKFRDFLSWEAAMAMAVIETDSSVEKPQSAVDNEAAGSSEKAQAGGDKAKGDKKSKKKKTLGKGTSAVLMLLRDHVTNGSTVASVNSVLVAEWAASLSLLFDPKCPGLVSLVEKVKEIVESNEVRRLPKIPKVIIILFADGAVLFIWSNXGTHIVMLFPFLTFLNVCAYXXGTRDFGKEQMAIRERAFSIITSVFKMHGATALDTPVFELRETLMGKYGEDSKL

SEQ ID NO: 226359 - protein, 119 aa, Zea mays
  Clone ID: MRT4577_138026C.1.pep
LGIERVFAIMEQQEKERNEKIRPTETQVLVSILGKDLTLAAELASELWNAGLKAEFKLTTRVANHIKYALQSGIPWMVLVGESELQKGSVKLKDVEANQEEEVDRKDFVQELKKRLSKP

SEQ ID NO: 226360 - protein, 226 aa, Zea mays
  Clone ID: MRT4577_138027C.1.pep
VYVSLVCLSTTNKESEKERVAVSSCGFTSGGIGRGERCHPCRGPSCASNAAILAIKRPLPLPSRATLLAGNVLTRLPGGQLPDPPPWSATSRSASLTVLRHVCDGPEVSFRNVCLFVPWMFSQGERWYVREVLHNNLQERNGTFASVLYPGHKSLYTNSRQCTWLSGRYLRGTRRYFASGARDFFTSGARDFFIWEVRSTLIFASRGVFRITCAVIGEGWVKIPKT

SEQ ID NO: 226361 - protein, 474 aa, Zea mays
  Clone ID: MRT4577_138028C.1.pep
MGKVVKNPNLNSQDDTFPYLGSYSGLLQPGAGLHEKGLPLRPQEVGLAMAVQDPLVGVLGCLTLEVEPVHKVDLEPVLKAPHQGRGRARTRDEVFESDGDEYNYDIISSMKTYDKANWTETNIYMFCELSVEQIRAGNCPSGTMSNGGYKIIAQKFLEKYGLWRSTKQLKNKWPQCKTLYAFHVWSQGETSLGRNPDGTIFAPDNWWKKTYRGRRKPESKKLRTCLPYYLDYIREMFHGYGVGGRSSCIPGEANYPIEADDVNEEGDDDDIIKPKDLEFGTIHQRLQSPRFSLFFDKCIGAIYGTHIPVVVPTTETVQHTGRHGYTSQNVLAVCDFDMRFTFVVVGWPGSIHDIRVFKDAINKYGHKFSHPLQGKFYLVDSGYPNRPGYLAPYKGYPMPKQSQIIIACMTLHNFFRESSMSDDDFNLCDHDENYVPLFGASSSQLGTSTAREGEEDENMNEFRDWIANGLFPRA

SEQ ID NO: 226362 - protein, 119 aa, Zea mays
  Clone ID: MRT4577_138029C.1.pep
GSCFSQQPRFFQFQLRLLNCLQILNKNPFPPAIGNSKDLDPHQARFLKGLNAVQKQLHLGLRPPIKSHFRPTRRFGFINSIHAQNAGAIPLIVFARPKELLWPMGNHGSFSRILPPKND

SEQ ID NO: 226363 - protein, 279 aa, Zea mays
  Clone ID: MRT4577_13802C.1.pep
MAARLRRSPISSPIPPPSLCISLYPPPHSSVETTYPACSTYLRSPAMTVLDAESRFHVLAVDDSIIDRKLIEMLLKSSSYQVTTVESGNKALELLGLRDNGAEDASPPSSSSSSSSSSSPDHQEIDVSLIITDYCMPGMTGYDLLKRVKGSSSLKDIPVVIMSSENVPARISRCLQDGAEEFFLKPVKPADMKKLKSHLLKRKQPNQKNKPQAQAVESPEQQLDPHPQPVHEPEEAAADRNGVNKRKAAAMEEGLTVVVTAPESTKPRRLSTSSLTVET

SEQ ID NO: 226364 - protein, 106 aa, Zea mays
  Clone ID: MRT4577_138030C.1.pep
SRAIRNSRYLKAAQELLDEVVNVWKSIKQKAQKEQVEAGKTEGKENEGGGPKSEGPQESGANAAPELSTAEKQELQNKMAKLMAMLDEVDRKYKHYYHLMQSVFSC

SEQ ID NO: 226365 - protein, 55 aa, Zea mays
  unsure (1)..(55): unsure at all Xaa locations
  Clone ID: MRT4577_138031C.1.pep
ARCPXLGXRCXRSXCARCXPGRRXRGGGPSARGXSXWXRGARRXRWRXSXRXRAP

SEQ ID NO: 226366 - protein, 100 aa, Zea mays
  Clone ID: MRT4577_138032C.1.pep
TKCAVVWRTGLSGVPPDSVRCTRTVQGPSRHSRVFTGALRYKSSDPYHFLHLTRPFPYLRKNMEMGRKRERAYSVRFFGIPFFSWIEPVFIPYLTNMGRA

SEQ ID NO: 226367 - protein, 68 aa, Zea mays
  Clone ID: MRT4577_138033C.1.pep
KNCFFFFFLVFYQLFNKSFHDVVWFLFKRFFTSIFLNGCPTSQQATRAVDTQTQTRRRPANHEDARPC

SEQ ID NO: 226368 - protein, 104 aa, Zea mays
  Clone ID: MRT4577_138034C.1.pep
CGAAEMGVVPSVTSGQLSLFLWVQWLRKPTVVRFGSGGRCSLLCSQLFLFQISSCSFRIAPKVTKTSRSHVLIIPPPPPPMSMLLNIYMMATSLVFSRQKKLKP

SEQ ID NO: 226369 - protein, 232 aa, Zea mays
  unsure (1)..(232): unsure at all Xaa locations
  Clone ID: MRT4577_138035C.1.pep
MPRSRINGNFIDKTFSIVANILLQIIPTTSGEKRAFTYYRDGXLTLYRREKPYEMKTSCTVLERRFFEXMNDRXMLAQSEGNYAEALQNYYEAMRLEIDPYDRSYILYNIGLIHTSNGEHTKALEYYFRALERNPFLPQAFNNMAVICHYXDYLHYRKKKKKKGGNFLVNTRKEGFLYSNRGEQAILQGDSEIAEAWFDQAAEYWKQAIALTPGNYIEAQNWLXITKRFEFE

SEQ ID NO: 226370 - protein, 156 aa, Zea mays
  unsure (1)..(156): unsure at all Xaa locations
  Clone ID: MRT4577_138036C.1.pep
QKCVWLIVQVNVELVGVDTRPDIERAVSFGEKPRTSMAPPPLPTTRDGRKSLEAATYHDVLDLKQLLDLADKEGRVAVYGNKRNSDTSSVSSVSSSSSGSITSTSSASTSGGASPEPASTSKRRFLPWMMRSRDFRQRSTDTESLSQXLPTKSTDX

SEQ ID NO: 226371 - protein, 149 aa, Zea mays
  Clone ID: MRT4577_138037C.1.pep
AVVTTQSTRGEKRAFTYYRDGMLAQSEGNYAEALQNYYEAMRLEIDPYDRSYILYNIGLIHTSNGEHTKALEYYFRALERNPFLPQAFNNMAVICHYRGEQAILQGDSEIAEAWFDQAAEYWKQAIALTPGNYIEAQNWLKITKRFEFE

SEQ ID NO: 226372 - protein, 170 aa, Zea mays
  Clone ID: MRT4577_138038C.1.pep
MPRSRINGNFIDKTSLIVANILLQIIPTTSGEKRAFTYYRDGMLAQSEGNYAEALQNYYEAMRLEIDPYDRSYILYNIGLIHTSNGEHTKALEYYFRALERNPFLPQAFNNMAVICHYRGEQAILQGDSEIAEAWFDQAAEYWKQAIALTPGNYIEAQNWLKITKRFEFE

SEQ ID NO: 226373 - protein, 82 aa, Zea mays
  unsure (1)..(82): unsure at all Xaa locations
  Clone ID: MRT4577_138039C.1.pep
MFVLSAKLAGFAXXTSTQLGGGASTDDTPKRLTYDEIQSKTNMEVNVTITCNQCPTIYNXVHSVPVKDLKYHMNNMHLYPNS

SEQ ID NO: 226374 - protein, 66 aa, Zea mays
  unsure (1)..(66): unsure at all Xaa locations
  Clone ID: MRT4577_13803C.1.pep
GVGKKKSSSIDPRALAIFEDARKXVGXDGAKXEVTRPPLGRLEQEGPHHQRQRQIIYMLXWRGGKT

SEQ ID NO: 226375 - protein, 76 aa, Zea mays
  Clone ID: MRT4577_138040C.1.pep
SKRRRWLSTCHWSRSYQSLVSQCQGSVQRGGASTVHMTGPYVITLLEIFRFSLLMPYIMGTNHSDVLYPANNSNRC

SEQ ID NO: 226376 - protein, 41 aa, Zea mays
  Clone ID: MRT4577_138041C.1.pep
TTPTMRLGSSFTYIHVSSWQSFYIITATPSLYMKYISTHTK

SEQ ID NO: 226377 - protein, 167 aa, Zea mays
  unsure (1)..(167): unsure at all Xaa locations
  Clone ID: MRT4577_138042C.1.pep
MATAFKNMLHPLHHHRDKKEPPHSGPLHDRTDSVMDKPREQEKQQLTLWEAHKHTLTPEEIDIDPQKKPVGHSSKVLREEDFELIKTLGTGTFARVWLVRLKDAKPGDENKVFALKILRKVDVIRLXQVEHVRNERNVLXRXGHPFITTMVASFQSLDSLYMVLDYC

SEQ ID NO: 226378 - protein, 80 aa, Zea mays
  Clone ID: MRT4577_138043C.1.pep
KKFWKCHCQLFGLQHCLGVNGCSLHVKTLCGAALSAFKPQGRDEGLPRHFSGAFLSRVSHEALSSQGSAPHMLTPRLTQG

SEQ ID NO: 226379 - protein, 82 aa, Zea mays
  unsure (1)..(82): unsure at all Xaa locations
  Clone ID: MRT4577_138044C.1.pep
MMIMEQEEEACSTCCSSPLRQCRICHDEEDERRSAMESPCACSGSLKXGCVQRWCDEKGSTVCEICLQNFETGYTVPPKKTQ

SEQ ID NO: 226380 - protein, 123 aa, Zea mays
  Clone ID: MRT4577_138045C.1.pep
MQAVGIRRGLTIDPAGEEEAPAARVWRLVRESPVVIFARRGCCMAHVMRRLLAAVGAHATVIEVDAGAAEEQELARAVEGGGGGGVPALFVGGDPVGGLEGLMGLHLSGRLVPRLRELGALCA

SEQ ID NO: 226381 - protein, 46 aa, Zea mays
  Clone ID: MRT4577_138046C.1.pep
IVEWKHYSSPSAVVAEQFPHPIPTLRSTDPYMMGEAKENDVYEEEL

SEQ ID NO: 226382 - protein, 68 aa, Zea mays
  Clone ID: MRT4577_138047C.1.pep
PINIKKKKKKKKKNKKKKRASIKGYEVKTNSIPWWGMLNRWNRYFFMGCCVHEDILGGCRRRYSAGAR

SEQ ID NO: 226383 - protein, 82 aa, Zea mays
  Clone ID: MRT4577_138048C.1.pep
ATSSGQTWGIGDPSPIGWRGEGEGEQLGVHLISVRQRIRPRSTYPFSSLPYYEGKAQAPADRERIIDSSKYCREQRPTLVTG

SEQ ID NO: 226384 - protein, 57 aa, Zea mays
  Clone ID: MRT4577_138049C.1.pep
VCIMKYMNKFMCFDILFLHVLYFIFHLSLFHNSIHEGMTFVIFAHDLRPKFIIPLGR

SEQ ID NO: 226385 - protein, 340 aa, Zea mays
  unsure (1)..(340): unsure at all Xaa locations
  Clone ID: MRT4577_13804C.1.pep
VDLSPGEFDSFADILKLYEGGIKLPNIPALEEVRKRFPLQLVKDLIPMGGDFLLKLPKPQIIKADEKAWMTDEEFAREMLAGVNPMMIKRLTEFPPKSTLDPSKYGDHTSTITEAHIGKSLEGLTVEQALADNRLYIVDQHDNLMPFLVDINNLDGSFVYATRTLLFRRGDGTLAPVAIELSSPLIQGDLTTAKSTVYTPHHAGVEGWIWQLAKAYASVNDYGWHQPISHWLNTHAVMEPFVIATNRQLSVTHPVYKLLHPHYRDTMNINARARGLLINAGGVIEMTVFPRKHAMPMSSMVYKNWNFTEQALPDDLIKGGMXAVEDPSSPHXVRLLIEDY

SEQ ID NO: 226386 - protein, 89 aa, Zea mays
  unsure (1)..(89): unsure at all Xaa locations
  Clone ID: MRT4577_138050C.1.pep
MSPRPRRPVHALGLLSEGAAVGFEEEKMRSARPHRAGLVHPMRQRCAWGSVYCLEHGIXPDGQVXGDKTAGHHDDAFSTFFSQTGAXKH

SEQ ID NO: 226387 - protein, 41 aa, Zea mays
  Clone ID: MRT4577_138051C.1.pep
MRMENPCLMERQDINNLTKLPLNGGIWLTGIQGNNIFSYLK

SEQ ID NO: 226388 - protein, 79 aa, Zea mays
  Clone ID: MRT4577_138052C.1.pep
FQGGYGGGGYGDGAVTGGSEGERERDTRPPYRGGGRRGGYRNVEFGDDSERPPRRNYERHSGTGHGYEMKRCVVCCCHI

SEQ ID NO: 226389 - protein, 83 aa, Zea mays
  unsure (1)..(83): unsure at all Xaa locations
  Clone ID: MRT4577_138053C.1.pep
GCSSAAPDLIRGTYHTARRRSRLLTAGCVTPSSXPRSLALTGLLPRRRGGGRLRALGCVPCGPGPDGRPGGPCRAGLLLPGGA

SEQ ID NO: 226390 - protein, 277 aa, Zea mays
  unsure (1)..(277): unsure at all Xaa locations
  Clone ID: MRT4577_138054C.1.pep
MATLNPFELLGADDNDDPTQLIAAAAAAAQKAEAKKSAVAPAGKAAQPAATTKFPTKPAPPSQTVRDARGGGSSARGGFGRGERGRGRGGRGYGQNRGFSGDNGNEFQGGYGGGGYGDGAVTGWICKDATANEEEEKEEDKEMTLEEFEKIREEKRKALLALKAEERKVEVDKDLQSLQPLSNKKENDEVFIKLGSDKDKKKENAXERDERAKKSVSINEFLKPAEGERYYGGRGRGRGRGDRGGFRGGYRGGYSRGPAAAAPSIEDQAQFPSLGGK

SEQ ID NO: 226391 - protein, 47 aa, Zea mays
  Clone ID: MRT4577_138055C.1.pep
NNEIEVDIDSMDAETLWELDRFVANYNKNLSKQNRKAERAMRARQDA

SEQ ID NO: 226392 - protein, 172 aa, Zea mays
  unsure (1)..(172): unsure at all Xaa locations
  Clone ID: MRT4577_138056C.1.pep
NEEEEKEEDKEMTLEEFEKIREEKRKALLALKAEERKVEVDKDLRSLQPLSNKKENDEVFIKLVSFLVINALIPXFAELCMGSSIFFCSXGSDKDKKKENAERDERAKKSVSINEFLKPAEGERYYGGRGRGRGRGDRGGFRGGYGGGYSRGPAAAAPSIEDQAQFPSLGGK

SEQ ID NO: 226393 - protein, 50 aa, Zea mays
  Clone ID: MRT4577_138057C.1.pep
IVNPFFLSYQETILVSKRNENGIPKGIPIPHSSEIRRLKSPYMNPNSVLC

SEQ ID NO: 226394 - protein, 176 aa, Zea mays
  unsure (1)..(176): unsure at all Xaa locations
  Clone ID: MRT4577_138058C.1.pep
DATANEEEEKEEDKEMTLEEFEKIREEKRKALLALKAEERKVEVDKDLQSLQPLSNKKENDEVFIKLVSFPVINALIPXFAELCTGSSMFFCSXGSDKDKKKENAERDERAKKSVSINEFLKPAEGERYYGGRGRGRGRGDRGGFRGGYGGGYSRGPAAAAPSIEDQAQFPSLGGK

SEQ ID NO: 226395 - protein, 110 aa, Zea mays
  Clone ID: MRT4577_138059C.1.pep
LLPADGTKQSGGGYKKGPAGPTQHKGKGADTTQQAEGAGRTRRGRATPPHPNEEAPRRTHEARRKRRPARGGCPDRKETSRERHRTAGTSTRGQTKNVRGNRPKSSQPTK

SEQ ID NO: 226396 - protein, 66 aa, Zea mays
  unsure (1)..(66): unsure at all Xaa locations
  Clone ID: MRT4577_13805C.1.pep
DEDVRLGANYFSERQAIWTAGQGDCDXKXYFEPPRSPLFXPPQQKCWSFYRYXVPXLVDTFLLLYI

SEQ ID NO: 226397 - protein, 378 aa, Zea mays
  Clone ID: MRT4577_138060C.1.pep
MATLNPFELLGADDNDDPTQLIAAAAAAAQKAEAKKSAVAPAGKAAQPAATTKFPTKPAPPSQTVRDARGGGSSARGGFGRGERGRGRGGRGYGQNRGFSGDNGNEFQGGYGGGGYGDGAVTGGSEGERERDTRPPYRGGGRRGGYRNVEFADDSERPPRRNYERHSGTGHGYEMKRDGAGRGNWGTATDELIAQDAEDSPKMEEAAPVAEKQGEQNDAPAADENKDNKDATANEEEEKEEDKEMTLEEFEKIREEKRKALLALKAEERKVEVDKDLQSLQPLSNKKENDEVFIKLGSDKDKKKENAERDERAKKSVSINEFLKPAEGERYYGGRGRGRGRGDRGGFRGGYGGGYSRGPAAAAPSIEDQAQFPSLGGK

SEQ ID NO: 226398 - protein, 137 aa, Zea mays
  Clone ID: MRT4577_138061C.1.pep
MENFFLALNHPRFFSPPIGPFFLGPPKPSQFQFFKAWPFLLGLENVFPQAPLRVPFSPPGPPLTFWSPCFWVFFFRGGPFFLFLINPRFLGAFVARFFFFFPKKKKKKKKKKKKKKKKKKKKKKKKKKKKRKKKKKR

SEQ ID NO: 226399 - protein, 381 aa, Zea mays
  unsure (1)..(381): unsure at all Xaa locations
  Clone ID: MRT4577_138062C.1.pep
MATLNPFELLGADDNDDPSLLIAAAAAAAQKAEAKKSAVAPAGKAAQPAATTKFPTKPAPPSQTVRDARGGGSSARGGFGRGERGRGRGGRGYGQNRGFSGDNGNEFQGGYGGGGYGDGAVTGGSEGERERDTRPPYRGGGRRGGYRNVEFGDDSERPPRRNYERHSGTGHGYEMKRDGAGRGNWGTATDELIAQDAEDSPKMEDAAPVAEKQGEQIDAPAADENKDNKDATANEEEEKEEDKXQEMTLEEFEKIREEKRKALLALKAEERKVEVDKDLRSLQPLSNKKENDEVFIKLGSDKDKKKENAERDERAKKSVSINEFLKPAEGERYYGGRGRGRGGRGDRGGFRGGYGGGYSRGPAAAAPSIEDQAQFPSLGGK

SEQ ID NO: 226400 - protein, 54 aa, Zea mays
  unsure (1)..(54): unsure at all Xaa locations
  Clone ID: MRT4577_138063C.1.pep
LGGACSNFKGQGNAYFPLKVQAAVYSKQYMDISVPYKDHLXLKKKKKKKKKEGE

SEQ ID NO: 226401 - protein, 99 aa, Zea mays
  Clone ID: MRT4577_138064C.1.pep
FPLYMPVSYMSVPSVYTNVIQRWPFNVVYISACFINHYLPLSCPCCHCTGMLSFPSLAYSCTLRQRRNSGPSLRPSARSVANSKSIYTCSSEHVNIGVR

SEQ ID NO: 226402 - protein, 71 aa, Zea mays
  Clone ID: MRT4577_138065C.1.pep
PWRKMIVNPVVTFEKLGGSPDVFIGAQLKAVWVKVGMPPLPRNAPGVPPGVFTEGFFQVQAKKKPPFNSYG

SEQ ID NO: 226403 - protein, 102 aa, Zea mays
  unsure (1)..(102): unsure at all Xaa locations
  Clone ID: MRT4577_138066C.1.pep
TRLPGRAQEPARGGAEXXGGHRRGQCERAWRRSSFGGAPARDWASGGRGRGAQLAIDRVREEWEGNGRAEPDFGGSGQPAGRAVSGSGIAHCSARCTTPDLA

SEQ ID NO: 226404 - protein, 68 aa, Zea mays
  Clone ID: MRT4577_138067C.1.pep
VPSVLQYHYRYKLFLLVPPSLKNMCLCKKSRSIFYLGSAFRSPCLYLALAGTVELQKSNQGAAPLVVL

SEQ ID NO: 226405 - protein, 110 aa, Zea mays
  Clone ID: MRT4577_138068C.1.pep
KGGTPRQREAKGAQKGKRAAENEQPGDADNPAGTHRTPGHADPRERTRREGEDARTERPPKHRRRPERPTGRAGHLHINHGGGRAYKHRDRNTRGGRRADNYHLRATILA

SEQ ID NO: 226406 - protein, 111 aa, Zea mays
  unsure (1)..(111): unsure at all Xaa locations
  Clone ID: MRT4577_138069C.1.pep
PSPRTRRAGPCPAAAAXAEGPRRRRPPCAPGPSQPASRRGLAAPPAGRPNPRRGRNRPPGSPGAHIGRPPPPTVRVGGTPGPRPPPPPKGLPAGKKKNQFSSTQSPRQHPH

SEQ ID NO: 226407 - protein, 197 aa, Zea mays
  Clone ID: MRT4577_13806C.1.pep
MEAIHLAYVLVFLLPILLLRSSFDKYAKGALFRDATADLIGDGLFAADGRLWSLQRKLASHAFSSRSLRRFTDGVLDVHLRRRFLPLLDAAARDGGAVDLQDALRRFGFRTICHVAFGVEGLDDDARRQDALFAAFDAAVEISFRSALTPDTFVRRLTKLLDVGKSRRLREAVHAIDDYAMSRRRIQGWRVGGTAST

SEQ ID NO: 226408 - protein, 58 aa, Zea mays
  unsure (1)..(58): unsure at all Xaa locations
  Clone ID: MRT4577_138070C.1.pep
RVPLDHNLSFLQGPAFAPSRILEAFWCGSTNFSTYEGXESYDSRVLTDVEDCPIHEIR

SEQ ID NO: 226409 - protein, 106 aa, Zea mays
  Clone ID: MRT4577_138071C.1.pep
PKSIHLLFIYHGNKGGNPVLGEKTRGRPNPHYFWPPKTKIPNFSYLTQGCSSRAGAPPQLQIPWLPGETGKSPHKRMDWPPLIKDKKKLWDSQADLELFHLHGGPL

SEQ ID NO: 226410 - protein, 95 aa, Zea mays
  Clone ID: MRT4577_138072C.1.pep
SGVALPVKIEKGASFWDIKKAFKAASQGPPKGIMGFVEKDLVFSHFLGDSRLSIFYPKAGVAFNDPFVKLVLWVDNEWGFNNRVVDLIPPMFKTP

SEQ ID NO: 226411 - protein, 131 aa, Zea mays
  unsure (1)..(131): unsure at all Xaa locations
  Clone ID: MRT4577_138073C.1.pep
NSLRETISNRNQLILFGLQDQTRVAIVKAGRPAISGQKYRAKXYAWKAVXRKRKDKAMNKYISTVKQLQEGPAACGKVPHAFPDSNLSYQLWPVPLYQYIILSRGAVWAQYRYGSSLVTSKALCRCPSPII

SEQ ID NO: 226412 - protein, 34 aa, Zea mays
  Clone ID: MRT4577_138074C.1.pep
VANRALLSFHLINSIITISLKFLSYEVWCLLYLN

SEQ ID NO: 226413 - protein, 273 aa, Zea mays
  unsure (1)..(273): unsure at all Xaa locations
  Clone ID: MRT4577_138075C.1.pep
MNAVEPSAAAIAEDPITPAASAAPYPGRLREALTALSEACESGNFSASETASFTISDILDTAAGVSGELDDGSDDSQDASRSGASEVLLREVLEFLSRPSSISNQMALDALSLVLPKPVAKLGARMGRCRDVAAAILKFFVTNCNPRDMLSILCEALDAPMELPNGLSSFVLLLDALAKECVEEHGSAAVDLFNAAHGVGKAIQEMCISMFNKNKDLCAILGLYSLQNIALVSRSRQQDIPLCLXSVVFQSFRFLXTSGFTYRGLLTGSDVTA

SEQ ID NO: 226414 - protein, 39 aa, Zea mays
  Clone ID: MRT4577_138076C.1.pep
ALILSHNIQIKRNLVKELCFSTLSDTLHNSYVVQLARPR

SEQ ID NO: 226415 - protein, 151 aa, Zea mays
  Clone ID: MRT4577_138077C.1.pep
MCISMALVSRSRQQDILSACGSVVFQSFRFLKTSGFTYRGLLTGSDVTAATVELSKEEDADFMEHFSFAMDGAALSVVWTLMHDDKDMSKYAGEELELAVKEVQGNHMEKWEAINMLKYVLSSIHYPWIIKSHSLNLMLILSGEDHVEGDQ

SEQ ID NO: 226416 - protein, 624 aa, Zea mays
  Clone ID: MRT4577_138078C.1.pep
MNAVEPSAAAIAEDPITPAASAAPYPGRLREALTALSEACESGNFNASETASFTISDILDTAAGVSGELDDGSDDSQDASRSGASEVLLREVLEFLSRPSSISNQMALDALSLVLPKPVAKLGARMGRCRDVAAAILKFFVTNCNPRDMLSILCEALDAPMELPNGLSSFVLLLDALAKVFTLIQRRHIEQVKVALPVVLKVMHATVSECVEEHGSAAVDLFNAAHGVGKAIQEMCISMFNKNKDLCAILGLYSLQNIALVSRSRQQDILSACGSVVFQSFRFLKTSGFTYRGLLTGSDVTAATVELSKEEDADFMEHFSFAMDGAALSVVWTLMHDDKDMSKYAGEELELAVKEVQGNHMEKWEAINMLKYVLSSIHYPWIIKSHSLNLMLILSGEDHVEEINNHVDFTCFAHRIFETLKAIESVMIAAPMALVRKKAFAALKKVISMVPSSQRFDILHGLVNNSTSPALTAILLDLVRQEVSRESRQADNDCIEDEGFRGNGLPRWASHALELVELILRPPEGGPPCLPDHSEQVISALNLLRFILIIDSRGQRSAKLFRKETLHKVHSEWLTPLRPIAEQIQLENEKDADEITKQIVCMLNLVQLVLYRCIELVEEKMKGC

SEQ ID NO: 226417 - protein, 77 aa, Zea mays
  Clone ID: MRT4577_138079C.1.pep
MFESWLILCVRPRGVDSPCRDIHYHQIWFVLKSPFSPPRFAVYYGTRSCFIICFGRLGCNFFLVGYAVRRVKLAVGF

SEQ ID NO: 226418 - protein, 223 aa, Zea mays
  unsure (1)..(223): unsure at all Xaa locations
  Clone ID: MRT4577_13807C.1.pep
MEAIHLAYVLVFLLPILLLRLRRRGPPPVKRPRTTTAHCPHPSPVLGNTLHFIRNRRRFFDWYADMLRAAPSGAIEAWGPLGAGHAVTTASPADVDHLLRSSFDKYAKGALFRDATADLIGDGLFAADGRLWSLQRKLASHAFSSRSLRRFTDGVLDVHLRRRFLPLLDAAARDGGAVDLQDALRRFGFRTICHVAFGVEGLDDDARRQDALFAXFDAALEIS

SEQ ID NO: 226419 - protein, 122 aa, Zea mays
  unsure (1)..(122): unsure at all Xaa locations
  Clone ID: MRT4577_138080C.1.pep
FKKPWAHDHEPIKKLVDARNGIKPTVLIGTSGVGRTFTKEVVEAMAALNEKPIIFSLSNPTSQSECTAEDAYTWSQGRAIFASGSPFDPVEYKGRVFVPGQANNAYIIPXGFVLGLIYVWLH

SEQ ID NO: 226420 - protein, 98 aa, Zea mays
  Clone ID: MRT4577_138081C.1.pep
MAHHQKVVVRVPPMPDAKIKQKALEAVAAISGIAPKAAGLKETKMPLIGEMDAVPLPQKLKKIGKIDIVPPPPAKEEKKEEKKGGKKGEKKEEKKEGK

SEQ ID NO: 226421 - protein, 92 aa, Zea mays
  Clone ID: MRT4577_138082C.1.pep
GVRSRQCAPTEASYGLPVWSPRSGRTGTWVARTLLRRLDRATCVGAGAPALVARASTPARMRRWPVYARGSSMDTQDNHGRLHVLHAVSWRL

SEQ ID NO: 226422 - protein, 127 aa, Zea mays
  Clone ID: MRT4577_138083C.1.pep
LRLSSDDRSRVGDGSILSIWHHSTIHGVASATTCIMDPFSSASALIRDSHVGFYDTVRSTVTARLYTLVHMGLGLYYMEQVLWNRLSLRLDHTRQCRLRLMLRCEILGMTTMLGISISVYITDISYE

SEQ ID NO: 226423 - protein, 94 aa, Zea mays
  Clone ID: MRT4577_138084C.1.pep
EEARKEETEAREEEEEEEEEMVPAPQHVTELELGMYALLGVFCMAIFIFLVNGVVFVLRYQRKEPPDSATDPSSPQRHNWVWLGTDQEELSRQL

SEQ ID NO: 226424 - protein, 61 aa, Zea mays
  unsure (1)..(61): unsure at all Xaa locations
  Clone ID: MRT4577_138085C.1.pep
MISLIMPPXDQIARVTKMLGDEYRTASHIKSTLNSQSVIAAITYAQQKLKLXRRVPPNGWG

SEQ ID NO: 226425 - protein, 90 aa, Zea mays
  Clone ID: MRT4577_138086C.1.pep
PPEISFVNSHAPVYHLQAGGGQIHKEECKYIPQPDGDVRPRGVQPPKAKEQERETEAKLKRNQECPVPWEQRSNPEQKLNLMPHGRGCGP

SEQ ID NO: 226426 - protein, 70 aa, Zea mays
  Clone ID: MRT4577_138087C.1.pep
GCTLKTQKGVLERHFVRSQFCNLGNLEGAKCKNFNRRHSLAIYLVTKIKEEATTWGSAGARHLKEILQST

SEQ ID NO: 226427 - protein, 115 aa, Zea mays
  unsure (1)..(115): unsure at all Xaa locations
  Clone ID: MRT4577_138088C.1.pep
FGAKNQAAQSFFKRGFKAGFPPKEPLPPPLKVPPKTMVSPPLFSQKLDLAQVFFHPGSGEVQSPVFFPXTLGKPLSKFGLTHPPPGAKSFFFFGLFIPTIFFKNGLTLFAPVFLT

SEQ ID NO: 226428 - protein, 78 aa, Zea mays
  Clone ID: MRT4577_138089C.1.pep
VRRPPPSLLGVMSSDVAYCDFVCVCGSRARALCGDPGRTRRFRTHCKLGTKASQPASLTGRFAYRSRRSYLRPPGETP

SEQ ID NO: 226429 - protein, 56 aa, Zea mays
  Clone ID: MRT4577_13808C.1.pep
CCTVCYELYIICLVYGKKDHPSADEGFSIFLSNVQFTAIGLLWFERVFVHGLVSSG

SEQ ID NO: 226430 - protein, 896 aa, Zea mays
  Clone ID: MRT4577_138090C.1.pep
MGKRSQKRLIRRHQDGSIGCMAGLIRMFYSRHDANKLLLDRKQPGSRRHSFSAFSGRRGHSRKNSKDLDEIDEYGDYNMEESSFSKPTVKRLLEDELRKLKQLKLPNDEVERILADLGHGACLDKSSTQNSKAKKGDQNHIRGITTTAAPSGSLDPTASNCMKEAEENELEFALADFLGRIHRNCNNNGELCTEMKALIQTKIAELDNPPCTFAYEQQTSRGDENDTAGGKHRCSSSKTQPKKFRDALEMLSSDTELFFQKSNSRILESAQRNQNRLIGSNLEPTKIADNTDSNKDPKSLNQHELATRRYGKESRNIFFWKKERSSPRQTAQGTSSSQPVNKIVILKPNPRREIGHAVAVSSTQAPKLGATESSKFSIKEVRRRFRIVTSEATKGIPSVSEDNLQKGQHWLNSSAFTIIKDTRQLAEQTSEGKFSSSVMKDFRSSNSGRQKKRKNDGPTEKNGSIITSSKDESVFYDEARKHLTEILKDKRQTTKQHPTLEISRSLVRMLSLPQSSTSSPRSSPRAKDCIYLSPEEASIRAIYKSNKDFLEEESQSGEFPENVVCDPSEALHEQAVQERWCVKEESQETTQEGAELDTLRTKEIDKLDCMGKNSNAWGTPAKQCTYKPSQDMVGEAEPGQRHVRTFPSSPENDFEKLECQEPTTPRPSAQIEQISQFSPDGNHEKQEQPSPQSVLDVFFLDGELHKDILRTRYNTTGDGSDQGIFWEDKHPRLCYIKELLELSELCANQNLEVWYLEDELISPCLFEEVHGGNQIDGTKLLFDCICEAVTEIQDIYFRNPACLSSLTHSIRAPPPAGQNLISEINKRVERHLHYRFPSTLDQLVNMDLEGGSWMDLGSESGEVAVVIWDCTLDELLEELVYDLWISGFNLAAGNHL

SEQ ID NO: 226431 - protein, 135 aa, Zea mays
  Clone ID: MRT4577_138091C.1.pep
APAPRIMFVAASLHNCCHDVTASGVPLSIVRHRRCTSRQRRHDHIPWSKEICNTVQFIGTVGTGVDRWQLSASQSLRYCEELLCRMEVNRRYYMNHLLLLLGEIINKGIHKFHTAKTLRSIADSFHLASSSTRTA

SEQ ID NO: 226432 - protein, 126 aa, Zea mays
  unsure (1)..(126): unsure at all Xaa locations
  Clone ID: MRT4577_138092C.1.pep
PRSLGSXSGLTGAXGKXGRRLTQLLFFTTSSXSTRKGIENMGIMAMACTLPLVLVHFPQWGXSMLLPPSADADEEXYYASEWSEDEKSVGRHSASLKFAENSRSERGKRNAVAVLATAAATPEHVV

SEQ ID NO: 226433 - protein, 50 aa, Zea mays
  Clone ID: MRT4577_138093C.1.pep
QHIWRQALKAQATWNSACSGRVLGRVSTQWSLRLLIYTDQIHSECPYSCH

SEQ ID NO: 226434 - protein, 154 aa, Zea mays
  Clone ID: MRT4577_138094C.1.pep
PLSFLVPPPLGPPPFTLYTSRPGVVWNFDRRPILPRPPLWPFFPPVLTGPPLPKIAPPPGPAPNFPVFPPVPLFLKKSVFPFFFPLFVKKFFFFQIFSPFNTVFFFFKVPGSLIITLGPPTLSSFLKLPPGPPPPPFPFRSPPPLFCPQKIPPS

SEQ ID NO: 226435 - protein, 114 aa, Zea mays
  Clone ID: MRT4577_138095C.1.pep
MASTAGYLARRAAQKERVRLLYRRALKDTLNWAVHRHLFYQDASDLRDKFEANRHVDNLDVVDRLIDDAEAQYRNFQHPDPYIVPWAPGGTKFTRNPPPPQGIEIIYNYGKEDQ

SEQ ID NO: 226436 - protein, 303 aa, Zea mays
  Clone ID: MRT4577_138096C.1.pep
GTLEAGPIKPRKYWWGKEDRDPVGNTDDFIWNKDFLPHMERVIANGGADAEPTITRLAPVDEEGESGFLSINRAMSLDSVEVDLSQELQAPTRPILQTQVEAAWRGRAIGAEAVNGASAPRWRLVPTRREQAKWDRAAKAATGGSDVILRESKSRVQQGDPKVLAARSREDYLQLKQRLQWFTLGIGGVGVISAYISYTPEIAVSFGAGLIGSLVYLRMLGTSIDSLAGGTGETVKSAAAQPRLLIPVVLVMMYNRWNQILVPDYGFMQLELIPMLVGFFTYKIATFAQAIQDSIPPVGNREG

SEQ ID NO: 226437 - protein, 114 aa, Zea mays; identical to SEQ ID NO: 226435
  Clone ID: MRT4577_138097C.1.pep

SEQ ID NO: 226438 - protein, 47 aa, Zea mays
  Clone ID: MRT4577_138098C.1.pep
IYEPTTVAIRPSQHSYKMISLSPLAARARSLRTPPILVSLGLFCTVE

SEQ ID NO: 226439 - protein, 114 aa, Zea mays; identical to SEQ ID NO: 226435
  Clone ID: MRT4577_138099C.1.pep

SEQ ID NO: 226440 - protein, 71 aa, Zea mays
  Clone ID: MRT4577_13809C.1.pep
GQVSVGWHYLPPFFFNRRSQGVHMKTYLDHSNFPALGRGGLVTKVHRGPQIWGQFLGPKKKLFCQTPTSHK

SEQ ID NO: 226441 - protein, 79 aa, Zea mays
  Clone ID: MRT4577_1380C.1.pep
MGRAGGGGARRLGSPGARPQFACRLTLAANILTLAQANKDLTEVTHKVHFDIEIHHKPTGRIVMVLFGKTVLIQERTFE

SEQ ID NO: 226442 - protein, 78 aa, Zea mays
  Clone ID: MRT4577_138100C.1.pep
GSSATLMVTMLRDVECHLELIGSLGRELSTRGPQLVFLLHLSQTRRHLKEDQELGHKSCHRSGKGMLEVLCVVLLAEF

SEQ ID NO: 226443 - protein, 120 aa, Zea mays
  unsure (1)..(120): unsure at all Xaa locations
  Clone ID: MRT4577_138101C.1.pep
PPPGPHPSRASGPPSPRWPRPRCSRCPVVPPPRMNHVLGGMPFVPPPRLPGGQKSNNPPPVPEKKERFIPVGNPPPNPLPKARHGKGKXGKGKTPVSLWGPPPPPXLVFGHSPKPPPSPL

SEQ ID NO: 226444 - protein, 102 aa, Zea mays
  Clone ID: MRT4577_138102C.1.pep
RPRELGIRLEARASARFFIGGAWRAESITGVPLPQDTGTPRCYVPMVPSAHPVIGALVLTVQLLTYLKMYAACAILRAHLGLKDHTRWGHQNDCEKHRNKRL

SEQ ID NO: 226445 - protein, 38 aa, Zea mays
  Clone ID: MRT4577_138103C.1.pep
LIMRGLLLGDRTIYILIALSDRVLLIYGDRHISFRVGR

SEQ ID NO: 226446 - protein, 95 aa, Zea mays
  Clone ID: MRT4577_138104C.1.pep
MTSAVVERVPSSDRSVVSFLDPALGPHHRQANGPVIGEVIRDCMQTEPKPRPSISQVPARLRQAVGICPVDAKPSLSPLWWAELPVLSATEASLL

SEQ ID NO: 226447 - protein, 89 aa, Zea mays
  Clone ID: MRT4577_138105C.1.pep
RHASDDGLPGQVPSQPEQRAPPAVVTATVKAPVCGCGAAAEVVVLDPGVGDLIRIHTPWELDLDAALRQGWARQGGRVACESRPGRLGA

SEQ ID NO: 226448 - protein, 88 aa, Zea mays
  unsure (1)..(88): unsure at all Xaa locations
  Clone ID: MRT4577_138106C.1.pep
FCANSSRKGSEDETFDDTAVKVADIDDTFRLQEEPPFDKKSFVSYIKKYIKNLTAVLYPENAYEFKMVSRAXTNFLLTMMKDLQFFGC

SEQ ID NO: 226449 - protein, 57 aa, Zea mays
  Clone ID: MRT4577_138107C.1.pep
SEKKASIAEIPYFYLMLKKRIQGTDDNNERNTSFQEELWVLLILYMGTSKKAFLPFS

SEQ ID NO: 226450 - protein, 69 aa, Zea mays
  Clone ID: MRT4577_138108C.1.pep
PHSLGVIFNNKKPCSASACTFVLARQVAVLYCNRQQRASVVHVCPKAIYEHVPLSSHHLAINNNYNSVY

SEQ ID NO: 226451 - protein, 112 aa, Zea mays
  Clone ID: MRT4577_138109C.1.pep
SYQYSRAKQRGTPFPLPGVPTHHHHHHHPRRQQQPSTTDPSIHSSFLRPAARLHPSPTPLRHQTLGYQLFPPRVLRSPEGGSRAIFPSDFLKPYSRIRDRPATGPLLAFSFS

SEQ ID NO: 226452 - protein, 35 aa, Zea mays
  Clone ID: MRT4577_13810C.1.pep
QLLPPYLFGPALSLRIILYGSGAYQHHYCSTCHLP

SEQ ID NO: 226453 - protein, 74 aa, Zea mays
  Clone ID: MRT4577_138110C.1.pep
YFNSSVGTSLILSLIVFSTLPFGESCLDSFEISSFPSRFENGVLPILTLVAFSPLSVTIIALAPSFIMLMPLPS

SEQ ID NO: 226454 - protein, 47 aa, Zea mays
  Clone ID: MRT4577_138111C.1.pep
PPRAHRVAHDAHSKAEAKGEWLPGLASGSYVDGSLAGDNGFDPLSLA

SEQ ID NO: 226455 - protein, 237 aa, Zea mays
  unsure (1)..(237): unsure at all Xaa locations
  Clone ID: MRT4577_138112C.1.pep
MAAAEAEVSNKGVILKQFVTGVPTEDDLELVTAVVRLAVPPGSASVMVKNLYVSCDPYMRNRMSEHNEASYIEQFVPGEVLATFSVGRVVASGHPNFKSGDLVWGMSGCEEYTLITDPESLFKINHPELPLPYYTGVLGMPGLTAYAGFFDVSKPKKGDYVFVSSAXGQLVGQLAKITDCYVVGSAGSDEKVNLLXTKFGFDDAFNYXKEEDPHAALKRCFPRGIDIYFENVGGAML

SEQ ID NO: 226456 - protein, 179 aa, Zea mays
  Clone ID: MRT4577_138113C.1.pep
MAATAMIRITTLRCRHDPLSSLPRTTSAACSCTLPPRCRQCRLLPPHSSGCSPSSSIFPRRVRVRPTAALKRIGGGNTSFMGPANNGATTLQRSSSPDLRRSLIVLKSTAGTGGGNASSGLLPTILGVAHLLVSLGIVLATDKFLKQAFVAASIKFPSALFGMFCVFSVLVVFDTFVPA

SEQ ID NO: 226457 - protein, 416 aa, Zea mays
  Clone ID: MRT4577_138114C.1.pep
MTSRNPTKTLSVLTTLLLLLEFLALCAPASAQPLHSEPMATQSPPPPLPPGSTIPRAQAGGAARLRRIALGVLFGSLSGFLLALAFLYAIRLAILHAKSTPAIAKGPVSFAPQISAKNLLAALPAAQPLAHGPHGKYYKLALDNDLTVAVKRLEAASRPEASPSMSPSASKSDMRRVQRQLEALARVRHQNVLSLKAYVREADRLSLVYDFVHGGSLEDLMKRVRSQQVSLGWDARSRIAVGIAKGLRHLHFECNPRIVHCNLKPSNVMLDEGLEPLLADCGVARLIAAGSGDPELCTGLYAAPECYQSSRYTDKSDVYALGMILGVLLTGRDPTDSFFSGETTGQGGGGLPRWLRHTQQSADPKETLDTSILGDEGEEEEMLMAIRVAIVCLSDSPTDRPSSDELVAMLTQLHSL

SEQ ID NO: 226458 - protein, 124 aa, Zea mays
  Clone ID: MRT4577_138115C.1.pep
MTNSLESSRPILANSTAKRASTRMSTYSAAPTLTPSIAPSHLSEASSTAGDPKSQDIKSWNAGFNRLEDKRLVQQRYAMSNEKTDDMSKLALGAKLDRALGRRMSGQDAVFRPRAMSEKKEVQA

SEQ ID NO: 226459 - protein, 81 aa, Zea mays
  Clone ID: MRT4577_138116C.1.pep
IPFCNEMSGKLWQNCVQNDVAESDVRLAGHHRLSASLSIIFQNYENAVGKTKFVLFQPNPIFSGLFRSKATRTRWNLRGQN

SEQ ID NO: 226460 - protein, 158 aa, Zea mays
  Clone ID: MRT4577_138117C.1.pep
YSLSAYIQSHSEVSHVEILEHVSSILKEHGFHPTEEDDMDTINLQPYDCKMSDKKSDSKGLIDPNRAIMESDNLHAAKKKVKAMTVTKKVGRGWDPTYTRRSFFPYWRSILVIRCPVKVYPCYARADGRIQRNLDHFSVSQRKSLGNGHVRRTSPLAS

SEQ ID NO: 226461 - protein, 127 aa, Zea mays
  Clone ID: MRT4577_138118C.1.pep
RHQILDLDPEIRTDFSNNKKLCAGRDGRHGPRNTKAPHSARQRRARHGGRSSVSVLIYHCCRCCEGDDDGREARAPELALQRQPDGGWGRQNLRRGQSVLRSATLPLRAWPSPSPSFCRNETNARPA

SEQ ID NO: 226462 - protein, 320 aa, Zea mays
  unsure (1)..(320): unsure at all Xaa locations
  Clone ID: MRT4577_138119C.1.pep
RYAEAGARILRSGGRGGGSDLEGDGGGRXVSIPAGARRTIADIKEIAGGHTDEEVYAMLRECNMDPNETVQRLLLEDTFHEVKRKRDKKKEVSKEPSDSRWRPAVQGQGGKNCRNCASRSLSSSNDSAGRSAISGKENGISLIMGKGSGSTPITNMNMDVKASTFMPSNSLLSGLCNGPYQSVDPAAVLVSSSSAVGDKSGSTALADLTGGLPFKDVVATIDPNSLQPLKPAPPSDPVVVSFLNSHSLGDVGASRQTIGIKKTSVEHKVGRDVSTDKGSSEQSVQSSFRRSSASRPSSSYNSHSEQSQKATEDATVHDND

SEQ ID NO: 226463 - protein, 89 aa, Zea mays
  Clone ID: MRT4577_13811C.1.pep
PPASMGKAFKTVGFYGELDPNNIREALLRAPGLCINTSSWAGIPGYCRFSFFLERGEFKRAMGCKARFKELVLGGAQINGALWTHPCFT

SEQ ID NO: 226464 - protein, 88 aa, Zea mays
  Clone ID: MRT4577_138120C.1.pep
SHLTVRWTTTFALLPFINRNLLTGFRLYLASPILFVNINLLMTSIGHWRCSNSIRHTKRRHYTRGDPAINRCALGVCPRQSLGRTRGW

SEQ ID NO: 226465 - protein, 111 aa, Zea mays
  Clone ID: MRT4577_138121C.1.pep
PEKSGPQGRFGGSGGPEKTNPPPPPRVGGFRRGPPHYIILQKRPGGASMFPQPPPRGAKRVENPGRPRPPFFLSPKEPLRTPAAPEKGPFPCPLGPGGAQTIKCRARNPAP

SEQ ID NO: 226466 - protein, 84 aa, Zea mays
  Clone ID: MRT4577_138122C.1.pep
NPQRNPIRTEPAGQVIFTWNALQHLPGKQYPSRGEEGEFRKSGINAACTPCRAGPNICTCIDQIFACKLLLLGGMNNKKERGYL

SEQ ID NO: 226467 - protein, 81 aa, Zea mays
  Clone ID: MRT4577_138123C.1.pep
EPWFFFQRRQREPLILPCPVLSGLVSLRYAKAAVSGLTALDVSPMLPFRLLSHLERSLFVLSLPTNYRLSMPMRFRNYRHP

SEQ ID NO: 226468 - protein, 399 aa, Zea mays
  unsure (1)..(399): unsure at all Xaa locations
  Clone ID: MRT4577_138124C.1.pep
MEPDSATTRLALLALLLLAAPARPASAAPVEDGLLSNGDFETAPAGGFVRSASVAEGASSIPGWTINGTVELISAGQHQGGMILIVPQGDHAVRLGNDASVGQVVDVEKGSDYAVTFSAARTCAQLEALNVSVLGGVSQTVDLQTLYNIEGWDAYALAFQATEEQAHLQFMNPGMEDDPTCGPILDNVAVKKLFTPDKPKDNVVLNGDFEEGPWMFPNTSFGVLLPTNLDEQTSAIPGWMIESNRAVRYIDSDQYKVPQGKRAIELLSGKEGIISXQMVETTPXKVYSLTXCXGAAGDSCQPPMXXIMAFAGDQAQNFHYSPLGNATSQAVNVTFTARAERTRVAFYSVYYNTRSDDHSSLCGPVIDDVRVWGLNTAAGLKASVGLVLGIVGVVGMVLF

SEQ ID NO: 226469 - protein, 227 aa, Zea mays
  Clone ID: MRT4577_138125C.1.pep
RTIRNLPTRLKMSLVQDMLSPLPDISPEKLTILKLKHSTLNRDVFSEPSSPIHEHEGMNFSKSPNNMSSSVVSRRTSRATSGARRRSSFLHSHRSEMSRELTSQAEGKFFALMDLMSTASREASSLKESWARIVSERESLFKEKEELLSRVEEVTETLERTQTEHHHHGHEHGERKKQVEKLLLELSVAVTTIQEHKKKIADRDHEIDRVRTEIRELQSTSSTSYNE

SEQ ID NO: 226470 - protein, 104 aa, Zea mays
  unsure (1)..(104): unsure at all Xaa locations
  Clone ID: MRT4577_138126C.1.pep
DSPSLGKIPSPQQQQEIQNDPRKGGGEPSSXALQTLFXDAPLARLLRARDWXVQKASPLMXAAVKRRLAFEPELLCWDDIAXEAETGKIYXAAYKATQGKTVLW

SEQ ID NO: 226471 - protein, 55 aa, Zea mays
  Clone ID: MRT4577_138127C.1.pep
MEPDSATTRLALLALLLLAAPARPASAAPVEDGLLSNGDCETAPGGGFVRSASVA

SEQ ID NO: 226472 - protein, 147 aa, Zea mays
  Clone ID: MRT4577_138128C.1.pep
TYPLRPSPTPSSLMHLIHSPSAIYIPCIHAKSSPPRTLTILCASLHTYASSEAHMMSAITNIKMAAPLLLRHRLHEGRSSHQPDRPGPDPRKAQGADDERIAQLLADQETGMVQSIYMKTTSTERSHTLLPISSMRISDTTSRRSQR

SEQ ID NO: 226473 - protein, 209 aa, Zea mays
  unsure (1)..(209): unsure at all Xaa locations
  Clone ID: MRT4577_138129C.1.pep
MEPDSATTRLALLALLLLAAPARPASAAPVEDGLLSNGDFETAPAGGFVRSASVAEGASSIPGWTINGTVELISAGQHQGGMILIVPQGDHAVRLGNDASVGQVVDVEKGSEYAITFSAARTCAQLEALNVSVLGGVSQTVDLQTLYNIEGWDAYALAFQATEEQAHLQFMNPGMEDDPTCGPILDNVAVKKLFTPDKXKDNVVLNGDF

SEQ ID NO: 226474 - protein, 61 aa, Zea mays
  Clone ID: MRT4577_13812C.1.pep
ANEHPSHRVLKYHQPLGAGWWNPDTFSPYPPCSFNRTKLVFCWFHYRPYMLLMLKVWNMTF

SEQ ID NO: 226475 - protein, 80 aa, Zea mays
  Clone ID: MRT4577_138130C.1.pep
QNQFIRTMPLDRIKDKSMGIWVYKKNVVYPISWVGFYTGPTTGPLGQIFFTFLDTEYFTKPMPDWSQVFCCEKKQRGCGH

SEQ ID NO: 226476 - protein, 84 aa, Zea mays
  Clone ID: MRT4577_138131C.1.pep
FKISNAERSLMKELIPGTVNDRADRLNIAGFVKQAVTMGALRCENQVPEPYATTGRTETAVDVYKTRQVLKSSSLLHEGPWGRW

SEQ ID NO: 226477 - protein, 61 aa, Zea mays
  Clone ID: MRT4577_138132C.1.pep
YMRDTYPYDEYLSPGQFRPLILSSIYVALTLEEERRLIMWNLDKNPAIVWLREGHNRNFAA

SEQ ID NO: 226478 - protein, 248 aa, Zea mays
  unsure (1)..(248): unsure at all Xaa locations
  Clone ID: MRT4577_138133C.1.pep
MRPVFVGNLDYDTRHSELDRLFYRYGRVERIDMKSGYAFVYFEDERDGNDAIRALDGYPFGPGRRRLSVEWSRGEQAGRRDGNKPEANTKPTRTLFVINFDPMNTRVSDIERHFTPFGNISSVRIRKNFAFVQFETMEEARKALEATHATTLLDRVISVEYAFRDDSEVSDRYGSPRRGGGYGRRXDSPVYRSRPSPDYGRPASPVYGSYDGPGPGRDRYRRSLAYRXRSHPCEREHMTNREPSLCHI

SEQ ID NO: 226479 - protein, 134 aa, Zea mays
  Clone ID: MRT4577_138134C.1.pep
VSGWGILFVEKLVPIIANLFLEAPPNERFSVSPEVIQGLGRCMNTRRDNPRGTLWRISAESFNRVVTDEVRQDNVDCRSDVNSYKLSRARFWKEVADVYETFLVGSCGRASSFRSLLKLNYITAYEVLEMSALH

SEQ ID NO: 226480 - protein, 228 aa, Zea mays
  unsure (1)..(228): unsure at all Xaa locations
  Clone ID: MRT4577_138135C.1.pep
YPRVFRDGPHPSIPGLTKHRYVFEXPQLKGRLFTEQEVEQLEVDIDEAFKKAYDLVHFKSKTGRNWADYEDDISYEAPKFQGNDARGPVRENKTDSPTPTVSPVATSNSDILNKVVEALVNKIDVSVIERMVVQQIAESAMKRPKNNRRRQSKPKTSPPISPPFTGGKYVTPALRSQGSKPVGPSPGTTSQNKKKNQNXGRLLAEGNPXRWQKKSVASGGPXLVPRPN

SEQ ID NO: 226481 - protein, 196 aa, Zea mays
  unsure (1)..(196): unsure at all Xaa locations
  Clone ID: MRT4577_138136C.1.pep
CSSYHQNYAGYAFVYFEDERDGNDAIRALDGYPFGPGRRRLSVXWSRGDQAGRRDGNKPEANTKPTRTLFVINFDPMNTRVSDIERHFTPFGNISSVRIRKNFAFVQFETMEEARKALEATHATTLLDRVISVEYAFRDDSEVSDRYGSPRRGGGYGRRGDSPVYRSRPSPDYGRPASPVYGSYDGPGPVRDRYRR

SEQ ID NO: 226482 - protein, 58 aa, Zea mays
  Clone ID: MRT4577_138137C.1.pep
QLCLAYSLPTNKTDHGSAQAIASLTNSSSPAAAALRTRSHGPVGSQPCRRIPPGHEWR

SEQ ID NO: 226483 - protein, 99 aa, Zea mays
  Clone ID: MRT4577_138138C.1.pep
MHFQAPTITTGILCFFILLWRLPNLATTTISPQCSQAPISSLLPPYLSTTVSSEFENPILQPYRIQQLIAARILPLSPLFLQQSLDLFQHIPLLHLLAQ

SEQ ID NO: 226484 - protein, 234 aa, Zea mays
  Clone ID: MRT4577_138139C.1.pep
MRLSGFTACNIVIWLLPKKKKKLSCTFTSVGYAFVYFEDERDGNDAIRALDGYPFGPGRRRLSVEWSRGEQAGRRDGNKPEANTKPTRTLFVINFDPMNTRVSDIERHFTPFGNISSVRIRKNFAFVQFETMEEARKALEATHATTLLDRVISVEYAFRDDSEVSDRYGSPRRGGGYGRRGDSPVYRSRPSPDYGRPASPVYGSYDGPGPVRDRYRRSPAYRSRSPPAKRRAYD

SEQ ID NO: 226485 - protein, 37 aa, Zea mays
  Clone ID: MRT4577_13813C.1.pep
KQHTKATSEAAFEQHWRATMAAYICSMLLLHALLTRP

SEQ ID NO: 226486 - protein, 115 aa, Zea mays
  unsure (1)..(115): unsure at all Xaa locations
  Clone ID: MRT4577_138140C.1.pep
PPPHRHRRQHPPEAGHTEKTNTPAPPPSRAQRTPXAAGTRSAGGPPRPAVRHLTALTNXPGKCGLPAPPPPQQDIQKQGGCAXPVSPRPPSIRARRRAPPPPPYRGSATGQAAEE

SEQ ID NO: 226487 - protein, 249 aa, Zea mays
  Clone ID: MRT4577_138141C.1.pep
MLELPQSILDAEAEMHAPKMWRMLITQNKKVESGPGTLAAGRAGIHSKASKPDHQRNEKEEVSVGEKTKERKRDIALRRMALTTDELKAKAEVYYGDEICQLCTQLLLREAGLPNGLLPLKDLIECGYVQETGFVWLKQSKRVDHIFHSLGRLVSYGTEITGYAEKGRIRKVKGIKTRELMLWVPVEEIALDDDPATGKLVCKSIAGITKTFPASAFHIPEKENNVKANCAALKPVVLMERAPRVVKNS

SEQ ID NO: 226488 - protein, 132 aa, Zea mays
  unsure (1)..(132): unsure at all Xaa locations
  Clone ID: MRT4577_138142C.1.pep
GRVPPGPRAPNRPVSPPDEPDRPAPGGRPVGGAPEPPRGTGAKPGAAVGXXPPGPGSTGXRAREGAPCPXPPHPGVQEQRSPQRGPGPHGRGGGRAGATVPPPARARLPXKDERAPPPQTPPEFVVCSGTSA

SEQ ID NO: 226489 - protein, 93 aa, Zea mays
  Clone ID: MRT4577_138143C.1.pep
GVPVVAARAGGIPDIIPKAKEGKPSFLFTPGDFDECVRKINQLLSSKDFREPLGMAPKKKMEKCDWRAPSKKIRNEPFSPPILFWRKKMGKTN

SEQ ID NO: 226490 - protein, 51 aa, Zea mays
  Clone ID: MRT4577_138144C.1.pep
FHSQIIVSLYGVRMTQKLGHNHIDYSIKLHTYPYHYYILYSRFASLKHKNS

SEQ ID NO: 226491 - protein, 101 aa, Zea mays
  Clone ID: MRT4577_138145C.1.pep
PSLVGQYSSRAAHKAAAVAHQCVALNPKSRPHMSAVVEALEPLLALDDCLVGPFVYIAPPETTTANGDEAAPVSSNKEGSGRRGGRRRSSGEGAAVVRPEE

SEQ ID NO: 226492 - protein, 122 aa, Zea mays
  Clone ID: MRT4577_138146C.1.pep
STSVMVGKKKMNGAVRRRLYCWHFMSCQLKRMACPSARRAEPYGMLPSTPNATILCCTLRYATQTRQDNTRSASVLFGTLTERICYATLNPVALVEVRPLSQNTYITWMGQENKTNSPDVMF

SEQ ID NO: 226493 - protein, 83 aa, Zea mays
  Clone ID: MRT4577_138147C.1.pep
GRRRRWHCTARYSVSGTLRGRQHRRHRSTGERVRVTGGTTLGWCRWIVGATRNWQLRPASRGPNTPYRRRYAPPPPPPPPPPP

SEQ ID NO: 226494 - protein, 293 aa, Zea mays
  unsure (1)..(293): unsure at all Xaa locations
  Clone ID: MRT4577_138148C.1.pep
LAQGILYVITLLEKAKLKKLFKDSCQRVCLTTDAWTSQVQDGYMTVTATFIGENWNLHKKVISFFMVKGHKGEDIGKNLTRCLADWGLDRVMTITVDNASANDSGVDYLRKHLQKTNIAKGKYLHMRCAAHIVNLIVRDGLQEVDQSIKRVRAAVRYIKNGTSRLVKFKEIAQEENVDDKAFLKLDVPTRWNYTYLMLKAAIVYEKVFLKLVEDDTNYVIDLSEVRDGPGHPDEDDWDNAKKMAQFLQHFYDLTVRISSSFQVTSNDFFHEXIGEIRMLIQEWLSSEKKKRAA

SEQ ID NO: 226495 - protein, 53 aa, Zea mays
  Clone ID: MRT4577_138149C.1.pep
ATGGHFFLLTIMRRNTEAHNCSSQGVKGHGYDTHLYLLRNLPVVALILLLTCY

SEQ ID NO: 226496 - protein, 56 aa, Zea mays
  Clone ID: MRT4577_13814C.1.pep
GRNRGFLLGNSSHTCLAFYTQTLHMTIILLLNSTSYLSIAMAGVCTNKQSRPMIQR

SEQ ID NO: 226497 - protein, 199 aa, Zea mays
  Clone ID: MRT4577_138150C.1.pep
RGRPGLPGHLPQLPGTHQQICFSHFNLTRPFPTYQKPLHLLLYIMSYAEMAAKGPKQSPEEARAPAPPQVEHTPDDSVHSLVDVDSPHISSVPSDYESQSIKTDTQAERIQREEEVKKEAEKLKERAAAKKESAKEKAKKNADNPVVIGNAVGLAIVGGIVGFGAYRQYARGELTGKVVAAWAAAIGLFGVGDYYVSQY

SEQ ID NO: 226498 - protein, 96 aa, Zea mays
  Clone ID: MRT4577_138151C.1.pep
QFLSRNNHHLMGLLSYAEDTNNSFEGTRKSQTSFSAYLSGIGKNQVDEVALVRKVLDFSFHNVKGLLQLIRHSLESINHESGTSSNLDVEVNKFRE

SEQ ID NO: 226499 - protein, 165 aa, Zea mays
  Clone ID: MRT4577_138152C.1.pep
MGIINWVQNRLNTKQEKKRSAAAAAAGASSVRNAPVREKSCRGQADDELPGDWSMLSIGTLGNEPTPAPAPAPDQAVPDFTIEEVKKLQDALNKLLRRAKSKSSSRGSTAGAGDEEQNLPLDRFLNCPPSLEVDRRLSLRLGRRRRTGSSRRTRRSYSARAGSSS

SEQ ID NO: 226500 - protein, 80 aa, Zea mays
  Clone ID: MRT4577_138153C.1.pep
TPARGLENAAIKGEMGPLKGGLNPPQGGGNPQKWPQGGARPKKKIFILYFIFFFNFFFFFFFFFFFFFFSFVLRFFFSLR

SEQ ID NO: 226501 - protein, 226 aa, Zea mays
  unsure (1)..(226): unsure at all Xaa locations
  Clone ID: MRT4577_138154C.1.pep
MDAMELSWGARCAGLAFFVLSVLVVALAAVLLLVRRWPWCSCHVCRTYLTGSWAKDFTNLGDWYAHLLRESPTGTVHIHVLGCTVTANPANVEYMLKTNFENFPKGKRFSALLGDLLGGGIFNVDGDAWRHQRKMASLELGSVTVRSYAYKIVAHEVETRLLPVLADAADXXGKVVDLQDVFRRFAFDTICKISFGLDPGCLDLDMPMSDLANAFDTASRLSAMRG

SEQ ID NO: 226502 - protein, 218 aa, Zea mays
  Clone ID: MRT4577_138155C.1.pep
IFWNKKKKKKKKKKKKKKKKKKKKKKKKKKKKKKKKKKLLSSPIRRWPSGPPFRPLSLESSISPPTMGKKKPHINFGVIGHVNSGKSTPTGPLIYKFGGFDKGGIKRFKKEVVEMNKGPFKNAGGLNKLKVEGEKGIPFDIALGKFETTKYYCTVFDAPGHRDFFKNMITGTPQVDGAALIIDSTTGGFEAGIPKDGQTREHALLAFTLGGNQMICCC

SEQ ID NO: 226503 - protein, 130 aa, Zea mays
  unsure (1)..(130): unsure at all Xaa locations
  Clone ID: MRT4577_138156C.1.pep
HRAPPLPSSSSRSVARLGSNPKQGVDLSAAGMSKLQSESVKDAISQIVGYGKENNRKFAVTVELHIERQNYDAQKDKDCCNAVFCAYDPHTTIXYGRWCFPDHFDEAPLLMGVTRCMCFGAPLHQXEXEH

SEQ ID NO: 226504 - protein, 59 aa, Zea mays
  Clone ID: MRT4577_138157C.1.pep
RGRTPAGVQPRSVSLYVGVRELRDNCVRRPHRGRQFLIPTSSDCVLVHDHAQSFRIGPA

SEQ ID NO: 226505 - protein, 55 aa, Zea mays
  Clone ID: MRT4577_138158C.1.pep
GLVKVEEFKSYYFSFTYDLHKYSYWLVAGSLAFCVPTALIQSFTSEVISMYCAPL

SEQ ID NO: 226506 - protein, 89 aa, Zea mays
  Clone ID: MRT4577_138159C.1.pep
LRVHRRGTCPRLYIIDHSDARVIRRSVRTLNRIRRGGIALQGAWPHQHGSGRSCRPRLCQSHPAPALGFRLGSARPSRGTLWPLAGARW

SEQ ID NO: 226507 - protein, 86 aa, Zea mays
  Clone ID: MRT4577_13815C.1.pep
GEKQKPFRAVQFVANKKVQTSGPYFFSLRPWWGNPLPPEWGEMGKNLKRGGLIGDLNPPKPPQIMGVGSIPNQAQRGKAGFSDPRA

SEQ ID NO: 226508 - protein, 309 aa, Zea mays
  unsure (1)..(309): unsure at all Xaa locations
  Clone ID: MRT4577_138160C.1.pep
SSTCRHGSGGSAGEPDLXHVAHKIPPGDGPYARAKHFQLVEKDLDASIAWFWKAISAGDKLDSALKDMAVVMKQRGYLAEAIDAIRSLRHLCPKQSQEPLDNILLDLYKASGRTKEEIELLKQKLRKIYLGEAFHGRTTKRARSHGRKIHVSVKQETSRVLGNLAWAYMQQRNFMAAEVVYRKAQMRDRHGNKACNLALCLIEQARLADAELVLADVLAGRYLQARDQQDGKIVRKVEELLARIMAHTTWPGGGGGDGRRRPADKSGSGSESDDDDWVENQMLALLDVAVPYRKKSRRLPVFEEISRAE

SEQ ID NO: 226509 - protein, 33 aa, Zea mays
  Clone ID: MRT4577_138161C.1.pep
RQRWQRSISCGFPQIQLTIMVLADHFDIGMNQV

SEQ ID NO: 226510 - protein, 220 aa, Zea mays
  Clone ID: MRT4577_138162C.1.pep
AGGEGPGRVDRVVLRHLCPKQSQESLDNILLDLYKASGRTKEEIELLKQKLRKIYLGEAFHGKTTKRARSHGRKIHVSIKQETSRVLGNLAWAYMQQRNFMAAEVVYRKAQMIDPDANKACNLALCLIEQARLADAQLVLTDVLAGRYQARDQQDGKIVRKVEELLARIMAQTWQGGGGVGRRRRDESDDDDDDWVENQMLALLDVAVPYRKTSRRLPVF

SEQ ID NO: 226511 - protein, 95 aa, Zea mays
  unsure (1)..(95): unsure at all Xaa locations
  Clone ID: MRT4577_138163C.1.pep
YSPGPKGIPPAPAPESQGTXPGEKWKGNPLSAGPKGPPPGPRGKXGQTARPRKPGXRGFAPKIVKNGAPLKGPPGVKYVKNPEGRKKNPGERGGG

SEQ ID NO: 226512 - protein, 49 aa, Zea mays
  Clone ID: MRT4577_138164C.1.pep
RPSPTEVFQTCCSLTKMFRMYDFKGRSLYTKKLLAFLTSEELWQKGPFF

SEQ ID NO: 226513 - protein, 137 aa, Zea mays
  unsure (1)..(137): unsure at all Xaa locations
  Clone ID: MRT4577_138165C.1.pep
RREEDGSATNRTPGGEHDRRGPAXETTGTKNTGEPQGQQGEPPGEEQQRXPGTGGGSREQTAPPHNQKPDREHTARPSAAEAKREEEKAKGDXADEAAEKQEKAXRDEKEEDEEEESEEEEEGAGREPQGRGGRGEG

SEQ ID NO: 226514 - protein, 109 aa, Zea mays
  Clone ID: MRT4577_138166C.1.pep
RSRQAKGRARFWPRPKPRPGPVLTALAGSRLSGRCLKRLTGKKRRPNPCTPLVCPRVSPFLGSPGRAFVPPISPHRAGGFNRFYRAIKVNLPPPFKAVFFGFCPWGRLL

SEQ ID NO: 226515 - protein, 130 aa, Zea mays
  Clone ID: MRT4577_138167C.1.pep
ISHIPRPRPALAVSQQQQESSLRCFLPRSPSLVLASLSHLSRRRGLLRSADSTKVTLFSPVLFFFASPNGGTSRQLCPRALSPSSSQRSTTCTLTFSAPRKFPVSEDTSTPRSVQRFSQSPLADTTSACC

SEQ ID NO: 226516 - protein, 158 aa, Zea mays
  Clone ID: MRT4577_138168C.1.pep
MAENLAPEKRHSFVHNGQKVFEWDQTLEEVNMYIELPKGVPTKLFHCNIQASHVEVGIRGNPPYLNHDLTHPVKTDSSFWTIEDGEMHITLQKREKGKTWSSPIQGQGILDPYAADQEQKRLMLQRFQEENPGFDFSQAQFSGTCPDPRTFMGGIRSE

SEQ ID NO: 226517 - protein, 49 aa, Zea mays
  Clone ID: MRT4577_138169C.1.pep
ILPSILCSCGCSHTHKHPTKKPCQQLLKHTNITPLLNILIITKTFYKAL

SEQ ID NO: 226518 - protein, 57 aa, Zea mays
  Clone ID: MRT4577_13816C.1.pep
PPLPVTFRTCVALGASTSFDARRGLTLVRRTKGRLRRLDERKSMAISSDQARPASSA

SEQ ID NO: 226519 - protein, 158 aa, Zea mays
  Clone ID: MRT4577_138170C.1.pep
MAENLAPEKRHSFVHNGQKVFEWDQTLEEVNMYIELPKGVPTKLFHCSIQASHVEVGIRGNPPYLNHDLTHPVKTDSSFWTIEDGEMHITLQKREKGKTWSSPIQGQGILDPYAADQEQKRLMLQRFQEENPGFDFSQAQFSGTCPDPRTFMGGIRSE

SEQ ID NO: 226520 - protein, 42 aa, Zea mays
  Clone ID: MRT4577_138171C.1.pep
LLWAFVGKQLVLIASYPFMPKFVLSQLCRCPLGFRLKKFPLS

SEQ ID NO: 226521 - protein, 131 aa, Zea mays
  Clone ID: MRT4577_138172C.1.pep
MQSVRELDVAPTGMMATRGRDVCRSQGCKDIDRLQVKGRSSSSLRNIGHGGWIQCMHEWPVYSNKKIETLDTLPPLATDDLLKHVDYLLRNGWIPCLEFSKLGVVYRKNSTLACYYHRRFWTMWKLPMGGC

SEQ ID NO: 226522 - protein, 119 aa, Zea mays
  unsure (1)..(119): unsure at all Xaa locations
  Clone ID: MRT4577_138173C.1.pep
GGGNEGXXGXXXGXXVXRNDKGGXXKGGGLCFFGGVXGNNGRGGGGGICQVGXXGKRVXGVVPPNKPKGWGXXKRKILILGREKNNTGITGKGPGKKAPFLKKKPTKKFFLTPPPPKGG

SEQ ID NO: 226523 - protein, 39 aa, Zea mays
  Clone ID: MRT4577_138174C.1.pep
FGVFLGPEFYVFFGLWNEGGHSKRAPSILKSSSQSLLAA

SEQ ID NO: 226524 - protein, 54 aa, Zea mays
  Clone ID: MRT4577_138177C.1.pep
KIIKQKKKNKKIKNGVGANIKEGKVLFTSYITNFEMIAHQFNNLCILIQRFIHK

SEQ ID NO: 226525 - protein, 46 aa, Zea mays
  Clone ID: MRT4577_138179C.1.pep
LGDTQRMFRVHQRTQDKRGSRPSPVIFLLRAYIEHSSLTGLQLSLT

SEQ ID NO: 226526 - protein, 69 aa, Zea mays
  unsure (1)..(69): unsure at all Xaa locations
  Clone ID: MRT4577_13817C.1.pep
KLQQHNSLAVDITFRVMLSSLVIYXDHRIDLYNWLPKMKRPCTATSSPSSGTTTGYINTPTLMGPTILD

SEQ ID NO: 226527 - protein, 49 aa, Zea mays
  unsure (1)..(49): unsure at all Xaa locations
  Clone ID: MRT4577_138180C.1.pep
VTXESPAXALSDKPGKLGLIPDMTSHRMVGGGKXLWFWMDSXPIXLLVG

SEQ ID NO: 226528 - protein, 35 aa, Zea mays
  Clone ID: MRT4577_138181C.1.pep
DGLHGVLVKAEVALKTGVAVSGPRRLAHFRSSRTE

SEQ ID NO: 226529 - protein, 151 aa, Zea mays
  unsure (1)..(151): unsure at all Xaa locations
  Clone ID: MRT4577_138182C.1.pep
YRARRRRRRAAEGCCHPVRMRRHGQTRPGTTTTWHALMLTALQMMRLNDAAQASTARXYISLTRTPLNQLLPTGCGRSPLIYLRTVLRPCTEMLLPATTTWDTCSRRRDDGQQAMNDALSRRCFSVNDITAACHYIVYPDLSVPTERARCS

SEQ ID NO: 226530 - protein, 102 aa, Zea mays
  unsure (1)..(102): unsure at all Xaa locations
  Clone ID: MRT4577_138183C.1.pep
GSHKIQGIGPGFIPEVLDTSVIDEAVTVTTEEAMAGARRLAREEGLLVGRVFVKNLXGCLXVAAREESKGKMIVTVFPSGGERYMTSDLFAAAREECIAMTF

SEQ ID NO: 226531 - protein, 92 aa, Zea mays
  Clone ID: MRT4577_138184C.1.pep
NLTLPALDAAEAPCASCLFVSLAGYTEDAFGLLVLLLVREKEPVVPPLSSSLRTSRSVASAAPAQSLADFCKDSSSSAAHGLLNILPNMLFL

SEQ ID NO: 226532 - protein, 60 aa, Zea mays
  Clone ID: MRT4577_138185C.1.pep
NIDYIRSYLVHACMRTTCRCLALDGANDGRRLSYLATNPLQEKIYTQQLRLNSEILDLRM

SEQ ID NO: 226533 - protein, 242 aa, Zea mays
  unsure (1)..(242): unsure at all Xaa locations
  Clone ID: MRT4577_138186C.1.pep
PSIPLSSPALDCVLLCLPLLRRSFPPSCSLHAAKVLSLESVLLRRNFSEQCSDLKKERPLRDRRDSFQRPNLIFAPSSKFTDEYDDHKMDLSSFTPSVRLKVVFYVHPEGLLLFVLRIRAIYVMSPMIQILLLLLRLRIIFYDVFLKXSRXTINMLRRVEPYVXYVYPNLKSVXKLIYITGXGKLNSLRIPLSNXQVILEGLIKHTSSAFEDLVHEIMTVAXHFRRXDNFLWHLAERTLLGL

SEQ ID NO: 226534 - protein, 140 aa, Zea mays
  Clone ID: MRT4577_138187C.1.pep
NGLTYPGGGPKLAQAAAKAFARPETQSLGEATNLDLKGFFAKKANEERVMLFLKNPFPWSTLMTQNRGTSRFSKLNANRKGLCKKNWGFIPPSLTKNSILGKKIPPNNASFWGILDTGFETSNSKQPKVLLKKQVWQQPF

SEQ ID NO: 226535 - protein, 142 aa, Zea mays
  Clone ID: MRT4577_138188C.1.pep
MIPLEELRHELPLQTYAPNANGHGIPSPMNIPISSPSSQSSRDPLNVPMHSPSSHVRKDNFHGNGFMLPQDSKLEFGTLGALPSEVASKDHANRSGSVSNNQASGPVSPMSVAKITGMGSNGMRNVQPYRLKDSGDFPPLSS

SEQ ID NO: 226536 - protein, 135 aa, Zea mays
  Clone ID: MRT4577_138189C.1.pep
MLLITVIPWPLTGQQLLKLRSGFALEGKVNGGDKEESAREASPDTAESDQSGGEHNLPDSPFASPTKSAALLHDSFTATETESTAASRVGVDAGVGSKIDGGSNHLRPPALEIPSPSSYFFPMHRLSSDHGALGI

SEQ ID NO: 226537 - protein, 54 aa, Zea mays
  Clone ID: MRT4577_13818C.1.pep
TCVQLSPVLVEAMAPVRDSSCQDLRYSKPSVLLNDSCPHVHKESQLGLSLSMLL

SEQ ID NO: 226538 - protein, 70 aa, Zea mays
  Clone ID: MRT4577_138190C.1.pep
APRNTSGFPSFHPFWGRVIVMTPEKNFRFSGMGPPVKFGRVMELTGGACLCKCLKFRLWPPDHVYAYMPV

SEQ ID NO: 226539 - protein, 90 aa, Zea mays
  unsure (1)..(90): unsure at all Xaa locations
  Clone ID: MRT4577_138191C.1.pep
GYLEAGRVVYQKVLKKGELMXFPQGLLHFQLXVGKRKALAFPVFSSAFPGLQILDSALFASNFSTPLVTQTTFLDPAIVKKLKGVLGGSG

SEQ ID NO: 226540 - protein, 41 aa, Zea mays
  Clone ID: MRT4577_138192C.1.pep
KHLVRISARARSASKANILLPTVARTLLVRYAWCACDFTRT

SEQ ID NO: 226541 - protein, 148 aa, Zea mays
  Clone ID: MRT4577_138193C.1.pep
MEGSPADAAGSGRRTRTRGAEASGRAAVLQQLRAVRSGQIRASDAIQVKVDAPIYDTVPEEEYNVLVARRRKEAGEFIIDDDGLGYVEDGREEDWSHRALPSSSDEGSEGEDGAPRKRKQTRPPQAKRQPQQSAKVASLSAAAAKRAS

SEQ ID NO: 226542 - protein, 702 aa, Zea mays
  Clone ID: MRT4577_138194C.1.pep
MNGGGRRRRYSSEQLLFDVPANAGAGRWAQQPGGVRRGDGEIFVSVEPATPARLCGGDAAAGDSPGQRQQLSPGLLDLHAFDTELIPDFQVPGMYDGAQKFGYGGGLDESDMRFTANKLMSKSAVFPDGNYLKAFTEKEKAAPVAKIKVVVRKRPLNKKEVSKKEEDIIDIEQRSNSLTVHETKLKVDLTEYVEKHEFVFDAGLDEDVSNDEVYRETVEPVVPSIFNRTKATCFAYGQTGSGKTYTMRPLPLKASQDILRLMHHAYRNQGFQLHVSFFEIYGGKLFDLLNDRSKLCMREDAKQKVCIVGLQEYRVSDVETIKELIEKGSATRSTGTTGANEESSRSHAILQLAIKRRVDGNDSKPPRPVGKLSFIDLAGSERGADTTDNDKQTRIEGAEINKSLLALKECIRALDNDQTHIPFRGSKLTEVLRDSFIGDSRTVMISCISPSSGSCEHTLNTLRYADRVKSLSKGSNAKKDVSLAVPLRESSPSPLPSVVPSFSASEVMNDITERNNFGWPKQQYVKERPAPTFVERMPKVKDAVEFATSDGAYLKGQRSQGCMAPNIAEIPDTMYQQRRQPARKAKDTALRNNMRNSVAYPTRSVEPDEDDHLNNLLQEEEGLVSAHREQVEATLDILKEEMNILGEADQPGFQLDDYNITRLSSILSQKAAGIVDLQARLEQFQRLLDENNVLLYAQSPRL

SEQ ID NO: 226543 - protein, 100 aa, Zea mays
  unsure (1)..(100): unsure at all Xaa locations
  Clone ID: MRT4577_138195C.1.pep
XKKKKKKKKKKKKKKKKKKKKKKKKKKKKKKKKKTPPPTHWFSLPSKARFSQTKVGFKASNSTQGKKILSKRGGEQKASGRGPITGAPGKALKDKGALCR

SEQ ID NO: 226544 - protein, 43 aa, Zea mays
  Clone ID: MRT4577_138196C.1.pep
SLQECVIIYVYMFVDDGRKYLRRQLFWVKKFSCYFQRIKLDNS

SEQ ID NO: 226545 - protein, 46 aa, Zea mays
  Clone ID: MRT4577_138197C.1.pep
TSGCFTTAQKRVYSLMENNSYPRFLESEFYQDLCKKPQITTEPHAT

SEQ ID NO: 226546 - protein, 259 aa, Zea mays
  Clone ID: MRT4577_138198C.1.pep
PASEEGYGHQGHLLSPVGSPLSDNESGAAAAAGGGGCGSSVGYCGGGGGESPAKEQDRFLPIANVSRIMKRSLPANAKISKEAKETVQECVSEFISFVTGEASDKCQREKRKTINGDDLLWAMTTLGFEAYVAPLKSYLNRYREAEGEKAPVLGGGARHGDGGGAADDAGPLAAGGGAGDGVDRAGHDDDAHVGLMMGASSVGFGSGGGAAPSYYAAASRKAYGAGEGSKVMEFEGEEENGGVQRGRGFASHLHGAVQW

SEQ ID NO: 226547 - protein, 129 aa, Zea mays
  unsure (1)..(129): unsure at all Xaa locations
  Clone ID: MRT4577_138199C.1.pep
MAPKICDLPCALKRLFTATAHACQSYCTVPNYPTTSVKPSHMHKGCPIDXLKLMECSNVMCSAKEVAHAPTCRQCCPLLEGMLKLQAXLRLCTDIKAKDLSIHLNVSLMLKLILDNCRNMCPKDSTCLN

SEQ ID NO: 226548 - protein, 67 aa, Zea mays
  unsure (1)..(67): unsure at all Xaa locations
  Clone ID: MRT4577_13819C.1.pep
MGTRLQFENXCEIGACSKLTNAYCLEATGGSXNCYRAFEAKLANAIPVVKTCIGGSRIISHLWVGNK

SEQ ID NO: 226549 - protein, 70 aa, Zea mays
  Clone ID: MRT4577_1381C.1.pep
MLVLIVVLALLALSASADFSTSDGCDFHTPPFHIPAPCYMPPTLYLPAEQQPLTLLYPTQPPQLIPCHQF

SEQ ID NO: 226550 - protein, 126 aa, Zea mays
  Clone ID: MRT4577_138200C.1.pep
GPPGPCTLRYERNQRQGKHRREGSSIGNKVLHCRRKHASSISRTRIRSIKEDDVDGTERRMNARETTNNRHAGQAGKGTKTGVASNGQERDCTARSPRAAAPNVERGSGSHQRVEPGEGRHNLLPP

SEQ ID NO: 226551 - protein, 61 aa, Zea mays
  Clone ID: MRT4577_138201C.1.pep
TYILAMQAVALGSYLAIVILDRWRLGLCFKFILKKHVELCTAAAGLCLTDAFRPRHALTPP

SEQ ID NO: 226552 - protein, 83 aa, Zea mays
  Clone ID: MRT4577_138202C.1.pep
ESSRTGPVCSVSTPPHVPVRFIFSKTLCASVNTAVLPLGWGTRFSLFPFVAPSVVIHMWCSPVCLFSPKCVNVWGLYALGMDC

SEQ ID NO: 226553 - protein, 131 aa, Zea mays
  unsure (1)..(131): unsure at all Xaa locations
  Clone ID: MRT4577_138203C.1.pep
MMNASASCYLCRSLVRAPPLKSRSAVRCPSAAPPGASGATSTSKTQDPVENQKLCAYLVEKAVNRLPPGAENILGIFDLRGFRVENGDLQFLKFLVVKPLLKSYASLXFCDTETGRKEYFKEETVHPDFRD

SEQ ID NO: 226554 - protein, 61 aa, Zea mays
  unsure (1)..(61): unsure at all Xaa locations
  Clone ID: MRT4577_138204C.1.pep
YYYPXRLGQVLFVDAPFVFQPMWQVVKPLLKSYASLVRFCDAETVRKEYFKEETVPPDFRD

SEQ ID NO: 226555 - protein, 201 aa, Zea mays
  unsure (1)..(201): unsure at all Xaa locations
  Clone ID: MRT4577_138205C.1.pep
TTTSSTKPPNARARHCCWISQPSYTSSGRPPEFSWTATAANHAAXNKAARPAPAPDATQQPASSTAAGAGEKVDDGRQQPVAPVDESRRAAGGAEPEEEEGGNRNDDAQVEMFYALLANIRAMRRGLPPHDVAASSSVRGGGGGDTGDDAVLDSAREKRLRLSADPPWRPAFRMEDFEEPAPAACETRKRTRGTGHGDGAS

SEQ ID NO: 226556 - protein, 90 aa, Zea mays
  Clone ID: MRT4577_138206C.1.pep
NILGIFDLRGFRVENGDLQFLKFLMDVFYYYYPKRLGQVLFVDAPFVFQPMWQVVKPLLKSYASLVRFCDAETVRKEYFKEETVPPDFRD

SEQ ID NO: 226557 - protein, 205 aa, Zea mays
  Clone ID: MRT4577_138207C.1.pep
TAPNPRQQMGDAGGALESAATDAARSVTNFSTGLRADVEAHLTASDAATDARLRQIEVDTGSRLTAIESAVQLFDCWRPRVDSSLDAMKTNLDRLCSEASRMEVAGFQGVFGGFPGVLGSPGSGATSSGLLGSPPSFAPTGAVPVRPSATVDHSDAYRFGPSYENYLRDSGLRYPDCRWPLPGQGYVAPPVSTIFLSITRSFCRK

SEQ ID NO: 226558 - protein, 161 aa, Zea mays
  unsure (1)..(161): unsure at all Xaa locations
  Clone ID: MRT4577_138208C.1.pep
LWCCSIIRNQXKSLYQTGKAYVHDSLDIYGRPVLIVVAAKHFPSTQDPVENQKLCAYLVEKAVNRLPPGAENILGIFDLRGFRVENGDLQFLKFLMDVFYYYYPKRLGQVLFVDAPFVFQPMWQVVKPLLKSYASLVRFCDAETVRKEYFKEETVPPDFRD

SEQ ID NO: 226559 - protein, 96 aa, Zea mays
  Clone ID: MRT4577_138209C.1.pep
LIYVIHVPSRHKTAGRQVVSWPTALCCSKLPLSLSVLPRPKQLLATGLASSYLLASCLSQMKIICLTISLFFVRLNLRENVLLPPPGRQDATFLSF

SEQ ID NO: 226560 - protein, 54 aa, Zea mays
  Clone ID: MRT4577_13820C.1.pep
LKKKLRRKTVSQEGLLGLEFLWAGAQKKALTFRPCFWLGKPLGPYILTCPLKVE

SEQ ID NO: 226561 - protein, 188 aa, Zea mays
  unsure (1)..(188): unsure at all Xaa locations
  Clone ID: MRT4577_138210C.1.pep
NEDRPPRQAPHRPSTANRQTKPTQTHTQNDRKPHAEPKRNQAKTPQREPARPKAPNERPRPTERQTPKKRAKDRPETXKPRANSSTQTKKPPPPAAARKPDQEPGPRPPQNKRTPRPAGTRHXPPKPTTTRGGPEPKPPHSEPKHXAPRPPPQQRPDRENPXAKPTXKPPSKKNPNNTPRANTRTGPP

SEQ ID NO: 226562 - protein, 96 aa, Zea mays
  Clone ID: MRT4577_138211C.1.pep
GRPGRVFEWLNGFPGKNPGLQRPPPLTRQVFYFSPLRRWKPGHRWTKGTSCLFIWVNLLGGDLCYVPEVGSGGKICPFPLSPPHVKYRPGLLALAP

SEQ ID NO: 226563 - protein, 242 aa, Zea mays
  Clone ID: MRT4577_138212C.1.pep
MTVSTSCYMCRSLVRAPPLKSRSAVRCPSAAPPGASGATSTSKLVLEVKERLAREHPGLPTGRNGRDDDDMVLWFLKDRKFSVDEAVSKLTKAIKWRQDFGVAELSEESVKSLYQTGKAYVHDSLDIYGRPVLIVVAAKHFPSTQDPVGNQKLCAYLVEKAVSRLPPGAENILGIFDLRGFRVENGDLQFLNLMDVFYYYYPKRLGQVLFVDAPFVFQPMWQVVKRPGKSYASLVCSPSPLG

SEQ ID NO: 226564 - protein, 112 aa, Zea mays
  Clone ID: MRT4577_138213C.1.pep
TPVRQQRHLHVQVNNTTTDLETRVSGGVPSPRRRDLRPWHGGTDEWFADGGVAVSFFCYRRGDLPFCSEECRQEQIEIDEAREQRLKQTGRAEQQRQRQQKQSPQRIPIWAW

SEQ ID NO: 226565 - protein, 128 aa, Zea mays
  Clone ID: MRT4577_138214C.1.pep
MAHYHPVSADTYQDLEAGFSGHSSSPLKPAASPRRPGRMFCDPCDDGDELHGRHHYLDICFRCRKLLSGNRDIFMYRGDLPFCSEECRQEQIEIDEAREQRLKQTGRAEQQRQRQQKQSPQRIPIWAW

SEQ ID NO: 226566 - protein, 83 aa, Zea mays
  Clone ID: MRT4577_138215C.1.pep
HYHVPSRQWIEQVRSEPCARPLGSRCHQHAHKCRSQTPLPHHHLYSRQTYWRHCTRGTGIMYHSARPRWNPASIQTSTCPYSS

SEQ ID NO: 226567 - protein, 50 aa, Zea mays
  unsure (1)..(50): unsure at all Xaa locations
  Clone ID: MRT4577_138216C.1.pep
WIVMVVPCLYMLVVMNMWGSCKGLVVVRDNLLCNPLVLFVALKKKGERYX

SEQ ID NO: 226568 - protein, 42 aa, Zea mays
  Clone ID: MRT4577_138217C.1.pep
MAALKDYDIAVSNVCHSINSNQKKITRAQAQISKDQKSIQQA

SEQ ID NO: 226569 - protein, 101 aa, Zea mays
  unsure (1)..(101): unsure at all Xaa locations
  Clone ID: MRT4577_138218C.1.pep
GVYLSIFYLSGFMFSNFITYAEIYHKGQDLPRPLFFAQPAVVWSSHQRHLKLGLLRTKKPYFTRGPMSLSDLLKKNPLALDDSLLRLICHLXLVSPSVCTI

SEQ ID NO: 226570 - protein, 207 aa, Zea mays
  Clone ID: MRT4577_138219C.1.pep
MEPAPTEQDYGFLGDLQLSTAIDSPHILQIDNRGARDEDTVMILQLLEGPQDETNLDDWLSGDLHPSPLLETNAHYQPRCRKSGRRGARRRRTSPWDPMFFERPVSREYSTAKGRKNNSRWTSKEVERLARGVSRFGVGQWTLLKQEFFKSSIRTAVNLKDKWRNLLKGYQACRYYSPESKKNAVRSSSKIRNGGANWPGPVWKGIQ

SEQ ID NO: 226571 - protein, 102 aa, Zea mays
  unsure (1)..(102): unsure at all Xaa locations
  Clone ID: MRT4577_13821C.1.pep
PPPTDGGGPPILRLTHPQSPTSPKKKRGRPPPPQLLAFNNPQRTQRTAWTPPGPPWPSRSGTAHRAGPPLSRRPSGPPASRPPLGGEPINXPPGRPRGFXFA

SEQ ID NO: 226572 - protein, 211 aa, Zea mays
  unsure (1)..(211): unsure at all Xaa locations
  Clone ID: MRT4577_138220C.1.pep
HMSTFVHPXVWGGSSGLLXAAPDLGGWVLAAGDLCSMTVGSSCLLRLPYPLPIASARGFFPELIMAAPDGXQTCPLGKIAQEDQPIRRLKWGTASLIVRAPITPIVLPIVHSGFEKVMPENSFFGRRPPVPLCSKKIDIIVGEPIEFDLPSLKQEASTVPHDSSSERKGWPTITPDGLDEAAQRWLYQKMSDKVQSVMERLRKTVTNLKQR

SEQ ID NO: 226573 - protein, 122 aa, Zea mays
  unsure (1)..(122): unsure at all Xaa locations
  Clone ID: MRT4577_138221C.1.pep
KSRPPPFGPPKIEIPFLVSRPTKGEKPNXGGKNPQAPRENPKKPPGPSPSFGPPHPPGGPPPGPQGPRGRRKMEKTPRGNKFPPPKKKPHPPDGXYQPRGPPXPPXKRKGPEPPQGKNKDFF

SEQ ID NO: 226574 - protein, 237 aa, Zea mays
  unsure (1)..(237): unsure at all Xaa locations
  Clone ID: MRT4577_138222C.1.pep
MAASSCCQARWLLPLLLLAAAAGALGAEGASSIVQLDVESLLPSAAAPCPTPQAEQKQGAAPPTRMPVVHQHGPCSPLADNRNGKAPSHAEILAADQRRAEYIHRRVAETTGRARRRKQXHRSSSGPARRRRRSSSPRXSSATSTTDLPASYGVALGTGIYVVPVRLGTPAERFTVVFDTGSDTTWVQCQPCVAYCYRQKXPLFDPTKSATYANISCSSVYWSDLYVSGCSRGHCLY

SEQ ID NO: 226575 - protein, 95 aa, Zea mays
  Clone ID: MRT4577_138223C.1.pep
GVHPRAGLQGSPWRLVQSLLLPLRSCNAAQTLYLVNPPLGPVPVVMHFLLVHQPMYPVPARSCKHPVIRPFGELYQAVNLEFCIVYSLYAFIIWC

SEQ ID NO: 226576 - protein, 37 aa, Zea mays
  Clone ID: MRT4577_138224C.1.pep
SVSTLRVSCVTLWSDLILHSQPSKGILVFFKAHPIRR

SEQ ID NO: 226577 - protein, 60 aa, Zea mays
  Clone ID: MRT4577_138225C.1.pep
CDCSLSLIILQLQKYCKKSSCLKKYCERYQGGVGCSSNCRCESSKNAFGRRDGEHLAFQI

SEQ ID NO: 226578 - protein, 91 aa, Zea mays
  Clone ID: MRT4577_138226C.1.pep
GPPRFGHSRELWRELARFWRAFRAFGLQFCLHWVTYLVIDEGWRAPAVVAEEVCEVDLHVDIVGGSDEALLSASHSSDTALQQEDMADPGR

SEQ ID NO: 226579 - protein, 133 aa, Zea mays
  unsure (1)..(133): unsure at all Xaa locations
  Clone ID: MRT4577_138227C.1.pep
MARGFFKKPAVFSPAEEEPAGXCPAGKKPKAEKRXPAGKSASTEGGEKNGMKKAKKSVETYKIYMFKELKQVHPDIGIWSKAMCIMNSSMNDIFEKLAADADKLARYIKKPTITFREIHTFIGLVLPGELAKH

SEQ ID NO: 226580 - protein, 64 aa, Zea mays
  Clone ID: MRT4577_138228C.1.pep
AIAFLLLNTSPGTIIRVTMNLRTWSDCHLAAKLISIITCREIVLKDTNRIHHIVQGVCSCGDYW

SEQ ID NO: 226581 - protein, 86 aa, Zea mays
  Clone ID: MRT4577_138229C.1.pep
NKLARASQAAACLRSGRPAPVRAPTAAATSASRHPSVDRALRPAAIRRRWGALRWGVTSGGDASDVPVAGAVGSATRTIREVTKVT

SEQ ID NO: 226582 - protein, 113 aa, Zea mays
  unsure (1)..(113): unsure at all Xaa locations
  Clone ID: MRT4577_13822C.1.pep
NAFVLDSHLVPSDDTGVSKVXYLKMKGDYHRYLAGFKTGADRKEAADNSLLAYKSAQDIAMADLAPTHTIWLXLALNFFVFYYKILNSPDRACNLIKQAFDEAIFNLFSFMRG

SEQ ID NO: 226583 - protein, 66 aa, Zea mays
  Clone ID: MRT4577_138230C.1.pep
PLFRLMACGSVSLPSASKYSYTVDQRRRMNPYFVVILVQDKVYLVLRKKRNADKDEASATRRCWRC

SEQ ID NO: 226584 - protein, 80 aa, Zea mays
  Clone ID: MRT4577_138231C.1.pep
QKLPAGKTCIWGKQRTGLHIPTSYSLLYTGGERAYITPFLTSVKINSGHPCLTGTTIHLLEGFFCEDLLLLNMQTFFITP

SEQ ID NO: 226585 - protein, 895 aa, Zea mays
  Clone ID: MRT4577_138232C.1.pep
MGEAVPDPDDLAAFPAWARSVADCEARLGVSVTRGLSSAEAAARLRAHGPNELADHPAPSLLRLLLDQFEDTLVRVLLAAAAVSFLLALSSSAGALTLAAFVEPLVIFLILVVNAAVGVWQEANAERALDALREIQSHHAAVLRDAAWLPALPARDLVPGDVVQLRVGDKVPADMRVASLLTSTLRLEQGSLTGETASVNKTSRALPLEDADIQAKDCMVFAGTTVVNGAALCIVARTGMDTEIGAIHAQIHQASQEDDDTPLKKKLNEFGEALTKIIGLICALVWLINVKYFLTFDLQGGWVPRNITFSFEKCTYYFEIAVALAVAAIPEGLPAVITTCLALGTRKMAAKNALVRKLPSVETLGCTTVICSDKTGTLTTNKMSVAKLVAVGDSSQEVRTFKVDGTTYDPRDGKIHDWPAGSIDANLETIAKVAAVCNDANVAHSSHQYVATGMPTEAALKDPPREEVYDAIEDCRAAGIRVMVITGDNKETAEAICREIGVFSPDEDITFKSLTGKEFMALEDKKTLLRRKGGLLFSRAEPRHKQEIVRLLKEDGEVVAMTGDGVNDAPALKLADIGVAMGITGTEVAKEASDMVLADDNFSTIVSAVGEGRSIYNNMKAFIRYMISSNIGEVASIFLTSALGIPEGLIPVQLLWVNLVTDGPPATALGFNPPDKDIMKKPPRRSDDSLITPWILFRYLVIGLYVGMATVGIFVIWYTHGSFMGIDLTGDGHTLVTYSQLSNWGQCSSWDNFTASPFTAGARTFAFDDDPCDYFHAGKVKATTLSLSVLVAIEMFNSLNALSEDSSLLAMPPWVKPWLLVAMSVSFGLHFLILYVPLLATVFGIVPLSLNEWLLVLLVALPVVLIDEALKLAGRCTSPSSGPTRRSRKKKQKGE

SEQ ID NO: 226586 - protein, 65 aa, Zea mays
  Clone ID: MRT4577_138233C.1.pep
YMKLYCAYLIETATLMSFYQWWGGGGKTLLQVQQCVAIGTTCFDRTRGLVLTTQLLVERYFILLI

SEQ ID NO: 226587 - protein, 1039 aa, Zea mays
  unsure (1)..(1039): unsure at all Xaa locations
  Clone ID: MRT4577_138234C.1.pep
MPAQAHNTSNLALISSDERGTRLLDQFEDTLVRVLVAAAAVSFLLALSSSAGTLTLAAFVEPLVIFLILVVNAAVGVWQEANAERRVDALREIQSHHAAVLRDARCVPRAPLARDLVPGDVVQLRVGAKVPADMRVPASRAPPSSASSRASLTGETASVNKTSRALPLEDADIQAKDCMVFAGTTVVNGAALCIVARTGMDTEIGAIHAQIHQASQEDDDTPLKKKLNEFGEALTKIIGLICALVWLINCKYFLTFDLQGGWVPRNITFSFEKCTYYFEIAVALAVAAIPEGLPAVITTCLALGTRKMAAKNALVRKLPSVETLGCTTVICSDKTGTLTSNKMSVAKLVAVGDSSQEVRTFKVDGTTYDPRDGKIHDWPAGSIDANLETIAKVAAVCNDANVAHSSHQYVATGMPTEAALKVLVEKMGLPGGKNGLSLDPSEILGCCAWWNNVAKRIATLEFDRTRKSMGVIVKTSSGSNALLVKGAVETLLERSSHIQLKDGSVVPLDEKAKRTILASLHEMSTNALRCLGFAYKEALAEFATYDGENHPAHKLLLDPANYAAIETDLIFAGLVGLRDPPREEVYDAIEDCRAAGIRVMVITGDNKETAEAICREIGVFSPDEDITFKSLTGKEFMALEDKKTLLRRKGGLLFSRAEPRXQTRDCEVAEGRXGEVVAMTGDGVNDAPALKLADIGVAMGITGTEVAKEASDMVLADDNFSTIVSAVGEGRSIYNNMKAFIRYMISSNIGEVASIFLTSALGIPEGLIPVQLLWVNLVTDGPPATALGFNPPDKDIMKKPPRRSDDSLITPWILFRYLVIGLYVGMATVGIFVIWYTHGSFMGIDLTGDGHTLVTYSQLSNWGQCSSWXTTSRPRLSPPEPERSRSTXDPCDYFHAGKVKATTLSLSVLVAIEMFNSLNALSEDSSLLAMPPWVNPWLLVAMSVSFGLHFLILYVPLLATVFGIVPLSLNEWLLVLLVALPVVLIDEALKLAGRCTSPSSGPTRRSRKKKQKXASSERALTFDXRAQLLNHSINHVNKR

SEQ ID NO: 226588 - protein, 39 aa, Zea mays
  Clone ID: MRT4577_138235C.1.pep
YRERPALFYFKEVRYTARSITPSAYMKRHSKVANFKETH

SEQ ID NO: 226589 - protein, 79 aa, Zea mays
  Clone ID: MRT4577_138236C.1.pep
VVPDLMAPSLLGAMSRSPFVANNGRSHRTLGAADTQEAGRRVDALTCEPDRVAPQNERVLVRREHIAEKSAGGVLQQKS

SEQ ID NO: 226590 - protein, 49 aa, Zea mays
  Clone ID: MRT4577_138237C.1.pep
TDLTNLKQVLPSCYSYYLNRLLIPVSHHTLYYKPLKPELRKRNPTRLRR

SEQ ID NO: 226591 - protein, 66 aa, Zea mays
  Clone ID: MRT4577_138238C.1.pep
CLLISSLRHYNLTRALVVVIKISRFSSHFHTPNALAISSSLRSSIDSKIATHFPMEYSSLLLSFDG

SEQ ID NO: 226592 - protein, 220 aa, Zea mays
  unsure (1)..(220): unsure at all Xaa locations
  Clone ID: MRT4577_138239C.1.pep
MADALLLPCRFLAPLSVASGASSSASSSPPCRWVLSSPGSPWRPRLAAGQRQPRPRRFTRHKICAAERGEQPKWWEKNAGPNMIDIHSTVEFLDALRDAGDRLVIVEFYGTWCGSCRALFPXLCRTALETPDVLFLKVNFDENKPICKRLNVKVLPFXHFYRGADGLLHLHLHLQFQKLKDAVAMHNTARCSIGPPVGVGDVDLLDSTSPQEKPAEASPH

SEQ ID NO: 226593 - protein, 226 aa, Zea mays
  unsure (1)..(226): unsure at all Xaa locations
  Clone ID: MRT4577_13823C.1.pep
TRELRLYNTKSRKKEQFRPRIPGREVGMYVCGVTPYDDSHIGHARAYVAFDVLYRYLRYLDYEVRYVRNFTDIDDKIIARANQLGEDPFILSKRFSDDFLSDMANLQCLPPSVEPRVSDHVDEIINMIKQILDNRCAYVVGGDVYFSVDNFPDYXELSGRKLDDNRAGERVAVDERKRNPADFALWKAAKDGEPWWDSPWGPGRPGWHIRCSAMSAHYLGRSFDIH

SEQ ID NO: 226594 - protein, 59 aa, Zea mays
  unsure (1)..(59): unsure at all Xaa locations
  Clone ID: MRT4577_138240C.1.pep
MADHDRGATGGSGGYGDLXRGGSMQXLGAQHHKQGAMMTALKAATAATFGGSMLGVSAL

SEQ ID NO: 226595 - protein, 127 aa, Zea mays
  unsure (1)..(127): unsure at all Xaa locations
  Clone ID: MRT4577_138241C.1.pep
KEAANTPAIYQNTKTSGASFLTHQQTQPFYKKKKTNGGTLLKKKKLLPFKKKIFSKKKASHQKKKNAVALFSIEKKLKIKKKRPRNKLFSNLKKKKKNYKXKKKKKKTIKKKKKKKKKSLYLPGRPL

SEQ ID NO: 226596 - protein, 58 aa, Zea mays
  Clone ID: MRT4577_138242C.1.pep
PINMGINRSTSRRRRQLSSSKYCVLRKMLGSYIVSRFWVLSIWIMSYAVNMLAYRLGS

SEQ ID NO: 226597 - protein, 73 aa, Zea mays
  unsure (1)..(73): unsure at all Xaa locations
  Clone ID: MRT4577_138243C.1.pep
MCGLSTKLFVDHLLLVCYTVTHGGPETIVSGKKCEXNSLHFKGPWSRDANCADPCLTEGFTHGLCNGLRHRCL

SEQ ID NO: 226598 - protein, 64 aa, Zea mays
  Clone ID: MRT4577_138244C.1.pep
IGAALRSVLSLLAVICLFSGVLCPFSSILILFVGGTSLRGLYFSFLGESIFLYLFCHILSVFTV

SEQ ID NO: 226599 - protein, 53 aa, Zea mays
  Clone ID: MRT4577_138245C.1.pep
SGVLYIDYSPTHFHADQYHRPKFFSQKLPTERLFAFSYTSIQRIACPPFYRSE

SEQ ID NO: 226600 - protein, 121 aa, Zea mays
  unsure (1)..(121): unsure at all Xaa locations
  Clone ID: MRT4577_138246C.1.pep
MSEEQFGGDGAAAAATAAVGGSAGEQEGAMVAAAAQGPAAAAGSGSGGGGSAAGGTEGGSAEAEGAKIDASKNEEDEGKMFIGGLSWDTTXKDLKDYFSKFGEVVDCTLKVDPITGRSRGF

SEQ ID NO: 226601 - protein, 87 aa, Zea mays
  Clone ID: MRT4577_138247C.1.pep
RRPNKQKGGSKKTIRNGLKKSGDIFAKCKTEKEPIKQKGTPKKPLKVLLKKGQNNIINLCRKGGKFQKKTTPGNLWRVVSTRGETRW

SEQ ID NO: 226602 - protein, 125 aa, Zea mays
  Clone ID: MRT4577_138248C.1.pep
SRGSAKYKTCLLPRCGVPTDESCTQLLSSDPMINLNTTVFLLFFSQSRLRGISTIWSLSPLQKMFTENHGAGEGMSDAHKTSKDQSNTHTSSNKSSQHNSKSTQLHKSSICYHNESNALDQCLGA

SEQ ID NO: 226603 - protein, 166 aa, Zea mays
  Clone ID: MRT4577_138249C.1.pep
EHIWKAILAFCRRAHRILSGARSLSLFGEADRCRFLAVGAPDTVRCTLDSPVPLLTVDSCHASRADYAADRWLGRLLAHWTVRCTPDSPVNYSRTSPMISREQQVRLSQPGAPDTVRCTTGQSGVPDRAQSCLYTAKPFSPVFFSSSFCFKHLDNYISTQNQCTKA

SEQ ID NO: 226604 - protein, 247 aa, Zea mays
  unsure (1)..(247): unsure at all Xaa locations
  Clone ID: MRT4577_13824C.1.pep
MAAAVVVRRAAGLIPLLSSRFGARMPLHRALSQIPPPRFCRLLSQQTKPFSASASNGAATDRTRELRLYNTKSRKKEQFRPRIPGREVGMYVCGVTPYDDSHIGHARAYVAFDVLYRYLRYLDYEVRYVRNFTDIDDKXPELHFWNYVDXARANQLGEDPFSLSKRFSDDFLSDMANLQCLPPSVEPRVSDHVDEIINMIKQILDNRCAYVVXGDVYFSVDNFPEYGELSGRKLDDNRAGERVAVDE

SEQ ID NO: 226605 - protein, 146 aa, Zea mays
  unsure (1)..(146): unsure at all Xaa locations
  Clone ID: MRT4577_138250C.1.pep
DVSCQLAAAPEXPEKVKVEQDTAVTEEVKENKKKRRKDDENNDADASIPAKKIKVEEAAEAVEGEKSEKKKKKGKGESRSAKAVEVKEEVDASDEKGSEKKKKKKSKEGSDADPESAQNGDDGTHAERSEKKKEKKKKNRDTEGTQ

SEQ ID NO: 226606 - protein, 254 aa, Zea mays
  unsure (1)..(254): unsure at all Xaa locations
  Clone ID: MRT4577_138251C.1.pep
RVTACGSKVGKMDIVGGPEVGPLRCWPGGLCLSRSIGDLDVGECIIAVPHVKQVKLSNAGGRIIIASDGVWDDLTCEMALDCSRGFSSDVAANRIVNEATRPRGIRDDTTCIVIDILPPXKYSPXSPRKRPRRITFNNVFRKRHLDVPPETNRSEYAEPDVVEEIFEDGSPMLSKRLTTGYTLEKTFAPSSCAVCLVRLKSGQGISVHDNPLQYEKLQGWQGPFLCPSCHEKKEAMEGKRRPKGSSSNVFGHMC

SEQ ID NO: 226607 - protein, 63 aa, Zea mays
  unsure (1)..(63): unsure at all Xaa locations
  Clone ID: MRT4577_138252C.1.pep
GLWLNIPDYDAPTQLVKPKERNERYVDADMTIPKGTSVPTXGKNLAFYREFIGPDMYIGLMGE

SEQ ID NO: 226608 - protein, 241 aa, Zea mays
  Clone ID: MRT4577_138253C.1.pep
RSAGIPQAVAHLLSSPLSPPPRRHYCSSRPCCASSSLARRWVTPQRTASPGHTSRAASLCYTSRDLLPLLPPACIPPVDAPRPASRDLLPLLPPREPSHLHTSLRQIRLPLEKTLPNDHMHSYWGDATIGAEEPIWRIACTPSLPSSNPPLSPTPQARRCLPTAPAPPALAAHTPSPADHSRLYPSGSRARTHITRTMARGSGTRPRRLLEQRNPTERSNANLQSQIRAARKGAPTSGMAR

SEQ ID NO: 226609 - protein, 94 aa, Zea mays
  Clone ID: MRT4577_138254C.1.pep
HTLKGNGKKMRLQSHGKGFREQCTIIHVVHLVVGNVPFLGLVQTLISSRQEMQNLEEKEKPTRPSHDAAGRDRDHPVQLIFVVVVPEAWVLQAQ

SEQ ID NO: 226610 - protein, 65 aa, Zea mays
  unsure (1)..(65): unsure at all Xaa locations
  Clone ID: MRT4577_138255C.1.pep
SSVHNKNCILGLSYLQQLSHFILYVKFYSAISIIHSINLLFYMIWCGQSLHGWHMDLRHIXRHVK

SEQ ID NO: 226611 - protein, 60 aa, Zea mays
  Clone ID: MRT4577_138256C.1.pep
PNQRNFKGQISTVNLLRRLKKTFFPTKILATNRGLNWLPMALVRRLASLPGGLQTSLSRP

SEQ ID NO: 226612 - protein, 74 aa, Zea mays
  Clone ID: MRT4577_138257C.1.pep
LLISDNSYILHTGIRIKHISMVRLQLINRRFMYKFHGSTLCNFVRFANREESVMHALGPMPGKAFGYYCSCRRR

SEQ ID NO: 226613 - protein, 81 aa, Zea mays
  Clone ID: MRT4577_138258C.1.pep
SIYDNPNKQPPYTHTQGPGPGGRFYSMLLAAHQRTSRNRIPTYPRALGRLLNPKERARLTLGSSRGVFFPRRPPCCKWFFS

SEQ ID NO: 226614 - protein, 115 aa, Zea mays
  Clone ID: MRT4577_138259C.1.pep
RGHSILLIFFPRRQKLQIVPLQQAALPTEPRIESVQKHAVRYKAYRFFLLKSRHCLCQMLRQHGKRDGAVMLFFFSSSRVRVANGPWVNRTEQAGRLFPPRLEDHRGREATGPGH

SEQ ID NO: 226615 - protein, 75 aa, Zea mays
  Clone ID: MRT4577_13825C.1.pep
EPLGVGEARVVRSGTVWLGVSTYRSSIENVVHAHLRRLFPGRWRWMAPLVSVYSALGTKNIDTSLDPSQVVGTGY

SEQ ID NO: 226616 - protein, 104 aa, Zea mays
  unsure (1)..(104): unsure at all Xaa locations
  Clone ID: MRT4577_138260C.1.pep
PVXSMYKAFSLIXYYTITRLPXXVXXXXYIRGRCTCALADXLFVPGYXGDKPDAFGLGVEXVHALVDSCDDVALEVEDGGKXVSLGGGFVWVYLGKVLKXWFCK

SEQ ID NO: 226617 - protein, 148 aa, Zea mays
  unsure (1)..(148): unsure at all Xaa locations
  Clone ID: MRT4577_138261C.1.pep
RIPRLRLAGAVLIQPFFGGEERTEPEVRLHKACRILSVARADRYWREFLPEGPSRDHPAARVCGEGVDARRXTFPPPMVVTGGIHLLKDWHARYVEPLRGKGKLVRVVDYPDAFHGFYVFPELPHSGKLIEHIKLFVDDHRTKASGSD

SEQ ID NO: 226618 - protein, 56 aa, Zea mays
  Clone ID: MRT4577_138262C.1.pep
KKKKKKKKKKKKKKNKKKKKKKLKKKKKKKKKKKNHKKKKKKKVFSLGRNPFKGKF

SEQ ID NO: 226619 - protein, 66 aa, Zea mays
  Clone ID: MRT4577_138263C.1.pep
LYVAPGIGFLYSPSCYSSDKGTPSLCFVSFNGTPGRSLSLGGRSGGDDSCVRISALCQLEAVECIL

SEQ ID NO: 226620 - protein, 109 aa, Zea mays
  Clone ID: MRT4577_138264C.1.pep
VHKAEKIGRFGRKGFVVPICKKSEGFVVKKMPKQLNVAIKPWEFFEGEFFVPKEENVKKNFYNAHDYFFFPGGFLQKFGFSKGWPLALCLYSRIFILWGLKFFNALGRP

SEQ ID NO: 226621 - protein, 90 aa, Zea mays
  Clone ID: MRT4577_138265C.1.pep
GTGRPPSAPSLTEGTRLPYNRIHCQNKEGVRSHLVQSSDEQAKHTGSCKTGGGATVVEASEHVRGNDYAVRLVSVFLTIVSRPPPRQSPV

SEQ ID NO: 226622 - protein, 127 aa, Zea mays
  Clone ID: MRT4577_138266C.1.pep
GKTKLSAKVIIPHSDEAGVLNQPEITPGLFKERTRLSMGKALVRNFNMKAPTSWSPEGRTWAIDRGIHHYWPSAQADGHMTSAGNTIGLKRMFPFTTTKAFTMECAHRIDHWGGSVTSVPRRLHQRP

SEQ ID NO: 226623 - protein, 584 aa, Zea mays
  Clone ID: MRT4577_138267C.1.pep
MKRMHRMQTRKSHSWWWDSHISPKNSKWLAENLEEMDKQVKEMLKLIEDEGDSFAKKAEMYFQRRPLLVNHVENFYRMYRALAERYDNVTGELRKGLALQSQGSGISETDSETQSTSSCPEPNMEQNTAKPKRNVLLGSGGSSDISKKESDGSSSSSSDSDSEVDEASEENGNGISYISDERIAELEDELQEARQQIEALEVKNMHCQCEKLEESLKQVSNEKEDLVAAILASKNEVEDLKGDMVSAAKHFEAQLVHRDHEIEKCKQEAEQVSEKYFHEKSTLESEIERLQEVVRSFEENLTKVAGEKFQLEAQVKELEQTSNDLDDSSAEIIKLQEIIKDLQGRLENDSNDKSVLEERAMELEQVRRQLEDSRAEASMKLQTTIKNLNQVLEEKAELENRMKDAEQATSDLNSLVGSLDGKLKATEAQLEQLHAEKAEAILESEKQISELNQAIARLKTRLELLSSEKAAVDTKASALLTDVAVRDEKLKETDRHLQQLHLEHVELIGAADAARKDASGLRSRVRELEVEVERQRLMVADSAEGKREAIRQLCFSLDHYRHGYQQLRLLLQGHRRPRPMVMTA

SEQ ID NO: 226624 - protein, 99 aa, Zea mays
  Clone ID: MRT4577_138268C.1.pep
PLAPLQSSRHQRTPVLDKGCHHLTEAGAYRAKWCAKIKHPTAGVPLRGQQVCGYFLGIERAPPWIIIPTEIVRLLGVGKIKRPILNQDEETNQIISKKP

SEQ ID NO: 226625 - protein, 43 aa, Zea mays
  Clone ID: MRT4577_138269C.1.pep
CLTLITKDVCINYNFNGDGDPRWGFIPAGNGDGEKMLLARVVG

SEQ ID NO: 226626 - protein, 66 aa, Zea mays
  Clone ID: MRT4577_13826C.1.pep
SSQASAPHLFCFFLLLLAQLTLFNFKPVITSPSICKCNCYSICSYTSSFIFMFFNFYTFYTIIFNT

SEQ ID NO: 226627 - protein, 175 aa, Zea mays
  unsure (1)..(175): unsure at all Xaa locations
  Clone ID: MRT4577_138270C.1.pep
YVSSDFGSCGGGKVLRDGMGQASGYPESFCLDTVITNAVVIDYTGIYKADIGIKGGLIVAIGKAGNPDVMDGVHNNMIVGVNTEVIASEGMIVTAGGIDCHVHFICPQLAEEAIASGITTLVGGGTGPAHGTCATTCTPGPSXIEMXMLQSTDQSPINMGCTGKGHTXKPXGLAE

SEQ ID NO: 226628 - protein, 64 aa, Zea mays
  Clone ID: MRT4577_138271C.1.pep
MLNAVALLSSTDRVKDTIFFTQYEHIPTAVTGSVSLLKPDLHEFHVHALRYTTNLFMSTAPHYN

SEQ ID NO: 226629 - protein, 74 aa, Zea mays
  Clone ID: MRT4577_138272C.1.pep
SSPFCLSFPMLKCLAGAVDLGRWPQLLKGGKKIFGIKTWSGLGTKNSPPENGNPIPRGVYELGEQKPLPKMVVF

SEQ ID NO: 226630 - protein, 34 aa, Zea mays
  Clone ID: MRT4577_138273C.1.pep
SVSGLAFNSDTSGPSTSFGALGRSYSTTSVSSTC

SEQ ID NO: 226631 - protein, 119 aa, Zea mays
  unsure (1)..(119): unsure at all Xaa locations
  Clone ID: MRT4577_138274C.1.pep
NRHLPKPFSPCSWCLGSMVAAAARLGALPSFLSPSSSLPLPPPAISHGALGASRLSTSGRPQSLHDEIAPYSHEHQHSSAPPSPSRPLAMNAANPGARPGTALSCARRLXLSSPPSPPL

SEQ ID NO: 226632 - protein, 76 aa, Zea mays
  Clone ID: MRT4577_138275C.1.pep
VESRALESSDQPDMKKQIGMIAGGSGITPMLQVVRAILKNPNDNTQVSYHNKLQSFFRNWLFLCISAALQRLSEKA

SEQ ID NO: 226633 - protein, 131 aa, Zea mays
  Clone ID: MRT4577_138276C.1.pep
PPEPWGGKNISGESPPWGDFPPRLIGKRVLVGVFKNVKKRAPPGPKVSKGAPKKKLSGPVFVFPGPGKLPPKVVYRVDSVIGWTVCSGVPCLFGKPRGGPFRGMLSEVLQPGKVLRLGFLLLAPLKGIFVP

SEQ ID NO: 226634 - protein, 77 aa, Zea mays
  unsure (1)..(77): unsure at all Xaa locations
  Clone ID: MRT4577_138277C.1.pep
FPXIFLARVIFDVFSEHTPPFTKPYNKPLKNQNRDEKKTLSQENKQNHTSFMNHQMKLYYRLQLTPKYKFNGLKPLL

SEQ ID NO: 226635 - protein, 56 aa, Zea mays
  unsure (1)..(56): unsure at all Xaa locations
  Clone ID: MRT4577_138278C.1.pep
GXGGGGGXXCGWVLFGWXGWDFYCWFCFSFSYLVMGGKMAPLLAAAMNHAAAHFCP

SEQ ID NO: 226636 - protein, 118 aa, Zea mays
  Clone ID: MRT4577_138279C.1.pep
GIDSNDRGIFRRIQKRAIHTCDRSHRERGQLMFLRLQPDPPCGRPRGLRLQDHGFTNTGPDPHHASLSTLRPWVLDEIQEIGQCAWALYDIMVGRTGGTIHQAQWPCPTGWDSNGSRT

SEQ ID NO: 226637 - protein, 68 aa, Zea mays
  unsure (1)..(68): unsure at all Xaa locations
  Clone ID: MRT4577_13827C.1.pep
GFGGRGGGRGGFGGRGGGRGGRGXFGGRCRGGFGGRRGFRGGRGGGGDHKPQGKKTSLNSFCPYCFPF

SEQ ID NO: 226638 - protein, 111 aa, Zea mays
  Clone ID: MRT4577_138280C.1.pep
QLPLSDLPLWQAHNNIDGALETTANKYMPNHRPCISKQEAAQGTCVYACILRMIERAHGDADSKSSSMQKKKMCSCVNGGALHARRSGRHGGRRCVCVRIGAGEERRGTGA

SEQ ID NO: 226639 - protein, 39 aa, Zea mays
  Clone ID: MRT4577_138281C.1.pep
NSPYSNHHVRSLATHSLVMRRRCAAMPEHPLTVAAGHSR

SEQ ID NO: 226640 - protein, 71 aa, Zea mays
  Clone ID: MRT4577_138282C.1.pep
SVGAKQGRWLLTAEWVTMIKTAVLAVGDGSPSLRRTNNREEWNGSGGVYSRKCYRLARDFLACRNDAGSVK

SEQ ID NO: 226641 - protein, 69 aa, Zea mays
  Clone ID: MRT4577_138283C.1.pep
YLFKRAMYLEQERVQNEKLVVEVRQQDVQLHKQRHEDRIMTMDLTVLPEEQKKYYLSLLSKIMSQLPSV

SEQ ID NO: 226642 - protein, 50 aa, Zea mays
  Clone ID: MRT4577_138284C.1.pep
ISIRPTPTHETRSNYLLHITFTYFANSNRPSYSSYYFTSTNAYLLKLSTH

SEQ ID NO: 226643 - protein, 37 aa, Zea mays
  Clone ID: MRT4577_138285C.1.pep
PSGEFPLSRQEQISGHQRSFVIASVHYLPKRMVCSTR

SEQ ID NO: 226644 - protein, 61 aa, Zea mays
  Clone ID: MRT4577_138286C.1.pep
RVCCARQDVPPGCVEHISCVLGVGSLVMPTSPGVKLFFSFRGNAPIPQLPRCVNPKNMKVK

SEQ ID NO: 226645 - protein, 75 aa, Zea mays
  Clone ID: MRT4577_138287C.1.pep
TAFQKVFKSGALTKQADGSMGGRNLVLTSKTWIYKRRALQTLVFPLFELHTIKGEWLLPSLLQHVSKLAEITRRI

SEQ ID NO: 226646 - protein, 47 aa, Zea mays
  Clone ID: MRT4577_138288C.1.pep
ANQGLSTKIMESDTITNQSEHQRYVSKAPSRWCSDWFGIRYNYKPGV

SEQ ID NO: 226647 - protein, 65 aa, Zea mays
  Clone ID: MRT4577_138289C.1.pep
AAFKQNRQKLSFIKWKSIWCIVRPSNVGAHFWPFSQCLSREFVTLFWIPAMSANNPYCLCQPGNL

SEQ ID NO: 226648 - protein, 85 aa, Zea mays
  Clone ID: MRT4577_13828C.1.pep
NAFSWSPTCMRNKTNAWLLASSLFVLAISARFQRYVLRRLMEDVSANHEVNEVDGAKNREQRVVGVVPALVQVVRDPRGATPAAL

SEQ ID NO: 226649 - protein, 60 aa, Zea mays
  unsure (1)..(60): unsure at all Xaa locations
  Clone ID: MRT4577_138290C.1.pep
RTDLNSRAERLVRPPFLXFYLXSTFMTWGFSRERDLRWWDCVMATTFFCRKLYFEIHATF

SEQ ID NO: 226650 - protein, 67 aa, Zea mays
  Clone ID: MRT4577_138291C.1.pep
EKSRKGSSLIFSKRKVILGFLPIIVSWLFYENIVEVELVVDSYEVTLMSCQNFFNRYFYLGTILYIL

SEQ ID NO: 226651 - protein, 168 aa, Zea mays
  Clone ID: MRT4577_138292C.1.pep
MLSLPACSPFRLPPTRCGARRKSAAAATITMRDRSKNRKPTQRGRYLSTVAIQAVQSLKRAVLRGAPAASAAAVVEPKLRRLLKADMVAVFRELAAQGEALLALQVFEEIRKEHWYKPRLLWYVDLVTALASKGLRTEVDRACSYLKREQLEPDTEGFNLLLKALLDA

SEQ ID NO: 226652 - protein, 58 aa, Zea mays
  Clone ID: MRT4577_138293C.1.pep
IRLNQNFVLYFVESGNLGLNFEGKHPFFFFTCPPLHHKFTKVFYKPTKKLKKFLIYGP

SEQ ID NO: 226653 - protein, 45 aa, Zea mays
  Clone ID: MRT4577_138294C.1.pep
HFLSKKSFFFGAKQDPIILAFTLQCPREGTISWPCHFPRQGLKGS

SEQ ID NO: 226654 - protein, 75 aa, Zea mays
  unsure (1)..(75): unsure at all Xaa locations
  Clone ID: MRT4577_138295C.1.pep
GAIFTNPLFKKKFGWAPPIKPKDGVGFPPFWVKNQFXKEKPPGVDIPGXGLSKVVSPQGPVKLGSPRPPGGKEGL

SEQ ID NO: 226655 - protein, 65 aa, Zea mays
  Clone ID: MRT4577_138296C.1.pep
AGIRRHLSQATVTEARLRRRRLCDPRKVANMSTVFQRPIPGTVHCFPQKKMAAPTLYGKISHLVL

SEQ ID NO: 226656 - protein, 92 aa, Zea mays
  unsure (1)..(92): unsure at all Xaa locations
  Clone ID: MRT4577_138297C.1.pep
LCPPLVGWGAXLLLWXACPFSSLRVLSLLSLPLLRXLLPPRXLLSWACRLLALPGXCWCSACCFCLLVPVRFPLVFSLWFAPWSCVSPRPCS

SEQ ID NO: 226657 - protein, 47 aa, Zea mays
  Clone ID: MRT4577_138298C.1.pep
AEATIKDGKRILFRFDRAAFAFKFLPFKVPYPVPFRLLGDEANGWLD

SEQ ID NO: 226658 - protein, 152 aa, Zea mays
  Clone ID: MRT4577_138299C.1.pep
MAVAELWETLKQAILAYTGLSPTAFFTAVAVAAALYHVVSGIFAPPPPPRQRPREEPEAEPLPPPVQLGEVDEEELRQYDGSDPKKPLLMAIKGQIYDVTQSRMFYGPGGPYALFAGKDASRALAKMSFEPQDLNGDTSGLGPFELDALQDW

SEQ ID NO: 226659 - protein, 148 aa, Zea mays
  Clone ID: MRT4577_13829C.1.pep
MALRRIIKELKDLQRDPPTSCSAGPVSDDMFHWQATIMGPSDSPYSGGVFLVAIHFPPDYPFKPPKVAFKTKVFHPNINSNGSICLDILKEQWSPALTVSKVLLSVCSLLTDPNPDDPLVPEIAHMCKTDRLRYESTARGWTHKYAMG

SEQ ID NO: 226660 - protein, 627 aa, Zea mays
  unsure (1)..(627): unsure at all Xaa locations
  Clone ID: MRT4577_1382C.1.pep
MASDKEHLAFAEQLLSIETLEAGRAADASTVEACTPGLSVSRGKEHLRVTSAIARSTSPPAAAARPRRMLGHRFPTALRLPHGLLLRRSIMARRGLTIMAGGEAEGPLAGFFDYMERLRNYERSGVPRGAGTDSDDGFDLGRMRRLLRRLGDPHTHFPAVHIAGTKGKGSTAAFLSNIMRAQGYNVGCYSSPHLLTIRERISVGNDGGPVPVRLLSDLFDEAKKAIDEAIESENGSLTHFXEGFTALSFLLFSQQNVDIAIIEAGLGGARDATNVIRSTELAASVITTVGREHLVALGGSLQSIAIAKSGIIKQGRPVVIGGPFSEDIEQIIRDRAFLTQSPVISACGHGIKSFTKCIDWDNGKPYQRCYISIKISRDVPLSIEMHDINLQLLGDHQRQNAVTAACAALCLCSQGWDISDASIQAGLEETQLPGRSQFLTAEEASALGFDGASTVLIDGAHTEESAKALSGVIKTVRPEGPLALVVGMASDKEHLAFAEQLLSGQTPDVVLLTEASIAGGSSRAMPASSLKEVWIAAVRHRGIEYVDIGGISGTETPEHIADLLGSPSLSSRRKPMVIGCQDMGPFSWNLIIAASQLLESRGRAPGLICVSGSLHLVGAILQKLGRH

SEQ ID NO: 226661 - protein, 60 aa, Zea mays
  Clone ID: MRT4577_138300C.1.pep
SLSRASTKSAVFLVQAPYSIDNCRPPMIMSSDCTHPTQPLHRPLLRQPTISPSLQNHPVS

SEQ ID NO: 226662 - protein, 407 aa, Zea mays
  unsure (1)..(407): unsure at all Xaa locations
  Clone ID: MRT4577_138301C.1.pep
MGQEEAVAANGTGTGVGRGRPHAVVMPYPLQGHVIPAVHLALRLAERGFAVTFINTESVHHQIGAGGDIFAGVRARGGGTTTEELDVRYELVSDGFPLGFDRSLNHDQFMEGVLHVLPAHVEDLLRRXRRRXDPATTCLVVDTFFVWPATLARKLGVPYVSFWTEPALIFNLYYHMDLLTKHGHFKCKEPRKDAITYIPGVASIEPSELMSYLQDTDTTSVVHRIIFRAFDEARRADYVLCNTVEELEPSTIAALRADRPFYAVGPIFPAGFARSAVATSMWPESDDCSRWLGAQPPGSVLYISFGSYAHVTKQELREIAGGVLASGARFLWVMRPDIVSSDDPRPLPEGFAVQWCCXQVEVLSHPAVAAFLTHCXWNSVLESVXWAGVPMLCFPLLTDQLTNRRLV

SEQ ID NO: 226663 - protein, 68 aa, Zea mays
  Clone ID: MRT4577_138302C.1.pep
NFWTHEFTNRWAPFFVFFFKRMAGTLTLNSEEKISPRFKGNPTQIQYRWHRQPRLQEPTHTVPITESS

SEQ ID NO: 226664 - protein, 406 aa, Zea mays
  Clone ID: MRT4577_138303C.1.pep
MAQGAAGVVETRRHGGKPHAVVVAYPLQGHVIPVVHLALRLAARGFAVTFVSTEAVHDTFFVWPATLARRLGIAYVSFWTEPALIFNLYYHIDLLTQNGHFKCKEPRKDTITYIPGVASIEPSELMSYLQETDTTSVVHRIIFRAFDEARRADYVLCNTVEELEPSTIAALRADRPFYAVGPIFPAGFARSAVATSMWPESDDCSRWLGAQPPGSVLYISFGSYAHVTKQELREIAGGVLASGARFLWVMRPDIVSSDDPDPLPEGFAEAAAGRGLVVQWCCQVEVLSHAAVGAFLTHCGWNSVLESVWAGVPMLCFPLLTDQLTNRRLVAREWRAGVSVGDRGAVRADEVRARIEAVMGGEDGLKLREQVKKLRGTLEAAVASGGSSRRNFDEFVEELKRRCGGR

SEQ ID NO: 226665 - protein, 190 aa, Zea mays
  unsure (1)..(190): unsure at all Xaa locations
  Clone ID: MRT4577_138304C.1.pep
CHRRCHLATAWPVTPRKDLPASVHLPPPGPVPPPSPTPPSPCQNPTXTARPKAHSKPHPCPCERPHAKATXAGLTGGVGSTTMLGXCXEILREWCSTTAPPYCSTQXDSXRQQGCQHLRPVETQXRDQASLGLCLQSILQQQAESGQGAGLLAAQIAQQLTAMCGLQKSTACPYAAAGXVPHLKKLCAGA

SEQ ID NO: 226666 - protein, 585 aa, Zea mays
  unsure (1)..(585): unsure at all Xaa locations
  Clone ID: MRT4577_138305C.1.pep
MTLLDLSKRTGAYISTLQGILADLGEKVESEFDSISIDLAELVTMELGVNSRRMHTGEGKNEPRPAVVTVMGHVDHGKTSLLDALRQTSVAAKEAGGITQHIGAFVVEMSSGASITFLDTPGHAAFSAMRARGAAVTDIVVLVVAADDGIMPQTLEAMSHAKAANVPIVVAINKCDKSGADPERVRIQLGSEGLLLEDMGGDVQVVEISAVTKTGLDKLEEALLLQAEMMDLKARIDGPAQAFVVEARVDRGRGPLATAIVKYGTLVSGQHIVVGAEWGRIRSLRDTAGNITQSAKPAMPIEIEGLKGLPMAGDDVVVVDSEERARMLSHGRKKKQEKDRLRKIDEGMAEELEIKERDSXERVEMTIIVKADVQGSVQAVTDALRSLNSAQVFVNVVHVGVGPISQHDIDLAQACGAYIVGFNIRSPPIPITQAAARANIKVLLHKVIYHLLEEMGKAIVEKAPGTAETQVSGEAEVLNIFELKGRSKSKGPDVKIAGCRITDGHFSKSGTMRLLRSGDVVFEGPCESLKREKKDAETVEKGNDCGLVIQDCDDFQVGDIIQCVEQVIRKPKFISTQSGSVRIEC

SEQ ID NO: 226667 - protein, 105 aa, Zea mays
  Clone ID: MRT4577_138306C.1.pep
GWLFLLAPRGLFFLRPARLLPVFARGITFSRGGPGCPWVPLGVIWLPLGGGGGFSGAGPGFPGLPWVPVFFLGLRGFGRPPGGADCFPCMFNTFNQGTNLKKKTP

SEQ ID NO: 226668 - protein, 125 aa, Zea mays
  unsure (1)..(125): unsure at all Xaa locations
  Clone ID: MRT4577_138307C.1.pep
DYSAHTIFGGVCRTSRIVCSGHVTARKEVNVKSSISPLEKRGEWEIIDIGPLTQNLRKFAVDEENKIGQFGRLTFNKVIRPCMKKTIYDNERDIKGYEYHLYVYASEKLFRADIFXDYKTRGRKL

SEQ ID NO: 226669 - protein, 54 aa, Zea mays
  Clone ID: MRT4577_138308C.1.pep
QKPCSSIRIKSYQYIFFNIFLSKKIVYSISKISIPENERKQTKARLSKSDCYEI

SEQ ID NO: 226670 - protein, 93 aa, Zea mays
  Clone ID: MRT4577_138309C.1.pep
ATARGGLSCTCLPPPRYGRHLRPSPQDGQLFQGRLVGASPVFYRLLKGKFAARRISRVTPGLTQSPRCQGWPVGAFRWRYSIPRAWPARVCKL

SEQ ID NO: 226671 - protein, 70 aa, Zea mays
  Clone ID: MRT4577_13830C.1.pep
GSQKQYPIIWSSSKTGKRPTRCRGNISAPEMAGKVYKKVEATPNGRVFLIKSKAFPKPGYGGLLIKAALN

SEQ ID NO: 226672 - protein, 34 aa, Zea mays
  Clone ID: MRT4577_138310C.1.pep
SHSPTPPSHDTYNNTFNSYFHYCLQLYSARTLIQ

SEQ ID NO: 226673 - protein, 65 aa, Zea mays
  Clone ID: MRT4577_138311C.1.pep
TPSYEFHRATSADSMELVFLVLELQILTLRRPSQLVSRDLLPEHASRKHESSERKGSSKLTVHTL

SEQ ID NO: 226674 - protein, 92 aa, Zea mays
  unsure (1)..(92): unsure at all Xaa locations
  Clone ID: MRT4577_138312C.1.pep
ARWGSHYHTSKERKGISKMFRGNPRASASNELPIESVVRVNFFFLXEANNLVGGGWQMATAKVTRSLTRGIVRVGDVDEMPDXFXWVPIART

SEQ ID NO: 226675 - protein, 125 aa, Zea mays
  Clone ID: MRT4577_138313C.1.pep
NSIPCCLGLSAIAGCAAGSGSRRRGRLRRPRALHSPAVFLRYGKFSLNTSLILPQKMVMQLRKTYMIKLIMPSSSSPSSIMSIQQRSRPSATKPSASSHAFAASMFTRSSAAFLLQYASCTCRRD

SEQ ID NO: 226676 - protein, 319 aa, Zea mays
  Clone ID: MRT4577_138314C.1.pep
MMAKANGAVHASTKEPLFSFGVIADVQYADIPDGRSFLGVPRYYRHSITVLQRAVNRWNEQGNIKFSINFGDIIDGYCPKDKSLWAVQKVLDEFDKFDGPTYHMIGNHCLYNLPRSQLVSLLKIATDSDRAYYDFSPCPGFRIVVLDAYDFSCLGWPHDHPVTIAAMKLLDEKNPNTDKNSPDGLVGVDRRFVKFNGAVGKEQVSWLNDVLQDASTQHQNVIICSHLPMDPGASSPAALMWNYDEVMAIVHQYNCVKACFAGHDHKGGHSVDSHGVHHRTLEAALECPPGTSAFGHVEVYPNRLLLVGFDRMADTEVRF

SEQ ID NO: 226677 - protein, 100 aa, Zea mays
  Clone ID: MRT4577_138315C.1.pep
FWARVRGLTPLFRGKIFQKLSPPPWVSLTGWVPRFLVPDPFPPGSVGFSPFVNGLGFPLERPSPVPGLISGVCFLKLLSCRFQTFSPQISSIFFFVGAPF

SEQ ID NO: 226678 - protein, 797 aa, Zea mays
  Clone ID: MRT4577_138316C.1.pep
MSPTKRRGLGRRGHGRGRGAAAEKDMDHLDISVPSSPSTTSDREDQPLLIPRQSPACYVGPSEVSTMLLNPKINHRSDAIFGDQAVEQLKLRHHKPLKFHERYRPYLRDAGLLGLSQICQKMPQLDKALITALVERWRPETHSFHLASGEITVTLQDVAMLFALPIDGRPVCSTTDHDYAQVVLDCLGLDARGPAMPGKSFLHYKWLKKHFYELPEEVDDMTVERHVRAYILSLLCGVLFPDGTGRMSLIYLPLIADLSRVSTYSWASAVLAFLYRSLCSVASSHNIKNIGGSLLLLQLWSWERFHVGRPLVRSPLCTEMGIEHDLPPIGFRWVGSRTQSESANRCLKQYRDELNVQRVDQVKWEPYLQVESSTLPPLCTRDADLWLTQAPLINFPIVEMYLPERVMRQFGLRQCIPPPFRPTLQSLHRISRRGKERENWEETHHEYIQEWEARRQRIFRDTEQYDPSSYEEYLRWYSGATRRYLVPATSDDGEAGPSAPTDDFSDLQYQAKSPIIRKAVDKLESMVKKAKRAMTTTADTTTQALVAEFLLGFEDVLQDLGEIQNNSGSTVPPFHLDSPHFDAAASQQTPQLLLEAEENLDTNQEAQLEEDEELNTVERASLALETVEEENDFSNDVLPGNLSLGVEEDCDSATPANGICDAATPMTDLVVPRSDEGLHQDQHLEDHTEIEPATLMVEPKCEEGDGSSFVLPPSPPELMLEEQDDSGLIALGTGSCTEQQSLGVGEAEDQENPSTGTAQHGIMIVERTGEENSSCNGVYSSCPPSSVIVESSSDYLC

SEQ ID NO: 226679 - protein, 139 aa, Zea mays
  unsure (1)..(139): unsure at all Xaa locations
  Clone ID: MRT4577_138317C.1.pep
MMAKANGAVHASTKEPLFSFGVIADVQYADIPDGRSFLGVPRYYRHSITVLQRAVNRWNEQGNIKFSINFGDIIDGYCPKDKSLXAVQKVLDEFDKFDGPTYHMIGNHCLYNLPRSQLVSLLRLQXDSDRAYYDFSPCP

SEQ ID NO: 226680 - protein, 54 aa, Zea mays
  Clone ID: MRT4577_138318C.1.pep
DAWATLAYTPIPHLTFDIRVGCSGSGLAPSMPAPARNYYSYPPTVTPTIDVHHD

SEQ ID NO: 226681 - protein, 319 aa, Zea mays
  unsure (1)..(319): unsure at all Xaa locations
  Clone ID: MRT4577_138319C.1.pep
MMAKANGAVHASTKEPLFSFGVIADVQYADIPDGRSFLGVPRYYRHSITVLQRAVNRWNEQGNIKFSINFGDIIDGYCPKDKSLWAVQKVLDEFDKFDGPTYHMIGNHCLYNLPRSQLVSLLKIATDSDRAYYDFSPCPGFRIVVLDAYDFSCLGWPHDHPVTIAAMKLLDEKNPNTDKNSPDGLVGVDRRFVKFNGAVGKEQVSWLNDVLQDASTQHQNVIICSHLPMDPGASSPAALMWNYDEVMAIVHQYNCVKACFAGHDHKGGHSVDSHXVHHRTLEAALECPPGTSAFGHVEVYPNRLLLVGFDRMADTEVRF

SEQ ID NO: 226682 - protein, 79 aa, Zea mays
  unsure (1)..(79): unsure at all Xaa locations
  Clone ID: MRT4577_13831C.1.pep
PLYPGGKFDPPGLAGDPKAFSGLKVKELKNGPPPMFSMLGFFVQAIVPGKGPLKNLPGPIVGPVNNKGWGXAPNFVPGK

SEQ ID NO: 226683 - protein, 323 aa, Zea mays
  Clone ID: MRT4577_138320C.1.pep
HASAEATADGLLINTFRGLEGVFVDGYAAALGRKTTATCWAVGPTCASSSGGLDAGATAARGNRADVDVGLLLSWLDARPAASVLYVSFGSLAQLSLKQTVELARGLEASGRPFVWAIKEAKSSADVRAWLLAERFEERVRDRGLLVRGWAPQVTILSHPAVGGFLSHCGWNASLEAITHGVPVLTWPNFADQFCSERLLVDVLGVGVRSGVKLPPMSLPDEAEGVQVTSADVEKAVAELMGVGADGTARRARAKELAAKAKAAMEEGGSSYADLDDMLRHVAELNMKKSHEEGTGFSTLPELGTGSKNNDNIGAGAALSVQS

SEQ ID NO: 226684 - protein, 44 aa, Zea mays
  Clone ID: MRT4577_138321C.1.pep
SCYTQLSFLTRGNLGNVALKGFALNEGHHVLQLVRRQLGELGKE

SEQ ID NO: 226685 - protein, 319 aa, Zea mays; identical to SEQ ID NO: 226676
  Clone ID: MRT4577_138322C.1.pep

SEQ ID NO: 226686 - protein, 127 aa, Zea mays
  unsure (1)..(127): unsure at all Xaa locations
  Clone ID: MRT4577_138323C.1.pep
TSLDVTAMDRIMLLILVCIGLDXFGVLDAVDVRTGSGLGSILLKLLSVVYGNKATLEVNEYPSRQVSTSVVEPYKTVVSTDSLFEQTDVAKQLDHNAIYDISLRSLDIGTATYTRLNTLVSQVIASL

SEQ ID NO: 226687 - protein, 87 aa, Zea mays
  Clone ID: MRT4577_138324C.1.pep
TTFIFFYLKNFIFFGGGGPFSSHNLTHSHRGGINQPRPKPWFSQYSLLFASYYVLILNFPVLAVRETVGEYLPALRFCSRYYPHCSS

SEQ ID NO: 226688 - protein, 91 aa, Zea mays
  Clone ID: MRT4577_138325C.1.pep
TGAAAGMDTGQFGYCGRRGTLCIRNVLTLRGIPEGAVVCNVHHHLSDRRVFGKGSGDYANVISPYPDNGTWRIKLASGAQNSVPRSWPAMI

SEQ ID NO: 226689 - protein, 85 aa, Zea mays
  unsure (1)..(85): unsure at all Xaa locations
  Clone ID: MRT4577_138326C.1.pep
VTGEDQTIFKFLHSIDVHDGDAQAGYSIHLNHSQNTRLVYTNRAQTHIFGNDGTITIEASEINWTEGTXTAIFNSLNKRRSKQPL

SEQ ID NO: 226690 - protein, 91 aa, Zea mays
  unsure (1)..(91): unsure at all Xaa locations
  Clone ID: MRT4577_138327C.1.pep
NCLQHCNCNERHARCAWEKKKKKKKKKKKKKKKKKKKKKKKKKKKKKKKKKKKKKKKKKKKKKKKKKKKKKKKXXXXXXXXXXYIKKKXFF

SEQ ID NO: 226691 - protein, 110 aa, Zea mays
  unsure (1)..(110): unsure at all Xaa locations
  Clone ID: MRT4577_138328C.1.pep
LAVFLKRWNWKNLGFTKFNRFEENPLFASWVISKKAPTNPLSKNLPTFIGNWTXPFSGPLTAGGGGVTPRVTVTFARALAPVFLVFFLSFLATFPGFSLKFLIRGLLLGF

SEQ ID NO: 226692 - protein, 150 aa, Zea mays
  Clone ID: MRT4577_138329C.1.pep
MAPPAQSPRAWLLKYGDLLPAGYLAEKSQLSVPISPLDSSHGLDRFLRFLVFWCKSCWWKVEGALLVRSEVLLLSVVPSVHLCGAQSVLIIVHRGLVPGLPAARCSSSRAGAVDVSFGSGSGSSISVNLPPCRPGRGRRNWFSGTEPCVR

SEQ ID NO: 226693 - protein, 71 aa, Zea mays
  Clone ID: MRT4577_13832C.1.pep
ILYTNKCVFCFSRQDLYQCSLESQCWHPKCKGRHTCIYHEAYLVHWRRSEYHSNQRFRSERVGERMGGRVA

SEQ ID NO: 226694 - protein, 86 aa, Zea mays
  unsure (1)..(86): unsure at all Xaa locations
  Clone ID: MRT4577_138330C.1.pep
LKNLKREVLSAQEDVRGIQCAHLVIGQLMEMSQGNYGFVDTTTENNDYRKIRRNINRKVIHPSAPDWQKYHSXNVLVNKLPSNVNN

SEQ ID NO: 226695 - protein, 245 aa, Zea mays
  Clone ID: MRT4577_138331C.1.pep
MNIHKSTEPEEDLWFTKKVVPEFTEEHRTEAITVFYVMAKILASKDNDLAQEYTVIASKLKTMEPSCAHELLCNYLNPATIQTITNIKSFIFLKKLDNQMDESTRVLEKKLSKKTVLQMIHIIFYKTLPCPEGNHCQHYPRKIVHKNDFLDMELDCYFYHHEKDRRRFVLNNDEKEFKYAGNFADEKRGKSSGSGFARNFFESLYHPYYKNRCVRSKCDKSVLCPYNHSLQEKTVWMTVFKNFFG

SEQ ID NO: 226696 - protein, 271 aa, Zea mays
  unsure (1)..(271): unsure at all Xaa locations
  Clone ID: MRT4577_138332C.1.pep
PNRRRRRRRIAAAGVPGSRTESISRHPRPRSIARSTGSYKDWPEDMGFFRREGGWSTEYGEFFMSWYSQMLLEHGERILSAATGVFTGSPGVKISVKVAGIHWHYGTRSHAAELTAGYYNTRSHDGYAPIARMLARHGAVLNFTCVEMRDHEQPQDAQCRPEALVQQVAAAAREAGVGLAGENALPRYDDTAHDQVVATAADRAGRXRMVAFTYLRMGPDLFHPDNWRRFAAFVRRMNGAGSCREAAEREAHGVAQATGSLVHEAAVALRS

SEQ ID NO: 226697 - protein, 544 aa, Zea mays
  unsure (1)..(544): unsure at all Xaa locations
  Clone ID: MRT4577_138333C.1.pep
MACNLAQCATAAAATVAPRTPRPAASASVSFSARKPAGGSLRLQRQACCEPSVAPSRAVFACRAAASGSAADLASGGRRSSGVPVFVMMPLDTVKECGTALHRRKAVQASLSALKSAGVEGVMVDVWWGIAERDGPGRYNFAGYAELMEMARKAGLKVQAVMSFHQCGGNVGDSVSIPLPRWAAEEMERDQDLCYTDQWGRRNYEYVSLGCDAMPVLKGRTPVECYTDFMRAFRDHFADYLGNTIVEIQVGMGPAGELRYPSYPESNGTWKFPGIGAFQCNDRYMRSRLKAAAEAAGKPEWGHGGPTDAGGYNNWPEDTVFFRGDNGGWSTEYGDFFLSWYSQMLLEHGDRILSGATSVFGAAPVEVSVKVAGIHWHYGSRXHAPELTAGYYNTRRHDGYLTIARLLARHGAVLNFTCVEMRDHEQPQEARCMPEALVRQVGAAARAAGVGLAGENALPRYDGTAHDQVVTTAAERAAEDRMVAFTYLRMGPDLFHPDNWRRFAAFVRRMNGAGSCREAAEREAHGVAQATGSLVHEAAVALRS

SEQ ID NO: 226698 - protein, 43 aa, Zea mays
  Clone ID: MRT4577_138334C.1.pep
KPVLRNISRPYGSPFVPFEKCGSLNPSLVMNIGNYTTLTLKYI

SEQ ID NO: 226699 - protein, 544 aa, Zea mays
  Clone ID: MRT4577_138335C.1.pep
MACNLAQCATAAAATVAPRTPRPAASASVSFSARKPAGGSLRLQRQACCEPSVAPSRAVFACRAAASGSAADLASGGRRSSGVPVFVMMPLDTVKECGTALHRRKAVQASLSALKSAGVEGVMVDVWWGIAERDGPGRYNFAGYAELMEMARKAGLKVQAVMSFHQCGGNVGDSVSIPLPRWAAEEMEKDQDLCYTDQWGRRNYEYVSLGCDALPVLKGRTPVECYTDFMRAFRDHFADYLGNTIVEIQVGMGPAGELRYPSYPESNGTWKFPGIGAFQCNDRYMRSRLKAAAEAAGKPEWGHGGPTDAGGYNNWPEDTVFFRGDNGGWSTEYGDFFLSWYSQMLLEHGDRILSGATSVFGAAPVEVSVKVAGIHWHYGSRSHAPELTAGYYNTRRHDGYLTIARLLARHGAVLNFTCVEMRDHEQPQEARCMPEALVRQVGAAARAAGVGLAGENALPRYDGTAHDQVVTTAAERAAEDRMVAFTYLRMGPDLFHPDNWRRFAAFVRRMNGAGSCREAAEREAHGVAQATGSLVHEAAVALRS

SEQ ID NO: 226700 - protein, 42 aa, Zea mays
  Clone ID: MRT4577_138336C.1.pep
IKVEYLEQIIRSCPPGGVISYGRIRVGRPPKIDLDDIESNRR

SEQ ID NO: 226701 - protein, 72 aa, Zea mays
  unsure (1)..(72): unsure at all Xaa locations
  Clone ID: MRT4577_138337C.1.pep
GGGGVFKPIFFCHPTALRSAFHSIFRGKPKPSNLERLTHSIFHKTTTKIWGVEGGNYLNTTLISNLHIKTXX

SEQ ID NO: 226702 - protein, 237 aa, Zea mays
  Clone ID: MRT4577_138338C.1.pep
IPKKGSTSSSSSSRRGRAAPNECCVVVVEFQHGGTLKTLLYNHRDKKLSYRKVVRLALDLARGLSYLHSKKVMHRDVKAENMLLDRKRTLKIADFGVARVEAQSCEVTGQTGTLGYMAPEVLQGKPYDHKCDVYSFGILLWETYCCAMAYPNYSLADISYHVVKLGIRPDIPRCCPRALVEIMTRCWDGNPDNRPEMSEVVALLEKIDTSSGKGGMTPVDDVAQGCSCFGFNHRSVA

SEQ ID NO: 226703 - protein, 51 aa, Zea mays
  Clone ID: MRT4577_138339C.1.pep
MELIKSQATVCALLLALLLLSHYDGGTTTTMGRRPGVHGRPAPLVPLISDA

SEQ ID NO: 226704 - protein, 37 aa, Zea mays
  Clone ID: MRT4577_13833C.1.pep
PYFRVAKLIGDKRAVVAERGFNRPYTKILVTNCGVLS

SEQ ID NO: 226705 - protein, 94 aa, Zea mays
  Clone ID: MRT4577_138340C.1.pep
INGNPVCLVVTSGAKGDGKLLLWNALRGELASDLNSNLRSQDMIYPSVDTMEFYSENHLACGSDCDYGGSAVVQLWDIDSPESYLSFSASDSYI

SEQ ID NO: 226706 - protein, 104 aa, Zea mays
  Clone ID: MRT4577_138341C.1.pep
SVIPGGPRPLVWNGKSAVLVFGGRWLCPVLPCTSLSISRDGWALMFLAMRELPLMLVLFLDRVWREGWPLCTFWPSFTHNVGILFGFPRCLTPSHRVVMWILVT

SEQ ID NO: 226707 - protein, 87 aa, Zea mays
  Clone ID: MRT4577_138342C.1.pep
PTKELKLKDMEKDKDQVARAYKKKVKSNPCPANPDQSADNHEQDAASGNENSQEADVESILRNWLGCVLKKVQLVVGRFCASFLPCF

SEQ ID NO: 226708 - protein, 85 aa, Zea mays
  Clone ID: MRT4577_138343C.1.pep
PPPRNRGLRIRGFQKKGPKGGPFFRNYPGSFWGIILPESFLVFGAAQIFNPFVLNIGLGAAPPLENPSMVEKNPRKNQNVVFLLG

SEQ ID NO: 226709 - protein, 151 aa, Zea mays
  Clone ID: MRT4577_138344C.1.pep
MASEQAFNSDLRSEAQDFKREKTARVKWAYGKAFGPGRREEDGRPRPAKLAPLPKSAWGPPGMHKNRTAIKNDIAYASGDSSADEEVEHPSVAPVPDAGVTYSFDAVQGPNHGSQVLGQALDKAIETFEVRQTDKLIKEEYEVLRLDEKPF

SEQ ID NO: 226710 - protein, 259 aa, Zea mays
  Clone ID: MRT4577_138345C.1.pep
MASSCLSTAAAQLQLQLQLHLASSPVFPRPARAHHHRLVAAHAVAVPVHRRRALAVTASASQEEAGATVVVEEELEEVAEQGREVQLQEQDEVQEEGAAVGASSDDSGPSVAATTTTTTTKLYFGNLPYNCDSAQLAGIVQEYASPEMVEVLYDRTTGRSRGFAFVTMTTVQDCELVIKNLDGSLYGGRTMKVNFADRPKPKQALYPETEHKLFVGNLSWTVTSEMLTEAFGRCGTVVGARVLYDGETGRSRGYGFVCY

SEQ ID NO: 226711 - protein, 225 aa, Zea mays
  unsure (1)..(225): unsure at all Xaa locations
  Clone ID: MRT4577_138346C.1.pep
MRANLEDLPSCDLMYELLRRMKCSSQPHKRLILIWPLGSGKVTPPPIIQGDYCLXHLSTGDMLMAAVATKTPLCIXATEAMNTGELVSRXIXVGIIDEAMKKPSCHIGFILDGFPKTVTQAQKLGEMLTKQGAHGDKGLNFASDDAALQPTITGRCIHSARGRTYHSXFAPPESPRVDDVTGEPLIHWIHDTADVLKTWLEAFHRHAEPVVDYYSETGLVVNLSA

SEQ ID NO: 226712 - protein, 73 aa, Zea mays
  Clone ID: MRT4577_138347C.1.pep
PARWVLPGNLDSGIGFLRGVRGERQPGGVGSPQEVLELRQEEEEEEDIGGDDARGCPFIGSHRRRRMVLHVAC

SEQ ID NO: 226713 - protein, 91 aa, Zea mays
  Clone ID: MRT4577_138348C.1.pep
GRGGGYRLRWLRGRCPLARGAWCGSSKVLRGKNITATDGKDWVDAKASWFGKPPGAGPDDNGGGCGYKDVNKPPYNSMGACGNIPILQVGL

SEQ ID NO: 226714 - protein, 35 aa, Zea mays
  Clone ID: MRT4577_138349C.1.pep
VVTNLVSWPPCVPVTQNNRAPAKGLIMKKCCLNLT

SEQ ID NO: 226715 - protein, 84 aa, Zea mays
  unsure (1)..(84): unsure at all Xaa locations
  Clone ID: MRT4577_13834C.1.pep
PKTQEAAQNPXAKTQQQRPHPESQQGAANGAPNKTQQQXRPYNQQKRANPATLXQQQQMLPFGQLALTDRAASNQQHIIGGALF

SEQ ID NO: 226716 - protein, 82 aa, Zea mays
  Clone ID: MRT4577_138350C.1.pep
DPCWPCSSKGTLNKGRHGTSLAWRGGVRSVLGRAARADGPAARRLGAQLAFKNWMVRGILPFTAGVALCCVFHRSEIVNIRS

SEQ ID NO: 226717 - protein, 135 aa, Zea mays
  unsure (1)..(135): unsure at all Xaa locations
  Clone ID: MRT4577_138351C.1.pep
KNNFYLFFXTNKFIGDFGILFLVKKTSERTTHTPVSGTTGNGAAPFIVSTQTGGQFPWDLWPITNGASIKVPPHPTKYQMQDPSQYCRKGTRETLGDPAHPPGVPMDHHQYCPCSGPESIYHIPRQGNHCFHGRG

SEQ ID NO: 226718 - protein, 79 aa, Zea mays
  Clone ID: MRT4577_138352C.1.pep
VARATAGGSLSRHIVPPAFHGFIHFPVYLCICSFCDNNFHVLAIIYMGYTLVLSWNVWKFSFVALVFIFSNLVILEQSL

SEQ ID NO: 226719 - protein, 77 aa, Zea mays
  Clone ID: MRT4577_138353C.1.pep
LVLLVLSPTGSLARSGPFCFRQKLVGSFGYHESYIASVETRRALLSKPSGVLINWSLDGTFAVLACFTCIRGSVAIT

SEQ ID NO: 226720 - protein, 66 aa, Zea mays
  Clone ID: MRT4577_138354C.1.pep
GPVLFCDIGNNANDLLMKDYTDDQQLTISTDSACGLGLTCTAVNKGGLYYLNGTSGDTYKNTTACA

SEQ ID NO: 226721 - protein, 76 aa, Zea mays
  Clone ID: MRT4577_138355C.1.pep
SRAKSCVNYSTAVWPMKIVEQPCSLPGQNIFWSHIQYSQVYLRIKTSSYCLSGYQYMNVLPWNFHPHHPPKAFSHC

SEQ ID NO: 226722 - protein, 79 aa, Zea mays
  Clone ID: MRT4577_138356C.1.pep
HAPSRDPVGKLERGKLGILPTRPGCWSSPKPAPRRTPCLYPITRPTALPQGSTLALPAKVSPRNATCVESVYLGEGWRR

SEQ ID NO: 226723 - protein, 80 aa, Zea mays
  Clone ID: MRT4577_138357C.1.pep
FNSMVWSMLVRTSSCLVHTCVHSEGVLYVILIANVVVSGTTIQYQASGIIRRWWYYLHNGMFDKSTVFRGVSYGDGFIVS

SEQ ID NO: 226724 - protein, 73 aa, Zea mays
  Clone ID: MRT4577_138358C.1.pep
YPAAALILKNSLGLPHLYTFYLVCRSPGLLLSLYPSVGGPDYMCCHGLTLHTLVARVDAHAVSARSKMTIKAL

SEQ ID NO: 226725 - protein, 90 aa, Zea mays
  unsure (1)..(90): unsure at all Xaa locations
  Clone ID: MRT4577_138359C.1.pep
LDRAEYDRKSKEKSRERAKDSNKDRYIKRNSSRDREYDRRRSHDRLHDRERERDSRQSRSYDSRSHRKSYSTRGNSXDYDRSGYVYLYFS

SEQ ID NO: 226726 - protein, 57 aa, Zea mays
  Clone ID: MRT4577_13835C.1.pep
KRMGERRDKALKELMDQVATKQPNSMCHGNKENFWEGQGFKFIASMSMLALVSLGQR

SEQ ID NO: 226727 - protein, 92 aa, Zea mays
  Clone ID: MRT4577_138360C.1.pep
SCSSSPSPAGADTLTRALPGRAAAGSTAPTCPHTTCAMWSSLPMPPLLSRPISLLAAMAASTWICTRDMAHPGLQFQFRFLWGTCCAVVRSR

SEQ ID NO: 226728 - protein, 76 aa, Zea mays
  Clone ID: MRT4577_138361C.1.pep
SKRNCMHAGNTMCKVGAQDLRRLTNGVHSSRTAKMRMPIVNSLTIDCYLSVVQEIGGCVRSHDTYTGKTEIERGYD

SEQ ID NO: 226729 - protein, 43 aa, Zea mays
  Clone ID: MRT4577_138362C.1.pep
PNSTQSVPKTICLTPINAAVLRTAISTHNQVGQLSSMATDYYP

SEQ ID NO: 226730 - protein, 62 aa, Zea mays
  unsure (1)..(62): unsure at all Xaa locations
  Clone ID: MRT4577_138363C.1.pep
MVGLRMWSCPLSRRVEGLQDPGPVPVPPIPAVAGGGAPTRAXGIWLSPPPRSLPGHGRWGTA

SEQ ID NO: 226731 - protein, 118 aa, Zea mays
  unsure (1)..(118): unsure at all Xaa locations
  Clone ID: MRT4577_138364C.1.pep
SARGRLTGALAGIAPLQRSGAGLNLVALTMASPTXVEXRHPADGRRQQQQLSVFWLEAQFFVFDLLELFTNRVLTEFCHEQVLSSAGKPVHMQTVYMSMIYRSFSFGFYLSSVLVSMV

SEQ ID NO: 226732 - protein, 146 aa, Zea mays
  Clone ID: MRT4577_138365C.1.pep
GRASAEEAVQRLHGTMIGQQAVRLSWGRSPASKQDSSAVWSQQADPNQWANAYYGYGYDAYGYAQDPSYAYGAYAGYSQYPQQVEGTVDATSVAGSHPGMEQKEEPYDPMNIPDVDKLNASYMAVHGRAMLGRSLWLKTNPLPQPT

SEQ ID NO: 226733 - protein, 86 aa, Zea mays
  Clone ID: MRT4577_138366C.1.pep
LGSGMNGFSLSTRKVHRRVRLSRSKLQRRVSRLNDSWLLLRERYYPLKTLNINVLYLWKVEFKVRQHHYASSFCLTTRWGHSTLIF

SEQ ID NO: 226734 - protein, 60 aa, Zea mays
  unsure (1)..(60): unsure at all Xaa locations
  Clone ID: MRT4577_138367C.1.pep
RNHYKLLPAHARCDKHTKRRHLCLTTRTRTTDSQQTLQXFLGMILXXXPTSKKYNKKKXI

SEQ ID NO: 226735 - protein, 415 aa, Zea mays
  Clone ID: MRT4577_138368C.1.pep
MAAPYHQPTSLEEVRTLWIGDLQYWTDENYLYSCFAHTGEVQSVKIIRNKVTSLPEGYGFIEFVSHEAAEKILQTYNGTQMPGTEHTFRLNWASFSSGERRPDPGSDHSIFVGDLAPDVTDYLLQETFRVNYSSVRGAKVVTDPNTGRSKGYGFVKFADENEKNRAMTEMNGVYCSTRPMRISAAIPKKSTGSQLQYSAAKAVYPATAYAMPQLQAVLPDSDPTNTTIFIGNLDPNVIEDELRQICVQFGELIYVKIPVGKGCGFVQYASRASAEEAVQRLHGTMIGQQAVRLSWGRSPASKQDSSAVWSQQADPNQWANAYYGYGYDAYGYAQDPSYAYGAYAGYSQYPQQVEGTVDATSVAGSHPGMEQKEEPYDPMNIPDVDKLNASYMAVHGRAMLGRSLWLKTNPLPQPT

SEQ ID NO: 226736 - protein, 77 aa, Zea mays
  Clone ID: MRT4577_138369C.1.pep
RGNKLLKTPYRPILLYTPQFLYIQLTINSLNFDNTNVTNVFINLLQRPHTNPIMEPLPLSIPTSIKRKLDSAWGHQP

SEQ ID NO: 226737 - protein, 593 aa, Zea mays
  Clone ID: MRT4577_13836C.1.pep
MSEQQQPLPQPRSSMREALEKEDKEKAAAAAAAKEKAAVPKNGNGNGGKNGGGAGSGNGGAPPQSGEETAREIQVVREAYRRETAAPAYVIPEEPPAVVELVGWYIYGFCSYFITHLLLPVLFPAIITQVAFPNSDFTPDPKYTLKGVTCSVHEMSMYQRLTKHSIVIDGSRMSPLGWSGLSWAIGILIVAPLLTQTAHHLDRGQYQSLILIAATSFGSFFCLLTGFFKTVWVFLFYILFIAGSIIVAEAVHTRNLGLMIRGLAAHDSGKHLVLRRRAAASQLSLYCTAIGGIGAALMAAFMYHMLRRTDQLTGLWVVSIFCGLIWFIGICHGLFTNRPSSSSPTTAFEPNFFTKLSYSMTLLRYPQAIGSLVAVFLSSFATMCIFTSGTLYAIGGVCIKPVLVLALWILYFLFPLISLPLLHPIQIIIRADAVRMQLLGFIICLFVSGAGFYFKSHRWRAAHIIVIALVQSTANGILYAFGRILLLDASPPGKEGAFSVWYAFVRVTGAMIGFAASSAGPGRAGGSFAAAFLGSFLGIIVLIFGNVSNIGALKAAGHLKGMDDEKRMGGLGMEKGEGMGSAVADSGESRGRV

SEQ ID NO: 226738 - protein, 176 aa, Zea mays
  unsure (1)..(176): unsure at all Xaa locations
  Clone ID: MRT4577_138370C.1.pep
XELRQICVQFGELIYVKIPVGKGCGFVQYASRASAEEAVQRLHGTMIGQQAVRLSWGRSPASKQDPSAVWSQQADPNQWANTYYGYGYDAYGYAQDPSYAYGAYAGYSQYPQQIEGGVDATSVAGSHPGMEQKEEPYDPMNIPDVDKLNASYMAVHGRAMLGRSLWLKTNPLPQPT

SEQ ID NO: 226739 - protein, 139 aa, Zea mays
  unsure (1)..(139): unsure at all Xaa locations
  Clone ID: MRT4577_138371C.1.pep
LGPSRPAVISSGVLVSPPPPSRVRDRRSSPAIGYVDERIEMQWTDDEHRCFVGGLDXDTDDHYLHNGFNTYGKVLESNIXLDRXTQRARXFGFHTFSKEEAMWNAIQGMNGKELDDRNITDYDAQSRGVRERGEGGVPR

SEQ ID NO: 226740 - protein, 259 aa, Zea mays
  unsure (1)..(259): unsure at all Xaa locations
  Clone ID: MRT4577_138372C.1.pep
QRYPDQHLCCNITQQYLRPAAPASSLFCTRNAPFTVSRRRDLQPTPSSHPYSLRDIXRGNAFSTSANAVTVKKPVGDKVQKDASKKDIDEEIADSQILKNLGKYLLLNDSPDFRFRVALSLVLLVGAKVINVQVPFLFKLAIDWLAALGGAEASLASFTETNATLLALFASPAAVLIGYGIARSGVSACTELRNAVFSKVTLRAIRSVSRKISTRRVKXKPKLRGRSGGNSKGRYSKFLGKEFLCRALGPKKKMQTTCG

SEQ ID NO: 226741 - protein, 52 aa, Zea mays
  Clone ID: MRT4577_138373C.1.pep
EPIKVASDRSCGVMALDASENCGIINAYDEIDERSISARRGNIVVAVDVRSW

SEQ ID NO: 226742 - protein, 123 aa, Zea mays
  Clone ID: MRT4577_138374C.1.pep
GGGKKRGGEKVESGGQKGGKKRGGGGGGKRGEKKGGGGEKGKKRGEKKGEKGKEGKGGGKGGRERGRKGKKGKGEREEGGKGKKEERGEKGKKGGGKGGGKKGEGEEEGRKKEGKEREGENGE

SEQ ID NO: 226743 - protein, 41 aa, Zea mays
  Clone ID: MRT4577_138375C.1.pep
GHFVYKNILGANQHLFLNSLPYPCTSHSTWTYLSVSSLTCH

SEQ ID NO: 226744 - protein, 59 aa, Zea mays
  Clone ID: MRT4577_138376C.1.pep
PDRARQRKPAMPAESKGWQPHGQCCRQSSSMHKWLLPRRSQSQRSLWAPMNYRFRSDDA

SEQ ID NO: 226745 - protein, 107 aa, Zea mays
  unsure (1)..(107): unsure at all Xaa locations
  Clone ID: MRT4577_138377C.1.pep
QRKARPGREGSTADQQTGRGAGNQRDDGPTRADDNIQKESTLHPAPRLRGGRQTFANTPTGKTITLAVEASGPTGHGKGNSQDKEGKPPDQQRXITSAAKQLEDRRT

SEQ ID NO: 226746 - protein, 71 aa, Zea mays
  Clone ID: MRT4577_138378C.1.pep
MGISRDSMHKRRATGGKQNAWMKKRKYELGRQPVNTKLSNTMTATRVPVRGGNVKWRALFLGTGNYSLGSE

SEQ ID NO: 226747 - protein, 72 aa, Zea mays
  Clone ID: MRT4577_138379C.1.pep
HIGVSKHRPSSQPQFSATLKLYVRTYSAEAPPRGTPPVVCVHVGIISYRVGGHLQELSLDAFTSRKTECIYR

SEQ ID NO: 226748 - protein, 79 aa, Zea mays
  Clone ID: MRT4577_13837C.1.pep
HQDSRPKLAMTGWEWQRWDYISLQSLNHRRSAAVINPRAYPKKGPPDTKTYPMSKTRVYNRFQNSLSATGTTERISPLE

SEQ ID NO: 226749 - protein, 53 aa, Zea mays
  Clone ID: MRT4577_138380C.1.pep
VQPAMLASPHICSHELKCDLYHRIINVVIVACKSIFKCTCVQRVYQTTPMAYI

SEQ ID NO: 226750 - protein, 73 aa, Zea mays
  unsure (1)..(73): unsure at all Xaa locations
  Clone ID: MRT4577_138381C.1.pep
RRDGGGGTREDGTGNGTASTQGAHTGYGTVAGGSGTPGXXGTGGTXGIGSSGTGGTGSSGTWGAGRLGIPAGT

SEQ ID NO: 226751 - protein, 77 aa, Zea mays
  Clone ID: MRT4577_138382C.1.pep
MASTSNFLAVALVMGAVLLGGAGTCHAARRLDELPPLPQVPAGIPSLPAPQVPELPMPQVPTVPQLPGVPLPPAAVP

SEQ ID NO: 226752 - protein, 527 aa, Zea mays
  Clone ID: MRT4577_138383C.1.pep
FGTRLRVNRGEKVAVCGPVGSGKSSLLYALLGEIPRLSGSVEVFGSVAYVSQSSWIQSGTVRDNILFGKPFNKELYDKAIKSCALDKDIENFDHGDLTEIGQRGLNMSGGQKQRIQLARAVYSDADVYLLDDPFSAVDAHTAAVLFYECVMTALAEKTVVLVTHQVEFLTETDRILVMEGGQVSQQGKYSELLGSGTAFEKLVSAHQSSITALDTSASQQNQVQGQQESDEYIVPSALQVIRQASDIDVTAKGPSAAIQLTEEEEKGIGDLGWKPYKEYINVSKGAFQFSGMCIAQVLFTCFQIASTYWLAVAVQMGNVSAALLVGAYSGLSIFSCFFAYFRSCFAAILGLKASKAFFGGLMDSVFKAPMSFFDSTPVGRILTRASSDLSILDFDIPYSMAFVATGGIEVVTTVLVMGTVTWQVLVVAIPVAVTMIYVQRHYVSSARELVRLNGTTKAPVMNYASESILGVVTIRAFAATERFIYSNMQLIDTDATLFFHTIAAQEWVLIRVEALQSLTIITAALFL

SEQ ID NO: 226753 - protein, 104 aa, Zea mays
  unsure (1)..(104): unsure at all Xaa locations
  Clone ID: MRT4577_138384C.1.pep
VAFICLKSRSLNHEADHIAGSRNHTAPDEDGLPFDTVMWAAEDVEDTINLVDKFVVLKISXRVDMTMGSTGPKSXIEARSAXTFLELIGIQLECVNKMYGRNEA

SEQ ID NO: 226754 - protein, 75 aa, Zea mays
  Clone ID: MRT4577_138385C.1.pep
NSYMNMFASIFLHNVQLEFPEELGSHFLWFQDRPNKNTHNSNSYMYIFASLYLENVELEFSEEFRYHFLWLQDRH

SEQ ID NO: 226755 - protein, 36 aa, Zea mays
  Clone ID: MRT4577_138386C.1.pep
LECNVNCKSKISVFSTRIDGTVILYLSLIMKEKVKS

SEQ ID NO: 226756 - protein, 214 aa, Zea mays
  Clone ID: MRT4577_138387C.1.pep
MQPKTAAVLSSKIVHKSKIKFCPACGSPTKLAIPDGDEKMRAVCSSCGRVHYENPKMVVGCLVEHDNKVLLCRRKIEPAYGLWTLPAGYLEVGESTAEGASRETLEEACADVEIISPFAQLDIPLIGQSYIIFRARLKTPNFSPGAESLECALFALDDIPFDSLAFSSIIVTLRMYTEDVRSGNIKYHYCTINKRLGASPSDLRSFDIDNHIAV

SEQ ID NO: 226757 - protein, 169 aa, Zea mays
  unsure (1)..(169): unsure at all Xaa locations
  Clone ID: MRT4577_138388C.1.pep
MQYALAPLALAAIVAALPQASTSSECSENYPGTFQIQVVNQTDVAKRSAFEKRQSTPLEISLKDGVLTDAXGRVGSIVANQQFQFDPAPGQPDAVYTSGWSVCNNGSLSIGGDSTFYQCLSGTFYNLYDQDVADQCSPVYIEAINGAGSASQVPDGQVTATQVASQMPD

SEQ ID NO: 226758 - protein, 99 aa, Zea mays
  Clone ID: MRT4577_138389C.1.pep
ATRDNPFANPFGPESPALLGLRDVALPPTLVVAAGQDLLRDRQADYVARLKAMGQHVEHVEFEGQHHGFFTVEPASDASSELVRLVKRFVYGDGDGNSI

SEQ ID NO: 226759 - protein, 96 aa, Zea mays
  Clone ID: MRT4577_13838C.1.pep
AGFPVLQDKYPRRYKAFLYCNTASFMASVALIVLLLNPNLYGPGINCYALFVCMVAGMFSLIGAYAAGSSLHLRTSIVLLLLVLAVFAAVLYVTIK

SEQ ID NO: 226760 - protein, 263 aa, Zea mays
  unsure (1)..(263): unsure at all Xaa locations
  Clone ID: MRT4577_138390C.1.pep
MLLPLLRSHPLLHHAARLSSPRTRLLLRRDAIPLARSPPIRMAASSGSGASSPASAPPAAVVHKSKIKFCPACGSPTKLAIPDGDEKMRAVCSSCGRVHYENPKMVVGCLVEHDNKVLLCRRKIEPAYGLWTLPAGYLEVGESTAEGASRETLEEACADVEIVSPFAQLDIPLIGQXXYIIFRARLKTPNFSPGPESLDCALFALDDIPFDSLAFSSIIVTLRMYTEDVRSGSIKFHYCTINKRLGASPSDLRSFDIDNHIAV

SEQ ID NO: 226761 - protein, 48 aa, Zea mays
  Clone ID: MRT4577_138391C.1.pep
HPFSQPVHLLQQYTNNIITNTNTLNFPNFHPSLLNFIYPNNSNNNRYI

SEQ ID NO: 226762 - protein, 85 aa, Zea mays
  Clone ID: MRT4577_138392C.1.pep
TFLPPYFLKMWIWTSPRIFGSHFLWLQDRLNKKTNIPNSYMNIFASLFLENVELEFPEEFRSHFLWLQDRPIGNNIPFNCHWLVF

SEQ ID NO: 226763 - protein, 89 aa, Zea mays
  Clone ID: MRT4577_138393C.1.pep
NNLALISLPHSAYKSCLRAPSFLRCLLSCSAYSRSSARTHHPTACLLLLLHFRSCHRRRSSTAVTSNSASICVLNISSQPKSAPIVVEP

SEQ ID NO: 226764 - protein, 74 aa, Zea mays
  Clone ID: MRT4577_138394C.1.pep
CTAPTIFHIFQNLLTTLVCFGSPTHFSCRCPYFVSSVFTAIVLFTIDSSVFLFLACFIFSSFYLLTHIYALDLL

SEQ ID NO: 226765 - protein, 74 aa, Zea mays
  Clone ID: MRT4577_138395C.1.pep
TLVSGENRDSLCCRTPIPASNPLVLFMYRRQQTCVKRQWDACCKVICLALYAFYTLFGCSNVIPICIRFLTVGL

SEQ ID NO: 226766 - protein, 87 aa, Zea mays
  unsure (1)..(87): unsure at all Xaa locations
  Clone ID: MRT4577_138396C.1.pep
YFPYPYLGDVIRVVLGVVFXLMRWRVGAPKRAPINGTLLKLLSTDTLCHGLGHITSIECSAAAEVXFADTMKALEPLFSATCTQLIL

SEQ ID NO: 226767 - protein, 109 aa, Zea mays
  Clone ID: MRT4577_138397C.1.pep
DAHRVGPYTTGQKVGADMVHHHVLPGAPVRTHSSRRRDSDLHGCDDLHVNISGVGQARRRLLLSGQRQMVSTKQQQQQLGLSLASAANLPQSPELSVRPLRPVVPWLIR

SEQ ID NO: 226768 - protein, 160 aa, Zea mays
  unsure (1)..(160): unsure at all Xaa locations
  Clone ID: MRT4577_138398C.1.pep
FPLAAAAALFPLAAGGLPSGGSSXXALVGLLWAXPLSSRLSPGSWSWPXLPLSGGLPXRSSWGXPSPPRXAPLLRLPRXXLSXLARSPLSXLAXPGAARRACXXPLXSSRVXXSPPRGXRPPXXPCSXRXXCFVLPAPAXXXPSFGAARGARAGRGAXXG

SEQ ID NO: 226769 - protein, 60 aa, Zea mays
  Clone ID: MRT4577_138399C.1.pep
LRKRSHSFKYIFLTTLPVYRNLSICGINQALILNFGEESWDLYNFCEKLRSNLWGVTFYY

SEQ ID NO: 226770 - protein, 37 aa, Zea mays
  Clone ID: MRT4577_13839C.1.pep
VDGQTHMLFGSDRMELLAHLLGEKWMGPIPPAVNARL

SEQ ID NO: 226771 - protein, 49 aa, Zea mays
  Clone ID: MRT4577_1383C.1.pep
STARVRLFVGTQETTSCVGDIAMCVRAGASKNSLGQHVPMGLGKCGYTG

SEQ ID NO: 226772 - protein, 96 aa, Zea mays
  unsure (1)..(96): unsure at all Xaa locations
  Clone ID: MRT4577_138400C.1.pep
IVRDSNRLLWGKLARSRRAPIRYSGRDSTRPLILWTGRSMLEMFQLSGHTARVLXMAKSAYGCAEPSPAADGTMRFFYVSGDPEVAEPASNASPLG

SEQ ID NO: 226773 - protein, 61 aa, Zea mays
  Clone ID: MRT4577_138401C.1.pep
MADYRDGVDEDSRGGVEDEDDDDDHDAEYNGVSAVQLERRLHELLHERNRDRIEELEAALL

SEQ ID NO: 226774 - protein, 107 aa, Zea mays
  unsure (1)..(107): unsure at all Xaa locations
  Clone ID: MRT4577_138402C.1.pep
TPASSFFPHKSSCGVLGPYLPPTPSTSPPRTMTTFTPLFTNKPLNLSNHXPFHNQPFLSPINPFTFPITTXXXSPPLLSPHLSLFLKKTFXPLPXXNFPPPPPPFIY

SEQ ID NO: 226775 - protein, 57 aa, Zea mays
  Clone ID: MRT4577_138403C.1.pep
AVVDPNRDRRAQSLRRWRCRRRGCGGVGRLRRGEGFARESRHEEKGCTRSGERKGGA

SEQ ID NO: 226776 - protein, 106 aa, Zea mays
  unsure (1)..(106): unsure at all Xaa locations
  Clone ID: MRT4577_138404C.1.pep
GYDVLHTSRCRRRSFARVTLTLNLGKEKSHINIAGIGHAFFGRAXTTGHLIYKLGGIDTRLIEGGEKEAAKMNKRSLRCAWALDKLMGERERGITIDIALWKIETT

SEQ ID NO: 226777 - protein, 478 aa, Zea mays
  Clone ID: MRT4577_138405C.1.pep
MGNSQASPASASSSRFVMASRAFPKQELDGLRELFASLAAQSRTGGRAISRPVFLEYYQVRGRLGDRLFQLVAKESGGSDGVTFEDLIISKATYGRGTRDEVDEFIYQLCDVTGDGALTRSDLESVLASVHETVFAIKKEAVEVSNNRPFEEFLNSAVFSKDVEGVSGKSMSLSDFRNWCTLLPSLRKFLGNLLMPPDSGRPGFEVPLLHHPENICTDTLLLNKEYAWHIGGGFSQHEVQEWKLLYHSSLHGQSFNTFLGKVTNGDAQTVLIVKDTEGSIYGGYASQPWERHSDFYGDMKTFLFKCYPQASIFRPTGANKNLQWCAVNFSSENIPNGIGFGGQPHHFGLFLSANFDQGHSFTCSTFTSPPLSKTNRFRPEVIECWGIQMRGAQDEKLELVKGTVLERFKEYRNMLKSETMVLYSTDHILSLKKVNCSESVHHMFIKIIKSETMFLYLNNHIIQDKMVSYEFIVTIDQS

SEQ ID NO: 226778 - protein, 92 aa, Zea mays
  unsure (1)..(92): unsure at all Xaa locations
  Clone ID: MRT4577_138406C.1.pep
IPNPHLKSTLAMSPRQRKKMTRITPTMKELQMMVEHHLGQQQQGEDPEGAAESTGTQGSRPPGIPDTEVESRLGTSGTAKXTAECIPKTHER

SEQ ID NO: 226779 - protein, 95 aa, Zea mays
  unsure (1)..(95): unsure at all Xaa locations
  Clone ID: MRT4577_138407C.1.pep
FVSLPVVIIFLSFKEHGTVAVRSAHLLCSRGAKFVGSSLCSPTSSLRFGGASLLLALAPFFGSSGSTWRPPGASFFVARYRQVVPXAXXFPPGSA

SEQ ID NO: 226780 - protein, 153 aa, Zea mays
  Clone ID: MRT4577_138408C.1.pep
VKDTEGSIYGGYASQPWERHSDFYGDMKTFLFKCYPQASIFRPTGANKNLQWCAVNFSSENIPNGIGFGGQPHHFGLFLSANFDQGHSFTCSTFTSPPLSKTNRFRPEVIECWGIQMRGAQDEKLELVKGTVLERFKEDRNMLKMVGLANASD

SEQ ID NO: 226781 - protein, 49 aa, Zea mays
  Clone ID: MRT4577_138409C.1.pep
EFFYHPSSLVWGHSPMPAGRLHLLTPYYAFRLFADFIFRPIRILATIVT

SEQ ID NO: 226782 - protein, 34 aa, Zea mays
  Clone ID: MRT4577_13840C.1.pep
SSDLIFSRQHRDPLTYLIDTPEILTNPYPNRIGG

SEQ ID NO: 226783 - protein, 59 aa, Zea mays
  unsure (1)..(59): unsure at all Xaa locations
  Clone ID: MRT4577_138410C.1.pep
YRTPSPXFFFFFFFFFFWEXQXEGDPLTHINSKITPNYFFLQKTPTPVHPPMGWQQFHL

SEQ ID NO: 226784 - protein, 163 aa, Zea mays
  unsure (1)..(163): unsure at all Xaa locations
  Clone ID: MRT4577_138411C.1.pep
MAMDTQAYADTRHLVAAADSAWAHEAKPRQLSSQLALTTTSSRAPAPVRATAGEAVTEEAPKGFADPQLDPNTPDQNFGGSTGELLRKAHEEEIYVITWVSPKEQVFKMPTGGACIMREGPNLLKLARKEQCHTLGTKLXSKYKITYQIYRDFPXGKEQNLHP

SEQ ID NO: 226785 - protein, 80 aa, Zea mays
  unsure (1)..(80): unsure at all Xaa locations
  Clone ID: MRT4577_138412C.1.pep
GYIQQWSDDYLHIKVAHVHATAKVLSDALSHYQFALRINPQNVPANNGIGALGETYDGSXRDAPXDYEKNEAEDVDVDTR

SEQ ID NO: 226786 - protein, 158 aa, Zea mays
  Clone ID: MRT4577_138413C.1.pep
FINMMPAPQSTDELSSPTTSSNLPPMQPPATRPQEPEPNESQSSVQRILQDLMMSPQMNGIGQLGNDMKRPNGLTSSVNGVNCLVGNAVTNNSGMGGMGFGAMGGLGPNHAASGLRTAMVNNAMAISGRMGMNHSAHDLSQVGQLQQQQQHQQQQQQQ

SEQ ID NO: 226787 - protein, 59 aa, Zea mays
  Clone ID: MRT4577_138414C.1.pep
PHRSPAVKEQEAGSKVSFIARNSEGLYMACPPGLPPQKKEPPLSHLKKCPQQTKDPPFT

SEQ ID NO: 226788 - protein, 172 aa, Zea mays
  Clone ID: MRT4577_138416C.1.pep
MGRSAISQALPVHQEDEDLFETSSSFSCDSDDEAQFSDGEDQFVPASPPVRRLNSDSVYDLSSIKAELSAKKGGLSKYYDGKSQSFACMSEVRCLEDLPKKSPYKKIKSCRSNINLDGNQRDCPVTGSNNSKGIAKQSSASSCANLMMARTSSANMLYRPPAIPVNKSACHQ

SEQ ID NO: 226789 - protein, 51 aa, Zea mays
  unsure (1)..(51): unsure at all Xaa locations
  Clone ID: MRT4577_138417C.1.pep
TITHSHELGCYHDVDLTSLAPTQYHLMIPFSKPCRSXERVCFTSHHYLPRA

SEQ ID NO: 226790 - protein, 72 aa, Zea mays
  Clone ID: MRT4577_138418C.1.pep
QQTKHIQHSTITDNIYVLFMLARGPLFTCSYHYHTIILLSYYNISITTHLLTTNYVIYFTTQFFTTTSSTTR

SEQ ID NO: 226791 - protein, 102 aa, Zea mays
  Clone ID: MRT4577_138419C.1.pep
SIWGCHCFQNYFLSVRVCSRDVHLVIQRWLDRAQTIIRLSMPKLGIWLYVCSCHFGALYSWFQIDLFLLTSVCRLLMHLLKRNGTSETVTLECLLACRPNVK

SEQ ID NO: 226792 - protein, 55 aa, Zea mays
  Clone ID: MRT4577_13841C.1.pep
ANEVFFPSWQLVSELLWSESTFAGENLWNLLQKDCPKCLRKYSSDAFSLQPYLSC

SEQ ID NO: 226793 - protein, 147 aa, Zea mays
  Clone ID: MRT4577_138420C.1.pep
GTWGCGQPLNETRTPEHSHEAHAASSKVASALLPDVPPPPVMNPRGPDGGLDALSRPMLDTNAGDYTREEDEITTVEADGGERRTLRHGRCHPHADYAQEDDCHTGGELPSTWNGMTNVCAKRLQKKVLRRGSCTTRSNMDAESHVL

SEQ ID NO: 226794 - protein, 399 aa, Zea mays
  unsure (1)..(399): unsure at all Xaa locations
  Clone ID: MRT4577_138421C.1.pep
MAGYMSRGPQNGSVYVCNLPPGTDENMLAEYFGTIGLLKKDKRNGRPKIWIYRDKVSNEPKGDATVTYEDPHAASAAVEWFNNKDFHGSTXFSEQDEVDNGAGRGRGRGDGPGKAWQQDGDWMCPNTRXYDCCGNVNFAFRGVCNRCGAARPAGAGGTGGGGGGRGRGRGNSDARGSSRAGAGAATGGGPPGLFGPNDWPCPMCGNINWAKRTKCNICNTSKPGTNEGGVRGGRGGGYKELDEEELEEVKKRRKEAEEDDGEIYDEFGNLKKKFRSKALHTESAQTLPGSGRAGWEVEHRGSSEREGRERSRDRGRDDYDEKETRSIDRGDHGRDQRRSQDREREKGRERRDHEYERSRERDRXTGEERNDRAFCSYIAFATFCSHGTRGLVLVSGGVH

SEQ ID NO: 226795 - protein, 115 aa, Zea mays
  Clone ID: MRT4577_138422C.1.pep
GCRRPCPRPPSSSSRRRTGRATRRRRTWPRTRGHAVDVPLPMRRLLTNTVLNVSADAALAFVEQGVGGSGGGGKACGINGFKGGLGDGDRGSILSITDAHYRQMIEADPGNSLLL

SEQ ID NO: 226796 - protein, 60 aa, Zea mays
  Clone ID: MRT4577_138423C.1.pep
SSAYVHLRYDGILALVKEIQLGLEHKVHALPIFFDHRKKGLFDKGSWRYLIIGHICLPDN

SEQ ID NO: 226797 - protein, 419 aa, Zea mays
  unsure (1)..(419): unsure at all Xaa locations
  Clone ID: MRT4577_138424C.1.pep
MAGYMSRGPQNGSVYVCNLPPGTDENMLAEYFGTIGLLKKDKRNGRPKIWIYRDKVSNEPKGDATVTYEDPHAASAAVEWFNNKDFHGSTIQVHIAESKSKDAFDNPTNLNTIAGVSEQDEVDNGAGRGRGRGDGPGKAWQQDGDWMCPNTSCGNVNFAFRGVCNRCGAARPAGAGGTGGGGGGRGRGRGNSDARGSSRAGAGAATGGGPPGLFGPNDWPCPMCGNINWAKRTKCNICNTSKPGTNEGGVRGGRGGGYKELDEEELEEVKKRRKEAEEDDGEIYDEFGNLKKKFRSKALHTGSAQTLPGSGRAGWEVEHRGSSEREGRERSRDRGRDDYDEKETRSIDRGDHGRDQRRSQDREREKGRERRDHEYERSRERDRXTGEERNDRAFCSYIAFATFCSHGTRGLVLVSGGVH

SEQ ID NO: 226798 - protein, 252 aa, Zea mays
  unsure (1)..(252): unsure at all Xaa locations
  Clone ID: MRT4577_138425C.1.pep
MAGYMSRGPQNGSVYVCNLPPGTDENMLAEYFGTIGLLKKDKRTGRPKIWIYRDKVTNEPKGDATVTYEDPHAASAAVEWFDNKDFHGSTIQVHIAESKSKDAFDNPTSLNIIGGVGEQDELDNGAGRGRGRGDGPGKAWQQDGDWMCPNTRXYDCCGNVNFAFRGVCNRCGAARPAGAGGTAAGGGGRGRGRGSSDARGSSHAGAAVGGPPGLFGPNDWPCPMCGNINWAKRTKCNICNTSKPGTNEGGVS

SEQ ID NO: 226799 - protein, 40 aa, Zea mays
  unsure (1)..(40): unsure at all Xaa locations
  Clone ID: MRT4577_138426C.1.pep
PVCVRPSDARRGXRLXASGTLLSSCRSAHCGVLVIELVPA

SEQ ID NO: 226800 - protein, 34 aa, Zea mays
  Clone ID: MRT4577_138427C.1.pep
LLSYLHWLQKSHTLKTNNSNSLIYILTFLFIQNL

SEQ ID NO: 226801 - protein, 127 aa, Zea mays
  Clone ID: MRT4577_138428C.1.pep
THSPAAHPYPCSRRLSLFCSLTHAYTHTLSLSISSSVTYITPSAMVATALLRRTPGTLSAAIRLHRATTAFATPAARALSTHVTNAACEDHEPSFLGSVETFYDRAAKISGISEKSLMGIKAVDSVL

SEQ ID NO: 226802 - protein, 68 aa, Zea mays
  unsure (1)..(68): unsure at all Xaa locations
  Clone ID: MRT4577_138429C.1.pep
LHLRTSQRQDKRNHVYSSGILKCPGVSCHSSXNNVISNALNSSTXVMHLKPSLFLVLYFLSGSCKEVV

SEQ ID NO: 226803 - protein, 104 aa, Zea mays
  Clone ID: MRT4577_13842C.1.pep
IRACYFFSSFRRPPLNYQPVGAPKARVPLGAGAGSTFVASPTARGNRMLLNSGFLSSWVRLFFTCTGGCFGCAQTTPIISFDEPTQCLRIQGRSPKIHNLFDYF

SEQ ID NO: 226804 - protein, 62 aa, Zea mays
  Clone ID: MRT4577_138430C.1.pep
YRSFRGNWYPRRDPARNKFRVDGVTNRRPPRVFFFFNVQNIHIHSHVSWSLVKDTGNCSSCL

SEQ ID NO: 226805 - protein, 172 aa, Zea mays
  unsure (1)..(172): unsure at all Xaa locations
  Clone ID: MRT4577_138431C.1.pep
FNNKAEHVKQXLWDFFRYEVVYEARADVVATTSCKKLVVDMHYEVRIQAIVSYHGXSILGEKVTKXDARTMSLTRDQXLQCWEQMVDRWCSPEWDEVHNASRERCLMIXASHGGQPCSIFLNYAMTHKGKVTSNITYNPDDGPEAYNNPAVIYIRLSESKEHELEPSHTTSV

SEQ ID NO: 226806 - protein, 72 aa, Zea mays
  Clone ID: MRT4577_138432C.1.pep
PAATHSSYEISTDLAYISHKFQKFLRNLFNTLPSPYLDFLLFFFLFILFISSSLILLFFFFFTFFLIYFLFF

SEQ ID NO: 226807 - protein, 103 aa, Zea mays
  unsure (1)..(103): unsure at all Xaa locations
  Clone ID: MRT4577_138433C.1.pep
PLTWKASSTSRCNILFVERTSAWRTTLPMCRKSTHNRPGVLARMQSNXFHFRGRRRLKGKRNLVVAIPDQVNCSTGRIHIETGCFYLAQLGEGELVLRLSLEM

SEQ ID NO: 226808 - protein, 97 aa, Zea mays
  Clone ID: MRT4577_138434C.1.pep
SPIFCPFPPPPPVVLSLGTQGCLAFSHPPLEFWWFPPMVFISLLTSRPVAMAGEFPGPPYSFRIFRFRSLGCRPPHVFLIFRPPSLFGLIFPLGPLG

SEQ ID NO: 226809 - protein, 228 aa, Zea mays
  Clone ID: MRT4577_138435C.1.pep
PAFRRSLSSAAISHSTCSCVPLQHRGNSFSSHEIRNHQPGSRFRPPATLPGSSTAACASATSGSPATSGASPTAIASREGGRPMSEIRNVFDQIRQGRNARLEDLLLIDRSLIMRRANLIDRHRDMRLDVDNMSYEELLALGERIGYVNTGLSEEKILSNLKQRKYVLISLEDPPTGVEPCCICQEDYAEGEDLGRLDCGHDFHTACIKQWLVIKNVCPICKKTALDA

SEQ ID NO: 226810 - protein, 37 aa, Zea mays
  Clone ID: MRT4577_138436C.1.pep
GPGNIYHIIPFQSLFNTKGVMSCVVTTTYPLLLARIM

SEQ ID NO: 226811 - protein, 39 aa, Zea mays
  Clone ID: MRT4577_138437C.1.pep
TGTVYSSHIGGQQQGQQMPQSPTTLQDHQRRPTCQRTRG

SEQ ID NO: 226812 - protein, 30 aa, Zea mays
  Clone ID: MRT4577_138438C.1.pep
MADTWTSRERLGGAAAGPRLGERWRQQPTV

SEQ ID NO: 226813 - protein, 386 aa, Zea mays
  Clone ID: MRT4577_138439C.1.pep
MSTEDEKLLKEAKKLPWDERLQHKNWKVRNDANIDLAALCDSITDPKDARLREFGPLFRKTVADSNAPVQEKALDALLAFQRAADADASRYAREVCDSIVAKCLTGRPKTVEKAQAAFLLWVELEASEVFLEAMEKAVKNKVAKAVVPAIDVMFQALSEFGTKVVPPKKILKMLPELFDHPDQNVRASSKGLTLELCRWIGKDPVKSILFEKMRDTMKKELEAELANVSGLAKPTRKIRSEQEKELEEESVPETSGANTSEEAATDAPVEIDEYDLVDPVDILTPLEKSGFWDGVKATKWSERRDAVAELTKLGSAKKIAPGDFHEICRTLKKLITDVNLAVSVEATQAIGNLARGLRAQFSGNARMLLPVLLEKLKEKKPTMTEA

SEQ ID NO: 226814 - protein, 101 aa, Zea mays
  Clone ID: MRT4577_13843C.1.pep
CFSRGPTRLCGELASNRPGLSVKLVVPRRSGSSYWACTHRSPRPSLNADADRHTHSCNTRPRITRRRRKALSLKDTFQSPRYLSPLHYHGGWGSIIVSHRA

SEQ ID NO: 226815 - protein, 38 aa, Zea mays
  Clone ID: MRT4577_138440C.1.pep
AHVCPSGFIRLARPGRWCGVRPKKALKKPPEHRGARRH

SEQ ID NO: 226816 - protein, 97 aa, Zea mays
  Clone ID: MRT4577_138441C.1.pep
QKTFFCSRWVGRSPVCWQNFFFLKTNVLPKVLLVRDRPICSHKCLVFRYVKEQCVFSVHVSGAFCSPQPCPVCLPPCTPSSLFLKKGFVCSLKNGCF

SEQ ID NO: 226817 - protein, 101 aa, Zea mays
  Clone ID: MRT4577_138442C.1.pep
VPNILFFTQTGPYPCLGPIHATLLNINPHNNNPPPLFVGPNRRPPNFGGGVFFFPPRRYLPFFPGGKVKSLPFPTGSQKTGRELTIPYLRWDVFDSPWSMG

SEQ ID NO: 226818 - protein, 99 aa, Zea mays
  unsure (1)..(99): unsure at all Xaa locations
  Clone ID: MRT4577_138443C.1.pep
KMAEKNRKDAEDWFFTKTEELNREXATNSELVQSGKSEISELRRTMQNLEIELQSQLSMKASLENNLEETKGRYCMQLAQIQEMIGSVEEQLAQLRCEM

SEQ ID NO: 226819 - protein, 78 aa, Zea mays
  Clone ID: MRT4577_138444C.1.pep
KIDIVVPHVEQISFYSSLSLLGSGPARGLFNLAADYSLCRSPSATEASPTGTTMGCDEMKKTIGQGRQWRGDRIRRRP

SEQ ID NO: 226820 - protein, 72 aa, Zea mays
  Clone ID: MRT4577_138445C.1.pep
KKALGTPKGTPLFFYSHPPPLTVLDGDIYEGLTKLGYLLKIERFSINREAAFILPPTVIFSWSSRGCIQNRG

SEQ ID NO: 226821 - protein, 116 aa, Zea mays
  Clone ID: MRT4577_138446C.1.pep
LGRQLTDSEKPVGLGSRGAVLSHSLRTNTARAAPRSLSPAFPSAAGSEHIEDGLLLVRVRFVPSDPATMNIFKKKVDPKEALRTSKREMAVATRGEQPSTADQLFATADDLLLVDY

SEQ ID NO: 226822 - protein, 131 aa, Zea mays
  unsure (1)..(131): unsure at all Xaa locations
  Clone ID: MRT4577_138447C.1.pep
FFPNLKLGAFXSRYFSPGFQDVPRGVKNQTKPPVFFTGQFLWGDFFFPVFFGTPYFCGGKGDQICNQIPWGGNEDFFFAWKNGPPGYPWVDAFIIQLGDWGWVDPLAPHFVGCFFPPGDLVFPLVCKACLE

SEQ ID NO: 226823 - protein, 82 aa, Zea mays
  Clone ID: MRT4577_138448C.1.pep
QAGARAGASFFFFFFFFFFFTKGGGLIILHIHIHIHAYTQHPHHYLFYHKASDEGGGAESENHMAMGWILTIAVVRGGLGSS

SEQ ID NO: 226824 - protein, 66 aa, Zea mays
  Clone ID: MRT4577_138449C.1.pep
GCPRQESLDQVSGPQEDQDHFLSMGMYMTLKPKIMDLVHASRRDDFVFITATVMRTRGKNRERPPR

SEQ ID NO: 226825 - protein, 38 aa, Zea mays
  Clone ID: MRT4577_13844C.1.pep
GKQTLKLTTWTWPILHSKSPHHSQLVTHASDDENATSE

SEQ ID NO: 226826 - protein, 57 aa, Zea mays
  Clone ID: MRT4577_138450C.1.pep
SRSMIDDHMINSIVNCCLHAHTSTYYSRMCLQGLYTVPCQVTLHASSRYWTPSQTCP

SEQ ID NO: 226827 - protein, 103 aa, Zea mays
  unsure (1)..(103): unsure at all Xaa locations
  Clone ID: MRT4577_138451C.1.pep
KRFDVLGVAIFFSTAARLMNTQIPAASRPSXRPAPTPGLLYSDRLLRAYKRPVEVDADQSRWFISKDAIVSGLGLLGIKQGGPEATFSKSRRKRVIRKKVTSG

SEQ ID NO: 226828 - protein, 543 aa, Zea mays
  Clone ID: MRT4577_138452C.1.pep
MAYAAPPMASSLTASHPPLSPSHLITHPHRCPARPNPTTGLLRLTPSRRRGRPPVAVRLAISASSTSAPPPSADRSEAASSLERYLSATVTGAVMGTGAAPPASAPPRAPPAMKGGRKQYSALGAVTLEKAKLDLSQRRKNIMPELATGGGGGDIGKRIGHGGGDGGDDDGDDDDYFDDFDEGEEEGGLFRRRIVVQELFNREFVEAVLQEWYKTMSDLPTGLRQACEMGLVSSAQMVRYLSIFARPTNARSFSRALPGWLSRGLVGRTLADPSFPHKMSLEFIATIASSIWCEMNIRKERFKQEWDLVIVNALTAACCNLMVLGLLAPCRSYASTSRFDFQNAIEKLPNNIFEKSYPLREFDLAKRISAFFYKAAELSLVGFVAGSVQGGMSIVLSARKERRLSVTIPSISTNALGYGAFLGLYANLRYQLLCGVDQYMVKRFDVLGVAIFFSTAARLMNIQIGEASRRTWLGEEADPQYSDRLLRAYKRPVEVDADQSRWFISKDAIVSGLGLLGIKQGGPEATFSKSRRKRVIRKKVTSG

SEQ ID NO: 226829 - protein, 53 aa, Zea mays
  Clone ID: MRT4577_138454C.1.pep
DGAVGEISNCVEATDRHGLLMGACHHHRQAGRPWGHHHHHAIGELDDEGEAVL

SEQ ID NO: 226830 - protein, 116 aa, Zea mays
  Clone ID: MRT4577_138455C.1.pep
MASTSAMSLVTPLNQTRSSPFLKPLPLKPSKALVATGGRAQRLQVKALKMDKALTGISAAALTASMVIPEIAEAAGSGISPSLKNFLLSIASGGLVLTVIIGVVVGVSNFDPVKRT

SEQ ID NO: 226831 - protein, 77 aa, Zea mays
  unsure (1)..(77): unsure at all Xaa locations
  Clone ID: MRT4577_138456C.1.pep
SFPSPWGPLXHAFRGPISPFTXSSFNXLSGVLQPKFWKNLLVPQVKPLGKHPLLDTWMSRQKAPSDRPFQMFRIISG

SEQ ID NO: 226832 - protein, 63 aa, Zea mays
  Clone ID: MRT4577_138457C.1.pep
EGQEGDTRTPGGPSLPQRLATLWLLARHGTRPWYGTGTTHRVRTAESGSGVTLVSYKGSYVIE

SEQ ID NO: 226833 - protein, 88 aa, Zea mays
  Clone ID: MRT4577_138458C.1.pep
RETGGRARRRLVNADASARHAAREAREQIGRAGTGDADQRHREEVVGVVRRPAYRTNAAPRHEGALCSSRRSGSEATRDVVGSGRSVP

SEQ ID NO: 226834 - protein, 184 aa, Zea mays
  Clone ID: MRT4577_138459C.1.pep
RKQMALEIVPTQATSKGWAGCPAGSASGLWGEPGGEAGGGRGEAAGLAASASLGRAVPATPAPLAPQLQPQPPTAGERSVQKTGSLGSRTREELGPQSPPTLALPTGFDPQQTLLGTFCRTGTHRGKGDRAASPSSTHTTALGPSGAWEKPSIERRNKTSKDFALPAHSAPGSPLSRPEEPRPP

SEQ ID NO: 226835 - protein, 260 aa, Zea mays
  unsure (1)..(260): unsure at all Xaa locations
  Clone ID: MRT4577_13845C.1.pep
DSPLAAPVSCSPRRPIRRCTGPRRDAPPGDLQVFSSSPPPPGGPVLPAPPGTGRPTLPAFSPSPPPRAHARPASYPTFQIFPPXARXPSPARRDPSPTYPGKHPSPXFSSARAMXWPCPPAPTPIFGYSPQSWSPSSGLRPSHSWPTSSPSGSPPAPGRTPSGGPFCSPRGPAQARIAWRRTGGTPPWCAPPSGXPVAXAGVRPQAPPTPAGSPPQSHEEPGGGGGGGLSASVRPGPGSRPPRPHQQSSDASGGFEINDP

SEQ ID NO: 226836 - protein, 485 aa, Zea mays
  unsure (1)..(485): unsure at all Xaa locations
  Clone ID: MRT4577_138460C.1.pep
MEEAAPAGTSNKVYYDGCPGCAMDRRKESRAGVPYKELLFVAAATFASALPITSLFPFLYFMIRDLRVAEREEDIGFYAGFLGAAYMIGRGVASVFWGVVADRVGRKPVIAFSVLSVVVFNTLFGLSAKYWMAIATRFLLGALNGFLAPAKAYSIEVCRPEQQALGISVVSTAWGMGVIIGPAIGGYLAQPAKQYPHLFHEKSVFGRFPYLLPCLCISFFAALVVISCAWLPETLHKHRGLERAAAEVAEGTTXQQQQLKKAPRSRXEPPKSSLLRNRPLMSSIVSYCVFSLHDTAYVEIFSLWTVSGRDHGGLSFASKDVGQVLTVAGASLLVYQIFAYRWVDKILGPVNSTRVSSALSIPIIAAYPFMTRLSGIRLGVPLYVAAMLKSVLAITRVTGTSLLQNNAVPQEQRGAANGIATTAMSLSKAFAPAVAGILFSWAQKRQHAAFFPGDQMVFLLLNLTEVIGLVLTFKPFLAVPQQYKQ

SEQ ID NO: 226837 - protein, 62 aa, Zea mays
  Clone ID: MRT4577_138461C.1.pep
FKENRRLLFFVVNISRRCVYYIFMGSEQVHDGCSSPSSMSVVGAFPRQMRLCGHPGHKLSSV

SEQ ID NO: 226838 - protein, 650 aa, Zea mays
  unsure (1)..(650): unsure at all Xaa locations
  Clone ID: MRT4577_138462C.1.pep
MSWLRSAVHRAVEASGGHSSLLTRTVRTSLDTVVHHAGQAVAGGARLITGSRSYKSAKVAAKRLEEEALSCKGDERVQLLRRWLVALKETQRATTAVREPQFGDNPDQTAPLLDLYIDYDSGAEPMNFFHVFLYSQALECVVLSLIREAPTEEEVPLVSEVFGMCLSGGKDVHNALLSSVKDLARLFSSYSDEVLAKRDELLQFVQGEITRLKIDADVGRXILKIRSSNXIDSLDTLHATPIGNQNEKAPTDTEGYREGDCENRLDGRREEQLLKKKSIDTDDELETHFDKLDKLKVMAATLVNXSANAEKRILEDRLQKEESLIFRVTKTNEVSGIEKELVAEISGLEEQRNQLEAELKKVNTKLKVATVKLKKTREERDQFDEASNQIVLHRETKDDELSRSIASCKVEASTVSAWINFLKDTWKLQSLFEELREKQANEELDRCGLCFAKLMKYHVSASMEELSTSIDRIKTFVDNLKIFGNRSVSAEDGANGPSKQSNPRRYLEEEYLQTEKKVVAAFSLVDSIRAIYSSNQDYYKTSLCRRDDTEVKNLFTSIDNLRIEFESVPRPVLQIEIKEQAEKKKRSPSLKVSASPSHSRSDSPIAAQLRTRLPSESESELAKFDQEYKADEISGWEFDDLEDEPTPGFL

SEQ ID NO: 226839 - protein, 117 aa, Zea mays
  Clone ID: MRT4577_138463C.1.pep
YNGIMRTDALTTQPERDSRGVREHGVDSEVVSGNSVIGRGGEHLFMRASRMLCGRMTIGRRYPRARYPHAYLKRSSNPGSREPHPEFESCSARVVFRAAARGSIRDNYDICLCHVGR

SEQ ID NO: 226840 - protein, 797 aa, Zea mays
  unsure (1)..(797): unsure at all Xaa locations
  Clone ID: MRT4577_138464C.1.pep
MWLELELKLVADVRIVGAPNAGKSTLLSVISAAKPAIANYPFTTLLPNLGVVSLDFDATMVVADLPGLLEGAHRGYGLGHEFLRHSERCSVLVHVVDGSAQQPEYEFEAVRLELELFSPSLVDKPYVVVYNKMDLPEASERWNTFKERLQSEGIEPFCISAINRRGTQDVIHAAYKLLKERLKVSVMSWLRSAVHRAVEASGGHSSLLTRTVRTSLDTVVHHAGQAVAGGARLITGSRSYKSAKVAAKRLEEEALSCKGDERVQLLRRWLVALKETQRATTAVREPQFGDNPDQTAPLLAPNYLCSRELQDLYIDYDSGAEPMNFFHVFLYSQALECVVLSLIREAPTEEEVPLVSEVFGQVIRPFDVLMCLSGGKDVHNALLSSVKDLARLFSSYSDEVLAKRDELLQFAQGAISGLKINADIARLDNEITQLQQQINSMXMRSMLHQSSXQNKKAQTATEGFRKAVSEVRLCSRMEELLLKKKSIHPGDSLETHFEKVDKLKVLSESLANSSAKAEKRIMENRLQKEESLIFRVTKTNEVSGIEKEDELSRSIASCKVEASTVSAWINFLKDTWKLQSLFEELREKQANEELDRCGLCFAKLMKYHVSASMEELSTSIDRIKTFVDNLKIFGNRSVSAEDGANGPSKQSNPRRYLEEEYLQTEKKVVAAFSLVDSIRAIYSSNQDYYKTRRDDTEVKNLFTSIDNLRIEFESVPRPVLQIEIKEQAEKKKRSPSLKVSASPSHSRSDSPIAAQLRTRLPSESESELAKFDQEYKADEISGWEFDDLEDEPTPGFL

SEQ ID NO: 226841 - protein, 82 aa, Zea mays
  Clone ID: MRT4577_138465C.1.pep
FPTRPTRPLTHTTTLTHLYLNPSYNNTHDMILSFSKTINNPTSNNVITIHSPHASNFNNLTFHSLYIPLPFPTINNITFPTK

SEQ ID NO: 226842 - protein, 229 aa, Zea mays
  unsure (1)..(229): unsure at all Xaa locations
  Clone ID: MRT4577_138466C.1.pep
AVVTTQSTFFFFFFFFFFFFFFFFFFFFFFFFFFFFFLGGGDPPLGPKKPGGKQPEFKKQGRTPPPSPRNSPQKKPLGPQFPPPPPGELRPPGGKDPTGGQEIPRKNPGAPQTGPKLGGGGPKFPWGKKPEAGXNSGGGDPKGGAGGFPRAFLNHKQKNPPPPGLGENPPNKXGPGRXKKIFPGGAQIFFPKTPPPPRFPHKKTLGKKNPPPPXPNGPKTPFPRGGEPP

SEQ ID NO: 226843 - protein, 47 aa, Zea mays
  Clone ID: MRT4577_138467C.1.pep
QQQHAGFSHTLVKRPIMLSHAQELTLVTLRKRSIGNINADTARYAAV

SEQ ID NO: 226844 - protein, 143 aa, Zea mays
  Clone ID: MRT4577_138468C.1.pep
PTSTSTCGTRPLISAATRSNSRPEPSLARAMPTRAASRFLTAPTSSSGLPPSTSPTGKTLLSLSTTLRTRLPSSTARERVPSRRSPAPSALTSLVAASTTAVCSRSLLVLLMLPMLVSRSLLLTRARSTVVSSLRTLPTAVFL

SEQ ID NO: 226845 - protein, 84 aa, Zea mays
  Clone ID: MRT4577_138469C.1.pep
PLGRLWGQSMRAQQLRQLGLANLAAYSQQQKFLAFNQLGGLNSASYLQQQQLPLSQLPAAYPEEFVPFNQLAAWNSAAYLQGQQ

SEQ ID NO: 226846 - protein, 71 aa, Zea mays
  Clone ID: MRT4577_13846C.1.pep
EESLGATGITYHSSPSRGERISTDKRQRRRGSGAEAEPHPEPAHDEHHKKLARFKKGNFFFGAYFSPWAKM

SEQ ID NO: 226847 - protein, 75 aa, Zea mays
  Clone ID: MRT4577_138470C.1.pep
CRGAQETAVANQLMSMCERVVGVVLLLFARGQPPFVEPHKDGCNVFVILYLPRQIVCKVCQIVCKVVPSFDGGQS

SEQ ID NO: 226848 - protein, 80 aa, Zea mays
  unsure (1)..(80): unsure at all Xaa locations
  Clone ID: MRT4577_138471C.1.pep
QAEAAXRDTISAGRADTPCHHNSLHHLVSFILGASASVVLLFFLTIATSGSRFTVISNCSNITTGFDDHTPVQSAPFTLS

SEQ ID NO: 226849 - protein, 98 aa, Zea mays
  Clone ID: MRT4577_138472C.1.pep
SLNGHEFDFIHDVNKKHNEFVGNWNKNAVHVNLFETPVEAQYVRLYPTSCHTACTLRFELLGCELNGCANPLGLKNNSIPDKQITASRSYKTWGLHLF

SEQ ID NO: 226850 - protein, 235 aa, Zea mays
  Clone ID: MRT4577_138473C.1.pep
FCDYWIIWMNFEPKSHWIRNWSLPPLPLLLVPTNASDTGGSEPPKSRFQRSSIPPPPEHARAAGTAADDENEKRQARPRISSSRQTTRPVGSRPAYQRKEGTPCRARRGRRLPFPCRHTRAPRRPAGSSLHLHERPSRPATRSSLAAFKIWDGAETPAAGCGGEGELSPTGRHASQGGCRRKPRPTPPSPSRSRGLPAWRRARGTKQIAHTMSRQAGHTTTARCAVGRKQTPSRP

SEQ ID NO: 226851 - protein, 162 aa, Zea mays
  Clone ID: MRT4577_138474C.1.pep
MVLCQGVSVGNAQLLAFPGRSSSLKSTQFLVKTNHFPARALRVGTDSIHHAMPTSSPRENSVRGIPSLSRQHNQHPRSVSCQTSSLASFSYPELTSKPRWWWRTLACVPYLLPLHNMWSYADVIYQLHTYLQGFSLLYTFIDTMTLCPGWLFLVIFMTVYFF

SEQ ID NO: 226852 - protein, 67 aa, Zea mays
  unsure (1)..(67): unsure at all Xaa locations
  Clone ID: MRT4577_138475C.1.pep
RGLRRRYFPWPGPGAGDKAGQTAQGTCMLYVHAGTNPFDXTIIKAVKVVERHMQTFHNRKKKKLPSF

SEQ ID NO: 226853 - protein, 141 aa, Zea mays
  unsure (1)..(141): unsure at all Xaa locations
  Clone ID: MRT4577_138476C.1.pep
MSTSFPRENSLKGIPSLSGQHNQHPRSVSCWAASLASFSYPELTSKPRWWWRTLACVPYLLPLHNMWSYADVIYQLHTYLQGFSLLYTFIDTMTLCPXWLFLVIFMTVYFFVVRRKWSPHFLRXHVILAILLDTGSQAVGT

SEQ ID NO: 226854 - protein, 50 aa, Zea mays
  Clone ID: MRT4577_138477C.1.pep
LIKFIYLALKILRIIFGSLIKRFLGSFENGIRKGVFKKGSKHKIFRGDFL

SEQ ID NO: 226855 - protein, 254 aa, Zea mays
  Clone ID: MRT4577_138478C.1.pep
MVLCQGVSVGNAQLLAFPGRSSSLKSTQFHVKTNHFPARALRVGTDYIHHAMPTSSPRENSVRGIPSLSRQHNQHPRSVSCQASSLASFSYPELTSKPRWWWRTLACVPYLLPLHNMWSYADVIYQLHTYLQGFSLLYTFIDTMTLCPGWLFLVIFMTVYFFVVRRKWSPHFLRFHVILAILLDTGSQAVATMCTWMPSIVYQGKPMQYLWMSIAFIQIFTVLECLRCALCGMYPNVPFISHTAFIHSDLNLFR

SEQ ID NO: 226856 - protein, 56 aa, Zea mays
  Clone ID: MRT4577_138479C.1.pep
FGGCESIIVQPAILSFWDSKEQGDILGFKDTLIRFSFGVGVFGVFKNVFVQALEKF

SEQ ID NO: 226857 - protein, 71 aa, Zea mays
  Clone ID: MRT4577_13847C.1.pep
VPQSIWYGPFRPKYLGPFFEQTPSYLTGEFPGDYWWDTAGLLGDPETFARKPELEVIHFRWAMLGALGCVF

SEQ ID NO: 226858 - protein, 254 aa, Zea mays
  Clone ID: MRT4577_138480C.1.pep
MVLCQGVSVGNAQLLAFPGRSSSFKSTQFHVKTDHFSARALRVGTDSIHHGMSTSFPRENSLKGIPSLSGQHNQHPRSVSCRASSLASFSYPELTSKPRWWWRTLACVPYLLPLHNMWSYADVIYQLHTYLQGFSLLYTFIDTMTLCPGWLFLVIFMTVYFFVVRRKWSPHFLRFHVILAILLDTGSQAVATMCTWMPSIVYQGKPMQYFWMSIAFIQIFTVLECLRCALCGMYPNVPFISHTAFIHSDLNLFR

SEQ ID NO: 226859 - protein, 111 aa, Zea mays
  Clone ID: MRT4577_138481C.1.pep
SRDDRPVQEMSSVGRQDSMDSLDCSYYLSDGGLVEAPTLSSKQIEHARKQALTILETKSPEEVLKIFPEGSEAKTDLAREKAPTPTTPPKGADAKATTTSGTVRATSPPTN

SEQ ID NO: 226860 - protein, 131 aa, Zea mays
  Clone ID: MRT4577_138482C.1.pep
RVVQQGISIQLKWNKTLTLTVSVSSFLESATKILELNFHEPIIECLYKQMQTCSYVQDTCSQGWGFQQPRQLSSKFKAESPTYSAWISHCDSITGARVRKVHVACSVRVGHRRVYGHSFSGHVSDVDLGSR

SEQ ID NO: 226861 - protein, 343 aa, Zea mays
  Clone ID: MRT4577_138483C.1.pep
MISTTVAAHPATVTALRRRYPLRPRQPLCAPIFTAATRQCMATAKPSVTNALANLSVESAPAALPKLSFPILVNSCTGKMGKAVAEAAVSAGLQLVPVSFSAIEVPDRKIEICDREIFIHDPSESEKILPTIVKEYPNVIVVDYTVPDAVNANAELYCKFGLPFVMGTTGGNRQLLHKTVHDANIYAVISPQMGKQVVAFLAAMEIMSEQFPGAFSGYKLEVMESHQATKLDISGTAKAVISCFQKLGVSFDMNEVKQVRDPEEQVTLVGVPEEHLGGHAFHMYHLTSPDGTVSFEFQHNVCGRSIYAEGTVDAAMFLYTKIQSGASKKLYDMIDVLREGNMR

SEQ ID NO: 226862 - protein, 58 aa, Zea mays
  Clone ID: MRT4577_138484C.1.pep
NSTQHLILSDQPPSDGSRELHEWVHYFLIWSVPREINVRRGFQASHRRARRRRGPRVR

SEQ ID NO: 226863 - protein, 77 aa, Zea mays
  unsure (1)..(77): unsure at all Xaa locations
  Clone ID: MRT4577_138485C.1.pep
MASPLRSLMLLLAVLAVAWAGTSRPPPRLLGAPQEXDASEEGVQRALDFAVSEYNKGSNDAYHSRAIQVVRPRKHLV

SEQ ID NO: 226864 - protein, 71 aa, Zea mays
  Clone ID: MRT4577_138486C.1.pep
SLCNKLKRHSLNKITNSFTSHTFLNCDYTAQIANYTCYWKLEHLLYKICAIRHNPEHITDDTQRANYILGT

SEQ ID NO: 226865 - protein, 45 aa, Zea mays
  unsure (1)..(45): unsure at all Xaa locations
  Clone ID: MRT4577_138487C.1.pep
MYSYYLSCIVXLLWPGRWKLAVTELHIAQLLFSFAASVVILLLHF

SEQ ID NO: 226866 - protein, 81 aa, Zea mays
  Clone ID: MRT4577_138488C.1.pep
ANLTQLFFLFFYATHMPPTQSLQNSSASASPKSISESSEIEQSSKMSSGFSLSTSNTSSSSSWPNKYSSESEHTSTLPRFF

SEQ ID NO: 226867 - protein, 509 aa, Zea mays
  Clone ID: MRT4577_138489C.1.pep
MDPPGRGDQGEAPQPLEWRFAQVFGERAAGEDVQEVDIISAIEFDKSGDHLATGDKGGRVVLFERTDVRDNASQRELERQDVPVTRHPEFRYKTEFQSHEPEFDYLKSLEIEEKVNRIKWCQTANNALSLLSTNDKTIKYWKVQEKKVKRFAVMNLDSSQSAGSSTTAIASTSSSKAPLPNGGCSDMLGCLNNDLTFPPGGYPSLRLPVVTSLEANPVARCRRVFAHAHDYHINSISNNSDGETFISADDLRINLWNLEINSQSFNIVDVKPTNMEDLTEVITCAEFHPSHCNTLAYSSSKGSIRLIDLRQSALCDNHSKIFEEHEAPGSRSFFTEIIASISDIKFSRNGKYILSRDYMTLKLWDLNMNSGPVSTFQVHEHLRPKLCDLYENDSIFDKFECCLSGDGLRVATGSYGNIFRVFGRPPGSIEATTLEASRNPMRRQIANPARPTRTLTSFARGVRRGGENQGVDANGNSLDFSTKLLHLAWHPTENSIACAAANSLYMYYA

SEQ ID NO: 226868 - protein, 113 aa, Zea mays
  unsure (1)..(113): unsure at all Xaa locations
  Clone ID: MRT4577_138490C.1.pep
PAQSILSXWACQVVLMGPVEGYRIPGGPLGEVVDPFYPGGSFDPLGLPEAPGAFSGFKVKGLKTGPLPMFSMLGFFVRAFVPGKGPLENLLAPIAAPVNNNVWAYPPNFVPGK

SEQ ID NO: 226869 - protein, 91 aa, Zea mays
  unsure (1)..(91): unsure at all Xaa locations
  Clone ID: MRT4577_138491C.1.pep
GPGRRGTESVPMVGSSMSRDGDCGSADASNYSTQRTRRGTKRASQKRLMRALAHINWGALTALPSXGKPGGPPALRRRPTRAREAGSVXGA

SEQ ID NO: 226870 - protein, 60 aa, Zea mays
  Clone ID: MRT4577_138493C.1.pep
KRTPFSFINNAQGLGISPPWEKKHFTHFFLGKPPFYQGFYFIKTPKGVLIPCKKPQKTWG

SEQ ID NO: 226871 - protein, 110 aa, Zea mays
  Clone ID: MRT4577_138494C.1.pep
MMNQQAVVANKVDHHESRFCLLKEQCKHLAKEGNLLRKKALRYKEISETRDSNLQKAELEVDLLGDEVEALTDLLAKIYTALDHYSPVLQHYTGVMETLSMIKKHISMAK

SEQ ID NO: 226872 - protein, 241 aa, Zea mays
  Clone ID: MRT4577_138495C.1.pep
MASTEEQVFLESRNLSYDGAHHPDACTDWDYPEDPGDRRNGVEVAELHDQPARMSTSDSDPCEVARRALDLMFPREEDSDDCWSTWSAREKGSDDDDEQGGEEGDGSTQESSDYEDDGRNCQVILAETNCPGKLYPESQAEAIDDKWVHRYSQQLTEHEKLCREIMALRDDEDDDDEEEEEKDDDAPCPVYPMRVFPDATGACVLGLKCHHRIYRTHDTSTTPSTLGKRTPSYMLQLFCMR

SEQ ID NO: 226873 - protein, 155 aa, Zea mays
  unsure (1)..(155): unsure at all Xaa locations
  Clone ID: MRT4577_138496C.1.pep
SREPPERPPPXPINAPNGPPHPGGKVEREAENTPHNKTTTPPQPPQPTTPKEQHRPANTRHQRRPKPKPTKDPTRAPKPRTAQPRAQPQPPPQSKNAPHPSQPPKQTXNPPPEPKRAGGPNTPHTRHXQEKEHPRGNQSPRGAKPPKPXPTPRPG

SEQ ID NO: 226874 - protein, 174 aa, Zea mays
  Clone ID: MRT4577_138497C.1.pep
GVFPGSTDLAYQQAIYVAADIIDCTGRVSKDGTAFCKHSADISSSTTASVAFASKASTVHEIQNKSGIFSFDLSWSEIATLKPSIISPFAQAGMLRNPAAKNAGKLMTLPEFLDLAKASNITGILIEIEHASYLAKRGIGVVEAVSSALTKAGYDKETKQQVFIQSDDSSVLAA

SEQ ID NO: 226875 - protein, 56 aa, Zea mays
  Clone ID: MRT4577_138498C.1.pep
LHVRLKNLLDMLPKCPRMGVNTKEYIVVYKCRWVPTSLSRKNVQNVTGRNVQTIHL

SEQ ID NO: 226876 - protein, 260 aa, Zea mays
  Clone ID: MRT4577_138499C.1.pep
MLLLRGARAASAWAASTAVSAGASSSRSISIRLAPVAALSSGGRKRKGQRRGEAKPPSPPPPPPPLPRQGETPSSKKKSGARPSGEGKKSRLVELEEARGPRRAEGGEARKGNTQQQQEKAKAKRLVKWKCASGCGACCKLDKGPDFPIPDEIFADHPDDLQLYRSMIGSDGWCINYDKATRTCNIYQDRPSFCRVEPKIFDELFGVPRSRFDREACSACVDTIKMVYGDDSAELSNFKRVIREESNKLESKNQDKLLDA

SEQ ID NO: 226877 - protein, 81 aa, Zea mays
  Clone ID: MRT4577_13849C.1.pep
DVERQISVHRFGEDGGMNDEMIENICGEGETVVALSEGDIEDELMNIDLQNRVGKIILVGMREVGRVGLTNHRQEEEEKGE

SEQ ID NO: 226878 - protein, 118 aa, Zea mays
  Clone ID: MRT4577_1384C.1.pep
LLFTTGMKLLTMLMNQMRLQTRILRLLGHLSRTRTPLRRYLISNNKDETHPDPNNKLDTEPPQLILRHLHHHQFTQNKGEANKCKKDKETATHRSRTEGAQHLSHKYFHFTYQSSPST

SEQ ID NO: 226879 - protein, 133 aa, Zea mays
  Clone ID: MRT4577_138500C.1.pep
MAVPILKTAIVKKRVKHFKRAHSDRYIGLKQSWRRPKGIDSRVRRKFKGCTLMPNIGYGSNKKTRHYLPNKFKKFVVHNVSELELLMMHNRTYCAEIAHNVSTQKRKAIVERAAQLDVVVTNKLARLRSQEDE

SEQ ID NO: 226880 - protein, 37 aa, Zea mays
  Clone ID: MRT4577_138501C.1.pep
FINIPRTCKRASITWSTYIILLGRMYTVLNSQKQHAF

SEQ ID NO: 226881 - protein, 133 aa, Zea mays
  Clone ID: MRT4577_138502C.1.pep
MAVPLLKEAIVKKRVKHFKRAHSDRYIGLKQSWRRPKGIDSRVRRKFKGCTLMPNIGYGSDKKTRHYLPNKFKKFVVHYVSELELLMMHNRTYCAEIAHNVSTQKRKAIVERAAQLDVVVTNKLARLRSQEDE

SEQ ID NO: 226882 - protein, 104 aa, Zea mays
  unsure (1)..(104): unsure at all Xaa locations
  Clone ID: MRT4577_138503C.1.pep
LEPPQLPIKQVSCAHPQPIFPIHPLATIDFSGXFPQPPPIPIHQVSGCKPGTFLNQPPVVPVQQARGPNPGPLLPTPPMVPIQPPGFANPTTVQQPPNHGGALL

SEQ ID NO: 226883 - protein, 73 aa, Zea mays
  Clone ID: MRT4577_138504C.1.pep
HVCCPFILLPSVTASSTAMLLIFFQLSTMWVRTHITLKRISGPSSSITPCTIISCHSPSCSISTTRSQALSLT

SEQ ID NO: 226884 - protein, 132 aa, Zea mays
  unsure (1)..(132): unsure at all Xaa locations
  Clone ID: MRT4577_138505C.1.pep
GNLFSFCKEKQFFPFNKLFSLNPAGFLRPQLFPFSQVGFAXNXQQKLFPFNQLAALNPPGYLRQQNLLPFSQLISANRGSFFTQQQVLPFYHQFWGNPPTLLQIQQMVPFGPPGLTEPRGSFQQHNIGGGPL

SEQ ID NO: 226885 - protein, 136 aa, Zea mays
  unsure (1)..(136): unsure at all Xaa locations
  Clone ID: MRT4577_138506C.1.pep
TNTANVIRNFPTQALNFAFKDYFKRLLNFKKDRDGYWKWFAGNLTSGGAAGASSLTYGYSLDYSRTRMANDATAAKGGGERQFNGLVDHYRMTLKSDGIAELYRGFNIFXGGIIGYRGLHFALYDSIKPXVRTGHL

SEQ ID NO: 226886 - protein, 42 aa, Zea mays
  Clone ID: MRT4577_138507C.1.pep
SIKSVPCPSVCFDPNQTRGLCFYELNWHGLKQNSADAWADAW

SEQ ID NO: 226887 - protein, 165 aa, Zea mays
  Clone ID: MRT4577_138508C.1.pep
PTRPPTRPPTRPLPFEPLSMSFNEINYYVDMPAEMKSQGVTADKLQLLSGISGAFRPGVLTALMGVSGSGKTTLMDVLSGRKTGGYIEGEIYISGYPKNQETFARISGYCEQNDIHSPQITIRESLLFSAFMRLPKEVTDQEKKIFVDEVMELVELNGLKDAIVG

SEQ ID NO: 226888 - protein, 63 aa, Zea mays
  Clone ID: MRT4577_138509C.1.pep
SSGNNAEYFFFFFFFFFFIRSNSCYLVLPIFSSPLDHTIYVSDVTRLLIFFSELNCYRNCLNF

SEQ ID NO: 226889 - protein, 45 aa, Zea mays
  Clone ID: MRT4577_138510C.1.pep
VLTPKKHAPDLPLGGRQCQIKSTPPKSRVRFECYMSCFPVSMIAM

SEQ ID NO: 226890 - protein, 45 aa, Zea mays
  Clone ID: MRT4577_138511C.1.pep
ALPGARGTITRYGRGRRQPAKPGRGARHAGAAGGLRGGRAQRARP

SEQ ID NO: 226891 - protein, 94 aa, Zea mays
  unsure (1)..(94): unsure at all Xaa locations
  Clone ID: MRT4577_138512C.1.pep
RGPGISPLISLMXDQVLQLTMYNILACLLGSAHAENVLTDIKLGKYRIVYVTPEYCTGNMCLLXQLEADIGITLIAVYEAHCISEWXHDFSDSF

SEQ ID NO: 226892 - protein, 117 aa, Zea mays
  unsure (1)..(117): unsure at all Xaa locations
  Clone ID: MRT4577_138514C.1.pep
APKAIKTGPRVTWVCNPVAQPRXLRGLPPAGKKYRGLGGKGPPPPKNRPSRRAPWKGNQTLSLPRYRLAARRGVGNCPCPVISHQDNKGACFWLHFQSFAIWVGPFYVRRPFWGICL

SEQ ID NO: 226893 - protein, 64 aa, Zea mays
  Clone ID: MRT4577_138515C.1.pep
DCIFFITELDIYMTFPLSEARRNLLDQRSRSMGSEAQVSFFLRPIPFPPLLWQDFNDASGLLVF

SEQ ID NO: 226894 - protein, 258 aa, Zea mays
  Clone ID: MRT4577_138516C.1.pep
ILTDLSCGPSSKAKGGQPAAAPGSGGDRQGRGKIEIKRIENTTNRQVTFCKRRNGLLKKAYELSVLCDAEVALVVFSSTLEAGRDANNSVKSTIERYKKANSDTSNSGTVAEVNAQHYQQESSKLRQAIDSLQNANRTIVGDSIHTMGLRELKQMEGKLEKAINKIRARKNELLYAEVEYMQRRMDLQTDNMYLRSKIAENNNETGQPAMNMIGVPSTSEYDHMASFVDSRNFLQVNMQQQQPQHYSHQLQPTTLQLG

SEQ ID NO: 226895 - protein, 241 aa, Zea mays
  Clone ID: MRT4577_138517C.1.pep
MGVKGLTKLLADNAPKSMREQKFESYFGRRIAVDASMCIYQFLIVVGRTGMETLTNEAGDVTSHLQGMFSRTIRLLEAGIKPVYVFDGKPPEMKKDELLKRHAKRNEATEGLTKAVEAGDTDAIEKFSKRTVKVTKQHNDDCKRLLRLMGVPVVEAPCEAESQCAALCKNDKVYAVASEDMDSLTFGATRFVRHLMDPSSRKIPVMEFEVAKILEELQFTMDQFIDLCILCGCDYCDSIKG

SEQ ID NO: 226896 - protein, 125 aa, Zea mays
  Clone ID: MRT4577_138518C.1.pep
RSTTSIAPHVKLQIIQTSIFEVALRIVDYFKPENVADKIAAAEAEQDFLLHDLSRTVHGAVRHMKGKHDLSTILSGPLAVLTIPSVSPEHLKAALSILAPKASGFSAPSRKANPGYHELTVQEGL

SEQ ID NO: 226897 - protein, 160 aa, Zea mays
  Clone ID: MRT4577_138519C.1.pep
RRLTLDVNILMLIAVSGAIALKDYSEAGFIVFLFTTAEWLETRASHKATAGMSSLMSMAPQKAVVAETGEVVAAQDVKVGTVLAVKAGEVVPIDGVVVDGRSEVDESTLTGESFPVAKQPESQVWAGTLNIDGYIAVRTTAMADNSAVAKMARMVEEAQN

SEQ ID NO: 226898 - protein, 66 aa, Zea mays
  Clone ID: MRT4577_13851C.1.pep
LGAGLRKRSGRGGGHDVRGEGVGRDPFAGAQGGEVCGRKIRFLHTVSSSMLAMCTPTLSLVVVFNQ

SEQ ID NO: 226899 - protein, 87 aa, Zea mays
  Clone ID: MRT4577_138520C.1.pep
ISTCITIRKTEIMLCSYTTQPVCQQTVDREICNAVGLYTSHSIYQQSVNITFSIYYTEEKNSIQPSTFRNLPAESGVSDNKVASKLM

SEQ ID NO: 226900 - protein, 85 aa, Zea mays
  unsure (1)..(85): unsure at all Xaa locations
  Clone ID: MRT4577_138521C.1.pep
XTSCPIHHLYSHLWISHHPVSLSVSWVMFSLESTTPSSTISNLGLSSQYSPNYFVWHQPFQIQTLNFCFYSTLHFCIYSTTFLII

SEQ ID NO: 226901 - protein, 89 aa, Zea mays
  Clone ID: MRT4577_138522C.1.pep
ATAGMSSLMSMAPQKAVVAETGEVVAAQDVKVGTVLAVKAGEVVPIDGVVVDGRSEVDESTLTGESFPVAKQPESQVWAGTLNIDGINI

SEQ ID NO: 226902 - protein, 27 aa, Zea mays
  Clone ID: MRT4577_138523C.1.pep
FVHKPIKQAYQLVKAGKRLTGNLFVTF

SEQ ID NO: 226903 - protein, 145 aa, Zea mays
  unsure (1)..(145): unsure at all Xaa locations
  Clone ID: MRT4577_138524C.1.pep
DKCSQTRAKDGGTGEINKVPIEHQERRLTELGQKILEIFVLSHIFSGIEVAYKEAVALKRQEELIREEELLEQEMKGKRGSVAEKDKRSKKKQAKQKKNNRKVKDKEREERXDSKFLERGKDVSTNHDXEDSKQVGQSAVEADNF

SEQ ID NO: 226904 - protein, 95 aa, Zea mays
  unsure (1)..(95): unsure at all Xaa locations
  Clone ID: MRT4577_138525C.1.pep
MRAVSTIDQYKLXFLRDQRARKKNIITRLMYDKFDYTYLITTAIDIVSETMYSXNRSVTLRLCDTVEDERFEKLITSDIRDSSLVCNGIQCCLHY

SEQ ID NO: 226905 - protein, 111 aa, Zea mays
  unsure (1)..(111): unsure at all Xaa locations
  Clone ID: MRT4577_138526C.1.pep
PPPXNLPXPGRRGGRRTSAXPEGKKAPHRGNSSGGXXSADXXARXGRXRXXNXXXXXGTDEXGTGGETKAXEEKXTPKEXGXKXQXXHKEXXKGXNXKDKXGLAXXPEQTE

SEQ ID NO: 226906 - protein, 76 aa, Zea mays
  Clone ID: MRT4577_138527C.1.pep
MAAAAKEVDMKKMELMKEVRAHQVAIGELNNLPPSRAAYQKTCNIFSRKDIKSAVASQQKQLDIAKAKLQKLDQAS

SEQ ID NO: 226907 - protein, 87 aa, Zea mays
  Clone ID: MRT4577_138528C.1.pep
KQKLSRAEDPDQAHGLSVLGKCQTTEFHLSPLLEYSTKKQNLGAPKSVSSAVELLLYTAVPLSLSKQSRNLSTADHSPSSAQSLQAS

SEQ ID NO: 226908 - protein, 135 aa, Zea mays
  unsure (1)..(135): unsure at all Xaa locations
  Clone ID: MRT4577_138529C.1.pep
AGTHPPRTRXTPRILLEHSDRLYXTLPSSIRGHSSTASSRGCSATYAAYFVPADSGNSGHENYADDQVPDDSRWIACVLRTVPTIARSPSDSEGDLHEPAEGAPTRRYLNYRYLRSGALTILCLHVLQRRHTTKS

SEQ ID NO: 226909 - protein, 30 aa, Zea mays
  Clone ID: MRT4577_13852C.1.pep
ISKKKKKKKKEKKKKKKKKKKKKKKKKKKK

SEQ ID NO: 226910 - protein, 84 aa, Zea mays
  Clone ID: MRT4577_138530C.1.pep
NLEKGPECWTLGGHHKRKMALFADKPPLVCKKKKQFRGLGFRKGKRNPWRGKKKPAGNKLERTFPGLFYLERFRVKMNQRMGKI

SEQ ID NO: 226911 - protein, 282 aa, Zea mays
  Clone ID: MRT4577_138531C.1.pep
TLQSMQALVRAQAAVRERRAALHHQPVRPRYSLQERYADDTRSEHGVAAYSSRRLSASVESPSYGYDRSPKIVEVDPGRPKSRSSSRRASAPLLDARSSGSGGGEEWCANNPASSPLPCYLPSGPRRIAVPTSRQFPDYDWCVLEKARPATAQSTPRYLQAHAPATPTKSVAGYSPSLNACPNYMSSTQASEAKVRSQSAPKQRPELACCGGGPRKRVPLSEVVVVESSRASLSAVMGMQRGCGPRAQEAFSFRTAVVGRMDRSLEVAGSENDRLAFLQRRW

SEQ ID NO: 226912 - protein, 232 aa, Zea mays
  Clone ID: MRT4577_138532C.1.pep
MSSAVEPVSCSKVDVPAAGPDPEDAAAPAGHGEAAPCCHEEEEEEEEEKAPQAIDLGPMVSIKEQLEKDKDDESLRRWKEQLLGGVDLNSVGETLEPDVRITSLSILSPGRRDIVLPLPVDATKGVWFTLKEGSPYRLKFTFSVSSNIVSGLRYTNTVWKTGLKVDRAKEMLGTFSPQPEPYTYVTPEDTTPSGMFARGSYSARTKFLDDDRKCYLEINYAFDIRREWPSAS

SEQ ID NO: 226913 - protein, 166 aa, Zea mays
  unsure (1)..(166): unsure at all Xaa locations
  Clone ID: MRT4577_138533C.1.pep
YIYLLRTLDVVTLTLPSARSCXWTAAIXMLTHSNALSLLXKTRGRDTAVILMVIHXLITFGYRGAPLYFRRIEEIXMHDAKSNNKCVMARLIIGEPMWMLAIIFLLIGPIKSAVSVLLVMFTGYMIPALAQQLSXSTESVRMNGMHKAPFFLSSWTRMRNHSSQST

SEQ ID NO: 226914 - protein, 63 aa, Zea mays
  Clone ID: MRT4577_138534C.1.pep
QYQKLSYRANPCGVFAAIQSSWLIMMFGQSSCSHLSLSVYMNIQYHCSPVSVCGMPNIYMHGR

SEQ ID NO: 226915 - protein, 100 aa, Zea mays
  Clone ID: MRT4577_138535C.1.pep
MSTSKSLQLLRVCVREMMGGSGRAALLLALVVVAVSLAVDIQADAGYGYGGGYTPTPTPVIGAPKSEKPLTKGPKPDMPPKEHKPPKEHGPKPEMASNEH

SEQ ID NO: 226916 - protein, 237 aa, Zea mays
  unsure (1)..(237): unsure at all Xaa locations
  Clone ID: MRT4577_138536C.1.pep
MFAETLEPDVKIMSLSILSPGRPDIVLPLPVEPNGKGVWFTLKEGSPYRLKFTFSVSNNIVSGLRYTNTVWKTGLKXSEKASRQARGSDAWRAGRDDRHAICAHARARARPLLVCRPSLGHQNTTAHGLLVVMSCHAXVDRAKEMLGTFSPQLEPYTYVTPEDTTPSGMFARGSYSARTKXYVRGCRTSPFSVQTESESFRLDSSRGLVWHPVLWQFLDDDRKCYLEINYTFDIRRE

SEQ ID NO: 226917 - protein, 110 aa, Zea mays
  Clone ID: MRT4577_138537C.1.pep
KHWLRGRSKKIRRTGAAFSLEDIHTEYCSSVGRWLGSASPSSPIFVLGSFGPTVAVLASLVFGRRRREGTTREMTHARRIERHEEISGSAGRAMQRGGKPMDLLVVASSP

SEQ ID NO: 226918 - protein, 53 aa, Zea mays
  Clone ID: MRT4577_138538C.1.pep
PNSFLTNTILTDISLQISKKAQKPLFNKPAYYYVIGQVNADQAKDPYLYFSHD

SEQ ID NO: 226919 - protein, 153 aa, Zea mays
  unsure (1)..(153): unsure at all Xaa locations
  Clone ID: MRT4577_138539C.1.pep
SSFDFKPKLALQQGLLPWPDKHLSKTTGRAGNKLLAAERRTQPIGQPLQQDLPNVTIHAITPQHQQQFLPSLKHXLAVGKPDVYSQEQMLACNPLALANVVADQQQQQLQQLVPTNKQLAMVNPGXYVQQQQLVSSSPLAEGNAPTYLQQQLL

SEQ ID NO: 226920 - protein, 87 aa, Zea mays
  Clone ID: MRT4577_13853C.1.pep
FPYPFGRPPSQILKIQAGLGFCPLVPRKNWPCLDKFFKAWAIFNRFPAPPVSKLKSPEVKRNGPPLRVLSRQDLKTGLIPFFKPTRP

SEQ ID NO: 226921 - protein, 240 aa, Zea mays
  Clone ID: MRT4577_138540C.1.pep
MVRNVASMQSLRHNMEDMNFDAPPRRTLYEESYASMQDSPRRTTTTPISQPQQHPIVQLCGTDDYTKQLMNRVATGVATEAEQKAFAQQVQRGLPAMISNASSTRASSMRSSPREDKTARFMQATRENAEKYTKPFCDFLTNNPTVFHCVDAVKTQLKDAGWKELSERDAWKIEPSGKYFVERNGSALIAFSVGGQYKPGNGAAILAGHVDALTAKLKPVSQVPNKAGYIQLGVAPYAGA

SEQ ID NO: 226922 - protein, 72 aa, Zea mays
  Clone ID: MRT4577_138541C.1.pep
CPSGCESSHRICLTARWIPSTYCWRSSVRRGFLRLRINGSSCPSLDAQPCLWSCTGTPMVRGCPRISPAVHV

SEQ ID NO: 226923 - protein, 135 aa, Zea mays
  Clone ID: MRT4577_138542C.1.pep
STVLGGTLLLYLVIGMSIPSGRGNLRRSLQRNTRNRISSRTRGHVRRPRSLAIRWKVGRGVELNRSRVVRGIFTTRDKVIVRNFRIHRLLSCGWPYFRNFYGRCHVPALWEAPAKRRLFHTLSATVIKYKNTTPL

SEQ ID NO: 226924 - protein, 58 aa, Zea mays
  Clone ID: MRT4577_138543C.1.pep
GRERLDNKNLTVIMIVRLSTSGWQQAKVSKALAYYSRLSKSVYALAISTNALVTKTEM

SEQ ID NO: 226925 - protein, 71 aa, Zea mays
  Clone ID: MRT4577_138544C.1.pep
AASNDVSCFAFPPAEHIMSTVNHVKSHYAGTYNLHTYCTIVTLHTCTLSISWACLTIPGANTLSAHASADA

SEQ ID NO: 226926 - protein, 89 aa, Zea mays
  Clone ID: MRT4577_138545C.1.pep
PLGLAQDLKTLEEFKMKKFKSVGPYNVINVGFFVQALVPGKGPIESLSDLSKESMSPATHGPMQHILYPVNNQVEVPRPQGHMYVYLVW

SEQ ID NO: 226927 - protein, 186 aa, Zea mays
  unsure (1)..(186): unsure at all Xaa locations
  Clone ID: MRT4577_138546C.1.pep
GCQKLSQDASSHAAQNDRLPIQMVVRVLYFEQLRLKSSFSGGGSXASAWAAPXSFSQRFVCSSSGVPSSCVSPQRDNYASLRRENRELKLEISRMRVRLTELEREQGLMKQQGRMRGGDGGGGGGRGGGGEHGRAFLASLSRGIGRITMFGGPAAADRRRKKSGGRSSQCSDGKARRRQKASFAYD

SEQ ID NO: 226928 - protein, 129 aa, Zea mays
  Clone ID: MRT4577_138547C.1.pep
KQLKMQQHFQREAKECKLKTNLTHIGFGIFGSLLPPLGLFSQNKFFFLYLYQKHLFGKSRDLSRVNLIKCHKLPLFPIINILPHKRTIFCNKRVLIKHKDSNSTISTIFEIHKWLADPFALALISPPWH

SEQ ID NO: 226929 - protein, 69 aa, Zea mays
  unsure (1)..(69): unsure at all Xaa locations
  Clone ID: MRT4577_138548C.1.pep
GGVCFLKKFFFFFWSIKFGEWVYNGIAPHHILWGHVRVYPCKHEINRAKRGGGHFFYGXXXFEALLSTD

SEQ ID NO: 226930 - protein, 172 aa, Zea mays
  unsure (1)..(172): unsure at all Xaa locations
  Clone ID: MRT4577_138549C.1.pep
MRSLFDTSPEATQPSPFSPEIDTSGGDGSILPPTSXKGRDEGILLHQRRRKNAMEXANKDVTRDCSYDDLIIXDADEFXKDFFEKRIHNCASNMANNRXRENIVVPRQERFHDRSNYWNWKSISDLVPHGIATIYNRRTRDNDLKPSITVVQGPQPVKLTDLSRMRHILLKL

SEQ ID NO: 226931 - protein, 74 aa, Zea mays
  unsure (1)..(74): unsure at all Xaa locations
  Clone ID: MRT4577_13854C.1.pep
MPKANGRTRRQKFGYSVNRKRLNRNARRKAAPRIECSHIRHAWDHAKSVRQNLADXGLAVDPNRAVPLRKRKVK

SEQ ID NO: 226932 - protein, 66 aa, Zea mays
  Clone ID: MRT4577_138550C.1.pep
QLFPFNQSAVPNSAEDLHYQQQVCTPGAEVNPLVASIKQQHQMVPSSQLSLMSLAIHQPVVAGAVF

SEQ ID NO: 226933 - protein, 132 aa, Zea mays
  unsure (1)..(132): unsure at all Xaa locations
  Clone ID: MRT4577_138551C.1.pep
LIEXEAQADFETFHKQRPPVSKFYMEEQLSKVYTHNMFKKFQDEIEAIMYCHVSLISVDGPVSTFNVKECIFFEDGKRTMSKIFAVTYKADEKNISCICGGFQFSGILCRHSLSMLKFQLTLQSYQISIALL

SEQ ID NO: 226934 - protein, 84 aa, Zea mays
  unsure (1)..(84): unsure at all Xaa locations
  Clone ID: MRT4577_138552C.1.pep
GSPKFGLVGERIEMARXDVEYRCFVEGLXWATDDHSLHNALRTYGEALEDKIILDRETQRYWALSFMTFFTEDAMRNAIQGMNG

SEQ ID NO: 226935 - protein, 46 aa, Zea mays
  Clone ID: MRT4577_138553C.1.pep
WVVLHNWLYLFRDTGGLLKINAGPSMCCDVTYQKCWKFFHMADIYC

SEQ ID NO: 226936 - protein, 108 aa, Zea mays
  Clone ID: MRT4577_138554C.1.pep
VPQSQKGGAEKGIVPPGYIGVPANLHQFVGNQTAFRPSIVYMVPSGVDPHAFGNVMMPVMYQQMFQVPPKPNETVQDTSANGKSKRPRGQKLTETSQQANGTPASASG

SEQ ID NO: 226937 - protein, 108 aa, Zea mays
  Clone ID: MRT4577_138555C.1.pep
MSHAELASSYAALILADDGIEITADKLQTLIKAANVEEVEPIWTSIFAKALEGKDVKDLLVNVGSGGGAAPAAGGAAAAGGAEEAAPEEAKEEEKEESDEDMGFGLFD

SEQ ID NO: 226938 - protein, 634 aa, Zea mays
  unsure (1)..(634): unsure at all Xaa locations
  Clone ID: MRT4577_138556C.1.pep
ELVHFVFGESKHNSSVERGRLKLQPGDSEALRLFFTRMQAKNANFFTVIDLDDEGCTRNVFWADARSRAMCEYYSDVITLDTSYVASKYDMPLATLXGVNHHGQSVLMGCALLSDETAETYSWLLKSWIACMYGNLPKAIVTDYCRGIQSAVAEIIPGVRHRMCLFQIMRKAAERLGGLSEYRAINKAMHKAVYDSLTIDEFEEEWNTLITYSGLQSNDWLRSLYECRSSWVPVFIKDTFWAGMSTTQRNETITPFFDGYVDLKTTLKQFLVKYEMALQSKYEKEAQADFETFHKQRPPVSKFYMEEQLSKVYTHNMFKKFQDEIEAIMYCHVSLISVDGPVSTFNVKECIFFEDGKRTMSKIFAVTYKADEKNISCICGGFQFSGILCRHSLSMLKFQLVREIPQHYILDRWKKDFRQLHVMRRPPSDLVPNNRMDRYDYLSIRCLQLVDSAVLSDKYRLALRLVRETEKFLLNSNTHDDTQPRIKSRVPKVNKPNIVTGQTMVGAATGNGNDGLKGPEATAVTQVPQSQKGGAEKGIVPTGYIGVPANLQQFVGNQTAFRPSIVYMVPSGVDPHAFGNVMMPVMYQQMFQVPPKPNETVQDTSANGKSKRPRGQKLTETSQQANGTPASASG

SEQ ID NO: 226939 - protein, 83 aa, Zea mays
  unsure (1)..(83): unsure at all Xaa locations
  Clone ID: MRT4577_138557C.1.pep
ILHQLVDQKRDLPMLQRTQREXLADRTAELERVDRVNHCLQEDWERSAAMKKQRDLEDKAFERASDKLFLLDQCAQYRRCKQC

SEQ ID NO: 226940 - protein, 110 aa, Zea mays
  unsure (1)..(110): unsure at all Xaa locations
  Clone ID: MRT4577_138558C.1.pep
LSRCFGSNTLYTLLLYLRCGVNPIDHTKHTGLKCTGCNAPQKQMATNAARTSGPSSCGVKKPXCLRPGTXALREIRKYQKSTQMLMRKLGLKKTGRVIAHDFKTDLRFQS

SEQ ID NO: 226941 - protein, 77 aa, Zea mays
  Clone ID: MRT4577_138559C.1.pep
SPFLNRKKTTKRLKKRRGRPNEPSLHTLPCYAVAVISRNLNPVHSPQHLQHPDWKNPRAPQLNINRAHSRFYTQRNS

SEQ ID NO: 226942 - protein, 89 aa, Zea mays
  Clone ID: MRT4577_13855C.1.pep
LDRVANRPTSHLFSSLNTCLLLMYRNNLQVTDVGQLSSSLSHSSVCCTLLGARLLVKFFNSGFSAAMISANDGRLVRSVCQHCTIISAT

SEQ ID NO: 226943 - protein, 50 aa, Zea mays
  Clone ID: MRT4577_138560C.1.pep
INKLISGSYGIREPLDIIWFLLLLNIQLNGIKLTKIIIIIIIIKAEICTS

SEQ ID NO: 226944 - protein, 80 aa, Zea mays
  unsure (1)..(80): unsure at all Xaa locations
  Clone ID: MRT4577_138561C.1.pep
MGEILRAVIVRFDIXYDVDEEDGADIGDVVDHDLHRDEEVKSSLKISTIEGVVAPLSDLLRPHNVCGGVVEESMYVCRSR

SEQ ID NO: 226945 - protein, 76 aa, Zea mays
  Clone ID: MRT4577_138562C.1.pep
HLGHYNTGTPGIYHRNQTTSKPTHGRDKSTDTHRGKPLHTNLWGTKIKGMHMHTVTTLAEHSEGLQGPRIPGQYPQ

SEQ ID NO: 226946 - protein, 278 aa, Zea mays
  unsure (1)..(278): unsure at all Xaa locations
  Clone ID: MRT4577_138563C.1.pep
LWXWWSITNNNRTXPHYRLGXKFIEFREEXALYNIDLRXANIEKEFLLRGAVXXSGKSTGLPYHLSMRXXKVLLLEPTRPLAENVCRQLQGPPFNVSPTLQMRGLSSFGCTPITIMTSGFALHMYANNRDKKSEYDFIIFDECHIMEAPAMAFYCLLKEYEYRGXKIIKVSATPPGRECEFLTQHPVDIHVCENLTQQQFVMELGTGSTADATKYGNNILVYVASYNDVDSLAHALTELKFSVIKVDGRTMKQNTTGIITNGLNQQQSTFDWCLLFCV

SEQ ID NO: 226947 - protein, 145 aa, Zea mays
  Clone ID: MRT4577_138564C.1.pep
EHDVADAHVEAQEAALVDVEEVLLQRLHERVQVHGQGRLHVHVLPRSEGRVRVHAELQPAEEGRAMDRLGQLIHPQEDVAGEQSHGWLALVAETRVSRGSLDSFSTRRPGEDQTRSLSIDVHTSLHGLRARALHRAWVYVINTKR

SEQ ID NO: 226948 - protein, 76 aa, Zea mays
  Clone ID: MRT4577_138565C.1.pep
GGVNIQRPCFGNLAADRTDEKIFKPNLSSSGRSLLDQKPPDIHIFSAGSRVKKVKQLLNTRKLPQQGIRAETGRGA

SEQ ID NO: 226949 - protein, 69 aa, Zea mays
  Clone ID: MRT4577_138566C.1.pep
KIQVSLLPCQTPTSWRHPVLKPCSPISCRLITCFIKDVIYPYISGSPILKWHDLCHLITEQGTNHYLPQ

SEQ ID NO: 226950 - protein, 80 aa, Zea mays
  Clone ID: MRT4577_138567C.1.pep
GGPSRSRTSFFFFFDKNSNIDFGKLIHPVEGNSQQTSSRPHVAFHDLASLFIGCGEAFSSTSAPFRSRCTRTTHLEQAPA

SEQ ID NO: 226951 - protein, 145 aa, Zea mays
  unsure (1)..(145): unsure at all Xaa locations
  Clone ID: MRT4577_138568C.1.pep
GYLEAGRDRGYQRRKQTLDFSVGGGAPHINGMATXXGRYVMHNVYRNLFEVSSNYAAAIRPIGRGPYGIVCADADSQPEEEVAIKNVRNGYDNHIHAKRTLTEIKLLRHMQHDNILDLNDVIRPPTRXNFNDVYIATEVMETHLH

SEQ ID NO: 226952 - protein, 107 aa, Zea mays
  Clone ID: MRT4577_138569C.1.pep
LTLCIGFEYMLVIHLIRKRCVALPVRSMAAPTVCRLAWHDIHSSYLEPKATVRRVACSCFSRWEWRRALGFACLSYQRSLIPSSLVRRSDVGINDQRGSQHAQARRE

SEQ ID NO: 226953 - protein, 49 aa, Zea mays
  Clone ID: MRT4577_13856C.1.pep
RSLRHRFKSPHPSRPQRRHCQTPQLMYVQAEERRHATPHGLRPCYAHTA

SEQ ID NO: 226954 - protein, 107 aa, Zea mays; identical to SEQ ID NO: 226952
  Clone ID: MRT4577_138570C.1.pep

SEQ ID NO: 226955 - protein, 114 aa, Zea mays
  Clone ID: MRT4577_138571C.1.pep
MGGACALLIVRAAADVVLAAASSSAGRWSRGVVVDLYEDCGPRPVYQVGRGKHANKYKVVYAMTGLEMFEVRAQEAQRRAARRLAKAGGQVWPRRPRRGGGLNLLQDLLPGRRR

SEQ ID NO: 226956 - protein, 103 aa, Zea mays
  Clone ID: MRT4577_138572C.1.pep
NNDLTAPVIKISGVLTLLALFGNPTNAFIIPQCSLTPSAIITQFLPPLTSMYLPHLAAQANMQQQALAANVLQQPIAPLQQHTLPHLILQAITPHQPQHILPT

SEQ ID NO: 226957 - protein, 42 aa, Zea mays
  Clone ID: MRT4577_138573C.1.pep
YFSICKCAAHLVQFCSMILTENIHDSEHRCNIAICLNYYYIH

SEQ ID NO: 226958 - protein, 40 aa, Zea mays
  Clone ID: MRT4577_138574C.1.pep
LFQCCKFISYGNFLHLKKYGLSGPKEAYGRAAVAAARTRG

SEQ ID NO: 226959 - protein, 60 aa, Zea mays
  Clone ID: MRT4577_138575C.1.pep
IGFFDGLTEDSEHTRWFHTMSAMRRAVRAHALSVSHSSSSSVLACFRISAANKYSILKFI

SEQ ID NO: 226960 - protein, 67 aa, Zea mays
  Clone ID: MRT4577_138576C.1.pep
PRRRRGAPPPLDPAPWWRAFVPTGSARDGTRSAARGVAHGAAPAACLVRGELTTPRLARATACPPCG

SEQ ID NO: 226961 - protein, 111 aa, Zea mays
  Clone ID: MRT4577_138577C.1.pep
YVPGQDADDNRFIGWRLEHDVSNCLYTQGVTTIVLHGAFKENYGLSDHPSHCGHTGLMPTPHRDNQPGNSPLLVITKMLYAVGTLLFDIDAGWSLTHPGRLNVLIAERLAT

SEQ ID NO: 226962 - protein, 184 aa, Zea mays
  unsure (1)..(184): unsure at all Xaa locations
  Clone ID: MRT4577_138578C.1.pep
METNPPLPFLGKEHPPKKGPIFFFKKLDPHPGGGPGPRGQKKNQPGGGGKPRAPGGPREKKKMGGGXAKKNPPLGXSRGTPPLSGKNFWAPSPPPGDQRGPGCRGKTKGENPGPKFRRPGGPIFXKGPPPGGTPTFGPFKGGKMAPWGKKGKKGFPGENGYPLKIQQKKRPGKKKGKPGGPKGG

SEQ ID NO: 226963 - protein, 83 aa, Zea mays
  Clone ID: MRT4577_138579C.1.pep
PRSADGAGHRQRRGVGAVRALLLVNHIPVPCASHQTTLGRDALSTCGTGGARQHPTPARPTVERAADEASPVRSCRPATQIVS

SEQ ID NO: 226964 - protein, 218 aa, Zea mays
  Clone ID: MRT4577_13857C.1.pep
RPGFGLARLINHSHAAHTTMLAGTKGYIDPECVVTSRTSVQSDVYSFGAVLLEIACGRKPVVPHEDESKVLLVHWVWDMHGKGQLLDVADARLHDGGFDVEQMERTLVVGLWCMHPDYASRPSIRQAMNVLQFEVPLPELPLEMPVATYAPPVSSGYRSSTTSSSVSDNTTGHSSTANSSGLSVKSDTQAGTRSFVTSNDTRNTGGSVRESTSSPNAI

SEQ ID NO: 226965 - protein, 53 aa, Zea mays
  Clone ID: MRT4577_138580C.1.pep
QSQHVTWHIVIGLFSWMTGLAQVPGSQPMREFQLNKPITTCYMAHCLLCLIAV

SEQ ID NO: 226966 - protein, 42 aa, Zea mays
  Clone ID: MRT4577_138581C.1.pep
SGIYAACVSSSCVGVYLVSVACFLCHLVLLVIIYTQFCHNWP

SEQ ID NO: 226967 - protein, 80 aa, Zea mays
  unsure (1)..(80): unsure at all Xaa locations
  Clone ID: MRT4577_138582C.1.pep
NLNASEIHHEETAGTRQIIWGQPSVAPNVTNLPTISTGVHDIVPDYPAAAKDSTGTAVXNKMEKADQNEALFCFSQQPGA

SEQ ID NO: 226968 - protein, 55 aa, Zea mays
  Clone ID: MRT4577_138583C.1.pep
RPGYILNWIYRYFTEGHHSRWIPWLAGLVQTALYADFFYYYFLSWKNNVKLELPA

SEQ ID NO: 226969 - protein, 215 aa, Zea mays
  Clone ID: MRT4577_138584C.1.pep
MNAFRFLGDMTHLFSVLVLLLKIYATKSCSGVSRKTQELYMLVFVARYLDLFTDYVSLYNSVMKVVFITSSAAIVWCMRRHPQVRRTYDKEQDTFRHTVLVAAAFLLALIFHERFTFREICWAFSIYLEAVAILPQLVLLQRSRNVDNLTGQYVFFLGAYRAFYILNWIYRYFTEGHRSRWIPWLAGLVQTALYADFFYYYFLSWKNNVKLELPA

SEQ ID NO: 226970 - protein, 39 aa, Zea mays
  Clone ID: MRT4577_138585C.1.pep
CQTSNGILSLIHIQEGMVARNEHSLGLTKACMFRFFLVS

SEQ ID NO: 226971 - protein, 102 aa, Zea mays
  unsure (1)..(102): unsure at all Xaa locations
  Clone ID: MRT4577_138586C.1.pep
IPLNQLGGFLYHPAVLLSLFLFYRFGYHAPGLVFYSINTGMLMFGLWCLEKQWFFFLSKXIMFFNIVHGNFRGLLFFPCRKGTNVFQKNPPIXNXXXKKIKI

SEQ ID NO: 226972 - protein, 79 aa, Zea mays
  Clone ID: MRT4577_138587C.1.pep
DGLYYGSNGGSSAQLRSIAQSADGSSYRPCHAWHNMQAPSLSRELPPGQNDDYHVTVATKDTNTTKQNKLAGTDSTTTT

SEQ ID NO: 226973 - protein, 123 aa, Zea mays
  Clone ID: MRT4577_138588C.1.pep
RKKKKKKKKKKKKKKKKKKKKKKKGKTNFKGRHVFVGSNFTSAVLCYVGTFFLIAPVSAFTLAVGWTTPWPWQNLVRFPTYSPLQHIALFASWAQYLRAPHRSPFPKGAQASLPFGTLPVAGL

SEQ ID NO: 226974 - protein, 74 aa, Zea mays
  unsure (1)..(74): unsure at all Xaa locations
  Clone ID: MRT4577_138589C.1.pep
ADDACVLTSXTAISFLQNNSSLGRSMPFTIPPLSTTHFYMTLFIFSLTVLLTILTTAPNSKPSFSLMPPVYIPD

SEQ ID NO: 226975 - protein, 91 aa, Zea mays
  Clone ID: MRT4577_13858C.1.pep
GAVRDPCLTPPVRWWKKDRETPGDDWGRRGENKEEIWGGPHRQVLQSKAVSIPAPASSPFKNCGAGFDPALRAALTAALCFLTHPAGLEGP

SEQ ID NO: 226976 - protein, 52 aa, Zea mays
  unsure (1)..(52): unsure at all Xaa locations
  Clone ID: MRT4577_138590C.1.pep
MACYSSRYLMLLGLSASVATXTIVPQCSQAPIATLLPPYLLPAVSPMCDTPF

SEQ ID NO: 226977 - protein, 124 aa, Zea mays
  unsure (1)..(124): unsure at all Xaa locations
  Clone ID: MRT4577_138591C.1.pep
PHRFFPFVQLWSVIPHVFLQQEILPLSQLDKANXMQQRFFPFKQLAALNSAGYLQQQIIVPFSQLVAANRASFLTQQQLWPLYQQFTGNPATLFQLQQLLPFVQHGLAEPGASSHHHIIGGALF

SEQ ID NO: 226978 - protein, 98 aa, Zea mays
  Clone ID: MRT4577_138592C.1.pep
KATKIHRALRKKKRVGSFSYPNRDKSCKGVNNNGALDKGGPVCPNKPPKDEPHPELVLLERPRHLELFFLTDLVELKHPGFHLQGDPNRRAPEPEVLG

SEQ ID NO: 226979 - protein, 211 aa, Zea mays
  Clone ID: MRT4577_138593C.1.pep
GDWDPRGRPGDSQPLTVAILASLLFGESIGAIGVGGLVLGVVGLLLLEVPALSVEGNDTTIWGSGESLMFLSAQSMAVGTIMVRWVSKYSDPIMATGWHMIIGGLPLLVISVLNHDPALSGHIQDLTWSDILALGYTSIFGSAVSYGVYFYNATRGSLTTLSSLTFLTPMFASVFGYLYLGETFSPVQIGGALLTLVAIYMVNYKSIIGEK

SEQ ID NO: 226980 - protein, 104 aa, Zea mays
  Clone ID: MRT4577_138594C.1.pep
APKVPLVARGSLSLPLWGSPGIPPAPWCSWPWPWLGACPCPPGFYPVRENKASDWVSRPVPRVGLNAVLCPLEPVILNPKKVGNCLQKKKKNQKKKKKKKKKEK

SEQ ID NO: 226981 - protein, 159 aa, Zea mays
  unsure (1)..(159): unsure at all Xaa locations
  Clone ID: MRT4577_138595C.1.pep
MDTLLTAEIYANSPRFRRRSSTAVDAIHDLPAREEMAPAQLYSTESGRLFHSGRIVIATCGLPARGKTHTSVALARYLRWLGVKTHVFHLGDYRRATLSPGMDVPEDYFFLNAAPQSVLLRNKIXKKCRDDIYHXLEKRQGQVAIYDAVNAISQGRRSL

SEQ ID NO: 226982 - protein, 86 aa, Zea mays
  Clone ID: MRT4577_138596C.1.pep
RGRPGPLPLSSSCTTMRLDAWSVKQSTRPLWPLFSLAPPSPRSIPSRHSILSLSLSSSIEESPYTSSQHSSLPACLVHLVCSNFNY

SEQ ID NO: 226983 - protein, 152 aa, Zea mays
  Clone ID: MRT4577_138597C.1.pep
STTPQRYVDLVRALQRDGARVDGVGMQGHVTHPVAEVICDALDTVYAATGLPVWFTEVDVCEPDDALRADDLEVVLREAFAHPAVQGVVLWGFMQGHMCRQDAALVNADGTVNDAGQRLIDLRSEWMSDARGRLDADGQFSPRVRVRVGRPG

SEQ ID NO: 226984 - protein, 240 aa, Zea mays
  unsure (1)..(240): unsure at all Xaa locations
  Clone ID: MRT4577_138598C.1.pep
MALLRAAVSELRRRGRGALTPLPALSSLLSSLSPRSPASTRPEPNNPHADRRHVIALRRCPPLPASAVLAPELLHARGLLPRHWSHASPLSTSSSSSRPADKAQLTWVDKWIPEAARPYAMLARLDKPIGTWLLAWPCMWSITIAAMPGDLPDLKMLALFGCGAVLLRGAGCTVNDLLDRDIDNKVERTSFXPLRVGFLGIQLLLGLGILLQLNNYSRILGASSLVLVFSYPLMKXFTFW

SEQ ID NO: 226985 - protein, 68 aa, Zea mays
  unsure (1)..(68): unsure at all Xaa locations
  Clone ID: MRT4577_13859C.1.pep
EXGADPRFRPFSGHHFKFFYLHLVKDKFEGFFTFCRGASNHHLHYGHHKSYCFLLFKTIVDYDIYTFT

SEQ ID NO: 226986 - protein, 74 aa, Zea mays
  Clone ID: MRT4577_1385C.1.pep
KTGENQAAAPGVHPHQLSTSGVLLRELRWDAQKEIVPSLGKSGDSSLTLREAAELLHNVSSIIHVSIFGKNLHH

SEQ ID NO: 226987 - protein, 96 aa, Zea mays
  Clone ID: MRT4577_138600C.1.pep
WAIFAVRVGPNEVQFSVPSEIICFVTASSKLLHGLLLAFQVVFWSSFSFLVEGRHTVYKGFETSPAVFPYVFRTGKIKNLLNISKEPSAFIQKKEE

SEQ ID NO: 226988 - protein, 45 aa, Zea mays
  Clone ID: MRT4577_138601C.1.pep
LVIYSLSIIADERVNKWKKYILRIVRYGDDKCTSLYVSNQHRGCA

SEQ ID NO: 226989 - protein, 109 aa, Zea mays
  Clone ID: MRT4577_138602C.1.pep
MRFPHIQDHRRSTHTSHSLTHSPHSTGHPSIHPWSSSQQQQQPRIRKPCSSRLFSRKRSGGKAGMGVRGADKGRSSFSGRCARLVKEQRARFYIMRRCVTMLVCWREYA

SEQ ID NO: 226990 - protein, 61 aa, Zea mays
  Clone ID: MRT4577_138603C.1.pep
IFFNHTNVKIKFTTKTLTIQEMHLSPQTQALFYSFDSTSKLFLLPFLEYLKFLKNLGSIPL

SEQ ID NO: 226991 - protein, 63 aa, Zea mays
  Clone ID: MRT4577_138604C.1.pep
PALWQTVCQPTQAVEPVLGAVQPVLVNLTSLHVSQPVSLTVRLADSLPDLSGAVQPPWGRFNR

SEQ ID NO: 226992 - protein, 101 aa, Zea mays
  unsure (1)..(101): unsure at all Xaa locations
  Clone ID: MRT4577_138605C.1.pep
HGGAQGGPQKSGPAPRKHTGGFIRKKVPGKPPFPNRTRGGTPPRGNSNPPGGGTRGSQPGTKRGGNRGKTGPRGKLVSGHNSHNIRTGSKKXESPGGPMGG

SEQ ID NO: 226993 - protein, 57 aa, Zea mays
  Clone ID: MRT4577_138606C.1.pep
RPVLYIKTTILQHTNCTKPCFLLDTATVAACLPARLRITSQPSYDYSHLVGVPPTRI

SEQ ID NO: 226994 - protein, 86 aa, Zea mays
  Clone ID: MRT4577_138607C.1.pep
LISELIEEFGNGGKGKIKESASTSKSQATATSSRCLSKGIYILLYEPITVYWYDYERMTVYCYELHCLLILHPFLFNCRWIVQFCT

SEQ ID NO: 226995 - protein, 68 aa, Zea mays
  Clone ID: MRT4577_138608C.1.pep
CTRRIGLCGSMCSHTFLCSVETSLSGCTMHDYCRRCLWRMSGRRCQMIAAGSTHTKVRYASCLRSMYQ

SEQ ID NO: 226996 - protein, 130 aa, Zea mays
  unsure (1)..(130): unsure at all Xaa locations
  Clone ID: MRT4577_138609C.1.pep
RAEHGGVPPQSGWANGRKGERGGPPHHSPSRGKGEGLPGEXGGESQGSPRPRGGKGPGRAPENGPKRGPTRAPSKASPRPPRQGEGNPQNPPPSSRPAGPRTNFFFFFFFFFFFFFFFFFFFCLFFFLRI

SEQ ID NO: 226997 - protein, 55 aa, Zea mays
  Clone ID: MRT4577_13860C.1.pep
SSSGATCSLPMCVCGGRGVIARVSSQKFIAQQVYGIMCMSSLTVGFMYSVRLMNK

SEQ ID NO: 226998 - protein, 106 aa, Zea mays
  Clone ID: MRT4577_138610C.1.pep
KKTNLGRGGFLKKKTRLALKGFKGEKEETRPVGGSFYPFKEFPGPGGTKPPKPRKGLLIGPGVKGGGPVFWNGPKQNFPPPGGFGGGDPWGLGPPGPRGPPVFCFF

SEQ ID NO: 226999 - protein, 62 aa, Zea mays
  Clone ID: MRT4577_138611C.1.pep
VTGYVFCWTSAVVSQSLCSSFRCGSNTVVGLLLVQESSLVWVWHDRRWSCARHWVSRIPTVV

SEQ ID NO: 227000 - protein, 156 aa, Zea mays
  unsure (1)..(156): unsure at all Xaa locations
  Clone ID: MRT4577_138612C.1.pep
LGPPTRKPIRPMGPLXSPKTKPLRVQKPKPMRPPAPQTVLSDLWGQMWFIKVEMPGLMNLPPPVLWGPLPKPRGAPKKKPPVGLPFLYPSPLNFWKGGKREVSPRNPPKGEVYLGCPPQNRFPLFSFKKKKKKKKKKKKKKKKKNPQKNLNPPPPP

SEQ ID NO: 227001 - protein, 80 aa, Zea mays
  Clone ID: MRT4577_138613C.1.pep
VAHISVGSGWTFCSGALLTMYVDFPKLISYLVANYLQHVALRSQLVEFEQQPLYMIEGCGLPWHLCMFSVVCNVAKLLLM

SEQ ID NO: 227002 - protein, 248 aa, Zea mays
  unsure (1)..(248): unsure at all Xaa locations
  Clone ID: MRT4577_138614C.1.pep
LISQAKHPDPCTPRGFTRIAGSAKLPVGVLEPKVEYRPFAHSVGNFSECRSAALTLLQKGNEGCTYHECRLGAAFVPELEGKFLATENFYHTSKFFGLSSKPFLSDLMVAAGRVCHGDWSKIKNKYSSFDDGQLLLFCFSSAYIIALLHDTLKMPLDHKRIDVVNQIHGVPVDWALGAFIVQTTMXTEQSTQIHQFHIXSYDSPGLVPLLFIIVVVFTALSILRWRKPRLKTIYDMEKGRYIITRVSQ

SEQ ID NO: 227003 - protein, 103 aa, Zea mays
  unsure (1)..(103): unsure at all Xaa locations
  Clone ID: MRT4577_138615C.1.pep
PAPPPPTRGARPARPADPRHXGAAPPPAPPPGLGGSGTPAGRGGGAPPPTAGGTPRGGGPPPNPPFRVLFVVRRKQKARGRKLRHQRVGAPFWGKGAFGPPAP

SEQ ID NO: 227004 - protein, 70 aa, Zea mays
  Clone ID: MRT4577_138616C.1.pep
GTNPWGPFLIKVPKVGCPTQKLLGKNPCCLAFGRAQGPFKNCLPPTNQHFFWLLKEKPFFAPHWGNYWPV

SEQ ID NO: 227005 - protein, 126 aa, Zea mays
  Clone ID: MRT4577_138617C.1.pep
NGDPCAPRAWDAWEGVTCHRGDKGLVITQLDLASQGLKGYITDEISHLKDLVSLNLSYNSLTGSLPPGLGQPSLVSLDISSNEFTGSIPGTIGSSKLQTALLNNNQLDGQVPERLYSIGVHGGVIE

SEQ ID NO: 227006 - protein, 79 aa, Zea mays
  unsure (1)..(79): unsure at all Xaa locations
  Clone ID: MRT4577_138618C.1.pep
PDDIITSYHILTLKWHADKHSPSYRPXAYARFKAISEAYYALLDHQDNRCAFXAXCNNGRTGDRTRSAFAGAHGCHGRG

SEQ ID NO: 227007 - protein, 142 aa, Zea mays
  Clone ID: MRT4577_138619C.1.pep
GLMDCGPCLSKQSTGEIASRLQIPSAAGSAPSLFVLTETIHLRNNPENPLFLSLEISFFFFHQKGKRIVRRFNAGVTSPQLLTIRYNDDGYFFEYLLTRGNKNKECFSLHDCCQSYTYMSVMSQSSTTGSFFFFSICLIQTP

SEQ ID NO: 227008 - protein, 141 aa, Zea mays
  Clone ID: MRT4577_13861C.1.pep
MIRGGNHQQAADVEEELARNSRHAAAVATSRQWSAQTESRIVRVSRVFGGKDRHSKVKTVKGLRDRRVRLSVPTAIQLYDLQDRLGLNQPSKVVDWLLNAARHEIDKLPPLQFPPQDLMVGHLTPHNMPLMVHDEKFGHLA

SEQ ID NO: 227009 - protein, 42 aa, Zea mays
  Clone ID: MRT4577_138620C.1.pep
KLAVLNLKNPPVFKPTCPKKDHPPPLFFPFLIQVTKGMALKI

SEQ ID NO: 227010 - protein, 66 aa, Zea mays
  Clone ID: MRT4577_138621C.1.pep
LARFLLPSARAHLRTHVCPSAMEVRGRPACAFLPERRGSVHADASRRPGELGQGRGGPGREPPGPG

SEQ ID NO: 227011 - protein, 111 aa, Zea mays
  Clone ID: MRT4577_138622C.1.pep
LIINDLSKRNILTIDDKINSGGLSKKLVMPLLGGKVHPSRFLELMMQLTLILLAQMRILFLVEEYFLLQLFLGFNRDIKLLLHFKIKVKLYVPLLLILLLLYSHIALGHFI

SEQ ID NO: 227012 - protein, 80 aa, Zea mays
  unsure (1)..(80): unsure at all Xaa locations
  Clone ID: MRT4577_138623C.1.pep
FXXFFFLFFFFPSSFFYSARFFLEQGGFFLLPIINLSHFYTYPAHNIIPLKVLAKIMSVQNKKFKCPCNMFREKKKTLSG

SEQ ID NO: 227013 - protein, 175 aa, Zea mays
  Clone ID: MRT4577_138624C.1.pep
EEASVLRFTHRRFVVFFLSCHRYYYRCTYKDNMNCPATKQIQQKDHSDPPLYQVTYYNEHSCNSAFLALTPTEFQLQTASGKAVSICFDSSGAQEPGANASSPSSSAAPRATPSESKNKPLALRSEALSSWAPGVVEQKTACADLQSCSTECQDAYISEDIDAGRFGSIRFFHFL

SEQ ID NO: 227014 - protein, 46 aa, Zea mays
  Clone ID: MRT4577_138625C.1.pep
SAFAKFSITFSCTSAPLCYTFSYICYCDAFSLCRICICINCRICLV

SEQ ID NO: 227015 - protein, 109 aa, Zea mays
  Clone ID: MRT4577_138626C.1.pep
LGFGSPPPYIYLPHGGGGKPKKKQFFTGAGGAKKPGFLKPPLGTPQPLRGAGGELNGFNPPSFSFKKKKGKKEGGLGERGPYSPPLGGQKETKVLHRGPPSTKKGPKAA

SEQ ID NO: 227016 - protein, 169 aa, Zea mays
  unsure (1)..(169): unsure at all Xaa locations
  Clone ID: MRT4577_138627C.1.pep
MKKPFTHRFVFFFLSCHRYYYRCTYKDNMNCPATKQIQQKDHSDPPLYQVTYYNEHSCNXPSLPSPLQSSSCRPHLGRQSPSALIHPGLRSPEPMPARHLRVRRHAARLPRARTSPLRCVQRRFLPGPPALWSKRRPVLISSPAAPSAKMHTFQKTDAGRFGSIRFFHF

SEQ ID NO: 227017 - protein, 104 aa, Zea mays
  unsure (1)..(104): unsure at all Xaa locations
  Clone ID: MRT4577_138628C.1.pep
ARGKTGVGVSTTSTSGRAFESIEAAXADGAGAGSVSGTTRRALLVCRVIAGRVPKPLDNLKEFAGQTMGFDSLAGKVGPYSNIEELYLLNPRALLPCFVVICKP

SEQ ID NO: 227018 - protein, 164 aa, Zea mays
  Clone ID: MRT4577_138629C.1.pep
VGCLAHAMAKRQVADCLPFRITLLHRKPNIHSDLWFSFPFWMPKTVGTKRRGENEEDHKKLSVPPDLLFHCCHRSKNHLELGNIRSQDGELKARVEIRMGKSAYYDFLLHSEYIRTIRGKVSNEMGKDVAFYAGFPCYLDQFNIIYLQLPFQQSIILHLLYSDS

SEQ ID NO: 227019 - protein, 96 aa, Zea mays
  Clone ID: MRT4577_13862C.1.pep
GGNWLVCLQRNKAFFWGFLRDQMDFFSLELPLSPGIFLGFLKGPQSFLAIEPGGFFCSPKFKKNGFWEISPDGGLNHPPFFVVEEKSGKTRGFGMF

SEQ ID NO: 227020 - protein, 73 aa, Zea mays
  Clone ID: MRT4577_138630C.1.pep
QRLASRMYIRADNNSYDKCGPKLDLGDAEYLRAHGVQELDHAMQHLEHKYEFMTSDHHYISGKHDEDKAIVFQ

SEQ ID NO: 227021 - protein, 81 aa, Zea mays
  Clone ID: MRT4577_138631C.1.pep
SGHAGAWGEERHIMVCKIAEKYLSAKAAAAVQALLPESADGELSAVCAMADHVRWHYHWASSLHYANTPAVSSFKLSRDYH

SEQ ID NO: 227022 - protein, 95 aa, Zea mays
  unsure (1)..(95): unsure at all Xaa locations
  Clone ID: MRT4577_138632C.1.pep
VSKQLHHEISVSSPSLTLDSGDMDAPVIQNQDKGAVDAACMQRPDRFPPFLLLSLPFPRMTTTPCSKNGYQRRYTLHQGSLNDLXTPVGQRMLMR

SEQ ID NO: 227023 - protein, 61 aa, Zea mays
  unsure (1)..(61): unsure at all Xaa locations
  Clone ID: MRT4577_138633C.1.pep
PSPRPHPCSPVRPPPPPPPPPPPPPPPPPPPPPPPPPPPPPFLQXRPRPPPFKFLFLKDSK

SEQ ID NO: 227024 - protein, 80 aa, Zea mays
  Clone ID: MRT4577_138635C.1.pep
MHSSISARGGQGLLLPAEGVELLLGALAPAEGCYPRAFNFGDSLADTGNYPFVYGKQVTKLRTPYSETLFHRANWRACNW

SEQ ID NO: 227025 - protein, 79 aa, Zea mays
  Clone ID: MRT4577_138636C.1.pep
MDLELLWSGPPALSVLPWICGGLVASVLLWQAARLLDQLWWRPRRLERALRSQGLRGTRYRFLLGDVNDYARQTKEASS

SEQ ID NO: 227026 - protein, 324 aa, Zea mays
  Clone ID: MRT4577_138637C.1.pep
MFIQKAWRTAAFGLYGFNHFTKSGFLEHAKKFREEDMQIRLDGKNCLVTGANSGIGFATAEGLASHGATVYMVCRNKERGEAALNQIRSKTGNANVHLEICDLSSINQVKSFATKFTSMDKPLHVLVNNAGLLEHKHETTAEGLELNFAVNVAATYTLTELVMPSLEKAAPDARVITVASGGMYTEPLNKDLQFTEGTFDGTQQYARNKRVQVALTEWWAEKSGDRGVGFYAMHPGWADTPGVAKSLPGLSERLSGNLRTNDEGADTVVWLALQPKEKLASGAFYFDRAEAPKHLKFAGTADSHAQINPIVDSIRSICGLSVNG

SEQ ID NO: 227027 - protein, 55 aa, Zea mays
  Clone ID: MRT4577_138638C.1.pep
AKGGNLLHKVLPPGGRYAKKETKPIIVQISSVLAYYHLQGLFHRILSPGNFPFKT

SEQ ID NO: 227028 - protein, 93 aa, Zea mays
  Clone ID: MRT4577_138639C.1.pep
RFPARVGLGHHVPCPVEQPELGRLLPSRPVRCATAAGVSVIIFPRVILGIVIGGRSRTWASAVARDAAEAQEVAECEAAGGPGDGGGGCWERG

SEQ ID NO: 227029 - protein, 114 aa, Zea mays
  unsure (1)..(114): unsure at all Xaa locations
  Clone ID: MRT4577_13863C.1.pep
MTIQTAYCRTAAAPVCTNLREPNLKANTGAIVYSIRRNLIEKXLAGKHYSGRLQLQMKLPKRKKEYRNTYAGQHRIGGRLIIPXTLRFRPLYRLAMCKPLGHKGGXADVSLDET

SEQ ID NO: 227030 - protein, 217 aa, Zea mays
  unsure (1)..(217): unsure at all Xaa locations
  Clone ID: MRT4577_138640C.1.pep
MFIQKAWRTAAFGLYGFNHFTKSGFLEHAKKFREEDMQIRLDGKNCLVTGANSGIGFATAEGLASHGATVYMVCRNKERGEAALNQIRSKTGNANVHLEICDLSSINQVKSFATKFTSMDKPLHVLVNNAGLLEHKHEITAEGLELNFAVNVAATYTLTELVMPSLEKAAPDARVITVASGGMYTEPLNKDLQFTEGTFDGTQQYAXKXRVQVALTE

SEQ ID NO: 227031 - protein, 543 aa, Zea mays
  unsure (1)..(543): unsure at all Xaa locations
  Clone ID: MRT4577_138641C.1.pep
DEFILDIIGALEYDPKVPEVQKHRAFLKDHVVFKEAIRIENVSVVSKIHQTYRIGYLKDVILPRILDDATLASFNTMIHSNNASVISMLKDDTPFIRQLFARMRSSDISMESKRELVLFLHEFCTLSKSLPVVQQLRLFRDLXGEGVFEIISDVLQSQDRKIVSAGTDILILFLNQDPNLLRSYIVQQEGNSLLGLLVKGMVTDFSEEMHCQFLEILRILMDSFTTSGAHRDVVIEIFYERHLDYLVDVIASSCPPRSLSRSSSNSVHVGGNAEGHCIKPEILLNVCELLCFCVVHHPYRIKCNFLMNNAIEKILTLTQRREKFLVVAAVRFMRTIISRNDDHLIRHVVKFNLLKPIIDVFVDNGERYNMLHSGVLELLEYIRKENIKALTIYAIESFWDELVIFEHFGSIQAFKLKYQQYVESAEPMLNASVPNMRKRAEQRGLEKEEEDYFNKDSDEEDSGSGRRDKHAQNQHSKPKPKVPNGSEGGDTDGASRPKSAGLVDYDDDASSLLRMRPSMLAEIKLRAYLGVKYFYSFLIMLCF

SEQ ID NO: 227032 - protein, 470 aa, Zea mays
  Clone ID: MRT4577_138642C.1.pep
MERYTIINEVGDGTFGSVWRATNKESGEVVAIKKMKKKYYSWEECINLREVKSLRRMNHPNIVKLKEVIRESDTLFFVFEYMECSLYQLMKSRGKPFSETEIRNWCFQIFQALSHMHQRGYFHRDLKPENLLVTKELIKIADFGLAREISSEPPYTEYVSTRWYRAPEVLLQATVYNAAVDMWAMGAIIAELFSLRPLFPGSSEPDELYKICSIIGTPNQRTWPEGLQLAASMGFQFPQCESVHLSEVVPLASKDAINLISWLCSWDPRRRPTAVEVLQHPFFQPCFYVPPSLRFKSTGYASTPPSAGAKGAVDQKNIRRYYMGTVPNARPTVNYSYLRNNAPARAVGAQRKLELDYQLPETNNHNKVTKAEAMNQSWSRPAAVRSNAGNHLANDLNPRVPDLAEKLSQLSMGPNRVSGLGSERFVRTHENAAKRPLPVGSRAWHGPADPFRRPYEMPGDRTLLPRNLVR

SEQ ID NO: 227033 - protein, 99 aa, Zea mays
  Clone ID: MRT4577_138643C.1.pep
LSPLIRRCFGAPLIDGFLPVGGLVRVSLLGGGQVADLAPRFGLFMFWVIHLWFLLPVFHFSFGLASFSVSFFFGVSCVLFSFPMGWVLGWVSVVPPPPI

SEQ ID NO: 227034 - protein, 66 aa, Zea mays
  Clone ID: MRT4577_138644C.1.pep
QRGDFTLALDREDNDHIDSDKHHTRLYPQGDVLNSHSRLYYLQMVLLDTGAGLLANSFDDNTCFLA

SEQ ID NO: 227035 - protein, 211 aa, Zea mays
  Clone ID: MRT4577_138645C.1.pep
MRGFLTLLSVMLTYTTAVYATALTYKMDAHEVACFFATTVNKGTKLAFYFAIQSGGSFDIDYKVTGPGDKVIIDGTKERQGDFVFTANDVGEYKFCFSNEMSTFAEKVVDFEIAVENEAARAKIPSKQGSSPEQTSVIEESILKLSSQLSTISRNQKYFRTRENRNFSTVKSTEKRIFNFSLMESGLIVTMAALQVFIVRFFFQGARKGYV

SEQ ID NO: 227036 - protein, 109 aa, Zea mays
  Clone ID: MRT4577_138646C.1.pep
DGYWQTHQGLPYSQLGRGPDALLVEQHVLPFDLQAVVNIAAFLRQQHLWPLYAQVAGNINAFLQQRQLLPFYPQNVANIGDFLQQQQLLPFSQHALTDPTILLQAATIG

SEQ ID NO: 227037 - protein, 81 aa, Zea mays
  Clone ID: MRT4577_138647C.1.pep
GWEPGTGAVPSKLVFYEPGELTTNMLPYINCTLSWSRTWSWLFFYGGNMWCPWCALFKVPWVAPLITFGKSNKLFYFIPLI

SEQ ID NO: 227038 - protein, 128 aa, Zea mays
  Clone ID: MRT4577_138648C.1.pep
ILLDRNYVSKISDVGLARLVPPSVADNVTQYRLTATAGTFCYIDPEYQQTGKLGVKSDIYSLGVLLLQVVTARPPMGLTHHVEKAIDAGTFEQMLDITARANGGSGESGAQISGDSTTVGGSWETADS

SEQ ID NO: 227039 - protein, 68 aa, Zea mays
  unsure (1)..(68): unsure at all Xaa locations
  Clone ID: MRT4577_138649C.1.pep
FCGNNECPACRTHCASRRSLRDDPNYDALIAALYPDIDKYEEEEFAFSEXERIQNKKVTSSAFRRTTL

SEQ ID NO: 227040 - protein, 78 aa, Zea mays
  Clone ID: MRT4577_13864C.1.pep
NSKTITSHTSTHQSLDNLFDISSNPKTTKQSIIICKCQLTTLTCITTYSFLTTPHEPYLPISSSKILLRQTTSWHPIC

SEQ ID NO: 227041 - protein, 163 aa, Zea mays
  Clone ID: MRT4577_138650C.1.pep
PGSAGVLAHFVEHFEDGLQLAVFGTVPDEDVVDASRLCSWSLSRAPWQQPRRRRGGRSRQTAPCVTRGSSVVTRTNQRGSKRRRASAWSGGRRRTSGSNCSSRNRQGSEAAAREADEERREDGRRLGEAALGGGRVEEVERALRGGGGRDEVRKFRVVEVPQC

SEQ ID NO: 227042 - protein, 756 aa, Zea mays
  Clone ID: MRT4577_138651C.1.pep
MQGGPLSPDEYRVASPPALLHQPAPVIVVAIDRDRNSQLAAKWVVDHLLSGASQIVLLHVAAHYPANHGFAMAETTQSALEAEMKEIFVPYRGFFNRNGVDVFEVVLEEADVSKAILGYITANKIQSIALGGASRNAFTKKKKKKFADVPSTLMKCAPDYCNIYVVAKGKSVNVRLAKCGVPPMHTGADIASDTDSVRESGLYIRRGSRGHGHLPRVMPDARRSMDGRSTLPELTTRPPFRERSLPSSATKNVVVLPGKDYSEAPSRSARHDSFGGDLDFGPSTRFSSMDFGDNLDLTASPAREPMSPATGAQRDIEVEMRRLRLELKQTMDMYNAACKEAINAKQRAKEMQLMKLEEERRLEEARHAEETALALAEMEKAKCRAAMEAAEAAQRLADLEAQRRRNAEVRARREADEKVRALDAISNHDFRYRKYHIDEIEMATERFSDELKIGEGGYGPVYRASLDHTPVAIKVLRPDAHQGRKQFLQEVEVLSCIRHPNMVLLLGACPEYGCLVYEYMDHGSLEDRLFRRGGTPPLPWAQRFRIAAEIATALLFLHQTKPEPLVHRDLKPANILLDRNYVSKISDVGLARLVPPSVADNVTQYRLTATAGTFCYIDPEYQQTGKLGVKSDIYSLGVLLLQVVTARPPMGLTHHVEKAIDAGTFAQMLDITVKDWPVEEALGYAKLALKCTEMRRRDRPDLATVVLPELNRLRNLGHAYEARMSAVGTNSGSGESNDQVSGSSPTAGGSWRTAES

SEQ ID NO: 227043 - protein, 177 aa, Zea mays
  unsure (1)..(177): unsure at all Xaa locations
  Clone ID: MRT4577_138652C.1.pep
MQGGPLSPDEYRVASPPALLHQPAPVIVVAIDRDRNSQLAAKWVVDHLLSGASQIVLLHVAAHYPAXVRRSFPPLDDAAGQEEEKLSSGFLELNVCADGFAMAETTQSALEAEMKEIFVPYRGFFNRNGVDVFEVVLEEADVSKAILGYITANKIQSIALGGASRNAFTXKKKKNLR

SEQ ID NO: 227044 - protein, 251 aa, Zea mays
  Clone ID: MRT4577_138653C.1.pep
TRVEVLSCIRHPNMVLLLGACPEYGCLVYEYMANGSLDDCLFHRGGGGPVLPWQHRFRIAAEIATGLLFLHQAKPEPLVHRDLKPGNILLDRNYVSKISDVGLARLVPASVADNVTQCHMTSAAGTFCYIDPEYQQAGMLGVKSDVYSLGVMLLQLVTARSPMGLTHHVGRALERGTFADLLDPAVHDWPMDEAHRFAEVSLRCCELRRKDRPDLATVVLPELNRLRALGEDSMDSCTTMKGTSATRTRHA

SEQ ID NO: 227045 - protein, 173 aa, Zea mays
  Clone ID: MRT4577_138654C.1.pep
GDGASKEAAAADGWIRPRRAAWFGSSLITGKKNWRDTTTHLRLDRSSSLTFAELARTMQPEEEEAAAAALGARRRSHGCTGAKMVRGSIQASSSPCVCVPVCSSSGSTRCLAASPFEYDVSQLGAQRRHEYPYSLAQPPNVAIASGTTTSIFLSTMLFGRKKKKKIRCELLWF

SEQ ID NO: 227046 - protein, 67 aa, Zea mays
  Clone ID: MRT4577_138655C.1.pep
TKVTAFQSSPLTRFTSFVRPRTVVLQKNISLAEVTTIGEKHPLLQNTLTTKYIEFPYVLTIYMCNYY

SEQ ID NO: 227047 - protein, 84 aa, Zea mays
  unsure (1)..(84): unsure at all Xaa locations
  Clone ID: MRT4577_138656C.1.pep
VKDWPVEEALXYAKLALKCPEMRRRDRPDLATVILPELNRLRNLGHAYEARMSAARANGGSGESGAQISGDSTTVGGSWETADS

SEQ ID NO: 227048 - protein, 43 aa, Zea mays
  Clone ID: MRT4577_138657C.1.pep
SPWRVHGCSAAALPWASLGLDSFSVTLSCWIFCLLVGQWIILF

SEQ ID NO: 227049 - protein, 97 aa, Zea mays
  Clone ID: MRT4577_138658C.1.pep
RQSFEMVRVIRDKILNHLGADEVPLVVVGNKSDLKGDQRQVTLDEGRQLAEEFHCAFTEASAFLDFNVAKAFDLIIGEIEKSQNPSQPAGNNKCAVM

SEQ ID NO: 227050 - protein, 57 aa, Zea mays
  unsure (1)..(57): unsure at all Xaa locations
  Clone ID: MRT4577_138659C.1.pep
RKPEAKKWMMKTSDHYDSXVDLLGKNREKRQDDENSKGTFKKELRTEPAKEIPKHTP

SEQ ID NO: 227051 - protein, 295 aa, Zea mays
  unsure (1)..(295): unsure at all Xaa locations
  Clone ID: MRT4577_13865C.1.pep
MTTREPREASRRDGRDSHGRRPHSSFRSRRDDPSPRRRDDRRRESDRAHHRSRDGEFLEVVDHDQKRNRDAAQSADPPNAESKSASDMKNGPSTRHERSPRGTKRFSESSEAWRPRSFFXYLCFYVQHNERGSAGQGGRHYDRQASDYGRQREHLSDRDKQKTERHSLQGKIELDQQKKDGDSTWKHDGFFQLEEAAPLAKKRPPFQEMKIQESADTVTEPDSRSRNYQARGYGNHRPFLRPDDRGFRRGFPDHRSDGQRNGHDIRGRFSVRGGMDRDRFNNSYGGXKQRRAGFW

SEQ ID NO: 227052 - protein, 156 aa, Zea mays
  Clone ID: MRT4577_138660C.1.pep
MRSKAARTQATSISSYQSLLQFLERRREAKNTMEGKKSRLACCCLLMFLLLSAQQQQVAGLSKFCRCYRNCYTDCRKSTGRYPCNANCFQDCINGMLPPAPAEVVVPADCRDICLMGFCGSMELAGDALAGDAEACVADCTKNLGAFAPSGAKTIN

SEQ ID NO: 227053 - protein, 60 aa, Zea mays
  Clone ID: MRT4577_138661C.1.pep
FTHLAAMSNVVSPITLGALAPSVRVALRHLTGWCGGTPELGSLPAAPLLFSLPWAASGLG

SEQ ID NO: 227054 - protein, 91 aa, Zea mays
  Clone ID: MRT4577_138662C.1.pep
PSTKSVACVPCRGSCSGLPRVPRCQSIFSPILLRMRLLVLLCGKADPPCGRPSLTVGSSDVGRQTTQSNWSLLHQDVTCLLMKRHIMCHDL

SEQ ID NO: 227055 - protein, 124 aa, Zea mays
  Clone ID: MRT4577_138663C.1.pep
MEGKKSSLACCCLLMFLLLSAQQQQVAGLSKFCRCYRNCYTDCRKSTGRYPCNANCFQDCINGMLPPAPAEVVVPADCRDICLMGFCGSMEIAGDAVAGDAEACVADCTKNLGAFAPSAAKTIN

SEQ ID NO: 227056 - protein, 77 aa, Zea mays
  Clone ID: MRT4577_138664C.1.pep
NPATASAMPPTLLKEAFPHFNHRLYIITYLRIEPTQLLATFFRHIFFYSNRATLYCHRSLGGFFSLHRKEGWSTRIF

SEQ ID NO: 227057 - protein, 78 aa, Zea mays
  Clone ID: MRT4577_138665C.1.pep
WRPHAEVGAPLAREDLSGDLPGGRWPLPSVPRRRRLEKSPSPTGSPPPSALRASGSSYLSSPLGRRCGRGQDCSSAHP

SEQ ID NO: 227058 - protein, 134 aa, Zea mays
  Clone ID: MRT4577_138666C.1.pep
LERRVVVPPGEVPLVGVVGLVRDGAAGVGAASLWCYWCGVMCRWWWPVVHVGLVLRLALHGRCGLCRAGSVGLFRRKALSRGPLLGSVGSFCCIEPRWCLGGWRVSPALVKWAWWAVNGRLRSGSVGCSRGRPG

SEQ ID NO: 227059 - protein, 372 aa, Zea mays
  Clone ID: MRT4577_138667C.1.pep
MALGASQMPTALWMWVAAWRLVAATPAAALQEAHAPSRGGARGGTRQAGAPEGAAHASTRAPPPACHLPHALLARAAARPLGLRPRLCAFLSNPSSAPSLRDIQARQSHRRACTVTQCDLCVFESRPISGKKCKKPGPRKIHKAEREKLKRDHLNDLFVELGNMLEADRQNNGKACILTDTTRILRDLLVQVDSLRKEHSDLQNESHYVTMERDEMQDENGVLRKEISELQNELTMRVSGSPAGWGHGTARSDPPLPHSTAVFSSEQAMQPPTIASVVFPLQQPLAPSAMTKPPHAAPPLELKLFPEVASAEGHEPCEDHKAPNHVARPQARYPTQSASWPVNLFSGLPRMEDEQCSSSTSGSSREDNTDIE

SEQ ID NO: 227060 - protein, 115 aa, Zea mays
  unsure (1)..(115): unsure at all Xaa locations
  Clone ID: MRT4577_138668C.1.pep
DKSNSXDCESRIVDTRRANGRDVTEGYCGKXSQKCQXYEKAKXHTXEVCKNARXEAXXTGALLXXGXXLQPHTXXDWXXDEXCTLSRXXDXXAKGLXSIXXTSDXXTKWXXYGXX

SEQ ID NO: 227061 - protein, 124 aa, Zea mays
  Clone ID: MRT4577_138669C.1.pep
NRGEVLFLPKLKKNTLGAKFREGQRGQKPKLPLWFFISQNKGPFWWSKAPFALKGPWAARLKPPGKNPLFPFFPKVQKGEKKTPLNHPPSLFKNLGWDAPHHPINLLGFETPLDEFLSGQKHQI

SEQ ID NO: 227062 - protein, 91 aa, Zea mays
  Clone ID: MRT4577_13866C.1.pep
VLRCLWISVAQDPRSYNVLDLHAVSRYSYLSTWCHGWTSVIHLTRESYGCIHAMSAWPHNKNSFKVLALIFLPCLVPDCAGLTRTRGRTCV

SEQ ID NO: 227063 - protein, 270 aa, Zea mays
  Clone ID: MRT4577_138670C.1.pep
MVPSEMGTVATAVSTPAADKLLHGPISGKKCKKPGPRKIHKAEREKLKRDHLNDLFVELGNMLEADRQNNGKACILTDTTRILRDLLVQVDSLRKEHSDLQNESHYVTMERDEMQDENGVLRKEISELQNELTMRVSGSPAGWGHGTARSDPPLPHSTAVFSSEQAMQPPTIASVVFPLQQPLAPSAMTKPPHAAPPLELKLFPEVASAEGHEPCEDHKAPNHVARPQARYPTQSASWPVNLFSGLPRMEDEQCSSSTSGSSREDNTDIE

SEQ ID NO: 227064 - protein, 180 aa, Zea mays
  Clone ID: MRT4577_138671C.1.pep
MVPSEMGSVATAVSTPAADKLLHGPISGKKCKKPGPRKIHKAEREKLKRDHLNDLFVELGNMLEADRQNNGKACILTDTTRILRDLLVQVDSLRKEHSDLQNESHYVTMERDEMQDENGVLRKEISELQNELTMRVSGSPAGWGHGTARSDPPLPHSTAVFSSEQAMQPPTIASVVFPLQ

SEQ ID NO: 227065 - protein, 60 aa, Zea mays
  Clone ID: MRT4577_138672C.1.pep
RDGRCPGTRGATQSSWSWGTITQFEVCGSGGDAPANAKPSRPAKSQVFGSRFVGRLGQEC

SEQ ID NO: 227066 - protein, 87 aa, Zea mays
  Clone ID: MRT4577_138673C.1.pep
SKKVLFLGLAPPPGDFAKNLGTHPFVLLRALGGPPSKERAPLGRELGKKKGPRGEHQDGIVCHRGGNHSCFQLGGDPTAPGSPPKIF

SEQ ID NO: 227067 - protein, 53 aa, Zea mays
  Clone ID: MRT4577_138674C.1.pep
SNYQCRAYSVLLWLMLMAWGGHESWPRSCVNRGYAASITALISALLSRAHLYS

SEQ ID NO: 227068 - protein, 83 aa, Zea mays
  Clone ID: MRT4577_138675C.1.pep
TSRHIPFYYALLIRSPCSCNKLNPTVTSLCFSQHKLQIALVQISHHADLPNALATHELPYSMVGRHRFHHRGCLSLDGQTPSR

SEQ ID NO: 227069 - protein, 114 aa, Zea mays
  Clone ID: MRT4577_138676C.1.pep
MECGSKNAASGVMALLLLQLELAPTTATTRLLQANTSTAVDLDIIAEGVWPSRERHPLRGNLCLPTMLYGSHGLPMHWPNLHDVISGLPLFVICVERNTRTVRRCSTYCMWMEI

SEQ ID NO: 227070 - protein, 86 aa, Zea mays
  Clone ID: MRT4577_138677C.1.pep
YSHGRRVTLSDVVRPHQHSGHGGGCRIFVGPRGSCQGPRRAELVVAAPQIYSPEAGFVVESPGDADWCPELALTLILSYLWTFTLF

SEQ ID NO: 227071 - protein, 88 aa, Zea mays
  Clone ID: MRT4577_138678C.1.pep
LVFFSTSTICPSYYTLLISSPYTCNKLNITVPSLCLSQLKLQIALVQISHHADLPNALATPWLPYSMVGRHRSLHRGCLSLDDQTPSR

SEQ ID NO: 227072 - protein, 83 aa, Zea mays
  Clone ID: MRT4577_138679C.1.pep
MECGSKKAAGGVLALLLLQLVLAPTTATARLLQADTSPVVGLDIIAREFGHPVRGILCGETCVFLPCYTAAMGCQCIGQICMM

SEQ ID NO: 227073 - protein, 107 aa, Zea mays
  Clone ID: MRT4577_13867C.1.pep
TNFHEKHSVIYDLSTSAPVQAIQRQSTMINIKGLPQTRLYSLSFYRLSDQLTCNNISLMALQPQQRKWHLVIFSWHIPSLHATKFGNNGASTRLKLIICICLTPFSS

SEQ ID NO: 227074 - protein, 67 aa, Zea mays
  Clone ID: MRT4577_138680C.1.pep
RVRIFVTIAPCTCVSLGACVHVVLVSTGHYFSGPVPLLSGFEVLVSRCLVPLFFFGLDHGAIKSSSH

SEQ ID NO: 227075 - protein, 59 aa, Zea mays
  Clone ID: MRT4577_138681C.1.pep
IWHDTPKASVFESPLKMALPSLVKSGRAVPILPEKNPLQGWGKISQLIFCCSEKPPTPV

SEQ ID NO: 227076 - protein, 115 aa, Zea mays
  Clone ID: MRT4577_138682C.1.pep
GPFFFFFFRTSIMIRFYYTLLIRSASACNKLNPTVASSCFSQHKLQIALVQISHHADLANALATHGCRIAWYGRQQVSPQRMPVTGWPHSLAMMFQAIHGGGIRMQEAGRRRRRS

SEQ ID NO: 227077 - protein, 86 aa, Zea mays
  Clone ID: MRT4577_138683C.1.pep
LASMDSGSKNAAGGVLPLLLLQLMITPTTATDRLLQVDTSTVVGLDIIARRVWTSIDRILCGETCVFLPCYTEAMPCQCIGQICMM

SEQ ID NO: 227078 - protein, 85 aa, Zea mays
  Clone ID: MRT4577_138684C.1.pep
SMGGAFGSLPEDTFNFQSNRPSPLPNLGLETEGTHSSGKAVVGWPKIKGAIRWGIFARKKPPKKRAHLVQLEDCPRGFPMVKVPL

SEQ ID NO: 227079 - protein, 85 aa, Zea mays
  Clone ID: MRT4577_138685C.1.pep
LATHGVRQQERSRRCVDAAASPAGASSDDGDGPPPAGEYLHRGWPATSSRGSLPIQREASSVVKPVSSYHAIRQPWGANALTKSA

SEQ ID NO: 227080 - protein, 422 aa, Zea mays
  Clone ID: MRT4577_138686C.1.pep
MIRPGSRDSQNYDNNNQRVHPQPVDENMNQNGDSVDTMIGRIFNNISSLKSAYIQLQEAHTPYDPDKIQEADKLVIEELTNLSELKHAYREKHPKPIAASPQDSRLLSEIQEQQNLLKTYEVMVKKFQSQIQTRDTEITHLQQQIDEAKLRKSKLEKKLKQRGLLNRESEESDEEENYFSIELTPSLFTSAVDNAYQSIHEFSKPLINMMKAAGWDLDGAANAIEPGVVYTRRAHKKFAFESYICQRMFSGFQEESFSIKDSNISVSNEAFFHQFLAVRAMDPLDVLSQNPDSVFGKFCRSKYLLLVHQKMEGSFFGNMDQRNYVMSGGHPRTPFYQAFLKLAKSIWLLHRLAYSFDPKAKVFQVKKGSEFSDIHMESVVKNIILEEGAERPKVGLMVMPGFLIGTSVIQSRVYLSDAKCAD

SEQ ID NO: 227081 - protein, 283 aa, Zea mays
  unsure (1)..(283): unsure at all Xaa locations
  Clone ID: MRT4577_138687C.1.pep
MAAAAFDAYTDKNAIFRRLKAKPENKMCFDCNAKNPTWASVTYGIFLCLDCSAVHRSLGVHITFVRSTNLDSWTPDQLKMMAFGGNNRAHAFFKQHGWTDGGKVEAKYTSRAAELYRQMLNKEVAKSAITDNALPSSPVTASEASKPSDDFPEFKLSDAPAPPAENLNGKHEPKSPKAAPRSPKAATHPTFATSVKKPIGAKKVGGKTGGLEVRRSXTKPNEXLYEQKPEEPKPAVPALAASTKKGGQALHSRFEYVENEPSAAVLLSYLHRITDSSCTATAL

SEQ ID NO: 227082 - protein, 87 aa, Zea mays
  Clone ID: MRT4577_138688C.1.pep
GPQRQGWADPSPFGPGGPPPPQGPGRTPPPGLGPPLGGRAPPGPLNGSLIGAQKGFFPPIRAMLKPVGPLIFMGKCYVVPLGALCLK

SEQ ID NO: 227083 - protein, 296 aa, Zea mays
  Clone ID: MRT4577_138689C.1.pep
RTRVRTRGQEKEWDELQAMAGALCYKLITVDGNTAIWKKSTFFFCCDLFNGFGLDLCSTDYDPDEGWYFKLNKCVSKISVAEEIAIGSILKWPDRLSKPSARASVINNGANLFEVDSQKWVRRVSYYKKSLGVKLGSTNIRNVMDMNAFFGGFAAAIISDPVWVMNVVPGQKPLTLGVIYDRGLIGVYHDWCEPFSTYPRTYDLIHADAIDSLISGPISGTSRCDLFDVMLEMDRILRPEGTAVIRASPDVVAKAAQIAQSIRWKAQVHDSEPESGSTEKILVATKTFWKLPLTKQ

SEQ ID NO: 227084 - protein, 61 aa, Zea mays
  Clone ID: MRT4577_13868C.1.pep
QSNQLQDFADSLGIPFIETSAKESINVEEAFLTMSSEIKKRYGKKKKKKKKKKYSALLPLL

SEQ ID NO: 227085 - protein, 202 aa, Zea mays
  Clone ID: MRT4577_138690C.1.pep
NGVVPPKEKRGMPPPFQKFVGLFWGKLSKTFPEFCFLGRENLPRPLLMFFSNFLLSPKGYFPPVICNSKFFPNPPVNSDLGFLAWGNPPRGPPVNLPTKHFFSMANTGGPVAPSFSKEKPVLGMIHPQLLGGGPAPFPPGGGGLGSPVGGKKPGPLLGRAFFFRPPQRSAQLKKMLFKLLGPENFRPKQGKKPPFSLGARFF

SEQ ID NO: 227086 - protein, 88 aa, Zea mays
  Clone ID: MRT4577_138691C.1.pep
SFSFFESWFGLLKNILCVGGGRTWLDAVADSLLHQAPVLDPRATATTSSWSGRGVSVTTTGVCHYCAPRRTAAAFQSRMCSPGAAAAA

SEQ ID NO: 227087 - protein, 152 aa, Zea mays
  unsure (1)..(152): unsure at all Xaa locations
  Clone ID: MRT4577_138692C.1.pep
GRAPGSAGSRTAGTPQAPAATATPPKGQRPRSNSHQGTGQGQGGTKFFFFCKPTHGGGGAAGRRRTPPGAGGQGPGTEADRKSAPENGKTPRDEKGRXQXPGKATQKGXEEAXTXXARXAPPXXXXRKXKGGKTXKXPSSXXXQXPGKSRXT

SEQ ID NO: 227088 - protein, 41 aa, Zea mays
  Clone ID: MRT4577_138693C.1.pep
ATGYNKGGFIGGDTVPIVGIKRTSWLGTSVINGGPKTCNPG

SEQ ID NO: 227089 - protein, 64 aa, Zea mays
  Clone ID: MRT4577_138694C.1.pep
GSVRPIWSCCRPHTVTLSNHLDPRLEDPRPWIPVAGRTRVAPSVRCDEAVSALLNLLEDYFCSI

SEQ ID NO: 227090 - protein, 65 aa, Zea mays
  Clone ID: MRT4577_138696C.1.pep
GPGPIFLVKTGAFLLGKNWGWASPVGKPRLLSDRASLFYIPGFFSGVCFLQNLEFIPNNKLIYLY

SEQ ID NO: 227091 - protein, 61 aa, Zea mays
  Clone ID: MRT4577_138697C.1.pep
AGKSLRIRIQRPLQIHLAPANKKAEISALILKIPPQGPFFNPKEKLRSDKCATCFFRPPRF

SEQ ID NO: 227092 - protein, 57 aa, Zea mays
  unsure (1)..(57): unsure at all Xaa locations
  Clone ID: MRT4577_138698C.1.pep
FLSMLNGGCGCSSAGLFGWSEIFXGXALXCSLALGVQHFRSGSLFFKAQVVCPGCVG

SEQ ID NO: 227093 - protein, 280 aa, Zea mays
  Clone ID: MRT4577_138699C.1.pep
MAMKLDMSALETNFANLTASAGDDTYFSAEAPDVPSMVLPICDDFDGFQAATKDMVKNKKGTTTLAFIFDKGVIVAADSRASMGGYISSQTVRKIIEINPYMLGTMAGGAADCQFWHRNLGTKCRLHELSNKRRISIAGASKLLANILYSYRGMGLSIGTMIAGWDEKGPGLYYVDSEGARLVGNRFSVGSGSLYAYGILDDGYRFSMSVEEAAELARRAIYGATFRDAASGGCVSVYHVGPDGWTKLSGDDVGELHYHYYPVQKTPVEQEMADAPTASA

SEQ ID NO: 227094 - protein, 23 aa, Zea mays
  Clone ID: MRT4577_13869C.1.pep
LKQLSPYPTKLPFITYILLQLAY

SEQ ID NO: 227095 - protein, 49 aa, Zea mays
  Clone ID: MRT4577_1386C.1.pep
VFLPPMEGCTIGIQERGGVAKFRGNEFSLEFECAVSVKKFTPSMNEFHA

SEQ ID NO: 227096 - protein, 101 aa, Zea mays
  Clone ID: MRT4577_138700C.1.pep
QAHTALLLYHFRGCVACMPALLPFSFILFSCKFAVKSGFQSLSHEASSGTYSAGSLAPAPAESVFFRGGASSLWPRPSAPAILSFLFLRNLCSVSFLAMGG

SEQ ID NO: 227097 - protein, 314 aa, Zea mays
  unsure (1)..(314): unsure at all Xaa locations
  Clone ID: MRT4577_138701C.1.pep
MAASASCLLSLLVVVVLAALASAQLSSTFYDTSCPSALSTISSGVTAAVAQEARVGASLLRLHFHDCFVQGCDASVLLNDTSGEQNQIPNQTLNPRGFDVFDSIKAQVEAVCPGIVSCADILAVAARDGVVALGGPSWTVALGRRDSTASFPAQTSDLPPPTSSLQQLLRAYSKKNLNQTDMVALSGAHTIGQAQCLSFNDXIYNDTNINPAFAVSLRANCPRAGSTALAPLDTTTPNAFDNAYYTNLLSQKGLLHSDQELFNSGSTDSTVRSFASSTSAFNSAFATAMVKMGNLSPQTGTQGQIRRSCWKLNS

SEQ ID NO: 227098 - protein, 111 aa, Zea mays
  Clone ID: MRT4577_138702C.1.pep
MEPSNKLASVISRPSREREREREREGGSMADHKEEPVPESVMDKITEKFHGGDSSSSSSDSDDEKKGSSSESAAEAMKAMIYRLPRRERTVQSVLGGGTPADLILWRNRKI

SEQ ID NO: 227099 - protein, 61 aa, Zea mays
  Clone ID: MRT4577_138703C.1.pep
KPNGWKRPMLLNDSCHAPRKALMVPHTLWQSSHARFILICSIAISNCVAFWNLCARETKLA

SEQ ID NO: 227100 - protein, 99 aa, Zea mays
  Clone ID: MRT4577_138704C.1.pep
PAGLRTAMGVLRPDLVLKCIVPVVMAGILGIYGVVVSVLLSGGLAMKQTLFSGFVQMAAGLSVGLSCLAAGIAIGITGDAGVRATAQQPRMFVGMTLIL

SEQ ID NO: 227101 - protein, 234 aa, Zea mays
  unsure (1)..(234): unsure at all Xaa locations
  Clone ID: MRT4577_138705C.1.pep
FLTPISGVTALNLLKENPISPPPRCARRYDSRTXTIFSPEGSLYQAEYAMEAIGNDGSALGMLVGDVVVLSXDKKVTSMLVETSRSVYKMYKIDSHLSCAVAGIXSDAYILIITARLHAQSYAFSYEXPIPVEQLVXQALCDTKXDYTHFGGLRPFGVSXFLFAGRDEHHGIQVYMSDPSGNYVACKDAAVAVNRQAAQSMLEQDYKDALTRDEXVGLELIXVSKTVDSTSLTA

SEQ ID NO: 227102 - protein, 207 aa, Zea mays
  Clone ID: MRT4577_138706C.1.pep
PAGCNLVWQYKRRAAEDGSLSFSQLSQSVTQSVDDLGLEKFGLNDSQLHAVADCVLSAIDNRLPSLKLIWGPPGTGKTKTICTILWAMLMKGLRTLTCAPTNTAVLEVASRIVRLVEHLHGSVCFLNDIVLFGSKEKMKIGREDALSMVFLDSRAKRLLPCFMPTTGWMHCLRSLMDHLESPITQYRLHLEKLLKNEKKKESNKGRF

SEQ ID NO: 227103 - protein, 76 aa, Zea mays
  unsure (1)..(76): unsure at all Xaa locations
  Clone ID: MRT4577_138707C.1.pep
MSGKGSSSCGCAPTSKCGKKYPDLXETSTATQATVRLGVAPEKKAAPKFIEAATESSEAXHGCSCXGNCKCDPCNC

SEQ ID NO: 227104 - protein, 251 aa, Zea mays
  unsure (1)..(251): unsure at all Xaa locations
  Clone ID: MRT4577_138708C.1.pep
MESLEALVAHIQGLSGSPEELAHLHSLLKQADGEPLRAHAAALVPFLAHLSPETHSLGYLYLLEACATSSSNLSDFGGGDFLVTIGGFLTACSADQIRLAPDKFLNVCRVLKDQVMQLNMPIRGIAPLRAAVPKIQSSPEQLTPVHADYLLLCLLAKQYKAGLSVLEGDIFEVDQPKDLFLYCYYGGMIYVGLKKFPKALELLHNAVTAPMSSLNAIAVEAYKXYILVSLIMDRSYKVLRWWSILTRLSRG

SEQ ID NO: 227105 - protein, 319 aa, Zea mays
  Clone ID: MRT4577_138709C.1.pep
RRVYRGVLPKSKREVAVKKVSHESRQGIKEFVAEVVSIGRLRHRNIVQLLGYCRRKGELLLVYDYMPNGSLDKYLYGKDDKATATLDWAQRFRIIKGVASGLLYIHEDWEQVVIHRDIKASNVLLDSDMNGRLGDFGLARLYDHGADPQTTHVVGTMGYLAPELARSGKASPLTDVFAFGAFILEVVCGRRPVEQSMTDSRLMLVDWVLEHWQNGTLADVIDAKLKGSCDEEEAMLALKLGLLCSHPLPAARPSMRQVMQYLDGDMPFPELTPSHLSFSMLALMRREGFDSFILSASTTQPLSSTAMSIGTMTGLSDGR

SEQ ID NO: 227106 - protein, 98 aa, Zea mays
  Clone ID: MRT4577_13870C.1.pep
AAGAPARPPLRRKRDAGGGSSVGRTSGAFSRIVTSGVTRAYPGGSQLAMQEFMILPTGASSFKEVMKMGVEVYHNLKSIIKKKYGQDATNVVGEGAFA

SEQ ID NO: 227107 - protein, 220 aa, Zea mays
  unsure (1)..(220): unsure at all Xaa locations
  Clone ID: MRT4577_138710C.1.pep
MESLEALVAHIQGLSGSPEELAHLHSLLKQADGEPLRAHAAALVPFLAHLSPETHSLGYLYLLEACATSSSNLSDFGGGDFLVTIGGFLTACSADQIRLAPDKFLNVCRVLKDQVMQLNMPIRGIAPLRAAVPKIQSSPEQLTPVHADYLILCLLAKQYKAGLSVLEGDIFEVDQPKDXFLYCYYGGMIYVGLKKFPKALELLHNAVTAPMSSVNAIAVE

SEQ ID NO: 227108 - protein, 128 aa, Zea mays
  unsure (1)..(128): unsure at all Xaa locations
  Clone ID: MRT4577_138711C.1.pep
KEYLFPVTVLEFQYQNIQYYMVQEEMQASILRKLGLTLEQPYTLLQQPYIEHLHIQRIGAQQLQKQNAYQTTTKPPXANLTVYLHQQKSFSYKKQSGGNTDMYLKAHQILPCNQLGWSHYAWLLQQQT

SEQ ID NO: 227109 - protein, 425 aa, Zea mays
  Clone ID: MRT4577_138712C.1.pep
MESLEALVAHIQGLSGSPEELAHLHSLLKQADGEPLRAHAAALVPFLAHLSPETHSLGYIYLLDACAASASNLSDFGGGDFLVTIAGFLTACSADQIRLAPDKFLHVCKVLKDQVMQLNMPIRGIAPLRAAVRKIQSSPEQLTPVHADYLLLCLLAKQYKAGLSVLEDDIFEVDQPKDLFLYCYYGGMIYIGLKKFPKALELLHNAVTAPMSTLNAIAVEAYKKYILVSLIVNGQVPPFPKYTSISAQRSMRNHAQIYAELSTSYSNGSKTDLETFIQSNSAAFQSDNNLGLVKQVLSSMYKRNIQRLTQTYLTLSLEDIARSVQLETPRDAEMHVLRMIEDGEIHATINQKDGMVSFHEDPEQYKSVEMVEHIDSSIQRLTALSKKLASIDENMSCDPAYLLKTGRDRGRFDYDDFDSVPHKYF

SEQ ID NO: 227110 - protein, 176 aa, Zea mays
  unsure (1)..(176): unsure at all Xaa locations
  Clone ID: MRT4577_138713C.1.pep
METSSHKRAREAVDLAAAAAAAGEAVWPESDAKRLRPQDLLDMLEDDTDAAAAGDLASVMRSLEEEIASFDEAAEAAPSQQPELGFLLEASDDELGLPPAGSAAASSEEAGLAGPPEPAAPAAAALYGQIWAFDDEIDGGFGGYSPEAAAAAAAPPXWDDDVFGAGLFAFGDDACG

SEQ ID NO: 227111 - protein, 63 aa, Zea mays
  unsure (1)..(63): unsure at all Xaa locations
  Clone ID: MRT4577_138714C.1.pep
RCFTMXPDRYVDKVIGLALQGMGQHEHVLXRVVLPRHEVQVKLIRSPHQKTTSAPLQRAVTKY

SEQ ID NO: 227112 - protein, 102 aa, Zea mays
  unsure (1)..(102): unsure at all Xaa locations
  Clone ID: MRT4577_138715C.1.pep
EKTKKKKQKKKKTNTTKQKKQNKKKNNNPQHDHKAPREENNKTPTXXVRTKRTTHNDRKLSVQNHIRIVVDKVADHDKLLYKDDRPNLTEFYNXRKYCGSPG

SEQ ID NO: 227113 - protein, 125 aa, Zea mays
  Clone ID: MRT4577_138716C.1.pep
PGKRLSWRSHEETTTLGGRPREESREASPPPSLDRRPGDGEVGRSEASELLRRQRGLRPCRPTKDFAQHEGKRRRGSTWVLVAGEETNESLSTWLRAAAAAQSERGDRAPGRIKCPGRPRGSQSP

SEQ ID NO: 227114 - protein, 64 aa, Zea mays
  Clone ID: MRT4577_138717C.1.pep
PIQRARRTSPRDTPLGDDPYHIYIYKHVFSTIKWTQLSFVILSNLVFHCALTKAKGSDPSQRPC

SEQ ID NO: 227115 - protein, 184 aa, Zea mays
  Clone ID: MRT4577_138718C.1.pep
MELLALLTVLLLAHTAAYLAWQAVSRRRRARCYLLDYACHKPSDDRKVTTETAGAVIERNKRLGLSEYRFLLKVIVNSGIGEHTYCPRNVLQGREESPTHGDALEEMDEFFADAVAAVLARTGVRARDVDLVVLNVGSFSPAPSLVSRLVRRFGMRDDVMAYNLSGMGCSAGLVAVDLARGVML

SEQ ID NO: 227116 - protein, 144 aa, Zea mays
  Clone ID: MRT4577_138719C.1.pep
GSNSVNNTNSKTFSSLDWKQIGTVGLGVGKGLAYLHHECLEWIVHCNLKPENILLDQDLEPKIADFGLAKLLSRSGSGPARNVTPTRARGTVGYIAPEWVSGLPITAKADVYRYGVVLLELVSGTRVFDPVLMGRGGRLGPCSC

SEQ ID NO: 227117 - protein, 91 aa, Zea mays
  Clone ID: MRT4577_13871C.1.pep
SIWHVQSSQSKIWTEPFIKSQFSCLTFLGAWGNHLSLSIRQCIMYITIVSYCSIQSITVHLRDTVAKPAIREAAYFLAKSTEGPLSYKLII

SEQ ID NO: 227118 - protein, 124 aa, Zea mays
  Clone ID: MRT4577_138720C.1.pep
PPFFKGNSFHPFLEQGPFSPKKGFQRSLFKRSLPIIQVSPILPPSPKCLISRRVEGLSRSNMRNILQEHPFMLTRLVLSIQKAVRKSSSLFKIRCSKMLLRTSRSKCLSMWLFVCTCNKISPIP

SEQ ID NO: 227119 - protein, 36 aa, Zea mays
  Clone ID: MRT4577_138721C.1.pep
VLIGYSMKLGCVSNKGIGVIGVLAWSMVDVQGCVER

SEQ ID NO: 227120 - protein, 313 aa, Zea mays
  Clone ID: MRT4577_138722C.1.pep
MAVHYLLRRGVSGGSLLHPIRGLFLASKELGRRPLGSAAAGDAAAELRGAREDVRQLLKATSCHPILVRLGWHDAGTYDKNITEWPKCGGANGSLRFEVELKHGANAGLVNALKLIQPIKDKFSGVTYADLFQLASATAIEEAGGPKIPMIYGRVDVIAPEQCPPEGRLPAAGPPSPAEHLREVFYRMGLNDKEIVALSGAHTLGRARPERSGWGKSETKYTKDGPGAPGGQSWTSQWLKFDNSYFKAIEERRDEDLLVLPTDAVLFEDSSFKIYATKYAKDQDAFFEDYAEAHAKLSNLGAKFDPPKGISLE

SEQ ID NO: 227121 - protein, 84 aa, Zea mays
  Clone ID: MRT4577_138723C.1.pep
QSLCVFNMRSTLYRWSLAVHSVLKVSQYRPCLIKCIVEFVASVCPCLLRQKCVCSVRGDDTDCPVFDPVPICNVNGVVLDPPVE

SEQ ID NO: 227122 - protein, 190 aa, Zea mays
  Clone ID: MRT4577_138724C.1.pep
MHLSLGCRDPAHCTVAATVSSSTMSAASTVDPHPPHQQQQCSDKVSSMEMEIPADLIIRIGESVFPLHKAVMVPKCGYIRRAVEAVATRPSSKGGADADADPPATVELDLSALPGGADAFDKAARYCYGANFEITPQNAAALRCAAAFLDMRHASADLAGRVDEFLARAALRALPGAVAVLRSCEAPGLR

SEQ ID NO: 227123 - protein, 414 aa, Zea mays
  Clone ID: MRT4577_138725C.1.pep
GIKVGNFCYVKEGLVLGHIEPRVRPLVRGRVGAESEDMIKIAVDGLGKNGFINYYGLQRFGSGSIPTHLVGAALLRGEWKVAVNLILDPREGERDDINEVRKRYKEHGDIDMALRNFPRHLVAERAILQCLKKCPGNHLQALKGIPRTLRMMYVHSYQSYLWNHAASMRVEKYGISQVVEGDLVYNKECPSEESTSVDILETDDDHTNSIEIDLCSEAQPEESIQSAKIVDSGDFTKGIYTFDDVVLPLPGSQALFPGNEIAEIYHEMARKDGISLTENAHGVKEFSITSMKGGYRRVFQRPIGFEWELITYTDDTSSLAETDLDVLSRTKPKEANELISKQESQDKLEKAPDTSVPTNGNSSQEKLIGSPDILPKKLALKLAFTLPTSCYATMAIRELLKTSTSVAYQKTLSC

SEQ ID NO: 227124 - protein, 714 aa, Zea mays
  Clone ID: MRT4577_138726C.1.pep
MLMILINKRRFGLLLRTRAASPHLLSTHASDMNLDGPLVNSRRNLSISPPLDVFSRNVSPKRALERLPPSHSVLGPDPRKFTDRNGRLRWGLDDGAQRPTISMLDEEYRKQSARELIDAYGNCQGRDADERLPKVQRLDPNGMASRSSARNWLTSEEEEYSWEDMSPTLTDRVSSSMPSFPPGTMRIGFPGANAGLLESDVGRHNFPSQATRLSVDVSPFNIEDRISAASHVDISTRRYPSNFGVQNGALLEYQNSEHTLNHGRIATMPAPPWQQPIGLPLRIQAPEHPSVLGRIPQPVDGEMPVKRLDISGTYNGLNVDKSLVKHRSSPAPAPTEWLPLHHAQSQTLPLIIPDTKHVRSASDSLEISSFVSQGASSSVFVPHHQYDALDRKTGTRNLAQPPYQHQDLLLPSQQNQGTILGNQVHPHLPQQLHPHSHPHHQETFRSFAPGMTVSPFQGQGGNATMTPVSVLPTFSVPPAVPPYGVLSAPGFPMPPLPPGPPPVPLQMGSSSSQVGGPQPFVSGLLSNLMRHGVISLEPPSQSQDSVGVDFNVDLKVRNEPVINALYQDLSRQCKTCGLRFKCQEEHRAHMDWHVTKNRNSKNRKQSSRKYFVTVEEWLRAAETVGNDGVPAFVPSDPVPDRKEEREIAVPADEEQTACALCQEPFEDFYSDETDEWMYRGAVYMNAPDGNIDGLERSRLGPIVHAKCRSGPSNT

SEQ ID NO: 227125 - protein, 160 aa, Zea mays
  Clone ID: MRT4577_138727C.1.pep
AGGRGKKKKKKKKNKKKKKKKKKKKKKKKKKKKKKMPPKKKKKKGWLRPHQTCAGISGDLPPLVGGHRPKPVKGAGLRKTRRKRALPLKSSPRPKHCGNCPPGPEKFRGSTPQGSGKSLAPEEKDLIGPSPEFFARALFFSRKRNRKMYERSFKDPSGFW

SEQ ID NO: 227126 - protein, 79 aa, Zea mays
  Clone ID: MRT4577_138728C.1.pep
LYHPNCVQDMWSPTCRLLVGSKKKFGFEKKLSPVGLLVQTSERKHPSFPKNFRSLLSRSKFVQHFLKKKKKKKKKKKKK

SEQ ID NO: 227127 - protein, 208 aa, Zea mays
  Clone ID: MRT4577_13872C.1.pep
FCAETENGISSRRRRPRGVTASAAAATPNNGTSWAPTTTTLPPAAVAAREREAEIEQAMRARVSDFKKQADSLTLEGVRRALKKDLGLETYSLDAHKNFINQCVDKVFAESHDENANDNASEDPEAKDYLSKEEKDVGKQMPVSNKTSFNADVETCGKIEKDPEGGRDQTSSSDISEDVIKEAIEKRSSYFRKNSEYVSSPSHYMYNY

SEQ ID NO: 227128 - protein, 58 aa, Zea mays
  Clone ID: MRT4577_138730C.1.pep
GARPQPSPPPQNGGAGLSVRDRSIPPPLARPLWNICNETSRKFFQYTETTIESSRRRF

SEQ ID NO: 227129 - protein, 179 aa, Zea mays
  Clone ID: MRT4577_138731C.1.pep
PARGSSIGLRNVGILCPTRMISSVHLISQFLVEDHHDMLGCIHAEMSAIWSLYDDRIVDSLVELRVQGEIVPAHECSGHVVKSTVSTCITMAMRHDWSYIDSCGHPRKVGLEQRATSGVGRHPARSSSTTGTASGDLATDSSARCSAISDRCGAGTSMANKVHRCILREDARWRGREQE

SEQ ID NO: 227130 - protein, 66 aa, Zea mays
  Clone ID: MRT4577_138732C.1.pep
LPPTLPPTRPHTHRRVRPPRRRLLDRSAPMGYVLSAVGRVLEQPTAWGAAWEMALLAGPLWAAALL

SEQ ID NO: 227131 - protein, 123 aa, Zea mays
  unsure (1)..(123): unsure at all Xaa locations
  Clone ID: MRT4577_138733C.1.pep
PTRPRTRGVRSMHLGLCALMTAGLVTILYTPSEYEHQSQSSSWLDTGGIWEKRSSDPXYESYANIQGDDVYETIQNLNAGEQKLXYGLLNINRTELDARTHMLPERESSIIKLEHAKESITWQ

SEQ ID NO: 227132 - protein, 59 aa, Zea mays
  Clone ID: MRT4577_138734C.1.pep
RMVPANKVGMFLACIQSGVFEEAPGFTHFHSISHLNAAHAGFFDHKGPGFARNQQPPQR

SEQ ID NO: 227133 - protein, 56 aa, Zea mays
  Clone ID: MRT4577_138735C.1.pep
AARVARAPGAEEAGELTVEEARRRGRHQKRTFVRTGSYWVVGCWLGISCVCVLRSE

SEQ ID NO: 227134 - protein, 58 aa, Zea mays
  Clone ID: MRT4577_138736C.1.pep
SIMYTYVHHYNLWEFYLFRFNLSPCNYFVRKLYYIGFFVHLLVISSPPPHILLKKNKK

SEQ ID NO: 227135 - protein, 134 aa, Zea mays
  Clone ID: MRT4577_138737C.1.pep
KKNRLNPVNFGSQGKRGRGGPPMEPPHNPSPGGPGRGGKENGYPKVKKGGPSGQVPWVRGGAGLPPQGGEAGGVLVQQGGKKKRVQGGGDPPTGKGWDGFFFWEAWKEKRDPLRKKPPLSFPPLVFSFPVGGKH

SEQ ID NO: 227136 - protein, 734 aa, Zea mays
  unsure (1)..(734): unsure at all Xaa locations
  Clone ID: MRT4577_138738C.1.pep
MAHSPAPSGGGGGGPLPLLVSLNCLDDLSLEQEGLAGVAAVEHVPLSAVACGRIEAASAVLLPSLAFLPRAAQRRLRPWQLLLCLGSADRAADAAAAADLGLRLVHVDANRAEEVADTVMALILGLLRRTHLLSCHASSVPAAGWLGSVQPMCRGMRRCRGLVLGIIGRSAAARCLATRSLAFRMSVLYFDPRYVGLLYRLSNFSTTITTKGVFGNTVFQNHGISNTTVYKCHDMISVFNTTVLEYHGFEYMEVFGNKASGKTKRPSIVFPSAARRMDTLNDLLAASDLISLHCGLTNETMHILNADCLQHIKPGAFIVNTGSCQLIDDCALKQLLIDGTIAGCALDGAEGPQWMEAWVREMPNVLILPRSADYSEDYRLVGRWSACLQAMLLMFGRAGCWTVPCWRVAEISEAKNEDDYLGPQAKDSQSQIFDTEIDESHITLESEKKRAISHHKEPQASGKSVNIGSRSEGRRSRSGKKGKKRPAHRRPQQKPDDLSAVESDSNYSSRRDDDTAMSSRDQVVSSSSRFASPEDPKYKHKSLSESPMEITSEKKVPVLLSRKYPDKLKDGFIVALRARDNSGYHVARQRVVGGGGWILDVVSNATNRDPAAQFLVTFKNKXDPLINRKMEFVFASHSFDVWESWMLDGSLLEVMVVEVVLAGGGGSMLVRLEVKVSTCSRGWPHLEEARGVIIGAERGKHGKRSTVTDSPSEDVRSHEMRKISLFHGWKEIGD

SEQ ID NO: 227137 - protein, 195 aa, Zea mays
  unsure (1)..(195): unsure at all Xaa locations
  Clone ID: MRT4577_138739C.1.pep
GNKRPSIVFPSAARXRMDTLNDLLAASDLISLHCGLTNETMHILNADCLQHIKPGAFIVNTGSCQLIDDCALKQLLIDGTIAGCALDGAEGPQWMEAWVREMPNVLILPRSADYSEEVWMEIREKAITMLQSFFFDGVLPSSAISDEDEEISEAKNEDDYLGPQAKDSQSQIFDTEIDESHITLESEKKRAISHH

SEQ ID NO: 227138 - protein, 104 aa, Zea mays
  Clone ID: MRT4577_13873C.1.pep
CARPPRRPYQWREQKTGPLRPARRRPGCGRVVLPGPSAMSPRCRWVKTTVPRRRAPPSLRRAAGRSPPQSAPGSRRSRALAPRRAIPHRRRCPEVAPEGKAKAW

SEQ ID NO: 227139 - protein, 78 aa, Zea mays
  Clone ID: MRT4577_138740C.1.pep
WCPDPAAASCGTDSDGPLSLSWARGTVRPPPAFPRPGPYWLLCPATTTTDESIGDLSSLLLLVTTDELSVSGYSGWTG

SEQ ID NO: 227140 - protein, 162 aa, Zea mays
  unsure (1)..(162): unsure at all Xaa locations
  Clone ID: MRT4577_138741C.1.pep
MEEHGVTQTEHMATIEAHAVAQQVQQVHVATYTEHSMLSADEDSPSSPEDTSYDDSDILNSTAADEVTAHLAAAGPVGMAAAAAVATGKKRKRPHVFESNPSIRKRQQTRLLRKLRATLDEYTTRVGQQAIVLCISPSXPNPVFKVFGAAPLEKCVRKYKSM

SEQ ID NO: 227141 - protein, 242 aa, Zea mays
  unsure (1)..(242): unsure at all Xaa locations
  Clone ID: MRT4577_138742C.1.pep
MALVPSGSGSAPVIAEVEMNGGADQSATTVRATVVQASTVFYDTPATLDKAERLIAEAAGYGSQLVVFPEAFVGGYPRGSTFGFGISISITNPKDKGKGEFQKYYAAAIDVPGPEVTLLAAMAGKYKVFLVMGVIEREGYTLYCSVLFFDPLGRYLGKHRKLMPTALERIIWGFGDGSTIPXVYDTPLGKIGALICWENKMPLLRTALYGKGIXIYCAPTADSGPVWVASLYHISLEGGSFF

SEQ ID NO: 227142 - protein, 67 aa, Zea mays
  Clone ID: MRT4577_138743C.1.pep
MCSRERSQTDKMVDGMDFEELCSDFECISSPYVESIMRQVARDIFELREDNRAFSCYAVPVKYEAPS

SEQ ID NO: 227143 - protein, 233 aa, Zea mays
  Clone ID: MRT4577_138744C.1.pep
RRRSRSGRREKWPAHRRPQQKPDDLSAVESDSNYSSRRDDDTAMSSRDQVVSSSSRFASPEDPKYKHKSLAESPMEITSEKKVPVLLSRKYPDKLKDGFIVALRARDNSGYHVARQRVVGGGGWILDVVSNATNRDPAAQFLVTFKNKDTMGLRSFVAGGKLLQINRKMEFVFASHSFDVWESWMLDGSLLEGSKLINCRNPSAVLDICIEILAAPSEEDGVTRWLDSPRWGL

SEQ ID NO: 227144 - protein, 87 aa, Zea mays
  Clone ID: MRT4577_138745C.1.pep
MLRRQRRQSWGRSRAITEILVSSRERSQTDKMVDGMDFEELCSDFECISSPYVESIMRQVARDIFELREDNRAFSCYAVPVKYEAPS

SEQ ID NO: 227145 - protein, 161 aa, Zea mays
  Clone ID: MRT4577_138746C.1.pep
MAPKLVVLATAYVMVLLLIMGHLTMAEECSQCSQKCVDDCRSGECEICKSNPEFCDTCNAMDWKVCATECYSRDCIVGRSIGQPTQCPLLTTTCSACNKTCASLCDDTDQSLCSSDCLPPTGSALSTKCESCKASQIASCTATCQANICTYILSCPPVAPP

SEQ ID NO: 227146 - protein, 46 aa, Zea mays
  Clone ID: MRT4577_138747C.1.pep
AHLIFNHGVVLCRWCPSVELCLVFCCHGKIFIREICVSVTMVVSVS

SEQ ID NO: 227147 - protein, 142 aa, Zea mays
  unsure (1)..(142): unsure at all Xaa locations
  Clone ID: MRT4577_138748C.1.pep
SMPSPRPARPSSSFSPRARTPSSSPLLHHSMSHPHLSSRTHELAPARCPWSRQGCFVLCLLHCXHFRHRALASXNSRFSRSPELPPCWCPXCLVLTVDIXLHASASRSHLXLVPLALVAVAVKTXQHRWVSMVCWSAWMVVW

SEQ ID NO: 227148 - protein, 78 aa, Zea mays
  Clone ID: MRT4577_138749C.1.pep
RMPSLWNLKQWVETYNGKHAAHCTRLLATLLRLNFVTGVAVETMDIYTHMYMRTVTYGHRHRTWSCCCRQAMEPCTDS

SEQ ID NO: 227149 - protein, 55 aa, Zea mays
  Clone ID: MRT4577_13874C.1.pep
ILKRATTNDGLFVMNTVGFVKASWLNGINCCTCKRVLAYRRYVLVKWKQTCGCEK

SEQ ID NO: 227150 - protein, 58 aa, Zea mays
  unsure (1)..(58): unsure at all Xaa locations
  Clone ID: MRT4577_138750C.1.pep
RPRXLPLXLPLFHXXSLCVSCDXFVHPRVQQTHASNIMDCRSMDAVTPVRLYSKLILM

SEQ ID NO: 227151 - protein, 80 aa, Zea mays
  unsure (1)..(80): unsure at all Xaa locations
  Clone ID: MRT4577_138751C.1.pep
VLPCGCGLGTLNPLKLLDLDDNNTPAHXIAASAGAAQKAPAKNSSMAPASKASHPAATTKLPTKPATPSHTDHNARRPCL

SEQ ID NO: 227152 - protein, 94 aa, Zea mays
  Clone ID: MRT4577_138752C.1.pep
LLLAVRRRLPVVVGPFGGKHGGRTSLGALARAPDTDKTIHAHEQTPRDGREGQMVSDGSESPRTQCRAGGWSLKATVGSARAASDGGGRAAGAG

SEQ ID NO: 227153 - protein, 154 aa, Zea mays
  Clone ID: MRT4577_138753C.1.pep
PAGTHCQFIRSSTSATTASPRPASHSHTHSPLSCLLRRFCVDPEDILLLKDTLKPSTAGLPCPIGDEADGSQRAASPLAAPTPRPIRLGGGPLADIPWGQRAGARVGLASWRSVDGGVADGCFNNGSTDVRRQLPFMILRPKFKNQDTYYHLCA

SEQ ID NO: 227154 - protein, 87 aa, Zea mays
  Clone ID: MRT4577_138754C.1.pep
FETQGPGNKWVTQAPETQSITPKFLTADLGPWPRQKNKKVCETHLPELVFWGGGGKTVRGTPVAKIGTGPHVPVLKAPTGTRKIFGP

SEQ ID NO: 227155 - protein, 211 aa, Zea mays
  Clone ID: MRT4577_138755C.1.pep
ISDLVHLSLYMLFFIAIFLNYGVPLHLIRELYETFRNFRIRISDYVRYRKVTSNMNERFPDATPDELDASDVTCIICREEMTTAKKLLCGHLFHVHCLRSWLQRQHTCPTCRAPIIPPDNGRAASAQQHGAQPGVQPGTGTPSSGGAPTENVNMRQLKLEAAASAASLYGRSFAYPPVNTLNRHSGPLHATPSTSQSGEASTSTGHPLEPQ

SEQ ID NO: 227156 - protein, 64 aa, Zea mays
  Clone ID: MRT4577_138756C.1.pep
RVPQWQIGVVKLSMSFPICFPCLLWFFSHHFRPWLFLQFFTSLFVVVGPAVIIFKSQIKKRSFL

SEQ ID NO: 227157 - protein, 99 aa, Zea mays
  unsure (1)..(99): unsure at all Xaa locations
  Clone ID: MRT4577_138757C.1.pep
RCRFFLFPQHPTIGWGLNTMGGANXPXLPPVAVLPLGTKNNLSRCLKSXIDMNXQNLSKILNDLKTSKLVQYYRFSLEVIPLTNLIKYITHFPLLKFIN

SEQ ID NO: 227158 - protein, 89 aa, Zea mays
  Clone ID: MRT4577_138758C.1.pep
LCSIFFSRQNTNRLRFSELFDVLNLSGSSTYFSVMDPYTDQTVDESKFSLSVALRSPKSHYFMCACLHDCLNLAYCNSFSQTFGPIFAF

SEQ ID NO: 227159 - protein, 109 aa, Zea mays
  Clone ID: MRT4577_138759C.1.pep
PQFKGSLDKMYLGPMVPPLRQCLLHRSLPLSRQQIGRDTGQYQCQHQRGGCTGRSILLPLQASLSGSIFHVVFIRCGQIGRSPFSKPASFCRCAKRVLNWERRKKRHRF

SEQ ID NO: 227160 - protein, 55 aa, Zea mays
  Clone ID: MRT4577_13875C.1.pep
LLHESLGALGNHKPCAPSFCICEFSPCSARLVEPGVLCRTSIESTFRFQLSFLAI

SEQ ID NO: 227161 - protein, 75 aa, Zea mays
  Clone ID: MRT4577_138760C.1.pep
GGPKGFLGFFPRCQRWKGVFPGSQKKFGRPSFFLGRTIHGSLVFCFDSPFLEIIYWAQGCFFLGWEKKKKKKTPT

SEQ ID NO: 227162 - protein, 132 aa, Zea mays
  Clone ID: MRT4577_138764C.1.pep
TCSLPCVQAHKRRTACTGKRPRTDPVPLARFDDNQLISDYNLLEEVKQAHDSAHRLIGGFGRNYGGRGSGGAQLPRWLFYLSKAAHRRGVKLCFLPRGMARREQNRSQHNYRKDCIFWTLEWKFNSTDVVLT

SEQ ID NO: 227163 - protein, 230 aa, Zea mays
  unsure (1)..(230): unsure at all Xaa locations
  Clone ID: MRT4577_138765C.1.pep
EQVEERCPRTWCPAASGHRQRGRRCPRRLPPPPPLHWPXPPDTKRVGRRDFVLRSSEIATLAAIFHFSGSKPSYLGVQKSPPSLALCPATNNCVSTSEEISDSNHYAPPWNYNPKDGRSGKPITKEEAMKELIEVHHLVFGWNQVTKTKPDNFTPRIVEKKDDYIRVEYESPIFGFVDDVEFWFPPGNKTMVQYRSASRSGFIDFNANKKRVKELRLALEKKGWASESNF

SEQ ID NO: 227164 - protein, 813 aa, Zea mays
  unsure (1)..(813): unsure at all Xaa locations
  Clone ID: MRT4577_138766C.1.pep
MASQGEPSASASDPKEKKDFSTAILERKKSPNRLVVDEATNDDNSVVALHPDTMERLQLFRGDTVLLKGKKRKDTICIVLADETCEEPKVRMNKVVRQNLRVRLGDVVSVHQCQDVKYGKRVHILPIDDTVEGITGNLFDAFLKPYFLEAYRPVRKGDLFLVRGGMRSVEFKVIETDPAEYCIVAPDTEIFCDGEPIKREDEERLDEVGYDDVGXGVRKQMAQIRELVELPLRHPQLFKSIGVXKPPKGILLYGPPGSGKTLIARAVANETGAFFLLINGPEIMSKLAGESESNLRKAFEEAEKNAPSIIFIDEIDSIAPKREKTNGEVERRIVSQLLTLMDGLKSRSHVIVMGATNRPNSIDPALRRFGRFDREIDIGVPDEVGRLEVLRIHTKNMKLAEDVNLEXLSKIPGFSGADIPAIXTVGANLQCIREKMDIIDLEDETIDAEILNSMAVTNDHFKTALGTSNPSALRETVVEVPNVSWEDIGGLENVKRELQETVQYPVEHPEKFEKFGMSPSKGVLFYGPPGCGKTLLAKAIANECQANFISVKGPELLTMWFGESEANVREIFDKARQSAPCVLFFDELDSIATQRGSSVGDAGGAADRVLNQLLTEMDGMNAKKTVFIIGATNRPDIIDPALLRPGRLDQLIYIPLPDEQSRLQIFKACLRKSPVAKDVDLNALAKYTQGFSGADITEICQRACKYAIRENIEKDIERERRRKDNPEAMEEDEVDEIAEIRAPHFEESMKYARRSVSDADIRKYQAFAQTLQQSRGFGSEFRFSDQPATAGAAAAADPFASAGAAADDDDLYS

SEQ ID NO: 227165 - protein, 316 aa, Zea mays
  Clone ID: MRT4577_138767C.1.pep
MGDKVNPWCHWPNPQWKFNTESSAGNLHPPDVGLANADSVALPAYHLNAAPMPFFAASSIAERPLPMGPRHVTTLAPSFESPAPCPSRKRPSVLYQKETHGPTAAPLRRSKGPLDPVPELQGSNETNVTDVGAEETEGVHEDTDEIDALLDSSDSDEGPHELDRARRQPAAENETSSVESVASAAGSAPPAKKRRLSSCTDRSVVDTASSARPDRSVEQKPLASDCDAQSCCVGEVVESGRLRFSPGEGEGEVEAAEGDSPDDQRRRRERIQETVAALRNIVPGGTAKDATAVLDEAICYLQYLKLKVKTLGAASL

SEQ ID NO: 227166 - protein, 69 aa, Zea mays
  Clone ID: MRT4577_138768C.1.pep
PRCLALPCFDCHPGFLKDSFPPATFFQGFFFFLKLLFGLPCSVHILPLFFFPFRPPIPLSFPLSFFCPF

SEQ ID NO: 227167 - protein, 90 aa, Zea mays
  unsure (1)..(90): unsure at all Xaa locations
  Clone ID: MRT4577_138769C.1.pep
LRCLCLLAFPLFRFCHHRSETSTFSSVSESLLSRYTRSQSHLNKKNMAIMVMVGLGLLDFLVAGVSXIIGLGFIAFIASILCATASSTTP

SEQ ID NO: 227168 - protein, 119 aa, Zea mays
  unsure (1)..(119): unsure at all Xaa locations
  Clone ID: MRT4577_13876C.1.pep
SFTREWRLLAHLPVPTIIDYENGRGVAATNSDSLCMATPRADPLNWVKAGDELMDRHLXEVKRMVAEYRQPLVNIDGASLMIAQEAGDXTVAGEGSFELDEGVRNRAKVISNWYMTSMM

SEQ ID NO: 227169 - protein, 676 aa, Zea mays
  unsure (1)..(676): unsure at all Xaa locations
  Clone ID: MRT4577_138770C.1.pep
MATGDNDKPPSLDADVDMADLASLDATAATSAAAGGAPSTRFRPKAKGKPRPKAEPPRPVPVAVPKPEPEPEPEAVPMPEPDANPAPPPEDTMEVDGAVDAPGHGEGAVEEDFVLREIDVYFNPKPFEDDTQLYIMQYPLRPCWRPYELHEICEEVRVKPLSSEVEVDLSINTQSENYDQEAPLRLTKQTLSSSKAVDVTNYAVGVLNGNLVHLNHIDAVVQMRPSMSHIISGRAHTRQASQPREMNGGASTSMDSSHKGNERPEDSKDRAEDSEPWISLIYQPAGSNTATKYHDKMIANEGVPIDFTMSSSCYLTSLCPGASTSRKRINKFQAIREMLLLPLEERLKKWFTEVSGVNRFDALKDLAPTCSEVEILKMLPECAYLVRGLWVCKSSLLFDGVYSGPMDRILLEFTKXSRPIKYSGTIYQSDXNRAMRDWILSPLCKRRQILKDHKFISADLSFIKRYPHIVNEQECAWSARETTLRESLEMSTTLAKKTMNSTRPNVASKGPHSNMSKGRDGPSQGSDDLARSVLGTVFTANKVRSMQAVVRDLRQLAAKYASNRKDGSKLQALCNAAKNCASLPHDELNRKIHLVAVPVHSVFVAKHEDKRALRNIFILLFRHKEPNGTLTKQEVVAAAAKHIKREITDREYHQVVTEICISTEDGHLLLKNGDEP

SEQ ID NO: 227170 - protein, 57 aa, Zea mays
  Clone ID: MRT4577_138771C.1.pep
RTDIEDEYRGRCWRQPNTEPLDRRSMVNETSTPTLDLGRMPENRRFYFYLGNRCTLI

SEQ ID NO: 227171 - protein, 184 aa, Zea mays
  unsure (1)..(184): unsure at all Xaa locations
  Clone ID: MRT4577_138772C.1.pep
CTAGCWFERLGVEVHIDLAQHEVLLHRPLPCPGASTAPSTSIVSSGGGAGLASGSSTGTASGSGSGLGTTTGTGLGGSAFGLGFPMALGRNRVEGAPYKGQGTKGERVPGRPSGTRASREGDPSRGARGEQQGDGAAACRGSGAMXRGKHQGTARGRDGRADEEAPWRGPSRGKGGPTASCRKA

SEQ ID NO: 227172 - protein, 95 aa, Zea mays
  Clone ID: MRT4577_138773C.1.pep
MSQHLPASFGDASRISSTDIVGAPSVQETNDMQVDSHVAEDSEPENDDLYLSNCRISLVGFEEKELLRLVTLIRNGGGSRHILLSEKLTHIVIGT

SEQ ID NO: 227173 - protein, 89 aa, Zea mays
  unsure (1)..(89): unsure at all Xaa locations
  Clone ID: MRT4577_138774C.1.pep
WGPPPGGGKPNPKTRPMLKPGGKKGLGPRAKFRGPGGPPFFKGAPPGGGPHLLSPLGGGNGPPGEXGQSGPPGEIVFRPHSPPIYEPEK

SEQ ID NO: 227174 - protein, 74 aa, Zea mays
  Clone ID: MRT4577_138775C.1.pep
EGPVSVSMIALALYFEAMNEVLVRSRYCVECVALLSDAVWQEHQGWDPVEVVGPALDTLLGKPVVTVFQAIWEV

SEQ ID NO: 227175 - protein, 107 aa, Zea mays
  Clone ID: MRT4577_138776C.1.pep
RELRKRNFLKMNAKEIIHGKNYKKTIFYHPPLKKESPEFKPPTGHTLLHKKRSQTKKNTWLRLPTMFKVHASATHKNKTGQKNAKPLMATKDRHTSIDLKIPVEVLY

SEQ ID NO: 227176 - protein, 71 aa, Zea mays
  Clone ID: MRT4577_138777C.1.pep
RCSNSKNAAHGIWRIRSIIHTTQGLGQTMEEAEQKSMSATTEGIAQRITHILLDEWTMADAILRLGTATKI

SEQ ID NO: 227177 - protein, 308 aa, Zea mays
  unsure (1)..(308): unsure at all Xaa locations
  Clone ID: MRT4577_138778C.1.pep
MRPPARGGRGGRGGRFDGGGRGGGGGGRGFGGGRGGRGDRGGRGGRTPRGGRGGGGRGGRGGGMKGGSKAVVVAHKXPGSFISKSKEEALRTKNMVPGESVYGEKRVSVQNEDGTKVEYRVWNPFRSKLAAAVLGGVDNIWIAPGTRVLYLGAASGTTVSHVSDIVGPDGLVYAVEFSHRSGRDLVNMAKKRTNVIPIIEDARHPARYRMLVGMVDVIFSDVAQPDQARILALNASYFLKNGGHFVISIKANCIDSTLPAEAVFAAEVEKLKADQFKPAEQVTLEPYERDHACVVGGYRVPKKQKATS

SEQ ID NO: 227178 - protein, 129 aa, Zea mays
  Clone ID: MRT4577_138779C.1.pep
QEAVSNPFLVKDHRGEVYKKHHPPALADDVWRLEKIGKDGVFHKKLADFGIHTVQDFLRNLVMDQYGLRSLLGSGMSNKMWESTVEHARECVLDDRLYSYCSGHGIVLLFNCVYEVVGVVVGSHCFTLA

SEQ ID NO: 227179 - protein, 57 aa, Zea mays
  unsure (1)..(57): unsure at all Xaa locations
  Clone ID: MRT4577_13877C.1.pep
QQRDTEILYLLALLTHXLSATNAFIIPQFSLSPIAIISQFLPPFTFMGYQHLSFHAN

SEQ ID NO: 227180 - protein, 65 aa, Zea mays
  unsure (1)..(65): unsure at all Xaa locations
  Clone ID: MRT4577_138780C.1.pep
MDPKGKGMVVNDKEKESLFNEPRDDKPTDSGSSHKNRDGKKKKRIKKIIYYDSDASSXSPRDDDD

SEQ ID NO: 227181 - protein, 150 aa, Zea mays
  Clone ID: MRT4577_138781C.1.pep
PSAHSRRFHMRPGSPFIVPLIPHGRSLPLCSTPPTQVLEISPYTKHLTPAPLPLHRSGRHLGSISPTPSHCPLGAFSNPLLLLANCCSASCPSTPRDPVARATWPGCQNVMPPVLELALDAAVIFCRRVTISSIRAPIRVVLSSSHFLQQ

SEQ ID NO: 227182 - protein, 116 aa, Zea mays
  unsure (1)..(116): unsure at all Xaa locations
  Clone ID: MRT4577_138782C.1.pep
PGPPKKGXGPLYFPPRGPGGPWAPPGKGGPGPPQKRERGRAQPGGAPPRKGFPPKNXERERPXTPKKAPPGKGPLFQGQTPPPPQKGPGVSPPRIGKAPSEGQPLLPGSQTHGPLF

SEQ ID NO: 227183 - protein, 94 aa, Zea mays
  Clone ID: MRT4577_138783C.1.pep
FNELDEVAQKAAQALKRLHGTSYKVGPICSVIYQASGGSIDWAYDLGIKYSFAFELRDTGFYGFLLPAKQILPTAEETWLGLKTIMEHVRDLPY

SEQ ID NO: 227184 - protein, 159 aa, Zea mays
  unsure (1)..(159): unsure at all Xaa locations
  Clone ID: MRT4577_138784C.1.pep
APFGHESPSPHVSSPYISNFGXGFSSYYSLGGSTQHGLYLRRCEKSGPTLFPMVPRWSHHQFQSKAKVAPGGLFAQSRQSYLGRCGDSNPSLFYMGSAQLFPGFLGKFPLQNAAFPVHTMRLAGSHRWGNMYSIAFMILFLSVSGIWFFFCPFYCGPLT

SEQ ID NO: 227185 - protein, 77 aa, Zea mays
  unsure (1)..(77): unsure at all Xaa locations
  Clone ID: MRT4577_138785C.1.pep
PPTTILIXNLIGVGADIYYAINSGYQXSRGPILGMLFFVFXAIDYLNPLLKDLMGRXNRTLTIMHVWTILLASIFSL

SEQ ID NO: 227186 - protein, 108 aa, Zea mays
  Clone ID: MRT4577_138786C.1.pep
KKLRYITLLMESCNAIAFFSCAGCTYSNCGTSFRHLYLPSTLVAVNQVPHNCSPLGGDRSSNDVPARARHLSRGLCPGSNDCGSADRVFTGSSCPSGMPPVGHDHLST

SEQ ID NO: 227187 - protein, 49 aa, Zea mays
  Clone ID: MRT4577_138787C.1.pep
SINKVCTGEAFKINLVWCNGQKCSSCNKWFRCLWSFSHVLKVNVGRPQS

SEQ ID NO: 227188 - protein, 143 aa, Zea mays
  Clone ID: MRT4577_138788C.1.pep
SPTFSLLVADLFTASRRSCCLCLLSPLVLLLFFLAEAAGTVAEKSQLERVATWTKYLSTMSSSTCGSETESSAMRSHGERLSSQGSAEEDEGLEKPSPPQYSGAEHGARCGGGGGGGGSGLLNGGAESTGDAADSEYAEPRRR

SEQ ID NO: 227189 - protein, 131 aa, Zea mays
  unsure (1)..(131): unsure at all Xaa locations
  Clone ID: MRT4577_138789C.1.pep
METLTDPXPCPVVAEDCEQLHXSFQRWGTNEKMAISILAQRNAAQXRAMRRGYAXGYGKEMISAFADKIDPKFXRLVIWWTLDPVKTDLRLVHEEAKKRHPRSPSSISRVLRLLRRRSWIGAVWRLRVSRG

SEQ ID NO: 227190 - protein, 44 aa, Zea mays
  Clone ID: MRT4577_13878C.1.pep
LLMIVHAVVVPHQNSGLAREKIDHHCSIAALADQYRSVSNHAGE

SEQ ID NO: 227191 - protein, 119 aa, Zea mays
  unsure (1)..(119): unsure at all Xaa locations
  Clone ID: MRT4577_138790C.1.pep
SAHHNPWFNGSFSPPVANGMLGLNTXSAGILWLFPLLSFQVHXFPHATAYWPASWFPYGYCHSFHGLHGHCFPRHAPQGQHVYTYLNVLLLSLCVLVISSLISFYIMYFCLCRFSLMLC

SEQ ID NO: 227192 - protein, 82 aa, Zea mays
  Clone ID: MRT4577_138791C.1.pep
SQISAASTSGATCSRATSQPDHQPATCIYTLGRDWTNVVHTKGIRCRLHQIHHQPDHDDYEHDDVDRETDRGVTFDITSVQL

SEQ ID NO: 227193 - protein, 78 aa, Zea mays
  Clone ID: MRT4577_138792C.1.pep
TKVTKRIQATKFNSLGRHLTTASLAKPYNDPTEKPRRTPTLSQLEHLPLCPNRATCTTAAQADLPKRRALYRRIKPRP

SEQ ID NO: 227194 - protein, 71 aa, Zea mays
  Clone ID: MRT4577_138793C.1.pep
KRNKLIFLKIFLGFYKPFLTKKALKIKPYRKQKLTAQLFSGFFPNSQDPFLGNRTQRLTHTNPRLRNFYGP

SEQ ID NO: 227195 - protein, 83 aa, Zea mays
  Clone ID: MRT4577_138794C.1.pep
SLPLNKKRSRVATFGAGFLPTVPLRSRICSSRWQGHVAQKLWTKKSACRWTCPKARSFVQVLVSCHLFTGRGNFLALNQLFVK

SEQ ID NO: 227196 - protein, 203 aa, Zea mays
  unsure (1)..(203): unsure at all Xaa locations
  Clone ID: MRT4577_138795C.1.pep
MLFMVFINLIFNNQHYEFGIILMGRRDYRGGDFRDRFDRRRSPHRRHSPDGDSRGHRSLRDRRPNSQERESSYSRSPSRKSEMRHEKKPDDGETNSSRSLSVSDNNDDRKKETLLSGDDKEDHEIQLKQIRQDMELLRDDKSLLEIILDEKNAEVRKISSRLNDLDLQLRKEKEECHRMTSKLKXFLKXHARXLKAQKIEKSK

SEQ ID NO: 227197 - protein, 72 aa, Zea mays
  unsure (1)..(72): unsure at all Xaa locations
  Clone ID: MRT4577_138796C.1.pep
QIHEIKDFXLLTARXRKDARSVKIKRSKGVVGFMVRCSKFLFTLCVFDAEKANTLKQSLPPGLCVQEVLLGS

SEQ ID NO: 227198 - protein, 131 aa, Zea mays
  unsure (1)..(131): unsure at all Xaa locations
  Clone ID: MRT4577_138797C.1.pep
GPLQYRPXSRVIFNNQHYEFGIILRVCQWFHTILWYLPMALIFGSTLLWLMILSWRPFYLLCIELSCSSKAVGEEIIEVVTLEIGLIGGAHLIGGIPLMEIPGAIAPFVTDDQIPKKGNLAIHGLPVGRVK

SEQ ID NO: 227199 - protein, 320 aa, Zea mays
  Clone ID: MRT4577_138798C.1.pep
MRHEKKPDDGETNSSRSLSVSDNNDDRKKETLLSGDDKEDHEIQLKRIRQDMELLRDDKSLLEIILDEKNAEVRKISSRLNDLDLQLRKEKEECHRMTSKIKKFLKAHARFLKAQEELKRSQARFERLGDLLASDILKRGANEEVSSINVDEDPNVPYERSPNAAIAKKRSIPYSTSEEAKAVKKRRERDSDTTRPDKYRFEGTIAGFEKLSKGTEPTKSLYLKKKLWEDEKDKIGNFVSSANTDKVKESPVKHVLPSTGMAAHALDDLFEAVELEDRRDTSIENDADDETRSPVMPPQPPPVVNTYEQYEADDEEVDVE

SEQ ID NO: 227200 - protein, 400 aa, Zea mays
  unsure (1)..(400): unsure at all Xaa locations
  Clone ID: MRT4577_138799C.1.pep
PPCRYGRCTSSPSRQELRARGPQRPLKEPAERHVAASADRRQLAPRRAARCSHRPCSAKKVMVATVRCDEIANEKFGCITSDTEWLDVESAVQSGPVPGFGKKLGNIVDVHLQEYDKEAVYFDEAVREXKRQHLESRILNLVQPAFQKMLTHLRVKALEKFKTGLNSSLESGKGFAVSARDNTECSLKEFEQGCADAIIKQANWDCSKMLEKVRRDIEDHALSIRESKLSEMTRHAKDKLRKALAEPVESLFDAADQTTWTSIRNIYKRETDAILPEFLNNLCGFEMEYAPAEEMVSKLKDYARSVVESKAKEESSKVLIHMKERFTTEFSHDKDSIPRVWTGKEDVRAIAKEARSAVLKLLSVMAAIRWDDEPDRIESILTSTLLEGSVVSKIASAASA

SEQ ID NO: 227201 - protein, 73 aa, Zea mays
  unsure (1)..(73): unsure at all Xaa locations
  Clone ID: MRT4577_13879C.1.pep
TIEPCAAKLTXLHSXRERLGATFSXHPNELXALFSRYVHQGMGXLQRHQLLXEFXXXXXSDXXXXXPXKXXVW

SEQ ID NO: 227202 - protein, 167 aa, Zea mays
  unsure (1)..(167): unsure at all Xaa locations
  Clone ID: MRT4577_1387C.1.pep
PMVIXSTSRGERAYDIFSRLLEERIACIHVPITDDTASXIMSSQLXFLESXNPGKPDHLYMQLPGVVTTLXEALHLTXMENIRSRDTTLWICIGVYMVSLLLNSWVISLDVRRLSNTRVMSHQASRXSRDQSRLTSPSAXEILWADDRLDIIYVKHTRLSSDSSSTV

SEQ ID NO: 227203 - protein, 137 aa, Zea mays
  unsure (1)..(137): unsure at all Xaa locations
  Clone ID: MRT4577_138800C.1.pep
MSEEKHRHHLFHHRKQREEEGASSVRLTRREGGATDRATMGEARELGADRAASXACTRKHKPRKDPEDEHGRRVXEEEVAAVAAVGSAGLRASDGRPRRKEGTPKEATPDELDRVREAGLERCERATMRAAGWACAM

SEQ ID NO: 227204 - protein, 59 aa, Zea mays
  unsure (1)..(59): unsure at all Xaa locations
  Clone ID: MRT4577_138801C.1.pep
PVFVIYKTPSVVIYNLGLSITVENSTNYLDGRGGALXXGEAFAGKESLCLGLRVPVKPL

SEQ ID NO: 227205 - protein, 71 aa, Zea mays
  Clone ID: MRT4577_138803C.1.pep
CLHVILLRNTHSSTVEKFGCSLARNLYCFDPSSSSEELTTAWPELDFSFSTHTFIESIVPLRKDYYFKQIQ

SEQ ID NO: 227206 - protein, 107 aa, Zea mays
  Clone ID: MRT4577_138804C.1.pep
LGTSRPAGFFVFVPWTGTVSWDIGLWGLWKMSGENKTHLVEIEATTAESGTSLRAPTIEAGLVPACKDTCYGDLRLQLWEKKYDGSKGEVCLHHHEVVGTCFLEFSY

SEQ ID NO: 227207 - protein, 116 aa, Zea mays
  Clone ID: MRT4577_138805C.1.pep
LGREGQRGERIVLVPGSKLARKWPSRKQASTSRFLAANAGHGRRLQRPRPGAVPRRSQISAGHGVRGHLSATVSERCRGGTRGCVDLQQFLSIVHMRATDALSMIRLRETVGPTTT

SEQ ID NO: 227208 - protein, 36 aa, Zea mays
  Clone ID: MRT4577_138806C.1.pep
NKVNTESFFGIKLSCVCNQISCSSSTLFRFHMRLRP

SEQ ID NO: 227209 - protein, 154 aa, Zea mays
  Clone ID: MRT4577_138807C.1.pep
MAFAVSDELLGTFVPIAVYWLYSGLYIVMDRMEIDDYRLHPKGEEEVKNVVSKWTVVKGVLVQQGFQIAVSLLLFTIIGDDSGTVRKQPPALVIALQFIIAMFVMDTWQYFMHRYMHINKFLYKHIHSKHHTLVVPYAFGALYNHPLEGLILDT

SEQ ID NO: 227210 - protein, 82 aa, Zea mays
  Clone ID: MRT4577_138808C.1.pep
MATAATASAGLRSRITRLPTAVRFQRQRGLTTTALLKTADLQPKEQGKPETLDYRVFLVDGGGRKVSPWHDVPLRAGDGVFH

SEQ ID NO: 227211 - protein, 58 aa, Zea mays
  Clone ID: MRT4577_138809C.1.pep
LNLGGFLPTQRNLKTGGGILFPMKGKRQGALLPGSGKLKGDSDTQGGGGFFKRDQKGG

SEQ ID NO: 227212 - protein, 53 aa, Zea mays
  Clone ID: MRT4577_13880C.1.pep
NRPFVVSLHHRLLSSWVCTAVFHKRKERSPDSKRLEPMIMLALSSSRPFDLPN

SEQ ID NO: 227213 - protein, 310 aa, Zea mays
  Clone ID: MRT4577_138810C.1.pep
VIRQSHYYSARRRCVHHHLLSQLLRVPPPSPAARVTTRADGDAGLRSRITRLPTAVRFQRQRGLTTTALLKTADLQPKEQGKPETLDYRVFLVDGGGRKVSPWHDVPLRAGDGVFHFVVEIPKESSAKMEVATDEAFTPIKQDTKKGNLRYYPYNINWNYGLLPQTWEDPTSANSEVEGAFGDNDPVDVVEIGERRANVGDVLKVKPLAALAMIDEGELDWKIVAISLDDPKASLVNDVDDVEKHFPGTLTAIRDWFRDYKIPDGKPANKFGLGNKPASKEYALKVIQETNESWEKLVKRNIPAGELSLA

SEQ ID NO: 227214 - protein, 288 aa, Zea mays
  Clone ID: MRT4577_138811C.1.pep
MATAATASATAATRFTLLAGAGLRSRISRLPTAVRFQRQRGLTTTALLKTADLQPKEQGKPETLDYRVFLVDGGGRKVSPWHDVPLRAGDGVFHFVVEIPKESSAKMEVATDEAFTPIKQDTKKGNLRYYPYNINWNYGLLPQTWEDPTSANSEVEGAFGDNDPVDVVEIGERRANVGDVLKVKPLAALAMIDEGELDWKIVAISLDDPKASLVNDVDDVEKHFPGTLTAIRDWFRDYKIPDGKPANKFGLGNKPASKEYALKVIQETNESWEKLVKRNIPAGELSLA

SEQ ID NO: 227215 - protein, 120 aa, Zea mays
  Clone ID: MRT4577_138812C.1.pep
FPPKRGTQRLKVKGFSNFAPPWAKTKFFNPQKKKPFPPPCAPLKEKSPPLLSKPLREFLPFYTFPLKKKHHARVNQVMFKKQPSRVFHHKRKFSNLGKPPKTKTIFVKVPIKFKKKRAIW

SEQ ID NO: 227216 - protein, 288 aa, Zea mays
  Clone ID: MRT4577_138813C.1.pep
MATAATASATAATRFTLLAGAGLRSRISRLPTAVRFQRQRGLTTTALLKTADLQPKEQGKPETLDYRVFLVDGGGRKVSPWHDVPLRAGDGVFHFVVEIPKESSAKMEVATDEAFTPIKQDTKKGNLRYYPYNINWNYGLLPQTWEDPTSANSEVEGAFGDNDPVDVVEIGERRANVGDVLKVKPLAALAMIDEGELDWKIVAISLDDPKASLVNDVDDVEKHFPGTLTAIRDWFRDYKIPDGKPANRFGLGNKPASKEYALKVIQETNESWEKLVKRNIPAGELSLA

SEQ ID NO: 227217 - protein, 96 aa, Zea mays
  unsure (1)..(96): unsure at all Xaa locations
  Clone ID: MRT4577_138814C.1.pep
RYIMYMPLYNTGFDRHQLGSKRASHVVASQCVAGSQGSLVMFPKHSWRKLVWRQMYYVYLVLTKLYKASRSAQMSFLDRSACNXESAHRSKQECFV

SEQ ID NO: 227218 - protein, 65 aa, Zea mays
  unsure (1)..(65): unsure at all Xaa locations
  Clone ID: MRT4577_138815C.1.pep
MGKTRRILALGLLLSLLCAXAAGPAGAKXXGCQTNFCCSKFGYCGTTDDYCGDGCQTGPCRSGGG

SEQ ID NO: 227219 - protein, 58 aa, Zea mays
  Clone ID: MRT4577_138816C.1.pep
SLILTPSIGCGRRRGGTSGRSCTRKPISWCCSRRGRKEKSSKITRPRRWWAGARKKRG

SEQ ID NO: 227220 - protein, 61 aa, Zea mays
  Clone ID: MRT4577_138817C.1.pep
GAQAVARGGLFFFFFFGRNRGMVLATDYNMIGIHTQPSDMTSIRRLINTSYIYSRHVWSLD

SEQ ID NO: 227221 - protein, 63 aa, Zea mays
  Clone ID: MRT4577_138818C.1.pep
AIIDAWYVVRREAYTSLSALSRDCRVNMTCRESDKHQNQAHLGRHCRFNVVMEYDPLCGLLVS

SEQ ID NO: 227222 - protein, 38 aa, Zea mays
  Clone ID: MRT4577_138819C.1.pep
TRTQIALASFVYSSSFLGTSWRGEVILGHGVAQSPAPA

SEQ ID NO: 227223 - protein, 116 aa, Zea mays
  Clone ID: MRT4577_13881C.1.pep
AGSDVFCGIAQLEFFYGEAPAAMRSICSAFSFLALSLGFYVNSLVVTLVAAVTKRPGWLATDLDTGHLDYYFWLWTIISVANLLLYMVLAARYTPKQVAAAVVEPMRPSNSGGSDE

SEQ ID NO: 227224 - protein, 50 aa, Zea mays
  Clone ID: MRT4577_138820C.1.pep
RAWHRPLTRAYRSIQRPDIAESFADVTLNLDKGELHSSRVRSSSMSAACV

SEQ ID NO: 227225 - protein, 154 aa, Zea mays
  Clone ID: MRT4577_138821C.1.pep
GLVDAWGAGAGGAGAAGGGGGGGGKRGKKGAGGEEGKQGGGERGEAPTPPPPAPPPPPGPGPPPPPPHGPTPPPGANPKPPQPPKTNQPEAGSGKPATPKERANSQETPYAHCPPNSPRDLPATRQKEPAKTKGEEVRGTGAPPRGDKKTRRAR

SEQ ID NO: 227226 - protein, 248 aa, Zea mays
  Clone ID: MRT4577_138822C.1.pep
MAPPRRPSMGRQKIEIRRIESDEARQVCFSKRRAGLFKKASELSILCGADVAAVVFSPAGKAFSFGHPSVESVVERFLASSSPSPAGAGAGHSASGGEDRAVSELNRQHGELRAQLDAVKARQERADEAIRKEREAGSPAMAWIDAELSGGAMGHDDLVAFWAALAGVQAAVAASADRLLRDALLVGRRGRQQQQPAQLAGGGGVAFDVGAFGGVGVQVQPPPGFAGVVDLQGFGGQAAAILGAGGPS

SEQ ID NO: 227227 - protein, 63 aa, Zea mays
  Clone ID: MRT4577_138823C.1.pep
NGLLINAIVGCSLLIDEYYTLPDMPSRHKFPCFTQLLSVQLVHQNSKWTCCCDLFMLGSIQVA

SEQ ID NO: 227228 - protein, 123 aa, Zea mays
  unsure (1)..(123): unsure at all Xaa locations
  Clone ID: MRT4577_138824C.1.pep
PICXLEHESPEERRLRDSLHRAICTTATSTAVANAATVPTEATPFTTDNASFPANHGPIHPSTEAPPQNSSVFGIVLREAPNLEPEVKQFIQEMERKGALVTVMRGKAIGGDPWPSNITTTMQ

SEQ ID NO: 227229 - protein, 73 aa, Zea mays
  Clone ID: MRT4577_138825C.1.pep
AAPPPWARSPPFGGKFSLCWYLAQPGISRIRGASVSASRLFSCNLPLARSNSLYACLSKFTLFGMACNFFLTQ

SEQ ID NO: 227230 - protein, 100 aa, Zea mays
  Clone ID: MRT4577_138826C.1.pep
PPPTTRSCLLLVPSSFPFTTGAVDKFWCHGSLVENLPDVRRVESKLGRPPILRLPLGKTGIHHGRPTTTAELRCAVGQGPYLTHQRRRAGSSGGATRRGV

SEQ ID NO: 227231 - protein, 82 aa, Zea mays
  Clone ID: MRT4577_138827C.1.pep
RTRGKKTIKNKKKKNKKKKGKKVKIKKEIRKKKIKKGAATLYIPSFLTFPYKVIFLQLAHLNSFHCPPFYNSGTGKPLPFPN

SEQ ID NO: 227232 - protein, 66 aa, Zea mays
  Clone ID: MRT4577_138828C.1.pep
MEVDRKRNNFWGASELERAVKELMGGCEKRRKAREKALGMRDSCRNPVEEGGSSCFSTWEAIRENM

SEQ ID NO: 227233 - protein, 72 aa, Zea mays
  unsure (1)..(72): unsure at all Xaa locations
  Clone ID: MRT4577_138829C.1.pep
WAGFVVRRAGVXEETGERPVWVRDFSGIEDADAHTANLFVLVLDADHSGQLASRTQAAIAWSLRSDGLGGGG

SEQ ID NO: 227234 - protein, 142 aa, Zea mays
  Clone ID: MRT4577_13882C.1.pep
AFVDMLASSGKVNVLRIVNAGDVVTKVPGVAPRLPNKKEQYQHVGAELRIDSKNSPCLRPDAGPACRHDLEAYLHLIDGFTGTGRPFRHDARRSVIRLLQLQRGNVKKEYVNRARELGVDPAAPADVSRSMAYGNCAVASPS

SEQ ID NO: 227235 - protein, 61 aa, Zea mays
  unsure (1)..(61): unsure at all Xaa locations
  Clone ID: MRT4577_138830C.1.pep
MLWAGAHQHGRNWRKRETSPGTQGPLPPVPRARLALMATHAIAPTLSWAIPRXQCSPQPGR

SEQ ID NO: 227236 - protein, 75 aa, Zea mays
  unsure (1)..(75): unsure at all Xaa locations
  Clone ID: MRT4577_138831C.1.pep
VPCSRTSTAAAAASSGTASWRYXXSNSTILYDHQSLLRTMTKYTDNIHAEGLLPVLHGRVQSHFALVFEHTHALP

SEQ ID NO: 227237 - protein, 91 aa, Zea mays
  unsure (1)..(91): unsure at all Xaa locations
  Clone ID: MRT4577_138832C.1.pep
HEPVPRPDELSQLTFTHGLRRRMLGISYPELTXMQMRAIFEAVRSLTKHXLRTPEYAIXQVFASITVHLVVTSQDLQHQLTLSHQDIEKVF

SEQ ID NO: 227238 - protein, 494 aa, Zea mays
  Clone ID: MRT4577_138833C.1.pep
MWSKKLHGVFTLLMLMVFNVSGAFVGITIGNDMSNIPPATDIVSILKAKKIQHVRLLDSDHQMLTALANTGIEVMVGVPNDQLLRVGQSRSTAADWINKNVGAYIPATNITYIAVGNEVLTTIPNAALVLVPALQFLQSALLAANLNTQVKISSPHSMDVISKAFPPSAATFNLTWSSIMSQYLQFLKNTGSSFMLNAQPYYGYVGGQGVFPLEYALFRSLNPNSQISDPNTNLFYTNMFDAIIDATYNSIQAMNFTGIPVLVTASGWPWRGGPSEKAATVDNALAYNTNLIHHVLNNSGTPSQPNNQPSTYIFELFNEDNRSGPVSEQNWGIMFPNATTIYSLSFEDVATAIPESPALRGVFCVANSSASHSALKHSLDWACGPGSANCSAVQPGQPCYASDDIAAVASYAFNDYYHRTQSSGGTCNFNGTAMITSTDPSHGSCIFSGSTGANGSNGGTASGPVSPDSFASKSQSCWLTHLVATLLPILFVAM

SEQ ID NO: 227239 - protein, 77 aa, Zea mays
  unsure (1)..(77): unsure at all Xaa locations
  Clone ID: MRT4577_138834C.1.pep
AKSETMNDLEYAKDPIIMGGARKAAAISXNANRLXAYHEAEHALVAFTQNXAYPVHKATIVPSGAALGMLAHLADKD

SEQ ID NO: 227240 - protein, 52 aa, Zea mays
  Clone ID: MRT4577_138835C.1.pep
GGGRRDGGYGGGGGYGGRLEGGDGDYGAGDVYAGQVQDSGDDYVVDDDGWKD

SEQ ID NO: 227241 - protein, 59 aa, Zea mays
  Clone ID: MRT4577_138836C.1.pep
TFWFLSGTCKGQKELFKSEKPNQPRGTAKARKHTEGHQQRSRQTGYATQRKNARAEPME

SEQ ID NO: 227242 - protein, 55 aa, Zea mays
  Clone ID: MRT4577_138837C.1.pep
RTPADVLPVRDSLHGRRLSHSHVVHPSTLLTTLRYPPCVVYRRELPYHLGTFNLP

SEQ ID NO: 227243 - protein, 59 aa, Zea mays
  unsure (1)..(59): unsure at all Xaa locations
  Clone ID: MRT4577_138838C.1.pep
XXXFFFFFFFFFXGNELPHVSFISLEDEQTCLLIQCYNILWFHGGSKKPERLIKPRSFL

SEQ ID NO: 227244 - protein, 77 aa, Zea mays
  unsure (1)..(77): unsure at all Xaa locations
  Clone ID: MRT4577_138839C.1.pep
MHETCPSEKNIXLAGLGGKCVDYCKDYSDDWTTLSEKLAFKKAVFTKTHKENAGTEAEIVMVDGXIVEYKKIQDLHF

SEQ ID NO: 227245 - protein, 61 aa, Zea mays
  Clone ID: MRT4577_13883C.1.pep
TLNLVAEQPALHIAAGGRGGEHTTFLNFITGTGHGKIECPGRMSEALTASLNALSLCCYFC

SEQ ID NO: 227246 - protein, 131 aa, Zea mays
  unsure (1)..(131): unsure at all Xaa locations
  Clone ID: MRT4577_138840C.1.pep
FGTRRISSYYKSVQENKHVDLSPPRGPELHVQSHGAGIAPALARALAEDYVQSDHLHVVEQTQTSMAPKREQTQYPVICILEHLPKASLPXLEEGKTWGVWLLTGEDDASLYRAGQNDGRERWNWGTEWWG

SEQ ID NO: 227247 - protein, 81 aa, Zea mays
  unsure (1)..(81): unsure at all Xaa locations
  Clone ID: MRT4577_138841C.1.pep
XRPRPNRTHLLSVWAPKQHPPRDASRQRRQPRQNGSQAWSHKRNVMHLSSTEPWMVQVTSSRTRPSDLSVVVGWFVYIRCE

SEQ ID NO: 227248 - protein, 92 aa, Zea mays
  unsure (1)..(92): unsure at all Xaa locations
  Clone ID: MRT4577_138842C.1.pep
CRRXWPICRAMALDYRSHILQGENDITPLKSTILHSQVLNMFNNTPFEQLRMVFKGSSTQCLLTHTLTGKIXYXMPMNHPDNSQHKERFELG

SEQ ID NO: 227249 - protein, 83 aa, Zea mays
  Clone ID: MRT4577_138843C.1.pep
FVSVCPVLALIVLSALSRVLSLPSSGLAFRCLSSLSGAPFLRFSVRCLCCFFGRPRGFSPCLVAVPAGSVFVRLRSFSARLRG

SEQ ID NO: 227250 - protein, 40 aa, Zea mays
  Clone ID: MRT4577_138844C.1.pep
IKNDENKRFEANTQIPQIYTMRTISQVQAGKQKCAKKNNG

SEQ ID NO: 227251 - protein, 85 aa, Zea mays
  unsure (1)..(85): unsure at all Xaa locations
  Clone ID: MRT4577_138845C.1.pep
QENYFIYKNFWLTDALDEKHLSWKWGVVCFVTXSRXHAQKIYFHXKVMXPTERLSNILLFDAVIYIACSXTKMPADVTASLEEVI

SEQ ID NO: 227252 - protein, 71 aa, Zea mays
  Clone ID: MRT4577_138846C.1.pep
HFVKHFKIQTCPPPPFYFSPLMPPGYFFSGYCFGERRCKIYPPKRELSVIPTSPNYIPPRWVSPKGTANLS

SEQ ID NO: 227253 - protein, 276 aa, Zea mays
  unsure (1)..(276): unsure at all Xaa locations
  Clone ID: MRT4577_138847C.1.pep
GYLEAGRVFRLLEDLCMSEDNSQQLKDGDGDRVTQGLGTVWSLILGRPPLRHVCLDIALKCAAHSQDEVRGKAVRLVAKRLYDLTYATEKIEQFAIESLVGVANEHTVDTDINSKSLKESTAEIEVGSQGTSVSGSQIPDTEFSENGPFKTSSVSTKQSAVSVSEAKRRTSLFFAPCTKRSSLLQHLFNAYGRSPKVIKQCIHWHMPNLIRNLXPSCPELLNIIHXIHLXSEHLITLTLQTLTERSNPSADLVAAVKHYIXYKLKDASILIPLLLH

SEQ ID NO: 227254 - protein, 524 aa, Zea mays
  unsure (1)..(524): unsure at all Xaa locations
  Clone ID: MRT4577_138848C.1.pep
SLQLKDGDGDRVTQGXGTVWSLILGRPPLRHXFLCGWYIGLLGFNSNTPTCLGXKALLLLLVVVRWSVLHLPSVVYLQCAAHSQDEVRGKAVRLVAKRLYDLTYATEKIEQFAIESLVGVANEHTVDTDINSKSLKESTAEIEVGSQGTSVSGSQIPDTEFSENGPFKTSSVSTKQSAVSVSEAKRRTSLFFALCTKRSSLLQHLFNAYGRSPKVVKQCIHWHMPNLIRNLGPSCPELLNIIHXIHLXSEHLITLTLQTLTEDSNPSADLVAAVKQLYNTKLKDASILIPLLPSFPKEEVLPIFPRLVDLPLERFQDVLARILQGTAHTGPALTPAEVLIAIHDINPEKDKVALKKVTDACTACFEQRTVFTQQVLEKSLNQLVDRIPIPLLFMRTVIQALDAFPALVDFVMGILSRLIDKQIWKMPKLWVGFLKLSFQTQPRSFDVLLQLPPPQLEFMLNKYPNLRTPLSSFVNQRNMHNTLPRQILNILGIFSETQQAPMAFVTATLQTADATTSLPGATLM

SEQ ID NO: 227255 - protein, 96 aa, Zea mays
  Clone ID: MRT4577_138849C.1.pep
WDPRGRPRHYHTTRTNMSSAPPTAAIWAQTSRHPKNRKRSPAASVPTRKRSATNACCSPPHTTRIRNAPTSSTTTGDAWPAMASRYNANALLWRLS

SEQ ID NO: 227256 - protein, 36 aa, Zea mays
  unsure (1)..(36): unsure at all Xaa locations
  Clone ID: MRT4577_13884C.1.pep
PQSHVTYFKHSIDDLRTFKLMGHLFDXCRNTREALV

SEQ ID NO: 227257 - protein, 172 aa, Zea mays
  Clone ID: MRT4577_138850C.1.pep
MWRPKVVEINQMATEDKTVGLQLPTGMADNLAIKAGPSMDVVDSPTLESRPSALRQSTSNDAPIPMEEDDLMEEDLVDYETTPEHSGVTINLMPYSLYRKLGKQDDELFKTNMMLSGVGTNSSIKAKGVTSFDLTIRTKALAAAFFVADVEGNYSLILGRDWIHDNQCIPST

SEQ ID NO: 227258 - protein, 131 aa, Zea mays
  unsure (1)..(131): unsure at all Xaa locations
  Clone ID: MRT4577_138851C.1.pep
GRVGKHVDRNKKEHHYXEKKADTGXNKTYXKHAGTXVRKNGFIXVIKNRSCKGGEVFTYKTGKHGHAKCHFVAIDIFNGKXLEDIETXSHNCDIPHVNRTEYELIDIYEDGIVSLLTSDGNTKDDLRLPTD

SEQ ID NO: 227259 - protein, 30 aa, Zea mays
  Clone ID: MRT4577_138852C.1.pep
EREIDRTTEFIHFPTSDRITGNMENFLMLI

SEQ ID NO: 227260 - protein, 89 aa, Zea mays
  Clone ID: MRT4577_138853C.1.pep
APQVWVFSTGKFWCGEAPPSPANVSPGVEPFIDTGAFFFFQVFYGAVRETPREAPWFWGWVHQANTFYPSGPFVGKECGFFCFPPTKNQ

SEQ ID NO: 227261 - protein, 89 aa, Zea mays
  Clone ID: MRT4577_138854C.1.pep
WSRTQQPRKPKAPPPSLSDGGRTRSPVQTRTPNDAAADAARKRERGESRELRRGRMVGSQPVLGQGSGRGEGSRETPTSRDAGAAGCAG

SEQ ID NO: 227262 - protein, 50 aa, Zea mays
  Clone ID: MRT4577_138855C.1.pep
DGSLDCQVKSFDLPPDSAMLYCCRSLASSLVRSCPRRLVPKKKRKFADGL

SEQ ID NO: 227263 - protein, 166 aa, Zea mays
  Clone ID: MRT4577_138856C.1.pep
RPCSTCWNPRHPRGSLRPEHPAAGGGTEGHTELSVKFDSRAGGAMAVMVDCELYETLKTEGGVQMDRSRSSHGPLRWGFSLSDVPDNELGWGVKVSGGTAGETTTTTTRGRGRSQLQQQQHQHLELEGFLNFNLGKGARLQPALVYAPRTESTATPALFLRSSWVM

SEQ ID NO: 227264 - protein, 37 aa, Zea mays
  Clone ID: MRT4577_138857C.1.pep
QHGKKPLTLNNLLQQRPWINYSCHSPIKIALRSTISE

SEQ ID NO: 227265 - protein, 91 aa, Zea mays
  Clone ID: MRT4577_138858C.1.pep
GTHCSLGARGRMPDFILCVGDDGSDEDMFEAISAPSSKSAFPEAAEIFACTVGKKPSLAKYYLEDPDEVLKMLKGLIDSFEENPSTVEANK

SEQ ID NO: 227266 - protein, 74 aa, Zea mays
  Clone ID: MRT4577_138859C.1.pep
LRQLSTLLANRLSEHSCAMSHARLRLSQAGVCNIMGDDGDRSWLSATLHILKLDESTEDVLRMRRMALQTEDTG

SEQ ID NO: 227267 - protein, 97 aa, Zea mays
  Clone ID: MRT4577_13885C.1.pep
SLIMHTATIMINNLDVFCLLIMQLSTALSATAPTCLKSPDHCFYYELQVPPVGAPYTDVRRSSESHRLTFHTTHIMFETFDWPAMSDDIHNSHYLYC

SEQ ID NO: 227268 - protein, 77 aa, Zea mays
  Clone ID: MRT4577_138860C.1.pep
YHGRLQQDALEHDVVLGRAHKQLPLRGDPAVPVHEDVSLDQSDVDVPHELNLLHQRRDPPQLRFFLAHPLHNDHLHR

SEQ ID NO: 227269 - protein, 574 aa, Zea mays
  Clone ID: MRT4577_138861C.1.pep
MALLPGAARRLLCSLFLCLWLSTLARAATRRYEWEVSYQFKSPDCVRKLSATINGQTPGPTIRATQGDTVEVKVRNSLLTENLAIHWHGIRQIGTPWADGTEGVTQCPILPGDTLTYAFVVDRPGTYMYHAHYGMQRSAGLYGVVVVVVAAAPGAKADDAEPFAYDDEHHVLLNDWWHNSTYELAVGLASVPMVWVGEPHSLLINGRGRFNCSAAAVPGTCNATSPECDTPVFAVVPGQTYRFRIASVASLSALNFEIEGHEMTVVEADGHYVKPFVVKNINIYSGETYSVLIKADQDPNRNYWLASNVVSRQPATPTGTAILSYSGDRAPPSTTPPTGPAWNDTMYRFQQSVATVAHPAYVEPPPPRADRTILLLNTQNKIDAHTKWALNGVSFTLPHTPYLVAMKRGLLDTFDQRPPPETYAYQGYDVYAPPQNPNATTSDGLYRLRFGSVVDVVLQNANMLAPNKSETHPWHLHGHDFWVLGYGIGRFDPAVHPASYNLKDPVLKNTVAVHPYGWTALRFKADNPGVWAFHCHIEAHFFMGMGIVFEEGIQRVASLPPEIMGCGETNGGHR

SEQ ID NO: 227270 - protein, 124 aa, Zea mays
  unsure (1)..(124): unsure at all Xaa locations
  Clone ID: MRT4577_138862C.1.pep
QQRPRRHRLVVQGPVPGPLWRHVLALGGHXYXLSTIGANDGKRTMAYVWALVTAVFPYXWRNLEPYGGGPPPCMYATASARYDGLLXLCGGRDANSAPLLSAYVLAKHRNDRWEETMALGVNPL

SEQ ID NO: 227271 - protein, 85 aa, Zea mays
  Clone ID: MRT4577_138863C.1.pep
MAMAVPASVEGFNCTANRTYPYQAYALYRAGFAGVPLDLAAIGDSSPTSCTPGTHTMRRPPVHALRLSVLLLLLCLCAFPAPTRS

SEQ ID NO: 227272 - protein, 177 aa, Zea mays
  unsure (1)..(177): unsure at all Xaa locations
  Clone ID: MRT4577_138864C.1.pep
SRSVDSRFDPTDEMDVSLIVQSYTRTAVPRGASAEIYEDSHLMXGRSDYLVEIVLIAGIKVCNIIVPPIVXKEPSEHLDIXDNFLXQQLDATSNVXCCRLQKIAANAILGGTLAVCMAGTMENKIPHYQLLPNLVENKTLLLPVPAYTVINGGSHAVNHLALQELMMLPTADSSLNE

SEQ ID NO: 227273 - protein, 249 aa, Zea mays
  Clone ID: MRT4577_138865C.1.pep
CLQVRCGTRGALDPPCNAVGYIDRRVLGINHMYQKPAWRRHRACTDDSPHEGPFREDAPAWCVAPFEPEGILSSLSAVLSTVVGVHYGHVLVHMKSHTDRLRQWVTMGVALLVLGIILHFSHAIPLNKQLYTFSYICVTAGAAGVVFSALYFLVDVVSLRYAFAPLRWVGMNAMLVYVMAAEGVFEGFLNGWYYESTNNTLVYWVRKHVFVKVWHSTRVGILLYVLFAQILFWALVSGVLHRARLYWKL

SEQ ID NO: 227274 - protein, 36 aa, Zea mays
  Clone ID: MRT4577_138866C.1.pep
QRAPSLFLELLFPMFGVIGYHCYNVRLGIVRSQSLL

SEQ ID NO: 227275 - protein, 134 aa, Zea mays
  unsure (1)..(134): unsure at all Xaa locations
  Clone ID: MRT4577_138867C.1.pep
PERKQRNTEASKEAERGGPGGQRSEAGEQPKGKRRHTQKQRTRPATGKASQSTQHAAQARTXHATRTQTRNRGDNTPRRSQSQDNERPNKGRETKKRGSDAGTKQKRRPEGEDDPNKKKKGTGAKKREPTPQRQ

SEQ ID NO: 227276 - protein, 82 aa, Zea mays
  Clone ID: MRT4577_138868C.1.pep
YHELYTIGGRGSFSLVVPNRKRISEYELVQNPQLESSSRNHDEPSSFFFKKNSKIMKGILSLRARQKSLQPIRSGIRKLRTV

SEQ ID NO: 227277 - protein, 291 aa, Zea mays
  Clone ID: MRT4577_138869C.1.pep
MASKKASDLLLLLNAATTGSIRTVVRQLFSRLVFSLQMECSLSMEIVSFWLWLEGNGHPDFLASVESLDNHRLRGIAFAGKMFIEGLRRRSSGGHLNSRGSVEEEEEEEEGYFQEEAMEGIVFYLNNFCYEALEDILEIAEAKERVVYHRARGNQVQQQQQQSSKGKAPMMMSTKDLLSKIKASFTTAARSSHEEGSTSSRSMPSPKKQILRDIENPIDQCLSTTTFPLATLFDSLKLRDDDPEADPAIIKVQRRRQPSIVLVPRDERTLFVTFSNGYPFTADELYEFFMG

SEQ ID NO: 227278 - protein, 209 aa, Zea mays
  Clone ID: MRT4577_13886C.1.pep
AGEATQALSRHWRSLSPTRIVILKPCPELSADDVEESSLGSPELVKKENNMEAFLEEVKKRLKIELEGGVASDDKADRRWFAAAAAADVIPADPKQIARSIANQIRENVTTLCAFDKCHAMAPRRASGGKALLEALWKSMQVWIEPPSDRRTASSASVDVLIGRDLSVSAWHGAFREDADALAGDVEAELLDELLEETVWDVLLNVGDS

SEQ ID NO: 227279 - protein, 247 aa, Zea mays
  unsure (1)..(247): unsure at all Xaa locations
  Clone ID: MRT4577_138870C.1.pep
NSARGSPPRPAAAAAAAASPRNGAEIPALSEPPGGRPPNRRCRPAVHLKTRQLFSTQXEEMAHVSFKSKDVDSGMSRWSEYLSVEEPIPSAMATWRNMSADAPQGSSAGSHKHLQMEPVVQLSKVAEGLLAKMYRLNSILDYPDPNTHTFSDAFWKAGVFPNFPKICITMXKKFPEHPNKLQLERVDKFGLDALNENAEGYMHNLEQWILLLLDLLAFREQALRLILDLSSTVITLLPHQNSLILHA

SEQ ID NO: 227280 - protein, 67 aa, Zea mays
  Clone ID: MRT4577_138871C.1.pep
NILFVLEHRPRRREATPSKCHQNYKCYFNVSLATTSKVFKGTNDNHHCQKQSSFSKPLKRISLSMGT

SEQ ID NO: 227281 - protein, 69 aa, Zea mays
  Clone ID: MRT4577_138872C.1.pep
MDSNKILTNIFDAYYDAYQVMATASGTATGLLHFLLQFLLERLHKLCAILGATVAFTLALEMSDYSYFY

SEQ ID NO: 227282 - protein, 178 aa, Zea mays
  Clone ID: MRT4577_138873C.1.pep
MQPRSKKFGRVDTVQLKAQIVRRLGPQRAELYFRSLTKFLGCQLGRDEFQKACAAALGKENVRLHTSLVQSILRNACVSDGPPPSAQAATGNSQTSTAVSNGTLTSGLPPPVTRARPPLTKWSGDKPSPIGKSPLGHRPGTAREFVSAGTGSKALQEVVSVEDGEEVDQARGGSGSPV

SEQ ID NO: 227283 - protein, 40 aa, Zea mays
  Clone ID: MRT4577_138874C.1.pep
KVSNDHKRATRYQANIKPQDPNRYEPVQSMQQVPHDSVIL

SEQ ID NO: 227284 - protein, 81 aa, Zea mays
  Clone ID: MRT4577_138875C.1.pep
QQTMTPGHQGAQKTPKILQNQNSRKIHERINIEPIQGPNDQKQGPILHQMGPLLGNKKTEGTPGWPRARLLKGLGNLKNHI

SEQ ID NO: 227285 - protein, 38 aa, Zea mays
  Clone ID: MRT4577_138876C.1.pep
TIMSSFLFKAFFDDYKLEFFFFFFFFFFFCCICSPTRT

SEQ ID NO: 227286 - protein, 261 aa, Zea mays
  unsure (1)..(261): unsure at all Xaa locations
  Clone ID: MRT4577_138877C.1.pep
TSQNGPVPHPISPGNLRSKRSQGFLVLLLKMQIFVKTLTGKTITLEVESSDTIDNVKAKIQDKEGIPPDQQRLIFAGKQLEDGRTLADYNIQKESTLHLVLRLRGGMQIFVKTLTGKTITLEVESSDTIDNVKAKIQDKEGIPPDQQRLIFAGKQLEDGRTLADYNIQKESTLHLVLRLRGGMQIFVKTLTGKTITLEGEASGXTLDNVQAXKIQDKEGIPPDQQRLIFAGKQLEDGRTLADYNIQKESTLHLVLRLRGXQ

SEQ ID NO: 227287 - protein, 113 aa, Zea mays
  Clone ID: MRT4577_138878C.1.pep
LALSCPPPQPAMLEHLSSLPTQMDYKGQKLAEQMFQGIILFSAIVGFIYGYVAELFGWTVYIVMAGFAFSCLLTLPPWPIYRRHPLKWLPVQESSTDDKKPGERKIKRHAKNN

SEQ ID NO: 227288 - protein, 255 aa, Zea mays
  unsure (1)..(255): unsure at all Xaa locations
  Clone ID: MRT4577_138879C.1.pep
MQIFVKTLTGKTITLEVESSDTIDNVKAKIQDKEGIPPDQQRLIFAGKQLEDGRTLADYNIQKESTLHLVLRLRGGMQIFVKTLTGKTITLEVESSDTIDNVKAKIQDKEGIPPDQQRLIFAGKQLEDGRTLADYNIQKESTLHLVLRLRGGMQIFVKTLTGKTITLEVESSDTIDNVKAKIQDKEGIPPDQQRLIFAGKQLEDGRTXLADYNIQKESTLHLVLRLRGGMQIFXVKTLTGKDITLEVESSDTIDI

SEQ ID NO: 227289 - protein, 82 aa, Zea mays
  unsure (1)..(82): unsure at all Xaa locations
  Clone ID: MRT4577_13887C.1.pep
MVKLAFRSVSDSFRATFIKAYVANLIITLHFIFIGTGSSISFAQLTNGSTLHPANLVTNTWEHALALXENIIVCVNTSGEHL

SEQ ID NO: 227290 - protein, 78 aa, Zea mays
  Clone ID: MRT4577_138880C.1.pep
LSWLGGLSSTPQVLGSAPSGRSTGVRLSPGRGHSHMSFDAAVYGWGRGSGDFLDLCENVFFLIQCSGAVLPSQVEFSL

SEQ ID NO: 227291 - protein, 68 aa, Zea mays
  Clone ID: MRT4577_138881C.1.pep
PQDRACSRASRRVAVDSLAQADIKSVCDYKNLKRMGGYNNNPKRDKDHAAKGGLATQIDWEECANPAK

SEQ ID NO: 227292 - protein, 101 aa, Zea mays
  Clone ID: MRT4577_138882C.1.pep
MIEHGKGHNNCAGRRGNSGNFSQIQGKNQENRTMNSKLGCAMAKNSGALLNAWPASPCHHRPLLRLANLRRELAPEPLCDYWAPPSIRRRDKRGFPIHRCP

SEQ ID NO: 227293 - protein, 49 aa, Zea mays
  Clone ID: MRT4577_138884C.1.pep
GACTLKLSFRPPPPESTCTLPPAPFCGGCRVIGFQRLALGISTSRSRLD

SEQ ID NO: 227294 - protein, 96 aa, Zea mays
  Clone ID: MRT4577_138885C.1.pep
MGVAGEKFQLGTVGALSLSVVSSVSIVICNKALMSSLGFNFATTLTSWHLLVTFCSLHVALCMKLLEHKPFDARTVMGFGVLNGISIGLLNLSLGF

SEQ ID NO: 227295 - protein, 107 aa, Zea mays
  Clone ID: MRT4577_138886C.1.pep
EQSSVGACLELAFTRRDEAVGHALDRCSGVRRHAESACAVTVTADQRRLALACALAVELRWPVILPVPVVGPGHVAEQHKVDQVIAVARLDISVQLGAGHQGPVNGL

SEQ ID NO: 227296 - protein, 382 aa, Zea mays
  unsure (1)..(382): unsure at all Xaa locations
  Clone ID: MRT4577_138887C.1.pep
MGVAGEKFQLGTVGALSLSVVSSVSIVICNKALMSSLRFNFATTLTSWHLLVTFCSLHVALCMKLFEHKPFDARTVMGFGVLNGISIGLLNLSLGFNSVGFYQMTKLAIIPCTVILETLFFRKKFSRNIKLSLSVLLLGVGVATITDLQLNLMGSVLSLLAIITTCIAQIXPFDCTLLTIFLWAYLSVSRTICIQQTLHLPLKHPLIXISVLWRITXSGPIISMTNTIQKKFKVSSTQLLYXSCPYRALTLFLVGPFLDGFLTNQNVFAFDYTTQVLFFIMLSCLISVSVNFSTFLVIGKTSPVTYKVLGHLKTCLVLTFGYVLLHDLFSWRNILGILIVVIGMVLYLYFCTRETQQIPAEASPQVVQVSVCWNSRRSEWCF

SEQ ID NO: 227297 - protein, 76 aa, Zea mays
  Clone ID: MRT4577_138889C.1.pep
PPPRTGIFFFFRDGVHPKLQAISLPRIPFQKKGEVSLPYLTARHPSGSIMRYIPFYARKEDVVVLLVHQKRKKIQP

SEQ ID NO: 227298 - protein, 61 aa, Zea mays
  Clone ID: MRT4577_13888C.1.pep
GSHNKLKMKKCWKGKKMGAFWFEHFLPKGTCLKRGLIRDIKGFSQTQGRETTTKRNQNRPP

SEQ ID NO: 227299 - protein, 76 aa, Zea mays
  Clone ID: MRT4577_138890C.1.pep
IGRTINHSQKLPFQGSNNTNSSVKTVIVWPYQIFCSCTCVVAACINFSIYASVSDYVSISVLCSRHLFVFQTIYQF

SEQ ID NO: 227300 - protein, 106 aa, Zea mays
  Clone ID: MRT4577_138891C.1.pep
RFVFFKKKKTLLALRSQEHQNQSSLTRKVPPRRHVRRNYPALKALKDELFLKKGGLFQQQSILPSFYTEQKYVSRSKQGITLFSEPSLLSSLNHPFTIPACNLNTK

SEQ ID NO: 227301 - protein, 80 aa, Zea mays
  Clone ID: MRT4577_138892C.1.pep
MWGLCTCQILSTPAGLCVSDACTFRRGAAHGLWGARASAAADTLSMRTSARAAPRHQQQARRGGRFPSLVVCASAGMNVV

SEQ ID NO: 227302 - protein, 91 aa, Zea mays
  Clone ID: MRT4577_138893C.1.pep
KKKTPPLNGAGGNNSKRSLLYPPAAIRRDLGHSGGKFFLGGGGGVIPWPGQVPGPKGAPGINHPVFGGGGQQNLRPNHLYFLPFAPTFCRA

SEQ ID NO: 227303 - protein, 125 aa, Zea mays
  unsure (1)..(125): unsure at all Xaa locations
  Clone ID: MRT4577_138894C.1.pep
GSWSTRVGGPPEVRITGIDFPQPGFRSATRTEGAGRRLSDFARQCGVPFKFRSIVATKWEMIFAEDLEIEPDEVLVVSGLFYFGKLMDXDEGVDGDCPSPRDMVLGNISRMRPEVSSSPGRPRGS

SEQ ID NO: 227304 - protein, 99 aa, Zea mays
  Clone ID: MRT4577_138895C.1.pep
PWFPGPPPWGVGGFFLGVAPTGGFFFSPTSSLFYALGRWDVSRVNYHCGPPPPGENLYCWLKGREPPFLNVMGIFKRRLKLLWGPVFEKKIKIKKKNKK

SEQ ID NO: 227305 - protein, 54 aa, Zea mays
  Clone ID: MRT4577_138896C.1.pep
DVPLSPGFTVDRRILRCLRFSASMKATPRDWDAFSLGAALRVLAVSQFFEVDVA

SEQ ID NO: 227306 - protein, 58 aa, Zea mays
  Clone ID: MRT4577_138897C.1.pep
ANQEPLKKWTAGFRRSICMAVYGSIHGMGRMKQTTLVYLRHTHNSILRRTDERTSLQV

SEQ ID NO: 227307 - protein, 156 aa, Zea mays
  Clone ID: MRT4577_138898C.1.pep
PPPRPPNTPSPHSPPPPQNPPNPQSPPTKPVTNRAQQTPGAGYLCVCAREREREKRGLFRIHGQEITSQAPGPGQASASATSSRFTTDPSPHNAASTLPKRPSTRTRAQKSQAPTPAFPTKIGGRSGPAPERLAKKGRKNLLCSQSEREEKGGSLD

SEQ ID NO: 227308 - protein, 66 aa, Zea mays
  Clone ID: MRT4577_138899C.1.pep
KNCLLKGCRVQINSSGVFPTRVSQQLNRISWQPSSCYKHHHPVSQKIFLGFVSCPGKPPIEAFCKF

SEQ ID NO: 227309 - protein, 593 aa, Zea mays
  Clone ID: MRT4577_13889C.1.pep
HKLNQRKKNRQHAFTNPSSFTYERRFFRPFEYALQPPPWYRDEHIALDKPELPPGVSKMTEYDGPQCFIIPGNHDWFDGLHTFMRYICHKSWLGGWFLPQKKSYFALHLPKGWWIFGLDLSLHGDVDVYQFKFFADVCQNKVGENDSVIVVTHEPNWLLDWYWNETTGKNVSHLIQEYLKGRCKLRMAGDLHHFMRHSATRSEKNNFVQHLLVNGCGGAFLHPTHVFRNFERFSGTTYECKAAYPSYDESTGIALGNILKFRKKNWQFDIIGGFIYFILVFSMFPQCNLVRILNEETWSGRLKSFSGTIWSALLYIFEHSYVSSVGSLTLLTASYSFVPSKLSRRRRAIIGGLHVLAHLTAALLLMLLLELGIEICIRNHLLATSGYHTLYEWYRSMESEHFPDPTGLRARLEQWTLGLYPACIKYLMAAFDVPEVMAVTRINICKNGMMSLSRSVLIMYYTSVFIYFWIFSTPVVSLIFGSYLYICINWFHIHFDEAFSSLRIANYKSFTRFHVKKDGDLEIFTLAVDKVPKDWKLDPRWESEGRGPHQLSHDRKHPSKWRSASSTDPVRSVRVVDHFTIERTRTPDMEPSS

SEQ ID NO: 227310 - protein, 164 aa, Zea mays
  Clone ID: MRT4577_1388C.1.pep
TRPRRTHEEATAHLTSSAPHCRTAMGTSPAGTPQPASASGTANPATRPPDLTAAPRPTCCGHRPPRPGPLAAASSMPHHDPRTEAAPTLAWPIAHGARAPPDLVPSAAAKPSRGRGGRGPWPWPRRCHPRICTDSRWSALATARLEEATGVVVVAESPPVSPAE

SEQ ID NO: 227311 - protein, 90 aa, Zea mays
  Clone ID: MRT4577_138900C.1.pep
TRADLRFPRKGKKLGTIQTQKKKNSGVFGKKLLLTMGMGEKKTFFYGGGGMIQGNQDQVDMPLAVCYITPPGPMFRCPQSKPGNRGKNLI

SEQ ID NO: 227312 - protein, 57 aa, Zea mays
  Clone ID: MRT4577_138901C.1.pep
MKEGRSVKQGVCDHLHDIFHAATKNIHGGWDLCCIQHGIHIKGSQGIYTTAGADNDT

SEQ ID NO: 227313 - protein, 76 aa, Zea mays
  Clone ID: MRT4577_138902C.1.pep
YFLSFPYILLLHILISSLKHSYIHHSIFYNTINLINQIIFNLTHNNINSFHSTLSKLTYSFLLHHNSIIHSPKFNL

SEQ ID NO: 227314 - protein, 462 aa, Zea mays
  Clone ID: MRT4577_138903C.1.pep
MAASPSLHAVAHRGPSLTALLFLVAAMVLVPPAAAEIRETAIRADPRSIIPLDEFGFSHSGVLELNVSGIAFDPQASAELDLSQLGFFLSTLDAWVHVLRQLQDLDVTCALQSELVKLAFSFDRLRPPSNPAGVEVARSSSFSTAFRVSEPGQYTLVFANCLGGGLKVDMDVRSAMYNVDPATGERQYLSAGASALPSFYFLFCLAYAGLAAAWVAILLRKRAAVFRIHYFMLAVLVLKALNLLAEAEDKSCIERTGTAHGWDVLFYIFSFLKGISLFTLIVLIGTGWSFLKPYLADREKKVLMVVIPLQVVANIAQVVIDESGPYARDWVTWKQIFLLVDVVCCCAVLFPIVWSIKNLREAARLDGKAAVNLMKLTLFRQYYVVVICYIYFTRVVVYALQTITSYRYLWTSVVAGELVTLAFYVFTGYKFRPEVHNPYFAIDDEEEEAAAETLKLNDEFEL

SEQ ID NO: 227315 - protein, 69 aa, Zea mays
  unsure (1)..(69): unsure at all Xaa locations
  Clone ID: MRT4577_138904C.1.pep
LYYSFLDRYAFFDGRIGHHKWXPXARKTYNLMDTVSRHKNQMYATSLTEIMLNFDNAVMWILHSNIWEP

SEQ ID NO: 227316 - protein, 54 aa, Zea mays
  Clone ID: MRT4577_138905C.1.pep
DKPYLVRKYYFLNALLSLIVNFSWRIPLFIFEKETDLEFHFHVFSHCLGQLWIP

SEQ ID NO: 227317 - protein, 54 aa, Zea mays
  Clone ID: MRT4577_138906C.1.pep
LKVRVLLLTQLLFSCKYLQLSTTLAREHDSRPWSHRWWPEKKKKETAARSIKRR

SEQ ID NO: 227318 - protein, 99 aa, Zea mays
  unsure (1)..(99): unsure at all Xaa locations
  Clone ID: MRT4577_138907C.1.pep
MSVIGGINVPEMHTPLCANALAEKGAKNYMIDIMIGGEXPACLHRLLLHHIERXKLLIHNQNDMIXHGRLSPXHQGIADXFKRTISDXGFSSLRRDNTA

SEQ ID NO: 227319 - protein, 43 aa, Zea mays
  Clone ID: MRT4577_138908C.1.pep
RRNHQGMVLTGMRLNPGRDMVYAEIYHQQCQLVGLAHGFGRVG

SEQ ID NO: 227320 - protein, 216 aa, Zea mays
  Clone ID: MRT4577_138909C.1.pep
MCTRRPFGHQARTVRLIRQVRQTVRPLKRWRPKAVEVNQTATKIGNKTTMLQVSAGTADSTSIKARSSVDDTDRPTSESGPSALREDTSNDAPTPMEEDDLLRKDLVDYGATPEHSDIGFMLSNVYLLRYSKCCYNGVADGPAFKTERFAATQRPPNPSEGGIIEEFMDLDKLGQEFTSADPSEEFDIGDGKTPRPTFVNKTLETDLRDEMIGLLK

SEQ ID NO: 227321 - protein, 178 aa, Zea mays
  unsure (1)..(178): unsure at all Xaa locations
  Clone ID: MRT4577_13890C.1.pep
DSTLSSPAFALRVPCTWYLSPICNTAGGGPVSSPNCTASXXXXXXXXXXXXXXXXXXXXXXXXXXXXXXXXXXXXXXXXXXGLAAGXSTKFRPFVVPRLVDRSPLFXVLPGTPSPPCPASEVPCLTXKNIIVAPSXHASXLXXAHHRSPKLPCLCICGNLPSSRRHRGIDNSDDHANR

SEQ ID NO: 227322 - protein, 53 aa, Zea mays
  Clone ID: MRT4577_138910C.1.pep
LASRGMGKPAINKSHILPETPNPVICFNKGKTLQARKNSKTKKGGFFTTRRVK

SEQ ID NO: 227323 - protein, 68 aa, Zea mays
  unsure (1)..(68): unsure at all Xaa locations
  Clone ID: MRT4577_138911C.1.pep
LLWCPMSVYSGTLTRRSVHPASPVLLTKNGPLRTLRSRRGFKKSSSNPRXLTYLKFENRLKLFQLQDL

SEQ ID NO: 227324 - protein, 116 aa, Zea mays
  unsure (1)..(116): unsure at all Xaa locations
  Clone ID: MRT4577_138912C.1.pep
MDSKSNHTGAMARPYKPKNILITGAAGFIASHVAIRITKKYPDYKIIVLDKLDYCSNLKNLLPXNIDTIMHFAAQTHVDNSFGNSFEFTKNNIYGHMYFLGLQISGQIRXVIHVAL

SEQ ID NO: 227325 - protein, 47 aa, Zea mays
  Clone ID: MRT4577_138913C.1.pep
SFNHVGFCSFLRVTQAIGGYLASVQWVSLVLYKPTVNLLWSLSVSDR

SEQ ID NO: 227326 - protein, 41 aa, Zea mays
  Clone ID: MRT4577_138914C.1.pep
FICNSVVRNHTGDYSSECYVVYIQIIVCFSRKLGILMDEFE

SEQ ID NO: 227327 - protein, 229 aa, Zea mays
  unsure (1)..(229): unsure at all Xaa locations
  Clone ID: MRT4577_138915C.1.pep
ASHVFNAAGVTGRPNVDWCESHKPDTIRTNVVGTLNLADVCRKHGLLMMNYATGCIFEYDAHHPEGSGIGFKEEDTPNFTGSFYSKTKAMVXGKCLLPLQLLLLSQLLSXIFHVSNSERNKWLFFLEKCXEELLKEYENVCTLRVRMPISSDLSNPRNFVTKISRYNKVVNIPNSMTILDELLPISVEMAKRNLRXIYNFTNPGVVSHNEILEMYKQYIDPSFKWTNFT

SEQ ID NO: 227328 - protein, 199 aa, Zea mays
  Clone ID: MRT4577_138916C.1.pep
MPGLFQPAAERLPISLLSHHSTMINITKPQNWTRGDYLVSTDPALLQVDAINAALSSDMVWWAGDLPADALWDALRSSICFGLYRKRSSEMNGTGPTVEYKIEEWEQVGLVRMITDGVTFGYLTDVYILPEHQGGGRGRWMLQILNEALQGWPHLRRVMLLTTDKMHLFGKNLGMKDYREFDGMKGVSIAMVEGPGAQH

SEQ ID NO: 227329 - protein, 666 aa, Zea mays
  Clone ID: MRT4577_138917C.1.pep
MARPYKPKNILITGAAGFIASHVAIRITKKYPDYKIIVLDKLDYCSNLKNLLPVSSSPNFKFVKGDIASVDLVNFLLVTENIDTIMHFAAQTHVDNSFGNSFEFTKNNIYGTHVLLEACRISGQIKRFIHVSTDEVYGETDEDAVVGNHEASQLLPTNPYAATKAGAEMLVMAYGRSYGLPVITTRGNNVYGPNQFPEKLIPKFILLAMRGEPLPIHGDGVNVRSYLYCEDVAEAFEVILHHGEVGHVYNIGTKRERTVLDVAKDVCRLFNLEPDKVIMFVENRPFNDQRYFLDDEKLKSLGWAERTPWEEGLKKTMEWYVANSDYWGDVSGALLPHPRTLMMPGCEGSEEIKGILSRFNNIQTKVGSTSDNAPEPHAFKFLIYGRTGWIGGLLGKICEKKGIPYEYGNGRLQERSSLVLDIQTIKPTHVFNAAGVTGRPNVDWCESHKPDTIRTNVVGTLNLADVCRKHGLLMMNYATGCIFEYDAHHPEGSGIGFKEEDTPNFTGSFYSKTKAMVEELLKEYENVCTLRVRMPISSDLSNPRNFVTKISRYNKVVNIPNSMTILDELLPISVEMAKRNLRGIYNFTNPGVVSHNEILEMYKQYIDPSFKWTNFTLEEQAKVIVAPRSNNEMDATKLKNEFPELLSIKDSLIKYVFEPNRKVPTD

SEQ ID NO: 227330 - protein, 61 aa, Zea mays
  Clone ID: MRT4577_138918C.1.pep
HGRGSGLAAPAGGARKRGSRCPPVTHTIFFLLSPADDDIVAGGHQRNAPSSSWCGLVSGLD

SEQ ID NO: 227331 - protein, 104 aa, Zea mays
  unsure (1)..(104): unsure at all Xaa locations
  Clone ID: MRT4577_138919C.1.pep
RAETPCACPDRWQPSYLTGRLAHACANTTTYGRVTMTVERMPGQTLPANLDGSTPGYYNFYTICHATMPENYEAVQESXVYHCRWDMLDFSGXLVKEAIGLCNK

SEQ ID NO: 227332 - protein, 349 aa, Zea mays
  unsure (1)..(349): unsure at all Xaa locations
  Clone ID: MRT4577_13891C.1.pep
PTCRFVFIFLIYFYLFQCNLVRILNEETWSGRLKSFSGTIWSALLYIFEHSYVSSVGSLTLLTASYSFVPSKLSRRRRAIIGGLHVLAHLTAALLLMLLLELGIEICIRNHLLATSGYHTLYEWYRSMESEHFPDPTGLRARLEQWTLGLYPACIKYLMAAFDVPEVMAVTRINICKNGMMSLSRSVLIMYYTSVFIYFWIFSTPVVSLIFGSYLYICVNWFHIHFDEAFSSLRIANYKSFTRFHVKKDGDLEIFTLAVDKVTDQPSFRCSHLLITLPPLLCCEXQVPKDWKLDPRWESEGRGPHQLSHDRKHPSKWRSASSTDPVRSVRVVDHFTIERTRTPDMEPSS

SEQ ID NO: 227333 - protein, 164 aa, Zea mays
  unsure (1)..(164): unsure at all Xaa locations
  Clone ID: MRT4577_138920C.1.pep
MYRAAITGSTSAFVKISKLLXGMACLYFEDFDIMSTDRFLWIDGLQIIKINNLDMXTFEVNITNTQSLVKGELXDMVXQIDVIHKRKSALLTPXDISVAQNAGVXAALVCEFFIKQEDPMEALSSLFLKEYRMLRLPRPTHNNKRYITTLLRVESFTVRHKIER

SEQ ID NO: 227334 - protein, 143 aa, Zea mays
  Clone ID: MRT4577_138921C.1.pep
MNECHRTFRFDKSLFADMFASLGTTAGVDLLKNVHVQAIVGPQTSTQAKFLTELGNKTSVPIISFSANSPSRSSSQTPYFIRTAWNDSCQAEAIASLVQKYNWREVIPIIEDDDSHTRFIPDLVDALGHVDTRVPYRCKIHPS

SEQ ID NO: 227335 - protein, 70 aa, Zea mays
  Clone ID: MRT4577_138922C.1.pep
LASLLACPADACRPCDVSLQSSASKLLKETCAYVKSLHREVDDLSERLSGLMETMDNDSPQAEIIRSLLR

SEQ ID NO: 227336 - protein, 51 aa, Zea mays
  Clone ID: MRT4577_138923C.1.pep
FGSRADCYRAVFQRVGQDDQPGQVFECLEGNVRCKDNERLVHYAARLLRPN

SEQ ID NO: 227337 - protein, 196 aa, Zea mays
  unsure (1)..(196): unsure at all Xaa locations
  Clone ID: MRT4577_138924C.1.pep
MPTKVTKPWVPVNWTGEASSSRGHSVGGGGLELEPAADRLSALPDALLHHVMSFMKAWDAVRTCVLSRRWRDLWASAPCVDVRVGRYSEPPQDFSKFVYRLLLAREALAPINTLRLRXHQLITTRISTILMVKMWIRHAIRLNACAIQLTGHPNLSAELDSIDLVSHHLKILKLAYTLVLDSFTRQLXSRCPSLED

SEQ ID NO: 227338 - protein, 87 aa, Zea mays
  Clone ID: MRT4577_138925C.1.pep
MSSGGRRGRISDDEINELISKLQALLPESSRRRNASRSSASKLLKETCAYVKSLHREVDDLSERLSGLMATMDNDSPQAEIIRSLLR

SEQ ID NO: 227339 - protein, 71 aa, Zea mays
  Clone ID: MRT4577_138926C.1.pep
STQLISDIQMNLLLKSLKNTCQGHDFLRWNGPEIVLGPYTLAGNWLNSNPSLGTGRSQTMTGRRPRFFRGI

SEQ ID NO: 227340 - protein, 122 aa, Zea mays
  Clone ID: MRT4577_138927C.1.pep
EEYKQNYIKKKPHHHSEHIKLPCACSLILAPMALLFSQDMDMSTAAAGLQYKNHGARSSYDYTSSYSVHILRRLPPRPRWVHRRYRQGRKRISRNRSQPGKRYIRKLKGVKGYTIRKAMERP

SEQ ID NO: 227341 - protein, 80 aa, Zea mays
  Clone ID: MRT4577_138928C.1.pep
PGIYFPGRRAIYFGGRPFFFFLVIFYNQKWSPRSGLCETLFRYRLRGPTSSQLPFRLKGLHMSDPRSRRHTCFIFVCLNR

SEQ ID NO: 227342 - protein, 94 aa, Zea mays
  unsure (1)..(94): unsure at all Xaa locations
  Clone ID: MRT4577_138929C.1.pep
LISHHTVRWCVQQRGHDAAGANSGVWMTVPAFGDWDTKNGALPDYSMDFSKIREMRKQNKKELSRASLGGDDDXXXHAHAHXQKPQXQQRPAQA

SEQ ID NO: 227343 - protein, 111 aa, Zea mays
  unsure (1)..(111): unsure at all Xaa locations
  Clone ID: MRT4577_13892C.1.pep
MGKPAKIGEWGGYAGDRGEGRATPDRVIEVKVKEXETDXIRSISFIYIGADGKPYEEGPWGFGHAGTEYKIDLRRFDESLTDISGTRGRGCNIDNLVKCLQIFHQQTRLRT

SEQ ID NO: 227344 - protein, 121 aa, Zea mays
  Clone ID: MRT4577_138930C.1.pep
MDNLKEQRGHDAAGANSGVWMTVPAFGDWDTKNGALPDYSMDFSKIREMRKQNKKELSRASLGGDDDLLAHAHAQKPQANSAQPKLGRPCPAADRRPLHARDHSPTGGKKFLSYFQCCIKA

SEQ ID NO: 227345 - protein, 82 aa, Zea mays
  Clone ID: MRT4577_138931C.1.pep
NQATNTRTTALPCLRSAPSHQDLRLTGGWRELGEAASRRSASHWRVEGAGRGREQEVMLAGPSARQDEQRPHASAHASAHAS

SEQ ID NO: 227346 - protein, 123 aa, Zea mays
  Clone ID: MRT4577_138932C.1.pep
MDNLKEQRGHDAAGANSGVWMTVPAFGDWDTKNGALPDYSMDFSKIREMRKQNKKELSRASLGGDDDLFAHAHAHAQKPQANSAQPKLGRPCPAADRRPLHARDHSPTGGKKFLSYFQCCIKA

SEQ ID NO: 227347 - protein, 153 aa, Zea mays
  Clone ID: MRT4577_138933C.1.pep
ARPRVPAASAIRACVRPSFSLAPHHSVRWCVRACVQQRGHDAAGANSGVWMTVPAFGDWDTKNGALPDYSMDFSKIREMRKQNKKELSRASLGSDDDLLAHAHAHAQKPQANSAQPKLGRPCPAADRRPLHARDHSPTGGKKFLSYFQCCIKA

SEQ ID NO: 227348 - protein, 48 aa, Zea mays
  unsure (1)..(48): unsure at all Xaa locations
  Clone ID: MRT4577_138934C.1.pep
SLGLCFVAXCSFXFCXCFXRSXXVSVRLPCXPSTAPPVXPXXXXRKXX

SEQ ID NO: 227349 - protein, 68 aa, Zea mays
  Clone ID: MRT4577_138935C.1.pep
AFFFFLFFLFCASYTLGVAIYSLKTQNFIKTMLLILVLPHMKKCVVWAGGVIYGMTRDVCRGLIKFWF

SEQ ID NO: 227350 - protein, 156 aa, Zea mays
  Clone ID: MRT4577_138936C.1.pep
TTLSLLGSATGPCCERDPCLRSSFLLTSSSSHRALVRACVQQRGHDAAGANSGVWMTVPAFGDWDTKNGALPDYSMDFSKIREMRKQNKKELSRASLGGDDDLLAHAHAQKPQANSAQPKLGRPCPAADRRPLHARDHSPTGGKKFLSYFQCCIKA

SEQ ID NO: 227351 - protein, 70 aa, Zea mays
  Clone ID: MRT4577_138937C.1.pep
TSSVCMSLLCGVSQCLCDPDSPMAYSPRPSVLWPVRTWSCVCSYCKHHLLLTHTHVSCMPGNGVPWWLNK

SEQ ID NO: 227352 - protein, 123 aa, Zea mays
  Clone ID: MRT4577_138938C.1.pep
MDNLKEQRGHDAAGANSGVWMTVPAFGDWDTKNGALPDYSMDFSKIREMRKQNKKELSRASLGGDDDLLAHAHAHAQKPQANSAQPKLGRPCPAADRRPLHARDHSPTGGKKFLSYFQCCIKA

SEQ ID NO: 227353 - protein, 174 aa, Zea mays
  Clone ID: MRT4577_138939C.1.pep
RGGVVIDGVAYRLRQMHWHAPSEHAINGRRYALELQMVHQSDTNRYAVVSQLYRISRRRPDRTIHRLERYIRRIARRKNHEELIDEEVDPRRPVSRSTAYYKYTGSFTTPPCTEGVTWVVAHQTRRVTRRQVRLLRNAVHDGTRSNRRPLQEANGRAITFYYTSPAHGRGANGD

SEQ ID NO: 227354 - protein, 101 aa, Zea mays
  unsure (1)..(101): unsure at all Xaa locations
  Clone ID: MRT4577_13893C.1.pep
MFLDGPGQLNLDXAPSWGCRRVDXSEKLELIGEGTYGQVFMAKVTAPTDIVALKNIRMDNEREGFPITDIRRMDTHQRLHHQNAIXLEEIVTSPGPDRYKQ

SEQ ID NO: 227355 - protein, 43 aa, Zea mays
  Clone ID: MRT4577_138940C.1.pep
GEVNKCTKRVGIMYIPCSPTAMRVLIFKKNNNYRLGYRLQPYS

SEQ ID NO: 227356 - protein, 124 aa, Zea mays
  Clone ID: MRT4577_138941C.1.pep
GLGGVKKIFFFFCFFFFFFFFFFFFFFFFFFFFFNPSPKGGGVHGFWQQKGLRGGFHGGRENPTLSKEQTNFPNRRLPRLTPGGEPTKKNSGPPPPRNKRGKYEPAAKEFPHRGPLPEQLQPTL

SEQ ID NO: 227357 - protein, 71 aa, Zea mays
  Clone ID: MRT4577_138942C.1.pep
AGSCPSGRRALSRGAAPGTTSWRRSPGMRYLASRQAETPMQSKHPRSWCSSLWCLSSTEWRDEGERHDTPD

SEQ ID NO: 227358 - protein, 231 aa, Zea mays
  Clone ID: MRT4577_138943C.1.pep
PQKLGLPVGRHVYVCASIGGKLCMRAYTPTSPVDEVGHFDLLIKIYFKDEDPKYPNGGLMSQYLDSLPLGATIDIKGPHRHIEYTGRRRFVVNGKQRHARRLAMIQAGRGTTPDDDTEQAVLRDQPDDDTEMHLVYANRTDHDMLLREEIDRAWLPRTRRLKVWYVVSKVPEDGWEYGVGRVDEHVMREHLPLGDSETIALVCGPPAMIECTVRPGLEKMGYDLDKACLVF

SEQ ID NO: 227359 - protein, 36 aa, Zea mays
  Clone ID: MRT4577_138944C.1.pep
PYPILNRLLLKPSATLHNKSLVLHGPLYLWGVFGCM

SEQ ID NO: 227360 - protein, 140 aa, Zea mays
  Clone ID: MRT4577_138945C.1.pep
GERGFARRLAMIAGGTGITPVYQVIQAVLRDQPDDDTEMHLVYANRTEDDMLLREEIDRLAAAHPARLKVWYVVSKVARPEDGWEYGVGRVDEHVMREHLPLGDSETIALVCGPPAMIECTVRPGLEKMGYDLDKACLVF

SEQ ID NO: 227361 - protein, 155 aa, Zea mays
  unsure (1)..(155): unsure at all Xaa locations
  Clone ID: MRT4577_138946C.1.pep
SRCVSPRAPSASCACAAWFVRGASPXLRAPCWPPAACXPXCLAXGRPXALXAXAXGXPSGAXAXPXXGPSPGGPXXXXXVXXSSGGCXXXPAPSGGGAXGRGGAXAXXGPAVXPXLXSPAPCPSLFRXAARVXVRLSPWCCPSRPGVVXVXVSCV

SEQ ID NO: 227362 - protein, 91 aa, Zea mays
  Clone ID: MRT4577_138947C.1.pep
GLGLASRISWCCVAFPVSCPCSSRTAGSLRSARPRQQRRSLWRGGGGHARCGSAIAVRLRGAASRVISRHHLAAWQWNSAAASPHLFWLPI

SEQ ID NO: 227363 - protein, 102 aa, Zea mays
  Clone ID: MRT4577_138948C.1.pep
IVGMRCSTEPMVAGGASPDTSPARSTVTRDESPSTTTTTADPEAPQKPLGAPHPARTPLAEQSPPCMYDITRDTQTQTPNRAKTNPLESPQYAAQTTRSRSR

SEQ ID NO: 227364 - protein, 321 aa, Zea mays
  Clone ID: MRT4577_138949C.1.pep
MCRTHFSSDVGPVLANKPTIEGLDEFCACSCSTFTQRSSLCSREYVLQSSCDSCPINGLHCRSCMGHAADSLTKHSLFDPLNTKERGSCCNGRCCYSVVPKCLSSCDFTKHCDVIIDQIGHAAPKDNHQLQMPTRCCTLGENEKLICQCLSNKIAVRNLPQTSHCKDVSEKVMNQPSIAITERLENVSEPSVADDSSSKAVAEKKDAYRDSAVSKGQPNFGFSSGSSSIIVTKFQKSPEFNNVSSTAKHSKHKNLCDEGSRIEKSSASSYVPTSTGCEEPLNSSAKSELGPSRVKRKCNQISEGRRLEETDNEEHCSELLK

SEQ ID NO: 227365 - protein, 64 aa, Zea mays
  unsure (1)..(64): unsure at all Xaa locations
  Clone ID: MRT4577_13894C.1.pep
PARPTRSEKIREDKTKALLALKADDRGGEVHKDPRSMQPLSNQKGNSXILIKLGSYQDYKNGNS

SEQ ID NO: 227366 - protein, 68 aa, Zea mays
  Clone ID: MRT4577_138950C.1.pep
RSIVVWPGAPSRSQSQWHVHVSPPSVPCVTRPEADGQHDAAQRYPRRPQVHVPTVVLEPRAVIGRSWT

SEQ ID NO: 227367 - protein, 79 aa, Zea mays
  Clone ID: MRT4577_138951C.1.pep
MTKLLPLLFLAMMMLNVACSAAHHKVELLVHKVKAGTTTAEGTSVDNHHAIPRPEYDSWSSPGNMPGSGHDVGSQEVKP

SEQ ID NO: 227368 - protein, 145 aa, Zea mays
  Clone ID: MRT4577_138952C.1.pep
GTSRPAGTVVSSERDRASPRVVLRSGDTGGPSPSPSAATLSSSISPSSSPEETAEGRRDRRRSVSPAFLLRLPSRCSDLSGFYVGRLKFQPRGYWGGCSPPRRRLPCLRRRRGLCSAVQHLVLQVQPGDGLAASAGGGGAAPFRR

SEQ ID NO: 227369 - protein, 390 aa, Zea mays
  unsure (1)..(390): unsure at all Xaa locations
  Clone ID: MRT4577_138953C.1.pep
RGEPHGGTGYPNSPDSYLSRPTHLAEPLHQPXEPETLATPMSDDATAAAPSSPSTSPSPSSASSSGASPSPSSPRTKRRRTDRYALGFEFAPRLAPXTNSLRNRSPTXKRSWPNWTERSTLALLDAWGDSFVRAGRSIIRADEWLEVARLVCAAVGRPAGYFSDAQCRNRVDTLRKKFKKERERARRAARRSGPSPSKWVYYDKMVAILCPTPPPLPTLPPPARPPPLPLQLLPLVAKRRRDRQPARRFQWGMKAPERLLGGAGDVVGPRVSGSGAKLGELGPQKNSAVQGKRNGFMALTESIQKFEEAFARMESSKRQHMVKVEQMRRDLQRDLDAKWREILEKAQAEIGRLSNEDGDEHDVDEDGDVGDGKRLEGGDEQNNGAMDASP

SEQ ID NO: 227370 - protein, 82 aa, Zea mays
  unsure (1)..(82): unsure at all Xaa locations
  Clone ID: MRT4577_138954C.1.pep
TPREQTKEKCRRDAPPPPSFAPAFGSLLRRRRGGIEEERVAALGLGGLPCRPSGGXDAGAGSPVPDGFSSPARARRRPGYME

SEQ ID NO: 227371 - protein, 155 aa, Zea mays
  Clone ID: MRT4577_138955C.1.pep
HWVPRGRPGVHYFSHPEDLRRCVAGLSVIERVIHSQAFKNFTYPDFSMETLLNMSTGFPVNLLPRHDNDSTSLEMFCKDTVMTIWHYHGGCQVGRVVDAEYRVLGIDALRVIDGSTFNASPGTNPQATVMMLGRYMGVRITNERLAAEGLEGTKP

SEQ ID NO: 227372 - protein, 56 aa, Zea mays
  Clone ID: MRT4577_138956C.1.pep
YVSTFQAIIMQVDNQVEFISSQQIKVSVTTDFNHTDYIYHIETEELSSILQGEDAT

SEQ ID NO: 227373 - protein, 144 aa, Zea mays
  Clone ID: MRT4577_138957C.1.pep
TPMSLLSFSLLHSLFILFPGTHASAGAAGKADSAMTPTPIFYVHEADVAHIHHFLEECFLCSKYVSRDIFMIRRDTTNLDRRVLGAHTYRRTGPTTYVRNTRRYTHLTDPPCSTGTMRKCCSTTTNSTNRTRGMPAWTPHTRGS

SEQ ID NO: 227374 - protein, 78 aa, Zea mays
  Clone ID: MRT4577_138958C.1.pep
SLVFGEFVSWSVFVLSWLRCCDYLKRRNAFLITMKNCVSKDQRGSSSQSGVSDFKEGDYIVMQDCCFCFVKTPTAELE

SEQ ID NO: 227375 - protein, 108 aa, Zea mays
  Clone ID: MRT4577_138959C.1.pep
PLRAQNFSCRHHKRAARRTLRERLGATFSSHPNQLRALFCRSPHPGKGMLQRHQLLAEYDALFDRDTETYAPFEDILRAAQEAIVLPPWVALAIRPRPGVWDYIQVNV

SEQ ID NO: 227376 - protein, 52 aa, Zea mays
  Clone ID: MRT4577_13895C.1.pep
ISPAPSPECYTLPISPEMAYTKYPLVVTPSSFKACPCMVLGPHENQKKSPPH

SEQ ID NO: 227377 - protein, 219 aa, Zea mays
  unsure (1)..(219): unsure at all Xaa locations
  Clone ID: MRT4577_138960C.1.pep
MAKVHPNAAESVQAEAEGELPTVLTVWRKSLLFNCDGFTVYDARGDLAFRVDCYAGSFRRRRRADVVLMDATGKPLLTVRRKTRFGLAERWVIYDGDADXARRPXTPLLSVRRRRIGACCKTLALARPRPRSAAAGTDAPSYVVEGSYGRRACAVRDARGGAVVAEVQRKEAVGDDVFRLVVAGPRLGAPLSMALVIALDDMFRGGWSARSLLRMSSPA

SEQ ID NO: 227378 - protein, 67 aa, Zea mays
  unsure (1)..(67): unsure at all Xaa locations
  Clone ID: MRT4577_138961C.1.pep
VDGPINPLYIIQLKEVHXFENKIKXLPGICHPRIANMSISLGANMGTSAGMNEYAPSPGGSSAAPKI

SEQ ID NO: 227379 - protein, 230 aa, Zea mays
  unsure (1)..(230): unsure at all Xaa locations
  Clone ID: MRT4577_138962C.1.pep
MAKVHPNAAESVVAPAVAPVGSAQAEAEGELPTVLTVWRKSLLFNCDGFTVYDARGDLAFRVDCYAGSFRRRRRADVVLMDATGKPLLTVRRKTRLGLAERWVIYDGDADAXTARRPXTPLLSVRRRRIGACCKTLALARPRPAAAGTDAPSYVVEGSYGRRACAVRDARGGAVVAEVQRKEAVGDDVFRLVVAGPRLGAPLSMALVIALDDMFRGGWSARSLLRMSSPA

SEQ ID NO: 227380 - protein, 115 aa, Zea mays
  Clone ID: MRT4577_138963C.1.pep
FSPRKGFFPPGKPSAWSFFFEWGKQASAPVIAPAPSRCFFPPPPPVFIGPVRVALALLSSLRVETGDRFEGKEGSGFPAFEGGWFLPFFFFFLPLPPFFFFSYIFFFFFFFLVFF

SEQ ID NO: 227381 - protein, 84 aa, Zea mays
  Clone ID: MRT4577_138964C.1.pep
REQRSEPTRPPRGGSSALLCCSPPFPSLLLPQPARNRHQRKPSIIPAPDRFRPPARPSKDPAADPASWPPWTLLLLQTLSRHQT

SEQ ID NO: 227382 - protein, 118 aa, Zea mays
  unsure (1)..(118): unsure at all Xaa locations
  Clone ID: MRT4577_138965C.1.pep
MFWHVPGFSAASPVDTILDKENFKLEDLLDEDEIIQECKALNTRLINFLRDKVQVEQLLRYIVEEAPEDAEXKRIFRFPFIACEIFTCDVDVIMKTLVXEDEDLMNLXLFSFLKPGHP

SEQ ID NO: 227383 - protein, 200 aa, Zea mays
  unsure (1)..(200): unsure at all Xaa locations
  Clone ID: MRT4577_138966C.1.pep
RVKLVAAGXHVSALKVASTYLGPLAANNEALLKPLKETLVTLIQPNEDVVMNALSLPVLASSVQVAMSRRLGIEEPQLMKIVRTTIHTHTEWFKLQMCKDRFEHLLKIDSLKEVDPSLGSHRKSKVLTDECANGSSQMTTCSSGKVPDEGSSPQVSSEVACDENAILKVMEFLALPRADAIQLLMQYNGNAEAVIQQIFQ

SEQ ID NO: 227384 - protein, 37 aa, Zea mays
  Clone ID: MRT4577_138967C.1.pep
LFCRKTTSTDFSSLVAADEHNRRNQHESQDSASTVFK

SEQ ID NO: 227385 - protein, 36 aa, Zea mays
  Clone ID: MRT4577_138968C.1.pep
MQEPAMDKMGRSGGIHNKLRTNLALKAVTHGDEPVE

SEQ ID NO: 227386 - protein, 58 aa, Zea mays
  unsure (1)..(58): unsure at all Xaa locations
  Clone ID: MRT4577_138969C.1.pep
LEPPXRVVLIRLLSDACRCSSCRSTFRLVFLCISATPPTDLLLPSGWQLLRSRRRVRV

SEQ ID NO: 227387 - protein, 39 aa, Zea mays
  unsure (1)..(39): unsure at all Xaa locations
  Clone ID: MRT4577_13896C.1.pep
SNHQSXXFIQHTLKSVSINNPIXXISPFSXSHKKKTPPP

SEQ ID NO: 227388 - protein, 91 aa, Zea mays
  unsure (1)..(91): unsure at all Xaa locations
  Clone ID: MRT4577_138970C.1.pep
ASXIXSLFLGLVPSPDTILPSAALSAPALLFPGWWPPYPSSTLRRPHQRPGRVEAQPGGTSLPARAGRAPARLASTGNPGAQSGFYHRVYR

SEQ ID NO: 227389 - protein, 69 aa, Zea mays
  Clone ID: MRT4577_138971C.1.pep
IELVMDSGALAVTIRYRMKWLRSMPLTSPETELCVYTSVCRFVITFRALELLLILDESEWATCGRMLSS

SEQ ID NO: 227390 - protein, 95 aa, Zea mays
  Clone ID: MRT4577_138972C.1.pep
AGPNQCCHSFQTDCNSRNIELPLSYMNENVHTCIQPEIFPGSGYERKFMCFRTQYKYLESQLLVHVYFFQSPGPSTTVTVSTSLAYSLQSSFSAN

SEQ ID NO: 227391 - protein, 62 aa, Zea mays
  Clone ID: MRT4577_138973C.1.pep
LPCVYVAPLPHSRRRRNRQPFTCIAVVNSFSSQHRNVSTDNKQPKQRLDDRHQPCRANCRCH

SEQ ID NO: 227392 - protein, 120 aa, Zea mays
  Clone ID: MRT4577_138974C.1.pep
MSTAAAGQVPAKKQQDLQVTYSNYKNTLQQIAQRIGDIEQEAEELKLVLETLEPLSEDRKCFRLINGVLVERTVKDVVPALKTNQEGLRKVLEDLVKQYKTKQDDLEKWKKKHNVQVAQR

SEQ ID NO: 227393 - protein, 218 aa, Zea mays
  unsure (1)..(218): unsure at all Xaa locations
  Clone ID: MRT4577_138975C.1.pep
FASSSTFVHGRPRKXHVLHHVPRRICNEPSTIYHACNTSFALLCKNAKVVARKLGSKCKGDKTCIWIPKAIVTNLVGPNKSWVXKPKRKLSCXYASGGSSWIIDSGCTNHMTEEKKMFTSYVKNKDSQDTIIFGDGNQGKVKGLGKIAITNEHSISNVFLVESLGYNLLSVSQLCHMGYNCLFTNVDVSVFRSDGSLAFKGVLDDKLYLVNFSKEEAD

SEQ ID NO: 227394 - protein, 239 aa, Zea mays
  Clone ID: MRT4577_138976C.1.pep
MDIWKSKVLPKIKLVFVKSAGKAAAAAAELVKSFDESKEGIDGEFQEKKADLQPKVVEIYESAPAPLKVLIKERSKVSGIKKNSAAITKFFEELAKIEFPGAKQVSDGISKAGPALLSGPIFATFEKVSTLLPVVAAEEPAKEAPAPPATEEAATKEAPVDEKKEEAPAPAAAVEKKEETQEEEKKEDTPAPPAAETAPPADAAAATEQPAAEAAAEAEAPPAPAVAEPAKAEEETPKA

SEQ ID NO: 227395 - protein, 130 aa, Zea mays
  unsure (1)..(130): unsure at all Xaa locations
  Clone ID: MRT4577_138977C.1.pep
ESKEGIDGEFQEKKADLQPKVVEIYESAPAPLKVLIKERSKVSGIKKNSAAITKFFEELAKIXVDRCSTRPHSDXQTDSKLINTHPHISSMNKFPGAKQVSDGISKAGPALLSGPIFATFEKVSTLLPVV

SEQ ID NO: 227396 - protein, 53 aa, Zea mays
  Clone ID: MRT4577_138978C.1.pep
SILSRITIIQVQYYIIVPTRCRFPFGIRYCHEVYPYSAAHVTSSLYRSQQLLI

SEQ ID NO: 227397 - protein, 141 aa, Zea mays
  Clone ID: MRT4577_138979C.1.pep
EYTATSPSRGNLKLAGPFNPTKGATGGLPFTRTPQPPEGGIKMVAEGGISLPLPGFSFFPLGPNAFSGIFSSSSRTFLLPWKKKCFSPARRDTGSTTAPIMPFDMTDRAWGRAMGVVTLVPPCTWGGWVNLRKKGAFRELP

SEQ ID NO: 227398 - protein, 73 aa, Zea mays
  unsure (1)..(73): unsure at all Xaa locations
  Clone ID: MRT4577_13897C.1.pep
PRVLTDVRIDVKLNRRXWSSGIRSVPRRVRVRIARMRNDEEDAKEELYFLXTVVEILXEGLNGLGAXXIXDSX

SEQ ID NO: 227399 - protein, 113 aa, Zea mays
  unsure (1)..(113): unsure at all Xaa locations
  Clone ID: MRT4577_138980C.1.pep
MKDSKESHLLSNDDFVAALTXPYDAGTVLNNCFIIIKNLPCQAEEVSTSXTAKDGHAECHFVDIDIFDANKLQDIVASPHXCDITACCNRSSSTNVTDIFVRIHARDLVLTMT

SEQ ID NO: 227400 - protein, 82 aa, Zea mays
  Clone ID: MRT4577_138981C.1.pep
SSSLQACAVLFPATNSVSFLHSASSFCQWLPQPPNSHLTVARAAGAVAHPRPCHRRTQPWIALPLAIQSMLIPTDLARALKA

SEQ ID NO: 227401 - protein, 77 aa, Zea mays
  Clone ID: MRT4577_138982C.1.pep
FNPVSLCWGKPVRLTSQAVKTKKLWVMFIGGSVKKMENGGFTFSEQTVDIQRPLFFGWSKFKNSPFCYFYSKLTPGG

SEQ ID NO: 227402 - protein, 181 aa, Zea mays
  Clone ID: MRT4577_138983C.1.pep
FSASEVMNDITGRSNFGWPKQQYVKEQPAPTFVERMPKAKDAVEFTSSNIAEVPDIMYQLGRQPSRKDVTLANNMRNSVAYPTRRVEPDDDDEHLNNLLQEEEELVSAHRKQVEETLDILKEEMNILGDADQPGFQLDDYITRLSSMLSQKAAVIVDLQARLEQFQRLLNENNVLLYAQSP

SEQ ID NO: 227403 - protein, 150 aa, Zea mays
  Clone ID: MRT4577_138984C.1.pep
ESGGKKDRRSGGRERARSPSSRHNPKRKNDCNEQMSKKNREIKSNALHSTTQFAIVHSPFSPAIPFGRSTIFFNLSLPLRDEHLHRAGDRATAHGAGSGDSCGGKGGGGDGGLALGADAEVAAREQHDGGRPPPARPARPGRPRVRPRVR

SEQ ID NO: 227404 - protein, 99 aa, Zea mays
  Clone ID: MRT4577_138985C.1.pep
SVACVHVAVAPSRMGLLVKFAPTRVVAVAPLMSPTPVRAFALGGRRAVHCLFSFPFACCMFVIPVERTCGLVPARLQRLRSVSRLRAITYRLSSSMCYS

SEQ ID NO: 227405 - protein, 296 aa, Zea mays
  Clone ID: MRT4577_138986C.1.pep
MGKDGIQYAVVDAFTAEPFKGNPAAVCLLEDAAKAADERWMQSVAAEFNISETAFLLREKSSAAGAVPLFQLRWFTPVAEVELCGHATLASAHFLFTSVLAEHEKLVEFSTKSGILTAKKVPAPQSTGVSGEGKLFIELDFPTIDLVDCHPSELPAIPDTLNGASIVSVHKSTTAGDLIVELSSGKEVADIIPNIHEIEKCSGRGIIVTGPAPAGSGYDFFTRFFCPKFGIDEDPVCGSAHCVLAPYWGGKLGKHKLIAFQASPRSGILYLELEATGRRVRIQGEAVSVMTGTLLA

SEQ ID NO: 227406 - protein, 144 aa, Zea mays
  unsure (1)..(144): unsure at all Xaa locations
  Clone ID: MRT4577_138987C.1.pep
GGLFFFFFFFFFFFFFFFFFFFFFFCLSEKGSPRAPNGPPFRAGPPGPRGGGGGTGQRSXPGGGEPGAGGEDRGAGYPPEGRGAPGPHGGPXSALSVGGTLRTPAPPPPARGNSAGRPRNTPEAPNPFGGKTSGPPGSPPWGNT

SEQ ID NO: 227407 - protein, 94 aa, Zea mays
  Clone ID: MRT4577_138988C.1.pep
PPFWWGTPVFGVQGEGAFMEFFDFKIAGSFRGLGHRKVLNKVCCLFSNLDPQGWHPVPHVFKTRLTGGGFPGPAAIVTNPGGGVFSKTGTRGCF

SEQ ID NO: 227408 - protein, 100 aa, Zea mays
  Clone ID: MRT4577_138989C.1.pep
MPGGHGLSSRTCDLFARPSPTKGYIPLTTYLRTDKISDYRLCKANGAATTVMPYQFYHRRTGRARTDAPPTIRAKRTSCCRRVYRKEVFLDHVEHVEACR

SEQ ID NO: 227409 - protein, 561 aa, Zea mays
  Clone ID: MRT4577_138990C.1.pep
MATPDDRGSWLLYLSLAAKCAGDQPYRLTGFLAVCAVAFVVTCLLHWCFPGGPAWGRWWWTRRLGAGAGGGATAAAAALPGPRGLPVVGSMWLMTGLAHRKLAAAAGSLGARRLMAFSLGGTRVVVASHPDVAREILSSPAFADRPIKESAYGLLFHRAIGFAPYGAYWRALRRVASTHLFSPRQVAASAAQRAVIARQMVGAVKELSAASPGRRGGVEVRRVLRRGSLHSVMWSVFGRRYDLELDPARESPETRELRRLVDEGYDLLGQLNWSDHLPGLACLDLQSTRARCDRLVPLVTRFVGGIVDEHRARNHLRSAPPAVVDFTDVLLSLPADDRLTDADMIAVLWEMVFRGTDTVAVLMEWVLARLVLHPDVQARVHDELDRVVGPDRAVTESDTASLVYLHAVIKEVLRMHPPGPLLSWARLATSDVHVDGHLIPAGTTAMVNMWAITHDPDVWAEPTEFQPERFMGSTEFPIMGSDLRLAPFGAGRRSCPGKSLAMATVAFWLATLLHEFELLPSPVDLSEVLKLSCEMAVPLALAVTARPRQAVQKSVGVSVSL

SEQ ID NO: 227410 - protein, 152 aa, Zea mays
  Clone ID: MRT4577_138991C.1.pep
MRRRPALPPHGLPCRLRRGLRRDLPPALVLPGRPGVGEVVVDAAARCRCRWRRDGGGGGPAGAEGPARGTDTVAVLMEWVLARLVLHPDVQARVHDELDRVVGPDRAVTESDTASLVYLHAVIKEVLRMHPPGPLLSWARLATSDVHVDGHL

SEQ ID NO: 227411 - protein, 168 aa, Zea mays
  unsure (1)..(168): unsure at all Xaa locations
  Clone ID: MRT4577_138992C.1.pep
MYIIIINVMYLNLKLCTIFSSQVSPELYGDSRPRLFTYWTVSTSCCCMLVDLHRIQSSTLLIXSYNXAMDDTHACTYIWLQSDAYEATGCYNALCPGFVQTSSRIAIGASISPVSSAGGAQYDMTLLVWKDPKLGNWWLSYGDQLVGYWPAQLFTHLSDHATMVGVGR

SEQ ID NO: 227412 - protein, 323 aa, Zea mays
  unsure (1)..(323): unsure at all Xaa locations
  Clone ID: MRT4577_138993C.1.pep
GYLEAGLACLDLQSTRARCDRLVPLVTRFVGGIVDEHRARNHLRSAPPAVVDFTDVLLSLPADDRLTDADMIAVLWXVTEPSVASSSSQCNLFQHLRTAWLLRFLMDDTRTSLRPFFLFCLQEMVFRGTDTVAVLMEWVLARLVLHPDVQARVHDELDRVVGPDRAVTESDTASLVYLHAGIKEVLRMHPPGPLXLSXARLATSDVHVDGHLIPAGTTAMVSMWAITHDPDVWAEPTEFQPERFMGSTEFPIMGSDLRLAPFGAGRPSCPGKSLAMATVAFWLATLLHEFELLPSPVDLSEVLKLSCEMAVPLAVMARPRQAV

SEQ ID NO: 227413 - protein, 116 aa, Zea mays
  unsure (1)..(116): unsure at all Xaa locations
  Clone ID: MRT4577_138994C.1.pep
MGISPAIPARMLLVALLGGVCCGATDGRSSHARHTDADDAIRLPSKCGAGGRPRNCCECAIKDASLPSXRCNDGEDXCAATXQDCQGWPAVDGCAXGDWISSLTEXAXCTQRPWDC

SEQ ID NO: 227414 - protein, 77 aa, Zea mays
  Clone ID: MRT4577_138995C.1.pep
YKGPIGRTSYNITFDGPVYRKLTTKGVKLQDHNTQSHPPPYLNQPSGFNNHEAYYNNHLSGIYCLKKIGTKNYNNLV

SEQ ID NO: 227415 - protein, 55 aa, Zea mays
  Clone ID: MRT4577_138996C.1.pep
PPNFFKKRGGGALPPSLRAGTYPPEKGGARLFFPEEGQGPPPQGQKTKFLNGKKK

SEQ ID NO: 227416 - protein, 367 aa, Zea mays
  Clone ID: MRT4577_138997C.1.pep
FKIIESFTPEARDMFEREFDFFDKVTSISGVLFPLPKDERRAGIRRELEKISIPGDDLYLPTATNKLVRGIQLDSGIPLQSAAKVPIMITFNVVDRDGDPNDVKPQACIFKVGDDCRQDVLALQVIALLRDVFQAVGLNLYLFPYGVLPTGPGRGIIEVVPDTRSRNQMGETTDGGLLEIFQQDYGPVGSPSFETAREMFMISSAGYAVASLLLQPKDRHNGNLLFDSHGRLVHIDFGFILEISPGGNMGFESAHFKLSHEMTQLLDPSGTMKSDTWNQFLRLCVKGYLAARRHMNGILSTVNLMVDSGLPCFSRGDPINNLRKRFHPEMNEREAANFMVRTCADAYNKWTTAGYDLIQYLQQGIEK

SEQ ID NO: 227417 - protein, 41 aa, Zea mays
  Clone ID: MRT4577_138998C.1.pep
FLQIIDIHLQLHHSDLGSLLPALVILDCKSAPCTGNVCSLL

SEQ ID NO: 227418 - protein, 220 aa, Zea mays
  Clone ID: MRT4577_138999C.1.pep
GRVDRSPTEIDKQTVPSTMDLLGVLSTGFATSTPVTNTSQSQGSSDSSGNNKSKSHSTEPVTVVNSHDISTQDFPASARGRSNSTQESRPHIYKQTEHETRPYLSLQLFGSSEEDIPPKMDSLNKYLSSESSNPLDERSPSSSPPITRKFFPIHSVDEEVRHPHITDFGEDATMGEVSTSQAWSAPPLDLLKDLERTLENGSAPNAEYQSCYGGTSWEDH

SEQ ID NO: 227419 - protein, 112 aa, Zea mays
  unsure (1)..(112): unsure at all Xaa locations
  Clone ID: MRT4577_13899C.1.pep
VPRAGRXARTLDPFRRQXXCPTPAAACPSSPHPMXALVCAASLLRRAVGFVSTTALLYYPPRNVGPXLVKNLXGFFFNGYSTLLVFYMKCCFHXNFFLPGLCGHXYCSLFCL

SEQ ID NO: 227420 - protein, 86 aa, Zea mays
  Clone ID: MRT4577_1389C.1.pep
MAAAGPWPRDLAPRVPCLAWPPRLEPDPVARVLRGLWATPALELPLFVGHGVGRCRWPKSGRSVAAAGWPWGGSQIRRSGGRICHP

SEQ ID NO: 227421 - protein, 73 aa, Zea mays
  Clone ID: MRT4577_138C.1.pep
PKSYNYFLTNLCYKHYLSSHRDGLHLAKISYTYRINHTNLWQVEMVEHKKMKHFKNHMSTIRLGHHLDEQSCY

SEQ ID NO: 227422 - protein, 106 aa, Zea mays
  unsure (1)..(106): unsure at all Xaa locations
  Clone ID: MRT4577_139000C.1.pep
MAPNKSVGHPALRFLAAMALVFTVSVCGQSSSPAPTPAPAPAPATTPALAPIMPAPTPAPTPATTPPASAPTAPAPTPAPTPSLTPAPTPAPAPXPKTGVPLASLT

SEQ ID NO: 227423 - protein, 149 aa, Zea mays
  Clone ID: MRT4577_139001C.1.pep
ALSSSAGNGKSDEIVGIRAHCRLFGIGIVVVCFIFSSSLLCIRRSNNMLYPREDKETRTLLYACQTCEHEEIATDTCVYKRVIRKPGGEPKDVLKDAATDPSLPRTRSVRCYNCNHPEAAFFQAPTKGEQAMTLYFICCNPSCGHRWRD

SEQ ID NO: 227424 - protein, 106 aa, Zea mays
  Clone ID: MRT4577_139002C.1.pep
GRPGSRAYAQVKRAPALSILDTCYDFTGRTKVQIPSVALLFDGGATLNLGFGGVLYVANRSQACLAFASNGDDTSVGILGNMQQKTFAVVYDLANQKIGFGAKGCS

SEQ ID NO: 227425 - protein, 161 aa, Zea mays
  Clone ID: MRT4577_139003C.1.pep
MMDRHMEEDSSTFLQWAMNHLQHPAAATAVSAAYQQEGGAGVGARISGGAGDQEDSAAAFPSLQALRASQPQVVPGSVRVRDLTVQVADYGGLTNSSSSGDSPGAAMDHDAAAGWSPHTARSRTTGLGGGSNSRSVSWNFSAASAQPAYDRGAVTVALPDA

SEQ ID NO: 227426 - protein, 69 aa, Zea mays
  Clone ID: MRT4577_139004C.1.pep
IFVCLQASENKGLSLGLGQTFQIWGFVIICWALIKMDVGKSVPIPVLHKCPVIQLIFIMYVCMYVCMFV

SEQ ID NO: 227427 - protein, 159 aa, Zea mays
  Clone ID: MRT4577_139005C.1.pep
APPPGGSLKIFLLRCPQVFKIRGKGGDPKFFGPPRGGFTPRIQGWEGHHRGFLPWGSGVLFLPKGAVGFFLAEKRGAYPRFKWPPAKKREGGVKKSPLFFFPSKPRFFERGVFPPPFHIEKARYSVAVETKEPKILSPRGGGEEPKNFLTYKNKRGGGG

SEQ ID NO: 227428 - protein, 62 aa, Zea mays
  Clone ID: MRT4577_139006C.1.pep
YSSLVLVLFPCLVECRLLAFMQLYYSIKDARDVREITSSNDGGGCLHLGLGNIHIELDNIYA

SEQ ID NO: 227429 - protein, 94 aa, Zea mays
  unsure (1)..(94): unsure at all Xaa locations
  Clone ID: MRT4577_139007C.1.pep
CTRQEAAGQSYGCRHRWPNTRRHGXGLLADPTDEETLKGALRRIPTRTESDRKAEWATGRRGAATWRALPLTESAGTQLAVEHPGQHAQGTRPQ

SEQ ID NO: 227430 - protein, 69 aa, Zea mays
  Clone ID: MRT4577_139008C.1.pep
MHIHFRELDTHRAMAAHERELIGLIHVVRQWSPYLWGPRFVVKTAHCTLTSLMAQRLVTIPQHHCLGRV

SEQ ID NO: 227431 - protein, 182 aa, Zea mays
  Clone ID: MRT4577_139009C.1.pep
MPVSRIAVGSHREVYEVGALKAALAEFISTLIFVFAGQGSGMAFSKLSPDGAATPAGLISAAIAHAFALFVAVSVGANISGGHVNPAVTFGAFVGGNITLFRGLLYWIAQLLGSTAACFLLRFSTGGLPTGTFGLSGIGAWEAVVLEIVMTFGLVYTVYATAVDPKKGSLGTIAPIAIGFIV

SEQ ID NO: 227432 - protein, 73 aa, Zea mays
  unsure (1)..(73): unsure at all Xaa locations
  Clone ID: MRT4577_139010C.1.pep
XTSPSXTSRRCCSAXXRGVXXPXIXPSISRSPXXPANPGSLLCLLRCVRFLSCXCVRTRGSTREFRXXXCSRX

SEQ ID NO: 227433 - protein, 164 aa, Zea mays
  Clone ID: MRT4577_139011C.1.pep
MSNTAEENTGGGGGGSTPTRVVVVERVVTVEYLEPSMSRELLGKFPDPSAFDFDYSQSGIWSPLNKVPRGGACEPETADATNSSTDFLIANPKRRARAGGRPKDSAGGGRSRWRRRRLRRDGSFLDLHETGRARLDFSPPAPSPAKVVAAHLPSLSFAEIVVSN

SEQ ID NO: 227434 - protein, 92 aa, Zea mays
  Clone ID: MRT4577_139012C.1.pep
DPRALWAYQHAAQHREPGAPKSGWEKHTKSSGERSPSKETDEGKTGAPVPATGKDTGAEKTNKNEKLAQRTTDPTGPRKPTPKKRTRSPRRT

SEQ ID NO: 227435 - protein, 71 aa, Zea mays
  Clone ID: MRT4577_139013C.1.pep
MEMGERETKEFCFLKMENRMLREECSDFDMAEKALRLKEQNLRLEIEKAREQFKSLLNEYVSLSATPTQKR

SEQ ID NO: 227436 - protein, 165 aa, Zea mays
  unsure (1)..(165): unsure at all Xaa locations
  Clone ID: MRT4577_139014C.1.pep
PPPPPRRGSGRPAVPTPQTTSLPRRRRRRRRRALLHGDAAHGSSSSSSSQSIRPPEAGCDGPRRAARRNVQDGQLGSSWTTPPRTTSSSPSPATATTREEGGGALPRRRRRRRRGLXHHDVREVSGKKLVDLEPGLATVSSTRLLLRPASLARCRRPTPSSPPGP

SEQ ID NO: 227437 - protein, 205 aa, Zea mays
  unsure (1)..(205): unsure at all Xaa locations
  Clone ID: MRT4577_139015C.1.pep
TGTDTSRVAKYQADNAVPGAENELASGAASPHSLQELQDTTLGSLLSALMQHCEPPQRRYPLEKGVPPPWWPTGDEEWWPELGIPKDQGPPPYKKPHDLKKAWKVSVLTAVIKHMSPDIEKIRRLVRQSKCXISFNTSSSEYDVDIIDECKGDEAGNQRTAVTDPTAFNLGAAILSDKFLVPTPMKEETADVEFIQKRNAPAAAD

SEQ ID NO: 227438 - protein, 72 aa, Zea mays
  Clone ID: MRT4577_139016C.1.pep
FTNKLGLLEWNSALMSNSTIKGLLPSLVLIKPTWKTNLAKPIVNMGQIEVLPGTQGQIRGKYRVINHAKIAT

SEQ ID NO: 227439 - protein, 647 aa, Zea mays
  unsure (1)..(647): unsure at all Xaa locations
  Clone ID: MRT4577_139017C.1.pep
MMGGGLLVDQSVVFPGVHNFVDLLQQNGDKNLGFGSLMPQTSSGDQCVMGEGDLVDPPPDSFPDAGEDDSDDDVEDIEELERRMWRDRMKLKRLRELQQTRGKDSLASGAGLADGSSKPRQSQEQARRKKMSRAQDGILKYMLKXMMEVCRAQGFVYGIIPEKGKPVSGASDNLRAWWKEKVRFDRNGPAAIAKYQADNAVPGAENELASGAASPHSLQELQDTTLGSLLSALMQHCEPPQRRYPLEKGVPPPWWPTGDEEWWPELGIPKDQGPPPYKKPHDLKKAWKVSVLTAVIKHMSPDIEKIRRLVRQSKCLQDKMTAKEISTWLAVVKQEEELYLKLHPGARPPASTGGIASAISFNTTSSEYDVDIVDECKGDEAGNQKTAVTDPTSFNLGAAILSDKFLMPTPMKEETADVEFIQKRNAPAPAEPELMLNNRVYTCNNVQCPHSDYSYGFLDRNARNSHQYTCKYNDPITQSAENKPLPAPPQPQAFQPAFSQANQAVNNLDFSLPMDGQRSIAELMNMYDTNFMTSKTMSSSDSVTIMERPNAMPQRIQMDEGFFGQGNGVFDDVNSMMQQQQQQAPPVVQQQQQQQFFIRDDTPFMSQMGDITSTAEFRFGSGFNMSSTAAADYPGAAQKNDGANWFY

SEQ ID NO: 227440 - protein, 115 aa, Zea mays
  unsure (1)..(115): unsure at all Xaa locations
  Clone ID: MRT4577_139018C.1.pep
VHLLELNXVVAQQLQQLXLAELAAYSQHQXLLPSSQLDALNSASYLQHQQLPFRQLPVAYPQQFLPFIQLAALNSAAYLQQQHLLPFSQLAGVSPATFLTQPQLXAFYXQHAAPN

SEQ ID NO: 227441 - protein, 75 aa, Zea mays
  unsure (1)..(75): unsure at all Xaa locations
  Clone ID: MRT4577_139019C.1.pep
MALLNQQGLXYSNFKLVIVGDGGTGKATFVKRHLIGDYXKIYLATIGVXVHPLDFSTNYGHIRYYCWDTTGQEKF

SEQ ID NO: 227442 - protein, 55 aa, Zea mays
  Clone ID: MRT4577_139020C.1.pep
FGSSTVENQLFFSWTFISFWGGLKLIWSCKETLQLFRCPAETSSDPMNVTAILFG

SEQ ID NO: 227443 - protein, 85 aa, Zea mays
  Clone ID: MRT4577_139021C.1.pep
TILDFQAVQKLLTSPKFTFGYDALHGGAGAYSKHIFVEELGADESSLLNCVPKDDFGRGHADPNLTYAQELLEHMGLGKSYSNVE

SEQ ID NO: 227444 - protein, 108 aa, Zea mays
  unsure (1)..(108): unsure at all Xaa locations
  Clone ID: MRT4577_139022C.1.pep
GTQTHLPXQLRRRSVVSACICVSLSLVQRDLMIWHHPDVPDTFPTISAWKTTSSKMPLLKTIRILVPRPLTTGPFLGRLKNLPCGTNYNIFAAEFXLQLLDDPDMDHP

SEQ ID NO: 227445 - protein, 42 aa, Zea mays
  Clone ID: MRT4577_139023C.1.pep
LLAKVQRRVCMLSNTTAVAEVWDRMDHKFDLMYVKQCPAGGH

SEQ ID NO: 227446 - protein, 66 aa, Zea mays
  Clone ID: MRT4577_139024C.1.pep
KAFSNAFIHLKKHYLYLICLKDKKNFDFALKTYYLINYSHIPLVSDKVYFFKSTKKSLNITYAHAL

SEQ ID NO: 227447 - protein, 71 aa, Zea mays
  Clone ID: MRT4577_139025C.1.pep
CLYANPAVPTPLRMRVVRNQSYSMPSLLPCKGQCDSGGGSVWLIRKEAGRGGRSRHACFVLHKVLVVTLYE

SEQ ID NO: 227448 - protein, 55 aa, Zea mays
  unsure (1)..(55): unsure at all Xaa locations
  Clone ID: MRT4577_139026C.1.pep
MPTMWDRSEGVEVFGGVTGGEGXAVFSLAPNIGPLGLYFFFIGEDIXGETAEDWK

SEQ ID NO: 227449 - protein, 78 aa, Zea mays
  Clone ID: MRT4577_139027C.1.pep
CHLNLINLPSFYNFITLKTFSLPKLITFQHILFSPVVILTKRPTPFSLSKNFHILNGYIYSPFTFTLIPIIFFVYSHF

SEQ ID NO: 227450 - protein, 147 aa, Zea mays
  unsure (1)..(147): unsure at all Xaa locations
  Clone ID: MRT4577_139028C.1.pep
MLRCCDGELFSAHLCSKKKKKKKKDMFHWQATIMGPPDSPYAGVFLVNIHFPPDYPFKPPKVSFKTXVFHPNINSNGSICLDILKEQWSPALTISVLLSICSLXTDPNPXDLCVPXDIFSHTHQYKXTDRPXYEATARNLTPKYAMG

SEQ ID NO: 227451 - protein, 55 aa, Zea mays
  Clone ID: MRT4577_139029C.1.pep
RGAPFFFFIRVCSSFFFFIFFFFLSRTAYVLSKASSISVRAEGGDESSVGSCVSV

SEQ ID NO: 227452 - protein, 116 aa, Zea mays
  unsure (1)..(116): unsure at all Xaa locations
  Clone ID: MRT4577_13902C.1.pep
SSGNNAEYFFFFFFFFFFFFFFFFFYACFILYLLFLNTRTPSLFGGAVTFCGGKTLQKALSLLGGWCSRNLRLPPGVLGPLGGSGAETPPPPLWLWGPGGPPGRLPPCPPRXCWSW

SEQ ID NO: 227453 - protein, 42 aa, Zea mays
  Clone ID: MRT4577_139030C.1.pep
KKKKKKKKKKKKKKKKKKKKKKKKKKKKKKKKKKKKKKGGPF

SEQ ID NO: 227454 - protein, 297 aa, Zea mays
  unsure (1)..(297): unsure at all Xaa locations
  Clone ID: MRT4577_139034C.1.pep
DDGRQNLVAYHEVGHAICGTLTPGHDPVQKXTLVPRGQARGLTWFIPMDDPTKQMVVTFALISRQQLFARIVGGLGGRAAEEVIFGEPEVTTGAAGDLQQITGLAKQVYFPLHCNFVNGNVNVCKEFCWSSQTILHFMTKNQTMLQNHMVEPVIIDSNLXLLSQGFTTTDLRCQLYXITMVLQMVVTFGMSEIGPWSLMEGGAQSGDVIMRMMARNSMSEKLAEDIDSAVKQLSDEAYEIALRHIRNNREAIDKIVEVLIEKETLAGDEFRAILSEFVEIPVENRVPPATPAAALPA

SEQ ID NO: 227455 - protein, 82 aa, Zea mays
  Clone ID: MRT4577_139035C.1.pep
HLRFFCFWTPWHCLFCFYCGHRLQMCMLIVHSIQLNNLIISINEIEDCVLYKFKMSQIILAGTKHVGVGRQCTIWVRFFFYF

SEQ ID NO: 227456 - protein, 139 aa, Zea mays
  Clone ID: MRT4577_139036C.1.pep
PRVRSSLSIKALPGIGHTVSSKLKSKEIEYCSQLRNVSKDALHKDFGKKTGDLLWNYCRGIDHSIVGSVQETKSVGAEINWGVRFNDNKDAEHFLNNLCKEVSLRLQGCGVQGRTITLKVKTRREGAGEPIKYMGCGDC

SEQ ID NO: 227457 - protein, 72 aa, Zea mays
  Clone ID: MRT4577_139037C.1.pep
NPPKQKFLGGGGGAIVPKFPGATPILKGVNFLGSKGKNKRLWGKNYAFSKKNNFFFLGGNFGNMKTTLIGSK

SEQ ID NO: 227458 - protein, 395 aa, Zea mays
  Clone ID: MRT4577_139038C.1.pep
MAGVTATGMAGVPATFSSATAQIGGFLSKKPYAPPLWATHLSPMPCHTFSLGHFPTPIHKWNLPNLPEGTEVWIKRDDLSGMQLSGNKVRKLEFLMADAVAQGADCVITVGGIQSNHCRATAVAAKYLNLDCYLILRTSKLLVDKDPGLVGNLLVERLVGAHVDLVSKEEYGKIGSVALADLLKKRLLEEGRKPYVIPVGGSNSLGTWGYIEAIREIEQQIQQSSDVQFDDIVVACGSGGTIAGLALGSRLSSLNTKVHAFSVCDDPEYFYDYVQGLIDGLNSGLDSHDIVSIENAKGLGYAMNTAEELKFVKDIAASTGIVLDPVYSGKAVYGLLKDMAGNPAKWKGRKVLFIHTGGLLGLYDKADQLSSLAGSWRRMDLEDSVPRKDGTGKMF

SEQ ID NO: 227459 - protein, 68 aa, Zea mays
  Clone ID: MRT4577_139039C.1.pep
MGFLICACLLQLLFLGSSPAAAQSPSPARALDAMLQGYAYRAFVRPHTGIVYNGTVPADLAGVAVSRL

SEQ ID NO: 227460 - protein, 37 aa, Zea mays
  unsure (1)..(37): unsure at all Xaa locations
  Clone ID: MRT4577_13903C.1.pep
FTGVPDNATYSGFTFSLINSAXEVTYSFQVRTRTYGH

SEQ ID NO: 227461 - protein, 124 aa, Zea mays
  Clone ID: MRT4577_139040C.1.pep
LENSLLRPAAERHAKKKKKKKKKKKKKKKKKKKKKKKKKKKKKKKKKKKKKKKKKIKKKKKKKKGGPTYKKPNFCDPFHQQKISMTGHKKKNDGKHVQNIGPGKTQECTNLKNEIKNPLPKWGG

SEQ ID NO: 227462 - protein, 85 aa, Zea mays
  Clone ID: MRT4577_139041C.1.pep
ALKKIFSPGKCPRGGKPLFEPWRFFLTLFLGTAFPNNFLVFQAFSPMWGGGIFPPPEISSWAPPGFTSPATFWVPLLLLGAPSLF

SEQ ID NO: 227463 - protein, 76 aa, Zea mays
  Clone ID: MRT4577_139042C.1.pep
SFILLLLKAKACIWTDRLCPGSQQSRGNVTKSLQPSFLLGPDSQFSYPCMPPHRLSFWPPKLIILAHRLHRRNWEN

SEQ ID NO: 227464 - protein, 68 aa, Zea mays
  Clone ID: MRT4577_139043C.1.pep
TSSPTNGAKFAQRTSLAPNKLENPCVPPPAILFTSRWASSKISEKVCHFKFPRWTIDDWICVELNLKF

SEQ ID NO: 227465 - protein, 74 aa, Zea mays
  Clone ID: MRT4577_139044C.1.pep
RPEASYDICRRSRYIERPTYTKLDLLESQAILSLTASLRINGALNVDENKFQTNLEPYPRIHFMHATNAPNKAD

SEQ ID NO: 227466 - protein, 55 aa, Zea mays
  Clone ID: MRT4577_139045C.1.pep
IKKKKKKKKKKKKKKKKKKKKKKKKKKKKKKKKKKKKKKKKKVFSLGRNPLRGNF

SEQ ID NO: 227467 - protein, 72 aa, Zea mays
  Clone ID: MRT4577_139046C.1.pep
YSEICMHTLWCLHFAAHYIGLKARKVLMHVIYTGATNAVYVDACVCTLKGSSFRRMRRKLLPGHSLIIQVIS

SEQ ID NO: 227468 - protein, 104 aa, Zea mays
  unsure (1)..(104): unsure at all Xaa locations
  Clone ID: MRT4577_139047C.1.pep
PRPKNGGSCLGGDKKERGGRGLLCWSSLPGLLGDASLRLRGQQNQIFWLGFXXXXXLWGGGGLCYXHSPHICGGGGVPPGRKEIRQPXGAGGSTAPLRPPRCRP

SEQ ID NO: 227469 - protein, 51 aa, Zea mays
  Clone ID: MRT4577_139048C.1.pep
TKHPFAPVLRSFPFLSVFFVNFHDFAGIRFFTRKCKKHRKFFYISVEFFGG

SEQ ID NO: 227470 - protein, 110 aa, Zea mays
  unsure (1)..(110): unsure at all Xaa locations
  Clone ID: MRT4577_139049C.1.pep
FCPNGLKKPWNPTHLSPGWLDPPILNPPXQKKLKIGLQWFPPGSNKQASPSFNPLCGPHPNPLIQLWPGPAPKQGGGWKKKILPLFHPPPGKKRRSRLDPPLCRIGRGRT

SEQ ID NO: 227471 - protein, 68 aa, Zea mays
  Clone ID: MRT4577_13904C.1.pep
TLEADQPVFPVTDQPQSVPRSLFRRRHSCTNPLNNFWVYSQDGLWALRTTPSACSCDFASRAQSTCVN

SEQ ID NO: 227472 - protein, 122 aa, Zea mays
  Clone ID: MRT4577_139050C.1.pep
PPPLLPPPSRARPATSASPSVIPHPRASPRIPPPTPAPSDINANGGFLSYGNMESYAMWVATGVASAFFVSLERCSCIHLHTVEDDGDEEEEDLEEARRSFSRPIPEYYYDRCGSSASVTKM

SEQ ID NO: 227473 - protein, 82 aa, Zea mays
  Clone ID: MRT4577_139051C.1.pep
ISLPFQQLTRIREIGNDFPILTICRALSRCYTNFTHTTIQSLDIFTWGFFCPCDHNSEASRRDRHRDGATEQRRTSELNHGE

SEQ ID NO: 227474 - protein, 124 aa, Zea mays
  Clone ID: MRT4577_139052C.1.pep
ENLGFPRELPPPPGVFLTPWGGGRFEPPFTNFCQPCPVFFKKKGYPVSAGFARAVTCFGRAPVSGGSKEGFFFFPGLGGAPKPKKTSFSKKKKKKKKKKKKKKKKKKKKKKKKKKKKKKKKKNS

SEQ ID NO: 227475 - protein, 85 aa, Zea mays
  Clone ID: MRT4577_139053C.1.pep
MNGINPNGGFLSYGNMESYAMWVATGVASAFFASLERCSCIHLHTAEDDGDEEEEDLEEARRSFSRPIPEYYYDRSGSSASVAKM

SEQ ID NO: 227476 - protein, 206 aa, Zea mays
  unsure (1)..(206): unsure at all Xaa locations
  Clone ID: MRT4577_139054C.1.pep
MILLQSPSRFLLQILKDRVVSGDKGVDIDCHTVEFDDMRYHIQFSMRNPKVMVLSVALPLAPPEAILHDGLPLGAIDAIKAAYGAVVQILDPPKDCFDVTMKINLTKLPTDEEQRNVVLTRIASVREVVLGAPLKLLLRHLASKTVAPNVDKLVALVHRPNESFFLAPQADKXVTVVYPMRFQDSIDIVLATSFLQEFVEARRTAA

SEQ ID NO: 227477 - protein, 114 aa, Zea mays
  unsure (1)..(114): unsure at all Xaa locations
  Clone ID: MRT4577_139055C.1.pep
FDLEGLDPLLADDPEDPLNIIISNMHKILFNIDSSATTSNRIQDVQAVLICAQRLGARNTRAGQLLTKELEEFRASTSADSVTKHQSRYVLQVITYVTHHXNNRWVALRDATGD

SEQ ID NO: 227478 - protein, 47 aa, Zea mays
  Clone ID: MRT4577_139056C.1.pep
DSKIHLNCLTVVTLLHINIVPDRATRTTAHVGCHEHQAERVFLPSSL

SEQ ID NO: 227479 - protein, 57 aa, Zea mays
  Clone ID: MRT4577_139057C.1.pep
LVFESQKIYIYIYIYIYASGFELVILLPTGFISCYLKTDFLPSQLQTEYTIMHLLGW

SEQ ID NO: 227480 - protein, 78 aa, Zea mays
  Clone ID: MRT4577_139058C.1.pep
PIIQHVRSFHMLGGLIQHFESSHMVPPLMSRLFFSHPPLLYRTPLLVKPLVTRAPSLVYNVTRGTQLVVFLRQVWISP

SEQ ID NO: 227481 - protein, 77 aa, Zea mays
  Clone ID: MRT4577_139059C.1.pep
MGVYTFVCRNNCGEWTDKQHSGEIEAYAATPYELQRLLITDASAADSAYGVQSSLYMVTPSYVVFQVIVGAVGGGAM

SEQ ID NO: 227482 - protein, 105 aa, Zea mays
  unsure (1)..(105): unsure at all Xaa locations
  Clone ID: MRT4577_13905C.1.pep
QRVGAGAPVCLPPVVEYLRGEVVELAGXLPRSHQKTRIITSQVLLXIVKDKELAYLLDGVSIAPAGVLPNTDHVVVPNKPGEQGFSVGTKEAKSPNKTAKSPNKA

SEQ ID NO: 227483 - protein, 51 aa, Zea mays
  unsure (1)..(51): unsure at all Xaa locations
  Clone ID: MRT4577_139060C.1.pep
GSFSNVKHTRNSRTGAVRAIKVLDRNHVLRHMMVKHIKRXTSTIKHIKHPN

SEQ ID NO: 227484 - protein, 53 aa, Zea mays
  Clone ID: MRT4577_139061C.1.pep
FTFPAPRTWLVRGHMLSVEGYPRFAERSAGVTAPSHSLATLGAVGQLTPPPCI

SEQ ID NO: 227485 - protein, 145 aa, Zea mays
  unsure (1)..(145): unsure at all Xaa locations
  Clone ID: MRT4577_139062C.1.pep
SCLNWHSILQHVLTLLEFILPQDFLNMFFRDQYRPIPNVYNLVLAMLWRHPENVQLEKVKVAHYCAAGSKPRRLTGKEANMDREDIKTLVNKWWDIYNDEALDFKXCPSRPADADDEVEAVAKKPLRAALAEAGTVKYVTAPSAA

SEQ ID NO: 227486 - protein, 106 aa, Zea mays
  Clone ID: MRT4577_139063C.1.pep
RAIQARLWTSKLDVVAISECNRHSVIRSFGKRIDLVYEARFSCLLVVRCGISPKSLQLTGAVRTESCLVGHVEGAVLRSTLASSFFLGALVSAGMRAGLSVRRMGQ

SEQ ID NO: 227487 - protein, 79 aa, Zea mays
  Clone ID: MRT4577_139064C.1.pep
RLKKTGHYAITQRRSIARMELLKELVPGCSKASGTALELDEIINYAHVSTKYLTMILAGGDPTSHLGGLDSFLTTEINV

SEQ ID NO: 227488 - protein, 103 aa, Zea mays
  Clone ID: MRT4577_139065C.1.pep
AAGRPPHPRHGPGRRESAQCPGRLSARAGRFGPAAGPAGFPTASGQCAASPVMEGVSLGRHPRQYTKPNRIDKKREKRERKKKIKQKTKKKKLKKKNGKKKGV

SEQ ID NO: 227489 - protein, 50 aa, Zea mays
  Clone ID: MRT4577_139066C.1.pep
LCFWECSNEWRHWVSFSITPCLLLIASLSLASVRKRETVYVKKRTRGPGS

SEQ ID NO: 227490 - protein, 139 aa, Zea mays
  unsure (1)..(139): unsure at all Xaa locations
  Clone ID: MRT4577_139067C.1.pep
KKDFPFGEKEPFCFFFPENQKLGFPFGLPDPPFLCFVPFPGKAKSSPGPVFLPFLXMGLGNSLFRLGLASPLLGAPPFFSPSPFFVYGGIVFIPSFCCHPPVFFSPGGSPRSNRLVPNFFASPPPGHFPRPFPVSPFPF

SEQ ID NO: 227491 - protein, 108 aa, Zea mays
  Clone ID: MRT4577_139068C.1.pep
LKVGFSGHVVKALLDRFKQHSIIYSTRSGCVHAVVDVIEEGNLSVACRPPTIQLLEGAVARNFHGGVVGTNYLASEGRSLLVVAINGSTECSSHTRTCKFMNSTDYCF

SEQ ID NO: 227492 - protein, 74 aa, Zea mays
  unsure (1)..(74): unsure at all Xaa locations
  Clone ID: MRT4577_139069C.1.pep
TGPSGGPWGLRKPPKGRTAPGGTPRPXGKNPPGLVPAGKNQLDAHPAKKRPLGFETLGPGRGKFVCQGKQNLIC

SEQ ID NO: 227493 - protein, 75 aa, Zea mays
  Clone ID: MRT4577_13906C.1.pep
PPPCVFLVPGGKSPPSPCLFFPPLCSSPNPPKSFLGTFPPFYKFLFFCPFNFLCPAFNRQSFVLPPIFDFCPPLV

SEQ ID NO: 227494 - protein, 141 aa, Zea mays
  unsure (1)..(141): unsure at all Xaa locations
  Clone ID: MRT4577_139070C.1.pep
MTSLLSSPMAASSSSGRRRYDVFPSFSGDDVRKTFLSHLLKALDGKSINTFIYHGIHRSPTIAPELISATREAMISIVIFSKNYASSTWCLNEFXEIHKXFNDLRQMVIPAFTTFXSFEVKKQTGQFGRVFXKTCXVNKDK

SEQ ID NO: 227495 - protein, 89 aa, Zea mays
  unsure (1)..(89): unsure at all Xaa locations
  Clone ID: MRT4577_139071C.1.pep
GAGAPPPVALIGPPAGVRRLPRLCFPRAPLLXEGPQGPPGGRRGEHAPLFGVVAPPVSWSLPXCASRACVIVIXEPPPCCARVRMYALV

SEQ ID NO: 227496 - protein, 168 aa, Zea mays
  unsure (1)..(168): unsure at all Xaa locations
  Clone ID: MRT4577_139072C.1.pep
ERSSRAARPLFLKLIPMVAVAQLGRSSCSLARSPMPRAPPWPLGLAAVAQSAADLDRPRTGGVWEAAGAGALAVLPTAVAMAAVPLSLAMELPCTRAPWWFSLPSLFPSLSSLSTCRRVVHRRASLPITEFPAVSLRTRPRPSLSVRLCFVVVLRCRRVLMSIWWXSI

SEQ ID NO: 227497 - protein, 77 aa, Zea mays
  Clone ID: MRT4577_139073C.1.pep
SHSAIIHRTIAQRSTVVNSEQWTTPKSEVRTAKSEHTGLSGVPPDFLLSQEDKGLQRSTALTFCCRKRTKDFNGQLL

SEQ ID NO: 227498 - protein, 101 aa, Zea mays
  unsure (1)..(101): unsure at all Xaa locations
  Clone ID: MRT4577_139074C.1.pep
RWRADVDVVRTYLRHHPLQSIGYPHADYMHKXRRATGGKHNTRGKKRKYELGRQPGDTKLCNYYTIRKVPLPXWNVKRKAFLLDTSYYSWGSGGLNPKNQI

SEQ ID NO: 227499 - protein, 77 aa, Zea mays
  Clone ID: MRT4577_139075C.1.pep
GFLTFIHFMGVRLRQVARSWPALGSPKLLELLLPLPPKCWAHSMLPWHLHELGDDLCSSEKVTGTLVGQQVLTDYCR

SEQ ID NO: 227500 - protein, 50 aa, Zea mays
  Clone ID: MRT4577_139076C.1.pep
RVVVYEKTKSSISFVAVSLRSGACKITRDEGVKYSDFLSVKEFVVMLVWY

SEQ ID NO: 227501 - protein, 117 aa, Zea mays
  Clone ID: MRT4577_139077C.1.pep
LQPATRGFPSAIAGIAAPLFPDFPYARASLCAPPAGRPGARPATTLLCPVSLSAACWQLATLPARGRRPGRSFLSLCSLCSPLLLVLPVPLCCLGAQLVSVHPPPAPLCVLGIGAGL

SEQ ID NO: 227502 - protein, 59 aa, Zea mays
  unsure (1)..(59): unsure at all Xaa locations
  Clone ID: MRT4577_139078C.1.pep
PSXMCTGKRILKTLHRCTDVQAHVSTMFSVRAELIVNKRNKIHKYESRCHTINRYRGSY

SEQ ID NO: 227503 - protein, 106 aa, Zea mays
  Clone ID: MRT4577_139079C.1.pep
LQGSFLSSPGFIFIWDPLAMKQNLFFEAQFFFGNPFFPKNRFLIFFLRVFGRKRAPTLALVSSPNWGGPHMPKKQDDPPFFHEGEQKRAGRPENHRGGVHFCPQKQ

SEQ ID NO: 227504 - protein, 49 aa, Zea mays
  unsure (1)..(49): unsure at all Xaa locations
  Clone ID: MRT4577_13907C.1.pep
VLSLKQNHVVKGRTSLTCVSAIKNLMVEHAXSFPREKKTKIQFITLPVF

SEQ ID NO: 227505 - protein, 93 aa, Zea mays
  Clone ID: MRT4577_139080C.1.pep
MSKRGRGGSSGAKFRISLGLPVGAVINCADNTGAKNLYIISVKGIKGRLNRLPAPGVGDMVMATVKKGKPELRKKVHPAVVIRQRKSYRREDG

SEQ ID NO: 227506 - protein, 154 aa, Zea mays
  Clone ID: MRT4577_139081C.1.pep
DMGGKKHQLPCIQYTIDDQCITHVCNIFSRVTPRFEAWYLHACGTLSLRSHQPERYDQRVHAVDRVTTAGVVVGVFPWAGGIEVIRFLSQFSSTLQRIELSKDIMSLTLMTTCGRVANRRHRIVSGVKCNLIMFVPLLVLACGVPVVVSCSSCN

SEQ ID NO: 227507 - protein, 142 aa, Zea mays
  unsure (1)..(142): unsure at all Xaa locations
  Clone ID: MRT4577_139082C.1.pep
MSEADRIRHCTAALALHDDEVRDKPDAKANVFADLGSPVSPLRVRASVATXSSSSSSGSAKSPAPSNAGMAGGRSHSGELVGECNPPRLXGYKRSGSGQLIFTGGGSRGRGGGSGDRGSTASSPMLNALPTGNIFPPVRVPA

SEQ ID NO: 227508 - protein, 41 aa, Zea mays
  unsure (1)..(41): unsure at all Xaa locations
  Clone ID: MRT4577_139083C.1.pep
CXKYXSEIXKLSXXWICVSINCLLFYKQHLFATEIXIKFHI

SEQ ID NO: 227509 - protein, 171 aa, Zea mays
  Clone ID: MRT4577_139084C.1.pep
MASLSPALLPGAGVTLLRAPPVFRVTASSSSSGSKKGKKPKSGSKGKDTKALEPPAPVVRRAPPGSASIFQQQKNEAASRAGGAGGKGPTEEELRQRQANENAFLLAWLGLGIIILVEGIALAASGFLPEEYDSFFVKYLYPSFTPTVVLFLAGTVGYGVLKYFESEKSKS

SEQ ID NO: 227510 - protein, 62 aa, Zea mays
  Clone ID: MRT4577_139085C.1.pep
MARFQLAAVAMAMLFAAAAAQAPTATPTPAPKASPPPATPTPTRSPASPPVPPTTMPAPDHA

SEQ ID NO: 227511 - protein, 138 aa, Zea mays
  Clone ID: MRT4577_139086C.1.pep
MSILWEKSAGWRWLVRRTRDSKPFFFTFAALCGVVPGVIGYGVMQLTGSRNEQLEAHLRSTARPETTMMGQVNRERLAEFLGELQRKEDTNDRYVAALRGETLTRKRYERIQPLPAANAQASQETAGASAEEERPKAK

SEQ ID NO: 227512 - protein, 157 aa, Zea mays
  Clone ID: MRT4577_139087C.1.pep
QRYELNGDDDEVVVNHTYGANGHIRLEKRMEAQTIVVPSPIDIYRRGHRAKNSEIPNELCSQASAERLETYRQKMVRKYGEGYDWRGAPTIDVEVMHSIREKANAGYSMFTGVTDSTELRSRGGSSSQASCGIEGNGPLHAITGDTSTSESRLEGGE

SEQ ID NO: 227513 - protein, 138 aa, Zea mays
  Clone ID: MRT4577_139088C.1.pep
MSILWEKSAGWRWLVRRTRDSKPFFFTFAALCGVVPGVIGYGVMQLTGSRNEQLEAHLRSTARPETTMMGQVNRERLAEFLGELQRKEDTNDRYVAALRGETLTRKRYERIQPVPAANAQASQETAGASAEEERPKAK

SEQ ID NO: 227514 - protein, 150 aa, Zea mays
  Clone ID: MRT4577_139089C.1.pep
GGPAGISLGFKKPFNPQFVFQTRRLRVRPTTKFFFFFFLPVFFPFPGEGVWILRPPPGLVPTYQKPGSRWDPPFPIKGGVSGHLVGAGQSWPYKKMGGGTPKKKGGLKRPGLGPEKGGRGVFLVQPPKKNFVFFFHPYPFGPKKILKKKK

SEQ ID NO: 227515 - protein, 59 aa, Zea mays
  Clone ID: MRT4577_13908C.1.pep
PPVFGGSWFRLQRSQGCVFSGLLVLSPNGQLMYPSCPTCARSGCWLFRKKKINHDQKKG

SEQ ID NO: 227516 - protein, 486 aa, Zea mays
  Clone ID: MRT4577_139090C.1.pep
MSAPPVRTLADLDGDVLAHCAGYLGARDVASLAMACRPLRAAAYCDAVWYRLFRDQWPFEKVPCDALGLRELYIHRHTEIHQMKFGDPIGSLYYLDPTRTPTRPVMMDRNSIWFCQGPAAKKLNIDLPETEIVETHRNHSARITCLRLFPLIDTPLFRSDTQKNEKALVTSSTDRTIRLCWKGYSRCYKGHSAPVTALADRLLMDGESKLLASGGEDCTIRLWSMSTRAKNHPLIATFHGHEKALSFLSVAWHKSSLLVSCSKDSKVKVWDTVAPSSGSSSCVGSAHLNSNGPPIAMKCHESLCYIAAGAEVTAIDLRTMKKASVLALQNHRILSCEMMPSEWLICTGTKDRALLWDIRKAQELPNTVAEMQSNGPVTLLHLDQYKVVTGVPSDGQVHVWETRTGDSLNTLGCGEPSRLGVRSRVSAMAVDGCRIAMAGSSPEGCMLHYRDFATASAPVVSLPGKEKEVSRFWRPQEFDDSEEEEY

SEQ ID NO: 227517 - protein, 78 aa, Zea mays
  Clone ID: MRT4577_139091C.1.pep
VMQKEMKHRGKKNTSNRTEKPSISGHPERWKMAYTKENTRTIDPVHDGTKITGLLRKQAGYSNTVATSEQEAKHADTK

SEQ ID NO: 227518 - protein, 91 aa, Zea mays
  unsure (1)..(91): unsure at all Xaa locations
  Clone ID: MRT4577_139092C.1.pep
DVQEPPEPEDDRDIMLGNKKKIKKNVKFPDEDDILQKDEALEDEDXKKDDGISFSNQTGPAWAGSERDYTYEELLNRVSNIMREXNPDMVA

SEQ ID NO: 227519 - protein, 80 aa, Zea mays
  Clone ID: MRT4577_139093C.1.pep
LFFYTFFFFGVFFFFLRANGTKPFRAADQWASREITRHPPCWPPKFHARHSHAKWPPKKLQPLGQHKVGHLFTTFPHQYH

SEQ ID NO: 227520 - protein, 79 aa, Zea mays
  Clone ID: MRT4577_139094C.1.pep
FISKNKISLNPSNIYMAGTLSSSPFQITDRFRKSRSVVVGPYSQMLHIKNKATQLLTIRYLRPSKHYLPWDIMIFRRRS

SEQ ID NO: 227521 - protein, 57 aa, Zea mays
  Clone ID: MRT4577_139095C.1.pep
IGPSDPCPSSPKPWNHPQWTSPSPSSRDLRPVKWLGLSARARAGISVLSKNAGKNGG

SEQ ID NO: 227522 - protein, 308 aa, Zea mays
  unsure (1)..(308): unsure at all Xaa locations
  Clone ID: MRT4577_139096C.1.pep
ARRRSPLXGTRIKTRKRNIAAPLDPASFSDAIVQIYLDNGGDLXTFWVVQHXELVAKSIESSDLNFSRYGDTFFEVVFVGGRTQPGTVKPEEGDRHPYSVLDXKGKMEDNLLDFFPSAKRSSEALSEHFTKEGLTSLVEYNEKKMFEVKLKEIKSTLTAMINDEAAISEVIETVKQQVKDAKFPDLEVIRMLWDVLMEAVQWSGKNQQQNSNAALRQVRAWTELLNAFCTSGRLELELIHKVQTQCYEDAKLGRVGGGVGRTLYDQDVLAEDTIVLWFRKGSNPKGRQSFVKALEPFVKWLEEAEEEE

SEQ ID NO: 227523 - protein, 48 aa, Zea mays
  Clone ID: MRT4577_139097C.1.pep
PLPSVRETIAQLVVYSLVEDYLSYWMHRLLHTQWCYEKIHRVHHEFTS

SEQ ID NO: 227524 - protein, 80 aa, Zea mays
  Clone ID: MRT4577_139098C.1.pep
KTEVNYLFFFVSRAPHFFFFGGGGGGKKSPAPFSGEMFDGALSGILNLYSFSRALAPPTGFKLFRRCLFLKWASCVTLEG

SEQ ID NO: 227525 - protein, 306 aa, Zea mays
  Clone ID: MRT4577_139099C.1.pep
MIPYATAAEAEGALGRTMTWAETAWYEYSAVMPDSWLHCHTTFILFVIYSIAPLPLLLLEQFAPSVVLPYKLQPRVRLPPAASLSCYMDAACIFPLAVGLQFVSYPAVAKILRTRMGLPLPSVRETIAQLVVYSLVEDYLSYWMHRLLHTQWCYEKIHRVHHEFTAPTGFAMSYSHWAENVVLSIPALAGPVLVPCHVTTQWLWFSIRLIEGINTHSGYHFPFSPCRLIPFYGGAAYHDYHHYAGGRSQSNFAPLFTYCDYLYRTDKGYRYHKLKQEKLKSLAENSADKGGNYSFDEGKKNRYFCA

SEQ ID NO: 227526 - protein, 104 aa, Zea mays
  Clone ID: MRT4577_13909C.1.pep
MDSHSHLMAGAEPPLYRGVGRPIRGHLREQESFAAGFPSPYRRALVRSRGIQRRIRMRSTSWVGQQPRRPPAPISMKTVKKHGIYVMAILNHSIGKHGFQRLRF

SEQ ID NO: 227527 - protein, 118 aa, Zea mays
  unsure (1)..(118): unsure at all Xaa locations
  Clone ID: MRT4577_1390C.1.pep
IFFCGWSIRASFGGLPKNQXHRPTPYHRCLLGRAALLPRLPPPSAHSVYDLFFFLYLLLLGLYGGLXXPXXPXRWGGEKNXMSYLTNSGSHMYTCHGVILVLGPFISAFFLVESTWWR

SEQ ID NO: 227528 - protein, 88 aa, Zea mays
  Clone ID: MRT4577_139100C.1.pep
ITQYLLKTDFINIYNNQDEHVAVAQVVVKVHLGYLFGSGEPPKPAVAPAVNAPPAAASAPPAEKPPAAKPDGTSQIAAGVTSHSNNYH

SEQ ID NO: 227529 - protein, 415 aa, Zea mays
  unsure (1)..(415): unsure at all Xaa locations
  Clone ID: MRT4577_139101C.1.pep
MSSKEKPTLGGTRIKTRKRNIAAPLDPASFSDAIVQIYLDNGGDLELVAKSIESSDLNFSRYGDTFFEVVFVGGRTQPGTVKPEEGDRHPYSMLDCVAQRETILPFVLYIQKTLRRWKRCXPFLIKNLENVMRKFLQSLEFFEENERKKLAIFTALAFSQKLSGLPPETVFQPLLKDNLVAKGIVLSFITEFFKEYLKENTLDDLIALLKKGKMEDNLLDFFPSAKRSSEALSEHFIKEGLTSLVEYNEKKMFEVKLKEIKSTLTTMINDEAAIPEVIETVKQQVKDAKFPDLEVIRMLWDVLMEAVQWSGKNQQQNSNAALRQVKAWAELLNAFCTSGRLELELIYKVQTQCYEDAKLMKLFPEIIRTLYDQDVLAEDTVLLWFRKGSNQKGRQSFVKALEPFVKWLEEAEEEE

SEQ ID NO: 227530 - protein, 55 aa, Zea mays
  Clone ID: MRT4577_139102C.1.pep
FGLVWSRRTKAQWTGQNTHLIPNLNNKWLFGSPNPSGFMAPQLVHLVPPFYMWVQ

SEQ ID NO: 227531 - protein, 68 aa, Zea mays
  Clone ID: MRT4577_139103C.1.pep
PRVRPASAPRPPTRPLFPAVVTTLYDAGLAEDTVLLWFRKGSNQKGRQSFVKALEPFVKWLEEAEEEE

SEQ ID NO: 227532 - protein, 50 aa, Zea mays
  Clone ID: MRT4577_139104C.1.pep
IIFYPPRGGGKGLYHNGRAHPRMSKVSHRPQFSRLTGKELITARQEIQKG

SEQ ID NO: 227533 - protein, 411 aa, Zea mays
  Clone ID: MRT4577_139105C.1.pep
MSSKEKPTLGGTRIKTRKRNIAAPLDPASFSDAIVQIYLDNGGDLELVAKSIESSDLNFSRYGDTFFEVVFVGGRTQPGTVKPEEGDRHPYSMLDCVAQRETILPFVLYIQKTLRRRPFLIKNLENVMRKFLQSLEFFEENERKKLAIFTALAFSQKLSGLPPETVFQPLLKDNLVAKGIVLSFITEFFKEYLKENTLDDLIALLKKGKMEDNLLDFFPSAKRSSEALSEHFIKEGLTSLVEYNEKKMFEVKLKEIKSTLTAMINDEAAISEVIETVKQQVKDAKFPDLEVIRMLWDVLMEAVQWSGKNQQQNSNAALRQVKAWTELLNAFCTSGRLELELIHKVQTQCYEDAKLMKLFPEIIRTLYDQDVLAEDTIVLWFRKGSNPKGRQSFVKALEPFVKWLEEAEEEE

SEQ ID NO: 227534 - protein, 50 aa, Zea mays
  Clone ID: MRT4577_139106C.1.pep
VSSECSFSPASLILIKVQFSGRLFDKAFPGITPAYPNLAASSIHFRFQQL

SEQ ID NO: 227535 - protein, 418 aa, Zea mays
  Clone ID: MRT4577_139107C.1.pep
LLFSCFLCSSKEKPTLGGTRIKTRKRNIAAPLDPASFSDAIVQIYLDNGGDLELVAKSIESSDLNFSRYGDTFFEVVFVGGRTQPGTVKPEEGDRHPYSMLDCVAQRETILPFVLYIQKTLRRRPFLIKNLENVMRKFLQSLEFFEENERKKLAIFTALAFSQKLSGLPPETVFQPLLKDNLVAKGIVLSFITEFFKEYLKENTLDDLIALLKKGKMEDNLLDFFPSAKRSSEALSEHFIKEGLTSLVEYNEKKMFEVKLKEIKSTLTTMINDEAAIPEVIETVKQQVKDAKFPDLEVIRMLWDVLMEAVQWSGKNQQQNSNAALRQVKAWAELLNAFCTSGRLELELIYKVQTQCYEDAKLMKLFPEIIRTLYDQDVLAEDTVLLWFRKGSNQKGRQSFVKALEPFVKWLEEAEEEE

SEQ ID NO: 227536 - protein, 65 aa, Zea mays
  Clone ID: MRT4577_139108C.1.pep
PSKSSPIVWLHPKPLLPSWFREVLTSEAAAKLSLGLTSAISFRTEYRSEPKTASPDIYRQLACAG

SEQ ID NO: 227537 - protein, 51 aa, Zea mays
  Clone ID: MRT4577_139109C.1.pep
PCGRALLSSQLEGPTPPQKSMKPMSTMFLIFDTNQIVHGRPLEKKLVDPAI

SEQ ID NO: 227538 - protein, 60 aa, Zea mays
  Clone ID: MRT4577_13910C.1.pep
LRHFNVRSGGMSVGLRFLRINCFGCREHVAKWFFKFKALRPVRMFLSFDIKCVMFLSRKF

SEQ ID NO: 227539 - protein, 113 aa, Zea mays
  Clone ID: MRT4577_139110C.1.pep
RELRGLTWNSIYHYNRHPYSKGNQPTHLPDVHMGQQAGLLAYLVHAMGGTSQTTLMMITTIKDSSGIHATRQHLQMVLQLIDHMRLYKQILKHVESFRYNYADSGTHMIMRKL

SEQ ID NO: 227540 - protein, 158 aa, Zea mays
  Clone ID: MRT4577_139111C.1.pep
HGEQGPDAWRVGEPSSWRVATPADRRVAPCAGEGSHGQGASRPRGMGGLEPRHGARRARDWLPRRRAHAQGRGGQLAGMSLPEPERTRHAAGGRARFSRERGARLAAWGLEPPDSWRRQALAAATVMARCSAWLSMRSGGEESGDWSNMGVGGFSSSV

SEQ ID NO: 227541 - protein, 29 aa, Zea mays
  Clone ID: MRT4577_139112C.1.pep
RDYFRCSYTSRVGDKESSKVYGRVGVRMT

SEQ ID NO: 227542 - protein, 144 aa, Zea mays
  unsure (1)..(144): unsure at all Xaa locations
  Clone ID: MRT4577_139113C.1.pep
TYWLINCFGSTDLIRDAFNWGSKMLNIEKAHVVPCQRFNEALLAWPIKDEIKPVLFDKLGYAVLSSIIRVLKNADCLGFITGCSGSQRRCQILFSYAQSEGICPIFKLLNNQFCNTRXYDESDFFKTNQYPIVISLNTSFLHML

SEQ ID NO: 227543 - protein, 120 aa, Zea mays
  unsure (1)..(120): unsure at all Xaa locations
  Clone ID: MRT4577_139114C.1.pep
GPNRKPRDDPRLYGDKQGRKHGAREDRQGTTHTGPDSRAGRPDPREPEGDARASTPTRPAXNLKAETPEGYEQTHTQKTRLNGNPPGAEQAPKPESSKPAPARGRSPPEKRTKQRTRPKQ

SEQ ID NO: 227544 - protein, 141 aa, Zea mays
  unsure (1)..(141): unsure at all Xaa locations
  Clone ID: MRT4577_139115C.1.pep
FWPCCPXSDILXLAPLWGFGGGFTEERSTPPPPPPHSNITDFLTNXWELNTNTXIGTPITTDRSFDRHQLYGGGKKYFFFYSGARHXXKERGRALGRPSVXVVQRFVFLXRGAAGGNAGELLVVGAXXSALFLVWVLVALI

SEQ ID NO: 227545 - protein, 134 aa, Zea mays
  Clone ID: MRT4577_139116C.1.pep
LPAALSIAPSRSLSSPFLLLPRARQAPKGASFLAMGKNTCKLCSRRFASSRALAGHMRSHYMAATKETAATATAAAAAAAATAQHHISSASSASTSIAIADEEVGSMMTASTNGLRENTKRTLGVADVRFSDRE

SEQ ID NO: 227546 - protein, 150 aa, Zea mays
  unsure (1)..(150): unsure at all Xaa locations
  Clone ID: MRT4577_139117C.1.pep
QPSAGGGASGKQKGGRRSDPGXGGGAAXRPASRRARKRPQXRAXPPNRGPAXGGGGGEPXXXNPTGANKKTQTAADRKDPRGRGKHDPQHSNDGGHRHKAGGPTTPARARKPRRRPAATARAARQPSRTEPRSATTAATRQPATSRQPAA

SEQ ID NO: 227547 - protein, 175 aa, Zea mays
  unsure (1)..(175): unsure at all Xaa locations
  Clone ID: MRT4577_139118C.1.pep
KKKKIREEKKRKEGKRKKKNKRNKXKKRKKRENYKRNIDRVVKKNIKNKIKKIIKLLRKKRKKKXKRKNKKEKNIIKEKKKKKXKEKYRKRNNIHNLKKKRXTKTKKFKISKKXKISSIYVKILEKIKQKKKKGSKKXKIRKIKLYKKXKKKRYNRKKKKVRXKKRKKNWQYISK

SEQ ID NO: 227548 - protein, 75 aa, Zea mays
  Clone ID: MRT4577_139119C.1.pep
FKSQSEALEGLRFRYTCMQSQSSSTLSVKFNSKALVLQCRDWERQDLTQINLLGAHPHFPIGRNSKKAHTDSHSQ

SEQ ID NO: 227549 - protein, 107 aa, Zea mays
  Clone ID: MRT4577_13911C.1.pep
IKPRSPFPRGPGLTMKKPFQLNPIDPNFFPPNNKGGPSLPIYQLKNPRNKKHSATGKNKPRLTKKIFVPRKKAVKRGQKSFFMESPQGKPRRGEHFTMQILMTGATP

SEQ ID NO: 227550 - protein, 189 aa, Zea mays
  unsure (1)..(189): unsure at all Xaa locations
  Clone ID: MRT4577_139120C.1.pep
CKXXXPGXTLVLFGVXWHSLLGLWQXXXAXXILXSLXPRQPAGKNPPFPPHXXEGXERLSYPAPXXDAIXXPRQXEXLSISAXIPQFKXRXXTLXXATXXXPAAFLEGTIYXPRLMLCCVPLVDXFVDKEPFCSSRKKEPRCAFLQMTSLCKPFLFLILVQQXLTFPYVGFSRRSXGFYLSACATFTTG

SEQ ID NO: 227551 - protein, 117 aa, Zea mays
  Clone ID: MRT4577_139121C.1.pep
IPEPTPRPPPVPTPSPPPVPTPTPPPVPTPRLPPPPPLPPPPRPTPRSFRAMWRLSAARRSDAITTAPRTATAFACAIVPCAQAGEVSNFSSRWPPTASFSCVHVRAQAIRQLLVDR

SEQ ID NO: 227552 - protein, 47 aa, Zea mays
  Clone ID: MRT4577_139122C.1.pep
FLQKMIEGPVCFLTVTERGFMGMKWASFLGCDIHHCLEGSIARLSHS

SEQ ID NO: 227553 - protein, 61 aa, Zea mays
  Clone ID: MRT4577_139123C.1.pep
SILVHVLSLCNLLQNSLSPGWHIVVMLCQQQILLCHVTSMCEYNIFKLQGVPSRCLRAKIA

SEQ ID NO: 227554 - protein, 83 aa, Zea mays
  Clone ID: MRT4577_139124C.1.pep
LVSTDLKIRSMSPVSTITECATNQLSSGLRARHSSRLPSKCGGGGSLSDEAHIYRVPRPQRLRMHAFAHASAHASAHASAHVS

SEQ ID NO: 227555 - protein, 415 aa, Zea mays
  unsure (1)..(415): unsure at all Xaa locations
  Clone ID: MRT4577_139125C.1.pep
MERSRPGAAPKPSPEEEVAAEGHAHGDDVTGQEEEEEATPVVLKKGPWTASEDAMLMDHVRHHGEGNWNAVQRMTGLLRCGKSCRLRWTNHLRPNLKKGSFSPDEELLIAQLHAQLGNKWARMAAXGWLGARPQLPGRTDNEIKNYWNTRTKRRQRAGLPVYPPEVQLHLALSKRCHYDDYDFPPLASSPQLSATTTTDVQALGAGPGYASSRPAPLDLARSQLAATTTQQTAQFLSPPPFSAPSSPWAKPFARNAQYFQLAHSSPVSPSTPTGPVHPAMPDLSLGGHGARAAAAADQSRLPPLSPSPGPRVELPSNQYGQPAPPTSAAAVAAGLALPDHQNAASLEQMLQELHDVIKVEPQALVPASGGGAALERHDCGVSVPESRISGLQRRGDDMDTLFGLVHPALGAPETA

SEQ ID NO: 227556 - protein, 115 aa, Zea mays
  Clone ID: MRT4577_139126C.1.pep
GRELINPTHKHPYHSIPSVNMQFTTSFIVAAFLGTAFAMPQAAPVDCPETSAIPTCGAPCITSAAAAAGCTDIACQCASSEVIQASALGCVVGNCGIPVALSVQAAAAAVCTACA

SEQ ID NO: 227557 - protein, 317 aa, Zea mays
  Clone ID: MRT4577_139127C.1.pep
VLDAPSLQDDFYLNLVDWSSQNVLAVGLGTCVYLWSASNSKVTKLCDLGPRDSVCAVHWSREGSYLSIGTGLGDVQIWDSSRCKRIRNMGGHQTRTGVLAWSSCILSSGSRDKNILQHDIRVPNDYISKFSGHRSEVCGLEWSHDDRELASGGNDNQLLVWNQRSQQPVLRLTEHTAAVKAIAWSPHQQGLLASGGGTADRCIRFWNTANGNVLNSIDTGSQVCNLAWCKNVNELVSTHGYSQNQIMVWKYPSMSKVATLTGHTMRVLYLASSPDGQTIVTGAGDETLRFWNIFPSVRTQTPVRDIGLSSFSRSHIR

SEQ ID NO: 227558 - protein, 88 aa, Zea mays
  Clone ID: MRT4577_139128C.1.pep
SLLSLAHGTAAGRLHLWVALAHPPSPATPALPHSLLCLAQSAPLPQAVGPHNLPQIQNSLLSPQLTHDDLLSSPIRISRREQKLVSDP

SEQ ID NO: 227559 - protein, 109 aa, Zea mays
  unsure (1)..(109): unsure at all Xaa locations
  Clone ID: MRT4577_139129C.1.pep
ALXXXLPFRILGXSRXXGFXXFLALAFFLLLYHCXXFSKSXSXXQSXXCVFXVTLVLSPVLSLLPFGVDLXRKKRVQVFLFVAKKHWGIAFFXXFEEEVLPVELFGCLL

SEQ ID NO: 227560 - protein, 81 aa, Zea mays
  Clone ID: MRT4577_13912C.1.pep
VRPITQFVGKGQGAWKPSQPPRILSALAGRGHGGEEWLWSCSSGREGLDRKNNGGGVHTVGVPPTPDHHGRCTVTGTQSRS

SEQ ID NO: 227561 - protein, 71 aa, Zea mays
  Clone ID: MRT4577_139130C.1.pep
NCTMPLYTTKQVNISICWFSKELKPNERIQWVKAATIKEQMSFKLNLLKLFRFRKKKQRFHKPPAYTEDKN

SEQ ID NO: 227562 - protein, 46 aa, Zea mays
  Clone ID: MRT4577_139131C.1.pep
IQLSTFNLLVLKLNIGKGMVLVILKVGPIPTLFFYQSILLGEGNHF

SEQ ID NO: 227563 - protein, 52 aa, Zea mays
  Clone ID: MRT4577_139132C.1.pep
GVASYGSGPFFKTLVWKGSFKVTGLGKPINMVLNHAKFGFLFSNIYSHWALN

SEQ ID NO: 227564 - protein, 137 aa, Zea mays
  Clone ID: MRT4577_139133C.1.pep
LSLNTSTSDTIGEIRGGLGTVPGSETLGGTLEAWVAGSCTANLSYGTRTKMVLGCGGHAENAHTVDASTDNALTVTRTIGNHGEYFDDKHDSIVSFATSNTITKDAAGANTGAVGTPEGYLGDNPSNTRSLNALSSA

SEQ ID NO: 227565 - protein, 79 aa, Zea mays
  Clone ID: MRT4577_139134C.1.pep
SRGHHQGGAGSLVQRPLSAMCRATAIEGGFLLPSPSRRLDIRAFYLRLYSCSATTPAELTLAYHPVIGCFFSFFFFFFF

SEQ ID NO: 227566 - protein, 74 aa, Zea mays
  Clone ID: MRT4577_139135C.1.pep
DASSIGNLAYPILMRSNEAKLERGEKGGSDRARVLSFTREAFCGPFSFLKYSWYQKFSGRVGRPGNSGPVPQAS

SEQ ID NO: 227567 - protein, 52 aa, Zea mays
  Clone ID: MRT4577_139136C.1.pep
FCLGWGAPCSGSSATSERHSRTPIASYYDGFSPVKNKFNIEMNTWFTYQILN

SEQ ID NO: 227568 - protein, 214 aa, Zea mays
  Clone ID: MRT4577_139137C.1.pep
MASQTQALSESSAPAASEAVVQKNAKKFKFIPPPTFTDKEEERKYKLGKLAAAFRIFAEHGFDEGVAGHLTLRDPILTDHFWVNPFGRAFSQMTVSDLLLINPDGEIVMGGKPDRQVYNEAAYAIHHAIHTARPDVEAACHSHSTYGRAFSTLGIDLDITTQDACAFYNDLAVYRGFGGVVLAAEEGNNITKALGQKKAVILQNHGFVDDKHQH

SEQ ID NO: 227569 - protein, 48 aa, Zea mays
  Clone ID: MRT4577_139138C.1.pep
RYVFLVVTPRIRRSFNITLIGPVFTVDFSSSACSLYASCSQIHVGHGV

SEQ ID NO: 227570 - protein, 79 aa, Zea mays
  Clone ID: MRT4577_139139C.1.pep
NVKAPGNANRSGLVVLLKRRFFWERAVRVSVGLSNRHCAWQKCVELVESTSTCSVGVSVLIQGGRDCSLCGGRHGGRAV

SEQ ID NO: 227571 - protein, 62 aa, Zea mays
  Clone ID: MRT4577_13913C.1.pep
VWRVGLRCLEDRADVTKRSGYPSTSDYYRDDSVRTLLPFFICPFREGYVACFMKLLNVLYSS

SEQ ID NO: 227572 - protein, 51 aa, Zea mays
  Clone ID: MRT4577_139140C.1.pep
GRGALRRVGSETRRSPPSPQPELDLPHLIPLTPPPHPYVPRKLSSPTSSST

SEQ ID NO: 227573 - protein, 36 aa, Zea mays
  Clone ID: MRT4577_139141C.1.pep
GSILFYFNLNCSFRSLLGLFLKGMVMGEILFFNHRG

SEQ ID NO: 227574 - protein, 76 aa, Zea mays
  unsure (1)..(76): unsure at all Xaa locations
  Clone ID: MRT4577_139142C.1.pep
MAQAMASMTGLSQRVVCSMRADSRTRTAVVVVRAFVEVDTVPHAXGCRAVIRLVATGIVSGALSHAARXETVKTIN

SEQ ID NO: 227575 - protein, 62 aa, Zea mays
  unsure (1)..(62): unsure at all Xaa locations
  Clone ID: MRT4577_139143C.1.pep
AXXTILLSEKQAHETTKKVLTEIQSRNEELIKXIQDCDKNIXELQXTVXXXXENTSTTGXYC

SEQ ID NO: 227576 - protein, 102 aa, Zea mays
  Clone ID: MRT4577_139144C.1.pep
PGFLAQVLRKGESFKPFLRPQFSGNPPVRGVPGVGLFFGVELDVPPGPLVYGCLDPGVFFFPPGKGNLVGLVPPLFFLEKELGPPPVFLRGFLPAPDVVFPP

SEQ ID NO: 227577 - protein, 207 aa, Zea mays
  Clone ID: MRT4577_139145C.1.pep
MDCPPSKVVADAVEAARAAAVAASEARCAVFVAEKEAKAAVQFAAIAVEKVEAVKASSNVDLVDFKYHVSIKNSLRYAIQEMRRQSKLLHSVQKLCSTIPEVQGGKIGKVRGFLEHVCKELDKTSSICEEDLETKNPTWDLYDNPSVDDEHPLDDDELGDGYSTEDPELWEMVFDDFKWEEIKANVSFEEHYRVINYRFEEINDRNM

SEQ ID NO: 227578 - protein, 221 aa, Zea mays
  Clone ID: MRT4577_139146C.1.pep
MRLTKLHPSLAAASTLTPKHSLNANRVVALTPSASHSSGGLRVSAASVAAAQPTPASPAAGAAAALSRVDVLSEALPFIQRFKGKTVVVKYGGAAMKSPELQASVIRDLVLLSCVGLRPILVHGGGPEINSWLARVGVEPQFRNGLRVTDAVTMEVVEMVLVGKVNKQLVSLISLAGATAVGLCGKDARLLTARACPDAASLGFVGEVTRVDPAVLHPSSR

SEQ ID NO: 227579 - protein, 43 aa, Zea mays
  Clone ID: MRT4577_139147C.1.pep
RDSRCPIQNRKHGSHDLRCTYATITEVESFSDYKPRPPSFIIH

SEQ ID NO: 227580 - protein, 74 aa, Zea mays
  Clone ID: MRT4577_139148C.1.pep
MSVIIHKIEEKLHMGGDHKTEDEHHKKADEHHKKEEVEHHMKDGVEHMEGIVEKIKDKITGEHGDKSGDHIAKK

SEQ ID NO: 227581 - protein, 64 aa, Zea mays
  unsure (1)..(64): unsure at all Xaa locations
  Clone ID: MRT4577_139149C.1.pep
SPXVVFXXXNAXRSKYXXVTTTVREXRALCRVRVMAXSIDNSQRVRTRQSRHTPVQLIXHVSNQ

SEQ ID NO: 227582 - protein, 420 aa, Zea mays
  Clone ID: MRT4577_13914C.1.pep
MAAPLLPSSVSVLLSLHIALLLVLCSSQVGDSCSSVRDCGTGLYCGNCPAAGRTKLSCIRDLAIQPTSIVKGLPFNRYSWLVTHNSFSILGEPSRTGVERVTFYNQEDSVTNQLRNGVRGLMLDMYDFNDDVWLCHSLQGQCYNFTAFVPAVDTLKEVEAFLSENPTEIITIFIEDYVHSPMGLSKVFTAADLMKYWYPISEMPTSGKDWPSVTDMVAKNRRLLVFTSDASKEASEGIAYQWSYLLENEPGDPGIVPGSCPNRKESQPLNSRPASLFLQNYFPTIPVQNEACKENSGLPQMAQACYAAAGNRIPNFIAVNFYMRSDGGGVFDVQDRINGRTLCGCDTIAACQAGAPMGACKDTGAPNQTTSPSVNGNVYSGTIEFKTHSTSAASNNNIRSRSVFLLRLQLTLLLFFSFRL

SEQ ID NO: 227583 - protein, 135 aa, Zea mays
  Clone ID: MRT4577_139150C.1.pep
MQLTATLLSLISLTTAITVSYDTGYDDGSRSLSTVSCSDGTNGLLTKGYTTQSSLPSFPNIGGASVIAGWNSASCGTCWALTYNGNTINVLAIDTATEGFNIAEAAMNTLTGGQAVQLGRVDASYVQVDDSVCGL

SEQ ID NO: 227584 - protein, 178 aa, Zea mays
  Clone ID: MRT4577_139151C.1.pep
ISKNSSPLPFQNNGSTSNVPVPRSPREDTHTQDAAKQKSPRARPGHTCMYRIGGVSQGAPVHKLRPNNGDGGDDDSSSFLAISGTGSSVVVVPDAAGHAVPGARVRLYCAACARTTISFISSRRVPINQLASAGRSGGRRLRPPPLLRAAPVFSRPGSSSTHLTCVRQGSLVGRKASS

SEQ ID NO: 227585 - protein, 116 aa, Zea mays
  Clone ID: MRT4577_139152C.1.pep
RMIKLLRSRLRDYLRILCSGLIKERHFGTDIPRWAYHVNSSHIMVALAKRGENKGEVYMMAVQTSFQSILTLKDHCKEGPSMCMRLFVNHQQFSILFSVYEYDDGLRVTRTVRRLV

SEQ ID NO: 227586 - protein, 61 aa, Zea mays
  Clone ID: MRT4577_139153C.1.pep
HTLSSSLLPLITSFHSPNHLLQICSHSSLSHSTMTHSLTLFYITLILMNFPTHKSSITSTT

SEQ ID NO: 227587 - protein, 80 aa, Zea mays
  Clone ID: MRT4577_139154C.1.pep
TESTLAQHTRRYRLHPTASQTFNFNPKRPTSWYTFECRFNWQEIYFGPIILNRTWPKVLLDVCGCTSQLMGLETIQLAIS

SEQ ID NO: 227588 - protein, 58 aa, Zea mays
  Clone ID: MRT4577_139156C.1.pep
MFKAMKIYKSEIVVVYVCYSKETSSAVNYFLPLHTCELASATLMVLTTRDAMRKLILC

SEQ ID NO: 227589 - protein, 56 aa, Zea mays
  Clone ID: MRT4577_139157C.1.pep
WALATTPYSLTSKIGMYHFSPSIHKYNQVLCTIFILVVFMNGWRVVIHAHFLPQIV

SEQ ID NO: 227590 - protein, 142 aa, Zea mays
  Clone ID: MRT4577_139158C.1.pep
GDPGKEERLASKKRRSPAPPRVRKFLRRKYQSFPKGGSQQTHYRLKKQARYMPSPLGHGAGTEVPSTSRNPNLDLNQDSVLNDVGNDCQGQHGHPEVEKLDQVEVNEDTMTPDVKLSVCRDTGEYSPVSEGKRAVPWQDRLR

SEQ ID NO: 227591 - protein, 171 aa, Zea mays
  unsure (1)..(171): unsure at all Xaa locations
  Clone ID: MRT4577_139159C.1.pep
GRGGAATAQKGGCPQIPAKIRPAQSPTGAGGADRAESSCEAQTRSTARKSRRRSALREVRRDQKQIGRSPSRGGAATVQGAAAGGGRSGGSRSRSGGVREGXCSNCAGRSGXAADGGRRSGCGWGKAATRRGGGRLRRRLRRGGRRPRRRLRGGRRPRRRLRILAGLEVPN

SEQ ID NO: 227592 - protein, 100 aa, Zea mays
  Clone ID: MRT4577_13915C.1.pep
IANVNPQFLCRLYSAAERQNRCGARTCRPGHLESWAGPDRMAAPRLPPRRAAALAAQARRRGRARAAVQLSARAAGVYVREPSRLTAKPKPGRDSQVAYG

SEQ ID NO: 227593 - protein, 199 aa, Zea mays
  Clone ID: MRT4577_139160C.1.pep
AWGYMFQIMFQTNAGAVMITDLVFWFILYPLLADNVYKIAFILIGTHSINVVFIVGDAALNRLHFPWFRIAYFLLWTGIFVNVQWIVHFFVSIGWPYPFLDLTFPGAPVWYLVVALLHLPCYGMFALVLRLKHMLLESWFPQTYAKLIKDDNRWSWLSLYASFSKKIKRRFCKLYAPRNHIEIDHTCLSTGFSGSGHVD

SEQ ID NO: 227594 - protein, 97 aa, Zea mays
  Clone ID: MRT4577_139161C.1.pep
MEQSMWLHVHSSHKECPVCKGEVTEGNITPIYGRGNSGSSMEKKVAEDGNASGPKIPPRPHGNRLESFRQQFHHLRPISRRLGEAHGFLSTWRRIFD

SEQ ID NO: 227595 - protein, 71 aa, Zea mays
  Clone ID: MRT4577_139162C.1.pep
MVRRAYPFISSRVTLAALGSSTGGRMSFNKIVDIGSLALVIYRDYYGRLDVIGDVVVQYKVLRVRIDLGKG

SEQ ID NO: 227596 - protein, 36 aa, Zea mays
  Clone ID: MRT4577_139163C.1.pep
ARDCGKVKAGGAYTMNTANAVTVQNTIRRLKEQTEA

SEQ ID NO: 227597 - protein, 36 aa, Zea mays
  unsure (1)..(36): unsure at all Xaa locations
  Clone ID: MRT4577_139164C.1.pep
XRATMNSATRCAHDGLSAPLPSSSDTSASHGALGGG

SEQ ID NO: 227598 - protein, 184 aa, Zea mays
  unsure (1)..(184): unsure at all Xaa locations
  Clone ID: MRT4577_139165C.1.pep
MDPTDQSPEEVYSVWALPPEPVRDRFRRIMEGLRAAYGGPAFEPHVTVVGDFRGRRSEAVKVFRAAAARVQPYTARVTGVARGSFFYQCVYILLDPTAEVVGASDHCCANFGYNKKTPYMPHVSLLYGDLTDEDRXEARKKAEELIKDICVIEFDITELVLYRTDAIDKSLESWELVEVCHLXK

SEQ ID NO: 227599 - protein, 53 aa, Zea mays
  Clone ID: MRT4577_139166C.1.pep
SSHNVRIRSLPLAAAAVIRGVFVRGPAESSRPAAVRAPRRRPRVPLTHDGAPS

SEQ ID NO: 227600 - protein, 75 aa, Zea mays
  Clone ID: MRT4577_139167C.1.pep
PCLGETSPPARAPVVLGVAPEKKAAPEFVEPPGGSGEAAPGCSWGGNCKWAPCNCCSHRSAPRDMIIIYLAWGGG

SEQ ID NO: 227601 - protein, 184 aa, Zea mays
  Clone ID: MRT4577_139168C.1.pep
MDPTDQSPEEVYSVWALPPEPVRDRFRRIMEGLRAAYGGPAFEPHVTVVGDFRGRRSEAVKVLRAAAASVQPYTARVTGVARGSFFYQCVYILLDPTAEVVGASDHCCANFGYNRKTPYMPHVSLLYGDLTDEEKEEARKKAEELDKDIYVLEFEISELALYRTDTTDKTLESWELVEVCHLGS

SEQ ID NO: 227602 - protein, 167 aa, Zea mays
  Clone ID: MRT4577_139169C.1.pep
HHGRTALPQHNGRSPTPPLLEKSETRDVWASVRSMITPASAESIAMTSDTPASTARQRSLHSVGELPLSSDPRTTVNGMILCYVNLVHSCPTLHFVLESRIYYRSTDGAARDLFPRSKVSGSRYISSLSGVALSICEMYDDDTTLSSIDISGLIHAASTLIHSGFIH

SEQ ID NO: 227603 - protein, 184 aa, Zea mays
  unsure (1)..(184): unsure at all Xaa locations
  Clone ID: MRT4577_13916C.1.pep
MAAPLLPSSVSVLLSLHIALLLVLCSSQVGDSCSSVRDCGTGLYCGNCPAAGRTKLSCIRDLAIQPTSXYSWLVTHNSFSILGEPSRTGVERVTFYNQEDSVTNQLRNGVRGLMLDMYDFNDDVWLCHSLQGQCYNFTAFVPAVDTLKEVEAFLSENPTEIITIFIEDYVHSPMGLSKVFTAAD

SEQ ID NO: 227604 - protein, 105 aa, Zea mays
  Clone ID: MRT4577_139170C.1.pep
AADLVVKGWMFLLKPPPLSAFGKALGPYAFFARSPVSLFFLFKTNRCVVRRLTLCRLVVIPPCPLEEINGCDGEAPWAWPPCFTGKKEGPLWGVETVFSFFFPSL

SEQ ID NO: 227605 - protein, 189 aa, Zea mays
  unsure (1)..(189): unsure at all Xaa locations
  Clone ID: MRT4577_139171C.1.pep
LPHLAQSPMEPMVAIARFNDGHCEAWAPTQAPQVTRERIAERLGIGFDQVTVNVTLLGGGFGRKSKPDYIIEAAILAKAMPGQAVRVQWTREDDIHYSYFHTVSAEYLRASLNKDGTPSGWLHRTVAPSITALFAPNMNNEGAFELGMGFTNMAYNIPNVRLENPEAKVHTRVGWYRXVSNIXPGSPPI

SEQ ID NO: 227606 - protein, 112 aa, Zea mays
  Clone ID: MRT4577_139172C.1.pep
AAPAYILTAASMIAWSALYTSSSRLTRLMKRNPLISRNLYRNDRNTEHDDSTVLDGEEPERHHVQKPKVDGRDQLIDHYREKDHGDRPIQNQHGCGPLPHVHDRELTWLDVL

SEQ ID NO: 227607 - protein, 37 aa, Zea mays
  Clone ID: MRT4577_139173C.1.pep
VYNKEREIIVTVSRLSHVSPSSAFCLCSRTSIPVKAR

SEQ ID NO: 227608 - protein, 92 aa, Zea mays
  Clone ID: MRT4577_139174C.1.pep
FFFFFFFFFFFFFFFFFFFFLNITDPRFRSSQLKNLIKGVHKMDDNSTTDRWALAVKRNPLQRRNQNLHSCLAGFIYRRHGQGYPTRLGGAI

SEQ ID NO: 227609 - protein, 159 aa, Zea mays
  unsure (1)..(159): unsure at all Xaa locations
  Clone ID: MRT4577_139175C.1.pep
VACCLPVXPVXPVPVCCLLLWVPCPALXALXXCCAGSLGRPXPAVGASGSAAWRWAVRVFLRVRFGSASAVGSPAXAXAXRRLLXGFCRWXWXXSSPXXXSXXASXAXVGRAGFLCSXPPPXRVLRFGASSVXGXAGRVSXSCGVGXIXXAPAVXXLSL

SEQ ID NO: 227610 - protein, 114 aa, Zea mays
  Clone ID: MRT4577_139176C.1.pep
MGRAFCYVILGGGVAAGYAALQFIRLGCETAAQAGEFCIISDEAVPPYERPTLSKGYLFPEGGARLPAFHTCVGANDQLLDADWYREYGIELILGTKVISVDVRRKTLDTSAGE

SEQ ID NO: 227611 - protein, 117 aa, Zea mays
  unsure (1)..(117): unsure at all Xaa locations
  Clone ID: MRT4577_139177C.1.pep
HASVHSCFDAWDHLGDGYLFVCAVVLTFTKLFSRFFFKKEMRILMVGLDAAGKTTILYKLKLGEIVTTIPTIGFNVLTVEYKNINFTVWDVAGKDKIXPLWRXFFQNTSQPLFLVVE

SEQ ID NO: 227612 - protein, 119 aa, Zea mays
  Clone ID: MRT4577_139178C.1.pep
MAVSRAVLLLVILTGAAASSPTDSTPEDADTKPSILTPIAHSPLGSFEGADGPVADNAIDDDDAAPVGSPIGTTMTEPEPQLAPPGLPDSSATAASVGHPVAAAAVAAAMATASAIFAL

SEQ ID NO: 227613 - protein, 139 aa, Zea mays
  unsure (1)..(139): unsure at all Xaa locations
  Clone ID: MRT4577_139179C.1.pep
RSRRGXKKKGGGGKKKKKKKKGGKKKKKKKKKKKKKKGEAGLRGPKEHGRGQATKEPKKKTRGGGGTEPPANKAKNGEKRGKPPRRKGQAAQPPYSPAGEKRQKGPHGEGPNQTVATTGKGRRGTRARRRGKKPERAGG

SEQ ID NO: 227614 - protein, 243 aa, Zea mays
  unsure (1)..(243): unsure at all Xaa locations
  Clone ID: MRT4577_13917C.1.pep
ANSGKDWPSVTDMVAKNXQLLVFTSDASKEASEGIAYQWSYLLENEPGDPGIVPGSCPNRKESQPLNSRPASLFLQNYFPTIPVQNEACKENSGLPQMAQACYAAAGNRIPNFIAVNFYMXCSVPTVTSKLPLLHGTEICSLRHVQRSDGGGVFDVQDRINGRTLCGCDTIAACQAGAPMGACKDTGAPNQTTSPSVNGNVYSGTIEFKTHSTSAASNNNIRSRSVFLLRLQLTLLLFFSFRL

SEQ ID NO: 227615 - protein, 82 aa, Zea mays
  Clone ID: MRT4577_139180C.1.pep
LWSRLSRYFDDIIAQPQQIELTRDTSIGDVITTQEYDRYYNDECHCYEKHLSPFRDLLKNGDRNSDVYLISLILLDEHYTLY

SEQ ID NO: 227616 - protein, 165 aa, Zea mays
  Clone ID: MRT4577_139181C.1.pep
WVPRGRPGIPWPSFILLSRENKLTKSSVMVTASAIQAFVNLVLTPCDAGYFIAKFAPNYFITYMSFQMTGVTDILVGGCDSRTLNHDVDWLEKVLKDKEHVTKLVTVLKKVRNLLDLSKDNLQIKESKIQGIYISRAIEIFIFNSSDVLENFFQELTTVLLGKHI

SEQ ID NO: 227617 - protein, 163 aa, Zea mays
  unsure (1)..(163): unsure at all Xaa locations
  Clone ID: MRT4577_139182C.1.pep
MGGGGAIVHGFRRWFHRRSGSTSNQSSIAGDGEGEADGGSPDLEIVDDPDLLGLRAIRVPKRKMPLPVESHRKDSVEMEFFTEYGEASQYQIQEVIGKGSYGVVAAAVDTRTGERVAIKKINDVFEHVSDATRILREIKLLRXLRHPDIVENKHIMLPPSRRE

SEQ ID NO: 227618 - protein, 89 aa, Zea mays
  Clone ID: MRT4577_139183C.1.pep
KAGGPNFRVFVSKNGWPSAGGFGARVDNGGKFNQGLFGPVGRGTPKRAGPLETFVFAMFNENQKGGGSPEKNFGLFFGNKQPGFPIRFN

SEQ ID NO: 227619 - protein, 141 aa, Zea mays
  Clone ID: MRT4577_139184C.1.pep
LRLLQIICKLRWAEFTNQRRNSRDNAVFEAVAEAPSTAHDHTEDDTGNEVPEEDMVSSELQGQTPGEKLVGQSATEQMVGSEDPKPQAENFVAEPVVLGAVGQVEIELESKTTVEVSGEQGYSIEQTVQGEALIEGAGGQL

SEQ ID NO: 227620 - protein, 580 aa, Zea mays
  unsure (1)..(580): unsure at all Xaa locations
  Clone ID: MRT4577_139185C.1.pep
MGGGGAIVHGFRRWFHRRSEGSTSNSNQSSLAGEGEADDGSSDLEVIEDPDLLGLRAIRVPKRKMPLPVESHRKNSVEMEFFTEYGEASQYQIQEVIGKGSYGVVAAAVDTRTGERVAIKKINDVFEHVSDATRILREIKLLRLLRHPDIVEIKHIMLPPSRREFQDIYVVFELMESDLHQVIRANDDLTPEHHQFFLYQLLRALKYIHAANVFHRDLKPKNILANSDCKLKICDFGLARASFNDAPSAIFWTDYVATRWYRAPELCGSFFSKYTPAIDIWSIGCIFAELLTGRPLFPGXKNVVHQLDIITDLLGTPSSETLSRIRNEKARRYLSCMRKKYPVPFTHKFRHADPLALRLLERLLAFDPKDRPSAEEALADPYFASLANVEREPSRHPISKLEFEFERKKLAKDDVRELIYREILEYHPQMLEEYMKGGEQISFLYPSGVDRFKRQFAHLEEHYSKGERGSPLQRKHASLPRERVVVSKDGNTEQQINDQERSADSVARTTVSPPRSEDADMDDVKPTSLSSRSYLKSASISASKCVVVRNKHPEPEDDGIPEEMEGTVDGLSEKVSRMHS

SEQ ID NO: 227621 - protein, 79 aa, Zea mays
  Clone ID: MRT4577_139186C.1.pep
LARDPLGESIYGLELEIDCYGPPQADFLSADAGEVVEETLVSALLKSNCPVTGQPDWATVSLRYRGPRIDRAGLLRYLV

SEQ ID NO: 227622 - protein, 56 aa, Zea mays
  unsure (1)..(56): unsure at all Xaa locations
  Clone ID: MRT4577_139187C.1.pep
XGGPAPFLTRINLNGQVASCKNGYVARMCVTDGWPLHLQPIHCSMLRKKNSYMNGS

SEQ ID NO: 227623 - protein, 28 aa, Zea mays
  Clone ID: MRT4577_139188C.1.pep
FTLSYSRLWKSFSIGLIKFYQKKKKKIK

SEQ ID NO: 227624 - protein, 80 aa, Zea mays
  Clone ID: MRT4577_139189C.1.pep
HRTAAYGSGYIKTTVSKTSMDPASRVTVYIYSQHTQAVKLVCYQRPLGRPFFGRQKSICLLAFWVLNICRNMFQPRVLYL

SEQ ID NO: 227625 - protein, 154 aa, Zea mays
  unsure (1)..(154): unsure at all Xaa locations
  Clone ID: MRT4577_13918C.1.pep
VVPGVLVPGVAVAALXGAPRVGPPFGALLFSGXXAAPLALPALGRPRAVXGPVSPPLRAALVLASGAAXVVAAWVRPAAGGARGVLSPPPCSVSSLGKKRFLLFPFCLAVVCRVAPAPSACPACALSVPSRAGPPPGAWSWRCFSPPPPPGRPL

SEQ ID NO: 227626 - protein, 36 aa, Zea mays
  Clone ID: MRT4577_139190C.1.pep
SAERQTRCHCCLNEWCKISKSYSLPRLIFHLLGLAM

SEQ ID NO: 227627 - protein, 163 aa, Zea mays
  unsure (1)..(163): unsure at all Xaa locations
  Clone ID: MRT4577_139191C.1.pep
HAGKIGCRSLFAWLPSQLSCKTXAGEFGVDTSTCWITYSLHDVVNTCEDAGKLLGFSLVILALLSSGATPKRTPNKLTYNKIHIKAYMKVKGTDTANQYRTIDCGVEKFPFNDEKNQMKKLCLXTTYFTGIAEGIAKNVQTEFQKTKLMTRLTYTLDQIEGPF

SEQ ID NO: 227628 - protein, 60 aa, Zea mays
  unsure (1)..(60): unsure at all Xaa locations
  Clone ID: MRT4577_139192C.1.pep
ALSRGMCDWXCIFLSSLSKMTDLIRPSDAIAIARPPGARQPRPTRGQPRRALEHQLRPQK

SEQ ID NO: 227629 - protein, 95 aa, Zea mays
  Clone ID: MRT4577_139193C.1.pep
TDSNVCRVCKESFSTNMLLIEHAKLHEEDPYICKYCDYKTVIFENLSQHIADTHFSDHLYWCEQCDVQFSSSSELYLHFQEHSCDEQYLCQFCEH

SEQ ID NO: 227630 - protein, 89 aa, Zea mays
  Clone ID: MRT4577_139194C.1.pep
ILVRRSDSSFQSHARVVRYKVTHRSRNTDFTTPMRPPQHHRLLAARQASSPVQSRAGSHTVSARFSEVGAATSVAQGRLCQHPPEEVCA

SEQ ID NO: 227631 - protein, 72 aa, Zea mays
  unsure (1)..(72): unsure at all Xaa locations
  Clone ID: MRT4577_139195C.1.pep
TSRKVPMPALPAPNFPPFPSIPPFIHISRGPGGSYSSREGXSXXXNPLSDPSPFPRDSYAPFTGALWHTRVX

SEQ ID NO: 227632 - protein, 84 aa, Zea mays
  unsure (1)..(84): unsure at all Xaa locations
  Clone ID: MRT4577_139196C.1.pep
FFFALGFXCFFLVLRASGALAGGARVFXLLWXLVGVPXGXSLSGFGSPSLSSLSXXXXXVSRGGSGFXSLYXXWXXLXXXXXXX

SEQ ID NO: 227633 - protein, 106 aa, Zea mays
  unsure (1)..(106): unsure at all Xaa locations
  Clone ID: MRT4577_139197C.1.pep
MFLHAVTNGHDHKAAGAVKGXDHLQPNNARAKQDAHQKKLNLPMLGPTTVASLTQTANLXRRSIHEYKAAKXISPEEYGSAIYEDNIMASKLQEELDIDEIIHCQP

SEQ ID NO: 227634 - protein, 70 aa, Zea mays
  Clone ID: MRT4577_139198C.1.pep
LTFNNSTCKPTWYNKLFTLASYNNQITNFYNNSCAILPYKPLGTKQQNFIKIFYLFEPFSFLNNSYITLF

SEQ ID NO: 227635 - protein, 50 aa, Zea mays
  Clone ID: MRT4577_139199C.1.pep
SINDWRQPTHVMYGLIVKLESDISACQMILGGLSSVVRPTHVCLHLHLSL

SEQ ID NO: 227636 - protein, 53 aa, Zea mays
  Clone ID: MRT4577_13919C.1.pep
MGKTLFFVSIYKCLMLTRCIMRTIHGCKCRENWWNIGCTRWECATRLGRHQEL

SEQ ID NO: 227637 - protein, 43 aa, Zea mays
  unsure (1)..(43): unsure at all Xaa locations
  Clone ID: MRT4577_1391C.1.pep
DGFRYLGTVSPVVVFLSLXXLFFWFYQKIRIGGEXISRAVMVS

SEQ ID NO: 227638 - protein, 70 aa, Zea mays
  unsure (1)..(70): unsure at all Xaa locations
  Clone ID: MRT4577_139200C.1.pep
CDYHRGXRPGLRVRRGPFPNADAGARHGADNARLPSGPATHTHXAENNXAGCPNYCGGVQNDRIPGPYAG

SEQ ID NO: 227639 - protein, 152 aa, Zea mays
  Clone ID: MRT4577_139201C.1.pep
MDRASCVLAGPLDPDLLEKVSEHEDDGTRFGRRRLLFDAVNEALAELAWTAELAAYPWGGGRSRLDCNCKNGSGGDSAAEEIWRVIRNWSTLDKYPPCETIEGNVLLEMILRREADSGETARLEVFGLGASVCVVVLEELVEETVVDLLTDC

SEQ ID NO: 227640 - protein, 89 aa, Zea mays
  Clone ID: MRT4577_139202C.1.pep
ACCSRSCLKPLLSVHRVGVRVVQPVGRCAVIVRRHLAGGAAALWRRRCAGRLRGCVRCGSKRGGRRPGARSLRRPVRSLAPAPPSLLSR

SEQ ID NO: 227641 - protein, 128 aa, Zea mays
  Clone ID: MRT4577_139203C.1.pep
MDRLIYVITAGMYCTHLHPHVRLRAHLINLEQSRARRSHLKCLFVFTYMCRGFVEVSLDRIVSTVPVSVVGGPPAGSHVVAEFPETLEAFLQGRRGARLADVHPEAGPLLWHGPSKLRVGWPSGPGPA

SEQ ID NO: 227642 - protein, 69 aa, Zea mays
  Clone ID: MRT4577_139204C.1.pep
PAPLEEVYAELCLIHQIKVNSRVLKKVLKTNVECTNGLRGLSVIWLNTDRVLKYVGANNNRLEMLLHCH

SEQ ID NO: 227643 - protein, 35 aa, Zea mays
  Clone ID: MRT4577_139205C.1.pep
ADSFIQCRLVSFAVVSRGGWLALLEMHSLYSRLDA

SEQ ID NO: 227644 - protein, 76 aa, Zea mays
  Clone ID: MRT4577_139206C.1.pep
VWATETAHLDKFVVGRPFTPSGLLQKCCSELGLLKPPWSEFIVEGGPFFSKNIYFKNTGAKVFLSKVNGFPRVLGP

SEQ ID NO: 227645 - protein, 81 aa, Zea mays
  Clone ID: MRT4577_139207C.1.pep
VLLREDPHRDDSLIRVSVIVNRKGATLLERLLLMRITHASASPVSIQHHRVNAIVRRIIKAARMRQRSLRAMYVEVRRHRR

SEQ ID NO: 227646 - protein, 64 aa, Zea mays
  Clone ID: MRT4577_139208C.1.pep
EGIRQACLVVEADINLSTYGAGCDKRDDCGHDQIDIYPVRSYCKEPVLGIRVHGAWVGVRARVG

SEQ ID NO: 227647 - protein, 146 aa, Zea mays
  unsure (1)..(146): unsure at all Xaa locations
  Clone ID: MRT4577_139209C.1.pep
PIKRFPGKTANRGKKEREKTKKTGPKGPAKVKGPPGGTPPPPGPKRPPKGGGPXQKGGPPVGKGNRGGPPPNNPTRQKGKCSKRKKRGKPKGFPNPKGEKPRPGKGKTPPKRGKGAPKKKAQRPPRGRKTPKKPPKGGAGQGQNPF

SEQ ID NO: 227648 - protein, 40 aa, Zea mays
  Clone ID: MRT4577_13920C.1.pep
LYLGLFKHGHDVGPPTLGLLPGFYIASGLRRPARHALCRG

SEQ ID NO: 227649 - protein, 87 aa, Zea mays
  unsure (1)..(87): unsure at all Xaa locations
  Clone ID: MRT4577_139210C.1.pep
MVRTHFAVAVAEVAAVLLLATAATTLEAVITCGQVSSAIAPCLFYARGTGSGPCAFCCSGVRNLKSAVSTTVDRRAXCNCLKNAGRG

SEQ ID NO: 227650 - protein, 171 aa, Zea mays
  unsure (1)..(171): unsure at all Xaa locations
  Clone ID: MRT4577_139211C.1.pep
MSYTLYDAAILHTKEALQSLSAILKKASTHANASSFPEAKLAPDMLDLNFQVFFMTDLSQKLVARTTGVEXSPSPATTXTNFEQYQARIAQVLEIVEKADKATVDKRADEIVTIGLGPGKSADMKSRDFVQGFAIPNIFFHLTTAYAILRKEGVEIGKQDFLGPFIGQYLQ

SEQ ID NO: 227651 - protein, 61 aa, Zea mays
  Clone ID: MRT4577_139212C.1.pep
ILTFNCQNIQLYAFSRYSPRSKKLVLSTAKTYIIVLKLNTIFKMKTRTYWLLNHHHKATGA

SEQ ID NO: 227652 - protein, 72 aa, Zea mays
  unsure (1)..(72): unsure at all Xaa locations
  Clone ID: MRT4577_139213C.1.pep
XFIFLHFNFGVVVFFFFSSTRSNFNILKVNFQNRSSKLTETPLLGLANLNKMAFSSTTGSDKCHSTKSVRRL

SEQ ID NO: 227653 - protein, 121 aa, Zea mays
  Clone ID: MRT4577_139214C.1.pep
PSANSPYPGIRMGSKASFRVTLLLLLLAAAWGPAAQADDAAELPDHIAITLKEQVSSTKIPVRLKSGSPLCSACENFTGKAVSYISEKQTQDKVMGFLHDACSQSFSFEQKCDELMDSYAT

SEQ ID NO: 227654 - protein, 78 aa, Zea mays
  Clone ID: MRT4577_139215C.1.pep
KLNPLGLLLLYPSDSVFSLDHTREVEYPGGGLSLIFCPLPFDLIWLVVIFTPSPVFSTPPEYIKFRVFSPVCICITIF

SEQ ID NO: 227655 - protein, 124 aa, Zea mays
  Clone ID: MRT4577_139216C.1.pep
LFAYISQIAVTCYLLQPNSSLLLVVVGPYPIHCPLTFSPSCTAELPDHRAITLKEQVSSTKIPVRLKSGSPLCSACENFTGKAVSYISEKQTQDKVMGFLHDACSQSFSFEQKVIILSMFCMFL

SEQ ID NO: 227656 - protein, 100 aa, Zea mays
  unsure (1)..(100): unsure at all Xaa locations
  Clone ID: MRT4577_139217C.1.pep
XRGGFFLKYTHIPASRAASWLSTIWEADAGGTASHELEPRPLSWTAESWSSLTGVVLDLLPSSTMSGPPPPQAPSSPSRNLSRSISVIGVRIRQAHATPS

SEQ ID NO: 227657 - protein, 142 aa, Zea mays
  unsure (1)..(142): unsure at all Xaa locations
  Clone ID: MRT4577_139218C.1.pep
ERARRLQAKMMTNLVMAKDRLQLLESGAVPKRKDPLTHASNSLPRSKTVMKTGPTGLSGHHRAPSCSGLSMVSGVRQGPGSAAATHKSTPKTNRTNKPSTPTTAARKKKDLKNFRNVDSNLANLIMNEIVDNGTAVKXDDIA

SEQ ID NO: 227658 - protein, 324 aa, Zea mays
  unsure (1)..(324): unsure at all Xaa locations
  Clone ID: MRT4577_139219C.1.pep
MCPGSVESSSAAAAGKSVCVMDAAGPLGHALVDRLLRRGYTVHAATYARDGEEGAAAAALLGHLSCAADACRHRLKLFRADPFDYHAIADAVRGCAGVFCMFNTPDDQAQCDESTVETEVRAAHNVLEACAQTDAMERVVFTSSVTAVVWSXPAPXHREEVADERSWSDLAFCRKFKLWHALAKTLSEKTAWALAMDRGVDMVAINAGLLLAAPGLGLTAAHPYLKGAPDMYDGGVLATVDVGFLADAHVAAYESPTAYGRYLCFSNAVCRPEDAVKLAQMLSPAAPRSPPPSDELKVIPQRIQGKKLNKLMLEFASGVYGELD

SEQ ID NO: 227659 - protein, 81 aa, Zea mays
  unsure (1)..(81): unsure at all Xaa locations
  Clone ID: MRT4577_13921C.1.pep
MVDASSCSVLLLLLDDVAALSAMSVNDATFIITNNCGITVWSADTPVGVGTQLNPDGTWTANVSADNNSXRMWDRNECSFN

SEQ ID NO: 227660 - protein, 90 aa, Zea mays
  unsure (1)..(90): unsure at all Xaa locations
  Clone ID: MRT4577_139220C.1.pep
FNLINEYHAKGESELSNISDGILNLLDSHLVPSSTAAXSKVFYLKINGDYHRYLAEFNTVPEIKESSYNSIIYYFASHDITLTYLLPTHP

SEQ ID NO: 227661 - protein, 164 aa, Zea mays
  unsure (1)..(164): unsure at all Xaa locations
  Clone ID: MRT4577_139221C.1.pep
MWPTHRILTCTALPALLLRRRGXQTDYKRRIPLINQHRPAXSTPKYRSRAPLTNEDMLYTNLSAVYPSXHGDMMLASAYSHELPLSVPERRLTNYVAAXCTGLLLALRXLKTRXLDQGYECLVYHTACYFSDEPCDDNRTFMALLDVEHIMTTTANHVIRALNG

SEQ ID NO: 227662 - protein, 69 aa, Zea mays
  Clone ID: MRT4577_139222C.1.pep
SYIRVCYKRWLVLVSVHGNGHRTTSRPHKMFLAKNSQVNSLTRISQVAPSWNTPLSSFFLIVENPLDAL

SEQ ID NO: 227663 - protein, 158 aa, Zea mays
  Clone ID: MRT4577_139223C.1.pep
KKRIPSTNTPPNLISRHHQYHSAWIITPKSAETISTNTNTPQIPATVTVRKGNQKSPNRYGEASRGSVAIGESGCRQMQSSECGGGRTGGAGIGVETVARANPTREAGYEEKVVVVCRGGWRGGSAKISKPPLPSWLPSPLVSLPRRAGGAEEKEEEG

SEQ ID NO: 227664 - protein, 137 aa, Zea mays
  unsure (1)..(137): unsure at all Xaa locations
  Clone ID: MRT4577_139224C.1.pep
PFPPQLYLLSPILIGVSIQSFPPIYHLSLTPTISTPSRKLLIIYLNRLHQNPPSYIIFSPMYNNIILCNSVIFFPYDTPXHLFTFNLTLHFTEDYPYNLSTIHINSHIFHSNIYSLFSTLFDILHNQLFPIYSFLHY

SEQ ID NO: 227665 - protein, 66 aa, Zea mays
  Clone ID: MRT4577_139225C.1.pep
QLLRAQRQFFETEPFCSSLYKGLSRGGPRGTPKHGQNLSRDPISCPPPQGQNMGGPLAFSSFFLGS

SEQ ID NO: 227666 - protein, 63 aa, Zea mays
  Clone ID: MRT4577_139226C.1.pep
RSPPCHRYQPLPDLTGINNGPVSRPDALLGMRSSAAVSWSLSDRPSGLSESPLLSVCACSVYR

SEQ ID NO: 227667 - protein, 80 aa, Zea mays
  Clone ID: MRT4577_139227C.1.pep
ISPKFPPYPWYPPRVPGDFRLGVRFSVWSLLGSLWFQEPPPGCFSLFKFPFPSGARACFFFWAPPPPWGGSLEPVCFVLF

SEQ ID NO: 227668 - protein, 178 aa, Zea mays
  unsure (1)..(178): unsure at all Xaa locations
  Clone ID: MRT4577_139228C.1.pep
IDEAFRCIRXLNLPSSHHEDGQRALTSGIDNVCXEPSILTLLKAAPDCSLXIHSNQISKGHLXRSTAAVDDSCLDLAYDXLLFDTLDITATYEHIMDASPGEAADRTEEIRSTHPAKLCRQIHILSKLIQGLWVSDDQIILVLLATDLACAHLSDSYQTMLETLALHDQNADVVMVLH

SEQ ID NO: 227669 - protein, 58 aa, Zea mays
  Clone ID: MRT4577_139229C.1.pep
GRLEGGGRVALFLPARDERKRESALSRSIQLTHQKSPRNQKTAGGSYTKGGGISLLRL

SEQ ID NO: 227670 - protein, 130 aa, Zea mays
  Clone ID: MRT4577_13922C.1.pep
MVRTSVLHDALNAMNNAEKAGKRQVLIRPSSKVIIKFLTVMQRHGYIGEFEEIDDHRSGKIVVQLNGRLNKVGVISPRYNVRLAELEKWVVKLLPARQFGYVILTTSAGIMDHEEARRKHVSGKNIGFFY

SEQ ID NO: 227671 - protein, 75 aa, Zea mays
  Clone ID: MRT4577_139230C.1.pep
SSKSVSIPIETFLSIEDFGINFFRSVRYPLSPSFVLDLGAFLFLNKYHLVGSVFLPAFDIYAKSRCPTSTKRTKK

SEQ ID NO: 227672 - protein, 43 aa, Zea mays
  Clone ID: MRT4577_139231C.1.pep
WHSQQNETSQHGHVAEAHNLSPWYLSSLLCRHIHLIDHSHGQP

SEQ ID NO: 227673 - protein, 54 aa, Zea mays
  Clone ID: MRT4577_139232C.1.pep
ICCVELCADHYLTRDTSMTVITTSSNATLYREILYAYIYLSRNNSRLDDLSTRR

SEQ ID NO: 227674 - protein, 74 aa, Zea mays
  Clone ID: MRT4577_139233C.1.pep
MKGGKKEMAGAVVVILMDLQLMAAPPTAMGARSPREAVPDGSLATTPKGTMVSGTLCYTVETCKYTPCFTPACS

SEQ ID NO: 227675 - protein, 59 aa, Zea mays
  Clone ID: MRT4577_139234C.1.pep
MHFSDRSSGTILNKNRLESYAFCNILCPCVYVCICRTAQQLRTLVCVGSRSVSLIMHGV

SEQ ID NO: 227676 - protein, 88 aa, Zea mays
  unsure (1)..(88): unsure at all Xaa locations
  Clone ID: MRT4577_139236C.1.pep
KXLFLKGPXLPCISHXWXLAIWVTFXXRSSALTPTLFVCXXQNXRXXRXTRAPGXCYXXELVPRLAXCSYMGSYADVNAXXSHTTPPC

SEQ ID NO: 227677 - protein, 82 aa, Zea mays
  unsure (1)..(82): unsure at all Xaa locations
  Clone ID: MRT4577_139237C.1.pep
XSEEGDGASGYDAYXWKNLSSDKYGDSSYHDEEEDEDEAEDDEDEDDEVGKDSDAESSDLFTNLNLGRTYASGYAHYEEQDN

SEQ ID NO: 227678 - protein, 72 aa, Zea mays
  unsure (1)..(72): unsure at all Xaa locations
  Clone ID: MRT4577_139238C.1.pep
FLFFCYHRNLQSQEVAKAFGAVCTPEFYLFKKDGRRPFELFYHGQFDDSRPSNNVPVTGXCRDLSRAIDCAL

SEQ ID NO: 227679 - protein, 78 aa, Zea mays
  Clone ID: MRT4577_139239C.1.pep
IQRLGLLPVRHSSISGFAAYLAVHYSQWCAPGGISRRAVGCLPQVRCSVSDVCVRWQSFYVRAFGLQPQRVTVAVAAS

SEQ ID NO: 227680 - protein, 84 aa, Zea mays
  Clone ID: MRT4577_13923C.1.pep
RMAPDAFMHWSVLKPCFGNCSVAVAVIRLQRILLCIRIGVGTIIINLRDDAQFTPVIGIIRFPTRSWSAAGSHAPIQLGGFLPQ

SEQ ID NO: 227681 - protein, 242 aa, Zea mays
  Clone ID: MRT4577_139240C.1.pep
MSLSVGGARTSLLPSSFTASSSRPRFLALPLHRRSHGSLTSLPAACRRRLRVRMARTESTGVTIGFRAPDFELPEPLTGKLWTLDDFEGNSALLVMFICNHCPFVKHLKKDISKLASFYVEKGLGAVAISSNSVRTHPQDGPDRMAEEAELFKYPFPYLYDESQEVAKAFGAVCTPEFYLFKKDGRRPFELFYHGQFDDSRPSNNVPVTGRDLSRAIDCALSGQELPFVQKPSVGCSIKWHP

SEQ ID NO: 227682 - protein, 98 aa, Zea mays
  Clone ID: MRT4577_139241C.1.pep
MAIKNMTVAATTRSLDADMTVDEFKEWLRRFDTDQDGRISRDELRRALRAIRSRFTGWRSRQGISYADADGDGYIDDSEVDGLIEFAQKNLGLKIVAY

SEQ ID NO: 227683 - protein, 67 aa, Zea mays
  Clone ID: MRT4577_139242C.1.pep
TRVRSSSSIFSGRSFGRSYRCSNDLSHDVRPEVIDCVCDIGGDILYDVRYTTADCIVQCNLHYDLSH

SEQ ID NO: 227684 - protein, 68 aa, Zea mays
  Clone ID: MRT4577_139243C.1.pep
MPIACTRKTHEPTLEPQPKTLTQLEPKLKSILLPQLKTNMKPKTVPLHVAPQSYPVHKRLLSISSRTR

SEQ ID NO: 227685 - protein, 63 aa, Zea mays
  Clone ID: MRT4577_139244C.1.pep
ARAKVNRAVCMISNSTSVVEVFSRIDHKFDLMYANRAFVHWYVGERMDHDDFSKAREDQAPLE

SEQ ID NO: 227686 - protein, 155 aa, Zea mays
  Clone ID: MRT4577_139245C.1.pep
MAPSGWRMSAEARVTCCPPTACLCIALTSSALSFSHSTKDLTAATNNVYLMIEIYSQPACRIVMSLYGMTVPKTVYNLRALCTGHIGLGKTVKLLHYKASTIHTIILILMLPGGDFTLGDRSGGESIYRLEHADANCKIHHTAAGLLSMGNAERD

SEQ ID NO: 227687 - protein, 59 aa, Zea mays
  Clone ID: MRT4577_139246C.1.pep
KWAKDRARWTVRTRMAAPALRGWRAIFALQVEGSHEELKDPAGSVQANQHDLGSVVQCL

SEQ ID NO: 227688 - protein, 89 aa, Zea mays
  Clone ID: MRT4577_139247C.1.pep
MRRATTSEPRAGGKDGIQVKARLRRLPLSLHMRRTNPSISCIAGISSRLNPNSRAYIKELHLEDYKAQLRDQVLVHLLVWMTWRVVHQV

SEQ ID NO: 227689 - protein, 117 aa, Zea mays
  unsure (1)..(117): unsure at all Xaa locations
  Clone ID: MRT4577_139248C.1.pep
MGHPGGRRWSSLHPRRQQEEGQSSCQPVGGLQEFFEQHDKKATSFHKTTNNNNLLLLWLLNQQAVVDVVTAGRRGIFHKKRRAXXDSWKVVEGKXKDEMINYFINMVQLLQEAAASS

SEQ ID NO: 227690 - protein, 94 aa, Zea mays
  Clone ID: MRT4577_139249C.1.pep
SKVSVFRLADAVSVVGAANGDCTDSLLVWTALLEPAEKPPALSMIRWGGRRGLWLRFFCLFFIVRRLLYIIGEIVVVKLFTRYVAISNKARIVR

SEQ ID NO: 227691 - protein, 82 aa, Zea mays
  Clone ID: MRT4577_13924C.1.pep
CHGMEFSPRLLAVRVHKSDEWIQLKCHRMDPEFMLFFCALSACASWLSTSIAIGRYFVCLFCCLLDVNEQVCMLVLLLDKKY

SEQ ID NO: 227692 - protein, 68 aa, Zea mays
  Clone ID: MRT4577_139250C.1.pep
AGGFFFLNKKIFPTVHDPQNGSNYISVPNPKFSLQAQKHCCAHKRLLTTRGGGGGATIPLPCSNGTVY

SEQ ID NO: 227693 - protein, 44 aa, Zea mays
  Clone ID: MRT4577_139251C.1.pep
AGTVSSHRHCQHPSESTDLKVTPRSCLRQLCSASERTRHLAQCT

SEQ ID NO: 227694 - protein, 124 aa, Zea mays
  Clone ID: MRT4577_139252C.1.pep
AVPALLECWTLGEAESGRRQRRRGQTVSSLHCPVIQSPPASAAVGARSLTADQPAASPPRGQRRPPDRSLETGEPAARAEVSCCRLAAVGSSGQEGDLVPLPYCREPRVTAVGARRLGPYCHTL

SEQ ID NO: 227695 - protein, 304 aa, Zea mays
  Clone ID: MRT4577_139253C.1.pep
EFCPGGDLHVLRQKQPTKTFSEAAARVYVAEVLLALEYLHMLGVIYRDLKPENILVREDGHIMLSDFDLSLRCSVSPMLVRISSVGRDEPSRPSGPCAQSCIDPLCIQPSWSNSSCFTPRLVSSRRPRAELLKKPSLPQLVVEPTEARSNSFVGTHEYLAPEIIRGDGHGSSVDWWTLGIFLYELLYGKTPFKGPGNEETLSNVISQGLKFPDNPAVSFHARDLIRGLLVKEPEYRLGSSRGATEIKRHPFFEGLNWALIRWTAPPETLKNIDTAPTPVTTRKKKEGKCLEFRLNGDDIEFELF

SEQ ID NO: 227696 - protein, 69 aa, Zea mays
  unsure (1)..(69): unsure at all Xaa locations
  Clone ID: MRT4577_139254C.1.pep
CGHLDFQIEHDLCPTMPRDNYHRVARLVQSLCAKHGIEYQSKPLLSGFAXIIHSLKESWXLWSDRYLHQ

SEQ ID NO: 227697 - protein, 798 aa, Zea mays
  Clone ID: MRT4577_139255C.1.pep
MKMQLVEPEGSKGMGSPGCSEIVELVDEPKDARSCGLTHLRVRVKPVGQELGARSCSVEDDLDQLIRSINVRTSARASGQTSTDRRLIGLGKSPVSGSEIVESVSLKQALRKMCISQASEMAAMKRLSKPTGVSTPSDSGAIKKLYGSVAVQTNEEQDDKSKVGKVYMQPEKPAGSSVGKASEISKGQSKSSAKKNLRSASPTTGNVHKTRIQDVISNKSSEGVEGISVEVTLPKQRKGKSMKTSSPRAVPVGGSRLVRPMFRNKTSTKKKVKPEPAIVPASHKHCETKGPKSHASKQKESLQDEPRTPAPANKKAAVSSTVDGSDFGTKGCGAGVIHGSKVGELSRSKEKGECSQSSKSSIGDYSTSTSISEDSYGSFSANGSRPHMSKDVRWGAIRRMAIQQGSLGLKNFKLLKQLGCGDIGTVYLAELVGSDCMFALKVMDIEYLISRKKMLRAQTEREILQMLDHPFLPTLYSHFTTDNLSCLVMEFCPGGDLHVLRQKQPTKTFSEAAARFYVAEVLLALEYLHMLGVIYRDLKPENILVREDGHIMLSDFDLSLRCSVSPMLVRTSSVDRDEPSRPSGPCAQSCIDPLCIQPSWSNSSCFTPSLVSSTPSRTRRPRAEPLKKPSLPQLVVEPTEARSNSFVGTHEYLAPEIIRGDGHGSSVDWWTLGIFLYELLYGKTPFRGPDNDETLSNVISQGLKFPDSPALSFHARDLIRGLLVKEPEYRLGSSRGAAEIKRHPFFEGLNWALIRWTSPPETPKNIDTAATLAGTRKKKEGKCLEFRLNGDDIEFELF

SEQ ID NO: 227698 - protein, 92 aa, Zea mays
  unsure (1)..(92): unsure at all Xaa locations
  Clone ID: MRT4577_139256C.1.pep
QSPISYLLLSYLLPTISSKIQNPISQPYTIQHXSLSFILPLSPLFLLHPSILLHQLPFFHFIPQNIITHQLQQHFLXNLSSYYHQLHFHSFY

SEQ ID NO: 227699 - protein, 154 aa, Zea mays
  Clone ID: MRT4577_139257C.1.pep
FKRSTFCRFYVAEVLLALEYLHMLGVIYRDLKPENILVREDGHIMLSDFDLSLRCSVSPMLVRTSSVGRDEPSRPSGPCAQSCIDPLCIQPSWSNSSCFTPRLVSSRRPRAELLKKPSLPQLVAEPTEARSNSFVGTHEYLAPEIIRGDGHGSS

SEQ ID NO: 227700 - protein, 251 aa, Zea mays
  unsure (1)..(251): unsure at all Xaa locations
  Clone ID: MRT4577_139258C.1.pep
MNIIKLQKKYPQFEQGEIFGLQDAFRKLDIDDKGYLDEGTVIKAAQQSEHQPYDVVRQALKEVELDSSRRVELDDYVDLISKLRVSSPAQQRMSTGPTRPRAGTASSVNSPSNPGHASKGSVGGGRIQVQGSSANVTHTINEDERTEFTRHINAVLAGDPDIGDRLPFPTDTFEMFDACKDGLVLSKLINDSVPDTIDERVLNXXKKIKSLNNFHFTENNNIVIESAKGIGCSVGDIGSGDIIEVREHLIL

SEQ ID NO: 227701 - protein, 82 aa, Zea mays
  unsure (1)..(82): unsure at all Xaa locations
  Clone ID: MRT4577_139259C.1.pep
PVMPGDWGPSXPDRAGGGLPGXGLAPNIINGGLEWGXPLPRGGQSRXKGGVGFYKRYCGLLGVGYGGNMAWGGPKPFGGCCP

SEQ ID NO: 227702 - protein, 520 aa, Zea mays
  Clone ID: MRT4577_13925C.1.pep
VPSGRPLLAEEMEFEYDWKDIFFEEATIVDRETIQEVVQDEEAIPARGDWAVKLGINLYYSANLAKSPLYSKQVPYNRVIYEAFGCGSPNDSPVKLKTYSRRQCRAKKIVLAGRWCGKVWMSNQVHPYLADRIKNHEPKEIDETFPSDQKSHAEPVENSSREAASTRKSSSRTIEGKTSKREKEQLEKANAKKPKFTEEDNSKSLEGTAEASTQKIKGRSVLEKTSKKEKAYTKKLKHTEKVSEALKGPSEASFPAPAGMVVRSSSRIANRKIMLKSKMEEEDNGSADRPKSKVEDDKDNPAGRSRAKPLRQKTKVDAKKKTKETRVEKRKAPSPASQKDEEEQSDDVEGRSTTKQRLSLRKKGAKTEGKQRMEKPRFGGSAPPPSSPKRKEEYVCDIEGCSMSFGTEQALSLHKNDICPEKGCCRKFFSHKYLQQHRKVHADDRPLKCPWEGCGMAFKWPWARTEHVRVHTGDRPYVCLEPGCGQTFRFVSDFSRHKRRTGHGASKKAKAKKQGKAAVT

SEQ ID NO: 227703 - protein, 65 aa, Zea mays
  unsure (1)..(65): unsure at all Xaa locations
  Clone ID: MRT4577_139260C.1.pep
KGPPPFXSXPFFFFFFFFFFFFFFFFFFFSTDHDLLIIYKIIHLETSLNRNFYNNLTLNTLLDFL

SEQ ID NO: 227704 - protein, 249 aa, Zea mays
  Clone ID: MRT4577_139261C.1.pep
MLLGRRRLLLVCASLVLLSLLGPSNGASNSTGNNLGESRNRTSSHPLEVTPGVSFQLRLHALFHWSSFGFLMPLGIILVRMSSKCRGGRCVRALFYCHAISQTVAVLLATGGAVLSLMNFENSFSNSHQRVGLALYGVMWLQPILGFFRPERGVKVRSLWYFFHWLLGIAICATGIVNVYIGLRTYHERTAKSVRLWTALLTVEVAFLAFFYLMVDRWSYMLKQGRATVEQLIRPTDSRRTYPTTFGRS

SEQ ID NO: 227705 - protein, 66 aa, Zea mays
  Clone ID: MRT4577_139262C.1.pep
IRHEGSFSLEAVSLLSWINGMPYKIVYFFKQEMELSLVGLKNARKTSLAAARSDTPASSSWKLYLF

SEQ ID NO: 227706 - protein, 69 aa, Zea mays
  Clone ID: MRT4577_139263C.1.pep
NWSLKKCLPFSFTLSSCSARLSPPFFFKLKIYLYCINHNLVIPAHSSNSKFEKSMTIGSFRTRGRTRGR

SEQ ID NO: 227707 - protein, 106 aa, Zea mays
  unsure (1)..(106): unsure at all Xaa locations
  Clone ID: MRT4577_139264C.1.pep
GGEWFEACDLEFISGNEAMIYSCRNGLASYPHPGCYLMSSVTLDVGVRNNVARSDLSADSSTRREIISXEGITWRTAVAEPFWLQYMMEWRLAITHSSRLEIDTWL

SEQ ID NO: 227708 - protein, 195 aa, Zea mays
  unsure (1)..(195): unsure at all Xaa locations
  Clone ID: MRT4577_139265C.1.pep
MDSYQAPAAGAGGRGCYNCGDSSHRAAECPTKGTPTCYNCGEKGHVSRECTSPQAEKTCYRCGGTGHISRECTKDGGAQMGGRGGGSQECYKCGQVGHIARNCSQGGGYGGAAGGYGGGRGGYGGGAGGYGGARQTTCYSCGGFGHMSRDCTQGQKCYNCGEVGHLSRDCPQETSXERVCYRCKQPGHVQSACPN

SEQ ID NO: 227709 - protein, 51 aa, Zea mays
  unsure (1)..(51): unsure at all Xaa locations
  Clone ID: MRT4577_139266C.1.pep
RXQEFREICSTMWCLFHTQLMLRTALPSTRSTASSSSNFAQALRTPRRSGV

SEQ ID NO: 227710 - protein, 133 aa, Zea mays
  Clone ID: MRT4577_139267C.1.pep
HMCSRSHAWLCPLDEKPGKDPRMQRRVILWPAPRFHGSFRRPPPLGCPGRGLAGCGFLVRCDDGRVDADVASLLTGSHARRPWRGGKKREEPVPQPPLTYRPTAANRTNQTWHETCGAVRCGSPLLSGQLRFR

SEQ ID NO: 227711 - protein, 79 aa, Zea mays
  Clone ID: MRT4577_139268C.1.pep
KKKKKKKKKKKLKKKKKKKKKKKKKKKKRGKKKKKKKKKKKKKIKKNLKKNPKKKKKRPQRAPGPHFFFLLRGVKWALG

SEQ ID NO: 227712 - protein, 143 aa, Zea mays
  Clone ID: MRT4577_139269C.1.pep
PRVRAIAVEHRKDVDSAVVTVLDEVMPSMTGSAGTLFTHKEVLPSMDDSVGNLFANRSTHEVGSSSCAGHEIHIDEIDVSVHPAQHTSSGEAKTGKQENINNECVGRLASVEGVSEQLNLHSDPIPNGSQHDLIPNLDVLSSN

SEQ ID NO: 227713 - protein, 131 aa, Zea mays
  unsure (1)..(131): unsure at all Xaa locations
  Clone ID: MRT4577_13926C.1.pep
MTGLLYGVLPMMRADNRDRTDDVNRASVKAHAQAGHHAVLSLVVTGIYRCSLSQAVHSETVKIIKIKDSTTTSXGGLSXTIHLSPTRGYXYLPLKERMYLHPLSIADAXARXKTFDHDMINXLKPLLDNKA

SEQ ID NO: 227714 - protein, 155 aa, Zea mays
  unsure (1)..(155): unsure at all Xaa locations
  Clone ID: MRT4577_139271C.1.pep
MPGGAETCLPSSSAPAPGTVQCFWRHKTAEVAVYSKMGRGLITANRVPIELHRXEMLRLKGFQPILVAXRSRFWDICMRIRVPGGXGRRFCIYAIHHAVAKGVXAYYHRYVKEAVNMEDKDIFTRYDLNLLVVDPWCCEPNKLGGRLARALFQNL

SEQ ID NO: 227715 - protein, 134 aa, Zea mays
  Clone ID: MRT4577_139272C.1.pep
GGSAGAGSSRHSAPVRRGRFGGRSGGGRGRAGVLVVSWSVGWCGALFCGFWPGVSGVLWAGVFGLPRWGGVGVPVWASVLSCCGVSGVRCCPVLCPRWFVVSLSPPPRGVWFLFRPGPPLLGAPAAPHSPSTPP

SEQ ID NO: 227716 - protein, 182 aa, Zea mays
  Clone ID: MRT4577_139273C.1.pep
MGTAAPAMMPTEDLEAAIAELPAKKGVLREAFHTLAACSPYPLPFTWEDLDAHVSSVQSSISRRFSQLRALEAAGTARSSKNKEEDNEVEEEDEVVEEEEEEEEVEEEMVEEDEEEEEEEDEEEGKKKQAEEEEEEVVEEEGEEEEGEEEQEEEEADDEIDNQKEEDREGGEDNKLAPSPRV

SEQ ID NO: 227717 - protein, 79 aa, Zea mays
  unsure (1)..(79): unsure at all Xaa locations
  Clone ID: MRT4577_139274C.1.pep
MADQGHQPTVLHKLGGQLQLRSIIYERVLARNILPSGLSYERRCVTRNYKTESLWGPSMXASGGMNVPAMQTPVXANAP

SEQ ID NO: 227718 - protein, 42 aa, Zea mays
  Clone ID: MRT4577_139275C.1.pep
VVFFFFFFFFFFFFFFFFFFFFFFFFLGWGEKNPGGKKVFFF

SEQ ID NO: 227719 - protein, 85 aa, Zea mays
  Clone ID: MRT4577_139276C.1.pep
WCVTYVAVVVPLILLQTALGAMRVSTGTPFLFSYLPITFFLWSSHTELVENVHIHTTYVRLCITCGDQLVDMLCKDVWIVVTSEW

SEQ ID NO: 227720 - protein, 72 aa, Zea mays
  Clone ID: MRT4577_139277C.1.pep
MYAYGNIYLYIGMCNAVGGDCESNIHSHYIRIYIYTHSILNQYHITNESVRLFVVKYRQAGTATHPHCQQTW

SEQ ID NO: 227721 - protein, 100 aa, Zea mays
  Clone ID: MRT4577_139278C.1.pep
LTNILQRKQQQHRSQLRLSLNISLRIKRIGRSRSRETKSTVGLNAEEGKQHQKPSRTLTNDPNQTRTSQHHHNKKHAIIKNNRPEPNIRKHINQPKGSKP

SEQ ID NO: 227722 - protein, 306 aa, Zea mays
  Clone ID: MRT4577_139279C.1.pep
MAAETKPAAASGVAGEMEVEAYRRLFPVAFLERHLGESVRIDARRLREARPTTVALGAVSSAHGSALARLGDTAMLASVKLEVMSPPAEHPDEGSVAVEFHMPPICSPLVRPGRPTDVAPVISKALEDVLTSSGMLNLKDLCLITGKASWLAYLDIYCLNADGSLFDAALISAVAAFTHLEIPLVSVGDDGKLFTVGGNDGKNKFELVNREKRKLTLGDIPLSLTCALHKGSILTDPTSEEESIIETYVTVVVDSSDRLVSLQKVGGTVTSMATIKECISLAKERRLRLREILIDSVKAMEVDHTE

SEQ ID NO: 227723 - protein, 79 aa, Zea mays
  Clone ID: MRT4577_13927C.1.pep
YELLILRISHRMDNENFLYAFDKFSAEQEEISIIRCSFLHMLSRCCILQLTLGDVMNDMIFYHLPLELYSIMSEVTTCF

SEQ ID NO: 227724 - protein, 112 aa, Zea mays
  Clone ID: MRT4577_139280C.1.pep
QSTRRIMTARYPDHAVLPSMCASAIVRHVSAMREPMDTCHILDPQHRWPRAQCVPLASCTSLGHLSGTLPTTTAMRYYNSAPPTLKLLSSTSTSRSYRPACQLKICLTVLGT

SEQ ID NO: 227725 - protein, 116 aa, Zea mays
  Clone ID: MRT4577_139281C.1.pep
LIVSIIEMIHYMLHILPARTTVRIRLRIIPRALLQYQLSPIGITRCIARFPTKTTIYIRFRIITRNLSPEPYHPPHHFVCMSRVPTRVTICVRLGVLDHGSSPAPLYSPLRSFFTC

SEQ ID NO: 227726 - protein, 114 aa, Zea mays
  Clone ID: MRT4577_139282C.1.pep
SPGPSGTDLSSLSSSSSSAASRQLSATPPWSTPTSPKSPRTTSAARSPSPATSSRPSKAASRSSASCTSTPPDPSLPPSSTVSAAVRSLTTSSTSRPKANKVAVFLKKKKTDPL

SEQ ID NO: 227727 - protein, 217 aa, Zea mays
  Clone ID: MRT4577_139283C.1.pep
PAGGTNGPQLQAESDTFSENGHRSFLAMADYLVTDKITGFLTQMQRAATEVLKEKQLKDRMNMDQVLQTVLQILDMFMGLSEDNSWINYLVHENPPVYAQLMAVSSSGFDDSSLLNDFRKLDQLMSETRIVLASDDFRNIMERSLRKIAGVVVEDLGVQIVTPGSGLPLATLLPKVDHLSSPLLEEPNKNKHIQIIRSMPEVELFYTLLYTNMPPET

SEQ ID NO: 227728 - protein, 62 aa, Zea mays
  Clone ID: MRT4577_139284C.1.pep
MERLESYLKEHFDVPPKNPSEEAQRRWRSAVGALVKNRRRRFRMVPDLHRRSLDEAQRRPRV

SEQ ID NO: 227729 - protein, 384 aa, Zea mays
  unsure (1)..(384): unsure at all Xaa locations
  Clone ID: MRT4577_139285C.1.pep
MLASARGFWARHRRKILVSLGVAGVGYAAYHFYDARRAQVVRVEQLRAMEEQAADDFVKNXCMLPFCCRLQAHFEKVKRICDTTTLPLAMHHLSDKITSQLDISKLTDKLRQAKVDSSALTPKEKYETWEEIKIKSFTKTVSSMWAMTLLSLYVRVQVTILGRHLYLDFAQGTNGAQLQAESDTFSENGHRSFLAMADYLVTDKITAFLAQMQRAATEVLKEKQLKDRMNMDQVLQTVLQILDMFMDLSEANSWINYLVPENPPVYAQLMAVSSSGFDDSSLLNDFRKLDQLMSETRIVLASDDFRNIMERSLRKIAEVVVGDLAVQTTLGSGLPLATLLPKVGHLSSPLLEEPNNNKYIQIIRSMPEVELFYTFLYANMPPET

SEQ ID NO: 227730 - protein, 117 aa, Zea mays
  Clone ID: MRT4577_139286C.1.pep
FYKTTLPPCIRFQNDHSISPVTFLNLPCPFTNMLVCIWSVPIGLRLCLTLEWLEFIFCVITLIFVEAPIFLEPYCQNLIFSCTLCCSTFEAVLKIILFSRWLFLSSCLKGFSSATHR

SEQ ID NO: 227731 - protein, 45 aa, Zea mays
  Clone ID: MRT4577_139287C.1.pep
PPEPRVDLIKHYAGERSGLPETAYNQACEENECVVLTEWAQALIA

SEQ ID NO: 227732 - protein, 70 aa, Zea mays
  unsure (1)..(70): unsure at all Xaa locations
  Clone ID: MRT4577_139288C.1.pep
MLLPLKHLKMNLIQLLISDYTEHMMHNGMHVYFDEFTGPTESIYQGXSYSVLLXLTDAYPYIYEDIGVHQ

SEQ ID NO: 227733 - protein, 44 aa, Zea mays
  Clone ID: MRT4577_139289C.1.pep
SCLRSRTSFIIIMNIGLKSRHELRLMELKSSSLSWDPNTRAYFF

SEQ ID NO: 227734 - protein, 73 aa, Zea mays
  unsure (1)..(73): unsure at all Xaa locations
  Clone ID: MRT4577_13928C.1.pep
SFVVVXKLSLFSWFLFHLXXCXIDNMLCGSIRRCGLNIYVTHFYHLFLTNEGCLPYGDQVTSSEAGDTRSHSA

SEQ ID NO: 227735 - protein, 92 aa, Zea mays
  unsure (1)..(92): unsure at all Xaa locations
  Clone ID: MRT4577_139290C.1.pep
LDLDCHPCKWVKLVLEFSKLCSPPPVLDIKSLKWHLSRGHGERNSIPFCVRPPPREKEKGPVVQVCNRLGLQLRSANGLLLVYLCPFLKXKS

SEQ ID NO: 227736 - protein, 85 aa, Zea mays
  unsure (1)..(85): unsure at all Xaa locations
  Clone ID: MRT4577_139291C.1.pep
FPFTQWRAWKFSSFFKEQQVYPLXQVXGVRPDTFLSQPQLLPFXQNGGPXRGHPLXMKQMVPLDQLVLTNPKHWFLHPIMGGGLF

SEQ ID NO: 227737 - protein, 85 aa, Zea mays
  Clone ID: MRT4577_139292C.1.pep
MIAYQGDLGYQDAVDSADAVAKLLNVSTDNILIQSTGVIGQRIKKEALLNSLPRLVGSLSSSVQGANSAAVAITTTDLVSKSIAV

SEQ ID NO: 227738 - protein, 77 aa, Zea mays
  Clone ID: MRT4577_139293C.1.pep
DTKKERKKNETIREKILDGYGCMDKYYTGGWKSSILRRRRRRGTASERPTRGLLVRLPPAAAATRTPRRTPVGTALV

SEQ ID NO: 227739 - protein, 115 aa, Zea mays
  unsure (1)..(115): unsure at all Xaa locations
  Clone ID: MRT4577_139294C.1.pep
THAAVXEHXXGEGQXEXKXXXXGPKRAPXDPXDTRKKQNNXKXXXRXXXXXDNXEEXXPEXXSGXEXXXDXEXXPXNXXXEXXQQNKNXKGXRKXXXKKXXEPXXEKAENKEDHN

SEQ ID NO: 227740 - protein, 68 aa, Zea mays
  Clone ID: MRT4577_139295C.1.pep
RTPEQRLTQQTRLMDKATSNQKGACYIHRTNRTWRARDHNIKKHGLSTWESILRELAHNPRLGAVIQN

SEQ ID NO: 227741 - protein, 86 aa, Zea mays
  Clone ID: MRT4577_139296C.1.pep
DHAGGPASVKRYLNARHTLEYYIILLPVHTWGLCLSSGTSGSRCSERMLAYLPPAPDRLASCWLSTRPLALVAFACRTERGLLLNA

SEQ ID NO: 227742 - protein, 128 aa, Zea mays
  Clone ID: MRT4577_139297C.1.pep
AINIMDDIQRAAIPPSRTTYNNVINACGAAGNWKKALELCKKMTENGVGPDLITHNIVLSAFKNGAQYSKAIAYFEIMKSSKVAPDTCTMNIVIHCLVKIGLYGEAIELFNSMRERRTTCHPDVVTYT

SEQ ID NO: 227743 - protein, 136 aa, Zea mays
  unsure (1)..(136): unsure at all Xaa locations
  Clone ID: MRT4577_139298C.1.pep
MDGDAGPEQHGCVHYRRGCKIRAPCCGEVFGCRHCHNEAKDSLEVSVHDRHVLPRHDIKLVICSLCNKEQDVQQDCANCGACLGKYFCAKCNLFDDDVSKNQFHCDGCGICRTGGAXEFYHCGRCGCCYTTPLKDS

SEQ ID NO: 227744 - protein, 89 aa, Zea mays
  Clone ID: MRT4577_139299C.1.pep
TRPTRPKHTLSYYIFYFRPHISLYPSVFKTTIIPQLSHPSTTYPQLTYLPSIITPIYSTPISSTLYSSSLNHIKLHTFITSTFNNLHPY

SEQ ID NO: 227745 - protein, 507 aa, Zea mays
  Clone ID: MRT4577_13929C.1.pep
MDNSAYYCYCCLLALLPPLYFLVKFWWRTSCARRSHGLRLPPGPWQLPIIGSIHHLRGSLVHRALRDLSLRHGPLMFLRLGEVPVVVASTPDAAKEFMKTHDATFATRPMTLSAKVFAKDGPGIVVAPYGGDHWRQLRKICIVELLSTRRVRSFGPVREEEAARLVQAVAGASTRRAPAPAPLVDLGRLAAVYVADASVRAIVGRRFGETDALLRFVDESVRLAGGFTPVDLFPSSLLVRVLTLRRAVRRLEHFRESLFGFMDGVVREHLERKQSSRGGGGEEEEADMVDVLLRIQQEGNLKFPLTMRIIEAVIFDLIAGGIETASSTLQWAMAELMRNPAAMSKAQAEVRGVYAGQTKVTEDRLGELPYLQLVIKETLRLHVPGPLLIPRECQEHCRVLGYDVPKGAMVLVNAWAIARSPEYWEEPDAFDPDRFSGDAARDFRGNDFEFIPFGAGRRICPGMAFGLANIELGLASLLFHFDWSLPEGIVPSEGLFGYFQSIWIEGD

SEQ ID NO: 227746 - protein, 193 aa, Zea mays
  Clone ID: MRT4577_1392C.1.pep
SARRRFACGSDGSVRRYDFHSGSQDTVGLHEDALACIEFSSLTGQIMTGSLDKKLKLWDSKTRNVSPSGTITLNSDVASISICGIYILAAVERNVYLYDMRNLTRPVDEKDCPLDYQIRCLHTSLEWNAYVAGSVDGVVALKYLDRGTDRDLGYAFRCHPNSRNGKWNLVPVNCISVHPCNRTFVTGDDKGCT

SEQ ID NO: 227747 - protein, 80 aa, Zea mays
  Clone ID: MRT4577_139300C.1.pep
PCYEVLYPHPLVRITKFPRIKKESPATVLCDQHVCILTPWTALPVMRTLYGPGSSPGHLDYRLDCTSCCVFTPLLSPCLS

SEQ ID NO: 227748 - protein, 236 aa, Zea mays
  unsure (1)..(236): unsure at all Xaa locations
  Clone ID: MRT4577_139301C.1.pep
CKIRAPCCGEVFGCRHCHNEAKDSLEVSVHDRHVLPRHDIKLVICSLCNKEQDVQQDCANCGACLGKYFCAKCNLFDDDXTGGAENFYHCGRCGCCYATPLKDSHRCVDGAMHHNCXNCPVCMEYLFDSMKAISVLHCGHTIHLECLYEMRAHQQFSCPVCLRSACNMSDIWQKLDQQVAASPMPAIYQKKMVWILCNDCGVTSNVQFHILAHKCPGCSSYNTRQTRGDPAACSRV

SEQ ID NO: 227749 - protein, 90 aa, Zea mays
  Clone ID: MRT4577_139302C.1.pep
GSHASHCVTLGHMSCLFLYSLGVTLDLLDPLFAILGAVSYVVGSPFASMSSPKLISSPSKSTPVLTPKTTLIAGRLDLLGLHKPVSRSRK

SEQ ID NO: 227750 - protein, 206 aa, Zea mays
  unsure (1)..(206): unsure at all Xaa locations
  Clone ID: MRT4577_139303C.1.pep
MPCPCPYSPMHGLNLSHLGNRVTDHLSLPAWSRDARCVHYRRGCKIRAPCCGEVFGCRHCHNEAKDSLEVSVHDRHVLPRHDIKLVICSLCNKEQDVSSLTKQGQCSSATVGVTCHTPHEKKTHLVCRQVQQDCANCGACLGKYFCAKCNFFDDDVSXDQFHCDGCGICRPSRAGYFYHXGACXCCYTTTLKDSHRCVDGAMHHNC

SEQ ID NO: 227751 - protein, 236 aa, Zea mays
  unsure (1)..(236): unsure at all Xaa locations
  Clone ID: MRT4577_139304C.1.pep
FFGPVGVTLHTPHEKKTHLVCRQVQQDCANCGACLGKYFCAKCNFFDDDXFPLLFSPVLLSRSLAFQVSKNQFHCDGCGICRTGGAENFYHCGRCGCCYTTTLKDSHRYVDGAMHHNCPVCMEYLFDSMKAISVLHCGHTIHLECLYEMRAXQQFYAPVCLRSACNMSDIWQKLDQQVAASPMPSXYQKKMXXWILCNDCGXTSNVQFHILAHKCPGCSSYNTRQTRGXPAACFRV

SEQ ID NO: 227752 - protein, 74 aa, Zea mays
  Clone ID: MRT4577_139305C.1.pep
SHINLRNISSPSHHPIVLLMCIVMTYLNIRRWRWQVKTYLKIRNKTQKRLQSNENPYIYRLPIFHWHRTLAVHR

SEQ ID NO: 227753 - protein, 77 aa, Zea mays
  Clone ID: MRT4577_139306C.1.pep
TLQVLRRFQVVLFVDMHRCHVRQMMLYNPNAVLDMYSGSIINTLACDTGLSIRRRLHGRQPELTPPDLKEPPLQVVP

SEQ ID NO: 227754 - protein, 120 aa, Zea mays
  Clone ID: MRT4577_139307C.1.pep
VPGPPLEFFFFFFFFFFFFFFFFFLFFFFFRFFSFVSTMSNRCFLIGGITTTTDYKPNTGVLQWCDKPGEPKTQGEGVFFFHAFLLCPYRARQASLCTKRLSSSAKRKKGLCGCPDTCSR

SEQ ID NO: 227755 - protein, 41 aa, Zea mays
  Clone ID: MRT4577_139308C.1.pep
AQHPFTEGGSILEHAKMDSLNTVHTYLMNCIISITWDHRLN

SEQ ID NO: 227756 - protein, 69 aa, Zea mays
  Clone ID: MRT4577_139309C.1.pep
EPQAPPYQHISIAFLCASNISQARARVTAAKPGQTQWRGRCGSVTRRCADVQLWQQRRETHVTASRCTS

SEQ ID NO: 227757 - protein, 113 aa, Zea mays
  unsure (1)..(113): unsure at all Xaa locations
  Clone ID: MRT4577_13930C.1.pep
PPSNDRTTRATKTGAHRARSAHRGSATKAGRRPQSARAPSAIIPQFLRPVSLMGFEHLSVQAYRLQQALAASVLQHPINQLQQQSLAHFTIQTMATQQHQLVLPALXQLDVEN

SEQ ID NO: 227758 - protein, 116 aa, Zea mays
  unsure (1)..(116): unsure at all Xaa locations
  Clone ID: MRT4577_139310C.1.pep
SRSARLGVGRAAAKQTREQDFNTRRLKPPQISVPPPGGTGHPPMRRPGKSSSSARSSDQPCVVQARSSVSEVEEXRRRPGILETARQSXQPRTRMFKRGFPLPLVQQSGQDRIGLS

SEQ ID NO: 227759 - protein, 152 aa, Zea mays
  Clone ID: MRT4577_139311C.1.pep
TVPFLFSTMSSDLIWQVIRNNNSFLVKRDGVQLSAEKNNLTNKHSFKYSGLANTKTVGVNLSKDKKITLAIKRTKTNAARHPATGYTVYALNKHQQNHTNKAAKTIRQLTTGSYYRPDLANAAVGRYHALHRSLKPVINKKSKRKPRGSKAK

SEQ ID NO: 227760 - protein, 39 aa, Zea mays
  unsure (1)..(39): unsure at all Xaa locations
  Clone ID: MRT4577_139312C.1.pep
MPPPAPPPXPPPPPPPXAPPPPPPRPPPPPPPHPTPPSS

SEQ ID NO: 227761 - protein, 70 aa, Zea mays
  Clone ID: MRT4577_139313C.1.pep
LTPGWFHDRWASENVQLVCKLAYNGNWLHVVLCNWPNVIDVHHLRSLRTVMYTTSWTSAALLYYALYSLS

SEQ ID NO: 227762 - protein, 61 aa, Zea mays
  Clone ID: MRT4577_139314C.1.pep
FHSCHSVGDATPSLLFPAVMQRMRGTVRIQRNYLEARVTEEIEKIKISYYLKLNSALSVLN

SEQ ID NO: 227763 - protein, 341 aa, Zea mays
  unsure (1)..(341): unsure at all Xaa locations
  Clone ID: MRT4577_139315C.1.pep
MSVARLGLDLNTVDSPDVAEPNPFFPYKNLGQSKVSAPSECGSTTGAIEESESHRKWREMKQNGFLSSSHGNAVVPRPRGRPPKRKRDDEFKKSSSTQHVQANKSVKVAAPSGLLSGLNPGIINHVRNSKQVYSIIKAMVHSERLENENHSSQTGERGREVNERIQDQKYGGGFMKCHLLIKDNNAVFHQTLPNTSQFLAQDGDSLKLQLPSAVTMSSDRTFSTSADDPASNHDYMTVLSVKAASVASQWLELLHQDIRGRLAALKRSRKRVRNALHTELPYLTATEFSSNQENESSXQILLXGCTDKAVSEAHVARWRSLFVQMDKTLQEEGKQLARHAR

SEQ ID NO: 227764 - protein, 97 aa, Zea mays
  Clone ID: MRT4577_139316C.1.pep
SRFNYQTLTRSVRLSYCHHLPVSGGGNLGACCLPRLWYAFLRLTVRPGRLIGRKVFPPRLVRYRPIVYLHSADFPLKNKRPPDPAVLSVFIVFALPV

SEQ ID NO: 227765 - protein, 160 aa, Zea mays
  Clone ID: MRT4577_139317C.1.pep
EHASEVPVGARHDLHVATETKVPARLPDAPLSGSCGDVEVHVLLPGSIPDLIQSLPVQVIHLRRLRWRHCSQSRVRGWLIWRSRLCGRCMMHLPVPYGRGIVLRLLPGASMRLDGGALGWQTTSRLPRAASLGRATAPAAVAFSSTVSSSGRPPGGTSSP

SEQ ID NO: 227766 - protein, 67 aa, Zea mays
  unsure (1)..(67): unsure at all Xaa locations
  Clone ID: MRT4577_139318C.1.pep
MVQQNSVKMVIVXLVIFLSLSSSSASSMQMPFPFAGLQVLYSSYAVLTTIMVSGGLYLYVNYLTQSY

SEQ ID NO: 227767 - protein, 486 aa, Zea mays
  Clone ID: MRT4577_139319C.1.pep
MDVPQLTAEGATQLGDRVSLLHQTGTLQSETPCLTLGRDSNAVSMEKLHASDCLPCGKENVGTGLQPKSDPERADNRMSVARLGLDLNTVDSPDVAEPNPFFPYKKLGQSKVSDPSECGSTTGAIEESESHRKWREMKQNGFLSSSHGNAVVPRPRGRPPKRKRDDEFKKSSSTQHVQANKSVKVAAPSGLLSGLNPGIINHVRNSKQVYSIIKAMVHSERLENENHSSQTGERGREVNERIQDQKYGGGFMKCHLLIKDNNAVFHQTLPNTSQFLAQDGDSLKLQLPSAVTMSSDRTFSTSADDPASNHDYMTVLSVKAASVASQWLELLHQDIRGRLAALKRSRKRVRNALHTELPYLTATEFSSNQENESSIANTSEIGCTDKAVSEAHVARWRSLFVQMDKTLQEEGKQLENKLKQVQEMQLNCDKGLKHMTCEAPLLGPMAELWKLKNPNISESEWAVQAAAASIYSTCNMVMRTENVPCF

SEQ ID NO: 227768 - protein, 50 aa, Zea mays
  Clone ID: MRT4577_13931C.1.pep
SFLCRRPAFLFFFCFITKGDLTFHDPKSSTTGRSGSACQGDRSTIAVRRS

SEQ ID NO: 227769 - protein, 316 aa, Zea mays
  unsure (1)..(316): unsure at all Xaa locations
  Clone ID: MRT4577_139320C.1.pep
MAKHKASPPAAVRRRIGGAGASAIRWALRVATSIVAWTLLLHLFTFLGIPRPPLPIARPSCLGGRSNSTAAXLRGRGRXAGHLALPALPPRRFYKSNGYLLVSCNGGLNQMRAAICDMVTVARYLNLTMVIPELDKQSFWADPSDFGDIFDVNHFIDSLRNEVKIVKELPQKFKEKVPLSMQPISWSSEKYYLRQILPLVRKHKVVRFSKTDSRLANNGLPLKLQKLRCHVNYNALRFAPSIEALGNKMISTLRRTGSFVVLHLRYEMDMLAFSGCTHGCSDEETEELTTMRYAYPWWKEKEIDSEKKRLEGLCPL

SEQ ID NO: 227770 - protein, 101 aa, Zea mays
  Clone ID: MRT4577_139321C.1.pep
GTYNCQCFSLWHCIHYSVRELAFLQPAHLAAAVLDGPNVLAVSGGALRAAHHAALLHRSITVSIDPADAGFGTVILTLLVPLVGVPYRLFLQSTSRIPSLR

SEQ ID NO: 227771 - protein, 91 aa, Zea mays
  Clone ID: MRT4577_139322C.1.pep
AVVTTQSTFFFFFFFFSPFSSLDLTLVITLCLLSKTSNLPSQFKRGLLLILPVVISYSLPLARLNSILGCTWIPGFYAHLPLPLHPCLYHL

SEQ ID NO: 227772 - protein, 32 aa, Zea mays
  Clone ID: MRT4577_139323C.1.pep
EAAVAEGVPGQLPPGLLLLGQSLLLFFFLTSF

SEQ ID NO: 227773 - protein, 51 aa, Zea mays
  Clone ID: MRT4577_139324C.1.pep
VDQQSCRLITSNISSVKSLIYIDSTCSKTLLLNVADETPWLQLALEICISR

SEQ ID NO: 227774 - protein, 59 aa, Zea mays
  Clone ID: MRT4577_139325C.1.pep
EAEGWRRESPGPAQVKQSSLSGFWSHMFMVVALTKKPQLSSHSIGSIGCRQPDLIVCYL

SEQ ID NO: 227775 - protein, 47 aa, Zea mays
  Clone ID: MRT4577_139326C.1.pep
DRTLTPNFKKLHSSNLHSRSTSLSCVCVIIRSFTLLNYIITFPNINP

SEQ ID NO: 227776 - protein, 164 aa, Zea mays
  Clone ID: MRT4577_139327C.1.pep
MKAATVLAVTFAALAQAHTRADIPSCALPCLDAAVTANTKCSTTDYACICKDFSAVQTSATSCVIEKCGADVALNKVLPATQALCKAQSGSGSSAAASSSAAATSAAATFCPASSAPASFRPASSCPAIFVAQTSVAATTSAAGTTFVTSSTSAGTCAPPVGNR

SEQ ID NO: 227777 - protein, 85 aa, Zea mays
  Clone ID: MRT4577_139328C.1.pep
GTPPGAHYPRGGGGTKIPKRGVRGKKSQMGPDPDFKKKTPHRSLNPLFQGFWKKPNLTRVPPHPFWVGVFFKRAPKGEEHWGGGP

SEQ ID NO: 227778 - protein, 97 aa, Zea mays
  unsure (1)..(97): unsure at all Xaa locations
  Clone ID: MRT4577_139329C.1.pep
LLQGARSAPXDLVEQSEVAVGRTLLRGLFCGQDGCRDAHDVVTPRPHHDEEQRRAQGSWCAGNDRLNVVMVRFREDSRVRGEQGASCVRENRDVQGR

SEQ ID NO: 227779 - protein, 432 aa, Zea mays
  Clone ID: MRT4577_13932C.1.pep
MFRRLLPHRRYISTSPASNSTPTLYSDGTIPFSILSWGRGASGQLGGGKEERRLYPSPVAHLLLPESDPRLAPTPGRLPSAEDTSGVEVGISCGLFHSSLLVEGGAWVWGKGDGGRLGLGDESSAFVPHSNPNLRDLRLLALGGIHSAALTTSGDVFTWGYGGFGALGHHVYHRELLPRQVNGPWEGKITHISTSGAHTAAITDSGELYTWGRDEGDGRLGLGSGGGPGEAGSLSVPSKVNALPVPVAAVACGGFFTMALTSDGQLWSWGANSNFELGRGSNFSDWRPQLVPSLKSTRVIQVACGGYHSLALTDEGEVLSWGHGGHGQLGHPTLQNHRVPLAIKALSDERIVHIACGGSTSAAISEKGDLYMWGNARDCQLGIPGLPEVQPLPVKVIFLRDDDEGLGPSRVISVAIGASHAMCLVSTQQTEK

SEQ ID NO: 227780 - protein, 66 aa, Zea mays
  Clone ID: MRT4577_139330C.1.pep
YINERGKKPIFPTNPWTLPTFNSHPLAVAAHVYRDNLIRPPHPTPILDLIRGYVGMQAGTPPSSYL

SEQ ID NO: 227781 - protein, 77 aa, Zea mays
  unsure (1)..(77): unsure at all Xaa locations
  Clone ID: MRT4577_139331C.1.pep
LSSSISTKSPHIIFNLLGPHGKDRSIVNGIIRTNGAHIGAAFAEQISTGGGRKPXSNWCNQYMRRKAGTKNYAINVR

SEQ ID NO: 227782 - protein, 39 aa, Zea mays
  Clone ID: MRT4577_139332C.1.pep
FWAPFKYGLLLKKKKKKKKKKKKKKKKKKKKKKKKKKKK

SEQ ID NO: 227783 - protein, 113 aa, Zea mays
  Clone ID: MRT4577_139333C.1.pep
TMGDAEPEDGAHTEAKNAGAAIHKGDAGTSRLPYRTSQTLAGMDLDEESGQMHITWRLVMTWSYGHVDYCGTNGEEVPSTFGAAHFEMGRGLAMLKALADAATKGTPPRDSTI

SEQ ID NO: 227784 - protein, 466 aa, Zea mays
  Clone ID: MRT4577_139334C.1.pep
MKTEVSCTLNSSVIPEGHKSSLSLPVPSGHSLSSNFATRSLSTAGESVKNTYDLVVFKGSRESSRAGDCISSPGVHHNIPPIMIDQGSNMNPSMESSNNSHRLMASNTNATQFYSYKDQMHVTPETRASVMTEKDSSQASAASSQPFAGTVLRAQSVSQEASPSVFTSKPLIDSSLVKNTYVGLSSGGAHIGHPNFGNQQPSDECLKRKSESLSGSEARGHSAALVQPALGNHNGSGGAHKGLRMANVVHRFKSLVESLEIGVVLSGRLWSSSQAIFPKGFRSRVKYFSIVDPTQMAYYISEILDAGPQGPLFMVTLENCPGELFINVSPAKCWSMVRERLNMEIRRQLSTGRANLPALQPPGSVDGFEMFGLLSPAIVQAIEARDRDRICTEYWRSRPHVVTEDRATAPPQAQGPLHALRGLFQRANRNELLALRSLLVSNISPDDFSRRQATQILDEEIAKQWR

SEQ ID NO: 227785 - protein, 72 aa, Zea mays
  Clone ID: MRT4577_139335C.1.pep
SLTRLSRASLHRATVVAASFLPPTRTVAARRNGGGGKVGTKAAAAERKEGQAAALDARFSGRRSRFGRGGAG

SEQ ID NO: 227786 - protein, 85 aa, Zea mays
  Clone ID: MRT4577_139336C.1.pep
CVKTKFPRFSDVITVKKPQQSVDICILLWTNSFFFNQPFYLSLFQVFGKTLFSTPFCSHKWVCPPLNFVCAPSPKPRGLFFLSKV

SEQ ID NO: 227787 - protein, 55 aa, Zea mays
  Clone ID: MRT4577_139337C.1.pep
PFLPSLKMSRGSFQLLSLDHPPPLNTYYNCCGCRFSFHFDKRKQVFFCNFYKKNP

SEQ ID NO: 227788 - protein, 78 aa, Zea mays
  Clone ID: MRT4577_139338C.1.pep
IKKSGIRFKVTQKRLTSHLQYINRISHLNKSLIDAHECLKISLKHREGENRHFPIREKVQQYRKGSAKKSNVGKTCLQ

SEQ ID NO: 227789 - protein, 85 aa, Zea mays
  Clone ID: MRT4577_139339C.1.pep
MHAYRSSEFGSWCNSFCRLFCHTRPTAIPRGDLVYSRGGRKTIDEEAASGGASILNAATGPEGPGERGRHRPTRASCRKFGRSPS

SEQ ID NO: 227790 - protein, 70 aa, Zea mays
  Clone ID: MRT4577_13933C.1.pep
MSAAGEKKNSKGKKKGKNGPAKVAMKARGAAADERNNPFEAIWSRRKFDVLCKKRKGQERRVSRSRSEAI

SEQ ID NO: 227791 - protein, 174 aa, Zea mays
  Clone ID: MRT4577_139340C.1.pep
MRHLYANFMKKHRGPIFTQHPYPAARSYIEDRFKWHLQQIAQSSPEAITWLVKNHSRIWYRSGFSEDCKCDYLTNNNSESFNKQIKALRSLLPHELVDGLGELIMEKMAYRRKRKVDSEDETSTKKHKTMKKRTPKKKRRTLKTKKKTPKKKALTEASAPPTKVIKKLTDYLKD

SEQ ID NO: 227792 - protein, 95 aa, Zea mays
  unsure (1)..(95): unsure at all Xaa locations
  Clone ID: MRT4577_139341C.1.pep
XXWXLARPWVXXXVFXXWXXXXLVXPAPPPXAXAXXXXVXFXSWXPXXXXPWRAXACXXXAXSPAXPPRRAPAXPXRRCAPRPCXPXPXRWVXPG

SEQ ID NO: 227793 - protein, 144 aa, Zea mays
  unsure (1)..(144): unsure at all Xaa locations
  Clone ID: MRT4577_139342C.1.pep
MSSTTTSPPPPAAGDHPRVLLRGFLSRETCKELEFVHRSCGAAGYRPSVISTSLPHLAATGCGHLLLPFVPVRERLRDAVESFFDCHFDLFIEFTGLISWCKGASIGWHSDDNKPYLRQRAFTAVCLLDNHGEDYXGGILQFRM

SEQ ID NO: 227794 - protein, 303 aa, Zea mays
  Clone ID: MRT4577_139343C.1.pep
MAAVSLLRAAALGLVVLASALPSARPWSKEGHVLTCQIAQGLLEPDAAHAVRNLLPDDAGGDLSALCVWPDQVRHWYRYMWTGPLHFIDTPDEACSFDYSRDCHGPDGAKDMCVAGAIANFTSQLLHYRHGSADRRYNLTEALLFLSHFMGDVHQPMHVGFTSDQGGNSIELRWFRHKSNLHHVWDREIIQTALADFYGKDMDAFRKQLEHNLTKGTWSDDVSAWTDCQDLSSCPTKYATESIGLACKWAYSGVREGETLSDDYFDSRLPIVSRRIAQGGVRLAMFLNRIFGAHNRDVPPPSS

SEQ ID NO: 227795 - protein, 141 aa, Zea mays
  unsure (1)..(141): unsure at all Xaa locations
  Clone ID: MRT4577_139344C.1.pep
PAYFLDLTAKCDKPLPLVGAMLPATAMSADATVNLYNDGETVMDPQSVNRDAMVXTNYTGLDGRDDTKTNTNAAQTFHTTKFAPLGYIHNAKGNYQCSPHRKHTRDTXLDVSKLNELPKVGIVYNYDNDSDAPTKVLIDEG

SEQ ID NO: 227796 - protein, 40 aa, Zea mays
  Clone ID: MRT4577_139345C.1.pep
FSCITSLGLIIHYSGSDIRVVLSCPCVCGCVELLVELAGC

SEQ ID NO: 227797 - protein, 83 aa, Zea mays
  Clone ID: MRT4577_139346C.1.pep
SYPPVIGSDARSTRSLLSSRRPRSFALSQDSPSLNPPPPPACCASSKPSCRSERYASTPVPVSPVVSGSSSRASSAASSDSES

SEQ ID NO: 227798 - protein, 83 aa, Zea mays
  Clone ID: MRT4577_139348C.1.pep
QDRKNRNLTNTRHIKLEPLQAWGTARTATGPHHHYHPTHTLLSPRNFEPEPDTFTRQTLLATYRATVGTHTHTHSETPVTVVY

SEQ ID NO: 227799 - protein, 37 aa, Zea mays
  Clone ID: MRT4577_139349C.1.pep
GTYPMSDTVSSDSVPPIPRPRLLQASPRPPKLVLFIL

SEQ ID NO: 227800 - protein, 52 aa, Zea mays
  unsure (1)..(52): unsure at all Xaa locations
  Clone ID: MRT4577_13934C.1.pep
RVXPGDSPGRQQRGLQTPFSSRSWDCSVTGRRDVGLKSLVAETSGSTNAGGS

SEQ ID NO: 227801 - protein, 190 aa, Zea mays
  Clone ID: MRT4577_139350C.1.pep
MEALVVFPEQHSHHHHRHPGTRSKSSGPYFSSPPNSRGFRGMNCRSFHSGRCVGAIPFPAPPARTYSSPEPKTPKQQPRHGGKRSRPISISLSTSPPSHSELWAGPAFSNSPPPSSLPIPKFSLRQKRSISLELPPVERPDDVVVRLHSKSAPSSPVEGYGYDFFNDDAIASAIATENLRRILQLDIADH

SEQ ID NO: 227802 - protein, 121 aa, Zea mays
  unsure (1)..(121): unsure at all Xaa locations
  Clone ID: MRT4577_139351C.1.pep
MEALVVFPEQHSHHHHRHPGTRSKSSGPYFSSPPNSRGFRGMNCRSFHSGRCVGAILFPAPPARTYSSPEPKTPKQQPRHGGKRSRPISISLSTSPPSHSELWAGPAFSNSPPPXSLPIPK

SEQ ID NO: 227803 - protein, 66 aa, Zea mays
  Clone ID: MRT4577_139352C.1.pep
NCAGLQKRVTPARASLSVMSLQSNLIRVCLHEGIQNPDSLSTLLRKSEPSNWFVNLKWERMSMLTD

SEQ ID NO: 227804 - protein, 83 aa, Zea mays
  Clone ID: MRT4577_139353C.1.pep
LFTQGPQTDKLKPFFCNIFSTRIPFPFFASLLIFVLPPFHCLFFCNNLVAPPKKSFFGPYLTPGGSLAFKSFLKILPHGFLGI

SEQ ID NO: 227805 - protein, 49 aa, Zea mays
  Clone ID: MRT4577_139354C.1.pep
IYFINMQLISFLLMNCTGMINSPSKSTKENSDFLVNKIIGPEDVFFCIP

SEQ ID NO: 227806 - protein, 48 aa, Zea mays
  Clone ID: MRT4577_139355C.1.pep
LTPKNIYLDACVRKVGLFKKNGRLPLKIGRVGPPRKSGPGPARGTTFP

SEQ ID NO: 227807 - protein, 117 aa, Zea mays
  Clone ID: MRT4577_139356C.1.pep
NGGKEPPAPPSSRKAYPYPMGPKLGPQSSKQKNPAAVSMQKNEGLTKENFFGLPPQAGMTPRGGNPGAESRIYTRAQKCLENGNPGHPKGGAAEPGQNFFFTTPNNTGRRDSAHREF

SEQ ID NO: 227808 - protein, 56 aa, Zea mays
  unsure (1)..(56): unsure at all Xaa locations
  Clone ID: MRT4577_139357C.1.pep
SPGGTHKEDWERRQQHLKRGDFVMSGWRPGMQPARCXPPRRPTFESHLESGRGGRV

SEQ ID NO: 227809 - protein, 88 aa, Zea mays
  Clone ID: MRT4577_139358C.1.pep
LPAPVTLAGSSRILRLPHSKNWGNPEPGGACHLRSLPTPITYGLKDTSSQGFKALNLDMPLRELFNDGNRLTLNQLTAFKSHPPENPR

SEQ ID NO: 227810 - protein, 91 aa, Zea mays
  unsure (1)..(91): unsure at all Xaa locations
  Clone ID: MRT4577_139359C.1.pep
CLAPAPLGGRLWSPLALXGAAGAPALXLXXXVAPPPLXXVFXXGPXXXPSXWLCXGPXPVAWXXGXAGFSRCXSLSSLWXLALXACSSWFS

SEQ ID NO: 227811 - protein, 120 aa, Zea mays
  unsure (1)..(120): unsure at all Xaa locations
  Clone ID: MRT4577_13935C.1.pep
SRFFISASMIFSAATRFWGRPLLFLAGTATSSPLLPLSSWVLPLVSCFRPLALPVPIDDSIHQKKLQRQLRKLGDAKIIYLDAAYSAALLLPLELTKILPAARVAPGLPARXLPAALLSL

SEQ ID NO: 227812 - protein, 79 aa, Zea mays
  unsure (1)..(79): unsure at all Xaa locations
  Clone ID: MRT4577_139360C.1.pep
PAFFFFWFGGGGGGEKKFFFPPPFFEKKKKKRGPPPPRGGGGGXXFFFFFPPPPPARGGGGDPPPPPGGGVVFKNLFFF

SEQ ID NO: 227813 - protein, 168 aa, Zea mays
  unsure (1)..(168): unsure at all Xaa locations
  Clone ID: MRT4577_139361C.1.pep
SPVEAGSAAGGGQRXLRGLDMQIIAVMSSGSVLVQGYVGAAHEATATCCNILNRALLLAAGPPCLMREINGHAERVIQGWNVDVSLRGVGWWQVIHETGGGKFAISAIARSHSWETCFIKEKVIGVQSLFWRKSSRAASEQRETRFLYIMIQMSLMRHSCSNHLLEHR

SEQ ID NO: 227814 - protein, 85 aa, Zea mays
  unsure (1)..(85): unsure at all Xaa locations
  Clone ID: MRT4577_139362C.1.pep
YPRYVGSLAKVYPQVVLGIVGAPAXGDVMELLIRVSEGFGRIVDARFKSFGCGSAIVSSSVGEQSQILVASRSRCAGVGCYAGWI

SEQ ID NO: 227815 - protein, 174 aa, Zea mays
  Clone ID: MRT4577_139363C.1.pep
MSERMLSMFQTIQDRHDTLQQQLLQDRAENRAFMTLMLQHTDVPIPPVQSAPPPPLQAAVVPAIQAGPPLPTVGPSSSPLRPVTLVFSSPVISSVSTQPPVPPAPAITTAVVVVSVTSSAPAAPVAQPPSESVPAPASTADPGSETDFDPQLVFALLPRPRPDAPPPPPSSSGV

SEQ ID NO: 227816 - protein, 114 aa, Zea mays
  Clone ID: MRT4577_139364C.1.pep
LMNHFFLGCGGPCNKYRGEPFPCRGTPFFSKNTEFYLPNYKKNLTYYRDTCPYWPDPGKTSRRKKNDFVLGTTRKLPPGGDKLLFQQHHTDVGHYTPPSFCERAQLGGEVFTPP

SEQ ID NO: 227817 - protein, 258 aa, Zea mays
  Clone ID: MRT4577_139365C.1.pep
MASSSRSTVFSLLLLVALLLSCSGMSSAARLLEEAPPKEEHPHPAVPELPEPELPPHPTDVVPPELPKPELPPHPAVVPELPKPEVPHPVPEQPKPELTPHPAAVPELPKPEVPHPTAVPELPKPEVPHPVPELPKPEVPPHPTAVPELPKPEVPHPVPELPKPELTPHPAAVPELPKPEVPHPVPELPKPEVPPHPTAVPELPKPEVPHPVPELPKPELPPHPVVPELPKPEVPHPVALELPKPELPPHPTVPKLPQ

SEQ ID NO: 227818 - protein, 189 aa, Zea mays
  unsure (1)..(189): unsure at all Xaa locations
  Clone ID: MRT4577_139366C.1.pep
MASSSRSTVFSLLLLVALLLSCSGISSAARLLEEAPPKEEHPHPAVPELPKPELPPHPTDVVPPELPKPELPPHPAVVPELPKPEVPHPVPEQPKPELTPHPATVPELPKPEVPHPTAVPELPKPEVPHSVPELPKPELTPXAAVPELPKPEVPHPVPELXQPEVPPHPTARPELPNLEVPTQCRSLPS

SEQ ID NO: 227819 - protein, 119 aa, Zea mays
  Clone ID: MRT4577_139367C.1.pep
GNVDGFAELFWDSRLGPLVRLQVPVGNFGFPPPVRGVKVQASLVFSYGLEGAPGPTFFPFWGGFMVFWCYPSYPCWALYMFSFFLQKYVPPAFAFFRFFYVFAVFELEGLLGVKIVINA

SEQ ID NO: 227820 - protein, 68 aa, Zea mays
  Clone ID: MRT4577_139368C.1.pep
IHVRADPPPAVTDGIGLRSVPTFDSDLHCIIHMAFKNAMIHTGSVAPAKMSPYKRSSAGLIFYASDQA

SEQ ID NO: 227821 - protein, 278 aa, Zea mays
  Clone ID: MRT4577_139369C.1.pep
MASSSRSTVFSLLLLVALLLSCSGMSSAARLLEEAPPKEEHPHPAVPELPEPELPPHPTDVVPPELPKPELPPHPAVVPELPKPEVPHQVPEQPKPELPPHPTAVPELPKPEVPHPVPELPKPEVPPHPTAVPELPKPEVPHPVPELPKPELTPHPAAVPELPKSEVPHPVPELPKPEVPPQPTAVPELPKPEVPHPVPELPKPELPPHPAVPELPKPEVPHQVAPELPKPELPPHPTVPKLPHPEVPEVPNHELPPLPKAELPPKPEGHYPEPEAKP

SEQ ID NO: 227822 - protein, 109 aa, Zea mays
  unsure (1)..(109): unsure at all Xaa locations
  Clone ID: MRT4577_13936C.1.pep
MATKVLFLLALLALLVSASYAFIISQCSLASSAIIPQFLPSVTSMGFEHPVVQAYRLQLALAASVLQQPIAQLQQQYLAHLNLQTIVTQQXQQFLTSLSHLVVVNPVSY

SEQ ID NO: 227823 - protein, 101 aa, Zea mays
  unsure (1)..(101): unsure at all Xaa locations
  Clone ID: MRT4577_139370C.1.pep
PPRAWAGKVETLEKAKPPLLPGGRPPPGASPGPXKGDAPXPXQGPPPRAPKFXVASPCAPLVLEPPPPSGLLSVSPPPHLLYSALKKTASLWGYGFFIFVF

SEQ ID NO: 227824 - protein, 42 aa, Zea mays
  Clone ID: MRT4577_139371C.1.pep
TVLPKGLIDQNCKSFIRFRSYSQRGKKNNIPDETNLVVKMPN

SEQ ID NO: 227825 - protein, 217 aa, Zea mays
  unsure (1)..(217): unsure at all Xaa locations
  Clone ID: MRT4577_139372C.1.pep
GWQKEDLMVQDNTGLTPAQLAADKNHRQVAFFLGNARSIHERGCVGNSYFVKLSKIGLXSSSLVYHYSLNGXYIHSIILEDYNTKMTVIFGLFAWLGVFLASVGLVMFYRCSRKDPGYINKNIRDSQNQRDDEPLLKMGLDSPELLDGNWSRLCITCKIVRPVRSKHCSTCDRCVEQFDHHCPWVSNCIGKRNKWDFFMFLILEVSAMIITGVMAII

SEQ ID NO: 227826 - protein, 182 aa, Zea mays
  Clone ID: MRT4577_139373C.1.pep
SPRAAFVHPLRRSRSGRDGRQRRPRRPRRRGRHTASHGCATGGRQGAAQQEGQDAGAAAVPIAIAIAVAASSSGSGSAKQHHPRVHECSICGAEFGSGQALGGHMRRHRPLVPAAAASRDDLHAPRKEKSLLELDLNLPAPCNEADAPELTSPRFAFAVAEQPPAPLPFPPATPSALVDCHY

SEQ ID NO: 227827 - protein, 56 aa, Zea mays
  Clone ID: MRT4577_139374C.1.pep
PRVRKVLQSLVPILAPFVVEKPVNPCLVGLSGGPAVAVRFFANPALRGGAQMMGSS

SEQ ID NO: 227828 - protein, 52 aa, Zea mays
  Clone ID: MRT4577_139375C.1.pep
YQHPHARPPATANPRNRKGSRHRPRPPKLRCHRVINIHHQRMHGAVRHDGAA

SEQ ID NO: 227829 - protein, 555 aa, Zea mays
  Clone ID: MRT4577_139376C.1.pep
MAAPALAFPMLLAASLLSVAAPALARSPSCPDGWQGGPVQNRCFMYISASLSWDRSEAVCHNYSGHLAAVSSVQELNFVKSLCGSSSTGCWVGGHHYSTSTGNGWKWSDDSSVWNETVFLGEPLPANCSDPACKVATSNDLCTLVTNGQPSTITEKRCSESHGLICRMNHVDRCYHDHCHKEYFISIIAVSGFILATTLAVVVWLLVYRRSKKRRRSREVLSASAAALVAPQWKVFTSEELRSITKNFSEGNRLPGNAKTGGTYSGILPDGSKVAIKRLKRSSLQRKKDFYSEIRRVAKLYHPNLVAVKGCCYDHGDRFIVYEFVANGPLDVWLHHIPRGGRSLDWAMRMRAATTLAQGIAFLHDKVKPQVVHRDIRASNVLLDEDFGSHLMGVGLSKFVPWEVMHERTVKAASYGYLAPEFIYRNELTTKSDVYSFGVLLLEIISGRRPAQSVESVGWQTIFEWATPLVQSHRYLDLLDPLIQESPDAGVVQKVVDLVYSCTQHVPSVRPRMSHVVHQLQQLELKSAASEQQLRSGTSTSATSPMLPLEVRTPR

SEQ ID NO: 227830 - protein, 88 aa, Zea mays
  Clone ID: MRT4577_139377C.1.pep
NHFLFTKDYVPTSKRRARKRKRNERKENRGRRRLCDVRGNYVRYKPNPLNSIVSWLLELSSLIGLRGAVTLELRRLTCQCASSASCYP

SEQ ID NO: 227831 - protein, 71 aa, Zea mays
  Clone ID: MRT4577_139378C.1.pep
RMACTSSSTNLLKDTIRKILVEHIGRLASLTDEHNDVEQLSRHDVETVRKFRSVAYNLRKKTTNLSITEWM

SEQ ID NO: 227832 - protein, 63 aa, Zea mays
  Clone ID: MRT4577_139379C.1.pep
GRDILELSAITFLIQLTGLVAELENALKEWTGGTTVANLFSNGKHSGCCDETRALKSDGKLVP

SEQ ID NO: 227833 - protein, 210 aa, Zea mays
  unsure (1)..(210): unsure at all Xaa locations
  Clone ID: MRT4577_13937C.1.pep
NIITPDTLRSLFPSLALGLFILTCTRAEQNSPTLDNLDLSDCNYWIVATAVXIVCTVINLKSKARTKKGTITDPRHLPKCNYDRSITRLDPAQDSXITLDLPVIIQDTTKHYSHVLDVRERHTPLRKAIPANXRTGCAKAYXHLHIAGDAAWYXIDDQYTVLHTHLYLTPQSGLIDWLPRTHREAYYLLLRLPTMILRLTRMTPHYQDEP

SEQ ID NO: 227834 - protein, 56 aa, Zea mays
  Clone ID: MRT4577_139380C.1.pep
ECCCSVWSTYYFHSQLQMMHLHSQNGLADPNQFSPWSTSIKHETKFCQIPQIQHDA

SEQ ID NO: 227835 - protein, 220 aa, Zea mays
  unsure (1)..(220): unsure at all Xaa locations
  Clone ID: MRT4577_139381C.1.pep
MSLSCRRVRFPGADVREAGRSREGMQRSRKALLRRTAAAQVQSAVAEAAGNGRKRRLYGFSVSLVVTLWVAVLLLHSLVGHGDGQRDGGGSAVDITFVEPTLNGGPVNSAVQEVHGENLAVPSDTCVGSVENAVLPEDTLVQAAQLCSNDEARSENTEALTKTXVELSGDQCGYLPQSDFDSGVQPRGKGWKIKNLPKPXRLSRGAPPDXDEFXTRAIAE

SEQ ID NO: 227836 - protein, 181 aa, Zea mays
  Clone ID: MRT4577_139382C.1.pep
EELRHHGLVELGPTPERPSRARRSTRTTALLPRPEQDKHTILMGHDHITHIEKLTADGSVADRKCCQEPGCDEIVSGRVMYCNSHTRGHSSQQLGYLQSSQKTSDLYMPPVKGRQCTEPSASAEQDVSIKYEGNDQAKLNDRSGDTQGNTGQLILGWPDTLCKHRQLQKAGPEQRIVLQAT

SEQ ID NO: 227837 - protein, 73 aa, Zea mays
  Clone ID: MRT4577_139383C.1.pep
GINPLDQQRNANFRFSDRNALYAIAFSLTPSPCALFSLIISYIRLALPRNPAAAGRNRTSRGFCSLSPSGGGG

SEQ ID NO: 227838 - protein, 225 aa, Zea mays
  Clone ID: MRT4577_139384C.1.pep
FEIMDELNMYQDGMGSFGKEIATRQRRNENFNPAKWWLNHGNSSPNLRKLAVKVLGLTCSSSACERNWSDFEKVDSKIRSRLLHDRMRDLVFVKFNSKLKQKKETKSRDPIEKQVPDILEDSGNEWITRVASIEQEQAQNTEFVEATNPQAASSRTAIETGKRKREIQPKRKKRTRKLIDINECNNDEHELASSSDSEEDDAHVDMDQQSSSSHSSDSDNSVFDE

SEQ ID NO: 227839 - protein, 85 aa, Zea mays
  Clone ID: MRT4577_139385C.1.pep
FPFNQWAPLTPAVFFHHQILLPFRELAAPSGASFLTQQQLFPFYKQFGANPPPLLKIQQLLPFVQLVLKNPTPPSQKNNMGGAPF

SEQ ID NO: 227840 - protein, 125 aa, Zea mays
  Clone ID: MRT4577_139386C.1.pep
MSSAAGGVEETVRASHILIKHEGSRRKASWKDPDGRIISATTRGDAAARLLDLRNQILSGQANFADLAARHSDCSISARRGGDLGTFGRRQMQKPFEDATYALKVGELSDIVDTDSGVHIILRTA

SEQ ID NO: 227841 - protein, 111 aa, Zea mays
  unsure (1)..(111): unsure at all Xaa locations
  Clone ID: MRT4577_139387C.1.pep
NVVLPPELRTPFLLKAPTAPHIVAAQEGVTLDIDTIVACHREALTRADIVVVEGAGGFRVPLTDTHDMADLAVALGVXVVMAVPVRXIGSITXXXLTADEIKANGLTLAGW

SEQ ID NO: 227842 - protein, 123 aa, Zea mays
  Clone ID: MRT4577_139388C.1.pep
TMFVVSFWVCLVLFAIPLVGCFYRVIDCVSRCKINYFNTINLYPFIRLKSSYLLGIHLYVASRVLATHGRAAIESGPSFLFVQFWWFIFVCGQRVKNCWLASETAQTMGFLLVNRKNEVNFLL

SEQ ID NO: 227843 - protein, 85 aa, Zea mays
  Clone ID: MRT4577_139389C.1.pep
LVGPRLGELNVKGRPPMREDAWPQSGRGTLGTVRTSCGSSRGTRVVGLGDNRIYTVRTGDGYRKGGLVKRDCRAHSYSSKGMAIV

SEQ ID NO: 227844 - protein, 149 aa, Zea mays
  unsure (1)..(149): unsure at all Xaa locations
  Clone ID: MRT4577_13938C.1.pep
MAVELAKQLLAVIGSYTPPLWATLIAGVFVIISVSLSLYLLFNHLSAYKNPEEQKFLVGVILMVPCYAVESYISLVNPSISVDIEIMRDGYEAFAMYCFGRYLVACLXGEDRTIXILNRXGGSGSAAPLLGQASETRYVNHPFXXDYML

SEQ ID NO: 227845 - protein, 218 aa, Zea mays
  unsure (1)..(218): unsure at all Xaa locations
  Clone ID: MRT4577_139390C.1.pep
CQPVFLLSPASSRFSQSVVRSSSGRERYGAFIDPFGRGAKLRQDGLGTGPGVSSSARLPIPKARPAVARSERRLKHASSEGQLNRVRNGDRSSQGSPAKQSREGVGLSLDIPQLHDLAVRPSKDKEESPDAALDFSFHSDEHSQRLQRVCSSPAPFXAGCSSDSLMVVPECAVHXTKVSKPPPPKPKRRAKSPIPKRVISDVFREAKAAHKRXSSPQR

SEQ ID NO: 227846 - protein, 294 aa, Zea mays
  unsure (1)..(294): unsure at all Xaa locations
  Clone ID: MRT4577_139391C.1.pep
MDDEDYSWVRRTRFSQSVVRSSSGRERYGAFIIDPFGRGAKLRQDGLGTGPGVSSSARLPIPKARPAVARSEGKLKHASSEGQLNRVRNSDRSSQGSPAKQSRERVGLSLDIPQLHDVAVRPSKESPDAALDFSFHSDEHSQRLQRVCSSPAPFFLQDATATADGGSRVRSASTKVSKPPPKPKRRAKSPIPKRVISDVFKEAKAATKRFSSPQRQRKPMSPRSPDDSPPLGFASLRAPSKLKINSRASSWPRTNLDSGPARVAAPEILERWTVDRSXLVIXHRFDSGPIPIVH

SEQ ID NO: 227847 - protein, 175 aa, Zea mays
  Clone ID: MRT4577_139392C.1.pep
MDDEDYSWVRRTRFSQSVVRSSSGRERYGAFIDPFGRGAKLRQDGLGTGPGVSSSARLPIPKARPAVARSERRLKHASSEGQLNRVRNGDRSSQGSPAKQSREGVGLSLDIPQLHDLAVRPSKDKEESPDAALDFSFHSDEHSQRLQRVCSSPAPFFLQDAAATADGGSRVRSAF

SEQ ID NO: 227848 - protein, 157 aa, Zea mays
  Clone ID: MRT4577_139393C.1.pep
GRAPRLAPGRFPTGARRRICASPGLLWSPPRCAAPDYGPVAGGVASAVGAGVGDRGGAVRCGFWSGPWSGNAGSEPPFDGPFSIDCLDLVCSLILPCLVLAAAAVVTGSAPPSPAQCSARVPPSQLVAWFVPCVPGRCSVGSWLCSFCSRGGNREKG

SEQ ID NO: 227849 - protein, 35 aa, Zea mays
  Clone ID: MRT4577_139394C.1.pep
RGSQLCAQKIVQQKSNYLLINWLLPFKLRPDAIKC

SEQ ID NO: 227850 - protein, 64 aa, Zea mays
  Clone ID: MRT4577_139395C.1.pep
IKKKKKKKKKKKKKKKKKKKKKKKKKKKKKKKKKKIFKKKNLVWGFPNLCGGGGANFNLIFGGV

SEQ ID NO: 227851 - protein, 109 aa, Zea mays
  Clone ID: MRT4577_139396C.1.pep
GRPFFFFFFFFWFFLVFFFWRTYVFFFLEHPLNKSLDSKMDQIQHLFMGASSRLTKKGPSKRKIGLAIIHGGPYGFVYHSWGAFWIENSLMHRGSFLEEIEGGGQPSFF

SEQ ID NO: 227852 - protein, 177 aa, Zea mays
  Clone ID: MRT4577_139397C.1.pep
MGVKKPQPAPEKPKPEPQVLVPPVFDFPPLAARTRMLVPAYELMFGKLARRSLFDDYLHSGGVDAQIVLKQLGDSHADLTATMSTNGGEAHFRWQRDLKDPNTFVDFLVSTSKPTMRLSSSIYYPKYRIGAFGTFPLNMANRACPEDYGVMGLRYGSENLSIGASFVPFPSPGEVPY

SEQ ID NO: 227853 - protein, 141 aa, Zea mays
  unsure (1)..(141): unsure at all Xaa locations
  Clone ID: MRT4577_139398C.1.pep
KQPTPASIHHTYSYSYYTYYPTAKDTPFYRNISYIFTPSHPIYIYSYNLTLRHVHHYYTFSLPNFNXNTPFVIIHPPLFKNSISNLIHHPNRNPSNTHSLYNLNYLNNRNAYPIPFKNPPNKKLIXLIHKNLFTLYTHPIP

SEQ ID NO: 227854 - protein, 105 aa, Zea mays
  Clone ID: MRT4577_139399C.1.pep
NRAPLKCFSGSKNGRAFNCRQAGKLSTKVMNISVGALPLAASSKNFVAHPFSILIVPHCHACLRCYYVIDSVKKRRIQISCTDESPPIEVLKHKLNQAVPHQKIM

SEQ ID NO: 227855 - protein, 45 aa, Zea mays
  Clone ID: MRT4577_13939C.1.pep
LLLFHSPHDNRGGIYNTFQNSEPDIHTRWHILATLAQKTSLTNIA

SEQ ID NO: 227856 - protein, 97 aa, Zea mays
  Clone ID: MRT4577_1393C.1.pep
VGSNGGGGARGVRVPSPGAFAPQRPARRTGGRTMVGDHADNNIALHWRLPGALGPGQVMGLLCEAQGANNICDKRGMIRGPLLEPHSLPTVLQTLTK

SEQ ID NO: 227857 - protein, 260 aa, Zea mays
  unsure (1)..(260): unsure at all Xaa locations
  Clone ID: MRT4577_139400C.1.pep
SPLLLPRLALGADLLAGSQLLARQARPHGAPVRISPPATRPCPLLTPATLPSPNPSQPSSGAQSMAHPAAPLSICSAASFPAPVVIEAPGAHVRTEAFGVHDDIVESRSVVARVPRRRATALGWDGALLPELALRSASSPWSSPLRLTPARRISSRAVALLLASVFSAPAIPWRFPLRQLPRRAASLPAQPPASLHCSSRPXTARRALAAPFFLLCLPISMVCRRRLEASGHARCALVREEDLLRAQIFFLPFPAPPARD

SEQ ID NO: 227858 - protein, 886 aa, Zea mays
  unsure (1)..(886): unsure at all Xaa locations
  Clone ID: MRT4577_139401C.1.pep
SRSRTSPWNVNKLAHIAXRMXGQLGVCVSILDIVYGHATMEVQEAFVKICEQAKAYLEMKGELVSGLNLINNTNLEYFCFVLHREKFRLRGDFLLKMNECETANQSYYSALTLFKHLPKGWISWGNYCDMVFKETKDEVWLEYAVSCFFQGIKYGVSNSRSHLARILYLLSFDGQNEPVGRALDKYLEQLPHWVWLSWIPQLLLSLQRSEAQHCKLVLMKIAQVYPQALYYWLRTYLMERRDVATKTEIGRNMLAQQRMLXAMMANNAANNLPDGSARASNHAGSNMTSDNQSHQASQSVGAAGSHDGGNVQGQDPERSTPEGGTNTSHDQGQQSSTGAEGSQVPLRRNSGHGWVTSAASAFDAAKDIMEALRSKHTNLANELELLLSEIGSRFVTLPEERLLAVVNALLHRCYKYPTATTGEVPQSLKKELSGVCRACFSQDAVNKHVDFVKEYKQDFERDLDPESATTFPATLAELTERLKHWKNILQSNVEDRFPAVLKLEEESKTLRDFHVVDIELPGQYFTDQEIAPDHTVKLDRVGPDIPIVRRHGSSFRRLTLIGSDGSQRHFIVQTSLTPNARSDERMLQLFRVLNKMFDKHKESRRRHLAIHTPIIIPVWSQXDSPITIFKEQLNQAVSGQLSPEAIVELRLQAYNEITKNIVNDNIFSQYMHKILPTGNYLWTFKKQFAIQVALSCFMSYMLQIGGRAPNKILFAKNTGKIFQTDFHPAYDPNGMIEFNELVPFRLTRNLQAFFSNFGVEGLIVSAMCSAAQSVVSPKQSQHIWHHLAMFFRDELLSWSWRRPLGIPSVPVAAGMINPSDFQQKVVNNVEHVISRIKSISPHCLAEEEENATEPPQSVQRGVTELVEAALSSRNLCMMDPTWHPWF

SEQ ID NO: 227859 - protein, 67 aa, Zea mays
  Clone ID: MRT4577_139402C.1.pep
RENLIQALPISDLIDCTPRGKIGGPFGAILSVFFWRDALTSVLDHLVVKTVIRKLMPKLCYGYPTPN

SEQ ID NO: 227860 - protein, 270 aa, Zea mays
  unsure (1)..(270): unsure at all Xaa locations
  Clone ID: MRT4577_139403C.1.pep
YPPSSAGVVDIEHPGQYFTDQEIAPDHTVKLDRVGXLTPNARSDERMLQLFRVLNKMFDKHKESRRRHLAIHTPIIIPVWSQVRMVEDDLMYSTFLEVYEINCARHNREADSPITIFKEQLNQAVSGQLSPEAIVELRLQAYNEITKNIVNDNIFSQYMHKILPTGNYLWTFKKQFAIQVALSCFMSYMLQIGGRAPNKILFAKNTGXKIFQTDFHHLAMFFRDELLSLVVEAASGHSISPCRCWNDQPIRFQVGNNVEHVISRIKSISP

SEQ ID NO: 227861 - protein, 431 aa, Zea mays
  unsure (1)..(431): unsure at all Xaa locations
  Clone ID: MRT4577_139404C.1.pep
EHWKNILQSNVEDRFPAVLKLEEEXKTLRDFHVVDIELPGRFFTDQEIAPDHTVKLDRVGPDIPIVRRHGSSFRRLTLIGSDGSQRHFIVQTSLTPNARSDERMLQLFRVLNKMFDKHKESRRRHLAIHTPIIIPVWSQVRMVEDDLMYSTFLEVYEINCARHNREADSPITIFKEQLNQAVSGQLSPEAIVELRLQAYNEITKNIVNDNIFSQYMHKILPTGNYLWTFKKQFAIQVALSCFMSYMLQIGGRAPNKILFAKNTGKIFQTDFHPAYDPNGMIEFNELVPFRLTRNLQAFFSNFGVEGLIVSAMCSAAQSVVFPKQSQHIWHHLAMFFRDELLSWSWRRPLGIPSVPVAAGMINPSDFQQKVVNNVEHVISRIKSISPHCLAEEEENATEPPQSVQRGVTELVEAALSSRNLCMMDPTWHPWF

SEQ ID NO: 227862 - protein, 61 aa, Zea mays
  unsure (1)..(61): unsure at all Xaa locations
  Clone ID: MRT4577_139405C.1.pep
LLAAGPQLPAGRRQRPARHRRAHPGHVRQLLISVPPDVPEEAAXGRQASTGASSGRIGRAG

SEQ ID NO: 227863 - protein, 42 aa, Zea mays
  Clone ID: MRT4577_139406C.1.pep
ERFLEAKYWSKGYGQFNTPLEIKDIHIMWQIIYKAFHQGNEI

SEQ ID NO: 227864 - protein, 71 aa, Zea mays
  Clone ID: MRT4577_139407C.1.pep
LPFGLRQGVGVPGPPPDQKGPSGPPPPGPPRQNLSSAFPFAWFSTLLFSPSPGRSVPIVMGPLSILLFPCS

SEQ ID NO: 227865 - protein, 79 aa, Zea mays
  Clone ID: MRT4577_139408C.1.pep
EFPGRPVGEEGRKTEDRAVRGLGTGTGHDPKISDASCPPARARRRVVLAGRAPATASPSPWGSDTPQAARWCCGSYDTA

SEQ ID NO: 227866 - protein, 94 aa, Zea mays
  Clone ID: MRT4577_139409C.1.pep
AINHQKVRPERGPNQSVTLPISTSHAVLGPRGSLQRRPLGVFSSTPRPVCCPLRSSDTTRLSRPSTDPGTQTLGNTSHFWCGSFLPSRATVRTL

SEQ ID NO: 227867 - protein, 68 aa, Zea mays
  Clone ID: MRT4577_13940C.1.pep
SCSYADDSGHGRQNGGGKPRLYVARYRTTARALSLMLGYLNGVTYMCGCRCNGELLLLGYDSIALTDR

SEQ ID NO: 227868 - protein, 63 aa, Zea mays
  Clone ID: MRT4577_139410C.1.pep
ADCCKQKKKKKKKKKKKKKKKKKKKKKKKTKKKQTYKIWLKKGGLLDDKFISFHCSASLFFTF

SEQ ID NO: 227869 - protein, 124 aa, Zea mays
  unsure (1)..(124): unsure at all Xaa locations
  Clone ID: MRT4577_139411C.1.pep
MATAAGSAPPLAVNISICLVIWSGTGTVDRDHDTERIQGSAGDVLEDYPXGRLMVDLYDAAEXYNTRRAAXDSMCNSHMLAAEIFMRRFLLRNASQTLNPAIAYWFYTPAYTKCGLTPWGHPLP

SEQ ID NO: 227870 - protein, 81 aa, Zea mays
  unsure (1)..(81): unsure at all Xaa locations
  Clone ID: MRT4577_139412C.1.pep
SPNNMGDDCGMSAEQTPINYXQTSDFXFCDIGDVIEEGFENWKETLQAMCKLLSQFCAKNGAMTRYVTEEGLLERVHEMAF

SEQ ID NO: 227871 - protein, 484 aa, Zea mays
  unsure (1)..(484): unsure at all Xaa locations
  Clone ID: MRT4577_139413C.1.pep
MAAAIVLSGQVRPLPSSLPLSLLLLLLLCCSGTSWGWSTSRGGAARECGFDGKLEALEPRHKVQSEAGSVQYFSRFNEADRELTCAGIFAVRVVVDAMGLLLPRYSNVHSLVYIVQGRGIIGFSFPGCQEETQQQQYGYGYGYGHHHHQHDHHKIHRFEQGDVVAMPAGAQHWLYNDGDAPLVAVYVFDENNNINQLEPSMRKFLLAGGFSKGQPHFAENIFKGIDARFLSEALGVSMHVAEKLQSRRDQRGEIVRVEPEHGFHQLNPSPSSSSFSFPSSQVQYQTCQRDVDRHNVCAMEVRHSVERLDQADVYSPGAGRITRLTSHKFPVLNLVQMSAVRVDLYQDAIMSPFWNFNAHSAMYGXIRGSARVQVASDNGTTVFDDVLRAGQLLIVPQGYLVATKAQGEGFQYIAFETNPDTMVSHVAGKNSVLSDLPAAVIASSYAISMEEAAELKNGRKHELAVLTPAGSGSYQQGQAGSAQQ

SEQ ID NO: 227872 - protein, 76 aa, Zea mays
  Clone ID: MRT4577_139414C.1.pep
PQRYPIPRPIPTEIVILHMEVQRNTMLCKISDKLLVRWVGSFSMTIFNEKIHVNTDFLLEIMNTLSMLMYRELYIL

SEQ ID NO: 227873 - protein, 88 aa, Zea mays
  Clone ID: MRT4577_139415C.1.pep
KRLRGSNSDTYTYICIIFCITQVMKTSTPSIPNYKMFGFSGYITFAKHLYIQCIYIGKAMLREKPKYLTIWNGVFPKELSIVGTLDLH

SEQ ID NO: 227874 - protein, 99 aa, Zea mays
  Clone ID: MRT4577_139416C.1.pep
GGGYPRLHLASSLRSAQGIINDEYGGTLYDGFLGVLNATPGLSQIIYSLAGVATGIYSSLSGIQWNGRYDICQNRENVWKVRRCFVLGVKGLLCLLLNM

SEQ ID NO: 227875 - protein, 127 aa, Zea mays
  Clone ID: MRT4577_139417C.1.pep
NWHTNLTIHSKNGPRPTHFRNLPYPPGARAPPKPALVFTPFIDPKPLDENPTPPFGAFEGGPPFPFVEKLVVPGNPKNFGDHGPNKGPRNRGGPPPGHPQKEPHDHPQKFPGPPLGPPGGGRENRAG

SEQ ID NO: 227876 - protein, 89 aa, Zea mays
  Clone ID: MRT4577_139418C.1.pep
DDNWTDERVPRTGFLVRVQYELSIHCSDDLRLQRAIMSTGYAAATQRCEAVSYKRQPLGPMPGLMVESTIIETVTPIPYDAGHDLKGGY

SEQ ID NO: 227877 - protein, 118 aa, Zea mays
  unsure (1)..(118): unsure at all Xaa locations
  Clone ID: MRT4577_139419C.1.pep
NTPTNALAGPTQGYQTLSLLALLALFASATNAFIXLPQWLTLPPSXALSPQFLPAVTSMGLEHPAVQAYRLQQALAASALEQPIAQLQQQSLAXVTIQTMGTQEQQALSHLGGGEPYG

SEQ ID NO: 227878 - protein, 99 aa, Zea mays
  unsure (1)..(99): unsure at all Xaa locations
  Clone ID: MRT4577_13941C.1.pep
RTTPRXHXRAVFAGXHARGRAGXANNTPRGATKXATKKTKKXTDNNKNKXQGEXKRGKDTXRLXRTGXKDFGGGGXNKXIENQSINXLSTPTKEVLEIE

SEQ ID NO: 227879 - protein, 222 aa, Zea mays
  Clone ID: MRT4577_139420C.1.pep
MAGEKGLVLLDFWVSPFGQRVRIALAEKGLPYEYAEEDLMAGKSDRLLRANPVHKKIPVLLHDGRAVNESLIILQYLEEAFPDAPALLPSDPYARAQARFWADYVDKKVYDCGSRLWKLKGEPQAQARAEMLDILKTLDGALGDKPFFGGEKFGFVDAAFAPFTAWFHSYERYGEFSLPEVAPKIAAWAKRCGERESVAKSLYSPDKVYDFIGLLKKKYGIE

SEQ ID NO: 227880 - protein, 113 aa, Zea mays
  Clone ID: MRT4577_139421C.1.pep
MAPIKVGINGFGRIGRIVFRNAVEHPDIEVVAVNDPFIEPHYAVYMLKYDSSHGIFKGEVGNQGNDLVVNGKTIKFYSERDPANIKWSETGADYVVESTGVFTTIDKAKAHLQ

SEQ ID NO: 227881 - protein, 267 aa, Zea mays
  Clone ID: MRT4577_139422C.1.pep
MFPQADAHPAHEPLAGRVAIVTGGAGGIGSAVAAHLASLGARVVVGFIGDPAPADQLVAALNNSSPAGNSDPRAVAVAADVSDPAQVARLFDAAEAAFGPELHVLVAAAGVQDATYPRIADTSPEQWDLAFGVNTRGTFLCCREAARRLARGGAGRIVTLSSSNVGSLRPGYGAYVASKAAVEAMTKVLAKELGGMGITANAVAPGPVATPMFYAGKSEERVAAAARECPMGRLAEPADVAPVVGFLCTDAAGWINGQVIRVNGGYV

SEQ ID NO: 227882 - protein, 431 aa, Zea mays
  Clone ID: MRT4577_139423C.1.pep
ESPDIDWSKVVCTITNATEQVLPASISKYNLQQLDMLSDRLDEIHMARKYKRLSTAVRIKAFCGDKQKRLEEARFLHDKLFYEKAKLQINNMKLVKLQKKAQLCQDGIQECCFLKSKILGAGHMEDSSLPAATTVSAGDRQEELDIISEKRLELKIIQRKVEKLRSSLECFHNIEGGIGSDSVVRYAEEQLMMRNQHRIIHWQAGLCKLNDIVKRGNKCDIILNYHNLLFQRIILNISDTSSIFVNNSLNGNQIGKTFPNLDASLAFNFVFEAEENQRVSDLQSLQKKTMETSLLLGNLIDVLEEIKLSKLELVNLTSAAFVLESQTRKLGLHLSFMSFKSGKKIAFIIDMTDLNRSVYPSEPSELIKVFEAHTTLAQPSIDETMASIRNLQSGRTAILRLCRMVSRLIHGYNDDLITGVQAVGSKHHPDM

SEQ ID NO: 227883 - protein, 60 aa, Zea mays
  unsure (1)..(60): unsure at all Xaa locations
  Clone ID: MRT4577_139424C.1.pep
FASWDIFVLEKLKILVLQNPQPFFFFFVMKLXKVHPPRIKNPRVPSVASFEAGQPFLQAW

SEQ ID NO: 227884 - protein, 156 aa, Zea mays
  Clone ID: MRT4577_139425C.1.pep
MGASLASAGLVNYPLVAALLAFALAQSSKFFTTWYKEGRWDARQLIASGGMPSSHSATVTALSVAVGIQEGFRSATFATALVFACVVMHDAFGVRLHAGKQAEVLNQIVYELPEEHPLSETKPLREILGHTVPQVVAGCILGILMAVVMLLALGRS

SEQ ID NO: 227885 - protein, 142 aa, Zea mays
  unsure (1)..(142): unsure at all Xaa locations
  Clone ID: MRT4577_139426C.1.pep
PTRSPTRPVQDGDPTKTIKVPEGFDYELYNRNDINRIXLGPKACCISFKDSGCRCFGYMVFKKNYIYTIDHDCFIAKDPXSGHDINXAIEHHIKNLLSPXSHPSFFNTPYNPFPEGASLIILAPPPPPRKGAHTPSLPQPRG

SEQ ID NO: 227886 - protein, 41 aa, Zea mays
  Clone ID: MRT4577_139427C.1.pep
AINVCISCKQSNWIAQGFLTSSAPTVCSSFSRVSISASTFN

SEQ ID NO: 227887 - protein, 156 aa, Zea mays
  Clone ID: MRT4577_139428C.1.pep
METAASAARLVNYPLVAALLAFAVAQSSKFFTTWYKDGRWDARQFIASGGMPSSHSATVTALAVAVAIQEGFHSATFATALVFACVVMHDAFGVRLHAGKQAEVLNQIVYELPEEHPLSETKPLREILGHTVPQVVAGCILGILMAVVMHLALGSS

SEQ ID NO: 227888 - protein, 136 aa, Zea mays
  Clone ID: MRT4577_139429C.1.pep
PTRPPTRPPTRPTWYKEGRWDARQLIASGGMPSSHSATVTALSVAVGIQEGFRSATFATALVFACVVMHDAFGVRLHAGKQAEVLNQIVYELPEEHPLSETKPLREILGHTVPQVVAGCIPGIPMAVVMLLSFGRS

SEQ ID NO: 227889 - protein, 180 aa, Zea mays
  unsure (1)..(180): unsure at all Xaa locations
  Clone ID: MRT4577_13942C.1.pep
MYTLPVRATTSSIVXPPXXXXXVXXLRLRXAAPGPGSSGTXXLRRPXTXVGMDPXXERFKSXFXKFKTEVYXKKPELXEXXKXGQSPRXMVXAXXHSRVXPSVTLGLQPGEAXTVRNXASMVPPYDKIKYXGTGSAIXYAVCXXKGXGIVVIXHNXRRGIRAXLSLKDGAPHNFHFVEDL

SEQ ID NO: 227890 - protein, 93 aa, Zea mays
  Clone ID: MRT4577_139430C.1.pep
GAQGGRTPGRAAKGDFTPWERAERNGLRDERAGRERAQGEKSSAREELATGTRRAGRDTAAMEMHCEGEKQGRAGAEDRALVRAGDREGIDKL

SEQ ID NO: 227891 - protein, 410 aa, Zea mays
  Clone ID: MRT4577_139431C.1.pep
MGASWITTCSPWSAFATLAALTTSALVLGYVSSSLLGQQAAYEYDDAYSPDAEPSGPAAPPRRGAGYPPVFAYYITGGRGDCLRMTRLLKAAYHPRNRYLLHLDAGAGAYERARLARYVRSEQVFLEYANVHVVGKGDALDGRGPSAVAAVLRGAAVLLRVGAEWDWLVTLSAADYPLVTQDDLLYAFSSVPRDLSFIDHRPDSETHHVVVLDQNLLQSTNAEISIASGHREKPDAFDLFRGSPWPILSRAFTEHCVAAPDNLPRTLLMYFSNSLEAKEFYFQTVMANSPRFRNSTVNHSLRVNVPPPPPPQSAGQQARYDALVGGGAAFAGRFGDDEALLQRIDEEVLRRPLDGITPGEWCAVGGGEDGAGECSVGGDIDAVRQGAAGRKLASLMAGLVGTAPCGGCNS

SEQ ID NO: 227892 - protein, 288 aa, Zea mays
  Clone ID: MRT4577_139432C.1.pep
MGKEVDVSTLEAGGVRDRDYADPPPAPLIDIDELGKWSLYRAVIAEFVATLLFLYITVATVIGYKHQTDASASGPDAACGGVGILGIAWAFGGMIFILVYCTAGISGGHINPAVTFGLFLARKVSLVRALLYMAAQSLGAVCGVALVKGFQSGFYVRYGGGANEVSAGYSTGTGLAAEIIGTFVLVYTVFSATDPKRNARDSHVPVLAPLPIGFAVFMVHLATIPITGTGINPARSLGAAVVYNNSKAWSDQWIFWVGPFIGAAIAALYHQIVLRASARGYGSFRSNA

SEQ ID NO: 227893 - protein, 244 aa, Zea mays
  unsure (1)..(244): unsure at all Xaa locations
  Clone ID: MRT4577_139433C.1.pep
PRGLPGIFILVYCTAGISGGHINPAVTFGLFLARKVSLVRALLYMAAQSLGAICGVALVKGFQSGFYARYGGGANEVSAGYSTGTGLAAEIIGTFVLVYTVFSATDPKRNARDSHVPXVLCIASRVALLMNQGNAHQVLAPLPIGFAVFMVHLATIPITGTGINPARSLGAAVVYNNSKAWSDQXYTHCPRLQHSLICWLLICCCCMQWIFWVGPFIGAAIAALYHQIVLRASARGYGSFRSNA

SEQ ID NO: 227894 - protein, 288 aa, Zea mays
  Clone ID: MRT4577_139434C.1.pep
MGKEVDVSTLEAGGVRDRDYADPPPAPLIDIDELGKWSLYRAVIAEFVATLLFLYITVATVIGYKHQTDASASGPDAACGGVGILGIAWAFGGMIFILVYCTAGISGGHINPAVTFGLFLARKVSLVRALLYMAAQSLGAICGVALVKGFQSGFYARYGGGANEVSAGYSTGTGLAAEIIGTFVLVYTVFSATDPKRNARDSHVPVLAPLPIGFAVFMVHLATIPITGTGINPARSLGAAVVYNNSKAWSDQWIFWVGPFIGAAIAALYHQIVLRASARGYGSFRSNA

SEQ ID NO: 227895 - protein, 44 aa, Zea mays
  Clone ID: MRT4577_139435C.1.pep
KSRTQSLWVSQRNYFSSAMLGHTPFEHYNFLWFELLFHYMMPVL

SEQ ID NO: 227896 - protein, 156 aa, Zea mays
  unsure (1)..(156): unsure at all Xaa locations
  Clone ID: MRT4577_139436C.1.pep
QQQXXAXNPXXXANXXXAXQQQQQXQQXAASXXQXARXEPXAXXXQQQQRXATSPXARGKAXTXRQQQXXQQQXXQQXGPXXXQXAGANPXAXXQQXXPXNQRTGXNGGAXXQQRQQXXXPXAGANPXXXAXXQQQQGXPXNQXXXXNXAXXXQQP

SEQ ID NO: 227897 - protein, 146 aa, Zea mays
  unsure (1)..(146): unsure at all Xaa locations
  Clone ID: MRT4577_139437C.1.pep
PTRPGLATIASAVRCPLGCRIRSPGHRIQRPRLAPLPPSWMWRKKQDEGALPLSPCLSPKHGHWPSLLPPKQTTPLSPTQMTREHDPSPPYRLHHINTRKSPVVIPASCMAMPTAXNSSMPAWWEQTQGSRPCIYATHKKVCYVSF

SEQ ID NO: 227898 - protein, 62 aa, Zea mays
  Clone ID: MRT4577_139438C.1.pep
GLNNYIWWCVFTTHESLIQVTQIWRLQHDEKIRLVSHITGSPTLTILPFTFFDKDSFQTRFS

SEQ ID NO: 227899 - protein, 426 aa, Zea mays
  unsure (1)..(426): unsure at all Xaa locations
  Clone ID: MRT4577_139439C.1.pep
QKTQDSRITEDSAMAMIEREKARAKAAMEAAEASQRIAEMEVQKRISAEKKLLKEAEERKNRGGSGMSHEARYRRYSIEEIEQATDNFNDARKVGEGGYGPVYKGFLDHTQVAIKVLRPDAAQGRSQFQQEVEVLSCIRHPNMVLLLGACPEYGCLVYEYMASGSLDDCLFRXSGGAGGPVIAWAQRFRIAAEIATALLFLHQTKPEPLVHRDLKPGNILLDRNYVSKISDVGLARLVPPSVADNVTQYRLTATAGTFCYIDPEYQQTGMLGVKSDVYSFGVMLLQIITAKPPMGLSHHVGRALERGELQDMLDPAVPDWPLEEAQCLAEMALRCCELRRKDRPDLGAVVLPELNRLRALGEDNMQYCGAIIRGGGGGGGGMHSSSPFHSNISRSHAEMMIDSQYPRSVFSSRAGDSPMPPRRSNA

SEQ ID NO: 227900 - protein, 115 aa, Zea mays
  Clone ID: MRT4577_13943C.1.pep
YSYQRTQKKTRQKTNCPGHPPKKKKGERTHTHKPQSPAAAIDPSSPASGGNSLPSVHPDGQKRRVNYFYNPDVDNYYYGQGHPMKPHRVRMTHYTLARYNLLNQMQVYRPNPPRN

SEQ ID NO: 227901 - protein, 148 aa, Zea mays
  Clone ID: MRT4577_139440C.1.pep
KKVIKKGKKEKPNRPLGGGNKTNTRGKQKTKKGKSRKLCFSSRGQKNQTTRSRGGGPKPRGGPRKETPPFTPSNQKRSWPPRGGGKGPKKRPLPVGPRGLEKKTPHPPLIPSKTEKPLVCNPKTGPTWGSKEVLKKTQTPLWKGKSPP

SEQ ID NO: 227902 - protein, 139 aa, Zea mays
  Clone ID: MRT4577_139441C.1.pep
HEKFSTHLTRSLAGIHNAGHETLVLLVSVLYDPDLRIVFRFTLCLLQLHLQHPERASTSVIFMVVHDIVSHKCTGQVIEQQYSQRVLSHQKSRFAAPMSYTGNQQQHRHMHVRAPDRNDLAAHAVAICTQCTSCAHCTS

SEQ ID NO: 227903 - protein, 96 aa, Zea mays
  unsure (1)..(96): unsure at all Xaa locations
  Clone ID: MRT4577_139442C.1.pep
LGCSDQGGHNSGVDGMGRCVVTMXXLQKQKKMPLSIFIPNTHVERGGRLFLADRXPCMTATRVEFASLRHPKGSFINNYSWEGSTCSTSTRPPLHL

SEQ ID NO: 227904 - protein, 165 aa, Zea mays
  unsure (1)..(165): unsure at all Xaa locations
  Clone ID: MRT4577_139443C.1.pep
MNWKKSPPAVSDGAPDDADDGRLRELGYKQELKRHLSXTPPPPHRIVSYHVASSSFALPLHLSRRVLSNFSISFTVISVLTGVTTLYNTGLAFGGPATMTLGWFVAGAFTMAVGLSMAEICSAYPTSGGLYYWSARLSGRRWAPFASWITGWFNIVAQASRASLS

SEQ ID NO: 227905 - protein, 89 aa, Zea mays
  Clone ID: MRT4577_139444C.1.pep
QDRARFEGRVCQARLVVFRRVGFHQPRCRLDPPRVRALVKGLFPPAYHEWVWIVYPKNKYHFPDHPGSHVLSKSGHGLSFCSRSRSHLF

SEQ ID NO: 227906 - protein, 124 aa, Zea mays
  unsure (1)..(124): unsure at all Xaa locations
  Clone ID: MRT4577_139445C.1.pep
ICSAVSFDRIFLSIIVGIRTVDGMISAISGIMEDVVRIGSFDLDAVSGAYPTTLPSPRMVAAGRELQLIHSPRQPSSGFRESLNPIYTDHDTTTTTTTTATTDSYRWPSXQTTLRXRQRQRHGP

SEQ ID NO: 227907 - protein, 104 aa, Zea mays
  unsure (1)..(104): unsure at all Xaa locations
  Clone ID: MRT4577_139446C.1.pep
KCLVIDEADRILEQNFXRQTVLFSATQTLDVEKIAKLSFEKNEVXKPDYVGVDDDKSKATVEGLQQGYCVISSDKRFLVLYAFLRKXKIMVFFSSCNSVKFHVE

SEQ ID NO: 227908 - protein, 191 aa, Zea mays
  unsure (1)..(191): unsure at all Xaa locations
  Clone ID: MRT4577_139447C.1.pep
MPIINIDILCSLTIERIQARDTLRNQDVQLHDGHDPYITRCYLTYLVEDYTXVHRRWKDCQVTLKDSHSLLLCQNPVSCCXSRXPEQIPCTEDRDDHVVQSTRXFTDQDNXMSLLIAGAKNVAISARHEHAPLPAAPDNEHKYTSHGCIVLNAXCTMNCLAALAQDADEYSGVSEGLMTTVHAVTATHMYC

SEQ ID NO: 227909 - protein, 120 aa, Zea mays
  unsure (1)..(120): unsure at all Xaa locations
  Clone ID: MRT4577_139448C.1.pep
MAKPMKYDDEEEISSSAEEEDQSDAAGFVSGEEGDDDHEDAVAPPAEEAEGEGHQEEEVDEEEIEAVTTGAGAEDEEDAGAVTGAEGDDQSQSTXDHEPVARDKDDDDQTDAVAGKPEKA

SEQ ID NO: 227910 - protein, 125 aa, Zea mays
  unsure (1)..(125): unsure at all Xaa locations
  Clone ID: MRT4577_139449C.1.pep
VLKAFQVGSATVLSRPPPSGLVPRLRARSPXPPAWPSLXRVRXLGSSTPTKKKKKNLFSSXCFSLGPPRVSPPPRWLSPPPQLVLGKKKKKDGTSNDGLLTRQLKDHHPLLFVCHLLFFLYLVFF

SEQ ID NO: 227911 - protein, 93 aa, Zea mays
  Clone ID: MRT4577_13944C.1.pep
KLGIRLEAHPTAQCEQKPRGPTPLRLTDAPDPEADATKEERETAHKRGDTADDNTEAREQASQNRPTRAKGLQTGHDRDISSRTGEEQESGAS

SEQ ID NO: 227912 - protein, 153 aa, Zea mays
  Clone ID: MRT4577_139450C.1.pep
MADVDVEPEVAAGAPKKRTFRKYSYRGVDLDALLDMSTDDLAQLFPARARRRFQRGLKRKPMALIKKLRKAKKDAPAGEKPEPVKTHLRNMIIVPEMIGSIVGVYNGKTFNQVEIKPEMIGHYLAEFSISYKPVKHGRPGIGATHSSRFIPLK

SEQ ID NO: 227913 - protein, 64 aa, Zea mays
  Clone ID: MRT4577_139451C.1.pep
NSLIELPGLLFLYFNLQFLFIYFFFLIFFYYFFIFFFFFFFFFFFFFFFLMKNSFHSVTGQQLT

SEQ ID NO: 227914 - protein, 67 aa, Zea mays
  Clone ID: MRT4577_139452C.1.pep
CLAPPGLLFLFLRRLFYCLRARVFVFLVAILSALYAHIFFLSRLGHPLSFPVGGVGILGETRLSYEP

SEQ ID NO: 227915 - protein, 61 aa, Zea mays
  Clone ID: MRT4577_139453C.1.pep
NLYKRSSSKYKYIVIFLYDTSSVCIKASLAIDIVKSLYYRCDLVRFNGSGPVNHVVTFTTR

SEQ ID NO: 227916 - protein, 157 aa, Zea mays
  Clone ID: MRT4577_139454C.1.pep
MLNIFFKMMPFFIVKCLNSETHEFYKHSELHVALFLSSLRTTTSTRAGRTKMTVPVAPSFVCANRADKRKEFYTKLEEKHKALEAEKDEAEARKKEEQDVALKQLRKSLVIRAKPMPSFYQEGPPPKAELKKVPPTRAKSPKFTSSRRKSCSDTPLT

SEQ ID NO: 227917 - protein, 153 aa, Zea mays
  Clone ID: MRT4577_139455C.1.pep
MADVDVEPEVAAGAPKKRTFRKYSYRGVDLDALLDMSTDDLVQLFPARARRRFQRGLKRKPMALIKKLRKAKKDAPAGEKPEPVKTHLRNMIIVPEMIGSIVGVYNGKTFNQVEIKPEMIGHYLAEFSISYKPVKHGRPGIGATHSSRFIPLK

SEQ ID NO: 227918 - protein, 137 aa, Zea mays
  Clone ID: MRT4577_139456C.1.pep
LIAAVMKRHCHLDEYQPNHMTLHANQVRSNLFTSLNLFWPRPRQARERCRGSGDDATRLEEPLDGGHPSRSPRLTPSRRRRHLHCQHLNYPRPSSTITVPITGNSKPRSLTRKRTRRRRLSCSRRGPTSRTGAAPPL

SEQ ID NO: 227919 - protein, 128 aa, Zea mays
  Clone ID: MRT4577_139457C.1.pep
QEEGGVYSFLALFLDGCLIHSDYSQLASSQALLFQKGFGSDSVVITQFYTKLEEKHKALEAEKDEAEARKKDEQDVALKQLRKSLVIRAKPMPSFYQEGPPPKAELKKVPPTRAKSPKFTSSREKELQ

SEQ ID NO: 227920 - protein, 194 aa, Zea mays
  Clone ID: MRT4577_139458C.1.pep
MNRESDEYKERPYPSPPPLRLSASPSATAYRDLIDHLQLSIMADVDVEPEVAAGAPKKRTFRKYSYRGVDLDALLDMSTDDLVQLFPARARRRFQRGLKRKPMALIKKLRKAKKDAPAGEKPEPVKTHLRNMIIVPEMIGSIVGVYNGKTFNQVEIKPEMIGHYLAEFSISYKPVKHGRPGIGATHSSRFIPLK

SEQ ID NO: 227921 - protein, 99 aa, Zea mays
  unsure (1)..(99): unsure at all Xaa locations
  Clone ID: MRT4577_13945C.1.pep
LARRKLTPRVTGEFGLGXSVLPPLPPPGGCGGAAPVVPVLPGSRRRFDRVAVVSLALGLGLRAGQGQGRGLLLWRQLVRRRGAFVRRRGPPRLHGACGW

SEQ ID NO: 227922 - protein, 112 aa, Zea mays
  Clone ID: MRT4577_139460C.1.pep
DEQDVALKQLRKSLVIRAKPMPSFYQEGPPPKAELKKVPPTRAKSPKFTSSRRRSCSDTPLTPGGENTNATSTRPHRHSIGSPRDANRVQQCSPKSGVATKTRSVKAELKAL

SEQ ID NO: 227923 - protein, 162 aa, Zea mays
  Clone ID: MRT4577_139461C.1.pep
LAHVLICFAQADVDVEPEVAAGAPKKRTFRKYSYRGVDLDALLDMSTDDLVQLFPARARRRFQRGLKRKPMALIKKLRKAKKDAPAGEKPEPVKTHLRNMIIVPEMIGSIVGVYNGKTFNQVEIKPEMIGHYLAEFSISYKPVKHGRPGIGATHSSRFIPLK

SEQ ID NO: 227924 - protein, 153 aa, Zea mays; identical to SEQ ID NO: 227917
  Clone ID: MRT4577_139462C.1.pep

SEQ ID NO: 227925 - protein, 102 aa, Zea mays
  unsure (1)..(102): unsure at all Xaa locations
  Clone ID: MRT4577_139463C.1.pep
GEKNVFIFDLGGGTFDVSLLTIEDDIFXVKATAGDTHTWSYDYIYRMVNSGDPPSTPISAIDISDRGPSHDPTDHGVRGHERPNSFILQTNLCAPGSPAQED

SEQ ID NO: 227926 - protein, 142 aa, Zea mays
  Clone ID: MRT4577_139464C.1.pep
EIIFRSPVRHAYIFEQLHQEKSSTPALSSTCSSIQQGQCSHFKDIQGHLSSKGHKVPTIYFGRGRSSLLPSGSSADPLLLNLCKTMEGQSQHSSEDNISSGRFQLIKEDLINATVDASDIFESFDSCPYYLSDHTKCALMSS

SEQ ID NO: 227927 - protein, 153 aa, Zea mays; identical to SEQ ID NO: 227917
  Clone ID: MRT4577_139465C.1.pep

SEQ ID NO: 227928 - protein, 122 aa, Zea mays
  unsure (1)..(122): unsure at all Xaa locations
  Clone ID: MRT4577_139466C.1.pep
AAGPRPPTPPWPRSTRGCGAPARTPAPAASRPCATARRRGGPRGXPXRGGPSRRRDGARSTGRPPPPRPRPRPPSRGTPGARSRPAAPGAPTPAPPPGXPMQLDPAXTPPRAAPHRPPARRA

SEQ ID NO: 227929 - protein, 450 aa, Zea mays
  unsure (1)..(450): unsure at all Xaa locations
  Clone ID: MRT4577_139467C.1.pep
WVEGKNEDISTIELSGGARIHYIFQSIFVKSLEEVDPCEDVTDEDIRMAIQNATGPRSALFVPEVPFEVLVRRQISRLLDPSLQCAQFIYDELVKMSHRCLAMELQQFPILRRSMDEVIGKFLRDGLKPSXENMISHIIEMEEDYINTSHPNFIGGSKAVEQAQQQVRSAKMSAAVVRKDGVDSQASEKTQKSRAILGRSGVNGVVTDHIQGVRPAAEAERPGSSGSGSTSFWNQIFTSNEDRTHAPARDNTTNKSYAVPAPNLEHSFSTIQLREPPVVLKPSEHQSEQEALEIAITKLLLKSYYNIVRKNVEDFIPKAVMHFLVNHTKRALHNYLITKLYRDDLLEDLLKEPDEITIKRKQIRENLKVLQQAYKTLDEIPLDAEAVERGGYSLDSDAIGLPRAHGLSSSLHGFNDGSSPYSTPKQSRSRRSNHSGEQLPFNPNMSGNGF

SEQ ID NO: 227930 - protein, 206 aa, Zea mays
  unsure (1)..(206): unsure at all Xaa locations
  Clone ID: MRT4577_139468C.1.pep
MISSDGYSFVCSECLTHTLVDQPPVVLKPSXHQSEQEALEIAITKLLLKSYYNIVRKNVEDLIPKAVMHFLVXFISDCLSVNHTKRALHNYLITKLYRDDLLEDLLKEPDEITIKRKQIRENLKVLQQAYKTLDEIPLDAEAVERGGYSLDSDAIGLPRAHGLSSSLHGFNDGSSSYSTPKQSRSRRSNHSGEQLPFNPNMSGNGF

SEQ ID NO: 227931 - protein, 109 aa, Zea mays
  Clone ID: MRT4577_139469C.1.pep
MAAADGPLNWALVEGRPPSAAECHHCGINATATPMMRRGPDGPRTLCNACGLMWANKGLLRDLSKSPVPLHSIQQSAPILNGGQNGSAMSALGSELENAAAAMGNGHEP

SEQ ID NO: 227932 - protein, 55 aa, Zea mays
  unsure (1)..(55): unsure at all Xaa locations
  Clone ID: MRT4577_13946C.1.pep
ITMFGPLLEEVRDDMFSSLEDITNAPYADLLSINSMRKGKGSXEISLGRWRGTSQ

SEQ ID NO: 227933 - protein, 187 aa, Zea mays
  Clone ID: MRT4577_139470C.1.pep
CSECLTHTLVDQPPVVLKPSEHQSEQEALEIAITKLLLKSYYNIGRKNVEDFIPKAVMHFLVNHTKRALHNYLITKLYRDDLLEDLLKEPDEITIKRKQIRENLKVLQQAYKTLDEIPLDAEAVERGGYSLDSDAIGLPRAHGLSSSLHGFNDGSSPYSTPKQSRSRRSNHSGEQLPFNPNMSGNGF

SEQ ID NO: 227934 - protein, 317 aa, Zea mays
  unsure (1)..(317): unsure at all Xaa locations
  Clone ID: MRT4577_139471C.1.pep
WNSARGPILRRSMDEVIGKFLRDGLKPAESMISHIIEMEEDYINTSHPSFIGGSKAVEEAQQQVRSAKTSAVVVRKDGVDSQVSEKTQKSRPILGRSGVNGVVTDHIQGVRPAAEAERPGSSGSGSTSFWNQIFTSNEDRTHAPARDNTANKSYAMPAPNLDHSFSTIQLREPPVVLKPSEHQSEQEALEIAITKLLFESYYNIVRKNVEDFIPKAIMHFLVNHTKRALHNYLITKLYRDDLLEDLLKEPDEITIKRKQIRENLKVLQQAYKTLDEIPLDAEAVERGGYSLDSDAIGLPXAHGLSSSXRFNDGSSPY

SEQ ID NO: 227935 - protein, 107 aa, Zea mays
  Clone ID: MRT4577_139472C.1.pep
MMRECGIIETRVDESMKGHAGIPFNILSGLFGDGSIKFDANLPSKKIRGHLRSLKPGDACKLLDKLVSAWKTRSGSTELVLRWIYCLLVIHGRFICSEESINNLEKV

SEQ ID NO: 227936 - protein, 58 aa, Zea mays
  Clone ID: MRT4577_139473C.1.pep
RPPFSLCALSGAANDRPWLGILATMAYQSSARSIIHSSQVRNWVFHLAARRLVKRPVP

SEQ ID NO: 227937 - protein, 68 aa, Zea mays
  Clone ID: MRT4577_139474C.1.pep
SVVSSGIAALLLYLDTVCKATMNYNTMENMCLVEFLNNMTFPGIPIHELKLKVGLQVMLLKSLCHQAT

SEQ ID NO: 227938 - protein, 84 aa, Zea mays
  Clone ID: MRT4577_139475C.1.pep
YFLSFSIFLLGFFFIFKRTIPRGVPNHQLGASHLMGPPSSTITLPKLLPTVKEMLFFSLEFAPKCSKKKGSLQMPRSSKIGGVY

SEQ ID NO: 227939 - protein, 260 aa, Zea mays
  unsure (1)..(260): unsure at all Xaa locations
  Clone ID: MRT4577_139476C.1.pep
MSSFGRNSWCILVLASVLLLSCLADTAVAKRTGELTVFWGRNKEEGTLREACDTGLYNTVIISFYSVFGHGRYALDLSGHPLDGVGADIKHCQSQGIPVFLSIDFYIDDHSAPGDHYDELARRLDYFNSMYYHATTKYVRLTATPRCAFPPDDPMARALRTGLFERIHVRFYGDADKCSYKNGDVSGVVDQWSKWTARYPKSQLYVGLAAAESGVPDHAPXPVEVYLXYLYYDLXXPKVQKGXNYGGXVWVWNRFTDXRT

SEQ ID NO: 227940 - protein, 244 aa, Zea mays
  unsure (1)..(244): unsure at all Xaa locations
  Clone ID: MRT4577_139477C.1.pep
MSSFGRNSWCILVLASVLLLSCLAETAVANRTGELTVFWGRNKEEGTLREACDTGLYNTVIISFYSVFGHGRYALDLSGHPLDGVGADIKHCQSQGIPVFLSIGGGGNHYSIPSSASAEAVADNLWNAFLGGGNSDVPRPFGDAAVNGIDFYIDDHSAPGDHYDELARRLDYFNSMYYHATTKYVRLTATPRCAFPPDDPMARALRTXLFERIHVRFYGDADKCSYKNGDVSGVVXVEQWRRGT

SEQ ID NO: 227941 - protein, 323 aa, Zea mays
  Clone ID: MRT4577_139478C.1.pep
MSSFGRNSWCILVLASVLLLSCLADTAVAKRTGELTVFWGRNKEEGTLREACDTGLYNTVIISFYSVFGHGRYALDLSGHPLDGVGADIKHCQSQGIPVFLSIGGGGNHYSIPSSASAEAVADNLWNAFLGGGNSDVPRPFGDAAVNGIDFYIDDHSAPGDHYDELARRLDYFNSMYYHATTKYVRLTATPRCAFPPDDPMARALRTGLFERIHVRFYGDADKCSYKNGDVSGVVDQWSKWTARYPKSQLYVGLAAAESGVPDHAPPPVEVYLKYLYYDLLPKVQKAPNYGGVMVWNRFTDNRTGYSGAVKGWAACSYAGCVN

SEQ ID NO: 227942 - protein, 68 aa, Zea mays
  Clone ID: MRT4577_139479C.1.pep
EVEEGPHGGAAGDGVERIQEGRRLRASGDIGVGKSCLLLRFSEDSFSTGFSTRIGDDLRIGTIELAGK

SEQ ID NO: 227943 - protein, 152 aa, Zea mays
  unsure (1)..(152): unsure at all Xaa locations
  Clone ID: MRT4577_13947C.1.pep
TTHYPLAITSRVTSVKESYPRYSNQPMQSQGLASESWPYQAPGHRLGSNVPRTSDLCKHAEGWGPLSPSRYDLTPCFEYSVLFGAVSLIAILGFTIRIYYLTHHAKAHNFGRTAWIYWPTQLCMGLGALMACTLSXAHFSSENSSPIFSXSC

SEQ ID NO: 227944 - protein, 48 aa, Zea mays
  Clone ID: MRT4577_139480C.1.pep
CDAIFQLWGRIKEYVSSASNHRRPLFCCIFNPTCNFHNSHRTRERTRG

SEQ ID NO: 227945 - protein, 92 aa, Zea mays
  Clone ID: MRT4577_139481C.1.pep
VKVRDHIKPNKVEREPNSGPVIDLSKPLEVLDINKPIDAQHDQFHHRPLTKSGVGNLQDSSFAFSGDQWDDQSKKTSTRVKNPPGGQSSGIF

SEQ ID NO: 227946 - protein, 89 aa, Zea mays
  unsure (1)..(89): unsure at all Xaa locations
  Clone ID: MRT4577_139482C.1.pep
GRGKVYKGKXLADGSLLAANRLKKDRTPGGELQLQTDGEMISMAEHKNLLRLSGFCMTPTERFLGYPYMVNESLGSRTPERHPSVPPVS

SEQ ID NO: 227947 - protein, 337 aa, Zea mays
  Clone ID: MRT4577_139483C.1.pep
MPASGSPRDGRGAEEDEAARSGSKSLDAECNDRSKGSRNRDHRGKSKRREEEESESSGEDSSERRKRRRKEKERRHRRRRRSNSESSGSSSESESESSYSGSSVESESESELDSEEERRRRRRKRRKEREDEERRRRKKEKERRKRKEKEKERERRKKRKEGKKNLGKKGAVTNSWGKYGIIRELDMWSKRPEFTAWLSEVKQVNLEALSNWEEKQMFKEFMEDHNTATFPSKKYYNLDAYHHKAMEKEKKKGLKMIVTERTVFNDEEQRRLELLKERERRKEEEVEALKRSMQAGLAQDMKEQARLREEMNYQYRLGNFQAAAAIQKRLDPDAPLQ

SEQ ID NO: 227948 - protein, 38 aa, Zea mays
  unsure (1)..(38): unsure at all Xaa locations
  Clone ID: MRT4577_139484C.1.pep
KGRAPAITFKKEXDTSLFLPRNTPNQKQLILAKALLQD

SEQ ID NO: 227949 - protein, 66 aa, Zea mays
  Clone ID: MRT4577_139485C.1.pep
FKVLTSDSIQFQTYVLNFNFSSVKIIPNIKFTVYYFFLFFSLPFIYGRSEWFHLKFPSLSLFSIPF

SEQ ID NO: 227950 - protein, 74 aa, Zea mays
  Clone ID: MRT4577_139486C.1.pep
VFSVQSRQHISENVEYGRDFVNRSGKIIPRLCLQDVKRNIFLFPSEQHTLKKKIWIIVSGSIEPQYDIFFSMDL

SEQ ID NO: 227951 - protein, 112 aa, Zea mays
  Clone ID: MRT4577_139487C.1.pep
DVYMGGTVGKNECHRNKSVVWDHIGIRGTTFEHHGFVLHLDTLFFGLAPSSGCTCVCLQVRSQDLNAVGEEELSGEQRIPSVRHATEVLVPAGREPPGVGALFGRLLHPLVV

SEQ ID NO: 227952 - protein, 92 aa, Zea mays
  Clone ID: MRT4577_139488C.1.pep
LCGGGRRLQLELATHPPRPARYHLIPSLFSLIWPGAGRSTIARSAATSSRAVPPLQAGPLQAAPPFATKNSTYEAVRSTTRKIFGRSNTKGW

SEQ ID NO: 227953 - protein, 76 aa, Zea mays
  Clone ID: MRT4577_139489C.1.pep
GRRSTQTQRGAATSLLSAPNLAAAARRHPPGSKAKSVAIPNMVYEMDELEALARNISFEDEDLDDDDHDDGPEASL

SEQ ID NO: 227954 - protein, 55 aa, Zea mays; identical to SEQ ID NO: 227932
  unsure (1)..(55): unsure at all Xaa locations
  Clone ID: MRT4577_13948C.1.pep

SEQ ID NO: 227955 - protein, 103 aa, Zea mays
  Clone ID: MRT4577_139490C.1.pep
SPSNAQSQQQAHARTVGLENHHVHTSIFLRNGGGDRGVSGGVLRGEPVRLGPTCKLHINRGVGYAIVAAGESKNIRYTASGGKTLSDEQNQRLFLGGRMGASM

SEQ ID NO: 227956 - protein, 80 aa, Zea mays
  Clone ID: MRT4577_139491C.1.pep
ISPRAVDAYTNLHRFSRIRADPETISSMRTTDRIKCHPISGCINIGPHPFQSRLLVITRAMEGQWVSREIGKNRGRHCLF

SEQ ID NO: 227957 - protein, 75 aa, Zea mays
  Clone ID: MRT4577_139492C.1.pep
FVSSRFDQLTSLPPPFFFLYRGTLKKKLGDHTLILHRSAIRPQLYPHNEDQLVYTSPKGIILMSNPQEHNLYEPF

SEQ ID NO: 227958 - protein, 52 aa, Zea mays
  unsure (1)..(52): unsure at all Xaa locations
  Clone ID: MRT4577_139493C.1.pep
DPLNWGAAXVELAESSCXEVKRMVAQARRPVVKIEGCTLHVGQVAAVPSTKD

SEQ ID NO: 227959 - protein, 89 aa, Zea mays
  unsure (1)..(89): unsure at all Xaa locations
  Clone ID: MRT4577_139494C.1.pep
AGRGHLGTXVKALCAEVYXCNNMVXQQLPGDGLLMYHRLCAARKDDATSPKSVFQCSYVENVKSAPPPMKKRWXLSNIPGWEEASESIK

SEQ ID NO: 227960 - protein, 43 aa, Zea mays
  Clone ID: MRT4577_139495C.1.pep
LAHPASTIQEPKPQPCFHRELAGVPWPGHHRDSHGSLLKLQMV

SEQ ID NO: 227961 - protein, 51 aa, Zea mays
  Clone ID: MRT4577_139496C.1.pep
MALALRVALLCTSRCPQERPSMRDVVSMLQEVRRGRKLLAPGMAKKQAKIN

SEQ ID NO: 227962 - protein, 47 aa, Zea mays
  Clone ID: MRT4577_139497C.1.pep
MAHDPCSSMAANHQPFGTPDHPWHATPPRRCRAPPSAPLPPISHTVC

SEQ ID NO: 227963 - protein, 85 aa, Zea mays
  Clone ID: MRT4577_139498C.1.pep
KRGPRHQGARKGQPGQEAETHTRGEKKIALTHFKWGRGGGGRATPHQGTCGGQTSKRKAGVQRTTTEKPGNKDLLTGAQTMPGIT

SEQ ID NO: 227964 - protein, 44 aa, Zea mays
  Clone ID: MRT4577_139499C.1.pep
CHAGLTSTLCRPAHQSAVELAVLDNATLVQGCHCVANALDASRV

SEQ ID NO: 227965 - protein, 67 aa, Zea mays
  Clone ID: MRT4577_13949C.1.pep
MAMAKAGAPRVSAAQLVALGLALLCAVAGPAAAQNCGCQPNVCCSMFGYCGTTDGCCGARCLPVPCR

SEQ ID NO: 227966 - protein, 89 aa, Zea mays
  unsure (1)..(89): unsure at all Xaa locations
  Clone ID: MRT4577_1394C.1.pep
DAAATKTKHKQRQADDQEGKSANGDTQTNTNNSGXTERPADTPEGGGTKQNKGGTRTANEPAGTSPGRERGRTGRPDNGNSGSGQTGDS

SEQ ID NO: 227967 - protein, 117 aa, Zea mays
  Clone ID: MRT4577_139500C.1.pep
AHGRSRLRSLIRSRHLESIVCHIVGYPRNGRSRDRNCGRGSISDSKRTAEDQDSVATHLKAIICTQMAYAGITYSCNNTFSSYDQVLHTSARLGPVSERQSGTGAQIGSESQLANGT

SEQ ID NO: 227968 - protein, 68 aa, Zea mays
  Clone ID: MRT4577_139501C.1.pep
DHQLCEDPSQPRCKPTLANLSNLHNPYQLTSYPPSTLLKKKQITRTNITPHRIPPTLYLHLYRLATPS

SEQ ID NO: 227969 - protein, 79 aa, Zea mays
  Clone ID: MRT4577_139502C.1.pep
RVNIFCGQNKFHLNWEVPGFTLTGGGKKIFFLNEKEKSSFGNEKGQTFYGKKKNWVPFLVEKNEVVTRKVKIYSGFKIK

SEQ ID NO: 227970 - protein, 80 aa, Zea mays
  Clone ID: MRT4577_139503C.1.pep
YQEQDAPTADAPSMAARPFYPTSAIFIDVILIAQPSLGDILRYQRMYLLTDIAHTAAYHTAQQSAPPLELLSAHKWLAIR

SEQ ID NO: 227971 - protein, 73 aa, Zea mays
  Clone ID: MRT4577_139504C.1.pep
MQPISTLAEIKAQQQLENNPFIGVDCNELKVKNMKDSNVFECFISKKQQLLLATQVVKMILKIDDVIKQGSSG

SEQ ID NO: 227972 - protein, 123 aa, Zea mays
  Clone ID: MRT4577_139505C.1.pep
AVQTGGDRWAHPLAEPEKGCLLGATEKLDGSHIFERTVILLLSSPSSLGPVGVILNRPSLMSIKEASGSIFADDADIARAFAGRPLFFGGPLEECFFVIGPRAAAGGGGDDSVARTGLFEEVM

SEQ ID NO: 227973 - protein, 109 aa, Zea mays
  Clone ID: MRT4577_139506C.1.pep
SSSSSSTRSKTLSICLVKVAFGAIYAQVKKKASRRISRSSRTSTSLRIRLAITPSQPPVHCAMMSHVGTMLRRRRSCRKKQLSAEAVRMRWPKVPLHEASVLQTDLKVE

SEQ ID NO: 227974 - protein, 76 aa, Zea mays
  Clone ID: MRT4577_139507C.1.pep
VALEKNVIASLTDKLFLKVHVLHFFVPIMLLNSSFFCVCVTTAKTQFSDDRIMSDGYRQLSDIRAYVRRLIDSRWT

SEQ ID NO: 227975 - protein, 89 aa, Zea mays
  Clone ID: MRT4577_139508C.1.pep
ASWCLSTTFLLLVGVRVRHAYGVTVMAESCWCCCCGAMFCTVSFLNPGCCDGAIAGYKGLAARHGHSPCASRPACSLARSTHLGGDTRN

SEQ ID NO: 227976 - protein, 52 aa, Zea mays
  Clone ID: MRT4577_139509C.1.pep
VGEKMAKLPNEKFELARQLNKKHSRNFIPRRWRHNSECTAELWKDCTQQRLF

SEQ ID NO: 227977 - protein, 78 aa, Zea mays
  unsure (1)..(78): unsure at all Xaa locations
  Clone ID: MRT4577_13950C.1.pep
IILWNKLLIVIIIMXSFVRINYRDTYRKSWLPRXSXIKKLEEEKGFVVRFVVGRSANRGDTFDTEIDDENRSIMDFLI

SEQ ID NO: 227978 - protein, 109 aa, Zea mays
  unsure (1)..(109): unsure at all Xaa locations
  Clone ID: MRT4577_139510C.1.pep
VDGDFCDKICYSLQKKNRWQDLVHHKAVSSIRDSYALMLYSADTTMLFACQITDLLVWCSSLSSGTMLAVCLLCSVIIISSKVERFEQVXAGGQWLVLEVAERVGHADV

SEQ ID NO: 227979 - protein, 56 aa, Zea mays
  Clone ID: MRT4577_139511C.1.pep
GLIFSPYILFYFSSKIPKYRNSNFILDNILGTLLSKNALTGGTQGWTTIPQGSISL

SEQ ID NO: 227980 - protein, 114 aa, Zea mays
  unsure (1)..(114): unsure at all Xaa locations
  Clone ID: MRT4577_139512C.1.pep
MNPVVAYLLAALAGNXASPSTDDSTAILESVDXEVDNDDMELLLTQLKGKDITXLIAATSKKLASIPCGREHVSLLQTTASADVGAAPACDANNEEKVLETGKXDDDMVFSLIY

SEQ ID NO: 227981 - protein, 26 aa, Zea mays
  Clone ID: MRT4577_139513C.1.pep
ISAIMGTHLPFISNVSDNQVNEFPLE

SEQ ID NO: 227982 - protein, 140 aa, Zea mays
  Clone ID: MRT4577_139514C.1.pep
GSVYKIRSRFHRSFFFLDYLGFLLPSRSFLVNSVPLLVLLLFFYLLSSSLLFSSYSVSRLTPSPFSGRPLLAFFSSLGFLVRSLTSQHVLSTAVQHLLGEVRFSVYIGLIYVIHPFFRFPSIALGFFLAPLLPWWNDSLF

SEQ ID NO: 227983 - protein, 220 aa, Zea mays
  unsure (1)..(220): unsure at all Xaa locations
  Clone ID: MRT4577_139515C.1.pep
MVLGLYTFADIDADGAPRLEVADGEEFVRVDRVVELALGPRVLKAPGTLYLTTRRVIWVSDGGEGYAVDFVAISLHAVSRDPEAYPYPCIYTXDSETNGELELSKVMEMRIIPSDPGQLDELFEAFCNCAELNPDPSAESDEKHGWVHGDEGYEDTVDGSDTEFSDVNPIGQTGEQDINHAVIELQINDQRFEDAVDEESHRNXTRDHVNWSSSIQQTCL

SEQ ID NO: 227984 - protein, 86 aa, Zea mays
  Clone ID: MRT4577_139516C.1.pep
MASRFRSFTRPAAAAFLRSTASRSPSASLPRTLAPVPRASATGRRMALARSLQPLHSAVSAARLTSRLGAEVDRAVSQETGLSVPR

SEQ ID NO: 227985 - protein, 191 aa, Zea mays
  Clone ID: MRT4577_139517C.1.pep
MVLGLYTFADIDADGAPRLEVADGEEFVRVDRVVELALGPRVLKAPGTLYLTTRRVIWVSDGGEGYAVDFVAISLHAVSRDPEAYPYPCIYTQIETEAISDEESDVSDSETNGELELSKVMEMRIIPSDPGQLDELFEAFCNCAELNPDPSAESDEEHGWVHGDEGYEDTVDGSDTEFSDVNPIGQTAPDQ

SEQ ID NO: 227986 - protein, 128 aa, Zea mays
  Clone ID: MRT4577_139518C.1.pep
RTPWCRVSFPPSSICSTTLRSPSSSSSPTALSPAFPPSPRSCTVYSSLAELLPRARIQPLTPSPNATSHTLGEPLTILIILHSMCSTKCRSKLRPGSVQPQHTPSICAATTTTAPSHRVLCLIALAVL

SEQ ID NO: 227987 - protein, 88 aa, Zea mays
  Clone ID: MRT4577_139519C.1.pep
MASRFRSFTRPAAAAFLRSTASRSPSASLPRTLAPVPRASATGRRMALARSLQPLHSAVSAARLTSRLGAEVDRAVSQGTLCSSYPGV

SEQ ID NO: 227988 - protein, 166 aa, Zea mays
  Clone ID: MRT4577_13951C.1.pep
HNSSKVVTLHCCPSPGHHHYPLPFRSYISSPLPPASHKLIRSAGPPLSATSLDQQEGQRNNGDAAVAGPPTGCHSGGVEAADDEICVARADVGGEGGSWRRVSQEASSCRMSSTQWGCMLATATATALVVSTEWRRPTTSSPSSSTSSQQLAPIARGRGGDDGCVR

SEQ ID NO: 227989 - protein, 127 aa, Zea mays
  Clone ID: MRT4577_139520C.1.pep
MIETEAISDEESDVSDSETNGELELSKVMEMRIIPSDPGQLDELFEAFCNCAELNPDPSAESDEEHGWVHGDEGYEDTVDGSDTEFSDVNPIGQTGEQDINHAVIELQINDQRFEDAVDEESHRNGN

SEQ ID NO: 227990 - protein, 93 aa, Zea mays
  Clone ID: MRT4577_139521C.1.pep
AGKGFFFFTLSPLSYTITPRGEKEHRKTKTTPFPSGSKTPFASGSKRRKTWPPRGGTKNPNRAFTMDLDTNGRGAYRGPEGAGSSQAKRGCSA

SEQ ID NO: 227991 - protein, 182 aa, Zea mays
  Clone ID: MRT4577_139522C.1.pep
QMTGYVSTRYYRAPEIMLTWQKYDVEVDIWSAGCIFAEMLEGKPLFPGKDHVNQFSIITELLGSPPEDVIHTICSENTLRFVQSLPRRERIPLSQKFKNADPAAVDLLERMLVFDPKKRISAAQALAHEYLAPYHDPSDEPVAAEKFDWSFNDADLPVDTWKIMMYSEILDYHNVDQNDPSL

SEQ ID NO: 227992 - protein, 67 aa, Zea mays
  Clone ID: MRT4577_139523C.1.pep
PPPGAYPEEFHIRILTPVLGSEQKDRDAVLYQYYNAASRFSAKVTPQKVEDLLEDPMALRAVSSQTL

SEQ ID NO: 227993 - protein, 515 aa, Zea mays
  Clone ID: MRT4577_139524C.1.pep
MAPPAPSVGPRLLLRRLLSTATEAAAETPAPTAPSSAAAAKPAKQDPRLLYRRLSALGSAGEGSVSRVLNKWVREGGATRSDDLVKHVKELRKYKRHAHALELMDWMVNARGMNMSHTNHAIRLELIYKVRGLEAAENYFANLPDPAKNHRTYGSLLSCYCSAKMEEKATNLYRQMDELGIWSSTLPINNLMSLYMKLDQYRKVVSLFEEMKLKNVKPNSLTCCILMTSYAALNKIDDIEELLKEMVEKDVTLGWSAYSTLASIYVNAGQFGKAESALKKLEGLISAHDDRQPFDFLLSLYASLGNLSEVNRVWNVIKSKFSKVTNTSYLGMLHALYKLNDIDRMKQIYMEWESNYETFDVKLTNMMIRSHLKVGMTEEAEMLVEKVKENGAEFDTKTCELFLDHYMGTEDMNSALNWLENMTKLSKKAEKLDQDRIYKFQKYFEEHKDADGAERFCNCLRTLGCIDGKAYESLLRTYLAAGKKSCSLRQQIKNDKVEICYDIGKLLKRLGDKGR

SEQ ID NO: 227994 - protein, 96 aa, Zea mays
  Clone ID: MRT4577_139525C.1.pep
HTYWDAGDSAVEATDDGKGLRMPVIKERNHDGTLDFWLIRKVTRPLKLNKDINALYHEGAYMVTASYFNNGDKIIYTVQSQEHTTTIGERSLPGLA

SEQ ID NO: 227995 - protein, 93 aa, Zea mays
  unsure (1)..(93): unsure at all Xaa locations
  Clone ID: MRT4577_139526C.1.pep
STQASGVLYAHRWRYQTDYILAWFLQDTSDILAQTYSHSCSNSLTTPMTAPSRREGTWTANTXWFLSMVRIASDPTLLSLTALRRILLIVAWK

SEQ ID NO: 227996 - protein, 39 aa, Zea mays
  Clone ID: MRT4577_139527C.1.pep
AVAVSEKGLPYNLLLSRIPLALTTIVYKAFYRNTPGNTW

SEQ ID NO: 227997 - protein, 100 aa, Zea mays
  Clone ID: MRT4577_139528C.1.pep
VRYVIRAMHLMEFALPRRLPVAGTASSTAWTCGAISSTVASQRDAIPPSRKWMRPSTTGQVTTTAMTRRASISTTLTRSPSSTRVPSSTTSLLPSTPPTT

SEQ ID NO: 227998 - protein, 60 aa, Zea mays
  Clone ID: MRT4577_139529C.1.pep
FSLGRGLKMAVCLGFNNKLSGQISARTSPSKQVQIALLGFGPGAPPIYRSFRPSEPPLAF

SEQ ID NO: 227999 - protein, 73 aa, Zea mays
  Clone ID: MRT4577_13952C.1.pep
NMSFVLERAMKRNTNAPKAPTIHILVCLVTRQRGLVQHHHQLKHSRQMALLSWNLILYSSATAFLQHYLVRTL

SEQ ID NO: 228000 - protein, 64 aa, Zea mays
  Clone ID: MRT4577_139530C.1.pep
FMFKSRTKKPRGPQRLKKRFCSLPKIRNKIFNFFWFNWPPPYFQEKKIVFWKLMFAKNPPKFTR

SEQ ID NO: 228001 - protein, 99 aa, Zea mays
  Clone ID: MRT4577_139531C.1.pep
RRSRLHGKMREGKPGSITVARPRTNQTLELLSHYQTVRHANTYTSTRLTCLPYICARQDASSAAQMHIPRREATAEPGALIDDPRHGRSPGSTTIADYT

SEQ ID NO: 228002 - protein, 51 aa, Zea mays
  Clone ID: MRT4577_139532C.1.pep
PLGSLPENSPEPGVLDILGSTLITPPLHRQATHLKRICLALTPNLLLHLLI

SEQ ID NO: 228003 - protein, 969 aa, Zea mays
  Clone ID: MRT4577_139533C.1.pep
MEQLRTIGRELAMGSQGGWGQSKEFLDLVKSIGEARSKAEEDRIIARELEHLKRRLADPDVPRRKMKELLLRLVYAEMLGHDASFGHIHAVKMTHDESLPLKRTGYLAVALFLDERHDLVILVVNTIQKDLRSDNYLVVCAALTAACRLIGEEAIPAVLPQVVELLAHPKEAVRKKAVMALHRFYQRSPSSVSHLVSNFRKRLCDNDPGVMGATLCPLYDLILEEPNSYKDLVVSLAIILKQVAERRPPTSYDYRHMQAPFIHLQHSQALAVRGHSDNQACGPMYTGPSDISRKSSNGSKKQHAILYECICCISSILPNPKMLEAAAETTSKFLKTARHNLKYMGIDALGRLIKINPDIAEEHQLAVIDCLEDPDDTLKRKTFELLYKMTKSTNVEVIVDRMIEYMINITDHHYKTEIASRCVELAEQFAPSNQWFIQTMNKVFEHAGDLVNIRVAHNLMRLIAEGFGEEDEGADSQLRSSAVDSYLRIVGEPKLPSSFLQIICWVLGEYGTADGKYSASYIIGKLCDVAEAHLTDDTVKAYAISAILKTFAFEITLGRKIDLLPECQTLVDELSASHSTDLQQRAYELQALLGLDKTAVESVMPADASCEDIEVDRSLSFLNSYVQQALENGASPYIPESERSGVISVGSYRSQEQQETSAHTLRFEAYEMPKPSLPLATSQTSMSTPPTDLVPVPEAGYYKEDNQTSMSQPPSDAISGEFGVKLRLDGVQKKWGRPTYSSSTPSSSISSQPTPNGASHSDGGGSSSQPRESSYGSKRQQGTEVSAEKQRLAASLFGSAAAKADRKAQASRKTAKDSPSTEKVATTNVTAQPVKEQVIPAAPPPDLLDLGDEPVSSSPPSADPFSQLEGLLGPASAAPVLSGTPATSTSKAPGLLSIFSDDVPTGVTSVSTDPTLGDVNSMGSRKGAAAVASMKGPSLQDALQKDAAARQVGVTPTVNNPNLFKDLLG

SEQ ID NO: 228004 - protein, 973 aa, Zea mays
  Clone ID: MRT4577_139534C.1.pep
MEQLRTFGRELAMGSQGGWGQSKDFLDLVKSIGEARSKAEEDRIIARELEHLKRRLADPDVPRRKMKELLLRLVYAEMLGHDASFGHIHAVKMTHDESLPLKRTGYLAVALFLDERHDLVILVVNTIQKDLRSDNYLVVCAALTAACRLIGEEAIPAVLPQVVDLLVHPKEAVRKKAVMALHRFYQRSSSSVSHLVSNFRKRLCDNDPGVMGATLCPLYDLISEEPNSYKDLVVSFVNILKQVAERRLPTSYDYHQMPAPFIQIKLLKILAVLGSGDKQASGHMYTVLGDIFKKGDTASNIGNAILYECICCISSIFPNPKMLVAAAETTSKFLKSDSHNLKYMGIDALGRLIKINPDIAEEHQLAVIDCLEDPDDTLKRKTFELLYKMTKSTNVEVIVDRMIEYMINITDHHYKTEIASRCVELAEQFAPSNQWFIQTMNRVFEHAGDLVNIRVAHNLMRLIAEGFGDEDEGADSQLRSSAVDSYVRIVGEPKLPSSFLQIICWVLGEYGTADGKHSASYIIGKLCDVAEAHLTDDTVKAYAISAILKIFAFEIALGRRIDLLPECQTLVDELLASHSTDLQQRAYELHALLGLGKNDVESVMPADASCEDIEVDRNLSFLDSYVQQALENGASPYIPESERSGLTSVGSYRSQEQQETSAHTLRFEAYEMPKPSLPLATSQTSMSTPNTDLVPVSEPGYYKEDHQTSRPQPPSDAVSGEFGVKLRLDGVQKKWGRSTYSSSTPSSSMSSQQTTNGASHSDGGGPSSQPRESSYGSKRQQGTEVSAEKQRLAASLFGSAAARADRKAQASRKTGKDSPSTEKVATTNVAAQSVKEQVIPAAAPPPDLLDLGDETVPSSRPSADPFSQLVGLLGPASAAPALSGTPATTTSTSKAPDLMSIFSDDVPTGVTSSGSTDPTPGDAISVSSHKGATAVAPKKGSSLQDALQKDSTARQVGVTPTGNNPNLFKDLLG

SEQ ID NO: 228005 - protein, 45 aa, Zea mays
  Clone ID: MRT4577_139535C.1.pep
TNISSINYIYISIQLSHSSYTFIYTSLFIDILIDILFHTPNTSSL

SEQ ID NO: 228006 - protein, 166 aa, Zea mays
  Clone ID: MRT4577_139536C.1.pep
MPELKVGADFPEGVFFSYVQPTPEIAEFSTCGAPTNYNASQEFKSKKVVLISVPGAFTPTCSASHVPSYVENIEQIKAKGVDQVIVVAVNDAFVMHGWAKANGITDDKILFMSDHNAKFSTSIGWNLGERTGRFAVVIDHGKITYASSDEPGSIEKSGALGVLPHL

SEQ ID NO: 228007 - protein, 58 aa, Zea mays
  Clone ID: MRT4577_139537C.1.pep
MAQVYRSKSFSSLLVVDLVSMVPLVLVRLDVSYGSIRVKQNRLFLLQRTDQYKCYAGH

SEQ ID NO: 228008 - protein, 58 aa, Zea mays
  Clone ID: MRT4577_139538C.1.pep
KMFSLLKIISKGYLPEVELRNQKVRLIYVDKLFSQNSCPSLHQIWNILASVMNGRLER

SEQ ID NO: 228009 - protein, 55 aa, Zea mays
  Clone ID: MRT4577_139539C.1.pep
LRRPLLFFRGREIKCVTASSCLSLHIGRARNDHLELLDSTKNTRGRREPIREGEP

SEQ ID NO: 228010 - protein, 42 aa, Zea mays
  Clone ID: MRT4577_13953C.1.pep
FGLDVMVDFIRDIVVLSYSEMSIKRLEVILLGVYVICICFVC

SEQ ID NO: 228011 - protein, 111 aa, Zea mays
  Clone ID: MRT4577_139540C.1.pep
MSLEDSLKKRVAKCRREYDIIYKQLPVLLEKMEILFPTGKKMESSEPENKSEAKGEPVDPLRAMTPAEIGERYKDLADTVKGFLKDLDEAEKEIVAGTSQAATPPASVEDQ

SEQ ID NO: 228012 - protein, 72 aa, Zea mays
  Clone ID: MRT4577_139541C.1.pep
DVCTSISMEISKFLNGCKNDIIRINLNHGREASISDLESYINHTYQKKSSRSKILLEFNTNTVCYGNQRHSM

SEQ ID NO: 228013 - protein, 89 aa, Zea mays
  Clone ID: MRT4577_139542C.1.pep
AHRLLTITESYDSSELRKPWKTRRLGDRTPRIPILSFNNCDYYQKAEDNEHVLPPLQRDDNEGRSGQAGCLLYQQHGRRLPLPHGYDCC

SEQ ID NO: 228014 - protein, 52 aa, Zea mays
  Clone ID: MRT4577_139543C.1.pep
VESIPWCIEISNLVDILKENRYLKFFPQTFRSTQTRSFSSSKHINQPKGSKP

SEQ ID NO: 228015 - protein, 78 aa, Zea mays
  Clone ID: MRT4577_139544C.1.pep
MSEEDKTAASAEQPKRAPKLNERILSSLSRRSVAANPWHELETGPNPPAVLKVVVGTTKGTKVNFNLDRKPERIKVNQ

SEQ ID NO: 228016 - protein, 151 aa, Zea mays
  Clone ID: MRT4577_139546C.1.pep
KLPRASYLPPPAPFPLTATALLHRVGLLFAATTLVVFVPQLAAPAAPCPYCPTPTPPPPSPPPPPVVNPPPSHTPCPPPTYSPSTPTGTCPVDTLNLLARVDTLNGLSHALVWTHANHTCCPLLSRVVHLHAELCLCSTIKANALSHRLVL

SEQ ID NO: 228017 - protein, 150 aa, Zea mays
  Clone ID: MRT4577_139547C.1.pep
MGKNNKRKREPTPPSEDFGDSEYSEEEFSSESEGSPAPVSPPASSDDSDDSQGIAAEVWTYIRAVERSGLEGSDESEYSSDEEDSDGGDEGEDDDDDDDDGDGDGDGSGSGGGDGSRGSTKGDSSKGSTKGGSSRGSTKGGGGGRGRASG

SEQ ID NO: 228018 - protein, 107 aa, Zea mays
  Clone ID: MRT4577_139548C.1.pep
LLPVLFQGLKRNFPHSMFVGLCFFPTKPFLAIWVRLFLVSQNLPWFFPYGPPFYLLTCFKNQSGFWGRPPGNRFFFHGPPHFFSPGGKMFPRNPFFGWGFSPPPFFF

SEQ ID NO: 228019 - protein, 62 aa, Zea mays
  Clone ID: MRT4577_139549C.1.pep
MADQLTEEQIAEFKEAFSLFDKDGDGTITTKELGTVMRSLGQNPTEAELQDMINEVDADGNG

SEQ ID NO: 228020 - protein, 97 aa, Zea mays
  Clone ID: MRT4577_13954C.1.pep
GGSKRHFFTIKLLFLLHVHYLGIVHFLVKQLVFLRYEEMAGINPNPNLIPKIETNLGGKEVINRLQNNKNTHLAIYFKSNGGANLSPQWPVLLLYKP

SEQ ID NO: 228021 - protein, 72 aa, Zea mays
  Clone ID: MRT4577_139550C.1.pep
TQTYTPPYTRHPSRSQLSGVSSSRRRSSPVAGDQEGVDFDAHQAYPYPVQKGMHVDCHGLTMEIMLTVKCPV

SEQ ID NO: 228022 - protein, 145 aa, Zea mays
  Clone ID: MRT4577_139551C.1.pep
MSTTTMKASDPGSAWFGSGARTRSAAGISHNARLVTTEVAAFVSVLGLALFLHLYVCHVRRRNRRRAAAVLPTTTAAAAAAAAPKRGLDPAAVAALPTVLYRDALRVADEDAQQGEAGAAEATRRPRRRRGLGRLGTAAAFCCRQ

SEQ ID NO: 228023 - protein, 60 aa, Zea mays
  Clone ID: MRT4577_139552C.1.pep
IVVSRSGARCKAINACEHCGHMVAVAAACIKTKEHKKDGHFSCHCWYKKVLNGRVAVRVG

SEQ ID NO: 228024 - protein, 245 aa, Zea mays
  unsure (1)..(245): unsure at all Xaa locations
  Clone ID: MRT4577_139553C.1.pep
DRHDTTDTMSTTTTKASDPGSAWFGSGARTRSAAGISHNARLVTTAVAAFVSVLGLALFLHLYVCHVRRRNRRRAAAVLPTTTXPRXXXAAPKRGLDPAAVAALPTVLYXDAGGADDGAECTICLGAVQEGELVRALPACGHVFHVPCVDTWFASSSSCPVCRAEVEPPPPPALSSSALFVQAEKVVQDAVKEEAGSSTPERGIGACASLMKMLSRERPAPRRPHADAGDLDDLERQQHSVAVNN

SEQ ID NO: 228025 - protein, 254 aa, Zea mays
  unsure (1)..(254): unsure at all Xaa locations
  Clone ID: MRT4577_139554C.1.pep
SKAMKFKAFFTDDGISLLDKRFLPAMDKVGRVCHVFFTPTHAMLLHNLLGATAAGPDGGGPQCVAQFAKDLLFREYNLSSRNGNQIAFSVEVALLHRALRSVLAVHAQPPAAGDAAGAPAIQVRLVNKLPAGSRTATPFLTFETKGAHAAVVQDVPISRPLSRSDVERLHAALDAAKDLPKTLVQVPDLPQLQSLVDRLKNVGDLLTVAVTQYGDLHLQVSTSLVTVGSEFRKLXVIGDRANAPVGDQNLTSST

SEQ ID NO: 228026 - protein, 201 aa, Zea mays
  Clone ID: MRT4577_139555C.1.pep
LREEKEIGGQLCAAACRFPICLISPSPSKASYEDRVVLAKRRPNKQTPLWEPQSPIEAAAAAPFRAATGNRSNQAAPPRAAVRNRSLPLFLSQIRNQTSPFLDTSRNRSLELISELHTTSMTKSSVQGLSKSSLNIVPKHEGRKLTSDDILQANTAMLEATRGILERRAGNPYSIRLLRMEFYLGDESIFIGQTVANTIAT

SEQ ID NO: 228027 - protein, 78 aa, Zea mays
  Clone ID: MRT4577_139556C.1.pep
MKFKAFFTDDGISLLDKRFLPPMDKVGRVFHVFLTPTHAMFFHNLLGATAAGPDGGGPQCVAQFAKDLLFRESTLCSR

SEQ ID NO: 228028 - protein, 149 aa, Zea mays
  Clone ID: MRT4577_139557C.1.pep
KTKKGGGPRTGGRSKGQNPPPARKRGPPFRLGGQTPPPPATTPGKGKLGAKAWTENRKPRDKREGGSKTGNQGGVKFRKKKKRFFLKKGGGGKKKRFWPPPHVFRGIWWPQGGPPGPKRGKGGAPAPPRNQVCLKKGKQKRPTSCGAGP

SEQ ID NO: 228029 - protein, 226 aa, Zea mays
  Clone ID: MRT4577_139558C.1.pep
DNEVDMLSKLPDDILLNIVERLDIADATRTTILSRRWKQIPAILSKVVIMVGSFQPKHEGRKLTSDDILQANTAMLEATRGILERRAGNPYSIHLLRMEFCLGDESIFIGQTVANTIATQKVASVEFIILTKLRNVFTNNELLTYGSQFMSFFDSCPVTFGGLARLTLENLRLGESGFPKIFSICKQLEFLRLYHCDMGIESLLEVEHPQLSELVIACSRIIERID

SEQ ID NO: 228030 - protein, 67 aa, Zea mays
  Clone ID: MRT4577_139559C.1.pep
IFFFFFFFFWGFFIFFLGFLPSLFFCYFFFWNRRGLFLKGEAGAKTNGSNPKFFFKGGGPRLKGPNF

SEQ ID NO: 228031 - protein, 49 aa, Zea mays
  Clone ID: MRT4577_13955C.1.pep
WSITECTSGSACSSYWLRQYLTRSLRLSRCRPLSCPTSCRLSVLTSWTT

SEQ ID NO: 228032 - protein, 264 aa, Zea mays
  Clone ID: MRT4577_139560C.1.pep
MVAAGNPPPKPWERAGNSSGPVPFKPPSGGSTSDVVEASGTAKHGEVVSAAGNNVASNVNSTISMPVPPRPWQQQGYENSYGGYGSSMYSSYGGYSGPYGNNMYSGYGGGYGGMYGGSGMYGGSMYSGGMGGPYGGYGMGMSPYNQGPNSFGPPTPPPGFWVSFLRVMHGVVNFCGRVSFLVSQNTQAFHMFITALLQLCDRAGMLYGELARFVLRLLGIKRKPKKSGVKGPGAPSSEGRGQQLVEAPKVNSWDSVWTENGKGN

SEQ ID NO: 228033 - protein, 54 aa, Zea mays
  unsure (1)..(54): unsure at all Xaa locations
  Clone ID: MRT4577_139561C.1.pep
GARGPRVFFFFFWTFSELXYLKLCTEVLYYAALFTVSPTNLTFYQFHAYYQLLH

SEQ ID NO: 228034 - protein, 182 aa, Zea mays
  unsure (1)..(182): unsure at all Xaa locations
  Clone ID: MRT4577_139562C.1.pep
MVAAGNPPPKPWERAGNSSGPVPFKPPSGGSTSDVVEASGTAKHGEVVSAAGNNVASNVNSTISMPVPPRPWQQQGYENSYGGNXSVLHVSENILVSQNVNVXENAGYGSNMYSSYGGYSGPYGNNMYSGYGGGYGGMYGGSGMYGGPMYSGGMGGPYGGYGMGMSPLYQGPNSFGPPTPPP

SEQ ID NO: 228035 - protein, 49 aa, Zea mays
  Clone ID: MRT4577_139563C.1.pep
GWLPTVGYQEHRKPRLLFMRNCWLVPRTFILHVCCYNLAVTLQSRCTLE

SEQ ID NO: 228036 - protein, 103 aa, Zea mays
  Clone ID: MRT4577_139564C.1.pep
GGPWLCLLCVCKTHPNRYSQISLPQANSSSSPFRRTGSLLPKRALYFPLAFSGHTLAHEVTFGASTRWWPRPSDDGAPGPLTPLFFGFLLSPHKRRTKFASSP

SEQ ID NO: 228037 - protein, 67 aa, Zea mays
  Clone ID: MRT4577_139565C.1.pep
EDCLIRTWTKIFLPPWECPACNSISHTSDLQHTTVWLCHILSMTMKLNLLLLLINNTELQGQLIRVN

SEQ ID NO: 228038 - protein, 62 aa, Zea mays
  Clone ID: MRT4577_139566C.1.pep
YSTCALLGPQESQCCCLVMRSKCFASDYGLIHSFLWLLLMLISDALSHLTIFRSKTYACLYE

SEQ ID NO: 228039 - protein, 72 aa, Zea mays
  Clone ID: MRT4577_139567C.1.pep
MEKKAHILMNRYKLGRTLMQGTYIKGYHRRNLAFRESACMKAIDKEKVMRDGMIDQIKREIYVMRRVRHPNV

SEQ ID NO: 228040 - protein, 119 aa, Zea mays
  Clone ID: MRT4577_139568C.1.pep
FGSLPIVIFFAECFFRALGKEVICRVPRKKPSVKENTRQRNFLPSVLFLTLSKEFLCRVSFFDTWQALWRVSQIQHSAKSSLPSVFSPTLGKNNLKITFLNSKLIQMKRFSTINLYNSS

SEQ ID NO: 228041 - protein, 192 aa, Zea mays
  unsure (1)..(192): unsure at all Xaa locations
  Clone ID: MRT4577_139569C.1.pep
FFDQXLDEXKLLKFVNKYDPLDEHHVLRLYDYFYHQEHLFIVTELLRANLYEFQKYNQESGGEVYFTLPRIQVIARQCLEALVYLHHLRIIHCDLKPENILIKSYSRCEIKVVDLGNSCFLTDNLCLYVQSRSYRAPEVILGLPYDQRIDIWSLGCIISELYTGEVLFPNEPVSMMLAQRIGIIGPIDMGNA

SEQ ID NO: 228042 - protein, 51 aa, Zea mays
  Clone ID: MRT4577_13956C.1.pep
SWGRRDRSFVTRLSAKSQSFLHLLLSPVQRYIIPSIPLGTRSRPTSGMPVS

SEQ ID NO: 228043 - protein, 51 aa, Zea mays
  unsure (1)..(51): unsure at all Xaa locations
  Clone ID: MRT4577_139570C.1.pep
XXVLLHLQATXQQLHCXLTPERHIACXSHXVPCPWKNTGDLAAQLLXXXIN

SEQ ID NO: 228044 - protein, 77 aa, Zea mays
  Clone ID: MRT4577_139571C.1.pep
PPGTTPSRGMPAGLKIIRAPTPLVTSLPPGPSPKGNRPPHGGSLSPGGFGQQKRMRRPFRRCRVVPQTLGRASLRTA

SEQ ID NO: 228045 - protein, 74 aa, Zea mays
  Clone ID: MRT4577_139572C.1.pep
PNSSNALTPSSPICTCHRLDCVAVLIVSLPTYVGTSLLYGYTCLKWARFARRPMAWHSLTWLEHDPARCPLGPC

SEQ ID NO: 228046 - protein, 74 aa, Zea mays
  Clone ID: MRT4577_139573C.1.pep
YTRAAGPRAQLDEIFQRQEAGGEASTYVPAGPLATAAESRRAWRTRITNRVLLLLFILYVPLVAAADSSFSFGV

SEQ ID NO: 228047 - protein, 53 aa, Zea mays
  Clone ID: MRT4577_139574C.1.pep
GGGSVPNNIIGNRVCPSFVSQSNFVTIDCLCFRIASSSAPLNSYGGDQKIKKK

SEQ ID NO: 228048 - protein, 138 aa, Zea mays
  Clone ID: MRT4577_139575C.1.pep
TRVERGDRVTYFQYGMGRMESIWGANAADFSVQRWLSIGEDNAPPAAVAGVSPFKYPVFQAGPRTCLGKEMAFVQMKFVASTVLRRFEIVPVDEGRVPVFLPLMTAHMAGGLNVTVRRRGEPIAAAATPLDPSADPVL

SEQ ID NO: 228049 - protein, 93 aa, Zea mays
  Clone ID: MRT4577_139576C.1.pep
CILPLMILTCTHYMQYEMHYVLRSTSKQQMIRNGPLMSILVTPYKSIMCSLVDIMNILDACIELIAAPTITPHNRSSHERGDHFPSTERPNYH

SEQ ID NO: 228050 - protein, 139 aa, Zea mays
  unsure (1)..(139): unsure at all Xaa locations
  Clone ID: MRT4577_139577C.1.pep
RFFXSIEGRLVRTLXXXFXPXXXSLPEQSNTIAVAEYLVSEXQXXXXLXNNLPIKQNYLKLAKIFYQLLEGACQFXNVLXSYAVSPACQPFFLEYXEAAAYSFINRKKGEYKPTRPSLDILVLQLNPHVLRXTGVATLN

SEQ ID NO: 228051 - protein, 167 aa, Zea mays
  unsure (1)..(167): unsure at all Xaa locations
  Clone ID: MRT4577_139578C.1.pep
MHLQSMDSDELVCPTFNAQDEFKEPFLLREWRPWYILYCMTEQVIGLFIKGEAVVCIXGDLQNVYVLVEKVXVVTVHIRPRVSDLAETLFFTEKELCIYFISGDHIKVISRVQYRATAVVTKVERHVLIILSDTTKEHMRVFDDHCPESSDITTRITRIGDYELHDL

SEQ ID NO: 228052 - protein, 64 aa, Zea mays
  Clone ID: MRT4577_139579C.1.pep
QAHPHTLDQHTLGSVRIVLNPYGFGVIECICVPNKSSSLVIFPMPSCPHVFQMFDRGPYMASSW

SEQ ID NO: 228053 - protein, 74 aa, Zea mays
  Clone ID: MRT4577_13957C.1.pep
GCDRSNSSCVRWEILTNSKAVFKVRRWSAIYTRGDEQSSIEEGGKDDSVSFLPRGPGGNELKSFAEHTLCVRVG

SEQ ID NO: 228054 - protein, 61 aa, Zea mays
  Clone ID: MRT4577_139580C.1.pep
VGHWALLVCTLFFLSWIRAGVLLGVRPAIIDLSLLLDRGQCRGSCFIWGLSAGFLQIPQLF

SEQ ID NO: 228055 - protein, 43 aa, Zea mays
  Clone ID: MRT4577_139581C.1.pep
GLPLLTMVPCNVGGWPGLHLKCPPVPFAPLRGTIRGLDYSSSR

SEQ ID NO: 228056 - protein, 167 aa, Zea mays
  unsure (1)..(167): unsure at all Xaa locations
  Clone ID: MRT4577_139582C.1.pep
YQSATFCLRTVHTALANRSWLNDIKGALIVEVLADFLDLWDAILTVNLNPQMEDKHILRXAHNGKYSAKVAYESLFIGSTYFEHYNMIWHSWSPXSKCNFFLWLAALQXCWTFDRLQRRGRDHXDQYLLCDQEPETIDHLLVGSVFARSYWFRLLGQLNLQDFAPQV

SEQ ID NO: 228057 - protein, 72 aa, Zea mays
  Clone ID: MRT4577_139583C.1.pep
SLAIEDLQHLEWTIGAGLSAITRFFRKQHVLCDAFSCALQGFSRSRRCARAAFALLLGCTKPARYFLASPRK

SEQ ID NO: 228058 - protein, 99 aa, Zea mays
  Clone ID: MRT4577_139584C.1.pep
FPRRPAGAVSNWAWQVATKAPPPSALPLFVAGLSGFFNPAPAGAPPAPWASSLRVWPPPPPPLSHSHSRLENQKTALLIFRGGSFFPRPLPLFRGVGLF

SEQ ID NO: 228059 - protein, 67 aa, Zea mays
  unsure (1)..(67): unsure at all Xaa locations
  Clone ID: MRT4577_139585C.1.pep
LFFYFLPPXQKHIILSPPPLTPQNKTSRLFPTPPTIFSSPSLYIHSPRTPAPSTHSILHYTSXNFHH

SEQ ID NO: 228060 - protein, 197 aa, Zea mays
  Clone ID: MRT4577_139586C.1.pep
FGTRPLVAASTTGLCSSQLSKPYPPDERSIGRARIPQPRAGGSAAARGAGAPAPRAGVQDEVVRAVAARRLFPRHMQLRARTRRAPPVPRIAHLVPTPRRYTQPSLVPPLSSRTLFFSVECLTSEIGIPWWCSVRCRSGGLVVCSFPANHVPRIVFIGRFCCKMSLILHPTVNGCSCNLCDLSVSEEQRYVTIQFMR

SEQ ID NO: 228061 - protein, 83 aa, Zea mays
  Clone ID: MRT4577_139587C.1.pep
CTSSCNRLSVDPHCHPSVLSIFHVVRSLLFRLYTRSFPTFVVLCVLVYSSILCLVCQILQEVVNVTRSYINPPLFCPCLRTYQ

SEQ ID NO: 228062 - protein, 349 aa, Zea mays
  Clone ID: MRT4577_139588C.1.pep
MGGGADRSAPVRAEESVSGGVDVWSDAVSSHAPDHLLVMVHGILGSTADWQYGANEFVKQLPDHVIVHCSEKNASMLTLDGVDVMGERLANEVLDVISRRPEITKISFLAHSVGGLAARYAIARLYRHPDSVSDGNTKGTICGLEGINFITVATPHLGSRGNKQVPLLFGSVAMEKVACHIVHWIFRRTGRHLFLTDDDEGLPPLLQRMVEDHDDLYFISALRAFRRRVVYANADCDHIVGWRTSSIRRNNELPELPVSSSDKYPHIVHEEHSEETDDDKWQDCMAECDMDVLEEKMVTGLGKVSWEKVDVSFHSSMTSFAAHSIIQVKYAFMNEGADVIQHIIDHFQL

SEQ ID NO: 228063 - protein, 94 aa, Zea mays
  Clone ID: MRT4577_139589C.1.pep
QRRRRRGGRRSIGSMSEGTANCVDILIAIILPPLGDVPQVRCAATSCWMLPASCTLPRATCPGHACYGHATAMHQVYNLASSSLGATSDAHVLL

SEQ ID NO: 228064 - protein, 252 aa, Zea mays
  Clone ID: MRT4577_13958C.1.pep
RHLKAPRRFCYAVKSQQKTFVFPNGENFVHFFCAEDGKLARRFLELVQRWRSWYLVNKQVDFGKKDKPPQLAMPLENDTVRKAISRSKSSAAYKGHSTQVSVDETPYTIGAFQPLLDMDRFDKPLEEFGKDPEQDKQKHGDPDTEFRSGLVRNATCKQPNVLTKSKSIHQKHRSPPTPRDEAQFSSTLLGQVYEEKRKIAERAPVISPPPTNAAFTGASLLGQGYEQKRKISERAPVTTVFLSRMPYRGSFT

SEQ ID NO: 228065 - protein, 83 aa, Zea mays
  Clone ID: MRT4577_139590C.1.pep
FGSRASNVPFCHGESFGGPATNVGRFEIHSGAGTYFRDASTDMSSRTAGPKGYLARADGQVAQWTVNRTYNRSWGSSCGNGEL

SEQ ID NO: 228066 - protein, 69 aa, Zea mays
  Clone ID: MRT4577_139591C.1.pep
MELVRVFPSAEDKVNVACFHPLPGGGLVYGTKEGKLRILQHNGANMINMGSGCFIEENMVEIQRYALEC

SEQ ID NO: 228067 - protein, 54 aa, Zea mays
  Clone ID: MRT4577_139592C.1.pep
VVIAILDNCFCYTNLVDIYTLCLTYRLYLDTYYINKAKPMRKVRIIYNKLELRE

SEQ ID NO: 228068 - protein, 233 aa, Zea mays
  Clone ID: MRT4577_139593C.1.pep
MLLNVVTVPTSNAIEMHGAGGQSNPRLQGSSSISNLERFSARDALQVSSLSSIEPIPSTAGSSGSNSRRAMPLNMLLTGGLDVQMFQRNVGSGQQDHFLFGDSSNWEVPFVQGFLMTQNHTGLHPALVNNNVLEDLSGAGTAGINNSTRESSHMHNFGRPGASSSIPLTSGSSRRPNRHYASRSVPGVGSLLLVGPQIDEAEAHAASLGAGSEITASMLAPGTELPCTGKLRI

SEQ ID NO: 228069 - protein, 419 aa, Zea mays
  unsure (1)..(419): unsure at all Xaa locations
  Clone ID: MRT4577_139594C.1.pep
MTQNHTGLHPALVNNNVLEDLSGAGTAGINNSTRESSHMHNFGRPGASSSIPLTSGSSRRPNRHYASRSVPGVGSLLLVGPQIDEAEAHAASLGAGSEITASMLAPGTELPCTVKLRIWRHDINEPCVPLAPEACRLTISHAVLCSEMGAHFSPCGRFLVACVACLLPQTEGGRGSQLPVPYEEAGSSPTRHPLPSHRVIYELRVYSLEEETFGDILASRAIRAAHCLTSIQFSPTSEHILLAYGRRHSSLLRSIVVEGEXDSCIYYFGGRYDNHIQFLNHSLIXTXHINYCMGILTVLVLQLHDTXIHGIQNDLLIILHNYSYCSYFXQCKPNYQSFFLIYYXVYRVSDMELVRVLPSAEDEVNVACFHPLPGGGLVYGTKEGKLRILQHNGANMINMGSGCFIEENMVEIQRYALEC

SEQ ID NO: 228070 - protein, 100 aa, Zea mays
  Clone ID: MRT4577_139595C.1.pep
TPAYLSTERERGKYLDSMQRGSKNAARGELTLLILQLVLAPTTPTVRLLHADTSTVLGLDIIARKFGHPAKGILCARNCDFLPCYTADMIGQCIAQICMM

SEQ ID NO: 228071 - protein, 792 aa, Zea mays
  Clone ID: MRT4577_139596C.1.pep
MEPRVPCGDGGPEPRAARTHRREGERNHVLDARILEPQRQRSNPIRNIFHLLTQREVSPRLKHHAKRMWNESPKYDPDSIELRSADAKLDIFSWAESQSLHSWSAKYCPLLPPPRSTIAAAFSPDGKTLASTHGDHTVKIIDCQTGKCLKVLTGHRRTPWVVRYHPLHSDILASGSLDHEVRLWDANTSDCIGSQDFHRPIASIAFHGSGEILAVASGHKLYIWNYNKRDGTSVPAIILKTRRSLRAVHFHPRGAPYLLTAEVNNIESADSPLTLARSSGYLNYPSALLVTNTNSRFCTLPESNVVSPCLLWPAYLRDGGILHVLGNDSSSTIVQQRSSLVQPSTSDTANVQLEQFATPMDVCPGEPTSSNDIPDAVTVPTSNGNEMHGAGGQSNSRLQGSSSTSNLERFSARDDLQVSSLSRTDPIPLTAGPSGSDLHRAMPLNMLLTGGLDVQMFLRNVGSGQQDHSLFGDSRNWEVPFLQGFLMAPNHAGASSSIPLTTGSSRGPNRRYASRSVPGVGSLLLVGPQIDEAEAHAVSLGAGSEITASMLAPGTELPCTVKLRIWRHGTNEPCVPLEPEACCLTISHAVLCSEMGAHFSPCGRFLVACVACLLPQTEDDRGSQLPVSYEGAGSSPTRHPLPSHRVIYELRVYSLEAETFGDILASRAIRAAHCLTSIQFSPTSEHILLAYGRRHSSLLRSIVVEGENGVPVYTILEVYRVSDMELVRVLPSAEDEVNVACFHPSPGGGLVYGTKEGKLRILQHNGADMTNMGVGCFIEENMVEIQRYALEC

SEQ ID NO: 228072 - protein, 118 aa, Zea mays
  unsure (1)..(118): unsure at all Xaa locations
  Clone ID: MRT4577_139597C.1.pep
LNPSGSSRSAPTASATHNHEGIRAFLSRLLDTTRRALSXARPWSELADRSALYRPESLAEATCRXRKNLAYFRVNYTAVAALCLARELLAHPFSLAELLGLLAAWCLLYVLPPRDAPP

SEQ ID NO: 228073 - protein, 202 aa, Zea mays
  Clone ID: MRT4577_139598C.1.pep
RCCRQHAQLHQVVSKEACTSGEASDLAGDYSPMDCSPYPAEAEHVPTEKYVASDQPVHIGDTVISNGNTSCAEDDVVSAAEHLVTDADLLMFGDEGRGPKLDASESNFGSSVSSFEGDQSNASQHSFTNIGQNCNENTYRTPHDFVEAAAFQSNPSNFSGLNFKFGVSSSPQISAAAAAQRRSDSNGIRAKGSLASKPSTID

SEQ ID NO: 228074 - protein, 192 aa, Zea mays
  unsure (1)..(192): unsure at all Xaa locations
  Clone ID: MRT4577_139599C.1.pep
AATRPAPLGRQWRSLAVLGALLGLHLIAAVAQSPPTAPTTPAAPTTPAAPTTPATPTTPAGPTTPAAPTTPATPTTPAAPTTPIAPTTPAAPTTPAATPVAPANPPPVPTTPAPTATPVAPAKPPPVAPAVAPAKPPPVTPPPVTPPPATPPPATPPAVLPPAVLPPAAAPXPTATPSAEAPAWLPPATTPP

SEQ ID NO: 228075 - protein, 357 aa, Zea mays
  Clone ID: MRT4577_13959C.1.pep
MGASGLTAVVVLLLASALLRVPASAGRSLLEGENPNSGGEDAPAPTVSGKSSAAGQQQAESKRQQNSLAPLPSASSPPPPPPTQETNSHKAASPPPGGGAGPNGGTDPEDTGSQGRRMGTDKLKEAMEKCDASHKCSSGKEFSACLQVSEDASVGSYIIVKNEGQHDIDINVKEPSSNTDNDKKSLHLIKGAFGQMNITYTTSDAGNITLSDGKVDCIIHVGQPVERKSVYDLQQQFQQLTAYAMRLNPAYGASFFVFTVVLVAVGCACCKFAKRKGNDGVPYQQLEMGGQAPNSSGVDNTASTTDGWEDGWDDDWDDEEAPAGPVDKKPTGSVSANGLSLRSQTNSKDGWDVDWDD

SEQ ID NO: 228076 - protein, 127 aa, Zea mays
  Clone ID: MRT4577_1395C.1.pep
PELAAKPISAADIDAIFTKEVVNPASNAVESSQTVGAQMVSGNCQESVHDEGDSSDNHGKNTESSDQTTDMVERETGLAAKLDKLENGPKISESNPEGNVHDEEESCDNQGKNTESSDQAICMVESE

SEQ ID NO: 228077 - protein, 92 aa, Zea mays
  Clone ID: MRT4577_139600C.1.pep
RLASLSLPGVSHGLRDGSGRTEPGLLKTKALSGYYLCGLKLGGLSDMTLPRKVCNVVAGFSFWRKLEADGLTESEMFSDDNGYFGEVHLCGM

SEQ ID NO: 228078 - protein, 290 aa, Zea mays
  Clone ID: MRT4577_139601C.1.pep
MAAPLLRQWRSLAVLGALLGLHLIAAVAQSPPTTPTTPAAPTTPAAPTTPAAPTTPATPTTPAAPTTPAAPTTPAAPTTPAAPTTPIAPTTPAAPTTPAATPVAPANPPPAPTTPAPTATPVAPAKPPPVAPAVAPAKPPPVTPPPVTPPPATPPPATPPAVLPPAVLPPAAAPPPTATPPAEAPASLPPATTPPPVAEAPAELPPAEAPSKGKNKHKRRRKQHGKKEAPAEAPQPLSPPAPAAPSPADLEDVSGPAPSADVNASCRQHQNWASVVVQTAMAALLLSLAW

SEQ ID NO: 228079 - protein, 83 aa, Zea mays
  Clone ID: MRT4577_139602C.1.pep
DYAPLVASAVRSELMITTGWAVVRFRSYQQQRFPSSHVRHQISRRIHLVVIPCPCRWSSRSRPRHPAVSHPARAAASRRGPAG

SEQ ID NO: 228080 - protein, 338 aa, Zea mays
  Clone ID: MRT4577_139603C.1.pep
KIAQVYSKFVRPLPSSIKEFALSFHKIFPHIADTRHLMSVNQAVQKLMKHKSKSLSSAFLLLCPASYSSVEKPSSHSPVTIEVEGDETMSSRFISGAKHEAGYDAYMTGCIFAQLCAYLGIQFEQFSPLDNLATNTKLQKHINFLSPSWNSGTVLDLSTGMETPDPGYTRRYPAAVYDNIVVIWGFLSKVRPKEIKDCICKVFGSGSVTTVFSIDSTAALVQFKKQESVNDFLDLKAVLERADSAISILHPLSTILEGGQTRAAKYDTYRDICGSSESIYLFADQAEAVCATSKNQLIENVDGNLISDVLDGAALASVTEEDGIIPSSKNQNVAEVTC

SEQ ID NO: 228081 - protein, 129 aa, Zea mays
  unsure (1)..(129): unsure at all Xaa locations
  Clone ID: MRT4577_139604C.1.pep
YRISDRPSRQSVSRTITDFIKPCLLSSYDMMAMMMNVGVFARNDNEVSIAGFCGFTSSEDHYSTEKAVYPVCECTLECAAYVCGVXDKGPPERIYDAMLSMRVDPSCVFGAWMFATACPLMATYEWGLL

SEQ ID NO: 228082 - protein, 74 aa, Zea mays
  Clone ID: MRT4577_139605C.1.pep
PSRQSRLIPAGGLGCPLRMPSPWGSGVNGSTAGWPASLIKALPPPAQLVVALLKKQTVGPVGVGLGRNWGSGPG

SEQ ID NO: 228083 - protein, 100 aa, Zea mays
  Clone ID: MRT4577_139606C.1.pep
RPFPRRMFTRIFHSIRDNMGKSAIRQTTKHDSPSISDCSERRPSVTEECDSMLTRFTAQTAPEPIPIRKNSRRSSATVFGISDVTFDDYVQKDLVSSSWS

SEQ ID NO: 228084 - protein, 65 aa, Zea mays
  Clone ID: MRT4577_139607C.1.pep
QRRVLCFFFFSRCKSDERGWGTHGHSVPAVEGAGDYDEPVCVIIIIRQRWISVAEGVICLYYCAC

SEQ ID NO: 228085 - protein, 55 aa, Zea mays
  Clone ID: MRT4577_139608C.1.pep
ALWRRTAAAARAGQRATHPAIVLVRPAAHCDPIQWLAMAEDLDDDDHDDGPEASL

SEQ ID NO: 228086 - protein, 45 aa, Zea mays
  Clone ID: MRT4577_139609C.1.pep
MKFGKRLKKQVEESLPDWRDKFLAYKRLKRLVRLVPASSPSRRGG

SEQ ID NO: 228087 - protein, 56 aa, Zea mays
  Clone ID: MRT4577_13960C.1.pep
ATPIRRRSARNTDATRSTKVNYLYTNLGMKAHHTITESLYTNSFYFLVSDHSSHDT

SEQ ID NO: 228088 - protein, 104 aa, Zea mays
  unsure (1)..(104): unsure at all Xaa locations
  Clone ID: MRT4577_139610C.1.pep
GVHGPPMGLVLDTXTSWIGVGQNYRVGIIVNNQGNRTTPSXVTFTDSERLIGDAANTQAALTPXINTLFVANRLMARRFRVCAVHRVIXVWPFEVFSGPAEKPV

SEQ ID NO: 228089 - protein, 109 aa, Zea mays
  Clone ID: MRT4577_139611C.1.pep
KLHLLMTLPSNHHPLGVVWDTTKKDCTKRSQLYQVNLEKVLGNRINICILHEGKKKCTPAKALFQSCCATWKTQTTLLDRKRSSYFEDLMPSTWNTDVVLEHSGTLIWY

SEQ ID NO: 228090 - protein, 40 aa, Zea mays
  Clone ID: MRT4577_139612C.1.pep
GNCVCFIRQLPVPRPMFSNEVGVVCSKHITNNFFQRNATL

SEQ ID NO: 228091 - protein, 43 aa, Zea mays
  Clone ID: MRT4577_139613C.1.pep
HGNQPSKVKRDGQDKTSAQQSLKRRARQEPIVVTNDRLHTGCH

SEQ ID NO: 228092 - protein, 115 aa, Zea mays
  Clone ID: MRT4577_139614C.1.pep
KRSQLYQVNLEGVLGNRINICILHEGKKNAHLQKRYSNPVAPPGRRKQLCWTEKEVAILRDGMAKFSPHNNGKIPWTQILQYGRRVFHKTRLPCDLRVKWRNMERKKSDAVDMEH

SEQ ID NO: 228093 - protein, 35 aa, Zea mays
  Clone ID: MRT4577_139615C.1.pep
ITNHTFICLCPSADLMPSTWNTDVVLEHSGTLIWY

SEQ ID NO: 228094 - protein, 150 aa, Zea mays
  Clone ID: MRT4577_139616C.1.pep
IRLEASSPALGVSIGPQWRPQPPPPPPPSCSAARAPPCPRPPFTRSPSASPPRASTLPRTSRSLPARPRRRRPPRGSPPPSRRWRRPSPAPPRRCCLTSWSSRRPTPPPRSSPPPRSPASRTRSTSPPRCRWPPATRPRWPRRPRPSPSR

SEQ ID NO: 228095 - protein, 93 aa, Zea mays
  Clone ID: MRT4577_139617C.1.pep
GVLPQSGGGHEGVLEALQDVTMLLMTINSAAIDDYRSNRDIIFATISDQTSHILIVRYHLQLITLPCRPTCMTHIYEEITPTCTKPLERVSPP

SEQ ID NO: 228096 - protein, 55 aa, Zea mays
  Clone ID: MRT4577_139618C.1.pep
SPPPYLIFYIILFYFLLHYSFFFLYEMIYTYPTFLTNYNLSTDKTLSLPIFISFL

SEQ ID NO: 228097 - protein, 61 aa, Zea mays
  unsure (1)..(61): unsure at all Xaa locations
  Clone ID: MRT4577_139619C.1.pep
LAVHAHARIAMSCDNPRGNRKSRVRTCLCCSVINEPVRSRKMLKMSSKATXPVAVSIINPE

SEQ ID NO: 228098 - protein, 157 aa, Zea mays
  Clone ID: MRT4577_13961C.1.pep
LPCRAARSGDVSTVTVTSLQPGSQPMGASGLTAVVVLLLASALLRVPASAGRSLLEGENPNSGGEDAPAPTVYGKSSAAGQQQAESERQQNSLAPLPSASSPPPPPPTQETNSHKAASPPPGGGAGPNGGTDPEDTGSQGRRMGTDKLKEAMEKCDA

SEQ ID NO: 228099 - protein, 62 aa, Zea mays
  Clone ID: MRT4577_139620C.1.pep
QPSRSRILTDHLCRAASCTWGLTRLHRPNAKWIVHNITSSSVHLKNESHCASCKNNTYTMLS

SEQ ID NO: 228100 - protein, 69 aa, Zea mays
  Clone ID: MRT4577_139621C.1.pep
VQSVYQDDTPSDNIVNGPVYCHQDGTVFQLTVDCHSDDLTDVDDVQKTLTNNGLLIAHALNIWPRKEAV

SEQ ID NO: 228101 - protein, 38 aa, Zea mays
  Clone ID: MRT4577_139622C.1.pep
SPLFSVSRTGVPSFRANKYFEKIRPVTKPYLYRIGNLM

SEQ ID NO: 228102 - protein, 97 aa, Zea mays
  Clone ID: MRT4577_139623C.1.pep
TADRSTLPYFRPHFNKRTNTPTHGLMKHPHKPKRQCKLYPNPKPSSKQVTHTPPTSKKKTCPSPPPFLLPQTLPYFLKENLPLLPSFTLAFLDPPKK

SEQ ID NO: 228103 - protein, 79 aa, Zea mays
  unsure (1)..(79): unsure at all Xaa locations
  Clone ID: MRT4577_139624C.1.pep
GRCHSSAVTDSGAILTLVWGLYGQCGQGNTDDDICPTSVSYIMRSTMQDIPESLWXKLYTSLYGDVHSPAGSDAGWTDT

SEQ ID NO: 228104 - protein, 328 aa, Zea mays
  Clone ID: MRT4577_139625C.1.pep
MARPRPSVVVLAVAVAVASLAQPGAADLKLDYYASTCPNAEAIVRGVVQQRLQATIRAVGSTVRLFFHDCFVEGCDGSVLIESTPGNQAEKDASDNKSLASEGFDTVRSAKAAVEAACPDTVSCADVLAIAARDAISMSGGPFFPVELGRLDGLSSTASSVPGQLPEANQTMDQLLAVFKAHGLNMSDLVALSAAHSVGLAHCSKFASRLYSYQLPGQPTDPTLNPKYARFLESRCPDGGPDNLVLMDQATPAQFDNQYYRNLQDGGGLLGSDQLLYTDNRTRPMVDSLANSTAAFYRALADAVVRLGRVGVKSGRRGNVRKQCDVFN

SEQ ID NO: 228105 - protein, 43 aa, Zea mays
  Clone ID: MRT4577_139626C.1.pep
LSAFQCWPLRAPCKALCSPCISWYQALLAVPLRCSCWFLPLFP

SEQ ID NO: 228106 - protein, 65 aa, Zea mays
  Clone ID: MRT4577_139627C.1.pep
MASHHYHYYYYYPLKHSPPISKMLAAAKLIDSYEMDPDVSWLEVFAYSGVSAALCATIWVAAKAC

SEQ ID NO: 228107 - protein, 67 aa, Zea mays
  unsure (1)..(67): unsure at all Xaa locations
  Clone ID: MRT4577_139628C.1.pep
PGTYGRPLPTLVPASSLGRRPWGRPGPFLPFRRLLVRWRPWPPDCCXCASRSRGWSTAREAADAREE

SEQ ID NO: 228108 - protein, 72 aa, Zea mays
  Clone ID: MRT4577_139629C.1.pep
NGFGYSPPSPKPVRNYKSRFFEPLKMVFNFYFFFQNLWPPPFFKVNYFFTWSPPPPKFFFMGFFLKIKPGPV

SEQ ID NO: 228109 - protein, 175 aa, Zea mays
  Clone ID: MRT4577_13962C.1.pep
FRIPWIDLTLSCGTWKKEPCFQTSFKASLGPFFSFASHVSNCCWGPSSPEGPPNPGLAMFSQWIMWAGPFGLPSTGIYFGPAGALSPPRTVVVAGLLLGWGAGGSLRKEDLLLFPKGVPAFLLKGCVGLFFFSWGLGPCYGRPGAFSLAAPPGPFFLGRPPGLFPRAGPWVLRPA

SEQ ID NO: 228110 - protein, 148 aa, Zea mays
  unsure (1)..(148): unsure at all Xaa locations
  Clone ID: MRT4577_139630C.1.pep
PTRQHRVIVRGXQLGEGLTLGDSIIHYEINLELTLXLXGGLQRCVKTFAGKTITLEVALSDTIDNAKANIQDKEGVPAGQQPVMFGGKHVEEGRTLAGSIIHYESTLERALHFRVGMQIFVKTLTGKTITLNVNFEDAIDNAKANIQD

SEQ ID NO: 228111 - protein, 57 aa, Zea mays
  Clone ID: MRT4577_139631C.1.pep
VSSAIWFSGQGSCTGSHRYGITPLCVCFECECSQDRLLVRVVASNNEIIVAILKMCQ

SEQ ID NO: 228112 - protein, 96 aa, Zea mays
  unsure (1)..(96): unsure at all Xaa locations
  Clone ID: MRT4577_139632C.1.pep
SRVRKKPFAAIVGGSKVSTKIGVIESMLWMEGILIPGGGMIYXIXKGHGWGPGKSLVPEDXLELATDLKETAKARVGTHPAQTPVVSQRCHPKARS

SEQ ID NO: 228113 - protein, 119 aa, Zea mays
  Clone ID: MRT4577_139633C.1.pep
MESETTPQPPLSSAKRAVPSLLQFDALFAGRKEETGPLGHQQRDGGYVTALNKHEALIESDVDGILYFFHNNCTLLALKNAFVLKSVKATLSNGVLASMSRTNDGLLSNTDIDIDDDQK

SEQ ID NO: 228114 - protein, 81 aa, Zea mays
  unsure (1)..(81): unsure at all Xaa locations
  Clone ID: MRT4577_139634C.1.pep
ISIARVLLALHQRPTXAXASSVLLLLLAAALXSMIANAAXFSITNNCXFXXWPAANPVXEGTQLXPXXTWTVNXPXXXXXX

SEQ ID NO: 228115 - protein, 113 aa, Zea mays
  Clone ID: MRT4577_139635C.1.pep
LDPIERPACPFFFFFFFFYLLKGILNSNSLERMLQRLETAAKLHGTAGTNRPNICQTKANGVLYRRATCLKSQPEGGGTTEDRSFYKGKIKAYCEPEELPEKKGKLEEGNKLR

SEQ ID NO: 228116 - protein, 71 aa, Zea mays
  Clone ID: MRT4577_139636C.1.pep
CLGGPKKRREAFVPPRIDPENKVPQNTPRGFPFWGKNFKPNRVKFLKKGEKKLGPFFFFVWPNKKNHVGPL

SEQ ID NO: 228117 - protein, 156 aa, Zea mays
  Clone ID: MRT4577_139637C.1.pep
MRSQMNIMLLQISTVLPLIFIYELTSTTAEYMDRRGREEHPIGVDGDAFPASITISIRIRSIAISLLLRVSMVPPGLLRRQDAGGGGGGSVAELAQRVLEHPGVAGVSLLPSSGHGRLRSRSGGGRRLRVRVRTSSWGEGAAAAVEDKAGLPARPA

SEQ ID NO: 228118 - protein, 56 aa, Zea mays
  Clone ID: MRT4577_139638C.1.pep
LGYKVLRYMLMRYWHSLRNSILISFGSMVVLHIAKNDSQHNSLVSAPQYDGDVELA

SEQ ID NO: 228119 - protein, 67 aa, Zea mays
  Clone ID: MRT4577_139639C.1.pep
RLNKFLSDAVRLCSFHGRSGGSCSPVTCLWSCPLRAGFNIYTRENVLYVCYFKCHLSSVKSQRASVS

SEQ ID NO: 228120 - protein, 118 aa, Zea mays
  unsure (1)..(118): unsure at all Xaa locations
  Clone ID: MRT4577_13963C.1.pep
ETKKSPKRNPTLKPPLKTNSAVKGYXRPFPPPLNREPNXKGTLXRVKNLSPTQKSPSPKRARAPHLKAFPWKVPPPNVCPIKKNPRFFVSRPKFKAPMPRFPPLKTQFXENETTPPPP

SEQ ID NO: 228121 - protein, 33 aa, Zea mays
  Clone ID: MRT4577_139640C.1.pep
LLQRMKNIPRRYLIVLDGEPSCFNKHERLMRTL

SEQ ID NO: 228122 - protein, 86 aa, Zea mays
  Clone ID: MRT4577_139641C.1.pep
ILYREASHSVIFCYHTCAVHCVCTRESVKHIKSQRAERARCCRRAQRPQRTADILGFLSFWECIKASSEELEGVKPGFPLGAQPRL

SEQ ID NO: 228123 - protein, 159 aa, Zea mays
  unsure (1)..(159): unsure at all Xaa locations
  Clone ID: MRT4577_139642C.1.pep
MPLMLLYLARLTTCSFAAGSFXTSMHITRCDKRSKDLDNXQLLTLTLNRTVRDPWFQSRHEYLFGNIDMQMRLVPGNSCGTCTAYYLNSHDAAHDDIDFEMLGNVTXEPYNLHTNPFTHLHGECRLKYXLWFDPTDDFHTYSILWNNNDCILMWDDMTI

SEQ ID NO: 228124 - protein, 165 aa, Zea mays
  unsure (1)..(165): unsure at all Xaa locations
  Clone ID: MRT4577_139643C.1.pep
GFTPAAYAILVXWWVKETNNKPIHLYIGQAAYKINNNSVPAWSXPEEYPRQIALNRXXYPEIKGSMHFSLKDINNNPLGAKDRLSKDIYKYPALIPPMPWLDHDPPKQPTLKGAIPRDEGIAIGIIDNRDNDSTYYAIYRANGKNEVDIQNPKNLLTITNSGSDT

SEQ ID NO: 228125 - protein, 68 aa, Zea mays
  Clone ID: MRT4577_139644C.1.pep
VPATGVSYVNLSFYDVPMHASWVRVIPPRFFFNALVTGPQWCMHFVHELISKVAMMPQPHMVGQFQQY

SEQ ID NO: 228126 - protein, 49 aa, Zea mays
  Clone ID: MRT4577_139645C.1.pep
FDMKLKKMNLLEVKRYVNLGLLKPQSRTKKVFWNGFNVNLLKTRMVLYY

SEQ ID NO: 228127 - protein, 79 aa, Zea mays
  Clone ID: MRT4577_139646C.1.pep
APIWGVAYSAFHCSITIVLFQNQWSRIWYNVVVIAVLKFQCSCIHCSLVTVGRFPKVCTLCILLYGTRFYQFPYPSCHV

SEQ ID NO: 228128 - protein, 49 aa, Zea mays
  unsure (1)..(49): unsure at all Xaa locations
  Clone ID: MRT4577_139647C.1.pep
LHKKVMEVDARVGTLVLXKHTPLSVVEEAPTARHHGGRRGAQARGESGH

SEQ ID NO: 228129 - protein, 78 aa, Zea mays
  Clone ID: MRT4577_139648C.1.pep
LLSPPLCFNFLRILWTEAPVLAFGVQDHWDQAVISMPESQPSTVTPRHLGRPGQTESREAPALPLPHCPEPKWGSERP

SEQ ID NO: 228130 - protein, 60 aa, Zea mays
  Clone ID: MRT4577_139649C.1.pep
LVFLCNLYLFFFFFFFFFFFFFFFFFFFFFFFNSNNFISFYIRSHKNIPTGSITMFRINF

SEQ ID NO: 228131 - protein, 63 aa, Zea mays
  Clone ID: MRT4577_13964C.1.pep
YQSGCNTLHILPHLWSVQCPVQPSSATLVHARSFTRSTITAGSELGASVINGSLVASDLSGLS

SEQ ID NO: 228132 - protein, 32 aa, Zea mays
  Clone ID: MRT4577_139650C.1.pep
TQVRMYVDTFEDISNFIFSTIFKPIYQDLLVN

SEQ ID NO: 228133 - protein, 284 aa, Zea mays
  Clone ID: MRT4577_139651C.1.pep
MSFQDLEAGHVRGAPLGGGRRNGRGPAGAGGAGAGASQAVASGVFQINTAVATFQRLVNTLGTPKDTPDLRDRIHKTRQHITQLVKDTSDKLKQASEADHRVEVSATKKIADAKLAKDFQAVLKEFQKAQRLAVEREAAYAPFITQAGLPQSYNSSEVNNGADKLAEQRTQLLESRRQELVFLDNEIVFNEAIIEERDQGIQEIQHQITEVNEIFKDLAVLVHDQGAMIDDIDSHIENAVVATSQAKGQLSKAAKTQKSNSSLICLLLVIFGVVLLIVIIVLAA

SEQ ID NO: 228134 - protein, 43 aa, Zea mays
  Clone ID: MRT4577_139652C.1.pep
FQVHMCRHEHSIFGFFLAVMSPREIILIPSTNSLFLTDIRLIF

SEQ ID NO: 228135 - protein, 120 aa, Zea mays
  Clone ID: MRT4577_139653C.1.pep
SECTAEQAYTWTQGRAVFASGSPFAPVEYDGKTFVPGQSNNAYIFPGLGLGLVISGAVRVHEDMLLAASAALADQATEENFVTGSIFPPFTNIRKISAYIAAAVAAKAYELGLATRLPPP

SEQ ID NO: 228136 - protein, 67 aa, Zea mays
  Clone ID: MRT4577_139654C.1.pep
LAVLVHDQGAMIDDIDSHIENAVVATSQAKGQLSKAAKTQKSNSSLICLLLVIFGVVLLIVIIVLAA

SEQ ID NO: 228137 - protein, 284 aa, Zea mays
  Clone ID: MRT4577_139655C.1.pep
MSFQDLEAGHVRGAPPGGGRRSGRGGLAGAGAGAGASQAVASGVFQINTAVATFQRLVNTLGTPKDTPDLRDRIHKTRQHITQLVKDTSDKLKQASEADHRVEVSATKKIADAKLAKDFQAVLKEFQKAQRLAVEREAAYAPFITQAGLPQSYNSSEVNNGADKLAEQRTQLLESRRQELVFLDNEIVFNEAIIEERDQGIQEIQHQITEVNEIFKDLAVLVHDQGAMIDDIDSHIENAVVATSQAKGQLSKAAKTQKSNSSLICLLLVIFGVVLLIVIIVLAA

SEQ ID NO: 228138 - protein, 652 aa, Zea mays
  Clone ID: MRT4577_139656C.1.pep
MPKEAAAESSQGGLVYFKYTFRYRDRFDELNDEWLSNIEATSDELLEAYTRAEDDAMTLAFGGRGKKRLNRVFDVIGFVYPDYTYPSRKQGKKRKIAASAISVVPKGKKIMVLTHRPRYIETATVPKLGKGTSSTAKAEQTARAASWEELTELSKVPAAGPVETPKHGAKAKEKAVKEPELEKAIMLPEILSPPVEVELPKVAKAPATTPKRRRMASVLDAVMESTRALTPAPTKKVAEAVTTCAETKAGPSVPTETEHVATEQRAEQESTDVGMALEKKDAPEKAKSPIPEAPSEDLDFIICHASGKKLSEEEIVEAKHYTRELKYQKGALVYNGTDEYDFLYCLPDNKEISVCREMAKNMGFPKLEAGLSAMSKDDLADSLAYNSLKGLILSNALRAQKNVEDESCQIALSNLCSEVIKLRNEAMEKDKILLSLVDKAGENVEELHESKEKSFEKSLDCVRKLKTSFAKVGAYSSEENFIRGDPEGIIDWISGEVEAFEDILSDRGDICAFADARGVAAILEKAGCDHVKAAAQTEAAFSTDDTRDPSIEATLVGGKFYSNVWVNGGRELANEIIKKNKKETHDAQEEAKRAEEAAERARRIAELSPLPEPYDPQADPVMKEALDVMSVANSIVDEVIDKLLNEATEKFF

SEQ ID NO: 228139 - protein, 75 aa, Zea mays
  Clone ID: MRT4577_139657C.1.pep
ETTSVRPQGGRFEKDLTACSAVQPQRAPTLNERRLPHSVQDVRSCSCMARADDRLRRSLLPTTARWRLTNGCSMH

SEQ ID NO: 228140 - protein, 121 aa, Zea mays
  Clone ID: MRT4577_139658C.1.pep
PVSGPSARCFLPAGGDPFCVNLAGFPPRAFFPGGFVFFPWGWPPMWAFSLGKTPPPNAYHKVFLVFSPWFPFNPPEKKFLSVVKMFGLFFPSRFKHFVPVVFSKKKKKKKKKNKGKKKKFF

SEQ ID NO: 228141 - protein, 55 aa, Zea mays
  unsure (1)..(55): unsure at all Xaa locations
  Clone ID: MRT4577_139659C.1.pep
MVECEDNWNCQLXNIIFNGNDGKVSHLEHVFIMGSMVRFMIIPDMLKNAPKFKLL

SEQ ID NO: 228142 - protein, 424 aa, Zea mays
  unsure (1)..(424): unsure at all Xaa locations
  Clone ID: MRT4577_13965C.1.pep
MAQLRAAADEQQEAAMHGVASGDGNESNKKARAGLCGLLRERKVVDLARAKRRLVEVPYTATLAHTANALLAARVSAVAVAAPPGHWIGAGGSMILESDPATGAVRKHYIGMVNMLDILAHIAEASDDDEAADLDRRMAVPVSSVIGHSLEGLTLWTLHPSTSVVDCMETFSKGVHRALVPLESSADNVVALELVESAPGYRMLTQMDVVRFLRAHGAELRGVLLRTVRELGAVNDTVFAVSGVTKVIDVIKAMRAASLTAVPVVDAVGSGTETLQYGSGQRAVETFSATDLRDCPVARLQAWLGISVMEFKRKXLSTAPAPGLWSPAPTPRTLAPLSPGTPTPPRLPPPLTKSRASSRSRXVTCSQESTLGEAIEAATSRHVHRLWVVDEEGLLRGVVSLTDILRAVREAALGEDLELHSIVP

SEQ ID NO: 228143 - protein, 108 aa, Zea mays
  unsure (1)..(108): unsure at all Xaa locations
  Clone ID: MRT4577_139660C.1.pep
FLFFYIFFLFFKPGFFSCXPTYPLLTHKPLKKIQIPPLNPKHHIISRNLAAFNLLPFIMHPYPTPIVYPSTFLHPLFNLTYFNLQLYIYIPHFKFLRINIYIQLSFVP

SEQ ID NO: 228144 - protein, 62 aa, Zea mays
  Clone ID: MRT4577_139661C.1.pep
PPLPSGSTTSPMESVDNPRRRGKLLWTQRQRVPRSQGVEALHAPDPSRTSPHKNFHCSVTLR

SEQ ID NO: 228145 - protein, 225 aa, Zea mays
  Clone ID: MRT4577_139662C.1.pep
MPPLRPPPPRLLLNNVSCMRNAQTVLRDINLSVHDGTALVLTGANGSGKTTLLRMLAGFSRPSAGEILWNGHDITSPGVFQQYKLQLNWMSLKDAVKEKLTVLENVQWFELLEGKDGSRSGPAIELMGLGRLMNEKARMLSMGQRKRLQLARLLAIDRPIWLLDEPSVALDAEGTRLLEYIIAEHRKKGGIVFVATHLPIQIEDSMSLRLPQRFPRRKTLVDLVR

SEQ ID NO: 228146 - protein, 146 aa, Zea mays
  unsure (1)..(146): unsure at all Xaa locations
  Clone ID: MRT4577_139663C.1.pep
GKQPEEKEGKKASFAKRKKKVEILLAKGGGGWPPVASSIERRTTASRGCWERAEDGSXLLELCFPSDSTVSSCAASPHSPATGLKVQAQVRCESLCWKPAAVTELKTVSAEQQQWAPTGRADRRGERRVLALSNAANKGEALKAKL

SEQ ID NO: 228147 - protein, 72 aa, Zea mays
  Clone ID: MRT4577_139664C.1.pep
KPKGLPEPPHRVKLDRHSVPSFSKDKTRASKRKATYCSLKATHTCVPTPPNKASIWCLPIGKMGEKKLKPSN

SEQ ID NO: 228148 - protein, 125 aa, Zea mays
  unsure (1)..(125): unsure at all Xaa locations
  Clone ID: MRT4577_139665C.1.pep
SSVRRPRPGRARGDVYSFGIVLLELLTGRRPGIFAGEVDDIVKWVMRXLQRGAVAXLLDPGLLELDPESSDWEEFLLGIKVGLLCTASDPLDRPAMGDVVFMLEGCRVGPDIPSSADPTSQPSPA

SEQ ID NO: 228149 - protein, 51 aa, Zea mays
  Clone ID: MRT4577_139666C.1.pep
VRRRQLCNFLRSSRIRVHPTSATSTMPPKFEPNEISVVYLMCIVGDVGATS

SEQ ID NO: 228150 - protein, 90 aa, Zea mays
  Clone ID: MRT4577_139667C.1.pep
RHHPLRAAMACSFSADITVSSAPTPAARPLAAATHSVRIARSAVATNARPHRLAASKFAQAIILVARASLLDDLLLVGNKVPDFEVDAVF

SEQ ID NO: 228151 - protein, 1026 aa, Zea mays
  unsure (1)..(1026): unsure at all Xaa locations
  Clone ID: MRT4577_139668C.1.pep
MEASAGLVAGSHNRNELVVIRRDGEXGAQAHGPAERXQVCQICGDDVGRNPDGEPFVACNECAFPICRDCYEYERREGTQNCPQCKTRFKRLKGCARVPGDEEEDGVDDLENEFNWTDKHDSQYLAESMLHAHMSYGRGADLDGVPQPFQPIPNVPLLTNGQMVDDIPPDQHALVPSFVGGGGXKRIHPLPYADPNLPVQPRSMDPSKDLAAYGYGSVAWKERMESWKQKQERMHQTRNDGGGDDGDDADLPLMDEARQPLSRKIPLPSSQINPYRMIIIIRLVVLCFFFHYRVMHPVPDAFALWLISVICEIWFAMSWILDQFPKWFPIERETYLDRLSLRFDKEGHPSQLAPVDFFVSTVDPTKEPPLVTANTVLSILSVDYPVEKVSCYVSDDGAAMLTFEALSETSEFAKKWVPFSKKFNIEPRAPEWYFQQKIDYLKDKVAASFVRERRAMKREYEEFKVRINALVAKAQKVPEEGWTMQDGSLWPGNNVRDHPGMIQVFLGQSGGRDVEGNELPRLVYVSREKRPGYNHHKKAGAMNALVRVSAVLSNAPYLLNLDCDHYINNSKAIKEAMCFMMDPLVGKKVCYVQFPQRFDGIDRHDRYANRNVVFFDINMKGLDGIQGPIYVGTGCVFRRQALYGYDAPKTKKPPSRTCNCWPKWCLSCCCSRNKNKKKTTKPKTEKKKRLFFKKAENPSPAYALGEIEEGAPGADIEKAGIVNQQKLEKKFGQSSVFVASTLLENGGTLKSASPASLLKEAIHVISCGYEDKTDWGKEIGWIYGSITEDILTGFKMHCHGWRAIYCIPKRPAFKGSAPLNLSDRLHQVLRWALGSVEIFFSKHCPLWYGYGGGLKFLERFSYINSIVYPWTSIPLLAYCTLPAICLLTGKFITPELTNVASIWFMALFICISVTGILEMRWSGVAIDDWWRNEQFWVIGGVSAHLFAVFQGLLKVLAGIDTSFTVTSKGGDDEEFSELYTFKWTTLLIPPTTLLLLNFIGVVAGISNAINNGYESWGPLFGKLFFA

SEQ ID NO: 228152 - protein, 46 aa, Zea mays
  unsure (1)..(46): unsure at all Xaa locations
  Clone ID: MRT4577_139669C.1.pep
SCRQRVAPRSLRLSLFLHQGLSEPCGFXFFFAHPSSFGLRVILFNT

SEQ ID NO: 228153 - protein, 68 aa, Zea mays
  Clone ID: MRT4577_13966C.1.pep
VSCGRHRQAHSGAFHVVVFSLGVMKLACYWVFQGVWFGQRSGRLVVYVGDFASRWLARAVSGLRLCSW

SEQ ID NO: 228154 - protein, 96 aa, Zea mays
  Clone ID: MRT4577_139670C.1.pep
APGLDCPPSPTGVESAGLPPPVTRRSAGKIDTEGKFLGNGGGVILEGLAGLSPKKSTFSGPPRGGFLAVRTLSRIWPFGGQQVVRKIFVPAGGWAP

SEQ ID NO: 228155 - protein, 166 aa, Zea mays
  unsure (1)..(166): unsure at all Xaa locations
  Clone ID: MRT4577_139671C.1.pep
ARCRKLKLEEAPVPDRWRPRLSSPAGSCWAAPRPLGFFFFKAPGGGRAFFFFFSTHRAGGELXXADKQTXXNXXXXXXGDNGYNLFFLLDPEVSLGXIXPKRXXKEKVINFFFFLLGSVGSNVKKIFFFFFXNPPDTALAWFKTGVFPPWGTYNYWXADSYTLXLF

SEQ ID NO: 228156 - protein, 101 aa, Zea mays
  Clone ID: MRT4577_139672C.1.pep
KCKTETESNIGIKLKLKTVVTELSSSRSAELKAEVQMTNSSRLRVTDVGLLDWRVETPARRRWATDAAREDDWSLEQPPVTGPLDADDWSWTAPESNRVYA

SEQ ID NO: 228157 - protein, 115 aa, Zea mays
  unsure (1)..(115): unsure at all Xaa locations
  Clone ID: MRT4577_139673C.1.pep
SLLFSPIPLYTQHNHYQYEYLKTHHPHQHYHHNIHQLLSYSTLITIXPTPITHLYNYLIHSHLTSFYFFYHNININHLYPSITKFFLSLLFIKPHPHFSHNIYKLIHTLILIQIL

SEQ ID NO: 228158 - protein, 85 aa, Zea mays
  Clone ID: MRT4577_139674C.1.pep
RTRQSQTATAKMYPRRPVSESRSLVTARWTKLTVSPTSNPSSQRPPTPRWGSVQRQHPLGYRGAVRGGCGCSYDQKGAASAEPCK

SEQ ID NO: 228159 - protein, 644 aa, Zea mays
  unsure (1)..(644): unsure at all Xaa locations
  Clone ID: MRT4577_139675C.1.pep
PLVPLEGVRKSLSAIQKQTNVFGKAPSQLDSYLQSKVDESEEPPQSLEIQESSQGIALTPLSDKDGGNTEDNNRTEKINASEAGGSKRWSRVPSLPSYVPFGELYLLGDSSVNTLSDSEYSKMTSXVQVQSVISELRERLQSHSMKSYRARFQKIYDSCMCANAPIFTGIEQLPQFSHLQELIGLTATDSVELGDIVDPPVIRTATSILPLGWTGLPGGKNAEPLKVDIIGHDLQMCTLFQAQINGNWYSTVIETLPSATSYSPNGELQPTLQKMRILVGQPLKQPPNYISGDFMIPVMAGADSTPDFGFESFFEDKDCCKGLSGFLIYGTSDFVTVRKEVHVRTRRVRLLGLEGAGKTSLLKAMLGQVKERNSTVLECIHVDLHGKGISNGLCYIDSTTVNLQELPLEVGRFKEELLLGLHDISRKTDLVIAVHNLAHRIPQYQRSNTSQPQPALSLLLDEAKALSIPWILAITNKFSVSAHEQNRLISSAMEAYQVSPEMTKVVNSSPFLMPSARNSLQQIRSATGKLKKDPANRSGYLPVNFGLSSFQRKDIVMHVEGVSSLRQLVHQVVLNNEETAFEELARERLLKELASEKAASLQVKQKPRKRDGSVTAAAVGASLGAGLGIVMAVIMGAASALRKP

SEQ ID NO: 228160 - protein, 61 aa, Zea mays
  Clone ID: MRT4577_139676C.1.pep
RPVCPATTVEADAGRATIRRALASLKRRHLAEERAHRHDIEALTRPLYCHALECKENAQKH

SEQ ID NO: 228161 - protein, 68 aa, Zea mays
  Clone ID: MRT4577_139677C.1.pep
YEGGRSPHCSDNGLPRRCKASSGRTLNTSQIPLVSSHPHVYDPCDDSFTLVRFTTLKQGTTLDTTSQG

SEQ ID NO: 228162 - protein, 40 aa, Zea mays
  unsure (1)..(40): unsure at all Xaa locations
  Clone ID: MRT4577_139678C.1.pep
ERGKRXKAXKXGTARXXPXTTXENDGQEREXRXXKGPXGP

SEQ ID NO: 228163 - protein, 141 aa, Zea mays
  unsure (1)..(141): unsure at all Xaa locations
  Clone ID: MRT4577_139679C.1.pep
RRRSVACSGGSPAPGPSPTAPKPRRGAMTAXKVGRWSLGEAWGEAWMRWERDTPRREEERDGGHVVEEQSVGEWIAWLRRWAQRFLKDGVGLPWRAERGDDLPWRADRAWGSRSRGRAGGHGDFGWRRRPSMASRGGDGEK

SEQ ID NO: 228164 - protein, 62 aa, Zea mays
  Clone ID: MRT4577_13967C.1.pep
REKLMLGARCEKLLASSMSSSTKQNPEVKNRLTTIQAATAGAPRSGASCPEPTFPQEEARPL

SEQ ID NO: 228165 - protein, 72 aa, Zea mays
  Clone ID: MRT4577_139680C.1.pep
FVFFKRHQSRWQYFFHYCVAPSRPNSHNVCFFFSKGTPSDTHSSSSIRFGPGRHLDTKLFLFFFKRDRNGYG

SEQ ID NO: 228166 - protein, 82 aa, Zea mays
  Clone ID: MRT4577_139681C.1.pep
QIDKNSQVNPSFSLNRAPLEHNRRPDEVNTTGPGRTDPPAICKCFAKFWPESQIFTRSVHGGTPTGWMLLSRPITPKRTKGA

SEQ ID NO: 228167 - protein, 53 aa, Zea mays
  Clone ID: MRT4577_139682C.1.pep
MIHLGSELISHSQIHKARKNADMRTWTLAHLITPILQTKALTSARLAEFKRHI

SEQ ID NO: 228168 - protein, 131 aa, Zea mays
  Clone ID: MRT4577_139683C.1.pep
MVTPAVKHTIVKKRTAHFKRHQSNRFMRVGESWRKPKGIDCNMRRRFKGQAPMPKIGYGSAKKTRNLLPNGFRKFTVSNVRELNLLLMHNRSYAAEIAHNVSSKKRVALLERAAQLNVKVINAGARLRSQE

SEQ ID NO: 228169 - protein, 46 aa, Zea mays
  Clone ID: MRT4577_139684C.1.pep
IAYASALDAPTWAPLVLRDLSVLGGPVSQYHTVHRVLCCNCLIMLS

SEQ ID NO: 228170 - protein, 407 aa, Zea mays
  unsure (1)..(407): unsure at all Xaa locations
  Clone ID: MRT4577_139685C.1.pep
MWRATRRSPPFLRWLSSDAASSKAPRQRVAALWGNGDYGRLGLGSLESRWSPTVCPFFLARAADPPASLACGGAHTLFLTQNGRVFATGLNDFGQLGIGTSVTHMLEPVEISGFHERVVEVSAGNHHSCAVTADGKLFVWGRNSGGQLGLGKGAGKVVSTPTKVDCLTDLRVKTVALGSEHSIAVTEEGEVLSWGAAGSGRLGHGRQSSILGFSLTSTEYTPRLIKNFDGIKIKKIAAGMLHSACIDEKXGFGRPNEEFRPNIVEEIPFSEEVACGGYHTCVVTDSGDLYSWGSNENGCLGLGGTDMVRSPEILKSSLFKLPVSKVSCGWKHTAVVSGDDIYTWGWGGANGTFFEEGHSSGGQLGHGNDVDYFEPMMVPFGTNARAVHVSCGFNHTGAIYECSEDFD

SEQ ID NO: 228171 - protein, 99 aa, Zea mays
  Clone ID: MRT4577_139686C.1.pep
RGGNNWRDEQSSSRRPPGQHWGGLQYFWWGWHAHHADEMVVMQKEILVDLMTGPEHVRPVLTGTGGCTIGYESYMWTQCSHKRFTDLSTALITLADPRG

SEQ ID NO: 228172 - protein, 63 aa, Zea mays
  Clone ID: MRT4577_139687C.1.pep
LVKLNFSYLIAKYLSNRLAIQLANLSGSLRPYLGQLQLQKIWWSWWSRSLSAPENRGAGAVSL

SEQ ID NO: 228173 - protein, 99 aa, Zea mays
  Clone ID: MRT4577_139688C.1.pep
MVCSPEILKSSLFKLPVSKVSCGWKHTAVISGDDIYTWGWGGANGTFFEEGHSSGGQLGHGNDVDYFEPMMVPFGKNARAVHVSCGFNHTGAIYEYSED

SEQ ID NO: 228174 - protein, 96 aa, Zea mays
  Clone ID: MRT4577_139689C.1.pep
ISPDLPSKGKGAKEQKMHRSFRLLIAKLANWVVKSLSAVQFFVLESKKIIKSHLSLSLHLPNSVQIRLPNPTNELSIISRFCRQLPNARRWNRHQR

SEQ ID NO: 228175 - protein, 37 aa, Zea mays
  Clone ID: MRT4577_13968C.1.pep
TSTILHPGSKGTTRLGAKKLALVALLTLCASATSATH

SEQ ID NO: 228176 - protein, 531 aa, Zea mays
  unsure (1)..(531): unsure at all Xaa locations
  Clone ID: MRT4577_139690C.1.pep
MWRATRRSPPFLRWLSSDAASSKAPRQRVAALWGNGDYGRLGLGSLESRWSPTVCPFFLARAADPPASLACGGAHTLFLTQNGRVFATGLNDFGQLGIGTSVTHMLEPVEISGFHERVVEVSAGNHHSCAVTADGKLFVWGRNSGGQLGLGKGKVVSTPTKVDCLTDLRVKTVALGSEHSIAVTEEGEVLSWGAAGSGRLGHGRQSSILGFSLTSTYDNIYFIKIFSKKHMLELNCVCTLCQFIVIYLEDIRKFLTIXMKIFLLLAGMPKYTRXMCMILRGNRPSKYLKQLKLVANELVWHIWVLFVLSXTEQGCSIMWYCNXVLGKMLNGIDIEVRKFEGFCLSXEYTPRLIKNFDGIKIKKIAAGMLHSACIDEKDRTXEFRPNIVEEIPFSEEVACGGYHTCVVTDSGDLYSWGSNENGCLGLGGTDMVRSPEILKSSLFKLPVSKVSCGWKHTAVVSGDDIYTWGWGGANGTFFEEGHSSGGQLGHGNDVDYFEPMMVPFGTNARAVHVSCGFNHTGAIYECSEDFD

SEQ ID NO: 228177 - protein, 93 aa, Zea mays
  Clone ID: MRT4577_139691C.1.pep
SRPAGTIFSCNSITLSSQSHRQRRITYLCPSSTESRTTASPKDELYVHMTNGHRRRAYMAAFYFNAAWCLSAAPSAHCSSNARRTYTTLHCIH

SEQ ID NO: 228178 - protein, 201 aa, Zea mays
  unsure (1)..(201): unsure at all Xaa locations
  Clone ID: MRT4577_139692C.1.pep
MILWSVVMASCMLSDTTXVPLQXGGXGLPEFSGLTSSGALSMRRNXTSDDFMCDVSFRTHASPTNGGPRRATTEANLKVAINGFRRIGRNFLRGWHGRGDASPLNVIDINETGGVQYACPLLKDDSTXGILDVDGKPVGDNDVSVDGEGIXIVSDGNPGXLWRGELELDLSIHGTGGCHDRQVAGKDIYASAQKALITGPG

SEQ ID NO: 228179 - protein, 91 aa, Zea mays
  unsure (1)..(91): unsure at all Xaa locations
  Clone ID: MRT4577_139693C.1.pep
HSVHIRSPFCPFGVSVIESVFNTLYAFAVWQHWLDCCFLQCVGFWPPKWGVPCPVLRPMQVTSQRRESLQISKLKHKCLFDGWPAXXNNXX

SEQ ID NO: 228180 - protein, 77 aa, Zea mays
  Clone ID: MRT4577_139694C.1.pep
CMFLWDLMPLYSLYKRTWSACRFQRTLGVRASGRYMPTACPPLGLSCLRNRLRTLRIMPVQVFLVYMPHKTCSRVLY

SEQ ID NO: 228181 - protein, 119 aa, Zea mays
  unsure (1)..(119): unsure at all Xaa locations
  Clone ID: MRT4577_139695C.1.pep
RRNSFSEYQIPLRPSLLLRNQNGSLFESFPFTSILEYWATSYLTTLFFLRFHSSIYSXFRFFXLFXXIPTPLEYRRLHSHTHTFLLWYESILSPNFSPRTLPQRKTPRIRTPXHCTELM

SEQ ID NO: 228182 - protein, 126 aa, Zea mays
  unsure (1)..(126): unsure at all Xaa locations
  Clone ID: MRT4577_139696C.1.pep
GRYMPRSGLKRHLPGYSFARYAFDFYRMTPRSPARAVPAXMQLXNSSAVCGSNTRLFGLDGNSGYPPEDTNRLPAVDVSRNMLSPFGVQHHHLSPARLFTVPIICTTIQCLSEVFPRLFCLNMYVF

SEQ ID NO: 228183 - protein, 123 aa, Zea mays
  Clone ID: MRT4577_139697C.1.pep
MAERKRGAGTRKDEVVTREYTINLHKRLHGCTFKKKAPNAIKEIRKFAQKAMGTTDVRIDVKLNKHIWSSGIRSVPRRVRVRIARKRNDEEDAKEELYSLVTVAEIPPEGLKGLGTKVVEDED

SEQ ID NO: 228184 - protein, 63 aa, Zea mays
  Clone ID: MRT4577_139698C.1.pep
PSQRVDQPCPGVFHQVAPPKKGPNLGCFPGPPFSGAWILGPLPQKNVFGRGNFFLGFFPRLDF

SEQ ID NO: 228185 - protein, 113 aa, Zea mays
  Clone ID: MRT4577_139699C.1.pep
KNPRPPHGPPKPHGKIPRQRRKRGGPPKEGRPPGPRLREGFQGGPPPPGPPPGLPLKSGPPLPGLSPPNPPARFKGGRHLLCPSFHRVMKRPNNLGRPGRSRGPCIHSPFFSG

SEQ ID NO: 228186 - protein, 193 aa, Zea mays
  Clone ID: MRT4577_13969C.1.pep
ASRYGNAFSYCIPATASDSGFFTLGVPRRASSRHVVTPMVRFRQAATFYGVLLRTITVGGQRLGVAPAVFAAGSVLDSRTAITRLPPTAYQALRSAFRSSMTMYRSAPPKGYLDTCYDFTGVVNIRLPKISLVFDRNAVLPLDPSGILFNDCLAFTSNADDRMPGVLGSVQQQTIEVLYDVGGGAVGFRQGAC

SEQ ID NO: 228187 - protein, 286 aa, Zea mays
  Clone ID: MRT4577_1396C.1.pep
AHLLCRGLPTLSPSAGALPNPQTRRAPAPPGWPHAHLPTVLAQLGSLLAGALPCHGRAPPQLASLKHATLLPARPWKPRRRPCLNPLCRVPLSDFRASAMVYAGMGLRYMYPCITMGRSLGPLVPSVSSTAHTLSSPSRPNSPPAVLACTAHGRYAFAPAQSIWSSGTTNGGKKQPTSLAQIRGALDVRPSHPRSRSGFPLFASVSMSKRTRLGQQWFRVPSIHAAHFPQICRAQDRFGMRVIFLALLTAMVAAPHHCRAPHCRASLQACFRTRLSPSLASACLPC

SEQ ID NO: 228188 - protein, 123 aa, Zea mays
  Clone ID: MRT4577_139700C.1.pep
MAEKKRGAGTRKDEVVTREYTINLHKRLHGCTFKKKAPNAIKEIRKFAQKAMGTTDVRIDVKLNKHIWSSGIRSVPRRVRVRIARNRNDEEDAKEELYSLVTVAEIPPEGLKGLGTKVVEDED

SEQ ID NO: 228189 - protein, 74 aa, Zea mays
  Clone ID: MRT4577_139701C.1.pep
LLSSTCNARYSITLFSIRVKCSSVEGVLEEMLSHFFGEGRQSESGGGDVGRLRAGRDGERSLLRLGQVAATVFF

SEQ ID NO: 228190 - protein, 97 aa, Zea mays
  Clone ID: MRT4577_139702C.1.pep
KPVKTSQSFLQGLMSHCSGNILNLNTRVPSFLIGKGPQKLGGPKKKTGGSQETIIRIVHPGLNHHTGSKLEIQAGGVNQVFHWGDHSSFLQSDSPTK

SEQ ID NO: 228191 - protein, 80 aa, Zea mays
  unsure (1)..(80): unsure at all Xaa locations
  Clone ID: MRT4577_139703C.1.pep
KRVFPEKKYGXVIEXSFRATQKRPPMEKKRFKWKAQGFPASKKGVRGGPVDPSKPVVELGPMETPPFIVTFVPPSAKPQL

SEQ ID NO: 228192 - protein, 90 aa, Zea mays
  Clone ID: MRT4577_139704C.1.pep
QRRPQPVDRSRQIPAYQQQQQQAHPFDDMARLGAGAVGALLVAVAAVSAFLAVPASAKSGELSTIGLLAAKGSRGTGTQKCTGALCYCYV

SEQ ID NO: 228193 - protein, 123 aa, Zea mays
  Clone ID: MRT4577_139705C.1.pep
IFGREMLTREGMSAVSQATKLSVVRAKPFQCLRRPARGSREGWGAPAKNVQFPEGLRCEVRGSHGTDVLRRRWPFVRHGWGQEDSHGFGLISRHFVCSTRCMFVCSSLSLFFCFLQLGYASSS

SEQ ID NO: 228194 - protein, 567 aa, Zea mays
  Clone ID: MRT4577_139706C.1.pep
MAEEVQAPLSATMAEEVQAPLSATMAKEAQSPPSATIAEATAPPQLVLFNSFTKREEPFQPRVEGKVGMYVCGVTPYDFSHIGHARAYVAFDVLYRYLKFLGYEVEYVRNFTDIDDKIIKRANERGETVTSLSSQFINEFLLDMTELQCLPPTCEPRVTEHIEHIIKLITQIMDNGKAYAIEGDVYFSVESFPEYLSLSGRKFDQNQAGARVAFDTRKRNPADFALWKAAKEGEPFWDSPWGRGRPGWHIECSAMSAHYLGHVFDIHGGGKDLIFPHHENELAQSRAAYPESEVKCWMHNGFVNKDDKKMAKSDNNFFTIRDITALYHPMALRFFLMRTHYRSDVNHSDQALEIASDRVYYIFQTLYDCEEVLATYREEGISLPVPFEEQNLIDKHHSEFLKYMSNDLKTTDVLDRCFMELLKAINSSLNDLKKLQQKIEQQKKKQQQQKKQQQKQQQLQKQPEHYIQALIALEIELKNKLSILGLMPSSSLAEVLKQLKDKSLKRAGLTEEQLQEQIEQRNVARKNKQFEISDGIRKNLATKGIALMDEPSGTVWRPCEPERSEES

SEQ ID NO: 228195 - protein, 191 aa, Zea mays
  unsure (1)..(191): unsure at all Xaa locations
  Clone ID: MRT4577_139707C.1.pep
MWICLLVLLLVRFRRLTVHFMLADVHELPSERTADTHHPNTDDARICDLIYNTELFHANMAFTGLWDKSQACEKTNHYLNMLTANTISYHXTCLLCYLCILFISTYTYSLVDMALNRLTSSKQIFLDTFNYXKNSLYTCMIFKSKLYFIXPNKVSSAFSGTHLRCSSCHNSSHSLEKITLXGESYHKVCFE

SEQ ID NO: 228196 - protein, 164 aa, Zea mays
  Clone ID: MRT4577_139708C.1.pep
LPRPLLVPPARRGASPSQLLLGFPFPAEIPPSALSRPTARLPDAHVSAPARLDLAVAYPLRRAPGPGLSPPTPHGAPALLLQRRVPPHLLCSLQLAEAPSRAPLQPWPRLSCSGSLASAAAPSSVVPGSSLVLAWLRPLALDHGGRPWPCSVFLPAALDALEPA

SEQ ID NO: 228197 - protein, 561 aa, Zea mays
  Clone ID: MRT4577_139709C.1.pep
MAEEVQAPLSATMAKEAQSPPSATIAEATAPPQLLLFNSFTKREEPFQPRVEGKVGMYVCGVTPYDFSHIGHARAYVAFDVLYRYLKFLGYEVEYVRNFTDIDDKIIKRANERGETVTSLSSQFINEFLLDMTELQCLPPTCEPRVTEHIEHIIKLITQIMENGKAYAIEGDVYFSVESFPEYLSLSGRKFDQNQAGARVAFDTRKRNPADFALWKAAKEGEPFWDSPWGRGRPGWHIECSAMSAHYLGHVFDIHGGGKDLIFPHHENELAQSRAAYPESEVKCWMHNGFVNKDDKKMAKSDNNFFTIRDITALYHPLALRFFLMRTHYRSDVNHSDQALEIASDRVYYIYQTLYDCEEVLATYREEGTSLPVPSEEQNLIGKHHSEFLKHMSNDLKTTDVLDRCFMELLKAINSSLNDLKKLQQKIEQQKKKQQQQKKQQQQKQQQQKQQQLQKQPEDYIQALIALETELKNKLSILGLMPSSSLAEVLKQLKDKSLKRAGLTEEQLQEQIEQRNVARKNKQFEISDGIRKNLATKGIALMDEPSGTVWRPCEPERSEES

SEQ ID NO: 228198 - protein, 59 aa, Zea mays
  Clone ID: MRT4577_13970C.1.pep
TKHGASRLCFSHTTLLSLIIVYVNQPSINTHTDTSINTPLNVAANSDLKYMSLARSSLN

SEQ ID NO: 228199 - protein, 218 aa, Zea mays
  unsure (1)..(218): unsure at all Xaa locations
  Clone ID: MRT4577_139710C.1.pep
MTEAQSPLSATMAKEAQSSPSATVAQATALPQLVLFNSLTKREEPFQPRVEGKVGMYVCGVTPYDFSHIGHARAYVAFDVLYRYLKFLGYEVEYVRNFTDIDDKIIKRANERGETVTSLSSRFINEFLLDMTELQCLPPTCEPRVTEHIEHIIELITKIMENDKAYAMEXDVYFSVESFPEYLSLSGRKFDQNQAAXRVAFDTRKRNPADFALWKAAR

SEQ ID NO: 228200 - protein, 62 aa, Zea mays
  Clone ID: MRT4577_139711C.1.pep
LLMQGLETLDLKKGPPFLFFIFFVYFLYFFFFFLFFYFYFFVFVLFLFFFKQMETHIIYFME

SEQ ID NO: 228201 - protein, 234 aa, Zea mays
  Clone ID: MRT4577_139712C.1.pep
MAGGVYDVNLVMRLVRVFVASEEDTDAPSERMWKVGRLVDKYLDEISQDQGLKVSKFLAVAESLPDSARDCYDSVYRVLDIYLEMAYPKTALLTRMANMLIQMSLQNPLTLAHPELNCQTFDRHLSNILMPQLLLKLKSHWMEDYTNPDLFVNQIIIEGIMQLEKDLKEQVVHGAVENTLGAGSINLLLENPIPKMDGNDMHVGMAKSKWGAYSAVLGCVWCLLCADEIWSKPS

SEQ ID NO: 228202 - protein, 121 aa, Zea mays
  Clone ID: MRT4577_139713C.1.pep
QQQKKQQQKQQQLQKQPEHYIQALIALEIELKNKLSILGLMPSSSLAEVLKQLKDKALKRAGLTEEKLQEQIEQRNVARKNKQFEISDGIRKNLATKGIALMDEPSGTVWRPCEPEGSEES

SEQ ID NO: 228203 - protein, 88 aa, Zea mays
  unsure (1)..(88): unsure at all Xaa locations
  Clone ID: MRT4577_139714C.1.pep
RECISSXIGQAGIRAANEXWELCCCDHGIQADGCMTGDNTIXGRDDASNTLFRETGGGNHDPRAAFGELETNAIHKWRTATYRLLFLP

SEQ ID NO: 228204 - protein, 267 aa, Zea mays
  unsure (1)..(267): unsure at all Xaa locations
  Clone ID: MRT4577_139715C.1.pep
SDRVRYPSILGVREHIFTGSVSXSLAWFXLSNQETSFVTIGQRVLANPLRVRFHXYGHSXDLFDRLFHXTRGGVSKXQKLSISVRTIFAGFNSTXLREGNVTHHKYMQVGKGRDVGLNQISLFEAKIANGNGEQTLSRDIYRLGHRFDFFRMLSCCYTTIGFYFSTMXILVNLXFELFLSVHWLTFLAFSDLFRCFTLTPLLFLHALXTVWTVYVFLYGRLYLVLSGLDEALALERRFVHNAPLQVALAXSKSFVQLXGFLMALPMM

SEQ ID NO: 228205 - protein, 278 aa, Zea mays
  Clone ID: MRT4577_139716C.1.pep
HRGAVTYIFITVSMWFMVGTWLFAPFLFNPSGFEWQKIVDDWTDWHKWISNRGGIGVAPEKSWESWWEKEQEPLRYSGKRGTVVEILLALRFFIYQYGLVYHLNITKKITKDNQSVLVYCFSWVVIFVILLVMKTVSVGRRRFSAEFQLVFRLIKGLIFITFTAIVVILIAIPGMTVLDIFVCILAFMPTGWGLLLIAQAIRPVIHKTGLWGSIKALARGYEILMGLLLFTPIAFLAWFPFVSEFQTRMLFNQAFSRGLQISRILGGHKKDRGTRNKE

SEQ ID NO: 228206 - protein, 313 aa, Zea mays
  Clone ID: MRT4577_139717C.1.pep
GSVYLGTLPDGSRIAVKKLEGIGQGKKEFRSEVTIIGSIHHIHLVKLRGFCAEGAHRLLAYEYMAKGSLDRWIFQRNEDSSLLDWDTRFSIALGTAKGLAYLHHDCESKIIHCDIKPENVLLDDNFLAKVSDFGLAKLMTREQSHVFTTLKGTRGYLAPEWITNYAISEKCDVYSYGMVLLEIISGRKSYDPVEGSEKAHFPSYAFKKLEEGDLRDISDSKLKYKGQDSRIEMAIKVALWCIQEDFYQRPSMSKVVQMLEGVCDVPQPPMSSHIGYRLYANAFKSSSEEGTSSGMSDYNSDALLSAVRLSGPR

SEQ ID NO: 228207 - protein, 117 aa, Zea mays
  Clone ID: MRT4577_139719C.1.pep
NLGKGGKPGKFSPPFFSPGPKKKTPKKTKRAKPPQKNHQNQAHLYLTPPFFGPKKIHQNKGPIKPTRYPASFFPGRPGNPETLFPLWKGGPRASLRPRKDWGGKIQLGEEIIEKFFS

SEQ ID NO: 228208 - protein, 100 aa, Zea mays
  Clone ID: MRT4577_13971C.1.pep
KKNRVKRKTPLKQPQNFGIPYFPGSFGGAMRAGVQSLWDPHKISPQGANSKNNPPLVNTPAPEGNFPLPPPGLAGGLPSRSQKAQPPARNLGGVKRETPQ

SEQ ID NO: 228209 - protein, 49 aa, Zea mays
  Clone ID: MRT4577_139720C.1.pep
NRIGIEVSNHGVGFTIQEYRLSLHHLACKWETEVATIGLVSLRRELIVG

SEQ ID NO: 228210 - protein, 53 aa, Zea mays
  Clone ID: MRT4577_139721C.1.pep
PSFKPGSNVLIFHWVMLGTCFLSLGVLCYPARPSILAYILTQHKRSQWSRTYS

SEQ ID NO: 228211 - protein, 52 aa, Zea mays
  Clone ID: MRT4577_139722C.1.pep
EKNIVGVRVVLLWRLLFWPGPSRVDSTLFCLLANLIVYGIILLGSDEKNHTP

SEQ ID NO: 228212 - protein, 202 aa, Zea mays
  unsure (1)..(202): unsure at all Xaa locations
  Clone ID: MRT4577_139723C.1.pep
TNGLKQPLQAAXCSTYISSTTADSIYGGNXKQMRRHSCGDRGDXKLVPTDIPXSMRVYGERSMHHDKIPXLPPKTDPSVTMMTVEEKTXATINDVGGSKDQTKKVXKKAELPMFDSQKSDKHANDPPKRVLYXRPQATGKTLLARDTXERTEAPIIXRVTGSERDQKYSXESAAMATELSQMASTKKASIAFFYEGYAIAGA

SEQ ID NO: 228213 - protein, 117 aa, Zea mays
  unsure (1)..(117): unsure at all Xaa locations
  Clone ID: MRT4577_139724C.1.pep
LEPAVKNSQKTREPRRPFRPRLRFRPPLTRALFPPDIPTPEIAPADKAIRQREDSRVARLIGRLFTQKEMRILTEGLQTDGKTTILYEVKLSENVPTIPSMGFTDKTVEXWNISFTV

SEQ ID NO: 228214 - protein, 165 aa, Zea mays
  unsure (1)..(165): unsure at all Xaa locations
  Clone ID: MRT4577_139725C.1.pep
RGLGLSSFRCSWAPGSPRARALLPSGPRGRHTRPSLSSPASNRSSPPPPSSHRSWPWRSTSTTANLPQLDAARWPRTPPAHRRVPRPRAIRCVPSSARLFLSSPASSPSHCDALFPALLPAXRWSGSXRGGAAPFTPSASVAGARRVDDGVAGEKSPLSTAEQQQ

SEQ ID NO: 228215 - protein, 285 aa, Zea mays
  unsure (1)..(285): unsure at all Xaa locations
  Clone ID: MRT4577_139726C.1.pep
MSSSRGLGGLRKKLAGRFKSKRPRGNDDDYVPTTDSEAQSSAGGTESMDAEDFPHVHPDYPIDIQGWTFPKRRFSMTEYCSRRTVNQYALPSDTNIQFFHTQLQFDVFWGTLVDTNFHKHQVIDWSFLLSQSVMEGLIPKFEACGLYQFMGQRTDFNEMAVKQFLATSEIDIAEESITWMTGFKRYSASFADFAAANSLNYGTISAGVDLYTEDNFEDFVQFYEPARLGIPRRFGETAGLRHHPAVINKIARVTILPXSGDKSKIRXKVWNIIHHIMNXRSHEHC

SEQ ID NO: 228216 - protein, 65 aa, Zea mays
  Clone ID: MRT4577_139727C.1.pep
FIPSPSAPADASFSSGRQRRGSTEPACHPPEARASRCCHCLRLPPLCRDRLLHPGHSRISQTKDP

SEQ ID NO: 228217 - protein, 189 aa, Zea mays
  Clone ID: MRT4577_139728C.1.pep
TLVAARVLGVAPGRSRTVRLVDADRPGLWRGPSGPLARTVRTLAEHYSSIPFINGDWFQLFIYGCLSHCCSGLGGLRKKLAGRFKSKRPRGNDDDYVPTTDSEAQSSAGGTESMDAEDFPHVHPDYPIDIQGWTFPKRRFSMTEYCSRRTVNQYALPSDTNIQFFHTQLQFDVFWGTLVDTNFHKQRYC

SEQ ID NO: 228218 - protein, 82 aa, Zea mays
  Clone ID: MRT4577_139729C.1.pep
LEAGRDIIFEYTTPSVPETMLTCLRRHAIFHLAPTASLNNYSAVSRGGQVCTTPHASSGEPLLPSCAEGSRRYARHDVSFFC

SEQ ID NO: 228219 - protein, 36 aa, Zea mays
  Clone ID: MRT4577_13972C.1.pep
DLIPSIYHKACVLEFLRLPVNQDCLRYLIKKKKNRS

SEQ ID NO: 228220 - protein, 204 aa, Zea mays
  Clone ID: MRT4577_139730C.1.pep
MAAITSKDKEEAAAAPQPKQGESKVFSRLFTRESSAAAPSLRVYYGVASAGSVPFLWESQPGTPKHDDATAKVATLQPPLTPPPSSYYTARQQRRQTSSSSSSATAATGKNKKLSKHYYTSVFSAILPKMILHRRSSRPASSRSASSRSSSSSSSWSAALASSAASSLSFRSARSPAACSSSSRRSRVFAFSAACFDGSEEEEE

SEQ ID NO: 228221 - protein, 238 aa, Zea mays
  unsure (1)..(238): unsure at all Xaa locations
  Clone ID: MRT4577_139731C.1.pep
MAAAGGGVGDGELRLLGKSSSPWVFRVRVALGLRGLSYEYIEEDLGNKSELLLRSNPVHKKVPVLIHGRPVCESLVILQYVDEIWRGTGPPLLPSDPYDRATARFWAAYVDDKFFPAFSALFRSRTDGQRAEALQNALLVAETLERAFTECSRGKAFFGGDAVGLVDVTLGSHPIWIKAVDQTAGTNLPDGARFPDLAAXAERFMALGAVNEVVPDAGKLLEQYRASRAKWTASADSS

SEQ ID NO: 228222 - protein, 165 aa, Zea mays
  Clone ID: MRT4577_139732C.1.pep
MAAEKRTIGMGMDYSPSSKAAARWAVDNLIKAGDRLVLVHVLPKGVDSSHKELWKTTGSPLIPLSEFMEMNLQARYGLNPDKETLEILRAVSKSKQVEVLAKVYWGDAREKLCEAVDDLKVDSFVLGCRGLGPLKRALLGSVSNYVVNNATCPVTVVRGPTGLSA

SEQ ID NO: 228223 - protein, 254 aa, Zea mays
  Clone ID: MRT4577_139733C.1.pep
RGRPGKCFKAIEKNGGCNLVRCKCGQCMCWLCGGGTGQDHTWNSITGHSCNRYEEEICVETVHTGRQQMQRYKHYHDRFKIHGDSSYGVEKQKLGAAIEERVRLLESDRERPLAIRDGDWLTRAHRRLLVSRQVLSRSYVFAYYMFGGHELRTRPAERANLGVARNLFEHQQEQLERHVEHLSRSLAESADLAGAPDAEIVKQKQTAITLTKTVERLCGEMYKCIQDELLTLLVEPMSIAAYRPDGPDRAKPAI

SEQ ID NO: 228224 - protein, 124 aa, Zea mays
  unsure (1)..(124): unsure at all Xaa locations
  Clone ID: MRT4577_139734C.1.pep
RILPPRSKPPLVGPFHPSKEAFGPPNPKDFKGCPPGGFLRTLGGINRGFSCPPRDFXKVVRPAKTGVGPNXNSLPRVFPPPPXVGLKLIKEGSPKRNSVPLERAVPGGPSRGFESKLLPLFGQE

SEQ ID NO: 228225 - protein, 450 aa, Zea mays
  unsure (1)..(450): unsure at all Xaa locations
  Clone ID: MRT4577_139735C.1.pep
MAGLAGVVCLLLAASSVTAAAAAAAEEESLSSYIVHVAAEHAPRSTRPRLLSRSYTSFLHDSLPAHLLRPAPLVFYGYAHAATGFAARLTERQAAHLASQHSVLAVVPDETLQPHTTLTPSFLGLSPSSGLLPRSNGAADVVIGVIDSGIYPMDRPSFAADASLPPPPSKFRGTCVSTPSFNGSAYCNNKLVGARFFHQGMQQRMGVAAFSEAGESLSPLDTQGHGSHTASTAAGSGRGGRFLLXYAKGXAIGVAPGARIAAYKACWEHGCSDSDILMAFEAAITDGVDVISVSLGASKPKPRKFYKDGIAVGSFKAVRNGITVSVSSGNFGPGEFTTVNVAPWFLTVGASTINRRFPASVVLGNGETFTGTSIYAGAPLGKAKIPLVYGKDVGSQVCEAGKLNASLVAGKIVVCDPGVNGRAAKGETVKQAGGAGAILVSDESFGEQAL

SEQ ID NO: 228226 - protein, 79 aa, Zea mays
  unsure (1)..(79): unsure at all Xaa locations
  Clone ID: MRT4577_139736C.1.pep
KHDLITVTQTLTPDEVLFRAGPSEMTAYSHYCGSLLFEHXPEYSHQTSLLRDLFIRXGYQLDHVCDCTIMKYPQLRDEF

SEQ ID NO: 228227 - protein, 161 aa, Zea mays
  unsure (1)..(161): unsure at all Xaa locations
  Clone ID: MRT4577_139737C.1.pep
TGATQPWDYMQVXDTLVKDMDRTQAFAKALHTWARWVDANLVQTDTKVFFQGISPSHYRGQDWGASPKKTCMGETRPLNATGPYPGGPIPQQAILRGVLAAMAKPVYLLDFTYLSQLRKDAHPTKYDGGIFGGDCTHWCVAGLPDTWNVLFYAALTGQGHN

SEQ ID NO: 228228 - protein, 179 aa, Zea mays
  unsure (1)..(179): unsure at all Xaa locations
  Clone ID: MRT4577_139738C.1.pep
MDILEKIRGGGDEPAAMETPRRTESWVEISESDSRICSFDAGGGGVVSVKLIQDNRMVHDKIVDSFLNKYFPSXYPYRVNDGYLTYTKFRALQHFSRAMLHVLSTQSLLFAARLRTTPAQATAASWIVEDGMQXAXKVICSDMRARMDSKAESWRIFADDHYDFGTALDFISPLCTQVF

SEQ ID NO: 228229 - protein, 50 aa, Zea mays
  Clone ID: MRT4577_139739C.1.pep
WKDTPTQASCLVLPNIYFYDKQILQQNWLLAAKLKGSSRTRGRTRGRTRG

SEQ ID NO: 228230 - protein, 39 aa, Zea mays
  Clone ID: MRT4577_13973C.1.pep
FLFLNIFKASPRLTLYSLKGKKGVSRLTSPYRLNNYRSG

SEQ ID NO: 228231 - protein, 44 aa, Zea mays
  Clone ID: MRT4577_139740C.1.pep
VGGWVWRQFVTIISPGCGFVRFVPLLVSRGLVLSAVFVQFVRIS

SEQ ID NO: 228232 - protein, 197 aa, Zea mays
  Clone ID: MRT4577_139741C.1.pep
MSWSIQKENPLLRLTVEAHASASIGVIILLECLTNAKQLLDVLSIADNHLGSSVAAALARFLGSHVRALNATDIGLGTVGFQILEETLPTEVALSHINISKNRGGIRAAYFVSRLICRAPDLVSVNAAGNLLPPESLEVICNSLKQGTCNLERVDLTGNMHLSSNIFPAFLEFKKHGKPILVVPPNLSTSAPYDDDP

SEQ ID NO: 228233 - protein, 73 aa, Zea mays
  Clone ID: MRT4577_139742C.1.pep
LFFFKDLYPNQQDFCDSQGVNAGQELMLKCHYSARLELGGNKFLCSTSYRGGGGINLIPNSLEMISEWATKDD

SEQ ID NO: 228234 - protein, 104 aa, Zea mays
  Clone ID: MRT4577_139743C.1.pep
AGADAAPNQMLLLHSSVPPPFLAILVCCSPRSRPAFAATAPLMQLSAAPRWPTHRHQALVQLCTTAVGPHPLASSNLPSLSSWGSLALFPIMQPRLYSAELKRA

SEQ ID NO: 228235 - protein, 79 aa, Zea mays
  Clone ID: MRT4577_139744C.1.pep
SSCISFTISIQMYLVRLLKFPVQICMYLLQRNYFHLKMNLPPTPKRKRGLTADFFDEWHIPIVLPLNLSLVQCARGRCE

SEQ ID NO: 228236 - protein, 127 aa, Zea mays
  Clone ID: MRT4577_139745C.1.pep
TKVDSVLNDNPGEHPKEIYAMKAAVNIPSQDFSCGAISSEDPTQGPADHVNSKDAPIVNCGKVHVSRESNDDEQSNGLQSRDTSIINSNVSRRPSGQFNSQNEVLEESVSLNEGSQDNQSFSGAPKK

SEQ ID NO: 228237 - protein, 55 aa, Zea mays
  Clone ID: MRT4577_139746C.1.pep
TSPTIPFIIPINNYKIFFLITNFSKTNIPYHITSPLYPIIYNNQTFKSYLIHLLT

SEQ ID NO: 228238 - protein, 66 aa, Zea mays
  Clone ID: MRT4577_139747C.1.pep
TTGDGVHHLLLPALPDVLDNTWNAPLYAYVDLKTQTVLGSYKNIFSWSLIDPIHEILSLGATLLTL

SEQ ID NO: 228239 - protein, 174 aa, Zea mays
  unsure (1)..(174): unsure at all Xaa locations
  Clone ID: MRT4577_139748C.1.pep
LEAGRAGTPRSRSAAPACALQQFGCSRSLVPCARRPAACPADLFGCFLLECLSHPAARLLLLVSLSRACTAACPALHLISTAIKVFYEPPAELLKDSEVLGXSMFVALGACAFVLIPVXYFLFGLAAGKLLERVRSLDFQNDQSLICSLSLMWISLPDSRIYILMIFLLMIARL

SEQ ID NO: 228240 - protein, 63 aa, Zea mays
  Clone ID: MRT4577_139749C.1.pep
LGHHGSDEAVRGGDVVGRADVRNGDVREASSDYAIVPIYLLTAESLSPELLVGYPIGQVPALQ

SEQ ID NO: 228241 - protein, 56 aa, Zea mays
  Clone ID: MRT4577_13974C.1.pep
NIKKMQVWISEIKIPFRFLTIRLVCIPKLSFLYASLTFDQSHIKPSCTTEKNSSLT

SEQ ID NO: 228242 - protein, 155 aa, Zea mays
  unsure (1)..(155): unsure at all Xaa locations
  Clone ID: MRT4577_139750C.1.pep
RTLEEHHFRXKADAARGTTYPQNDGTARNNGFLDINNRPCQAVEGSTSPTATHGXHAKCHFALIDIFHGKERENIVPSSHXNCDXVPHANSVTEYQMIDIXSDDGFATLLTSNVNAKGDLKLPTDETLAGQINERSDQXYDLVATAQTALIDEQI

SEQ ID NO: 228243 - protein, 500 aa, Zea mays
  Clone ID: MRT4577_139751C.1.pep
MSWLARSLATSLNIPDNSGADDDPDASHTPSPSARIPPSPPLPTHPPHSGAAEGVKEDLTELSKTLTRQFWGVANFLAPPPGETLPSPSHSPQSAGGQSADARTPPEIAGIRNDFAEIGGRFRSGISRISGHKAVSGFSKMASSFFAPDDGEEDEWEEERRRQIRHEMGEEAVWHEEAEGDEEWHQWEERVRLRVEDGDTRHELEMERARDEEDDELEEQRARHGDGGESGEQTTRPGEDGELEELRIRHEEEVEEEWDVIGITEEVLAFATNIARHPETWLDFPLLPDDDESDGPFSYFDMSDAQQEHSLAIEHLAPRLAALRIELCPIHMSQECFWKIYFVLLHPRLNKHDAELLSTPQIVEARAMLMQRLQYQSKLETEHLGHHKDDLGVQLRGDTLKDATEAFPFTRWEAASVMPITEIEIEKHPIQVTEVAVVDKSVIEEELPKGHAETSNVLQEAFDDDIDDWFEEADLAGHPTIHIGDEEDVSFSDLEEDDVK

SEQ ID NO: 228244 - protein, 37 aa, Zea mays
  Clone ID: MRT4577_139752C.1.pep
LPPPPPPPPPPPPPPPPPPPPLSTGKKITKKKYPGGF

SEQ ID NO: 228245 - protein, 175 aa, Zea mays
  unsure (1)..(175): unsure at all Xaa locations
  Clone ID: MRT4577_139753C.1.pep
MALAGGSCTWCGWGGIAIYWGQSCYXGTLAQTCAMRNYTIINXAXLPTFRKGQTPPLNLAGHCHPWSGDSTVLCSDVXKGTSACXVKVLLCIGRGVGSYWLXFRADPLSVAVYXLWDNYISGRSESMPLGDAVLDGVDLYIESGGVMYCDDLSRFLKSYYLCGRMRRPVYLSAAP

SEQ ID NO: 228246 - protein, 129 aa, Zea mays
  Clone ID: MRT4577_139754C.1.pep
GGVFPPFRFGDPELFWDTGGAPRGFFSDQAFCSFKINPAGGPRWGRPACFLGPAHPFFLGAHWAFVSLRGMCLPPHGGRFFGFFVCGSPLPPGAVGFPFAVVGSFRNLLGVFFLELGGVSKIKNGHHGV

SEQ ID NO: 228247 - protein, 74 aa, Zea mays
  Clone ID: MRT4577_139755C.1.pep
GYEASTRGTSDRLPDEMNGMSIRDEKEVEAVVDNGHGMDAGHTIVTNAGGRNPQERQTISEVVDRIAGQGSLGE

SEQ ID NO: 228248 - protein, 216 aa, Zea mays
  Clone ID: MRT4577_139756C.1.pep
MSKVSASAVRDIVNAIQAGAQEKQRKFVQTVELQIGLKNYDPQRDKRFSGTTKLPHVARPRMTVCVLGDAFHCDQAKGAGMEFQSVDDLKKLNKNKKLIKKLAKKYDAFLASEALIKQIPRLLGPGLHKVGKFPTPVSHNDSLTDKANEIRATIKFQLKKVLCLGVAVGHLDMTEDQLVANIMLSVNFLVSLLKKNWQNVKSLYLKSTMGKPHRLF

SEQ ID NO: 228249 - protein, 217 aa, Zea mays
  unsure (1)..(217): unsure at all Xaa locations
  Clone ID: MRT4577_139757C.1.pep
MSKVSASAVREIVNQIQTASAEKQRKFTETVELQIGLKNYDPQRDKRFSGTIKLPNVARPRMTVCVLGDAFHCDQAKGAGMEFQSVDDLKKLNKNKKLIKKLAKKYDAFLASEALIKQIPRLLGPGLHKVGKFPTPVSHNDSLTDKANELRATIKFQLKKVLCLGVAVGHVGMTEDQLIANIMLSVNFLVXSLLKKHWQNVKSLYLKSSMGKPHRLF

SEQ ID NO: 228250 - protein, 286 aa, Zea mays
  Clone ID: MRT4577_139758C.1.pep
GSPPTTDIEQSVFVSDYAQMDRILREERNYILGMVKKIKAAGCNVLLIQKSILRDAVTDLSLHYLAKAKILVVKDVERDEMEFITKTLNCLPIANIEHFRTDKLGYADVVEEVSVGEGKVVKITGIRDMGRTATVVVRGSNQLVIDEAERSLHDALCVIRCLVNKRFLIAGGGAPEIEMSMQLAAWAKELRGMESYCIKEFADALEVIPYTLAENAGLNPISIVTELRNRHARGEKNTGINVRKGQITNILEENVVQPLLVSTSAITLACECVRMILKIDDIVTVR

SEQ ID NO: 228251 - protein, 535 aa, Zea mays
  Clone ID: MRT4577_139759C.1.pep
MAAAVAAPAPSRKTETYTDTKRRDDVRGANIAAARAVADAVRTSLGPRGMDKMIASGDQAQEVIITNDGATILSRMALLQPAARMLAELSRSQDAAAGDGTTTVVVLAGSLLRRAQSLLSAGAHPTAAADALHRLATRAVEILHGMAIPIELSDRESLVKSASTALNSKVVSQYSTLLSPLAVDAALSVVDPAHPDLLDLRDIRIVKKLGGTVDDTELVPGLIFDKKASHAAGGPTRVENAKIAVIQFQISPPKTDIEQSVIVSDYAQMDRILREERNYILGMVKKIKAAGCNVLLIQKSILRDAVTDLSLHYLAKAKILVVKDVERDEMEFITKTLNCLPIANIEHFRTDKFGYADVVEEVSVGEGKVVKITGIKDMGRTATVLVRGSNQLVIDEAERSLHDALCVIRCLVSKRFLIAGGGAPEIEMSMQLAAWAKELRGMESYCIKEFAEALEVIPYTLAENAGLNPISIVTELRNRHARGEKNTGINVRKGQITNILEENVVQPLLVSTSAITLACECVRMILKIDDIVTVR

SEQ ID NO: 228252 - protein, 37 aa, Zea mays
  Clone ID: MRT4577_13975C.1.pep
PPTTHTQPPPYPPPPPPPPPPNYSTSPPPLSPPAPRI

SEQ ID NO: 228253 - protein, 202 aa, Zea mays
  unsure (1)..(202): unsure at all Xaa locations
  Clone ID: MRT4577_139760C.1.pep
XGVPAYRCVQHEGEFVLTFPRAYHAGFNCGFNCAEAVNVAPIDWVPIGQDAVELYRKQARKITVSHDKLLLGAAREAIRAHWDILFLKKNTADNLRWKSMCGLDSTICKSLKARIDLELAQRQNICSPSQSRKMDAEFDSTDRECALCCYDLHLSASGCPCCPGKYTCLVHAKQLCSCDWDKRFFLFRYDINELNMFGLSRR

SEQ ID NO: 228254 - protein, 105 aa, Zea mays
  Clone ID: MRT4577_139761C.1.pep
VERAELLAHDRVRRLLAFAQRPAEVVLDLLRIRRLAAVRRSHLLCLRYLCGRWPPLARGLAPRARQMIAMLRLFIIFASWLLLTRPICYSDDCTREHVHVSAHAS

SEQ ID NO: 228255 - protein, 196 aa, Zea mays
  unsure (1)..(196): unsure at all Xaa locations
  Clone ID: MRT4577_139762C.1.pep
VLLLRECSQFVCQRLAGDRRHPPLLILDASPRAALVRISSISDTGAASSLLITTHATDKXTTHRKASTATDSHLKDWEVYDSVFALQICHTXDQDRVQQISVPSDRGRVSXGLIYHADAMKPFDDLLQCREEHLTQARPSHPDHYPFALVRHRAADHGAHTGETSRNLDQACRALPGNLSHYETPAIAGAPVEHDL

SEQ ID NO: 228256 - protein, 90 aa, Zea mays
  Clone ID: MRT4577_139763C.1.pep
HGILSWLHGCKHAQDFGLCPGLSLAGIRTHRWKAFMPEPVIRKTVSPSAMRSVRSPFSVHDSLHGLDMPPDEFVFRAPGVHHGPRGPLFF

SEQ ID NO: 228257 - protein, 84 aa, Zea mays
  unsure (1)..(84): unsure at all Xaa locations
  Clone ID: MRT4577_139764C.1.pep
VLPPFLTPPXFXPXPLSSTNPYSXLSLPPSLPHEFLYLNTSRTLKSLPCSTIMSPKTYYSQRKTPPKYTFDLTHSNPIGWLMQK

SEQ ID NO: 228258 - protein, 89 aa, Zea mays
  Clone ID: MRT4577_139765C.1.pep
RPEAHRLIFLGRINAATLSILWCLDRQELFDHDTFTKDDSMGNAEFSILNFVEIAKQDLSDVPDGTVMKTIHTEKGSCLATDSHITCKD

SEQ ID NO: 228259 - protein, 49 aa, Zea mays
  Clone ID: MRT4577_139766C.1.pep
HFFKGCYSPKIKWPFLDTKSAQGTLRKITQLSPFFSNRLKKPSYFFFLG

SEQ ID NO: 228260 - protein, 104 aa, Zea mays
  Clone ID: MRT4577_139767C.1.pep
MAALCSSMWSSAERENLVLHFSRSCISPTKCDLINIFSQYGHVNEVKTDVANSASSAQVIFKRRMDAEAAFAGAGKISTLGPALVSFRITDFPASASGNKAHVA

SEQ ID NO: 228261 - protein, 95 aa, Zea mays
  Clone ID: MRT4577_139768C.1.pep
MLKFIYRDLKPQNLLVDKEKGILKIADLGLGRAFTVPMKSYTHEIVTLWYRAPEVLLGATHYSTGVDMWSVGCIFAELARRQALFPGASVLPQLP

SEQ ID NO: 228262 - protein, 84 aa, Zea mays
  Clone ID: MRT4577_13976C.1.pep
AAGGPQDHLPPSSNRRRPGNAVSFFTCSDDTGDINIRTKVRQDFLLPSQVTKRASPRRLSPTQPTSTKKKLMNTLLCLDDAEKP

SEQ ID NO: 228263 - protein, 63 aa, Zea mays
  unsure (1)..(63): unsure at all Xaa locations
  Clone ID: MRT4577_139770C.1.pep
RLLSPYXSQAKDVLHMHACVCVYVYAYVVTAYANVHQIKELAHAVTSASTKTSERHGGNLNRT

SEQ ID NO: 228264 - protein, 61 aa, Zea mays
  unsure (1)..(61): unsure at all Xaa locations
  Clone ID: MRT4577_139771C.1.pep
MEHYTMGHSNGWNSHPKNYGPGSRVWRFCSNPHGLIRKYGLMCXGQSLRRNAKDIGFIKNR

SEQ ID NO: 228265 - protein, 78 aa, Zea mays
  unsure (1)..(78): unsure at all Xaa locations
  Clone ID: MRT4577_139772C.1.pep
APTTHHEAXRATARAKAAXEAAXGTGRRGHDNKQGXQARQKPERTEKKGRRPPKAARPTXKQRDKGESNGRQPAPTKP

SEQ ID NO: 228266 - protein, 127 aa, Zea mays
  unsure (1)..(127): unsure at all Xaa locations
  Clone ID: MRT4577_139773C.1.pep
KYFNNNCVRITTANRKRFTDSQQTNDLXSLLKLYMIKRGLSLPVVTFLIKTIEIAPVAAQAPLLSWQHSDVNGDWPTKFHPNKDLEKLYNGTWFTEKEKLFHLQIMEICGLLRTKIKRDVCGIVIDP

SEQ ID NO: 228267 - protein, 52 aa, Zea mays
  Clone ID: MRT4577_139774C.1.pep
RRFIFAFMINLDGVLILQQNFYDGPQGETLSTQTGTKPAKEHYQSLLDTEKM

SEQ ID NO: 228268 - protein, 443 aa, Zea mays
  unsure (1)..(443): unsure at all Xaa locations
  Clone ID: MRT4577_139775C.1.pep
HCLQKNHPSAGVGSPADSSVPGXRKRASPEPGEVSGGRAMSRSSDSGKIGNDEKEDSEVDKDDYMDVDREHASDSGTENCMSDTDSDNEMCRPETPEPXEPPHRCINMLQGCRSVDXFERLNKINEGTYGVVYRARDKKTSEIVALKKVKMEREREGFPLTSLREINILLSFHNPSIVDVKEVVVGSSLDSIFMVMEYMEHDLKGVMETMKQPYTQSEVKCLMLQLLEGVKYLHDNWVLHRDLKTSNLLLNNRGELKICDFGLXAPELLLGTKEYSTAIDMWSVGCIMAELLAKEPLFNGKTEFEQLDKIFRTLGTPSEKIWPGYAKLPGVKVNFVKQPYNRLRDKFPAASFSGRPILSEAGFDLLNRLLTYDPDKRISADDALKHKWFSEVPLPKSKDFMPTFPALNELDRRSKRYLKSPDPLEEQRLKELQGNIGNRGLFG

SEQ ID NO: 228269 - protein, 136 aa, Zea mays
  Clone ID: MRT4577_139776C.1.pep
MKLTTILALAATALAGETINNEHLKTEVVTAVDCKRPSVAGDKIHVHYRGTLESDGSEFDASYNRGQPLSFKVGSGQVIKGWDQGLLDMCPGEKRKLTIQPEWAYGSRGAGPIPANSVLIFETELVSIDGVSKDEL

SEQ ID NO: 228270 - protein, 58 aa, Zea mays
  Clone ID: MRT4577_139777C.1.pep
FKFRICCGHISQLIHLLSCINVIDFLIKAKGFLPLRFFRLLQTKCKDQKKRHKEHEEN

SEQ ID NO: 228271 - protein, 90 aa, Zea mays
  Clone ID: MRT4577_139778C.1.pep
DSKGTPTSWQNNKKHTDAAVYQYKNARGGLSSYLTHPAGHGSERSTQVTLHGAPSQTYQLHGPGSGTIPAALHTPWPLCRTRMRIKKTVW

SEQ ID NO: 228272 - protein, 592 aa, Zea mays
  Clone ID: MRT4577_139779C.1.pep
ENGVRSSSREGDMVAGTGISSPIKKRKFSPIIWDRDSPKPPHSGAARDKKSVESVPSELPPPPPLPQDHIPLSLSVEKSPMDVETTVGTESAEQLPEHEVNKVIEQEEDYPSPTMRNISTSRWAGANDDEEGGAAPMKKRSVSPADSSVPGQWKRASPEPGEVSGGRAMSRSSDSGKIGNDEKEDSEVDKDDYMDVDREHASDSGTENCMSDTDSDNEMCRPETPEPERPPHRCINMLQGCRSVDEFERLNKINEGTYGVVYRARDKKTSEIVALKKVKMEREREGFPLTSLREINILLSFHHPSIVDVKEVVVGSSLDSIFMVMEYMEHDLKGVMETMKQPYTQSEVKCLMLQLLEGVKYLHDNWVLHRDLKTSNLLLNNRGELKICDFGLSRQYGSPLKPYTQLVVTLWYRAPELLLGTKEYSTAIDMWSVGCIMAELLAKEPLFNGKTEFEQLDKIFRTLGTPSEKIWPGYAKLPGVKVNFVKQPYNRLRDKFPAASFSGRPILSEAGFDLLNRLLTYDPDKRISADDALKHKWFSEVPLPKSKDFMPTFPALNELDRRTKRYLKSPDPLEEQRLKELQGNIGNRGLFG

SEQ ID NO: 228273 - protein, 71 aa, Zea mays
  Clone ID: MRT4577_13977C.1.pep
IALIGRLKLRPDKPRFYLQDLSRAEPERDASVGHVPVHDDASDGGGAHPARGRGGGLRSGGRGRGVLRRDD

SEQ ID NO: 228274 - protein, 135 aa, Zea mays
  Clone ID: MRT4577_139780C.1.pep
RAAKEGACTGQRTHNTSSSSMAGRAGSAHFFSPPQPPQNKRAALLLTDRSYFPSLSVSSFLLHLPHSYSAARENQPLASLLPLLFHVPSARSGGQRIAATALNCKARASGFSVVSMHSETGTADLAGSELIPSGG

SEQ ID NO: 228275 - protein, 119 aa, Zea mays
  Clone ID: MRT4577_139781C.1.pep
MRFTIIAASLVAAVAAQYPAASETCAAPVTVTVTKTLGHTPVAPSSGSAYYPTTVAVYPTSTPLVPEASTVISGAPPAVSGTAAPTGTGAPIPEFTGAASSIKVGSALAGLGAVAALLL

SEQ ID NO: 228276 - protein, 72 aa, Zea mays
  Clone ID: MRT4577_139782C.1.pep
PCRASSLLPSLMSMLFHLQSIFSTVAARGPTPHIGPVIPLWIKAPAPYLWCIAIAGFYIYSPPASSFVPYQQ

SEQ ID NO: 228277 - protein, 349 aa, Zea mays
  unsure (1)..(349): unsure at all Xaa locations
  Clone ID: MRT4577_139783C.1.pep
SDEFERLXQINEATYGVVYRARDKKTSEIVALKKVKMEREREGFPLTSLREINILLSFHHPSIVDVKEVVVGSSLDSIFMVMEYMEHDLKGVMETMKQPYTQSEVKCLMLQLLEGVKYLHDNWVLHRDLKTSNLLLNNRGELKICDFGLSRQYGSPLKPYTQLVVTLWYRAPELLLGTKEYSTAIDMWSVGCIMAELLAKEPLFNGKTEFEQLDKIFRTLGTPNEKIWPGYAKLPGVKVNFVKQPYNRLRDKFPAASFSGRPILSEAGFDLLNRLLTYDPDKRISADDALKHKWFSEVPLPKSKDFMPTFPALNELDRRSRRYLKSPDPLEEQRLKELQGNIGNHGLFG

SEQ ID NO: 228278 - protein, 76 aa, Zea mays
  unsure (1)..(76): unsure at all Xaa locations
  Clone ID: MRT4577_139784C.1.pep
CFVLNLNPTHWTLFTTYQSGIFYIXEVPKVKLVLTFTLFIAETNRFMFFCEQCYNCQLKISNNLYNKKKANSLQIT

SEQ ID NO: 228279 - protein, 102 aa, Zea mays
  Clone ID: MRT4577_139785C.1.pep
KPVAEHPLWSTMARAIPKNHVWCSGKFILLAINRFQVQVLLRGPTCCITFFSFFVLLQPYLIIILSSATAESKYSPPHKSGNFSVIECPVGGRIHFFRTGRM

SEQ ID NO: 228280 - protein, 64 aa, Zea mays
  unsure (1)..(64): unsure at all Xaa locations
  Clone ID: MRT4577_139786C.1.pep
RAAGLYSTFPYAXGQVVIYLTYSLSXNISYTIILYSIISYAXTKTKSFWYLPFSDYTMLYFSFY

SEQ ID NO: 228281 - protein, 72 aa, Zea mays
  Clone ID: MRT4577_139787C.1.pep
HPHGLSRESLHAHWGEESELISLPPQRLKPAPSGIREPPNQPRAHTTTNAAYVGERGTRADGSYGGGERHYT

SEQ ID NO: 228282 - protein, 160 aa, Zea mays
  unsure (1)..(160): unsure at all Xaa locations
  Clone ID: MRT4577_139788C.1.pep
RPSVRAVYRAVLSDNQVVIIRRAKRATFKRQNIXMEVKLLTKINHWSLVRFLGFIDEKDECIRITEYVPNGTLREHLHGDALICYNLRTSNILLTESYRAKVCCSELSKSGNIVLLKGTGGYIDPEYLETSELTAKSDVYSFGIILLEIISSHGPQELGC

SEQ ID NO: 228283 - protein, 109 aa, Zea mays
  Clone ID: MRT4577_139789C.1.pep
NRVLKGNHHKHPTSQARFAHPPQFFPPTQRGTMNPPAILNHHQHPPLTQQRGGTPPPFLTHPQLFPFHQPGGPKPGPPLQRQKLCPFTHPFLTTQPVFPPHPTPGGPPF

SEQ ID NO: 228284 - protein, 47 aa, Zea mays
  Clone ID: MRT4577_13978C.1.pep
IIKGESQKKRVSCQLKNPLITKKLCSNPPNYPSSSSITMASSATLLP

SEQ ID NO: 228285 - protein, 405 aa, Zea mays
  unsure (1)..(405): unsure at all Xaa locations
  Clone ID: MRT4577_139790C.1.pep
MSRELTTEDGALKAIGIDNSTIKHIPRFNTTSELSVDTISSSKVSTPSKEIPSTLRRPDKSKMPALIPDEGSLNLSLKQVQKVTHNFSPLFELGEGGTWAVYRAVLSDNQVVIIRRAKKGHVQEAKHLMEVKLLTKINHWSLVRFLGFIDEKDECIRITEYVPNGTLREHLHDQRKRILNFNQRIVIALDIAIALTYLHLCSGDALICYNLRTSNILLTESYRAKVCCSELSKSGNIVLLKGTGGYIDPEYLETSELTAKSDVYSFGIILLEIISSHGPQDWDVLMNHRQSSVVQWALEKFYDDLMNEILDYRMEDRVDGDVVRDLLSLALSCVVSRGADRPSIVVVGERLWKIXRSSKKRRGTARVPRKLGRIYRTRGNPEASQVCAQEKLGAFNNAAGLVCVC

SEQ ID NO: 228286 - protein, 301 aa, Zea mays
  unsure (1)..(301): unsure at all Xaa locations
  Clone ID: MRT4577_139791C.1.pep
MEKERKQGFFAALKEEVVRGLSPARTRGKSPAPRSASPARXADPAPAEGARGSAAAAAAAGEGAAXYLGEQLVARSGSLLRPGGEALAPLIEGPDAERLAAGDPDGEDSGRREGFGHWVRGHLTRAPSMAAAGGPDGSFRRSDLRLLLGVMGAPLAPIPSKPAEPLPLLSIKGTTIESSSAQYILHQYTAASGGYKLLQSVRNAYAMGKVRMVASEFETATRVVKNRGPSGXGVVDVEQXGFVLWQMAPDMWYVELXXGGSXVHAXSNXRLVXWXHTPXSXXXXXRGXFLPLXXXLQXXVP

SEQ ID NO: 228287 - protein, 54 aa, Zea mays
  Clone ID: MRT4577_139792C.1.pep
FYFFLFMGHGLPMTIRSFFFFFFYFFFTRTPGVPPIGLVNLLGGANYFRGVTNC

SEQ ID NO: 228288 - protein, 161 aa, Zea mays
  unsure (1)..(161): unsure at all Xaa locations
  Clone ID: MRT4577_139793C.1.pep
MREILPIQGGQCGNQIAXRFWXVVCDEHGIDPTGRYTDQFQPSLESVLYVYYNDXSCGRFVPRAVLMDLEPATLDSVRTGPYXQIFHPDNCVFGQSYAGSNXAKDHYTEGAELIDSALNVRRKETENCDCLQGFQVCHSIGEGTGSGTGSLMISAIARECP

SEQ ID NO: 228289 - protein, 175 aa, Zea mays
  Clone ID: MRT4577_139794C.1.pep
MSEGNVDSIQISVSNDERRNRADAEISEDEPRHTRMRSLKKKALHASTRLTHSLKKRGKRKVDCRVPRIAIEDVRDAEEEQAVNSFREVLFARGLLPVKHDNYHTMLRFLKARKFDFEKAAQMWADMLQWRKEFGTDTIFEDFEFHELEEVLQYYPHGYHGVDKEGRPVYIELLG

SEQ ID NO: 228290 - protein, 38 aa, Zea mays
  Clone ID: MRT4577_139795C.1.pep
EHIVFTYISTSSSPISVTTYIILTIYSTQYYLHSLSTS

SEQ ID NO: 228291 - protein, 59 aa, Zea mays
  Clone ID: MRT4577_139796C.1.pep
RTQSYKPINSNIKLPKSKSSYQNSTTSITYKTLLLHNLIAFHNILLYPTAVFSKTPFPT

SEQ ID NO: 228292 - protein, 65 aa, Zea mays
  unsure (1)..(65): unsure at all Xaa locations
  Clone ID: MRT4577_139797C.1.pep
FLFLGSXFIXXXTLLSDYFXXEVXXRAXXLMGCWWNTARFVLARWLXGGGGCCCLWVPAFCASCW

SEQ ID NO: 228293 - protein, 71 aa, Zea mays
  unsure (1)..(71): unsure at all Xaa locations
  Clone ID: MRT4577_139798C.1.pep
MASSVAAAASTFLXXRXADXAPXNGRXVXRXXFGLGCKANXXPKKVAKXSXSSXXPLLFPXAVAXDYLXXS

SEQ ID NO: 228294 - protein, 100 aa, Zea mays
  Clone ID: MRT4577_139799C.1.pep
KSLLLTRPSSTVPTKAGRPGAARRISATNASLEEAESGSISSPPSDGTPEEQVATKTRKWKLVINTGREGRSNKTKGNCVRRCLLPTAVPWLWVEVEASS

SEQ ID NO: 228295 - protein, 72 aa, Zea mays
  unsure (1)..(72): unsure at all Xaa locations
  Clone ID: MRT4577_13979C.1.pep
RPPXSSFFPXIDVAGAPYNWRKGAFYSVMTIATISPAAPIPSEPFSSLPLGRRHRPQPLLLNDFRRQLLNDS

SEQ ID NO: 228296 - protein, 76 aa, Zea mays
  Clone ID: MRT4577_1397C.1.pep
TMTLASETEVAEDEDDQTEEEEEEEDDQVLAAEDGGWLQRGEGELLDVDHRAEEFINMFYEQLRAQNFAAVFRYSP

SEQ ID NO: 228297 - protein, 67 aa, Zea mays
  Clone ID: MRT4577_139800C.1.pep
LLLCAFPYRAQAFPSSLQAVNRTGFSRHNQILNCAITSIPTLVTMMVNAFPSLWGVRHSSEPARLVP

SEQ ID NO: 228298 - protein, 96 aa, Zea mays
  unsure (1)..(96): unsure at all Xaa locations
  Clone ID: MRT4577_139801C.1.pep
CVRFXLQSTEQFCWPSCCKKCWKRVSSGLRKALWFRNISYTLKPVQNGFYPASTSLFLIFTVRSRISGRHPSATASCFRLMLLCAVTTCLPWACSF

SEQ ID NO: 228299 - protein, 61 aa, Zea mays
  Clone ID: MRT4577_139802C.1.pep
RSNVRAMIPSVSREPVNNHIGAPDCPVCTVQLPVRQPVVDSNEGLDQLREDICTPQCPEDY

SEQ ID NO: 228300 - protein, 607 aa, Zea mays
  unsure (1)..(607): unsure at all Xaa locations
  Clone ID: MRT4577_139803C.1.pep
MPLPAFLAAAARLAVLLAAAVTAANAASFARYRRRHLRRIPNPIDESADPVADFRALRPASAEDAAEDDSFFFGLATAPAHVEDRLEDAWLQFAVEHSCDDKEAMRDPTTADAVMASAAGDGGAQLASRRSSRGDDDRDGDGELRKPLKIAMEAMLRGFEMFAEGGESGSAAAAGDSCSHNVAAWHNVPCPQERLKFWSDPDTELKLAKETGISVFRMGIDWTRVMPKEPIEDLKSSVNFAALERYRWIVQRVRDYGMKVMLTLFHHSLPPWAGEYGGWRMEKTVKYFLDFVRLVVDRVSDLVDYWVVFNEPHVFVMLTYCAGAWPGGDPNAIEVATSALPTGVYNQALHWMAIAHAEAYDYIHSKGESKRKPVVGVAHHVSFTRPYGLFDVAAVTLANSLTLFPYIDSICDKLDFIGINYYGQEVISGPGLKLVDNDEYSESGRGVYPDGLFRILIRFNERYKSLNIPFVVTENGVSDETDLIRKPYILEHLLAIYAAILMGVPVLGYLFWTTSDNWEWADGYGPKFGLVAVDRANNLARKPRPSYYLFSRXVTTGENTRHDRLAAWRELQQAAFQKKTRPFFRAVDKHGRMYAGQLLMPRLPPLG

SEQ ID NO: 228301 - protein, 413 aa, Zea mays
  Clone ID: MRT4577_139804C.1.pep
EFLVFIPSIKCEHLPFLVPITNVTALFETPVELPKKLIIGPPSADRIQLPDGRHLAYEEQGVSANRARFSLIAPHSFLSSRLTGIPGISASLLEEFGVRLVTYDLPGFGESDPHVGRNLNSSALDMLYLANALNIPEKFWVVGYSGGGMHAWSALRYIPDRIAGAAMFAPMANPYDSKMTKDERRKTWDSWSTKRKLMHILARRFPSLLPFFYRQTFLSGKQGQLESWLSLSLGKKDKTLLEGPVFNAFWERNVAEAVRQGDARPFVEEAVLQVSDWGFSLSDIQMQKKEAGGFFELIKSLFNQAEREWVGFLGPIHIWQGMDDRVVSPAVAEFVRRVVPGATVHKLLDEGHFSYFCFCDECHRQIFSTLFGIPQGPINPAPPQPGEVVSELTEETTVPDNVTDQEQGKSGLP

SEQ ID NO: 228302 - protein, 67 aa, Zea mays
  unsure (1)..(67): unsure at all Xaa locations
  Clone ID: MRT4577_139805C.1.pep
RRRSNPASHNIQLMTIHKERKRLLMMVALASWSLSVSRGAKARLPGFEDQTXTAPXXLNSHGQSQCH

SEQ ID NO: 228303 - protein, 183 aa, Zea mays
  Clone ID: MRT4577_139806C.1.pep
CYGIIQDKTLLEGPVFNAFWERNVAESVRQGDARPFVEEAVLQVSDWGFSLSDIQMQKKEAGGFFELIKSLFNQAEREWVGFLGPIHIWQGMDDRVVSPAVAEFVRRVVPGATVHKLLDEGHFSYFCFCDECHRQIFSTLFGIPQGPINPAPPQPGEVVSELTEETTVPDNATDEEQGKSGLP

SEQ ID NO: 228304 - protein, 37 aa, Zea mays
  Clone ID: MRT4577_139807C.1.pep
SFQTISFIYCRAHKNPVDTMRVLLDGLLILHLVLCSF

SEQ ID NO: 228305 - protein, 55 aa, Zea mays
  Clone ID: MRT4577_139808C.1.pep
YTRIDTYFLFTNPSFELEISFHDDWFTFLGWKSPNSIFLKQITVCTMMLAPFDCS

SEQ ID NO: 228306 - protein, 117 aa, Zea mays
  unsure (1)..(117): unsure at all Xaa locations
  Clone ID: MRT4577_139809C.1.pep
KFQHLRNLGPWARETKTFPFQVEINQLPSLIINTFYSNEETFLREXITTSSNALNKIRSKRPTDKSKLEANPDIFLHPSPPTRQTYSLFIINRGIRMNMYDLVTNTDFTDKPRTWEP

SEQ ID NO: 228307 - protein, 95 aa, Zea mays
  Clone ID: MRT4577_13980C.1.pep
MARGPYPPPRWKRRRRRRCPRARRPQSTSSWRSLTTPPYRSCKEPPLAAAEGRRRLPWSVASPPQAYAQYYYSARADNDASAVAYALAHVMRTWA

SEQ ID NO: 228308 - protein, 59 aa, Zea mays
  Clone ID: MRT4577_139810C.1.pep
MECLLGLLKVLVVRGVNLAIWNRLTHSSDPYVFFGHGKHKGNSSLKYRTINPNWNKELT

SEQ ID NO: 228309 - protein, 66 aa, Zea mays
  Clone ID: MRT4577_139811C.1.pep
KHNDNAREYNTEFFITVHNGIHKLKVSNTSFIHILLTISLDKMVEQLFWLVAKASAAVLPSYLMRW

SEQ ID NO: 228310 - protein, 160 aa, Zea mays
  Clone ID: MRT4577_139812C.1.pep
RGPQLPAPRRALLAGEAVKTGGTTLLSSLHALVTTLRATVINKQGSDPTTVPRRQRSVEGRAPSGGPRPFRRHSDNIAKHIKEPIGHQQPPADVLGDLDDTLVPKSKRDKDDDQMMHTIDWLNKLCIHELTDYSLRCKLNPEACGHTGNRNDHRYPQITG

SEQ ID NO: 228311 - protein, 204 aa, Zea mays
  Clone ID: MRT4577_139813C.1.pep
PRREGLLSSVVGDIRCYSGSDPLRPWLRGMRRMERALPPATLREKLPRFLQKCAQEFQDNSRYRDDPRYLRVWIQLMDYVTDAKPLLKTMERNGIGLKRASFYMAYALYYEKHRRFNDAEKMYRLGIQNLAEPIGELHKAHEQFRFRMDSYKKKDKLQERMPRKVGSSATSMNQVKGESRHYKELKSNIKQTSESSSNPSLGPT

SEQ ID NO: 228312 - protein, 158 aa, Zea mays
  unsure (1)..(158): unsure at all Xaa locations
  Clone ID: MRT4577_139814C.1.pep
TPRTRDRTAPAPAAGTXXADAEEKAXXATHAARGGGRGXGGGXGXGXDXGTRPHTGRXGQPPRXGHSKAGADPRRRKXGXGAESAGGREPRRGGAXAGGKKAGGXREGRTTTTXRRXGTSRRRRGKPTRQAGHREEQXRRGKRRQEKEASRGGGEEGQ

SEQ ID NO: 228313 - protein, 66 aa, Zea mays
  unsure (1)..(66): unsure at all Xaa locations
  Clone ID: MRT4577_139815C.1.pep
TNTKVYCCFSIGGKVYNVTNFLDDHPGCDDVLLSSTVXDATDDFHHVXEPTXALAMLDEXFVGEIG

SEQ ID NO: 228314 - protein, 133 aa, Zea mays
  unsure (1)..(133): unsure at all Xaa locations
  Clone ID: MRT4577_139816C.1.pep
MSEAGEATTGGTTLPQAAADAPAAAPPDPAPKSPAASGAPQAPAPAALLAGSPGGDAAPGPAPASSAPAXGEDAEKKGLATKVLGTVKWFNVKDGYGCMNRNDTKEDVFVRQTAMKKNNPRKGLRSAGDGETV

SEQ ID NO: 228315 - protein, 112 aa, Zea mays
  Clone ID: MRT4577_139817C.1.pep
CLGWLGCSCLRLSCSPSWVGCRVVFVVPCLVWSGILWLLGVCLVIMRLPLCGLFLRWVLLWCACGSGCVALACLSAGLGCRSAGLLWWMSPLGWLSGAAAPPGLSGVCGPRG

SEQ ID NO: 228316 - protein, 61 aa, Zea mays
  Clone ID: MRT4577_139818C.1.pep
LEGDHSCTAAGRLLASKYQGLSGCQTGTNQNHTAGLVVLRLVKFLERHFATILVIGMFCFC

SEQ ID NO: 228317 - protein, 81 aa, Zea mays
  Clone ID: MRT4577_139819C.1.pep
CQMGILLTSQLRVCVNPKYSLGGGGNPSCRIRRRRDGCRAGASAEERDAPGAALEAQDKIEVKYNLERIYCSTRARGEGHS

SEQ ID NO: 228318 - protein, 404 aa, Zea mays
  unsure (1)..(404): unsure at all Xaa locations
  Clone ID: MRT4577_13981C.1.pep
MLLPGMLAAQFTALSLSQSPSPQSSLRLAIRPSLAARARFVAPRTAASAAAVSAKPAAVSSPLIEDRTVVRIGLPSKGRMAEQTLSLLKSCQLSVRQLNPRQYTADIPLIPNLEVWFQRPKDIVRKLQSGDLDLGVVGFDIVSEYGNGNEDLVVVHDALEFGHCRLSLAVPKEGIFENIHTMEDLLKMSEWTEERPLRVVTGFGYLGDKFLREKGFKHVRFLSADGALESYPPMGMADAIVDLVSSGTTLRENNLKEIDGGVVLEXSQATLVASRKSLHKRKGVLEVTHELLERLEAHLRATAELMVTANMRGNSAEEVAERVLSQTSIWGLQGPTVSPVYRRRDGKVDVEYYAINVVVPQKLLYKSIQQLRSIGGSGVLVTKLTYIFDEETPRWRNLLSELGL

SEQ ID NO: 228319 - protein, 109 aa, Zea mays
  unsure (1)..(109): unsure at all Xaa locations
  Clone ID: MRT4577_139820C.1.pep
MREWLVALXLQALAASATYTHTSGGCSXQPPPAVHLPPPVHLPPAVHLPPTVHLPPTVHLTSSVHLPPSVHVPSSVHVATAPCQYPTEPARSQPHPQPHPCPCQQTHAS

SEQ ID NO: 228320 - protein, 140 aa, Zea mays
  Clone ID: MRT4577_139821C.1.pep
FRPFPSGRRGSGSSPIFVRATLGPDAHALAAARLPRAWLTFSVPSGSFYHRSKQRAARRPCHMEVTATSCSTRPTTSTHAPMVYLFNMPQRAAANGADNVDNMFHRCMLDMINKNGMTDVGCKVGSRTIILAYEWLAIKR

SEQ ID NO: 228321 - protein, 142 aa, Zea mays
  unsure (1)..(142): unsure at all Xaa locations
  Clone ID: MRT4577_139822C.1.pep
TPKKRTFSKYSYRGSYLHALLEMTTNYLPTFFPGCARRTIQRRLKSESLATXRRLRIGGEKDAPADDKLYELETXHLRSMLIGTATRGXIDGVYDGKTFHRVXIYAEMIRPYLAELSISYKSVKHGRTGYGAIHSSRFIPLK

SEQ ID NO: 228322 - protein, 101 aa, Zea mays
  Clone ID: MRT4577_139823C.1.pep
AAASTQTANQLKDEAGSLRLLQASSGHVQPTVYFVHVKVTCDNSTAVLQDKNGCFFCLAAFLIVSHCCSISDLVMELLSDQDRGAPTFEHSLAYCHDVLMY

SEQ ID NO: 228323 - protein, 106 aa, Zea mays
  unsure (1)..(106): unsure at all Xaa locations
  Clone ID: MRT4577_139824C.1.pep
TRTHQGNGSNGTWSTTVWFQGPTCQIIHLQELTPTLDKMRWTLMQTENHSEAVGANRRAQIIEADNNTTWNRGMXLKKQDLVLEAKDVLKQGRPTEVEHLPGAYSN

SEQ ID NO: 228324 - protein, 109 aa, Zea mays
  Clone ID: MRT4577_139825C.1.pep
PPLLKKGFFSKLLCWGTPRFFPSPRFKTPPQKINFGSPKKKFKTSPPGVQNPEIRPRLLIFFLKNSPKKKKGPVLSFPPRRFLFPSGRKKIPLQVNPLNLDILFWRCRF

SEQ ID NO: 228325 - protein, 66 aa, Zea mays
  Clone ID: MRT4577_139826C.1.pep
RYLLPKHNGFMGRGVSFKEHVFLKIFASKTHKMIAILSSNFLRMWFMFKMSSCFCYSRSKLISRRL

SEQ ID NO: 228326 - protein, 87 aa, Zea mays
  unsure (1)..(87): unsure at all Xaa locations
  Clone ID: MRT4577_139827C.1.pep
MACTNNAMRALFLLVLLGMVHGEKEESKGIDAKAFGPGRSFDITKLCASGNGXTDSTNAVQDAWALACGRTAKQTMLIPKGELLVGQ

SEQ ID NO: 228327 - protein, 66 aa, Zea mays
  Clone ID: MRT4577_139828C.1.pep
QSQGRFILEFTAANTKHVGSRHSKGFLFLVSWQKDVTDLYRSFATNLVSIVGLGIWIHIVAVACEH

SEQ ID NO: 228328 - protein, 151 aa, Zea mays
  Clone ID: MRT4577_139829C.1.pep
KTTLAKRVFADQRVRDEFDLRVWVCVSQDVNEADLLWSVLVGAGGGHQFQQQHDATPDRSSLEPALQRAVSGKKVLLVLDDVWSDVAWKEVLQNAFRAGARGGSRVLVTTRKETVARQMKAVHIHRVEKLQPEDGWRLLKNQVVLGRNPTD

SEQ ID NO: 228329 - protein, 214 aa, Zea mays
  unsure (1)..(214): unsure at all Xaa locations
  Clone ID: MRT4577_13982C.1.pep
MGMADAIVDLVSSGTTLRENNLKEIDGGVVLESQXTFSNTHACVGHTLFSRQYFTVGGSFVKEKSLPLSCFLRYKILXATLVASRKSLHKRKGVLEVTHELLERLEAHLRATAELMVTANMRGNSAEEVAERVLSQTSIWGLQGPTVSPVYRRRDGKVDVEYYAINVVVPQKLLYKSIQQLRSIGGSGVLVTKLTYIFDEETPRWRNLLSELGL

SEQ ID NO: 228330 - protein, 138 aa, Zea mays
  unsure (1)..(138): unsure at all Xaa locations
  Clone ID: MRT4577_139830C.1.pep
SSATGAASTGSSSSAAAXGSAPAGSASVSAAGAAASSFTSPAAAGSGSASFGVSSSASVGDASGSAAAVGSVSAGAAGSSTLARAAGAASSGTSAGVAGVSPAGASSVATADGVWTSAVAMGHDQKADHYAAQWLGTS

SEQ ID NO: 228331 - protein, 98 aa, Zea mays
  Clone ID: MRT4577_139831C.1.pep
PTRPSIRAFNKSKIKRAHWTDHYDSGRCKNELDDYHDLPDISLPSDKQMKRNRHTSLLLSHYDDDPADVCTEKHSIYTDTERCFFPQPSDVPPIHERR

SEQ ID NO: 228332 - protein, 82 aa, Zea mays
  unsure (1)..(82): unsure at all Xaa locations
  Clone ID: MRT4577_139832C.1.pep
HTARLAQEVADIKKLIHICRRRDACSVAHLKTQKTSYIKFKVRCQENVYTLRLNDTDKASEAQVXLPPTLQLTEDLHRNKYA

SEQ ID NO: 228333 - protein, 117 aa, Zea mays
  Clone ID: MRT4577_139833C.1.pep
PKKEKTFGLSNFAIPNVSPPRPGRGERNFTLFPKRGPFYFRLPKSLSKANLNLGGLLKGPFRKNSCKPKESFSPHPIWFEFPLSLCKSLVFYSPGGTPDFFSVRSLFPPSPVVHRGT

SEQ ID NO: 228334 - protein, 80 aa, Zea mays
  Clone ID: MRT4577_139834C.1.pep
FYQNFPPTFSQWSPLGRAFGVGLFHFFSRGIGGGLFKGYFIWGNQGFSPGVFFRSPPGFPPHFALYKRPLVPGNPSRYTV

SEQ ID NO: 228335 - protein, 92 aa, Zea mays
  Clone ID: MRT4577_139835C.1.pep
KHLLALLSWPSFGAYTLITLKTKSPTTSLNKVILSPCLLHPPHYHTVLDAFTNQNPIFICNSPCVLKLKASIVDPPLLPSHPFIWSLGRIRY

SEQ ID NO: 228336 - protein, 48 aa, Zea mays
  Clone ID: MRT4577_139836C.1.pep
SMYAQNDIQGDRISQQAVKKERPITLAPYEIKDMMEWVIVCVDARVGR

SEQ ID NO: 228337 - protein, 80 aa, Zea mays
  Clone ID: MRT4577_139837C.1.pep
APGRQLATKAVRKSAPTTGGGKKPNRSRPGPGALPRIRRSQKSTGFLIRRLPFKGLVRKIAQDLKTDFRFQSHAGLAFPE

SEQ ID NO: 228338 - protein, 226 aa, Zea mays
  unsure (1)..(226): unsure at all Xaa locations
  Clone ID: MRT4577_139838C.1.pep
MMDLADSQQQRFIAGAALLVATVAFFRFLLRSRSGGKRLPPTIPGAPVVGGLVKFMRGPIPMIREQYARLGSVFTVPIISRKITFLVGPEVSAHFFKGNEAEMSQQEVYRFNVPTFGPGVVFDVDYSIRQEQFRFFTEALRANKLRSYVDQMVVEAEEYFSKWGESGTVDLKYELEHLIILTASRCLLGREVRERLFDDVSALFHDLTTXMQPISVLFPYXPIPAH

SEQ ID NO: 228339 - protein, 146 aa, Zea mays
  Clone ID: MRT4577_139839C.1.pep
LLDIPFCFKRVDAMLYRANFDGEINYLRKSFQTLEGACDDLKGSRLFLKLLEAVLQAGNRMNVGTNRGQARAFKLDTLLKLADVKGADGKTTLLHFVVQEIIRSEEDARTTSERAAEDEARKIARDETFRSKQGLKVVSGLSGELG

SEQ ID NO: 228340 - protein, 75 aa, Zea mays
  Clone ID: MRT4577_13983C.1.pep
WELYCLEHEICTDVRVSGDNTAAHNDDAYSTFFRHSADGKYSPRAIFIKLYPTVLDEVRNWTHTRSGISCCSTFF

SEQ ID NO: 228341 - protein, 490 aa, Zea mays
  Clone ID: MRT4577_139840C.1.pep
MMDLADSQQQRLIAGAALLVATVAFLRLLLSSRSGGKRLPPTIPGAPVVGGLVKFMRGPIPMIREQYARLGSVFTVPIISRKITFLVGPEVSAHFFKGNEAEMSQQEVYRFNVPTFGPGVVFDVDYSIRQEQFRFFTEALRANKLRSYVDQMVVEAEEYFSKWGESGTVDLKYELEHLIILTASRCLLGREVREKLFDDVSALFHDLDNGMQPISVLFPYLPIPAHKRRDRARARLAEIFATIIKSRKASGQSEEDMLQCFIDSKYKNGRPTTEGEVTGLLIAALFAGQHTSSITSTWTGAYMLRFKQYFAEAVEEQKDVMKRHGDKIDHDILAEMDVLYRCIKEALRLHPPLIMLLRQSHSDFTVTTKEGKEYDIPKGHIVATSPSFANRLPHIYKNPDSYDPDRFGPGREEDKAAGAFSYISFGGGRHGCLGEPFAYLQIKAIWTHLLRNFEFELVSPFPENDWNAMVVGIKGEVMVNYKRRKLAVDN

SEQ ID NO: 228342 - protein, 158 aa, Zea mays
  unsure (1)..(158): unsure at all Xaa locations
  Clone ID: MRT4577_139841C.1.pep
KIVXXXKWVLXEIXXKEVFEVVDFXFLEXXLVGGGVYCKVGGKLEDXEVVYGIIVXKDMSXLKMGKRIEDGKIXILXXXFEXXKGKXKXKVDIDIXEKFXELXEXEXKYXDEMVXKXKDVGXXLVICXWGFVDEXNYLLMDRNLXGXRWVGGVELELI

SEQ ID NO: 228343 - protein, 222 aa, Zea mays
  Clone ID: MRT4577_139842C.1.pep
MMDLADPQQQQRLIAGAALLLATAAFLRLLLGSRSRGGKRLPPTIPGAPVIGGLVKFMRGPIPMIREQYARLGSVFTVPIITRRITFLVGPEVSAHFFKGNEAEMSQQEVYRFNVPTFGPGVVFDVDYSVRQEQFRFFTEALRANKLRSYVDQMVAEAEEYFSKWGESGTVDLKYELEHLIILTASRCLLGREVREKLFDDVSALFHDLDNGMQPISVLFPY

SEQ ID NO: 228344 - protein, 85 aa, Zea mays
  Clone ID: MRT4577_139843C.1.pep
MCEEEDSTALVCDNGSGLCKAGFAGDDAPRAVFPSIVGRPRHQGVIVGMGQKDSYVGDEAQSKRGILTLKYPIDHGIITSWDDME

SEQ ID NO: 228345 - protein, 218 aa, Zea mays
  Clone ID: MRT4577_139844C.1.pep
MDLLETGTTSLVESLNTSNHQEVHDTLHEESIQLENPSTVGKKKKRKRRQLSPSKSASAQETTEPSATAVDLLIPTGEVLSNNSPGIQIHNIHAMDNLSQEKEQKKSRTSSPDTSNRHLLETNPTSLRETLNTSNHQGHDTLDEEFIQPENPSAAGKKKKKRRQLVPSKYASAQITTEPSSGAAPADLSKSTGDKAYNAELTSKGETVVEASGLPLSS

SEQ ID NO: 228346 - protein, 88 aa, Zea mays
  Clone ID: MRT4577_139845C.1.pep
INTHGDRISARQGRSPGPAPFRGRRGYHGGRVDTIARARVLGAPRKRRFIATVEVESPTTPVIKIVNVLCPLSNATTICSGGRNSSYP

SEQ ID NO: 228347 - protein, 46 aa, Zea mays
  Clone ID: MRT4577_139846C.1.pep
MSGSSAAGEDIVQHLSSNSNPSSSKLAKLEARMAGKAVSAPSSPAH

SEQ ID NO: 228348 - protein, 212 aa, Zea mays
  unsure (1)..(212): unsure at all Xaa locations
  Clone ID: MRT4577_139847C.1.pep
MSKTNNAYDFLAKILIIGDSGVGKTCLLLRFCENSFTTSHLATIGIDFKMKTIEVDGKKIKIQIWDTAGQERYKTITQTYYKGAMGIILSYAVNDAESFNNIENWVKQIKQHASEDVCKILIGNKCDMPDRVIPYEDGKKLADQYGIHFFETSAKENLNVQEAFKSIAKEVKDKLADKQGVPTPNAXMALVKLKEQXTSASKSEAGKGKCCS

SEQ ID NO: 228349 - protein, 61 aa, Zea mays
  Clone ID: MRT4577_139848C.1.pep
QDILCARGVFLRVFGYYGSLAQKLNTISLDGSNRAVEVTYNKQNGHYALYPYQAGNHYQTL

SEQ ID NO: 228350 - protein, 121 aa, Zea mays
  Clone ID: MRT4577_139849C.1.pep
RPGSEETAHPTSLIHCSQPHSCLVSSLADPMVCTKQTARKTTGGKAPRKQMPTKAARKTAPDTGGAKKPHRFRPGTVALREIRKHHKSTVPLIRTLPLQRLQEITHDSQTDLMFFFFLTSP

SEQ ID NO: 228351 - protein, 84 aa, Zea mays
  Clone ID: MRT4577_13984C.1.pep
ISLGNQRSRTLSHRDVLIINTHHSVGNHTNHPNPKWKQILPFVYRAHQKQTNLSPCACARNTYAKDLANLMSLTITMLSNRLLD

SEQ ID NO: 228352 - protein, 49 aa, Zea mays
  Clone ID: MRT4577_139850C.1.pep
GRAAPTYRMTSFKHQTTSSASSSTSTRTWLSCAPTKKRGRARAWALTSW

SEQ ID NO: 228353 - protein, 61 aa, Zea mays
  Clone ID: MRT4577_139851C.1.pep
TWIRNIITYSKQTIYGAGTRHLTGCKSKTILCFYDTSETTKQVGFDIKTLLAMLLDTQFRP

SEQ ID NO: 228354 - protein, 110 aa, Zea mays
  unsure (1)..(110): unsure at all Xaa locations
  Clone ID: MRT4577_139852C.1.pep
VNVGLMLAGMGASINXFRMASVRWEKRQAKVLEKARTRMVKQETSDTRSSWSEVWASSPPRDDQSNGGDGEASERAKRAAAAARRWREFSRRGADRPPTHKLPEAVGNKD

SEQ ID NO: 228355 - protein, 62 aa, Zea mays
  Clone ID: MRT4577_139853C.1.pep
PTRPPTRPPTRPPTRPKKKKRKKKKKKKKKKKKKKKKKKKKKKKNKKIKNKKKKKKKKLDTF

SEQ ID NO: 228356 - protein, 105 aa, Zea mays
  unsure (1)..(105): unsure at all Xaa locations
  Clone ID: MRT4577_139854C.1.pep
LMLAGMGASINXFRMASARWEKRQAKVLEKARTRMVKQETSDTRSSWSEVWASSPPRDDQSNGDGEASERAKRAAAAARRWREFSRRGADRPPTHKLPEAVGNKD

SEQ ID NO: 228357 - protein, 343 aa, Zea mays
  Clone ID: MRT4577_139855C.1.pep
MAPPLLSPPLLADALATLPRSFLCSRPTRQLPTVGLAGAVRGDRGRWSVRRRDPRVFATSTEADRERSDEDVADDYYSVLGVMPDATPEEIKKAYYSCMKECHPDLSGDHPDVTNFCMFINEVYSVLSDPAQRAVYDEIHGYTATAINPFFDDSAPKDHVFVDEFTCIGCKNCANICPGVFQIEEDFGRSRVYSQSGSTELIQDAIDSCPVDCIHWTSAAQLSLLENEMRRVERVNVGLMLAGMGASINVFRMASARWEKRQAKVLEKARTRMVKQETSDTRSSWSEVWASSPPRDDQSNGDGEASERAKRAAAAARRWREFSRRGADRPPTHKLPEAVGNKD

SEQ ID NO: 228358 - protein, 118 aa, Zea mays
  Clone ID: MRT4577_139856C.1.pep
SVDVLATAGDGTETVVSRACRRGMAGEIGVMLNIPQPFTVRCRRLTQAVRVSQGHLLRVVRPHTADADRVFCNFVRQHLGSPVWKVARKETPLFGEIADELEVGAATAASMSKRKSEM

SEQ ID NO: 228359 - protein, 72 aa, Zea mays
  Clone ID: MRT4577_139857C.1.pep
KGYARDFPKSLRILQKGSCTPFVKFAGKKMEDLPVLKKKKCREQNGSVDFYSPRFLKKSPSESRSEVWDGAG

SEQ ID NO: 228360 - protein, 73 aa, Zea mays
  Clone ID: MRT4577_139858C.1.pep
KQWTRNAIITPFVRSQTHKANPSTSSTLSESWRTHSPHPLLLPIFSSYFTRQQSLPSEHSHILTSSAFPQFAT

SEQ ID NO: 228361 - protein, 57 aa, Zea mays
  Clone ID: MRT4577_139859C.1.pep
IFCFKILLKVLPNLSQVEIVMSLEEHFDISVEESSAQTIATVEDAADLIDKLVAGKA

SEQ ID NO: 228362 - protein, 315 aa, Zea mays
  Clone ID: MRT4577_13985C.1.pep
MSMPRTSSGERIPLHLHHGATRTSKPTSAGRRGIVKKSMPLDHPSLVPEGHPAEANEHWTTSSTPSARTTRICVIPSETAETSSTPSGMADLSNLYHLPYHEEDPKNLDNLSKNKRQQKLNDRQILVAATSAPAPYRWSEHPITFTRADQWLNFDHPGKYPLLVDPMIRESRVKKVLVDGGSSINVTFPRTLLGLGVALKELHESDTPFFGIVPTEREYPLGHIYMSVTFGTPENYRTEFMTFEVVSFDCGYNAIIGRPGLAKFMAIPHYSYMILKMPGPQGIIIVRADFQGAAECFRVAIQAALTTKPPTTSSA

SEQ ID NO: 228363 - protein, 37 aa, Zea mays
  Clone ID: MRT4577_139860C.1.pep
ARGGQTFALNQKSQELCVSGSPSTGKDPFLIYAPSNT

SEQ ID NO: 228364 - protein, 53 aa, Zea mays
  Clone ID: MRT4577_139861C.1.pep
LPLLYTKITHSRHHIRIIPTISYTMCYTHTISNFTALYSPTINTTITHTLFVP

SEQ ID NO: 228365 - protein, 246 aa, Zea mays
  unsure (1)..(246): unsure at all Xaa locations
  Clone ID: MRT4577_139862C.1.pep
MAFSPRSPWSRAKKTDVYSTFVVHGDDDEDDARGGRGPSTRAEEDEEEDPSSLPPLLQRLPKDFGGASFDDDEDPYSSDPDDASLSATAAFKSGVPASGRSPFLDLRRSSPRATDDDPYSTFVVHSTTRSGRTSSSPRGSASGTFIRRSGGSSSPRESVSGTFIRRTGSPSSPGESASGTFIRRPGSPSSPRGSFSGTFIRHTSGGSSSHESASGGGGXFGSSFWTPAVEQSEELREPSPLMQQQQ

SEQ ID NO: 228366 - protein, 147 aa, Zea mays
  Clone ID: MRT4577_139863C.1.pep
MEALASAPRALFPRACPVATPAGPARRRTAAPHICRASAAAGEETPPPPAAPKKILKKKPVYSMKKGQIVRVDKEKYLNSINYLSVGHPPFYKGLDYIYQDRGEVLDIRNFETGEYALIAWVGIPTPPAWLPTYMLIKSDKLDYERI

SEQ ID NO: 228367 - protein, 80 aa, Zea mays
  Clone ID: MRT4577_139864C.1.pep
PRVREHRSQHFSQLSLQHQSLQQLGPLVRNPQGPRNSASKHLHLDRTRHPAVGVQVIVNTGVHVDAHGCAVKICGDGAGS

SEQ ID NO: 228368 - protein, 128 aa, Zea mays
  unsure (1)..(128): unsure at all Xaa locations
  Clone ID: MRT4577_139865C.1.pep
VFSRARPTRGGQIISQWEPPLNVQAYIHLSCCTXRAGNTNIAVMLYXPDXHIVSILKRESMRKFNHIFKPHPTDLPQSNGREAANAIXLMIKHXVIPIFRQQAXQLLSYYILCAAEXIAKALAKAIGY

SEQ ID NO: 228369 - protein, 161 aa, Zea mays
  unsure (1)..(161): unsure at all Xaa locations
  Clone ID: MRT4577_139866C.1.pep
HREAISNAELLVGSSLSRSTASGLPLHPFMSKCWKTXMDMFSGGEYSGFTEDKKYQRTNFLFDCIIESLDSKFCNFGKCGYKAWLSLPLSLSEDLLKRQVLEDIGNWRESSGTALRQVSDKEVDQVTDRWDASQVEAFDISIAIENDILEALAGEFALDLW

SEQ ID NO: 228370 - protein, 121 aa, Zea mays
  unsure (1)..(121): unsure at all Xaa locations
  Clone ID: MRT4577_139868C.1.pep
LLAVVLLALTFGXWGXRPRTPNFFTQLGQYMWPSVLFAMATGVVLMXATLCIHYACAXVGLCGTEVITFNVGLVDEASXLNYXFWTCPINRSDILIPVVSLLSLXVLLGPAVHSSMQVKSD

SEQ ID NO: 228371 - protein, 69 aa, Zea mays
  Clone ID: MRT4577_139869C.1.pep
ARAKISKSYLATIGPFSDLFGRHAKRRLLVRRVLPDDDHRLVWIRDRKRLAGLYHDRRRHEGPDHGLDL

SEQ ID NO: 228372 - protein, 56 aa, Zea mays
  Clone ID: MRT4577_13986C.1.pep
LSSTKCWLWELLIYPPLYFESPYIYHLTEITSSVTVLFEKMSLNQKHTFLEQEFPY

SEQ ID NO: 228373 - protein, 80 aa, Zea mays
  Clone ID: MRT4577_139870C.1.pep
KGGSRSTISQPLCAQGPCVCVCDTKRTCRAGHVFLTVWFIFEFSGLYLFPWTLLPRRPPLNLYHSMRCSLSCTRLFLLII

SEQ ID NO: 228374 - protein, 87 aa, Zea mays
  Clone ID: MRT4577_139871C.1.pep
SGGPSSLVRINRTRYSSELLVCLWSCPRTRLHSRSMTHDRISRVSLRLDEAVGIAWSMGDLRRAGSIMCSSAQHVRLKDSSHHLARR

SEQ ID NO: 228375 - protein, 61 aa, Zea mays
  Clone ID: MRT4577_139872C.1.pep
IIGVMSPNSFVWSMLLLYVHATIKDSMLVLHGTWYLFRYHVPFLIDPAYVCIFGLFARIVT

SEQ ID NO: 228376 - protein, 50 aa, Zea mays
  Clone ID: MRT4577_139873C.1.pep
NSRVDPRVRPLFTTTRSMVLPSMMLHRMVPHMSLPLLLADHAATIITIYE

SEQ ID NO: 228377 - protein, 124 aa, Zea mays
  Clone ID: MRT4577_139874C.1.pep
PTPSLSAAPPRPTPPLLSRRLGSPSRGTPPELTAAPGAWSFPHGHRDALPGSSYGSNCWVRCKRVYGDCLSSSGVIRTPQCVGSYKCLFSLYQRTMGHQRPNPRRSALVQANNHTLMIEKINDF

SEQ ID NO: 228378 - protein, 46 aa, Zea mays
  unsure (1)..(46): unsure at all Xaa locations
  Clone ID: MRT4577_139875C.1.pep
KRQXMFPNTARKTAGAYLAGGACWICNTLMMILSYVVTFRFNTRYT

SEQ ID NO: 228379 - protein, 562 aa, Zea mays
  unsure (1)..(562): unsure at all Xaa locations
  Clone ID: MRT4577_139876C.1.pep
IQCGSPANVRFMAREIQILRRLDHPNVMKLEGLITSRLSCSLYLVFEYMEHDLAGLCSSPDIRFTEAQLKCYMNQLLSGLEHCHSRRVVHRDMKGANLLVNNEGVLKIADFGLANFFDPNKNHPLTXAVVTLWYRPPELLLGSTHYDAAIDLWSLACVFAEMXLGXPNLEVTTRAGQRLKILKVCGSPADDYWKKSKLPHATVFKPHHPYPSTLRDVFKEVPENALSLLETLLSVEPYKRGTASSALSSEFFRTKPYACEPSSLPKYAPNKEMDAKLRDDALRRKASSRGHGAEASKKSSRISRAAREHTAVPKQIXRRGTQKQRERNQRWHNXQDRTKLSLNGDARLFADIQPVPAAAQVKGSARHAKNESREEMPFSGPLSVPSSSGFAWAAAQRPQEDRALARSRTRSSSRGQFPAEADRDCTRTQATTESAAAVRELPSSRDIPRVGSKVREREPHDAAKRAVLRKWSQLERPDSFDSCDTYHSQNFSHAMLVGGGALSSKNSFEGGHGHGQEEKAEYSGPLLSQSHKVDELLQKNERHIRQAVRTSWFRRGGRKEDK

SEQ ID NO: 228380 - protein, 76 aa, Zea mays
  Clone ID: MRT4577_139877C.1.pep
CARSEPPHKSSTDSIGRRLASHSIFIKLSLGGPAPQLASCAPANLTLLGGSCHLVVEEVAGLPPNETKKAKNSGSR

SEQ ID NO: 228381 - protein, 73 aa, Zea mays
  Clone ID: MRT4577_139878C.1.pep
MALVLLQQLVDLVRLGQQRPRVLGLLLLTMTMTMTALEAVLRRESTAPNPNEHGVGEVLGVVSVAGVERVRAL

SEQ ID NO: 228382 - protein, 94 aa, Zea mays
  Clone ID: MRT4577_139879C.1.pep
PPTTLCYKSRERAWGLGQFTLYPFTLWLYVPLVIHQHGGPLNGCTPHTPTAGASLLKLKHRTPVYKTSLGPHLRLFAANPLSCYLHPIKPFLSH

SEQ ID NO: 228383 - protein, 112 aa, Zea mays
  unsure (1)..(112): unsure at all Xaa locations
  Clone ID: MRT4577_13987C.1.pep
PPVSWGGGAPPCPWPLCSPPPPGPLXQAPNPAFLTTGPPAPDPPXPPLGNAPLPPPVPVSRPGLFPPPPWCLAFCAPSGELFSRPLAWWGPRLCSLAALDMILWGAGAPPRG

SEQ ID NO: 228384 - protein, 87 aa, Zea mays
  Clone ID: MRT4577_139880C.1.pep
NSTLSSSPGNQTTSVHSQENMTGDHGGRTQRIPHRRFQRRHQTLHKGHGLLRRTQGSRERHRIRESEFHRRLTTTDMIMRSLCGQAQ

SEQ ID NO: 228385 - protein, 124 aa, Zea mays
  unsure (1)..(124): unsure at all Xaa locations
  Clone ID: MRT4577_139881C.1.pep
APSPNPCPHEQXIFWINKQLSCRSTTXRAXGGIRAXGRAPPNHLXRRPCWAAAAWNSSLPLLLPPSRHTSLPQLIVSDRTRRATGAEETVLSGSANLQDNRGINTGTARACPSSKSPSPRALRS

SEQ ID NO: 228386 - protein, 57 aa, Zea mays
  Clone ID: MRT4577_139882C.1.pep
SAVLVLTERLIRLGPFIRPEFCGIVGCLMHASGPQGHCPLFPACFNVQSQIIVRLMT

SEQ ID NO: 228387 - protein, 63 aa, Zea mays
  Clone ID: MRT4577_139883C.1.pep
SFVRTTPTVARAKRPLTALKERLAVQRHQTQSDQGEKERNFPDEPSGGGATAVENNLLGGPQA

SEQ ID NO: 228388 - protein, 113 aa, Zea mays
  Clone ID: MRT4577_139884C.1.pep
RRWIDQSKRCETWHKSNKRRAAEVAGLICGKLTRPELSHGLASHAQAPKVTRPPLSSRALIGCLQQQHADARLVGVVMRGARLVRVVMPSIFYAIKFKIFKNPIRIRLHYYLF

SEQ ID NO: 228389 - protein, 49 aa, Zea mays
  Clone ID: MRT4577_139885C.1.pep
EQVPNKIYYYTHDIELAFTTVQEMNWDSRYYNRGLLTFTLSEWKLKYFI

SEQ ID NO: 228390 - protein, 143 aa, Zea mays
  Clone ID: MRT4577_139886C.1.pep
VTPQHRCCIVDMLAKAGRVEEAYEFVQELGEEGDFVSIWGTLLASCKAQDKQELVNLVTERLICIEKKYGHAGYSVLLSHIFAAEGNWSSADSLRKEMRLRGLSKMAGSSWIKVQHAALQSYPKNGHEHSLLHVVDYGRDEII

SEQ ID NO: 228391 - protein, 206 aa, Zea mays
  Clone ID: MRT4577_139887C.1.pep
GHASSRARPCLGRAKKTGRVPGCRALGCMLIYSATRARGRAPYSIRIRKRKAGRGRHKHATCSAPQSPVPTHGKLRRLVLVPRPRERTDELSGPGRRVAARLRPGGGGDPGLGVHLHGRRPGRLQRECVILGFDAPRKESGANKRQYFPSSFIWAEFCLHRSLRRDIHNHERLGIISCLSIVLPPARVIWHANCLISSAPIWLRRN

SEQ ID NO: 228392 - protein, 66 aa, Zea mays
  Clone ID: MRT4577_139888C.1.pep
ETLFCYKINLRVLLSPNMSNHIYLYFLTSSSVIARVKRPVATDFNSCFCHHLLHYLYMCGHVLHIF

SEQ ID NO: 228393 - protein, 66 aa, Zea mays
  Clone ID: MRT4577_139889C.1.pep
TLLLGWVKLKQGGSALGVLPGIMVLNKIREGKIFSPQKTPPNFLDMKFREGGGEPHSFLGGSPHVC

SEQ ID NO: 228394 - protein, 61 aa, Zea mays
  unsure (1)..(61): unsure at all Xaa locations
  Clone ID: MRT4577_13988C.1.pep
LMHIHGYIVRTGTQPSIVLSMASLTRNXTSPLCDSFSTIPTPQTRRRGEKNRRESVGFERA

SEQ ID NO: 228395 - protein, 136 aa, Zea mays
  Clone ID: MRT4577_139890C.1.pep
MGLCISVSLWKEKLYGADGSSRSVQCRVVHEVAGVESGDCECGNLGSDADALGVEQKAAAPAAMDVKTGGVEGTAAAVSGGTPVRPIWQMRVLMGVKCQLPRFSVMVLYDESGRPVCTGVRDRARDQEKHAAAISV

SEQ ID NO: 228396 - protein, 156 aa, Zea mays
  unsure (1)..(156): unsure at all Xaa locations
  Clone ID: MRT4577_139891C.1.pep
HWVPRGRPCTHYNAGITDASISACCTGYPDLPHIVRNPGRYKAKEKHGCSEAPDVALAELKWVTVEAPSPGVKAAMPCSIVYRTLMPGQPFCQMGAVLLPHSLIRCIRTLLXGXNNTLNRRTICGCLQNHGKRDDRTCYYITRNSPANQIMPRCPA

SEQ ID NO: 228397 - protein, 99 aa, Zea mays
  Clone ID: MRT4577_139892C.1.pep
LTSFFTKKPWCFFFSNRFFFFHQAAQVFFFGPAPSLQPLMLFFFFSCERTHPQALVRLGINQAGQPKTCWLFSIWYPCLNSPHGACLGFGINGSNPVFL

SEQ ID NO: 228398 - protein, 41 aa, Zea mays
  Clone ID: MRT4577_139893C.1.pep
GMRLRKSVGVDRQAPPSSQPAPNQRIDQRSRDAQSDSYAYA

SEQ ID NO: 228399 - protein, 45 aa, Zea mays
  Clone ID: MRT4577_139894C.1.pep
GKPGPTPRVRKSFLTLWKFVTLPPALISFRCHLHVINPSYHLLVL

SEQ ID NO: 228400 - protein, 101 aa, Zea mays
  Clone ID: MRT4577_139895C.1.pep
PGGDQVLVMAQAHNVNVHSRTSLIERASSSCSAVALAGAQRASVGYRGQKGAQGEPSTQDQQHMSLEYGVHLEKHVLSPCSTEPKIQGLVAMQRYYLTDDL

SEQ ID NO: 228401 - protein, 116 aa, Zea mays
  unsure (1)..(116): unsure at all Xaa locations
  Clone ID: MRT4577_139896C.1.pep
DRHRVLEFLSLACFYDMPRNNGSVGSDQIHPLYMDDLTNMTGMEYLLSEVMETHLFVIRKQKWDXPDKXRPMLAYYILDXSIYQAPQLXNVFDLHLRRDIHAILEAVTISCSKFEK

SEQ ID NO: 228402 - protein, 125 aa, Zea mays
  unsure (1)..(125): unsure at all Xaa locations
  Clone ID: MRT4577_139897C.1.pep
KKFSGWEGKKGFFFLFPKIVQLPGXLRGXPVRKNHSKGIWSPGILQKILLXWXKKRAGVTGFWPPKKLKGPLPIPPPKGENENVFFPPGKKQAQTRVQKTPSRGPFFFPVPKRKKQVPRVSTWGF

SEQ ID NO: 228403 - protein, 118 aa, Zea mays
  unsure (1)..(118): unsure at all Xaa locations
  Clone ID: MRT4577_139898C.1.pep
PHSYTIIERSKKIPLIFGERRPGEAGGGVFXTTKAERELNWKAKYGIEEMCRDQWNWASKNPYGYGSPDSIKQNGHQTNGCGDSFKQNGRTNGSTELPKGKGHHAYGFDLPRNGHWVF

SEQ ID NO: 228404 - protein, 122 aa, Zea mays
  unsure (1)..(122): unsure at all Xaa locations
  Clone ID: MRT4577_139899C.1.pep
GGRAADQQRLIFAGKQLEDGRTLXDYNIHKESTLHLGLRLMGGAXXRKKREXGEPNNINHKHKKGKLAVLXFYKVDDATGKGTRLRKGCPNAEGGAGGFMGNHLGGGXCXXXVSSYVSPTTG

SEQ ID NO: 228405 - protein, 552 aa, Zea mays
  unsure (1)..(552): unsure at all Xaa locations
  Clone ID: MRT4577_13989C.1.pep
GRPFKPLLSPPPRGGPREPRQPQQQEGGGGGAFQCVDGKVNVIFGGHGSQENKRQQKLNDRQILVAATSAPAPYRWSEHPITFTRADQWLNFDHPGKYLLLVDPXVIRESRVKKVLVDRGSNINVTFPRTLLGLGVALKELHESDTPFFGIVPTKGEYPLRHIYMSVTFGTPENYRTEFLRFKVASFDCGYNAIISRPGLVKFMAILHYSYMILKMPGPQGIITVRVDFQGAVECFRVAIQAALTTKPPTTSSAQANSKPKEDLAIPANEAQAVTSMRPTEETKKSTSADHWGKRVEAYVDDVVIKTEKSENFIEDLQLVLNSLRRYRSKLNPEKCVFGVPAGKLLGFIVSHRGIEANPEKIEAIMRVEAPRSQKKVQRLTGCMAALSRFISRLGEKGLPFYKLLKKVDKFQWTTEAQEALDALKKFLTTPPVLKPSRRALLDQPVEDLLLYIFCTTHMVSTALVVERAEEGHAYPVQHPVYFISEVLGPSKKKYPQVKKLLYAVLLTARKLHHYFDDHKVIVVTGFPIGDILHNKEAIGRIAKWACVTPGL

SEQ ID NO: 228406 - protein, 327 aa, Zea mays
  Clone ID: MRT4577_1398C.1.pep
MLGASASRGRKAAPPSVKLGAAKEAPATVAAAAGGGKVSAEEVWEVRPGGMLVQKRGGGGAADDEPSPGVKPVPTIRVKAKHAGVTHEIYVSSEASFGELKKLVAAKTGLHPDDQKVLYKDRERDSKAFLDTAGVRDRSKVVVLEDPEARARRIIGERRSGHLQKTASAVAAVTAEVDKLAPKVAALDASVRRGEKVAEKDVVQVTELLMNELLRLDAVVADGDVKAQRRMQVKRVQKYVETLDAVAAKNAALVGKSGEKAAAKPAPAPAPAPAPPPRQQGQGQTRWEMFDLLSSLPSTSSASSTTTVSSTASSGAPPPSRPDWMLF

SEQ ID NO: 228407 - protein, 45 aa, Zea mays
  Clone ID: MRT4577_139900C.1.pep
VSAGFWLQTLAHRDGGLACCVPLLCRLSRLGHGPPLTAQRLQHLP

SEQ ID NO: 228408 - protein, 70 aa, Zea mays
  Clone ID: MRT4577_139901C.1.pep
KYPRGAATVPTGSGMGGPPSGSRVGYFENPSRGCMNGVKNFPKWPPGGIFSQKTKKNRKKIIKIKIKLTP

SEQ ID NO: 228409 - protein, 64 aa, Zea mays
  Clone ID: MRT4577_139902C.1.pep
GCQLYLSKDSLGASITSAKSSEINVMVPSGGTDGDWVEHALPQQYIHSFKDGQFTTSPVSHSGA

SEQ ID NO: 228410 - protein, 57 aa, Zea mays
  Clone ID: MRT4577_139903C.1.pep
QSIKLESESAKTHLPSLSLLQYTQSITIFISNNKIIHEYVEILVEICGTYFSHKINP

SEQ ID NO: 228411 - protein, 58 aa, Zea mays
  Clone ID: MRT4577_139904C.1.pep
SSRPVQLDKLNSVSRLHLKKTIDSTLFSGKTVVKKLTQAECCEKQKIVYLKLLINTIL

SEQ ID NO: 228412 - protein, 74 aa, Zea mays
  Clone ID: MRT4577_139905C.1.pep
ELIPTCERLRSSIFEEVSVCRDDQQLSLVHNAFQALLTCGSLRVRHLYAGVMSKSPSYSLVEIFDEGIRHVGVP

SEQ ID NO: 228413 - protein, 67 aa, Zea mays
  Clone ID: MRT4577_139906C.1.pep
KKKKKKKKKKKKKKKKKKKKKKKKKKKKKRREDSVKGTKFHVRRAWNNLGLWFGRCLIWNLLGRGVT

SEQ ID NO: 228414 - protein, 114 aa, Zea mays
  Clone ID: MRT4577_139907C.1.pep
KKPGPHLGLPFFPRGVPHPQYHTVVNSPRAHTGKKQPRGHPLALEHTRPPISFEPGIILAVKKPGGGGPRLTHPQRPDPLGPGTPVVTLGWPLPPTPRMVLYGGGGAREKGSTP

SEQ ID NO: 228415 - protein, 99 aa, Zea mays
  unsure (1)..(99): unsure at all Xaa locations
  Clone ID: MRT4577_139908C.1.pep
RQRGDTRRDRRRVVKLCMAPRSESXSARPFGWHPLVMPLVLRLLLLLLFLLPDDDARVPCGRAAWRTSTCTATGRRRGESLTAPSXKLKCNGNRKRRKL

SEQ ID NO: 228416 - protein, 82 aa, Zea mays
  Clone ID: MRT4577_139909C.1.pep
CTHILQWAEPLVESLALHELIDDRIKDTNDTYGLYHLAKIAYLCARPNPEQRPSMGEVVRLIEIETEHIRDLSRQFIPHFMK

SEQ ID NO: 228417 - protein, 683 aa, Zea mays
  unsure (1)..(683): unsure at all Xaa locations
  Clone ID: MRT4577_13990C.1.pep
MAITFQHKITLCPGSVFFFGTISSVVDEEGILHHIADSPEKNPSLKISGKARTKQEIAQPPVPRAKNTSCKTEAENSFTRRTPLPTSSTERWTRITRKKRNKRDKGPSNCPSATPFYPDVLFIGGRVESSLISDDEPTVPGFSEKLADEGTDAIMPDDIMHPENETRCSLYHEMRSRRAIQWPPNFKVSNVDKYEPKQDPGGWLAVYTTAARAAGETKDVMTAYLPIVLRQDALQWLRRLPRHCIDDWSDFSQHFIANFQSLSEKSGQPWDLKSIRRQGDETLRSYLKRFQTMRNHILEVAEAAVIEDFYRGSSDSXVPEQLXSGRRTTSEQLFREADLYITADEXVPRTSSEERSXAPSAPQRDTNQQNDKRXRRRGLAKKSMPLDHPYLVPXAPRGGKQTLDDILDAQCPYHKDMRHSLRKCRDFKHSIGNGRLFQXSTTSPTMRRTRRTSXPQQQEGGGGGAFPRIDGKVNVIFGGHGSQENKRQQKLNDRQILXWRPPVPPPRIDGLGVALKELHESDTPFFSIVPTEGEYPLGHIYMPVTFGTPENYRTEFVRFEVASFDCGYNSIIDRLGLAKFMAIPHYSYKILKMPGPQGIITVRADFQGTVECFRVAIQAALTTKPPTTSSAQANSKPEEDLAIPANEAQVVTSMRMIEETKRINLGFADERKTAIISSSLDDK

SEQ ID NO: 228418 - protein, 428 aa, Zea mays
  unsure (1)..(428): unsure at all Xaa locations
  Clone ID: MRT4577_139910C.1.pep
DAGEFSYHKWAHLGVPMLISGGDDTKLFAEPARVFTPLAPHYLRPPPRPPLFPLXGWAGNXTKYLLVQSPLGLMFLLVKVRNESMSHITSSSLMIATVQPLARLKSKGSRKIISSAASANGTLLAYSDGVRPCLFALRHKGGKKYTLDKLELPKGLPCSQRMAFTVDSSNLILAGRNGKIYIIDIATGEISNVFHPTSTGDGSKIADDXPITSSXRSANGQWLAXAVNCYGDIYVFNLGLRRQHWFISRMNGGSVTSGXLVPQVXNTLVITTSKNEVYVFDVEAXTFRXWSKRYTHRWPRCXINFLXHCISLTFPPLSSSTEGVYSTRAMCNIDFGLPVVEDVGLPNGSGGPAEKADAKKSKKTRQKRKARDEESTEEKRNNFNFFAFKEPVLFVGHLQDSSILMVEKRWMDVVEGFSAPVDRHIYGT

SEQ ID NO: 228419 - protein, 305 aa, Zea mays
  unsure (1)..(305): unsure at all Xaa locations
  Clone ID: MRT4577_139911C.1.pep
MCSSRALWPVHCCRFKAEGSLSSLEAGRGLGAFLYRPDPSFIRVVTVRPRSPRRSPKSQPRFLWSARASMASPSPAVSSLETEAPQATVTRERRLNPDLQEHLPKPYLARAMVAVDPDHPTGTEGRDPRGMSVLQQHVAFFDRNGDGVVYPWETFKGMRAIGXGFFTSLVLSFLINLVMSYPTQPGWLPSLLLSVHVKNIHKAKHXGSDSETYDTEGRFDPSKFDAIFSKYGRTHPDALTKDEMNSMLKANRNIYDFLGWIAAIGEWHLLYSVAKDKDGLLQRETVRGLFDASLFERLQDSKKSS

SEQ ID NO: 228420 - protein, 89 aa, Zea mays
  unsure (1)..(89): unsure at all Xaa locations
  Clone ID: MRT4577_139912C.1.pep
LPVGLAQAPVPGPGAEHHVDRLFFVKVAGPFHTVRDYREKTDGMQTLQRQAERHEPGXITVFIPKDSGFAGLKQTTLANLTQYHLRSVL

SEQ ID NO: 228421 - protein, 165 aa, Zea mays
  unsure (1)..(165): unsure at all Xaa locations
  Clone ID: MRT4577_139913C.1.pep
PLVFLGIFGSSMSPSARTYPQAVIHTGISTIDVMNSIARGQKIAVFFADGLPDNEIAAQICREAALVKTLHTGKHAEGGEDDNFAIVLAAMGANMESAQFFKHDCEENRSMVRVTLFLDLTNDPTIARIITPTTALTTAXYWAYECLKHVLDMMTDASSYADALC

SEQ ID NO: 228422 - protein, 87 aa, Zea mays
  Clone ID: MRT4577_139914C.1.pep
LRKEAGQGSRDNRGQREAMNLGDERGLGDVPGRRVESTPASAHALRSCHVVWSPLLPRDPASPGRAWAEKPATRAPRRRAPPLHETR

SEQ ID NO: 228423 - protein, 894 aa, Zea mays
  Clone ID: MRT4577_139915C.1.pep
MHNPRPGGGDIVEMSSSATAEGRVIPHSGPLSKKSGARKSARFAESVSAPLSAPPPRASANNNNNDDDDYVEITLDVRDDSVAVHSVKPAHVGGAGAGGDDPDVTLLARTLESRRSSSYGHSVIRNASSRIKQVSQELRRIASINRRGAAGPRIDRSKSAAAHALKGLKFISKAEGAAGWEAVERRFDKLAENGLLHRSKFGQCIGMKEPEFAGELFDALSRRRNISGDSISKAELLEFWDQISDTSFDGRLQTFLDMVDKDADGRITEEEVKEIITLSASANKLSKITDQAEEYARLIMEELDPGNLGYIELYNLEMLLLQAPSQSVRIGTTNSRNLSQMLSQSLRPTAEPNPLRRWYRRAQYFLEDNWRRVWVMLLWLCICAGLFAWKFIQYRQRYVFQVMGYCVCVAKGGAETLKFNMALILLPVCRNTITWIRNRTAGVGRVVPFDDNLNFHKVVAVGIAVGAGLHIISHLTCDFPRLLHATDAEYAPLGQYFGVPRPPNYWWFVRGTEGWTGLVMLVLMAVAFTLATPWFRRGRIALPGPLRRLTGFNAFWYSHHCFVVVYALLIVHGHYLYLTHKWYKKSTWMYLAVPMVLYACERLTRALRSSVRPVRILKVAVYPGNVLSLHFSKPQGFRYKSGQYIFVNCAAVSPFQWHPFSITSAPQDDYVSVHIRTLGDWTRELKNVFSRVCRPPTEGKSGLLRAEYDRDGSAVANPSFPKVLIDGPYGAPAQDYKQYDIVLLVGLGIGATPMISIIKDIINNMRQLDGGGDLEASDASASSSSMASFRTRRAYFYWVTREQGSFEWFRGVMDEVALNHAKHGVDVVSGTRVKTHFARPNWRNVYKRIALNHQNQRVGVFYCGAPVLTKELRELAQDFSRKTNTKFEFHKENF

SEQ ID NO: 228424 - protein, 236 aa, Zea mays
  unsure (1)..(236): unsure at all Xaa locations
  Clone ID: MRT4577_139916C.1.pep
MADEDVQPIVCDNGTGMVKAGFAGDDAPRAVFPSIVGRPRHTGVMVGMGQKDAYVGDEAQAKRGILTLKYPIEHGIVNNWDDMEKIWHHTFYNELRVAPEDHPVLLTEAPLNPKANREKMTQIMFETFSCPAMYVAIQAVLSLYASGRTTGIVLDSGDGVSHTVPIYEGYTLPHAILRLDLAGRDLTDNLMKILTERGYSLTTTAEREIVRDIKEKLAYVALDYEQELEXARSSSS

SEQ ID NO: 228425 - protein, 131 aa, Zea mays
  Clone ID: MRT4577_139917C.1.pep
ARTEIQITKCFFLSRPQIITLSASANKLSKITDQAEEYARLIMEELDPGNLGYIELYNLEMLLLQAPSQSVRIGTTNSRNLSQMLSQSLRPTAEPNPLRRWYRRAQYFLEDNWRRVWVMLLWLCICAGLFA

SEQ ID NO: 228426 - protein, 52 aa, Zea mays
  Clone ID: MRT4577_139918C.1.pep
FVNCAAVSPFQWHPFSITSAPQDDYVSVHIRTLGDWTRELKNVFSRVRTRTR

SEQ ID NO: 228427 - protein, 177 aa, Zea mays
  unsure (1)..(177): unsure at all Xaa locations
  Clone ID: MRT4577_139919C.1.pep
ATPMISIIKDIITTMRQLDGGDLKASXTSSSSSSSMXSFRTRRAYFYWVTREQGSFEWFRGVMDEVAETDRKGVIELHNYCTSVYEEGDARSALIAMLQSLNHAKHGVDVVSGTRVKTHFARPNWRNVYKRIALNHQNQRVGVFYCGAPVLTKELRELAQDFSRKTNTKFEFHKENF

SEQ ID NO: 228428 - protein, 198 aa, Zea mays
  Clone ID: MRT4577_13991C.1.pep
MADLSNLYHLPYHEEDPKNLDNLSSRKGEEAERSRTSMEKSTSYLMDTGHKRTKGSRSSTIDKYWWRPPVPPPHIDGLGVALKELHESDTPFFGIVPTEREYPLGHIYMSVTFGTPENYRTEFMTFEVVSFDCGYNAIIGRPGLAKFMAIPHYSYMILKMPGPQGIIIVRADFQGAAECFRVAIQAALTTKPPTTSSA

SEQ ID NO: 228429 - protein, 38 aa, Zea mays
  unsure (1)..(38): unsure at all Xaa locations
  Clone ID: MRT4577_139920C.1.pep
PPEPQQSADNIKGHGHPLPCEALWPTPPXFLFFXLVAW

SEQ ID NO: 228430 - protein, 58 aa, Zea mays
  Clone ID: MRT4577_139921C.1.pep
QRRVLFFFFFFFFFFFFFFSSRIWVPISYKDCSKIIRFEKIKTKATKENFHTFQEKTR

SEQ ID NO: 228431 - protein, 117 aa, Zea mays
  Clone ID: MRT4577_139922C.1.pep
SRTEKWIMHPGSETDASCTQQPITGDLRDNSHDLQYKFMSFVQPASPSALLDILCLSSSSAYTSDAPGQEAGAVRCGCSAGLDDSVHKIQLLARAVTDFLDTQCEIRYEDPSTHKYI

SEQ ID NO: 228432 - protein, 64 aa, Zea mays
  Clone ID: MRT4577_139923C.1.pep
PEDGLLNSSASVKVANLLRSEYYLQLVTVSHGSNLRECSELCMVHSEGYAKNVSMSSNDAITDN

SEQ ID NO: 228433 - protein, 142 aa, Zea mays
  Clone ID: MRT4577_139924C.1.pep
LHLLYQEVASWLVTTLGLERCGQCRPQTTYVRRNLLPRHRISSSPSDLRPIGPREGRRPPVGCSRFGAPQQAAPWWHPGACRGKQRPQCGTGRCPSAPSERNHEPGQSPGPDLGGSAAPPAQQSRDRRTRQVGPRATRPWPR

SEQ ID NO: 228434 - protein, 153 aa, Zea mays
  unsure (1)..(153): unsure at all Xaa locations
  Clone ID: MRT4577_139925C.1.pep
PVDPASDRDPIVITWTPASQSLKYFSGCLTSLARSYTLLEAYTCCLCTGSFLCPACRRFWVGVAXAEGGLDFLIFDDRVQNVNLSLIDFDLAAAAEEGMRLRRGVMCHWHTFGACCSDAAVFVGLVAVFCCKSGITXLVVVMNEFCLLLFKLV

SEQ ID NO: 228435 - protein, 57 aa, Zea mays
  Clone ID: MRT4577_139926C.1.pep
MQIYLAFMLSFQAFCGTKACESEDLGPKFVQPSITEECIEGQVQVLDIVSSLSAYQI

SEQ ID NO: 228436 - protein, 133 aa, Zea mays
  Clone ID: MRT4577_139927C.1.pep
YYFLGAIKSTGRRLLDLVKLLVAVVLLGYLLFTFNELLLGVFHLLSTRVLGHLFVVGRVDGEPCWHRSTVPPRGIGSGEHFPALRPPFSPRKTFFARGAHRRRPLAHYCGSSPVHAQGRRWWTLISLSLTVLA

SEQ ID NO: 228437 - protein, 105 aa, Zea mays
  Clone ID: MRT4577_139928C.1.pep
FFFGSIIVVVGSYVLWLTIRRRSPWPAAEGPGPRAPTTEATSAQRQKTCSRTATTKTALPLGLRRDGRCSCEAYRQTEAVSEATRILLYAKRERSLFSLSFPGRG

SEQ ID NO: 228438 - protein, 110 aa, Zea mays
  Clone ID: MRT4577_139929C.1.pep
TNLHLTLKSKALPTFPQTTSKALGSQAINNKGPATNRGLLLPNAIGKEWADVNYRHKKMGKPCLGAHKKTFTPLFALSCGREPFTTLKVLQCPWTLACCSWREVLGPKCL

SEQ ID NO: 228439 - protein, 180 aa, Zea mays
  Clone ID: MRT4577_13992C.1.pep
KICCWDKKFRVEKKVCWAPKMIPSRGKPGGPNFMPWGKGKKKWIGFPLKGGGHWNGFGFCHYYAKNQGFGKEGTGIKEPVPAKTLGVKGGLRNQQRKGGPILGGKTGDRFKTLLPKKAQAKIKEKSQPNPFFLENRGGEFVGRKPFFLQNGPRFGGGFFFPQPNPRNVIYLTPKGARGFF

SEQ ID NO: 228440 - protein, 124 aa, Zea mays
  Clone ID: MRT4577_139930C.1.pep
MVGVIRSPAAPPIRTVPAVDRPDRAAGVPGLNSRRISQQCGRALAPLQQRRGQRGRPPTTTSLGAPVFQQEKEKKGSREMPRHTTSGRYIEATAGGWVLAACVLYGTPVLLFLLHYTFFADYDN

SEQ ID NO: 228441 - protein, 295 aa, Zea mays
  unsure (1)..(295): unsure at all Xaa locations
  Clone ID: MRT4577_139931C.1.pep
MGNKXXXXTQASATEYYLHDLPSTYNLVLLDVVSRGRFLKSVRCKHDEGLLLVKVYFKXAGESIDLKEHEXRXERIRNAFKGIXGSHVWPFQVWLQTDKAAYLLRQYFFSNLQDRLSTRPFLSQVAKKXLAFQXIHAVEQXHSKGICHGDIKCENXLXTSWNWLXLADFASFKPTYXPDDDPSXFSFYFDTXGRRRCXLAPXXIYXXCGESQVAADAPLQPSXDIFSLGCFLAELFLEGQPLFEXSQLLAYRRXQXXPIHXXEXIQDTXIRYKILHMIQLDPKKRVHVEXYLQKY

SEQ ID NO: 228442 - protein, 133 aa, Zea mays
  Clone ID: MRT4577_139932C.1.pep
PPPSVFSGFSRAPCSNWGPSGSSPAPGGSSGSLGPSSPSLRGGIFCGGWFLSSQKTLFGPPPFFAFAGVVVPLVGVVPRGLDFLFFFLSVRFLLFFVFFWSLPPCFFMDDGGFFFFFLVPLYPFTFLGGGFFL

SEQ ID NO: 228443 - protein, 113 aa, Zea mays; identical to SEQ ID NO: 205339
  Clone ID: MRT4577_139933C.1.pep

SEQ ID NO: 228444 - protein, 94 aa, Zea mays
  Clone ID: MRT4577_139934C.1.pep
KNNTAPHGELNKIQNPNPMCQGGSINPNQYSTPPKRGRKRHRSPCPNDAKTAPGFPWFLHILAGGIDAMGYGGAVPKAKSSLTNPLRSFLFGGG

SEQ ID NO: 228445 - protein, 63 aa, Zea mays
  Clone ID: MRT4577_139935C.1.pep
CRVLSADGGRSLPQDSWSPHKFYRVKPIIIGIERASPSTYSQTSNRSDGSSSLVSPTTESRCY

SEQ ID NO: 228446 - protein, 113 aa, Zea mays
  Clone ID: MRT4577_139936C.1.pep
MASVGFGTVAPAVASSPAARTTSVGRPSAAHVPAATTKVVAAAAGKREEEKGLFDTIFGALYKEEQLLETDPVLNKVGSKGKAAATAAPKKAAEEGGNGGLSLGGFFSRPKKG

SEQ ID NO: 228447 - protein, 77 aa, Zea mays
  Clone ID: MRT4577_139937C.1.pep
WVKGLMFGSLIAVISSVLPWISLLPSTLNTSQKNNDLKMSIIRCSPALIFPVIFTMTTPLLIDFFYHSSHELFQTHL

SEQ ID NO: 228448 - protein, 65 aa, Zea mays
  Clone ID: MRT4577_139938C.1.pep
TCQCYLDTEVYLTHCKYLDYLDLNYLYLLGLCTVNFSILGSSNSLKNELSKIMPPLLNTIYKYSF

SEQ ID NO: 228449 - protein, 48 aa, Zea mays
  Clone ID: MRT4577_139939C.1.pep
RNLPTQRTETPIEQSTYRPIPKAASHRAPSISYSSMSPLVSPLQIDQR

SEQ ID NO: 228450 - protein, 66 aa, Zea mays
  Clone ID: MRT4577_13993C.1.pep
LVVSLIPKAHTSLFNSVQSVQAQKKQPAALFVLLNTVPHSIRSLHVPWTVASPLFRIENFSFPTTC

SEQ ID NO: 228451 - protein, 119 aa, Zea mays
  Clone ID: MRT4577_139940C.1.pep
MVSRSYSNLLELAAGGSGGEPLPSLGRRRIPRVVTASGIVPDLDVSDAASAADQSSHAPRERVIIVANQLPVRASRRAAAGAGGGGWDFAWDQDSLLLQVKDSLRAHHGRADVEFVYRR

SEQ ID NO: 228452 - protein, 193 aa, Zea mays
  Clone ID: MRT4577_139941C.1.pep
TITAFIIRSHISLRQRQLLAAAEGGRRRARGTYGGAGSVGAGPFAAHQPAEQRRRVGIARPGAGRRGRDWARCAAAGRSGPMASTERIHGVDRAVALAAAVAAGRGCRGCPSVPSAPAGSAESLLLHRGCNDVRASDRTPAYFVRRRGGSGGRGGAGEANRRRARLQQLAGCPSSPAGRRDGSSPQAFTRHRS

SEQ ID NO: 228453 - protein, 84 aa, Zea mays
  Clone ID: MRT4577_139942C.1.pep
LAAGLVGNSQDYGRILKPIGGSDKECILHGVWLNTDQAQPEVTLLLLIPITCLKRGALGRGLQDPCNKAWISDMDLQSMDDISY

SEQ ID NO: 228454 - protein, 47 aa, Zea mays
  Clone ID: MRT4577_139943C.1.pep
KLRVGSYCCLHYIDDGTNLIFCISLSIILMEATLYFVFLLVYSELLL

SEQ ID NO: 228455 - protein, 69 aa, Zea mays
  Clone ID: MRT4577_139944C.1.pep
DPSANCITLSSTVTQTSARLLKAGDRNLILRPLGSPRTCTNHFCHTCHRSNVHFTRLRSTNYPMMMLTT

SEQ ID NO: 228456 - protein, 44 aa, Zea mays
  Clone ID: MRT4577_139945C.1.pep
PVSKFACARRVSADQPGISGKAVAGFTRLHTPGRGSITIIRTRG

SEQ ID NO: 228457 - protein, 91 aa, Zea mays
  Clone ID: MRT4577_139946C.1.pep
RGFWQWPLLPKCFPLILTQGRFQKPPYRVSPEMYPDPLPRGKIPGSWFPQKSFFGDPGGPFFFNLAPGFSPPRKGGFFFLRDYPPLWARVF

SEQ ID NO: 228458 - protein, 105 aa, Zea mays
  unsure (1)..(105): unsure at all Xaa locations
  Clone ID: MRT4577_139947C.1.pep
GLPGLLQGCIDLALDPLAQDLVYCTSLTPDLFXYRTWGTALGIAHSCYLAAATGGRRFYKELQKKWHKLVYHLDLCLRHQRWIDAYQPTSGACIIRAALICRPIT

SEQ ID NO: 228459 - protein, 151 aa, Zea mays
  Clone ID: MRT4577_139948C.1.pep
MSYRLGGAADREEGDEELFETAPSVSGGEGSCDQERRAFVPPLRRMNSDSIYDMASMVSQQLPAKKGLSRYYEGKSQSFACMSEVRCLEDLRKKGSPYKHRTNKSYGALGLGLGGMMWPRSPPPAPAPTSASPPPTGSGRPTAPIQNGYHQ

SEQ ID NO: 228460 - protein, 381 aa, Zea mays
  Clone ID: MRT4577_139949C.1.pep
MSVASVAALRTAGSGRRRGAGSQQTGLNGGRFLMMQRRELVTKAGIPLAVSCSMATSPASANGAAQGLEILPFKADGYNFWTWRGRRIHYVEQGAGRPVVLIHGFGASAFHWRYNIPELAKKYKVYAIDLLGFGWSEKALVDYEATIWMEQVSDFLREIVKEPAVLVGNSLGGFTTLFTATEVPELVRGVVLLNSAGQFADPNKPAAAPAEEEEGGSALSRYIVQPLKEAFQRVVLGLLFWQSKQPARVEKVLKSVYIDPSNVDDYLVGSITAPAADPNAGEVYYRLMSRFMSNQSRYTLDRLLGKMSCPLLLLWGDLDPWVGPAKAARIQEFYADTAVVHLQAGHCPHDEAPEQANRALLEWLAALDARAKSAEPSLQTV

SEQ ID NO: 228461 - protein, 407 aa, Zea mays
  Clone ID: MRT4577_13994C.1.pep
MEASFGGFSVKNNPRGDNEHADLLAKSAAQGLPRPSDVFFETLKEPSVELMERAMLIISPVHSEDWRTEIVSFFHGNYPLDDEVYIKRMHARTRPYVIIEGELFKQGVCSTLLKCLSRAKGQELMKEIHSGLCGAHIGSRPLHGKVFRQGFYCPKAASDAADLVQKCENCQKGLEILGPLPLAQGNLRYAVVAMEYFSKWIEAKPQATITSTTIQKFFWQNIICHFGVPKAITVDNGAQFDSKTFKTFCDQIGTKIHFASGKWSNELVKVVWNHNTDVSRSTGFTPFKLLFRDEAITPKAARTRSIRTVASVEDEDTCKIIKDTIAGVGLQAIDHINKYQAEIVKWRDRKVRLKNIKPGHLVLRRIANLDIVGKLQLKWEGPFLVVSSSRPRSYRLKDMDMNDIPRS

SEQ ID NO: 228462 - protein, 76 aa, Zea mays
  unsure (1)..(76): unsure at all Xaa locations
  Clone ID: MRT4577_139950C.1.pep
GYYDFLQAFIDKAVAYGFIXKPXQRHIFVSAPDARELCQNLEGYKAAQDEDPATPKLRREIEQDGYNTLLLADIAR

SEQ ID NO: 228463 - protein, 360 aa, Zea mays
  unsure (1)..(360): unsure at all Xaa locations
  Clone ID: MRT4577_139951C.1.pep
MSVASVAALRTAGSGRRRGAGSQQTGLNGGRFLMMQRRELVTKAGIPLAVSCSMATSPASANGAAQGIVSDSVSPVVRAGLEILPFKADGYNFWTWRGRRIHYVEQGAGRPVVLIHGFGASAFHWRYNIPELAKKYKVYAIDLLGFGWSEKALVDYEATIWMEQVSDFLREIVKEPAVLVGNSLGGFTTLFTATEVPELVRGVVLLNSAGQFADPNKPAAAPAEEEEXGQRAVQVYIDPSNVDDYLVGSITAPAADPNAGEVYYRLMSRFMSNQSRYTLDRLLGKMSCPLLLLWGDLDPWVGPAKAARIQEFYADTAVVHLQAGHCPHDEAPEQANRALLEWLAALDARAKSAEPSLQTV

SEQ ID NO: 228464 - protein, 235 aa, Zea mays
  unsure (1)..(235): unsure at all Xaa locations
  Clone ID: MRT4577_139952C.1.pep
GGFTTLFTATEVPELVRGVVLLNSAGQFADPNKPAAAPAEEEEGGSALSRYIVQPLKEAFQRVVLGLLFWQSKQPARVEKVLKSVTLTQLDVXSNRIKFIVLDRHTHTCXYIDPSNVDDYLVGSITAPAADPNAGEVYYRLMSRFMSNQSRYTLDRLLGKMSCPLLLLWGDLDPWVGPAKAARIQEFYXXTAVVHLQAGHCPHDEAPGAXNRALLEWFAGLDARAKSAEPSLQTV

SEQ ID NO: 228465 - protein, 47 aa, Zea mays
  Clone ID: MRT4577_139953C.1.pep
PGKFTWEGADGYADEDVGLVSSKNANTNRATKGGGAAGAKKDDDDDE

SEQ ID NO: 228466 - protein, 74 aa, Zea mays
  Clone ID: MRT4577_139954C.1.pep
WKNIPPIKRPFFIATKRPPPSLPNWGKLKLKRAQSWNGTPTSARKDSVHSGLTPQLFRVFPGKKLTVLGTLAKG

SEQ ID NO: 228467 - protein, 105 aa, Zea mays
  unsure (1)..(105): unsure at all Xaa locations
  Clone ID: MRT4577_139955C.1.pep
QRISLGTEGWPGWDRRPFLLGVWSGFIAPSVFGVRFIGGTLFSRTXGSWIASAGLWRGVFAVCLAGLSGVVGPAFGSFWLRAGDVPGWLVLAFFWGLLFSPVLLG

SEQ ID NO: 228468 - protein, 62 aa, Zea mays
  Clone ID: MRT4577_139956C.1.pep
VMESRSPKGTIYTDIARGTATRPTMPNPTMCPHNIHEYTVQARVKTYCIALGNLLYHYSCTA

SEQ ID NO: 228469 - protein, 160 aa, Zea mays
  Clone ID: MRT4577_139957C.1.pep
CILFLAPIRRAHYTLFTFKVLCPSCLESSQQDAIKHYKFSELTYSRITLERKLITSSQDGTPPPIPMTPSLYLWHPSIKHKLSDIKLYSTDILDQLIYLLLCLLINSSSSSVKSPYKSEFFSYNRSRHSSDRSLPPPRGWAPEGGRRTRTGRRSCHGQAP

SEQ ID NO: 228470 - protein, 62 aa, Zea mays
  unsure (1)..(62): unsure at all Xaa locations
  Clone ID: MRT4577_139958C.1.pep
TFFKQRSEFPKFINNRVTPSSLQTXSRSRQTRSLTHEMDHTXTXSNHRXPRRERTXNRMVCR

SEQ ID NO: 228471 - protein, 124 aa, Zea mays
  Clone ID: MRT4577_139959C.1.pep
GRDIRTVDLGPSDSAGGSVLRVGPPSGARPRPFLPHGGPPPRAALVGRAAPPSSSSRLEAVEVLPAGVQPYTVRVTGLARGSFFYQCVCVYLLLEPPPRLSISSPRTSSVVKFVLLRVSNFQQV

SEQ ID NO: 228472 - protein, 52 aa, Zea mays
  Clone ID: MRT4577_13995C.1.pep
SCVIRSRHPRFASSHCSSDGRMHASLRRHASPPGRRWGARCYRSAAHRPNLS

SEQ ID NO: 228473 - protein, 76 aa, Zea mays
  Clone ID: MRT4577_139960C.1.pep
IIAFLLHMIYTNTLPYHHWRYHHIVLSFQYANLYQDPTPIYYHTPCITSDTINTVISKNPYYHDIHPEYPHLLFYH

SEQ ID NO: 228474 - protein, 79 aa, Zea mays
  Clone ID: MRT4577_139961C.1.pep
ALGAFFFFFFVIGRSGLPATMRIRTQNHQGPIERASTATAGAPMHHVAGGRSVSISCIHMHACVVPDRAVVVVSSELAS

SEQ ID NO: 228475 - protein, 72 aa, Zea mays
  unsure (1)..(72): unsure at all Xaa locations
  Clone ID: MRT4577_139962C.1.pep
RLYNXKNWSCCVARXGWTKSAPTLCCSGCLVKMLFIVLYQCCSEAGSLEFHIIFVRLLRGGVELRVICSTRK

SEQ ID NO: 228476 - protein, 178 aa, Zea mays
  Clone ID: MRT4577_139963C.1.pep
MKSSLLLSATLVSAAAALEFVPRENPKVVLLDTQRRNVINPVAHDRLRRRQNTVQETLDNLETLYFANASLGTPPQKFRLHIDTGSSDLWVNAVNSNLCMQGGNQCGASGTYNANESSTYKYVNSVFNISYVDGSGASGDYATDTFRFGGKTLKDLQFGIGYVSSSTEGILGIGYPVN

SEQ ID NO: 228477 - protein, 99 aa, Zea mays
  Clone ID: MRT4577_139964C.1.pep
MPGAGEEDKKPAEGRVHIHLNVQGHDGNDELFPINTATQLNKLMNPYCDRHAVDMNAMAFLTDGRRLPAEHTPDELDMEDMDNIHCVLHHTESSGPNTT

SEQ ID NO: 228478 - protein, 95 aa, Zea mays
  Clone ID: MRT4577_139965C.1.pep
NKPYEPPSWVGARFFSHSSFGIFAGCTKICETAPICSSFIVIDGIHSFVCSTSTNHRQNLPKRTRQLCSLKKDQGTFTKEDPLNQARKKCSQRSS

SEQ ID NO: 228479 - protein, 61 aa, Zea mays
  Clone ID: MRT4577_139966C.1.pep
PIVCPLVHAGHVFSAMGIQCRYETVIVWKRRLYGHVRFDALVASGGMCGLSTFTHVEHVCR

SEQ ID NO: 228480 - protein, 109 aa, Zea mays
  Clone ID: MRT4577_139967C.1.pep
GKPWPLLHGSHVQRHPSSRGGWVNSTACTHSKTHSFHMDTNQKIAFILHNTNTMKRIEQNEGSIINYNTYWTSYEPTLQSTITTLATYADLLLKRDQSLTITNEDEVII

SEQ ID NO: 228481 - protein, 82 aa, Zea mays
  Clone ID: MRT4577_139968C.1.pep
GLVVLVLGVAGPGPLRGGGVRVVPPAVLQDGRAVGACCGLHAKSIALCSTRCRLVRTLHAETRRSDRGGEEEHGGYDRGRVG

SEQ ID NO: 228482 - protein, 45 aa, Zea mays
  Clone ID: MRT4577_139969C.1.pep
HNHSKLAEEKHNRFLARWGEIRQCAWGNQRGDVSPSAPPTRVSPL

SEQ ID NO: 228483 - protein, 82 aa, Zea mays
  Clone ID: MRT4577_13996C.1.pep
GTKDFVEELSPNARIGYAVDDVEGEGDGEEEDDDEEDEGEVKDRGNGEKQTLKPWLDPRELARALDGWDSREVAELEGAGLV

SEQ ID NO: 228484 - protein, 515 aa, Zea mays
  unsure (1)..(515): unsure at all Xaa locations
  Clone ID: MRT4577_139970C.1.pep
MATAAVLAATLALFLRAAAATAATAAAEADRIGRLPGQPPVNFSMYSGYVTVDAAAGRALFYWFIEAAGVPAESAPLVLWLNGGPGCSSVGYGASEELGAFRINADGRTLYLNPYPWNKVANMLFLDSPAGVGYSYSNSTSDLYTAGDNKTAHDSYNFLVNWXLERFPQYKHRDFYITGESYAGHYXXPQLSQLVYRNKQGIEKPIPNFKGFMVGNAVIDDYHDFIGTFEYLWTRGLISDETYEKLRLACQFDVSEHASKECNKVFDIAEAEEGNIDAYSIYTPTCKKTSLHKRRLIRGRTVVHLLRYQHTTFLCSETVALTVLSXSESIVLVKHKSSSTSSRHHAWFKXPWLPRXYDPCTEKYSTKYYNLPEVQRALHANVTGIPYPWVTCXVCSAGFLFVCLSCSHHKYVFSFDRLFLVSCTKQPLVPCSDPVYDFWKDSPRSMLPIYRELIAAGIRIWVFSGDADSVVPLTATRYSIDALFLPTITNWYPWYDDEEVGGWCQVYEGLTLVTV

SEQ ID NO: 228485 - protein, 95 aa, Zea mays
  Clone ID: MRT4577_139971C.1.pep
PPPFYPCAPPSFSPLPIVKAGPPPRPFPVFPVGARGPPLPKVGPPPASPSFLFKVPCWGFFPFFFFFLWGRPPSFRLRGPPLRPFLWFYLKCWSS

SEQ ID NO: 228486 - protein, 463 aa, Zea mays
  Clone ID: MRT4577_139972C.1.pep
MATAAVLAATLALFLRAAAATAATAAAEADRIGRLPGQPPVNFSMYSGYVTVDAAAGRALFYWFIEAAGVPAESAPLVLWLNGGPGCSSVGYGASEELGAFRINADGRTLYLNPYPWNKVANMLFLDSPAGVGYSYSNSTSDLYTAGDNKTAHDSYNFLVNWLERFPQYKHRDFYITGESYAGHYVPQLSQLVYRNNKGIEKPILNFKGFMVGNAVIDDYHDFIGTFEYLWTHGLISDETYEKLRLACQFDVSEHASKECNKVFDIAEAEEGNIDAYSIYTPTCKKTSLHKRRLIRGRTPWLPRGYDPCTEKYSTKYYNLPEVQRALHANVTGIPYPWVTCSDPVYDFWKDSPRSMLPIYRELIAAGIRIWVFSGDADSVVPLTATRYSIDALFLPTITNWYPWYDDEEVGGWCQVYEGLTLVTVRGAGHEVPLHRPRQGLKLFEHFLRGEPMPRPVDSVQSF

SEQ ID NO: 228487 - protein, 40 aa, Zea mays
  Clone ID: MRT4577_139973C.1.pep
TVYMKLVKKELNLKVHNKETCITVLCYIVYLFVMDGCIQF

SEQ ID NO: 228488 - protein, 606 aa, Zea mays
  Clone ID: MRT4577_139974C.1.pep
RALAAAGGEGRGSVSACESYLPMGKLTRRVLRANGMENKVKVFHKRSDELGVGVELDSRPDILVSEILDSELLGEGLIPTLQHAHDMLLVKNPKTVPYRATTYGVLVESTSLWKMHDLHSNEANAEDGVRLIPSGTQIVLSVKSQQHAMQCDALADEIRLLSEPFKVFEFDFSERPDSHRETKIEIKATADGHAHAIVSWWVLQLDSSGSVFYSTAPRWVRQSSGVDLPQYANGTKDWCDHWKQCVWFIQGTGAPAKKDQTLSLSASHNQTSISYQLKGNDEGSRSPKSNHLTLLPERVALYGDKVWRSALISVIRNYTSERSSPTCIVADDSVFLALIVSFLLPSSKVLAMFPCLRDIGLNYLQAVADANNLSMDRIKVIGKKASSLTTNDLNHEKVNMLVGEPFYHGSEGMLPWQNLRFWNERTLLDPLLSEDAFIMPCKGILRFCAMSLPDLWRSRRSLKDVEGFDHSVVNDTLGACGDLPGEQQGPCLPYYVWQCGYTKKLSEVYSLMDLNFSEPIHSCFGETKVEFAHDGTCHGFAVWIDWVLDKENSIVISTGPESRYWKQGVQLLSTPVQVNPANSVMHVEANFDAVIGELTFKSTTLS

SEQ ID NO: 228489 - protein, 118 aa, Zea mays
  unsure (1)..(118): unsure at all Xaa locations
  Clone ID: MRT4577_139975C.1.pep
VNSKILSXVIEYCNKHVHAAAKPAEGADANAAAAAGGGEDLKNWDAEFVKVDQATLFDLILAANYLNIKGLLDLTCQTVADMIKGKTPEEIRKTFNIKNDFTQEEEDEIRRENQWAFE

SEQ ID NO: 228490 - protein, 149 aa, Zea mays
  Clone ID: MRT4577_139976C.1.pep
SLRCCCATTTPAAAAILFRGAGQSRRLFQLKQVTASSGHSTATSQRGNTWRSGAAWTQFAAPSSGRIQSGPRRLLPVPSPVVHRTGPVLPGSVDFQQLFYGMGNNMGPFGAIKGTHDTLLYPSIPRETHHFDIIPQHLLVILVRSKCRF

SEQ ID NO: 228491 - protein, 782 aa, Zea mays
  unsure (1)..(782): unsure at all Xaa locations
  Clone ID: MRT4577_139977C.1.pep
MPSCLLPGIAPRPPPAALRSLLLRRSRMASSGTARAFQLRLNPLTGDSEWLVVDEAETEAEAPAPAPTQHKQLLAATSYLDMLNDASRNRAYRLAIDATVTDPTSRVLDIGAGTGLLSMMAARALAAAGGEGRGSVSACESYLPMGKLTRRVLRANGMENKVKVFHKRSDELGVGVELDSRPDILVSEILDSELLGEGLIPTLQHAHDMLLVKNPKTVPYRATTYGVLVESTSLWKMHDLHSNEANAEDGVRLIPSGTQIVLSVKSQQHAMQCDALADEIRLLSEPFKVFEFDFSERPDSHRETKIEIKATADGHAHAIVSWWVLQLDSSGSVFYSTAPRWVRQSSGVDLPQYANGTKDWCDHWKQCVWFIQGTGAPAKKDQTLSLSASHNQTSISYQLNINDEGSRSPKSNHLTLLPERVALYGDKVWRSALISVIRNYVSXLYVLGIVCSYPTSIPYYDCSPLLKIIIIINNXIPIFKIISMIIKXHHFLVLTSERSSLICIVADDSVFLALIVSFLLPSSKVLAMFPCLRDSGLNYLQAVADANNLSMDRIKVIGKKASSLTTNDLNHEKVNMLVGEPFYHGSEGMLPWQNLRFWNERTLLDPLLSEDAFIMPCKGILRFCAMSLPDLWRSRRSLKDVEGFDHSVVNDTLGACGDLPGEQQGPCLPYYVWQCGYTKKLSEVYSLMDLNFSEPIHSCFGETKVEFAHDGTCHGFAVWIDWVLDKENSIVISTGPESRYWKQGVQLLSTPVQVNPANSVMHVEANFDADIGELTFKSTTLS

SEQ ID NO: 228492 - protein, 63 aa, Zea mays
  Clone ID: MRT4577_139978C.1.pep
MTSQGQGNKDMVDKGLEGAEKKFGGSMGQNTEKNSGVNEKITDGARGAFEKATGKNVPDKVSN

SEQ ID NO: 228493 - protein, 227 aa, Zea mays
  unsure (1)..(227): unsure at all Xaa locations
  Clone ID: MRT4577_139979C.1.pep
AQALDNFRWVSDIRAPLSLXAFTQYXLLWDSLREVHLSQXTPDQHRMEXVXSGVFSSKSCYQSLFAGSTPFQPWKRLWKTCAPPKCKFFLWLAMKNRCWTAHRLEKRDLPHPVVYPLCDQEQETIQHLLISCIFARQFWHILLSPFGLGHLTPVVDAPSFTEWWKRVECHVPKSTRKGFNSVIILGWXIWLHRNNXKVVFDGDSPSLRRIQGLAALDLARALNVAGP

SEQ ID NO: 228494 - protein, 61 aa, Zea mays
  Clone ID: MRT4577_13997C.1.pep
MTRKTSAHLHHGSPLFISATSTAYHLGSCIRDHATCNLLLQADKVLTSNLNLSTVFKIILA

SEQ ID NO: 228495 - protein, 65 aa, Zea mays
  Clone ID: MRT4577_139980C.1.pep
LRKLILHYNLELASSSLQETMTSILRPIVNANSNGISEYRVVYKKEAGALETNIQSTHIERFVTS

SEQ ID NO: 228496 - protein, 165 aa, Zea mays
  Clone ID: MRT4577_139981C.1.pep
ELSMPTIRQHFADIGLDPDIAQYTKMSALSGGQKVKVVIAAAMWNNCHMLVLDEPTNFLDREALGGLATAIKKWEGAVVMISHSNEFVSALCPESWKLIGGKLYKEGQSAVDDESKIDEAKVKAKLSKKKKKTRNELKAQEERRRARHLKWIIEGGVKEPDTESD

SEQ ID NO: 228497 - protein, 106 aa, Zea mays
  Clone ID: MRT4577_139982C.1.pep
RSRERPRTSSRSASLAIVSQEAFVPGVRGQPECLSADQGGVGEGKAALAANFQSQDVAVLSQSRRWDAKCCDYTIRRVTLVFSFCVCTYYLLRVTWWDFLCLHMVG

SEQ ID NO: 228498 - protein, 104 aa, Zea mays
  Clone ID: MRT4577_139983C.1.pep
SSQSRAGPTGACKGYIFAMGVTEELDTWPEQDTHDRRWVAPAEAYQLCRYDWMREALTALLERLPVLEPVVAAAAAAATAELTTDQAGMYMMLQATSDGAVALC

SEQ ID NO: 228499 - protein, 68 aa, Zea mays
  Clone ID: MRT4577_139984C.1.pep
RFFLLSLSSFSEAQAALIATFQIYSRSEILIVLSFEREEFSWLECVTYLSIVISLFYFFNYDVPNFDL

SEQ ID NO: 228500 - protein, 56 aa, Zea mays
  Clone ID: MRT4577_139985C.1.pep
LRQKRLHSSNCLIRQDYLGDLADHDVALLSPRAGKGRGKKQEEEDEWTRSSARCWW

SEQ ID NO: 228501 - protein, 61 aa, Zea mays
  Clone ID: MRT4577_139986C.1.pep
HASVLDRERRPFFVLVVWCYLNFSGKKLAPLSVGCQKNHHENIFFVPVTHKKSRAGPLQYS

SEQ ID NO: 228502 - protein, 45 aa, Zea mays
  unsure (1)..(45): unsure at all Xaa locations
  Clone ID: MRT4577_139987C.1.pep
HVMMLTRKFFVYQMNKKTQGXEKKLILGTLGRGEIQVGKASPQGF

SEQ ID NO: 228503 - protein, 62 aa, Zea mays
  Clone ID: MRT4577_139988C.1.pep
PLSIECAFVLYRTIGPILFVTTPAGRSLFCYRISKCGNDRVSTVTKMSNNVLFAPCRCPDIR

SEQ ID NO: 228504 - protein, 32 aa, Zea mays
  Clone ID: MRT4577_139989C.1.pep
WTNSQMGRITGFTGKPFTLINHLYLVNVSLTS

SEQ ID NO: 228505 - protein, 222 aa, Zea mays
  unsure (1)..(222): unsure at all Xaa locations
  Clone ID: MRT4577_13998C.1.pep
MITFADLTEPAAAGAERCVDRQLWLACAGSMCTVPLVGASVCYFPQGHAEHALGLDGAADLSAARVPALVPCRVTAVRYMADPDTDEVFARIRLVPLRGGEAHAGGLDDDVAAADEQEKPASFAKTLTQSDANNGGGFSVPRYCAETIFPRLDYAADPPVQNVVAKDVHGXAWKFRHIYRGTPRRHLLTTGWXSTFVNQKKLIAGDSIGFLRGDSGELHVGI

SEQ ID NO: 228506 - protein, 37 aa, Zea mays
  Clone ID: MRT4577_139990C.1.pep
LFLNAAVGIRVLVVTQRSVQPKLSGTHLFRFPAQLIN

SEQ ID NO: 228507 - protein, 36 aa, Zea mays
  Clone ID: MRT4577_139991C.1.pep
LLLKLKRFEHWLSSDSFKNQAHNISCSENIDETLCS

SEQ ID NO: 228508 - protein, 143 aa, Zea mays
  Clone ID: MRT4577_139992C.1.pep
SPLKFISELDPGATALLEAALMDANREREEKILKGITKYSQPSPTSPCEHDAIDEASLEASDGELCCICFEQACSIEVQDCGHQMCAACTLALCCHSKPNPATLTPPSPACPFCRGSISRLLVARASPDADDGDGVDKPEHDL

SEQ ID NO: 228509 - protein, 57 aa, Zea mays
  Clone ID: MRT4577_139993C.1.pep
TAPATTTTPSPLQTRRRRGNRSRDDKRLRGQSGLALGRIGLKSTQQRWRPRRRPLAS

SEQ ID NO: 228510 - protein, 132 aa, Zea mays
  Clone ID: MRT4577_139994C.1.pep
CPMEVQDCGHQMCAPSTLALCCHSKPDPVTLALPSPACPFCRGSISRLLLVARASSDDADTEKSAAAAAAASSPQLVRRRSRRSHNLSDGGSSSFKGLSSAVAGSFSKIGRGSSRTMADSDGCGVDKPEHDP

SEQ ID NO: 228511 - protein, 126 aa, Zea mays
  Clone ID: MRT4577_139995C.1.pep
YKLFFFFFFFFFFLFFFFFFKSVHFSLIKTRPDFLMRHYGISPNEQRATTQVIILRETASGKPKTDSNRVQMNHGQAARVTASNSPSYPSKLSPDWIPKCIPGIEASQPKQTLGQWTQKPVCPPCK

SEQ ID NO: 228512 - protein, 69 aa, Zea mays
  Clone ID: MRT4577_139996C.1.pep
MPKQIHEIKDFLLTARRKDARSVRIKRTKDAVKFKVRCSRYLYTLCVHDTDKANKLKQSLPPGLNVQEV

SEQ ID NO: 228513 - protein, 70 aa, Zea mays
  unsure (1)..(70): unsure at all Xaa locations
  Clone ID: MRT4577_139997C.1.pep
RITLGGPSFFFSPNAFGKIXLRFAVYCNPFGHNGSNLASGIPGWGWKXIKKKKKKKKQKKKKKNKYLFIQ

SEQ ID NO: 228514 - protein, 49 aa, Zea mays
  unsure (1)..(49): unsure at all Xaa locations
  Clone ID: MRT4577_139998C.1.pep
EDIPFETFVWGAFFLSILILIDQIFLGXVSSTQFIIAXGXSGVESRDCT

SEQ ID NO: 228515 - protein, 54 aa, Zea mays
  Clone ID: MRT4577_139999C.1.pep
MFPAPYGDASAPAMLNTVDFVVSNVDDLMNWPRKVSIWPMTYRLACFTMQMMHA

SEQ ID NO: 228516 - protein, 160 aa, Zea mays
  unsure (1)..(160): unsure at all Xaa locations
  Clone ID: MRT4577_13999C.1.pep
PLRKNIPLEEEGGRAQKIKKFFKHPGGPLLDIFPPQIQALRVFXTLGIPFLPSPPQGSMGKFGDPFWLGEPLVKGGFXKFGGRIKEIQGFFSGGPPPPGLRNRLGAGVFPFKLFKPFSHPGGPGGGLPPRISFLPGRPPHPKGVPPPGGPLANCLGIKIF

SEQ ID NO: 228517 - protein, 170 aa, Zea mays
  unsure (1)..(170): unsure at all Xaa locations
  Clone ID: MRT4577_1399C.1.pep
MSCTVTIPNSPVFSPSRRPLSCKAAPASPEPAVAVSASSAAPAPAAAGSPLRPFALRALLREEVFPSPSPQLASAAAVASVPSGAVLKRRRPAPLLVPASGAAAAAAVAAVEADPTNEVEEEGEEFAAYCRRGKGRRVEMEDRHVAKVALGGDPQXALFGRFEGTRGKNA

SEQ ID NO: 228518 - protein, 58 aa, Zea mays
  Clone ID: MRT4577_139C.1.pep
MGRRILNDALRTMVNADRRGNASALLRPISGVMVSFLNIMKYRGSIPPLTRYLPQPPS

SEQ ID NO: 228519 - protein, 59 aa, Zea mays
  Clone ID: MRT4577_13C.1.pep
VLFILHMHDWACIVSYYYMAASLLLLLHACNARRTWVRGALIADYTSRPRRVHPRCAYG

SEQ ID NO: 228520 - protein, 68 aa, Zea mays
  Clone ID: MRT4577_140000C.1.pep
LEAGRVYPSQAHYIINIVRVCHRLGSESRYQLKLLAQMCLYSCNLVIGEDALECLQICYSIQYSSSVS

SEQ ID NO: 228521 - protein, 150 aa, Zea mays
  unsure (1)..(150): unsure at all Xaa locations
  Clone ID: MRT4577_140001C.1.pep
ARKTARAHPAKTVALPDRHQPGTRAANKETPASTTGGDPAAQRPDGPAGDRETRQTTRRREDEXTPTKPAAPRPPSDGPRHKSGDRQRHRPPQARTRPHPGPRKTPPGAATPERRRTRRQHQAPHREKPPPAEDSGTPDRTTTTAPPPRA

SEQ ID NO: 228522 - protein, 87 aa, Zea mays
  Clone ID: MRT4577_140002C.1.pep
VVALVASPCALDRLCPPESQDTRGAPTLAGKKQYHTGPETKNHMVMIVAVNQADPLSMTENAVGGTTGETAVLPLSILLNILELNWN

SEQ ID NO: 228523 - protein, 953 aa, Zea mays
  Clone ID: MRT4577_140003C.1.pep
MPPFRMPSHFLALPLLLLLLLQAPSPEAAESTPGTRTRKIGSSGASSVFSLFNLKDKSKFWTESIIRKEFDDLEGSASRDSSKNGLLNFTRAGNIANYLSLAEVDSIYLPIPVNFIFIGFDGNGRHEFKLGPEELERWFTKIDHIFEHTRIPPVGEVLTPFYKTTVKKLQHYDLPLVSHVNHNFSVHAIHMGEDVLSVFEHAIKVLSCKDDLVDSRENEEIFLQVDSAQMEHIFSTLVDHLQIQEAYNIFVLNPKPIGKRINYGYRKGFSESEINLLRENKTLQARILQSKSDNKLFLDIEKGVNRRPLYESHPLSSFSWTRTDSMDMGDWSKKCKEALSKFELLKEGKSKEDIVYEKAVQILHGTKDEVHDIVQSALKSSDLKGLHAQCLTDIWIGRERFAFVDLSAGPFAWGPSVGGDGVRTELSLPNVAKTVGAVAEVTEEEAEEKLQDTIRERFSSFGEDYHAVDILLAEIDVYELFAFKHCVGRRIQLALFKELDERMHDLKKELEGYNTGDFDETNKKKALDALKRMESWNLFRDTSVEHHSYTVAHDSFLAQLGSMLWGSMRHVIAPSASHRVYHYYEKLSFQLYFVTREKVRSIKQLPVNVKSIRESLNSVLLHHQNSMFSQNMLSLSEDPSLMMAFSMARRAAAVPLLLVNGTYKSTVSTYLDSAILQHQLQKLNEHNSLKGRHSNHRSTLEVPIFWFIHNEPILLDKHYQAKALSNMVVVLQSDDDSWESHLQCNGRPILWDLRKPVKAAIAATAEYVSGLLPPHLVYSHAHETAIEDWTWSVGCNPSAVTSEGSQLSEFQQDVIARNYIITSVEESIQVINSAIQQLVIERTTEKGFKIFKAHESKMVEKYNAVVSLWRRVSAMSKGLRYGDAVKLMSMLEDASNGFSSAVNSTISSLHPVQCTRERKLDVQLDLTTLPAFLAVFLLLWFLLRPRRPKPKIN

SEQ ID NO: 228524 - protein, 119 aa, Zea mays
  unsure (1)..(119): unsure at all Xaa locations
  Clone ID: MRT4577_140004C.1.pep
TISFIYFRAHTNRRNTIREWVDGRALLAVAGSASFTHTXGGGGGTPTPKVYITXPVYVSSLVXMAPAVHLSPAIHLSTTVHLPSSVTCDFEVHAEIAVCXHYATQPGRRHTHANLHRCP

SEQ ID NO: 228525 - protein, 256 aa, Zea mays
  Clone ID: MRT4577_140005C.1.pep
MATARALRLVLTSSSVPAAKDGFLVAARRRLLSASTEAGGAGDAAVQSGDAPSDDYTDRPPRFSGAEEATSAGGRVGKHPGGKAAERVPPFAPSGKKPPLAGSEHELADPAGAASFTQKRRLSCSSSSSSREREPREAATPGGPESAARKVREEDREYYRTHKPSPLAEVEFADTRKPITRATDGSAADRYADAQGRTVEDTVDDSLARAEAMFREAAARGNPEWPHSRALAEMLARRELGKDAAATASGHPCWGS

SEQ ID NO: 228526 - protein, 86 aa, Zea mays
  unsure (1)..(86): unsure at all Xaa locations
  Clone ID: MRT4577_140006C.1.pep
RTSGGSPYFHGDAGKXQAHPLKIFMVVRDFLSMLDHVCKEVGQQDRTAVVGSARSFRMSATTAMANLKVYGQHARDNDDDEESWSL

SEQ ID NO: 228527 - protein, 96 aa, Zea mays
  Clone ID: MRT4577_140007C.1.pep
MATAEVQTPTVVAAEEAPVVETFFPAVGREESVSVEGTALRWDDGAAADVSSVFEDVGIYADCVATTEVSISVTVDASKLWSRELTQQELGHVGEE

SEQ ID NO: 228528 - protein, 101 aa, Zea mays
  unsure (1)..(101): unsure at all Xaa locations
  Clone ID: MRT4577_140008C.1.pep
VAQDRLCVPALFSLRXLXLMEAHETAYSIHPGCLYFFLYLXKIFWWGGVXXDSLXFVAFCLCCXWFLAXLSSPFPLLPPLXFPXSPLPPFVLAFLVPLPPP

SEQ ID NO: 228529 - protein, 126 aa, Zea mays
  unsure (1)..(126): unsure at all Xaa locations
  Clone ID: MRT4577_140009C.1.pep
VLILSERLHSVTAQFDHLRSIRFQDAINRAMPRKKIQKRPEIKPAEPSKSNLVLKSDVSKVVDHEVSTTPMRVQEQLLDDETKALQXELTSLLMXVQETETKMIECXSTNHLMSTQVLXQQXQQFQ

SEQ ID NO: 228530 - protein, 87 aa, Zea mays
  Clone ID: MRT4577_14000C.1.pep
ILILVGWGSLAFLLAPATPVFLLKQSTARVGSGPGRWSVWVCPPPCKAPLFFFGDSPHAKVTGRVIGVVRTTRLFFFPPLCNVRTPS

SEQ ID NO: 228531 - protein, 129 aa, Zea mays
  unsure (1)..(129): unsure at all Xaa locations
  Clone ID: MRT4577_140010C.1.pep
GAWWRSCLARRFLRARRLLWLGAGGPFGGSPGCFGRASSACRCSCCWPGCLVRCSLRRAPSWGFVCAPPALGLRGLLYPLIVSGWGCGSAASGSLLLASSSXSLCVSLAVGVWLGLGRGGSLCSVGRVG

SEQ ID NO: 228532 - protein, 62 aa, Zea mays
  Clone ID: MRT4577_140011C.1.pep
AHNENIIVWGTFNLPLCNDLGYTTLVPPVYRPPSICSPVVETFHACLLTICLRRGMFNNKCL

SEQ ID NO: 228533 - protein, 99 aa, Zea mays
  Clone ID: MRT4577_140012C.1.pep
MQGGPLSPDEYWVISPPALLHQPASTIVVAIDRDRNSQLAVKWVVDHLLSGASHIVLLHVAVHYHTTHGFAMVETTHGALEAEMKEIFVPYRRFFNRNG

SEQ ID NO: 228534 - protein, 66 aa, Zea mays
  unsure (1)..(66): unsure at all Xaa locations
  Clone ID: MRT4577_140014C.1.pep
RGYNFLDNFIRELGDYIRFRINNNRAYTIPXKGGPGITQADLLVINMTDLPTAVVADLTXMERDPL

SEQ ID NO: 228535 - protein, 119 aa, Zea mays
  Clone ID: MRT4577_140015C.1.pep
ICTKASQLEKQSQLDHLPIACQSIHKSPRDDQAQKPHRDITPAGSRSKAHNYITKGSYHPRGGAKAHNYITLAGPELVRHKSPKATLMLQAGQKPSNNHPSFLDPPGLRDKLSLAKTPI

SEQ ID NO: 228536 - protein, 102 aa, Zea mays
  Clone ID: MRT4577_140016C.1.pep
ILRFQQDTQLQGRSQLRSWAGCTHVRLVRIVAGEGSEEVLPKAPTGTGRRRLPGVRAPSRHHRGERETERALAARGTEEDKSQVRIPQGHTHSRGTGCVPAG

SEQ ID NO: 228537 - protein, 68 aa, Zea mays
  Clone ID: MRT4577_140017C.1.pep
WRDRRRPIVVRIWISRVTLLVAFPMTCSSVVCRVHLARPLVELILVMCISGRITRRTVLLHPAYVVPS

SEQ ID NO: 228538 - protein, 35 aa, Zea mays
  Clone ID: MRT4577_140018C.1.pep
HGCSDRDYDSAAMSATARVSFTTTFRTITTATVTA

SEQ ID NO: 228539 - protein, 89 aa, Zea mays
  Clone ID: MRT4577_140019C.1.pep
PSPNIPLSLVERKLPPLKPPLKEPRGGSPLVVLCRRGNDFQKPVQFFPEKGFPPPKDLLGGLPGWGRDVPPPFPVSHRDGNGCPPLFPF

SEQ ID NO: 228540 - protein, 76 aa, Zea mays
  Clone ID: MRT4577_14001C.1.pep
QKKRGLALDFDAQANPIHPFTYGMNPVERSSHFFHIKIGFCEGSVPTLLSYLGLRVYKRYTTAKHRLLSTENFLSI

SEQ ID NO: 228541 - protein, 155 aa, Zea mays
  unsure (1)..(155): unsure at all Xaa locations
  Clone ID: MRT4577_140020C.1.pep
LFVGNNPLITMAYMTCMXAYDSGHGHWDHTDVALSDANTLLLDKKHFQVYGLEIPDEIPEGEGAATYXMLATEGFTDEXRHGAHRKGEANXLVCVSQATNXPMLVGAVLADKYTXSCYTWQKNASXCTRKCLAPLAKVIRESLRFIEVLLTPVHA

SEQ ID NO: 228542 - protein, 74 aa, Zea mays
  Clone ID: MRT4577_140021C.1.pep
KKGAQIFSLSIIFSLPLSFFHIIFSPFGPLLFFFFNRTTTFSNKIKQLIIWYYKNCATNSTNCTGTRNRFVHSN

SEQ ID NO: 228543 - protein, 154 aa, Zea mays
  unsure (1)..(154): unsure at all Xaa locations
  Clone ID: MRT4577_140022C.1.pep
PAFLHRRYATSVKLTAISAGLKTVEQTTLTEDNRFSTVGSDSDEYNPTLPKPRILVTEKLGEAGVNLLREFGDVDCSYDLSPEDLKKKVAESDALIVRSGTKVTREVFEAAKGRLKVVGRAGVGIDNVDLQAATEHGCLVXNAPTANTVAAAEH

SEQ ID NO: 228544 - protein, 776 aa, Zea mays
  Clone ID: MRT4577_140023C.1.pep
MDSSRSWIFTELGQPTYCPETFPEVPFERPTPPIIFFDEEHIFEEESSSSTTATPRNPSDPKQAGGDLDSIATAALSASEEIPQSLLVIDLERATSKCIRTHAVNDVPAVHSIIKGLQLERIGLAGSAPDLDTLTTARHCGSELSCQLGSNKRDVSLRVGCDQSYEWVDPETLDRSFVVLDNACATHEVFEVLPLSFPAAWVNVGKLPTTLCWKIPWPPPVLWVNLHAGGRYITSLLEECQLVFTIFFGGVCSLAKIQWPYMVLEYLANLHVIHGKIHMHPVQVCVRSYAVMPSAKGLVAETHLHFIGTYRGVVSTAFCTEIVESADAYIFAGSIFKDYSSVGYSFLLKKAKAIIVQPERVGVGNGLSFRCLMMKEYWTEIAKKVKKNTTTYENYKRNFVPEGQALESEPNEPLRVNVLFKYIQKMMTVNSVVMAETDDSWFNCHKLKLPESCGYQFQMQYGLIGWSMGALLGYAQGANHKILSPLTALHPLVAVCYDHDIIMDAAGFGDELVVISLGADCQIIASYHRWPFGQTGTGHFSPIGGYQVRQDMVLILDVARFIPLQFFWEAMNTTNDSTLRGSMLISRKVAESSLLYTVSCRDENWKIMPKFCVEDLPSLLKAGIGACVGLVTSGLSVVSSGQGNFSVFVWDPGDSGLVTSSLSAVSSDQGKFSVFVWDPGDRGLVTYGLRVVSIARVTAIMSGTYARGAATTSSPKMRQTQFRWRAEERHDAFNNDANPQIKLILHRQRLGGKPYFKEWGMLDILGVVDELWVMWA

SEQ ID NO: 228545 - protein, 161 aa, Zea mays
  unsure (1)..(161): unsure at all Xaa locations
  Clone ID: MRT4577_140024C.1.pep
LGYRSLCTTMYHHKDEETVIGSPIENLLFIGLSSGDKNMLMRDGREPVYFFGNPAXTDNYSGILRRLISHSQFVQNVVXLRCDSQFVLCSYCDGXLRLWDLXTDLTTRRLESHXKDVLYADFFVNNRQRDFVFRDKTIKVWNTLXESKYTIGGDLDAEEGH

SEQ ID NO: 228546 - protein, 71 aa, Zea mays
  Clone ID: MRT4577_140025C.1.pep
QHTKHNTVPTMADTLWGFLMLLGLSESVATVTIYSQCSHAPIPLIIAPLPLTNNCTSMKRYTHQLTLPDAI

SEQ ID NO: 228547 - protein, 33 aa, Zea mays
  Clone ID: MRT4577_140026C.1.pep
LFFFFCLFIFFLWVLRVTDSIYFMPLRENILGE

SEQ ID NO: 228548 - protein, 442 aa, Zea mays
  Clone ID: MRT4577_140027C.1.pep
MQRRARSRGGVRLLALLPSFDTRAQESVGFPNPVTMAAPPSPSSRSPSSEVAVHRFSGTLDVSSSPSRTELLSMVKKHSHLIGWTIIGAEDDASDVGMDDKFWHEMLDLFFVRGRQSKRSEEDDLVFFVNNMKLHGYGFNDNMEDPPPFFVRRWAPTLEKISINTVEVDWERSFYLNLIAHTSYTVTVAIFGIEDLRNRAAKNKQLPPVYKVTKNVYASPSRVNFHLDRRKAVETLPAYPNIFFSVDDFDDTFDAVVLSDPEHCYCVILNAHDGAAFPEESECKNPVSNTQPGMSCGSAQEKPPKRTLFSAYVGYQNVRGAYDACRSKFGSFLSLGHDHNKLDRLFMKGPEGRGEVEVAVSGIADQSSGKSKKDPGDSFRVLVHRAASAASKLVKHAYESSSANRQMDDELVPLKCCLMSVSLPWDYIAHDLLHKDTPPMDL

SEQ ID NO: 228549 - protein, 95 aa, Zea mays
  Clone ID: MRT4577_140028C.1.pep
CAETWFKIRGNKICEICGSTACNVAGFCDAEFIEQWNESSNTASAQATATEPRRFWQGHRFLNFLLACMRKHGEVSEFKLAEHEKTTGDGQVLLG

SEQ ID NO: 228550 - protein, 34 aa, Zea mays
  Clone ID: MRT4577_140029C.1.pep
GRQREALTLCRYRKLRDPGDRRVSHRTPQHVMLL

SEQ ID NO: 228551 - protein, 95 aa, Zea mays
  Clone ID: MRT4577_14002C.1.pep
RTRGLIYLALYIEVWLILYLSDAHTYMTMEVQRRGDTTMPHTFARPKHPSLYMLNLLSQRGKIYGYYHTTYRTWATDYGFTIPAAKTLLYATLGV

SEQ ID NO: 228552 - protein, 193 aa, Zea mays
  Clone ID: MRT4577_140030C.1.pep
MAAAEVLTAAWEEWGLRALVLLSLTVQVTLHILAEFRRHVDSGALRAVVWSAYMAADATAVYVLGHLSVASRSPERELTALWAPFLLLHLGGQDKMTAYAIEDNQLWLRHLQTLVVQVAAAAYVVYGSSAIVGARRLPLLLAATVTMSAVGVVQYGERVWALRRAGTSPTGNYSSDIGKRKFNLGVPDSFISR

SEQ ID NO: 228553 - protein, 107 aa, Zea mays
  Clone ID: MRT4577_140031C.1.pep
MVNGGEQSAITAAVERGRVSGVSRRLAGEESSDDDDEGSQRFSDAEDRSWHSHSRQGSALELEDCISTSAPISRDAGAASAGGGDTATAERARKSCVSECSLDGVVD

SEQ ID NO: 228554 - protein, 41 aa, Zea mays
  Clone ID: MRT4577_140032C.1.pep
PVAHSSDKNPDSPYKLIAPLSIGGLSMATPTTHHSCQDYNC

SEQ ID NO: 228555 - protein, 82 aa, Zea mays
  unsure (1)..(82): unsure at all Xaa locations
  Clone ID: MRT4577_140033C.1.pep
QKKKKXGXTLPRXSAPGLNWRGGASGPVXLKKLECLKQAIGXDKLXWDXXYPQQNKSWXWDGEIINRDXGGFDFKSEVKFWI

SEQ ID NO: 228556 - protein, 67 aa, Zea mays
  Clone ID: MRT4577_140034C.1.pep
MAAAEVLTAAWEEWGLRALVLLSLTVQVTLHILAEFRRHVDSGALRAVVWSAYMAADATAVYVLGHL

SEQ ID NO: 228557 - protein, 242 aa, Zea mays
  unsure (1)..(242): unsure at all Xaa locations
  Clone ID: MRT4577_140035C.1.pep
MANGGEQSAITAAVERGRVTGVSRRLAGEESSDDDDEGSQRFSDAEDRSWHSHSRQGSALELEDCISTSAPISRDAGGGDTXGHGRXGRKSCVSECSLDGVVDLEAGLAEIVKASPDKAERNCRICHLGLDSASAESGAGIVLGCSCKDDLSRAHKQCAETWFKIRGNKICEICGSTACNVAGFCDAEFIEQWNESSNTASAQATATEPRRFWQGHRFLNFLLACMVFAFVISWLFHFNVPG

SEQ ID NO: 228558 - protein, 147 aa, Zea mays
  Clone ID: MRT4577_140036C.1.pep
TRQGVRAAITAATLGFNATPPAQIPQRRRNKFFDHCRKEGTSLPPLFTAAGKAAASTPILVSTCPRFLSPSTHSLTLFSTCVSAATAAASTPLRPVHSLSLVISPPSLPPSPFGARTCEVNSQMAALGKLGPRFGSRLSSKKKRTFS

SEQ ID NO: 228559 - protein, 471 aa, Zea mays
  Clone ID: MRT4577_140037C.1.pep
MQGRSRDAATVAAAVACAAVLLLGDAWTVSAQAAAEEDKISALPGQPPVGFAQYSGYIPVDAAGKRSLFYYFAEAEADPAAKPLVLWLNGGPGCSSVGVGAFSENGPFRPSGNALTRNEYSWNKEANMLYLESPAGVGFSYSTDPAFYEGVGDSMTARDNLKFLQGWFARFPQYKGRDLYITGESYAGHYVPQLAQRMVEFNKKEKLFNLKGIALGNPVLEFSTDFNSRAEFFWSHGLISDSTYNIFTTVCNYSRYVSEYYRGSLSTACDRVMSQVARETSRFVDKYDVTLDVCISSVLMQSQVLVPQQGSRELDVCVEDETMRYLNRKDVQQAMHARLDGVQRWTVCSSVLEYKQLDLQIPTVNTVGALVKAGIPALVYSGDQDSVIPLTGSRTLVGRLAARLRLNATAPYRAWFQGKQVGGWTQVFGGGALSFATVRGASHEAPFSQPERSLGLFRAFLAGQQLPESFQ

SEQ ID NO: 228560 - protein, 94 aa, Zea mays
  Clone ID: MRT4577_140038C.1.pep
RVKNKKNKPRPDIRRVHFNLFHHNSHCESFIGIMWLWFPKPLVPPGFFPGFKSFWADRAGFLIRGGLVAPFALNKKACLFAFLPKYHAMFFFPI

SEQ ID NO: 228561 - protein, 550 aa, Zea mays
  unsure (1)..(550): unsure at all Xaa locations
  Clone ID: MRT4577_140039C.1.pep
MQGRSRDAATIAAAVACAAVLLLGDAWSVSAQAAAEEDKISALPGQPPVGFAQYSGYIPVDAAGKRSLFYYFAEAEADPAAKPLVLWLNGGPGCSSVGVGAFSENGPFRPSGNALTRNEYSWNKGERFFLYVAVAIPNGVRVLLQWLVQKKKKEDRKLGSVKNSPFGTPVCCVCVSEANMLYLESPAGVGFSYSTDPAFYEGVGDSMTXITDYFFLSFPHLQTHIIRLWVFWISEARDNLKFLQGWFARFPQYKGRDLYITGESYAGHYVPQLAQRMVEFNKKEKLFNLKGIALGNPVLEFSTDFNSRAEFFWSHGLISDSTYNIFTTVCNYSRYVSEYYRGSLSTACDRVMSQVARETSRFVDKYDVTLDVCISSVLMQSQVLVPQQGSRELDVCVEDETMRYLNRKDVQQAMHARLDGVQRWTVCSSVLEYKQLDLQIPTVNTVGALVKAGIPALVYSGDQDSVIPLTGSRTLVGRLAARLRLNATAPYRAWFQGKQVGGWTQVFGGGALSFATVRGASHEAPFSQPERSLGLFRAFLAGQQLPESFQ

SEQ ID NO: 228562 - protein, 93 aa, Zea mays
  Clone ID: MRT4577_14003C.1.pep
MLEGKAVVEDTDMPAKMQAQAMSAASRALDRFDVLDCRSIASHIKKEFDAIHGPGWQCVVGSGFGCYFTHSKGSFIYFRLESLRFLVFKGAAA

SEQ ID NO: 228563 - protein, 151 aa, Zea mays
  Clone ID: MRT4577_140040C.1.pep
GGGFFGLFLAGWAARVFADPQFPFKVLMEELEGVTPCMLGDMGCRPNFGLNELDFFFYTLVVGSMLNPHLMYLLARTDTVYTAVCALPSHMFKPGGLWLGSRVATLVSKGATLGVAGFTDGLGGTALYNGLMATRKHMDPGFETPNKPAAT

SEQ ID NO: 228564 - protein, 64 aa, Zea mays
  Clone ID: MRT4577_140041C.1.pep
NKARGITTFSKSYGQKLLRAQVFATSACGPLHTSAAALHLACRIEKMRSQIFSLSWPNIGCGFH

SEQ ID NO: 228565 - protein, 102 aa, Zea mays
  Clone ID: MRT4577_140042C.1.pep
CPKRLLPSAMVATPRHADAGRSVIAALEQHRHGAAAADRRKRDEVNAGRRLSEQGTRKRAAPTRGVAAEQEERRRSLCRSGEAAQESAHGSGHGSADGLGRP

SEQ ID NO: 228566 - protein, 79 aa, Zea mays
  Clone ID: MRT4577_140043C.1.pep
RTPGSPETPENPLCCLHLLLSNGCNGDNHPHGCTVVLGGHSTNSSLWRGTWEIARGPRTWQGKEEGGGATGHQPRGARA

SEQ ID NO: 228567 - protein, 75 aa, Zea mays
  unsure (1)..(75): unsure at all Xaa locations
  Clone ID: MRT4577_140044C.1.pep
IRLLRQQHLRAFYPQVEGNINAFLQHQQLLPFYPQNVGNIXVGFLQQQQVLPFSQHALTNSTTLLQPPTIGGALL

SEQ ID NO: 228568 - protein, 134 aa, Zea mays
  Clone ID: MRT4577_140045C.1.pep
MAPAADAAAKKNPRLQRMTQEQIDSLIRYQTVHMPEEAFRRLSRRTKELLTPEELAYQGDFPVPMGHIDDYLANICREINQTEARFLRERDRILNDYYNKGYAYADQQPSSSSSGNRRRFPPVLTKKKQTKPVG

SEQ ID NO: 228569 - protein, 58 aa, Zea mays
  unsure (1)..(58): unsure at all Xaa locations
  Clone ID: MRT4577_140046C.1.pep
GCSXRFSRGFWVRGVSGIEYGRRRNVRVPAASSGGLDLGHGTTHSLHNDLQLPTGEVP

SEQ ID NO: 228570 - protein, 56 aa, Zea mays
  unsure (1)..(56): unsure at all Xaa locations
  Clone ID: MRT4577_140047C.1.pep
RTXEADSXNVYYSLLSAPQYQPAAVYQKDGGQNIQCIDQGLKVPQQRRHVPQERIN

SEQ ID NO: 228571 - protein, 196 aa, Zea mays
  Clone ID: MRT4577_140048C.1.pep
MGKVVVAEATARQVASFVLGAAAALTVVMLVQYRAPAAGLSRARTPAHFSGLRLSSDDQHHRRNATTTARPVVHHQAPPVAGSAARDDDHRRRANATTITKPNSTTTSHLPSTRRHEEKGAKEDAEFRGLAAAVARAATDDRTVIITCVNQAWAAPGSLLDLFLESFRIGDGTARLLPHVLVVAMDPGAHARCLAV

SEQ ID NO: 228572 - protein, 102 aa, Zea mays
  Clone ID: MRT4577_140049C.1.pep
GGGNFCFGDSNRAVCPSRGWSVGSYLGGPGGGGKVPFKEAAGGGKKKKKKKKKKKKKKKKKKKKKKKKKKKKKKKKKKKKKKKKKKKNKKQKKKKKKKKKRL

SEQ ID NO: 228573 - protein, 96 aa, Zea mays
  Clone ID: MRT4577_14004C.1.pep
LLQGTNMLGWLGKFWLTLLGCLSAQHTQNTFGVYRTKPLAKANGSFMIAYVIQTLLFKNIAVDFILILILCLAASCCEIVSGLPGGIGLRGVAPIT

SEQ ID NO: 228574 - protein, 67 aa, Zea mays
  unsure (1)..(67): unsure at all Xaa locations
  Clone ID: MRT4577_140050C.1.pep
PFFNSXXYLQHLLQLLXPLAGANPIFSASQQXQQSPPHNQITLMNPAILKQQPIDPFAPNQQHLQKP

SEQ ID NO: 228575 - protein, 90 aa, Zea mays
  unsure (1)..(90): unsure at all Xaa locations
  Clone ID: MRT4577_140051C.1.pep
WRXGLLGLXXGAXXLLXRXPLXRGAXGXSGPPPLLLPLLLGXPAAGAXLAPXXXXGGRXXCVGXAXXGRXPRLPSLSPFLLPRRPXXAVV

SEQ ID NO: 228576 - protein, 51 aa, Zea mays
  Clone ID: MRT4577_140052C.1.pep
NTGNLLSWCPFLATFFFTRVFGFFILHNPCFFFFTKGVTFLCLLPIYICYP

SEQ ID NO: 228577 - protein, 52 aa, Zea mays
  Clone ID: MRT4577_140053C.1.pep
HASEKKKNKLKKKKKKKKEKKKKKKKKKKKKKKKKKKKKKKKKKKNKKINNN

SEQ ID NO: 228578 - protein, 97 aa, Zea mays
  Clone ID: MRT4577_140054C.1.pep
RHQVVLDVASHIVEIKSPICGSFTLFLPSQDSTRSCAFAMVELPLKKIPMVCEYADVFPDESLGMPPDRDIEFDIELQPGTTPISKRPYRMPPTELA

SEQ ID NO: 228579 - protein, 61 aa, Zea mays
  unsure (1)..(61): unsure at all Xaa locations
  Clone ID: MRT4577_140055C.1.pep
MNTMNRSMKEHIDNHIVQAGIQLXNPYWVPHCLERGIQADGHTTVDKTIDGGNTAFNKIVT

SEQ ID NO: 228580 - protein, 104 aa, Zea mays
  Clone ID: MRT4577_140056C.1.pep
PHGGPLQHIMWGNGSRCPPSGGMAHPWLFSIRRRLPRPLNLQLWIPSVRLWMTSGMRLGRFLPRRGFWVLAKLRGTCFKAGRFSSSVFSRPSKATPFSPLFAPP

SEQ ID NO: 228581 - protein, 36 aa, Zea mays
  Clone ID: MRT4577_140057C.1.pep
MSSMASLSESELTNRGSMWELDQNLDQPMDEEAGRL

SEQ ID NO: 228582 - protein, 121 aa, Zea mays
  Clone ID: MRT4577_140058C.1.pep
MAEHGQQTVDTELGLGSKFSQLEHDRLAKNDHCNFIPISKTISTVNEVHKNDKTARRYSRAAEEAVRSTNGSRDAPVGSRARHLTDLDGDLWDLVRRDLQLKATFLYIDLNRLIACNERGA

SEQ ID NO: 228583 - protein, 64 aa, Zea mays
  unsure (1)..(64): unsure at all Xaa locations
  Clone ID: MRT4577_140059C.1.pep
FARFLPPPPTARAPCXLPPLHSPAVGGCLAXXTQPAHPIWRRATTRWRGRALGASLVPPVSSCT

SEQ ID NO: 228584 - protein, 93 aa, Zea mays
  Clone ID: MRT4577_14005C.1.pep
MLEGKAVVEDTDMPAKMQAQAMSAASRALDRFDVLDCRSIASHIKKEFDAIHGPGWQCVVGSGFGCYITHSKGSFIYFRLESLRFLVFKGAAA

SEQ ID NO: 228585 - protein, 52 aa, Zea mays
  Clone ID: MRT4577_140060C.1.pep
FLFFSNLRKGDFLQSDLIWFSQGFSSYHVFKRRAVDFILVALLKKFTLHSRG

SEQ ID NO: 228586 - protein, 58 aa, Zea mays
  Clone ID: MRT4577_140061C.1.pep
CNGRLGSPGSVNFKPIPFHVSRVIARFTVFRPCVGSAYLCASAVHMYPVSSKPLKVLI

SEQ ID NO: 228587 - protein, 85 aa, Zea mays
  Clone ID: MRT4577_140062C.1.pep
KKKKKKKKKKKKKKKKKKKKKKKKKKFKKKKKKKKKNNFPGGPFKGEISKKLGAVFRESNLGPNLGKSMAKVVSWGKWYSVKISP

SEQ ID NO: 228588 - protein, 61 aa, Zea mays
  Clone ID: MRT4577_140063C.1.pep
RSCAAHTHTKRRHQWLHTTTSDYCSDKCTSVATSGFSAHSSSVDQNVVKSSFDDVNSVSWT

SEQ ID NO: 228589 - protein, 46 aa, Zea mays
  Clone ID: MRT4577_140064C.1.pep
LVFFETGTYKRTEGKKTMVELKQNNYINDAIITKAGKPLRQNKTKF

SEQ ID NO: 228590 - protein, 46 aa, Zea mays
  Clone ID: MRT4577_140065C.1.pep
LAESQWAPTKIRPTRRQDITLTTTNAVPPVRNHIQALTVAPHGLIL

SEQ ID NO: 228591 - protein, 39 aa, Zea mays
  Clone ID: MRT4577_140066C.1.pep
TTKYCAFFFLIKTPHEMTIIFAAALPPRHLLSTASRPPP

SEQ ID NO: 228592 - protein, 178 aa, Zea mays
  Clone ID: MRT4577_140067C.1.pep
AESVMGAEKEAPRARERAGDGCAGRALVRAPTSRGRARGESLGRGRRNRAGSSGQEDAQPKRRPGRSSARRGASQRAPVSRGCRLWANPRVRPWEVGSQRWGRWSWQGARRGGRWTTEQNAGASSEGARGALARHQRARPGAVRAGGRLGKRLRERDNGRRWKTEERDYARGAPRPRP

SEQ ID NO: 228593 - protein, 269 aa, Zea mays
  Clone ID: MRT4577_140068C.1.pep
MSYYERRGGDRGSGRIQGSGGRGGHVLRGRSGLAPRGLLGVNSRPSARTIAKSFSRTKDMTWRPDLFSDSMAASGIETGTKLYISNLDYGVSNEDIKELFSEVGHLKRFAVHYDGYGRPNGTAEVVFTRRSDAIAALKRYNNVLLDGKAMKIEVIGNDLGLPMTPRINVVGASNGRATRTVVMTPEFSQRGRGSSSRPLSNRFNNRGGFQAGRGRGQFQSWGRGRGQFQSRGRGRAQFQGRGRGRKPEKTADELDKDLESYHAEAMKTD

SEQ ID NO: 228594 - protein, 260 aa, Zea mays
  Clone ID: MRT4577_140069C.1.pep
EARNESRGNLARALCTHLPAPPAKDRASILPHRAFHADFELDTDADAHTMDPAGRCQANLAAYHAVAVLTWEEVLLHGTKHYSEGLSRFCDAKMSEVVSSLGWARARPWPEPLLQAFFLAAKGVWGVRLLARSVHPPLPVVRAERGARFDPRFMEDAAASRAGTLEPASVKMMMAPGFHVYLAGAGVVKCRVVCCYSSNNGRTAGHRDGGSSANGSVGLGSSCSGMNGSATDVVDSCNRLTAVGQGRVVALAQVERTRGF

SEQ ID NO: 228595 - protein, 130 aa, Zea mays
  unsure (1)..(130): unsure at all Xaa locations
  Clone ID: MRT4577_14006C.1.pep
GTHVINIPRFIVFLMNLPTVSLQCXQRLHRLSRFIMALLDLTCLCLYETCVSYLPKGVXNXKHLTHLHGLIIIHDNNAPEGCDLNDLKALXELMHLHIXRMDRATTCAYALVNNPFLEDLYLYRQALAIE

SEQ ID NO: 228596 - protein, 104 aa, Zea mays
  unsure (1)..(104): unsure at all Xaa locations
  Clone ID: MRT4577_140070C.1.pep
ARVRKLMGTLHSNALVLGMDPRQTISXVGHGLRACAGHRXISDSAIXSCDVGIERLIEIKLRRMEKLQDLLVSMLELXNLMDTPADEQRGFQGMGCNIYACEDE

SEQ ID NO: 228597 - protein, 138 aa, Zea mays
  Clone ID: MRT4577_140071C.1.pep
MFGIFQSFSRTKDMTWRPDLFSDSMAASGIETGTKLYISNLDYGVSNEDIKELFSEVGHLKRFAVHYDGYGRPNGTAEVVFTRRSDAIAALKRYNNVLLDGKAMKIEVIGNDLGLPMTPRINVVGASNGRATRTVVMT

SEQ ID NO: 228598 - protein, 272 aa, Zea mays
  Clone ID: MRT4577_140072C.1.pep
MSYYERRGGDRGSGRIQGSGGRGGHVLRGRSGLAPRGPLGVNSRPSARTIAKSFSRTKDMTWRPDLFSDSMAASGIETGTKLYISNLDYGVSNEDIKELFSEVGHLKRFAVHYDGYGRPNGTAEVVFTRRSDAIAALKRYNNVLLDGKAMKIEVIGNDLGLPMTPRINVVGASNGRATRTVVMTPEFSQRGRGSSSRPLSNPSNRFNNRGGFQAGRGRGQFQSWGRGRGQFQSRGRGRAQFQGRGRGRKPEKTADELDKDLESYHAEAMKTD

SEQ ID NO: 228599 - protein, 142 aa, Zea mays
  Clone ID: MRT4577_140073C.1.pep
PLFFFFFSSICLKKWWCSNKIPIRDDHHLLLPLNKFNLMIYCKISTKVASAPPSLQTILTENTLVTDITDTPAPPYNVSLGMLSPFSFYFSQEPDHEQKHSDRFGLALAIVRADGRELTPRGPRGANPDLPRRTCPPRPPLP

SEQ ID NO: 228600 - protein, 61 aa, Zea mays
  Clone ID: MRT4577_140074C.1.pep
RRRPRRMIKAEGKETTGTMGMKRRTRTPTTTGVRDVATESHQAADVDHGLYGEIPNPPWQS

SEQ ID NO: 228601 - protein, 110 aa, Zea mays
  Clone ID: MRT4577_140075C.1.pep
DLLQQALAMSMEGGASGSAAVTDSAMAEAGAVDPDLALALQMSVQDANMSSDTDMSKVFEDRTFVSSILNSLPGVDPNDPSVKDLLASLHSQGEQEKKEDTSDKTEDEKN

SEQ ID NO: 228602 - protein, 91 aa, Zea mays
  unsure (1)..(91): unsure at all Xaa locations
  Clone ID: MRT4577_140076C.1.pep
SGGHHKSXAPPLQNSYLSENPDWQDYHPEGAAKLTPLTSPMPISTTTLPCGKTGXSFXXLXNTITTPTSRATPTRTTTAPCTMGRXPAGAN

SEQ ID NO: 228603 - protein, 218 aa, Zea mays
  Clone ID: MRT4577_140077C.1.pep
QVRLTTRPELLLGRKSVHAAASSRGAAARASRENGGDLGERRVEPKSSARRKPTCVAGANSRRGRAEMAHYELGLGPDREGAQGAAARELGRAPELEKSHGEQRTGQIAWLGGRAPGGDLSRARPWRNPSRAPWEEPRWSWSKGELEARSHGRSKGRAAEEIKHRRLVKNYRRERWDRRLRGGWRIKSQADERWGERISTAPSKGYAFKFFFQRTAVV

SEQ ID NO: 228604 - protein, 128 aa, Zea mays
  Clone ID: MRT4577_140078C.1.pep
MRGGGGPGVGTPGRPRWGSGATTPRSLSTGSSPRGSDRSSDDGEELVEVTLDLLEDDNIVLRSVEPAAAAAAPAPPRRHPDPTPSSSAAPSRSRSPAMRRTFSHRLLQLSQELKGTGRRAKGWVGGPG

SEQ ID NO: 228605 - protein, 94 aa, Zea mays
  Clone ID: MRT4577_140079C.1.pep
GPCPLGPRRKVPRIRPTQARTAADLARWVNLSPWDWRVPRWVHFHGNKKAWGRHKSLGKTCFCVRVHVVSHVGRRGPPNKRTAFFGVGEKKKGL

SEQ ID NO: 228606 - protein, 98 aa, Zea mays
  Clone ID: MRT4577_14007C.1.pep
RRERLTQDLRRSSPSDALGTPQRPSHDRRRSHVRRGLCHPCQLGSGTLDNGAQVSFRAETTLSLPMLTILDCVGFHIVHYTCMHLALISICDHLPNTT

SEQ ID NO: 228607 - protein, 47 aa, Zea mays
  Clone ID: MRT4577_140080C.1.pep
SNLTMLLGLLLTLFYEQINSVRFIDWKTTCILLLTSVSCNPHIRLYS

SEQ ID NO: 228608 - protein, 66 aa, Zea mays
  Clone ID: MRT4577_140081C.1.pep
PARLLPSVHCCKLISRGLGHRTACRDITSCTVKSTPSGFTINSKTVHTTSLKKKKSFGKKKKKGGV

SEQ ID NO: 228609 - protein, 113 aa, Zea mays
  unsure (1)..(113): unsure at all Xaa locations
  Clone ID: MRT4577_140082C.1.pep
KNEHGDQLLFDSNNAIYKPPKLILLIIPIFYSYVCHCTSNIYIFSVSNIXNLNXLCTTPTSVVXPHGSARNTTCSVNHDPPSFTMPTFNTAYVDLILKLTEYDLKIWPHIYEY

SEQ ID NO: 228610 - protein, 100 aa, Zea mays
  Clone ID: MRT4577_140083C.1.pep
FLPRARTVSSPPLAGRASWHRRRPPPHSSADGQGLAVPRLEADEHRADEQAHAEGQEHLVAFLYFLLMFFSFFVYVFFFLSFFFFCHFCFIVFFFFFFFF

SEQ ID NO: 228611 - protein, 77 aa, Zea mays
  unsure (1)..(77): unsure at all Xaa locations
  Clone ID: MRT4577_140084C.1.pep
VESTKDVKKHEAHPAAAVLQKQDCIVERGRRERLRRARHALPHRVXCHEQQRHRPQRRSGHRTLRRARHPXLHDGPV

SEQ ID NO: 228612 - protein, 66 aa, Zea mays
  unsure (1)..(66): unsure at all Xaa locations
  Clone ID: MRT4577_140085C.1.pep
LVFRLLFVVVARCLVGVCCWLVVLVAVRVPGSVVVVGXGVGFGRLWPPRPVGWRGSLPPGRVSCLP

SEQ ID NO: 228613 - protein, 66 aa, Zea mays
  Clone ID: MRT4577_140086C.1.pep
ASSAQAAELTSDGTSTEAARMQGWFEAAMRGRESGACAVPLENDKAARGELGDAPTRAEPADARRK

SEQ ID NO: 228614 - protein, 31 aa, Zea mays
  Clone ID: MRT4577_140087C.1.pep
MLSNNMCKRVIPLCLMYGPLLNPFKLFYVPH

SEQ ID NO: 228615 - protein, 117 aa, Zea mays
  unsure (1)..(117): unsure at all Xaa locations
  Clone ID: MRT4577_140088C.1.pep
ASALANGXKLSAGGSRARSAAFPIYRNIITADDGEKYTQCXXWLKTTNDVATVDIRKHAQSHLREVVIVELSEPRTKAAEGGSFQNTESVRATSNLNSPMSGEVLEVNGKLSETPGL

SEQ ID NO: 228616 - protein, 574 aa, Zea mays
  unsure (1)..(574): unsure at all Xaa locations
  Clone ID: MRT4577_140089C.1.pep
MALHHLRLAPLALLRAASLPPLASSRIAARGHRRVLLFAPPSWPWRLLSPGARPRALATAAAEADDATSGSGNEFFAESTSWASLGVSERLASALCSAGLSRPSLVQATCIPHVLMANDVIVAAETGSGKTHGYLVPLIEKLCSKSSTTKDDNCQDTTPGAHDMVLVLCPNVMLCEQVVRMANSLLDESGKPLKRAAAVCGPNGWPAVHPDILVATPAALLNXYLTMNPEMDRGAHFMRNVKFVVFDEADMLLCGSFENQVVRLVYMLRFDEKLLSRAQDSGKDISLGSDDEYHEDSKFETAEFGSSDKEIEDNIVEDRLVKLENSHVGAHKDWRRVRKIYRRSKQYVFVAATLPQSGKKTAGGVLQRMFPDAVWVSGTYLHRHNPRLERRWIEVTADTQVDALLNAVKYGLKSEVHDAKDVPRRTMVFTNTVDAANSVSDILHRVGIPCILYHRESSLKERANNLQSFRENGGVLVCTDAAARGLDVPNVSHVIQAEFAACAVDFLHRVGRTARAGQSGIVTSLYTEANRDLVRAVRQAEELAQPVEGAFSRKRSFRNKLKKQALQKREALLS

SEQ ID NO: 228617 - protein, 111 aa, Zea mays
  Clone ID: MRT4577_14008C.1.pep
GLPTAGFFFYYTLEPGAKKKIRCPRAFTLGGWGTKQADFLLIYTTGRIFFLGAFFLFELRGGANISHNPTFGPFTQGDHLFGFFKTSSCKRGTIPDPRAIFSPKGGGKGGN

SEQ ID NO: 228618 - protein, 120 aa, Zea mays
  Clone ID: MRT4577_140090C.1.pep
QGRSQGQGSSSIRPRYVPPQGTPARLGGGPSPAQETPQTPHTGQVAPSGAPARPADREQAPHASSVVRLGTMQSLVRWGIPTHQLRTSNRLQPLTRDSALLGSPKSVLRLPLMELTSLSV

SEQ ID NO: 228619 - protein, 128 aa, Zea mays
  Clone ID: MRT4577_140091C.1.pep
YLIVFIYLGLQVSGDATLQVDHFTFSPSIADNMRTASLVISHAGSGSIFETLRLGKPLIVVVNEDLMDNHQSELAEELAERKHLFCARPQTLGETIRAMDLETLVPYEPGDAKPVVALINRFLGFPVA

SEQ ID NO: 228620 - protein, 56 aa, Zea mays
  Clone ID: MRT4577_140092C.1.pep
MHPQWGLFLKWVPLTRSIIFERKQLIVTGNPLYLKVSNKKPHVAGATVSTNQATKH

SEQ ID NO: 228621 - protein, 57 aa, Zea mays
  unsure (1)..(57): unsure at all Xaa locations
  Clone ID: MRT4577_140094C.1.pep
PLGGALGFQAEQDTRVVLLGIRHPGFCISPRRYTLETGFCLLRAEGLFTXVSARDLE

SEQ ID NO: 228622 - protein, 88 aa, Zea mays
  Clone ID: MRT4577_140095C.1.pep
HASVDSWVAALYTGFLEARADAGASLVSLARDNDRYSKLIIEEDGVPALLKLVKEAHLEGQENWALDIGLLGRDPECVAQMVQDGVCL

SEQ ID NO: 228623 - protein, 260 aa, Zea mays
  unsure (1)..(260): unsure at all Xaa locations
  Clone ID: MRT4577_140096C.1.pep
TSRPAGEKKLKKKKKKKISQKKKKKKKKKKKKIFLFVLFSSRPPVSVHHRRSRRGEDGRQCRAARLCSVPRRPPPPAERRHGSIGCTPKGVYPSPPTSTLTTSSTGADRPXTPPPPPSPLPPSSSNDHNDLVVVVRESPTKAAAKPKPPPAAQRPPRNPSRPNPSSSNSSQPPPQPQLQLVAVXSPMSSRSRPPXPGPPAPKAFRKQSRPRPRTDEDQPISALPAQRPHKDKKDKIAKAKKRRRAERAADADGERCTRTD

SEQ ID NO: 228624 - protein, 89 aa, Zea mays
  Clone ID: MRT4577_140097C.1.pep
ECCQGPPLDGTCILVRSALETFMFVAVVPGPVLPMFRVFLAQQSDLVFRAPLSLPRDAVGLEPKAPGLPQKKKKIKKKKKKRDKKKKKE

SEQ ID NO: 228625 - protein, 103 aa, Zea mays
  Clone ID: MRT4577_140098C.1.pep
RRRQPDPIPSLARVFVPAPPRSRIPPKQPWPAVPSRGKGIVSSGVPYKRTPPMWIKTATTEVEERVTQAAKKGQMPPQIEDLLRDQDRIPLCKSGNGRKILRT

SEQ ID NO: 228626 - protein, 54 aa, Zea mays
  Clone ID: MRT4577_140099C.1.pep
ALELIQTCTKCKQPALVIKLDFAKAFDTFRWTALSQIMTAIASPPCDAIGLTPC

SEQ ID NO: 228627 - protein, 108 aa, Zea mays
  unsure (1)..(108): unsure at all Xaa locations
  Clone ID: MRT4577_14009C.1.pep
NRSRNLFPKNALYSPNPXVAVCRNRLKADDKWTLWYQILKTRWLPRSRYKKNKDPXKEQHVLAQSXLVKRKGQVRDINKQFGPYEDECSGVNQNVNSSVRFKTVSWCQ

SEQ ID NO: 228628 - protein, 153 aa, Zea mays
  unsure (1)..(153): unsure at all Xaa locations
  Clone ID: MRT4577_140100C.1.pep
QRAVPAFGPAVXFPPRGQSEGGAPLYFNSLNKLGPQKPWALSFSFGRAPPGGPPKAWAGKVENLEKAXAAFPPRGKAHSGGPPGPPKGVSPPPPQGLSVQGSQVWVVFFLGPVFLGPPPPSRFFRVVFFFKLFYSALKKTCFPCGWGVSFFLV

SEQ ID NO: 228629 - protein, 107 aa, Zea mays
  Clone ID: MRT4577_140101C.1.pep
VPLFWVRLVGRITLHGLRWWACPPRGPLGSFSEPRPAAPFLLDCAPRVVPPTVPPAPLPPPPLWGPPPPPPPHLVLPFWEAPPTPPPLSFHGLYPLPPPPPLVGFGP

SEQ ID NO: 228630 - protein, 582 aa, Zea mays
  unsure (1)..(582): unsure at all Xaa locations
  Clone ID: MRT4577_140102C.1.pep
MGNTCIGPSAPSDRHSFFNTVSLAVLWRTPAAADPAEPSPTAEPSSSTPCSXPPPGPLTLSPSPTPSTXPHSTSTALGPAAPPNPNGKPKPKPKVKRVQSAGLLAGSVLKRDSERLKDVYTLGKKLGQGQFGTTYQCVEKATGKHFACKSIAKRKLVTDEDVEDVRREIQIMHPLAGXPNVVSIVGAYEDAVAVHLVMELCAGGELFDRIIQRGHYSEKAAAQLARVIIGVVEACHSLGVMHRDLKPENFLFVNQKEDAPLKAIDFGLSIFFKPGEIFSDVVGSPYYVAPEVLKKRYGCEVDVWSAGVIIYILLSGVPPFWAESEQGIFKQVLKGGLDFSSDPWPSISESAKDLVRKMLNRDPRKRLTAHDALCHPWVCVDGVAPDKPLDSAVLTRLKQFSAMNKLKKMALRVIAENLSEDEIAGLKEMFKMLDTDNSGQITLEELKIGLKRVGANLKDSEITTLMEAADIDNSGSIDYGEFLAATLHLNKVEREDNLFAAFSYFDKDGSGYITHDELQKACEEFGIEDAHLEDIIHDVDQDNDGRIDYNEFVTMMQKGNNPLGKKGHCQMSFGLREALKLG

SEQ ID NO: 228631 - protein, 51 aa, Zea mays
  Clone ID: MRT4577_140103C.1.pep
TSNTSSPNLKLSYQTLKPSLNLIHTNDNHTISTNLYTSPPSHSLINTTYIT

SEQ ID NO: 228632 - protein, 83 aa, Zea mays
  Clone ID: MRT4577_140104C.1.pep
PFYPSKTPLLPQSFYYILFIPILSSTIIPIPPIILFLIFISISSITTHITPSIYSFIFIFFYTKYTNSHLFSKLLFHLSCFLF

SEQ ID NO: 228633 - protein, 229 aa, Zea mays
  unsure (1)..(229): unsure at all Xaa locations
  Clone ID: MRT4577_140105C.1.pep
PNVVSIVGAYEDAVAVHLVMELCAGGELFDRIIQRGHYSEKAAAQLARVIIGVVEACHSLGVMHRDLKPENFLFVNQKEDAPLKAIDFGLSIFFKPAXLFCWERGEDLLGQSCEIFSDVVGSPYYVAPEVLKKHYGCEVDVWSAGVIIYILLSGVPPFWAESEQGIFKHVLKGGLDFSSGPWPSISESAKDLVRKMLNRDPRKRLTAHDALCXPCVRVDGVAPDKPLDS

SEQ ID NO: 228634 - protein, 124 aa, Zea mays
  Clone ID: MRT4577_140106C.1.pep
NIELICRCFEADIDNSGSIDYGEFLAATLHLNKVEREDNLFAAFSYFDKDGSGYITHDELQKACEEFGIEDAHLEDIIHDVDQDNDGRIDYNEFVTMMQKGNNPLGKKGHCQMSFGLREALKLG

SEQ ID NO: 228635 - protein, 63 aa, Zea mays
  unsure (1)..(63): unsure at all Xaa locations
  Clone ID: MRT4577_140107C.1.pep
RWAVAVREIXRRLAETPDERGDPTNLAARLVCSYERAGKAKCLGSAYRTVNVTTDGADSPPGG

SEQ ID NO: 228636 - protein, 102 aa, Zea mays
  Clone ID: MRT4577_140108C.1.pep
TFLLLYVMSISHCPNLAAVCMHQGIESYSLGMDTHDPISACAGFSVVVIKPWHMLANLGSILLVCHYEQSFSHIISTLQARVGLLAPPELWDNAPLEPLFCC

SEQ ID NO: 228637 - protein, 225 aa, Zea mays
  unsure (1)..(225): unsure at all Xaa locations
  Clone ID: MRT4577_140109C.1.pep
ASSSSLFLLAVLLAVVSWQATAYDPSPLQDLCVADMKSPVRVNGFPCKDPMAVNPEDFFNLAMLDKPRDTKNSKVGSNVTNINVINFPGLNTLGISLARIDYGPLGVNTPHIHPRATELLTVLEGTLYLGFVTSNPNRLFSRVVKKGDVFVFPKAMIHFQMNLAHDKPAAALSSLSSQNPGVISIANAVFGSNPPISDDVLATAFQVEKKLIDWLQSQFRENXHY

SEQ ID NO: 228638 - protein, 293 aa, Zea mays
  Clone ID: MRT4577_14010C.1.pep
LQEMVPQEIDADWVEMLIGWNWSPLDATAALKLFEEDQTDNLGTDRGKESDPTDNWSNKDNPDMSESSASPHNGECNGFGVVVREGDGTWPLSDDDERAKILERIHSLFKILVKNHNLSVCNLNRVIRFAVEELRGLSSGSLLLNHSLDKSPLCICFLEASSLWKVAKFLQDLVQASGINRNLENDGLGDRDSSPQNHNVLEKVILSSDSSELIIDGQTFGGKFDSESVDTDTLFSWLYAGSSIGEQLLAWNLMIDERSNQCMDLIRALGREFNNLQNSCERKLEQLRNERQQ

SEQ ID NO: 228639 - protein, 38 aa, Zea mays
  Clone ID: MRT4577_140110C.1.pep
ILLIKLFLNISTNSIHHNPQRLHTILVQKLLSNPSITK

SEQ ID NO: 228640 - protein, 15 aa, Zea mays
  Clone ID: MRT4577_140111C.1.pep
MAAALRPRLLLLLAV

SEQ ID NO: 228641 - protein, 104 aa, Zea mays
  unsure (1)..(104): unsure at all Xaa locations
  Clone ID: MRT4577_140112C.1.pep
SCPATAPTPVGFPLAIPALRLIHDIWEISSIPLSPILYNVNNRQVKXPDIYTLILLLWVMDPYESYSDGPINKRSWCFECNSNETKRETKEKKKXLVPPRAAVR

SEQ ID NO: 228642 - protein, 31 aa, Zea mays
  Clone ID: MRT4577_140113C.1.pep
FQHCKHNTSRTIAHDIACFLIQLPGIVINEF

SEQ ID NO: 228643 - protein, 69 aa, Zea mays
  Clone ID: MRT4577_140114C.1.pep
GPLIFFKFFKKRKKNPGLCLKFEFYVPRGTSVLCSWACMKPREMQKCFFKKKKKKKKNTKKKKKKKKKK

SEQ ID NO: 228644 - protein, 161 aa, Zea mays
  unsure (1)..(161): unsure at all Xaa locations
  Clone ID: MRT4577_140115C.1.pep
GFLAGTSAPILTGISRLKTVFMILYEVLRLYPPAVPLNQKTFKNMQIGGIPSPAGVILELPVIVVPPDPNVWGKDAPKFRPERFPKGFSKGTKDHQPGFFPFGWGPRICIGQKFALLEAKMAPSMILQGFQFRVSPSXRHGPYPVLLLHPQQGGPIIFDRI

SEQ ID NO: 228645 - protein, 38 aa, Zea mays
  Clone ID: MRT4577_140116C.1.pep
NRESTIYQQININYVDVSILLGSKVRAYAFFCSLLIYI

SEQ ID NO: 228646 - protein, 95 aa, Zea mays
  Clone ID: MRT4577_140117C.1.pep
PTSPKKLIYRPHYYGAALKQVGPGGETKGQKRAKLTMNLATQRHPPPILILGKHTPDPSMKSWGKKPLLGFKHGEDTGITPVGYSPTRCYTQDRT

SEQ ID NO: 228647 - protein, 197 aa, Zea mays
  unsure (1)..(197): unsure at all Xaa locations
  Clone ID: MRT4577_140118C.1.pep
NSAPGFAFPPSETGNSLACFWINSVEKGSGPFFNFFWKIGISPKGWDSFFKKKKIXGVKLKLRKLXTPVGSPPHNLVFFKTREVSLRPVSEKTNFKVAWFSPPPLGVWVPVFLLQLGPPQGFFRKKKLLLIPVFSGGPSRVKTPWGAIVQFFSKGNLFFGPKKKKKKKKKKKKKKKNQKKKKKKKKKKKNSREGPGY

SEQ ID NO: 228648 - protein, 169 aa, Zea mays
  unsure (1)..(169): unsure at all Xaa locations
  Clone ID: MRT4577_140119C.1.pep
GSTPRRPNLHTTVLIHVYMRQQHEVGVCRRHFQSCRCAYSTRYLVDTLTLXHSFRXLNTXTSXSPGSNLIQILLPFNRCNANYLEKFRKXKKXKKKGGGPLLRXDPXAYVPAXXCDXXIASFLXXCHXXNVKIHXGPXRFTKRXXDWGKTPCALPQLFNRLGSTNPPFS

SEQ ID NO: 228649 - protein, 42 aa, Zea mays
  Clone ID: MRT4577_14011C.1.pep
SNRKGGPCFFWKKKKKKKKKKKKKKKKKKKKKKKKKKKKKKK

SEQ ID NO: 228650 - protein, 227 aa, Zea mays
  Clone ID: MRT4577_140120C.1.pep
MQQQHLMQMNQNMMGGYTSPAAVTTDLIQQYLDENKQLILAILDNQNNGKAEECERHQAKLQHNLMYLAAIADSQPPQTAPLSQYPSNLMMQPGPRYMPPQSGQMMNPQSLMAARSSMMYAHPSLSPLQQQQAAHGQLGMAPGGGGGGTTSGFSILHGEASMGGGGAGAGAGNNMMNAGMFSGFGRSGSGAKEGSTSLSVDVRGGTSSGAQSGDGEYLKVGTEEEGS

SEQ ID NO: 228651 - protein, 112 aa, Zea mays
  Clone ID: MRT4577_140121C.1.pep
MSTAELASSYAALILADDGVDITADKLQSLIKAAKVEDVEPIWTSLFAKALEGKDVKDLLLNVGSGGGAAAPAAAGGAAAAGGAGDAAPAAEEKKEEEKEESDEDMGFGLFD

SEQ ID NO: 228652 - protein, 88 aa, Zea mays
  unsure (1)..(88): unsure at all Xaa locations
  Clone ID: MRT4577_140122C.1.pep
PVAPAGVSGLPAFAVCRXVPARGFLAXFPFGCRACARLLPGFLRPCGSAWPCAGAVPLASFSSSAWPVLFCXFVCPPALPGGRSARAG

SEQ ID NO: 228653 - protein, 100 aa, Zea mays
  Clone ID: MRT4577_140123C.1.pep
STVSISFNCCSLTRAVPALSTSPHERPLLYDGFTCNKHATRKASKGKTTKITEIKNVYNFFFCDFSYIKPIDSFVKGFTHSINKKERILKQKSESFEKVG

SEQ ID NO: 228654 - protein, 54 aa, Zea mays
  Clone ID: MRT4577_140124C.1.pep
RSRCIESHTLYTLLLNFQYEINTTDHTQHTWLTCNACNVTQKLMMTNEACLFGA

SEQ ID NO: 228655 - protein, 89 aa, Zea mays
  Clone ID: MRT4577_140125C.1.pep
QGLLRTPETVAKFQSVPVQAGQTPPLLQYFGTLLTRGKLNAFESLELSRLVVNQNKKNLLENWLAEDKLECSEELGDLVKTVDNDLALK

SEQ ID NO: 228656 - protein, 56 aa, Zea mays
  Clone ID: MRT4577_140126C.1.pep
GGCVININEVHRCVREAVVLRKVVGGCSMNAHMSRACDDKVFPGNGSGSCYRAHFK

SEQ ID NO: 228657 - protein, 87 aa, Zea mays
  unsure (1)..(87): unsure at all Xaa locations
  Clone ID: MRT4577_140127C.1.pep
LSYYYYDIHRLMRMTASGMESAVPSKFEADKNLXXGQGLARPEFSLTGGGLQEQTATGPRSREGSPRGSVTTHHPFWPPRERGRLAL

SEQ ID NO: 228658 - protein, 44 aa, Zea mays
  unsure (1)..(44): unsure at all Xaa locations
  Clone ID: MRT4577_140128C.1.pep
DNNLIQILAMIMITLRFNXTHYRETCLVCKNTSPIKGAAAVKNK

SEQ ID NO: 228659 - protein, 104 aa, Zea mays
  Clone ID: MRT4577_14012C.1.pep
APFVSSYHDFAGEACAWPPRPAGGARSPPTPACAAGTGPSWWDQPPAWALHAAQCLGTAWVARNLLVSNYCDDRKRFPTPAEECALRAAATALCSFYTIGLVRA

SEQ ID NO: 228660 - protein, 104 aa, Zea mays
  unsure (1)..(104): unsure at all Xaa locations
  Clone ID: MRT4577_140130C.1.pep
XPIDXWHSHGXVLNPXSXHEXGKWKVRXQNEEYMHPXLPFYXLVXWXSXTRPLQXXSRXWFLXSFRRNKEXXXVLXVKXVXXXKLXXFXXVXRXIGVVNAGDRP

SEQ ID NO: 228661 - protein, 144 aa, Zea mays
  unsure (1)..(144): unsure at all Xaa locations
  Clone ID: MRT4577_140131C.1.pep
MPQTAVSTTAGRTSGSDGDSWADTHRREKGRLSNRETPREAGLRKQHNLDELEQEVARLXADNARVGARATDIAYYDTRVKQDNTVLRTRADELIDRVQFVHEVLNLGEELSDEDVDRYERXMPDDDPVVHTWYEEYPDVMMPM

SEQ ID NO: 228662 - protein, 189 aa, Zea mays
  unsure (1)..(189): unsure at all Xaa locations
  Clone ID: MRT4577_140132C.1.pep
RSVSCLTSRAPPEGSSCITKARRLGVPTPVLYAVDPLLHTLTXYVDGLSVKDILLGFGSDGVNEERLDDISITQIGNVVGKLHDGGLVHGDLXTVTINXVVLIDFGLSXINNSRXEDKAVDLYVLERALISMHSSRGDVVRRLHKLASKLSFADYMHTLIPLFGDFILGRPMTYTGYGYISSQQYWIHQ

SEQ ID NO: 228663 - protein, 38 aa, Zea mays
  Clone ID: MRT4577_140133C.1.pep
HLFHVSYEGVSAHYSVLIRLLWFQPSKLYSDNCPSFSW

SEQ ID NO: 228664 - protein, 476 aa, Zea mays
  Clone ID: MRT4577_140134C.1.pep
MIHSGSQGYYGMQNSHAAYTSQQSLTGSWNATSSQFGVAISPLTPTQPAMQSLSGQNIAAAENMGHLTTGMAPATANAEMVNSDLTSQNQMLSSLPQTDDRLADGIESKSGEDVSHGRVRSSAEAMGPQDAQLGPVQLNAQQLENTRNHMSSIDLSKSMMPSQMMSAPSAASVQPSLTTTARSDNQSSGWAVPAQMANTPGQSQITGNLTWGNTPQGDASLGWGMVGQSNMNMPWVASAQGASGYNMGVAMPTQPNAVPNMGWLPNPGNTSMNMIWAATQGQGTPNAAPMMGGQMQGVPMAPWGGVAAGSANSYPAWGNQQAGNMNQNVGWSAPVQGNPGQANNNMNWNAPNGNPNWNNQQRENGGRHSGHRGAFSGGDSGGRSWKSRSGGDGGSRGHSRFSHSTNTEGYPSRTDRHYDRQNSGNERRYENHNERNGRQFDRQPSDNERNHDRPDGRHGGRDDDRQADRSESRELR

SEQ ID NO: 228665 - protein, 156 aa, Zea mays
  Clone ID: MRT4577_140135C.1.pep
VTGVEPLGGGTFIVVRFDFVARRHEPAAVAAREVGPADHVRLPRMVARDSADVAAYGVAGAAIGVPHDRCSFWRRSRPRPFGSPCPPPRYFATQHGLVACSCTACGWYIINGRASVMLSLLLVHPLDACMVLDRLIAFCRPCTCKNLKCTAKFNLV

SEQ ID NO: 228666 - protein, 56 aa, Zea mays
  Clone ID: MRT4577_140136C.1.pep
VFRLFLSCSCCGAACWGAILFFSLLPVVVLSGGPLVFVPVSSFMISPCLVSASAWK

SEQ ID NO: 228667 - protein, 106 aa, Zea mays
  Clone ID: MRT4577_140137C.1.pep
MSGVSKACCSIPPVISKGYEAKGEYKTIGGLKTYVTGPADATRAILVIYDIFGFFPQTIQGADILATVDKDKKYRVYMPDFFQGEYVDISWYPPTTDEQKQKVGKF

SEQ ID NO: 228668 - protein, 84 aa, Zea mays
  Clone ID: MRT4577_140138C.1.pep
NLPTSTLGDPNGRGVHSTPFKGSNDQLGSPHFFTYRLFPICEEFSQGGAFRPYNKDLKECTRVRVGEQHTQIPSTHPHKPRLGL

SEQ ID NO: 228669 - protein, 120 aa, Zea mays
  Clone ID: MRT4577_140139C.1.pep
LCVFFSFCFVPVPFRQSHSAPHTQERIRGGRGEQPGPVCESRAGRLEGALHRADAGRAGRARPGWGIRRRPRRGGIYWRLGDYGEGVDETPDKEVGGQDLHIDAEALGEGLAAEEARAAA

SEQ ID NO: 228670 - protein, 160 aa, Zea mays
  Clone ID: MRT4577_14013C.1.pep
MSNVTVCVRFRPLSHKERKANGDNVCFKRLDSESFVLKDEREEDVVFSFDKVFYEDAQQSDVYNFLAVPIVSDAINGINGTIITYGQTGAGKTYSMEGPSILHCNEQKTGLVQRVVDELFICLGSSASTWTVKLSMVTYQPHADSESTLIVSPSLVVRVC

SEQ ID NO: 228671 - protein, 220 aa, Zea mays
  Clone ID: MRT4577_140140C.1.pep
FFSSRPPPPSFFVDPAHGDPPGAAGGGIGVAEFLGAKNFLITGGTGFLAKVLIEKILRTNPDVGKVYVLIKAKDSEAALARLRNEVVDTELFKCLQDIHGEGYDGFIARKLVPVVGDVREANVGIAPDLADEIADQVDVIINSAANTTFDERYDVAMDINTVGPFRIMSFAQRFRRLKLFLQVSTAYVNGQRQGLVLEKPFRMGDTIAKELPWSSSPGHK

SEQ ID NO: 228672 - protein, 120 aa, Zea mays
  Clone ID: MRT4577_140141C.1.pep
QIAYASGFKKRSRLRSSSYDRLFPFGTVSRSSLAAIVADRASPLTCVMISLRSVRFVPQTVGPFGGRGTLFPFVCFSACCLNCSSQVVAPTSVLRCAPHLPSSVCSVDRCLFVPYPTDVL

SEQ ID NO: 228673 - protein, 231 aa, Zea mays
  unsure (1)..(231): unsure at all Xaa locations
  Clone ID: MRT4577_140142C.1.pep
MEPRRSVLVLALAVAAALSVAVAYDPLDPNGNITIKWDIMSWTPDGYVAVVTINNFQTYRQITAPGWTVGWTWAKREVIWSMVGAQATEQGDCSRFKANIPHCCKRTPAVVDLLPGVPYNQQIANCCRGGVVSAYGQDPATAVAAFQVSVGQAGTTNRTVKVPKNFTLLGTGPGYTCGPXKVVPSTIFLTPDRRRKTQALMTWDVTCTYSQHLAXKYPSCCVSFSSSTRHH

SEQ ID NO: 228674 - protein, 83 aa, Zea mays
  Clone ID: MRT4577_140143C.1.pep
GRPGGYSSANAVVLLDRRSGWNDLRLRAMPIPEINTKNLSVAHTDGCTEGMVDDTDFLKELISKRAIPTSCLWKEYCSVLKAL

SEQ ID NO: 228675 - protein, 71 aa, Zea mays
  unsure (1)..(71): unsure at all Xaa locations
  Clone ID: MRT4577_140144C.1.pep
VGKGRGLPVGALHIDGLRDVDGGPFGRVIAAPTRVPQFFSRWCGPPLNFFCFFACFFLVDVCFAXFIIRLT

SEQ ID NO: 228676 - protein, 76 aa, Zea mays
  unsure (1)..(76): unsure at all Xaa locations
  Clone ID: MRT4577_140145C.1.pep
MSCNCXSSCGCSSSCKCGKKYPNLEETSTVTQATVLLGVALKKKACPNFFEACFXSGEARHACRCSYTLMCDPCNC

SEQ ID NO: 228677 - protein, 68 aa, Zea mays
  unsure (1)..(68): unsure at all Xaa locations
  Clone ID: MRT4577_140146C.1.pep
XAXFVHXELSXNRAXSLVQNXCQNXSSYXXSYXRCSTXHXGXEACQVINXXXXMXKXGCLFKLXXGXP

SEQ ID NO: 228678 - protein, 80 aa, Zea mays
  Clone ID: MRT4577_140147C.1.pep
VSRTCKSAAHQYHRHILSSVRVDQPPVHLYPRSPHRVSEDSYRVGDGVCLFEKRVYTLAFGHGPRVPETAPPGTCSRTRE

SEQ ID NO: 228679 - protein, 229 aa, Zea mays
  Clone ID: MRT4577_140148C.1.pep
SLQSSLSPHGLHQVDHGGQPPRIAAGLIIGHPAARDDISCMLTIGSHQNNNNNKSDVKKASPQLMLFGKPILTEQQITLGNSGGFSPSAARKSSSEMSAEKSANNSDLPSPQSNQNGTTKNLSCGGVPLCQDNKVLDLGLDIGHCKIFMQSEDVGRTLDLTAVGSYEELYRRLSDMFGMEKAELMSHVFYRDAAGALKHTGDEPFSDFTKTARRLTILTDTSGDSSVAS

SEQ ID NO: 228680 - protein, 77 aa, Zea mays
  unsure (1)..(77): unsure at all Xaa locations
  Clone ID: MRT4577_140149C.1.pep
PRRPGDSRGMRTCMLPICTYGVTSSLRNHRLDWWQLRDRYPLMLPPCLRFXLXRVGNLHHGEGQPTDFSEGYAANPG

SEQ ID NO: 228681 - protein, 81 aa, Zea mays
  unsure (1)..(81): unsure at all Xaa locations
  Clone ID: MRT4577_14014C.1.pep
MAMDPDAVAKALIEHYYRTFYTNHTELVGLYQETYMLTFDGQMSXGPSVIAVKLGSLSLTXCDHQIVTVVXQSLEPHGGML

SEQ ID NO: 228682 - protein, 55 aa, Zea mays
  Clone ID: MRT4577_140150C.1.pep
RPLSFFFFFIFLLLLYIIWVGFNVLFMLFFKLPPKPPSDTKPLSDTQNFSTEPGS

SEQ ID NO: 228683 - protein, 254 aa, Zea mays
  Clone ID: MRT4577_140151C.1.pep
MADPTERDQFTDDEEEEDYLEDGEQGLGSEDEEGGGAGGKRKRLGNTLGGIGKRGVCYLSRVPPHMNPSHIRQMLSKYGEVLRIYLVPEGQGHHKHTSVKAKAYSEGWIEFAKKSVAKRVANLLNGEQIGGKKRSPFYYDIWNIKYLRKFKWDDLVGEMAEKTHIREQKLTLEIAAAKKQRDHYLSNIEKSRALKHIQERRKKRQKTEGAEASNVPETKTARSIPQKKPVVETDAKTKSTLSKDILAGVFGGSS

SEQ ID NO: 228684 - protein, 45 aa, Zea mays
  Clone ID: MRT4577_140152C.1.pep
VYVSRLLIHIDIFKVHYANSAVYSEGAMFCINISVTCWRHSENKP

SEQ ID NO: 228685 - protein, 72 aa, Zea mays
  Clone ID: MRT4577_140153C.1.pep
RPGSALCGPPLPSATCGFGTSGRSSSGNGSKPLPSQRKTHRLPPHSNHSTVPCTGVRTICSFLIFPNTSDPD

SEQ ID NO: 228686 - protein, 102 aa, Zea mays
  unsure (1)..(102): unsure at all Xaa locations
  Clone ID: MRT4577_140154C.1.pep
RWGGSVLWPKLSDNTWHPVRRYSITAVPLQRSKGTMNKALLLDEIRRGPWDLSILDRCMRKTKGMMSELADMHGVAMEGANEDIGKLVDXVEEAKIRDTEGR

SEQ ID NO: 228687 - protein, 89 aa, Zea mays
  unsure (1)..(89): unsure at all Xaa locations
  Clone ID: MRT4577_140155C.1.pep
KNPGLPKLNGFKKNPLFPTWRKNKKPQTNPLSKKGPTLNGKWNSPLTGXINPGGCGGNPQVNXNFQTPXTPAPKIFFPSFLPTFPGFPP

SEQ ID NO: 228688 - protein, 120 aa, Zea mays
  unsure (1)..(120): unsure at all Xaa locations
  Clone ID: MRT4577_140156C.1.pep
MDHHHHHHHHMIPGQEPPAADSSAPDSFFLGPAGAIIFSGGAGVSGAGSSSGAAALGSSAGAGGGPSPSSSSPSLSRYESQKRRDWNTFGQYLRNHRPPLSLSRCSGAHVXLEFLKYMDQ

SEQ ID NO: 228689 - protein, 106 aa, Zea mays
  unsure (1)..(106): unsure at all Xaa locations
  Clone ID: MRT4577_140157C.1.pep
GPAVSRSAPAVAACTMAVCCTAMAGTPIKVGSFGEARITMRNTVGKPNVAASGNRWYGPDRLKYVGPFSGEPPTXVTGELPGEXRWDTAGLSGDPETFAKNREVEV

SEQ ID NO: 228690 - protein, 47 aa, Zea mays
  unsure (1)..(47): unsure at all Xaa locations
  Clone ID: MRT4577_140158C.1.pep
SYSTTPSXVYVLRPNDXSQSXAKRKKRPTPTKSTTTTKLKTKKKIKN

SEQ ID NO: 228691 - protein, 114 aa, Zea mays
  unsure (1)..(114): unsure at all Xaa locations
  Clone ID: MRT4577_140159C.1.pep
RYCPNVFQSRRFWDSYRLSDGDELDGDGPPPAXADDPRAAAPDDEPAPDXXGASGEYDGSRGAEEEAVRGLSYPPPVALGPGSCDGGGGDGDPSILSRLLPARAAVCHSHSSAM

SEQ ID NO: 228692 - protein, 126 aa, Zea mays
  unsure (1)..(126): unsure at all Xaa locations
  Clone ID: MRT4577_14015C.1.pep
QPTPHTRGPKPSTHRRNSXTPDDAHRRTEPQPAPXHAHAPATPPPPPQRRAAPTTEPGGRHPRQQRRPRPQAXNPPSTRKPXPGSNRRTPARRRRRNPTTAPPNRRPTDRSTTRKEQPRQQQRAQE

SEQ ID NO: 228693 - protein, 77 aa, Zea mays
  Clone ID: MRT4577_140160C.1.pep
LEIQMRKRRNRSKYMKKDKNLKPRLIISKPGPYLSKRNMDSSLRRIKATGPNRDERELALPEIKGGPDKGEGDQGSP

SEQ ID NO: 228694 - protein, 83 aa, Zea mays
  Clone ID: MRT4577_140161C.1.pep
PSAFPFSKARWQPNQGAGVTSFINSFLPPPRAPPLHQRYNRPIPPARPFPYLHKYLDTTRSGRGRLPDWQVLRGRYTRHIQGP

SEQ ID NO: 228695 - protein, 127 aa, Zea mays
  unsure (1)..(127): unsure at all Xaa locations
  Clone ID: MRT4577_140162C.1.pep
PPPLFYPRTAKIKLVRFLMKVNNXTVPLEVKNGPVVPGPLPGGGISMNPPLKTGKLSLKGKNPVTLGPLSGGGNNIRYYIFSGRLNLEALLVEGTPRVXPKKPASGKPFGGGGGRGCGRGWGRGPPP

SEQ ID NO: 228696 - protein, 102 aa, Zea mays
  unsure (1)..(102): unsure at all Xaa locations
  Clone ID: MRT4577_140163C.1.pep
ALNSPAYFQHQQLLPWRQLSGVSAVTSLIQPQQMPLXHHTAHNAGTLLQLQQLLPFNQLALTQPXAQVHTQPIISLAPMCRYHIKFITIINNSGLIYQASPT

SEQ ID NO: 228697 - protein, 34 aa, Zea mays
  Clone ID: MRT4577_140164C.1.pep
ATLLQLQQLLPFVQLALTDPAGSYQQHIIGGALF

SEQ ID NO: 228698 - protein, 170 aa, Zea mays
  unsure (1)..(170): unsure at all Xaa locations
  Clone ID: MRT4577_140165C.1.pep
VRIPGLNSVHTSSHFTLAAYTMGISSTAXVGAPIMVGIPSASGLITMRKSVGNPQVAACGTRWYXGPDRLKYLAPFSRKPPSYXLTGELLRHYGWDTRXLSSYPETFTKNRELQVTHFLWAMLSALGCNLPELLXADXVMFRESLWLKGRSQIFRKSVLHXLGNPSLIHA

SEQ ID NO: 228699 - protein, 124 aa, Zea mays
  Clone ID: MRT4577_140166C.1.pep
PPPPPWALLHPPPVWLPLTPSWYPCGFRPRVAGPPPASAVFELQYPKHSVAQPFFVSLGVSFPAGIFPCLISRGPPSCGGALASSLLVRNEGAWLLRHLLRWAHPREPFHVVGKPPDSPIKNHK

SEQ ID NO: 228700 - protein, 58 aa, Zea mays
  Clone ID: MRT4577_140167C.1.pep
ELPLLGDPIAAKLRKKKLTFLGTVHTLFWRPTFRKRVDQLSWGVYAPIQGRETTREPG

SEQ ID NO: 228701 - protein, 164 aa, Zea mays
  unsure (1)..(164): unsure at all Xaa locations
  Clone ID: MRT4577_140168C.1.pep
MEGAGRDANPLSGYRIGKTLGIGSFGKVKIAEHILTGHKVAIKILNRKKIRSMDMEEKXIISGVEYCHRNMVAHRDLKPENLLLDSKCNVKIADFGLSNIMRDGHFLKTSCGSPKYAAPXVISGKLYACPEVDVWSCGVILYALLCGTXPXDDENIPNLFKKIK

SEQ ID NO: 228702 - protein, 134 aa, Zea mays
  unsure (1)..(134): unsure at all Xaa locations
  Clone ID: MRT4577_140169C.1.pep
GGPRRGKKRKEEDLPLLANKFSERQPICTGWHHTDDKDYKEPPPAPLFXAHRGGGCSFYRAGIAXFNSTFLFLYISILTEIGXSQSTSNCPTAKLQGIRCSFPGGVLXPFYSSSHISTWHINPGSDHSPSHLAS

SEQ ID NO: 228703 - protein, 119 aa, Zea mays
  Clone ID: MRT4577_14016C.1.pep
VGKQGFIISSGLIRRVYAASNFSALALVAYQEESQASTALAHGLAASLGTIVPGRFVRDIYIVGHQVVYEIIEEPRQVIPFVDLHLVLNRVYRLRGDVDTVVTEYEAIVFASNVTAIYR

SEQ ID NO: 228704 - protein, 56 aa, Zea mays
  Clone ID: MRT4577_140170C.1.pep
FPFLPTLSQRCILLVLYIHEFGAPEVFCWHIVRVSILQRLVSIPFCRITHAVRDVY

SEQ ID NO: 228705 - protein, 263 aa, Zea mays
  unsure (1)..(263): unsure at all Xaa locations
  Clone ID: MRT4577_140171C.1.pep
EETLXDVIKXGFDKNQLIESLHNRLQNEATVAYYLLMDNRLRTTSGYLGSEFQESMDPSFSQVHAETPTSAIEHRQHVFTESPGSGLRQHFASERKWALGLQVIFMLSTSYDVFPALLXSFICNCLXSRAHPPEIISEVLKALQELNVYWKKXGHYDMKCRWSPGCLESMMHNSDSFSAESAIIETDVFMEKSTPTVKFEIQLYKTRDEKYLLDLQRVLWIAYVFFWILRSGGVHSCSFVFNLYQLLIQYFVSMNCSCSSSNN

SEQ ID NO: 228706 - protein, 503 aa, Zea mays
  Clone ID: MRT4577_140172C.1.pep
MEGAGRDANPLSGYRIGKTLGIGSFGKVKIAEHILTGHKVAIKILNRKKIRSMDMEEKVKREIKILRLFMHPHIIRLYEVIDTPADICVVMEYVKSGELFDYIVEKGRLHEEEARHFFQQIISGVEYCHRNMVAHRDLKPENLLLDSKCNVKIADFGLSNIMRDGHFLKTSCGSPNYAAPEVISGKLYAGPEVDVWSCGVILYALLCGTLPFDDENIPNLFKKIKGGIYTLPSHLSPSARDLIPRMLVVDPMKRITIREIREHVWFKIRLPRYLAVPPPDTAQQVKKVDEETLNDVIKMGFDKNQLIESLQNRLQNEATVAYYLLLDNRLRTTSGYLGSEFQESMDSSFSQVIAETPTSATELRQHGFSESPGSGLRQHFAAERKWALGLQSRAHPREIISEVLKALQELNVYWKKIGHYNMKCRWSPGCLESMMHNSDSFSAESAIIETDVFMEKSTPTVKFEIQLYKTRDEKYLLDLQRVSGSHLLFLDLCSAFLTQLRVL

SEQ ID NO: 228707 - protein, 503 aa, Zea mays
  Clone ID: MRT4577_140173C.1.pep
MEGAGRDANPLGGYRIGKTLGIGSFGKVKIAEHILTGHKVAIKILNRRKIRSMEMEEKVKREIKILRLFMHPHIIRLYEVIDTPADIYVVMEYVKSGELFDYIVEKGRLHEEEARRFFQQIISGVEYCHRNMVAHRDLKPENLLLDSKCNIKIADFGLSNVMRDGHFLKTSCGSPNYAAPEVISGKLYAGPEVDVWSCGVILYALLCGTLPFDDENILNLFKKIKGGIYTLPSHLSPSARDLIPRMLVVDPMKRITIREIREHVWFKIQLPRYLAVPPPDTAQQVKKLDEETLNDVIKMGFDKNQLIESLHNRLQNEATVAYYLLMDNRLRTTSGYLGSEFQESMDPSFSQVHAETPTSATEHRQHVFTESPGSGLRQHFASERKWALGLQSRAHPREIISEVLKALQELNVYWKKIGHYNMKCRWSPGCLESMMHNCDGFSAESAIIETDDLIAKSTRIVKFEIQLYKTRDEKYLLDLQRVSGPQLLFLDLCSAFLTQLRVL

SEQ ID NO: 228708 - protein, 83 aa, Zea mays
  Clone ID: MRT4577_140174C.1.pep
PSSTSINSSGPAITLDLTRNGAGAVRGLEAAAAEVPGLKRLCQEIASPDFRTALVEQMARSLTKDPKFTDALAAAILQQLPEY

SEQ ID NO: 228709 - protein, 142 aa, Zea mays
  Clone ID: MRT4577_140175C.1.pep
PPLRRSPPTPPGSSVSTASRRFPLLRLGAAPARPSRSRGRPRRRRVAREVSSTTRPLSHLPIAVSRCPVPQPTSRDLSALLAFPGPRSCRRRFKGGLRTAAIALRWEWGSSRRLSAQDADRPRMQLCYARRCHFRASASRHS

SEQ ID NO: 228710 - protein, 225 aa, Zea mays
  Clone ID: MRT4577_140176C.1.pep
MGGFCCCLSAEEFDEYVYPNNPIYRQCVSLRHLFHSIFGGYTATFQRLESRPNNPAQGVAPLGSTNPSVNINDNSLNLVSRPPPYDTDPRYARVQREGLVSRREKSINLAQEESLALRRNASSSGIEHLAAQKKRNSTENEGEYKVHRSESTKSLSAKAYSSSYAVVASEDEDVCPTCLEEYTPDNPKIITKCCHHFHLGCIYEWMERSDTCPICGKEMEFCESP

SEQ ID NO: 228711 - protein, 95 aa, Zea mays
  Clone ID: MRT4577_140177C.1.pep
ASRLDRMFTRCYCTSLCVRRCSRSFSRTGCAARRGAGVLIYIPPRVTWVHSLVFRFSQPLRIAYAVCYVQFCCSQSPIRPSWFSIEYLLLPSLYD

SEQ ID NO: 228712 - protein, 173 aa, Zea mays
  unsure (1)..(173): unsure at all Xaa locations
  Clone ID: MRT4577_140178C.1.pep
ITAGILPLSPLFLQQSSAGLHQLHLVLLLAQNIRARXLHQLVLANLAAYSQHQQFLPFKHLDALKSASYLHQHHLPFSQLHAAYPQQFFPFIHLSAVSSRGYLQHRLLLPFRVLFGVSAVTFLIQQQLLPFSXHCAXALSPLFHLQLLHPFTLLVLTHPAALYQHPIIGGALF

SEQ ID NO: 228713 - protein, 39 aa, Zea mays
  Clone ID: MRT4577_140179C.1.pep
PSVFLLVELCPMPGTLKKYQVTIKYNREAHKPSTMNIMY

SEQ ID NO: 228714 - protein, 45 aa, Zea mays
  Clone ID: MRT4577_14017C.1.pep
PVNDPTGYRRLAGGPTGPWLNPIRFRLRWSTGVPPYARPIGVASH

SEQ ID NO: 228715 - protein, 119 aa, Zea mays
  unsure (1)..(119): unsure at all Xaa locations
  Clone ID: MRT4577_140180C.1.pep
WVGFSSPSGSGSGSTGSRAFYFVGEPIXIAASEVEYRCFIDGLPWTTDDHSLHNAFNTYSEVLKSNIILDRETHRYRXFPIPNFYTEDAMRNPIXEGINRNELDSRNIIHNEAQSLCHR

SEQ ID NO: 228716 - protein, 67 aa, Zea mays
  unsure (1)..(67): unsure at all Xaa locations
  Clone ID: MRT4577_140181C.1.pep
YITRKTNKILGGHILIDMSANAATATILPQCSQAPITSFLPQNPLPALSXIXCENPFLQPYMIQYAI

SEQ ID NO: 228717 - protein, 106 aa, Zea mays
  Clone ID: MRT4577_140182C.1.pep
LARGARLAKSAPFPRPRRSPDLSLRLASAARQGARLLPPLPRLSAVPMGFLQSTFSLLIGTGCGIYIAQNYDVPNIKKLMRSLVGKAKEVEESYKKTGNSKNKDNE

SEQ ID NO: 228718 - protein, 174 aa, Zea mays
  Clone ID: MRT4577_140183C.1.pep
MAETVFTPSLEDKFGAAMAIVKNDISGNITRLENKYSSDPSKYGHLYSMVQEEVQNKTAKGSSSCTNGLLWLTRAMDFLVELFRNLLEHPDWTMTQACTDSYTKTLKKFHGWLASSSFTVAMKLSPNRDKFMEVISGTGDINADIEKFCTTFSPFLKENHEFLASVGLDDMKAS

SEQ ID NO: 228719 - protein, 76 aa, Zea mays
  unsure (1)..(76): unsure at all Xaa locations
  Clone ID: MRT4577_140184C.1.pep
LPIPIYCSPISLPARWCTCGVDDEAVAAFAVWHGWFSTVVIVPPLRLPCGFAFFFLFFALGVNXPQKKKQLFFFLF

SEQ ID NO: 228720 - protein, 103 aa, Zea mays
  unsure (1)..(103): unsure at all Xaa locations
  Clone ID: MRT4577_140185C.1.pep
LVPAGTYSIKVDNDFFSEAVKIXDPQGTLSVGFPIDNRESPVGISALKSHLERIKHFAFVRRIWAFHLLVKGVAFVEAKSDMLAIAARVKTHSSMSVGYQFLV

SEQ ID NO: 228721 - protein, 208 aa, Zea mays
  unsure (1)..(208): unsure at all Xaa locations
  Clone ID: MRT4577_140186C.1.pep
MAQTVFTPSLEAMKHVKAENGVILTKPFLDVCKQILPVLXCFYGPDKFGGAMAIVKSDIGGNITRLENKYTSEPSKYEHLYSMVQEEVQNKTAKGSSSCTNGLLWLTRAMDFLVELFRNLLEHPDWAMSQSCTDSYTKTLKKFHGWLASSSFTVAMKLAPNREKFMEVISGTGDINADIEKFCTTFSPFLKENHDFLASVGLDDMKAS

SEQ ID NO: 228722 - protein, 181 aa, Zea mays
  Clone ID: MRT4577_140187C.1.pep
MAQTVFTPSLEAMKHVKAENGVILTKPFLDVCKQILPVLDKFGGAMAIVKSDIGGNITEEVQNKTAKGSSSCTNGLLWLTRATDFLVELFRNLLEHPDWTMGQSCTDSYTKTLKKFHGWLASSSFTVAMKLAPNREKFMEVISGTGDINADIEKFCTTFSPFLKENHNFLASVGLDDLKAS

SEQ ID NO: 228723 - protein, 202 aa, Zea mays
  Clone ID: MRT4577_140188C.1.pep
MAETVFTPSLEGMKHVKAENGVILTKPFLDVCKQILPVLDKFGAAMAIVKNDISGNITRLENKYSSDPSKYGHLYSMVQEEVQNKTAKGSSSCTNGLLWLTRAMDFLVELFRNLLEHPDWTMTQACTDSYTKTLKKFHGWLASSSFTVAMKLSPNRDKFMEVISGTGDINADIEKFCTTFSPFLKENHEFLASVGLDDMKAS

SEQ ID NO: 228724 - protein, 75 aa, Zea mays
  Clone ID: MRT4577_140189C.1.pep
STPLAPVCEKDKEERQRAGEQRRAFLQPEKSASALPGLRPWWRHASVVIVVDVVLYLVLFAVWMRVCKGFGCLTR

SEQ ID NO: 228725 - protein, 318 aa, Zea mays
  Clone ID: MRT4577_14018C.1.pep
MAAFGAAADHQPMNSAFSGSSEALLDHQRTKDGSDKGEPELGRNGHDGVLSSEAAAAGDCSSKGTSDSKKRRRPNEVMGGDQVQSSNLPADSANESVHSKDKGEESSLATTTTGPGKSKGKGARETSESQKEDYIHVRARRGQATNSHSLAERLRREKISERMKLLQDLVPGCSKVTGKAVMLDEIINYVQSLQRQVEFLSMKLATVNPRLDLNIEGLLSKDLLRFPGVPSSSLGFSPEMMHPQLQLSQPGLIQGGAAGMANPDVFRRIMQAQLSAKDGSQMPPHALNGAFSDVAQQQMAYPSSQDLSIGPSQDGFQM

SEQ ID NO: 228726 - protein, 202 aa, Zea mays
  Clone ID: MRT4577_140190C.1.pep
MAQTVFTPSLEAMKHVKAENGVILTKPFLDVCKQILPVLDKFGGAMAIVKSDIGGNITRLENKYTSEPSKYEHLYSMVQEEVQNKTAKGSSSCTNGLLWLTRAMDFLVELFRNLLEHPDWTMGQSCTDSYTKTLKKFHGWLASSSFTVAMKLAPNREKFMEVISGTGDINADIEKFCTTFSPFLKENHNFLASVGLDDLKAS

SEQ ID NO: 228727 - protein, 72 aa, Zea mays
  Clone ID: MRT4577_140191C.1.pep
QKPFRFLRGMGASYHTNTKLSYIPPPHKKFLFSSQREIQFTPQKYKTPLPNKNKIFSLFKKKFFLFFAPQTN

SEQ ID NO: 228728 - protein, 62 aa, Zea mays
  Clone ID: MRT4577_140192C.1.pep
HPLLTLINSLVSGVYPHRLLFSPHPPPSPSFLFFPCPFPFFPLLSPNCCLLSPFFFIPFPPF

SEQ ID NO: 228729 - protein, 44 aa, Zea mays
  Clone ID: MRT4577_140193C.1.pep
TTRTTTLEALYFQRQQVCHSRGSKVTYAGFQHHRSTIGAPKFNS

SEQ ID NO: 228730 - protein, 59 aa, Zea mays
  Clone ID: MRT4577_140194C.1.pep
TRVNSFAVSTSNVKKVYLFLFHTYVQFFPSSGFFIYLFEKALTLPFPITPPPRFLYLNF

SEQ ID NO: 228731 - protein, 68 aa, Zea mays
  unsure (1)..(68): unsure at all Xaa locations
  Clone ID: MRT4577_140195C.1.pep
MKREYQDAGGSDGYMGSSKDKXLMEAAAGTGEQEEVDELLAALGYKVRSSDMADVAQKLEQLEMAMGR

SEQ ID NO: 228732 - protein, 148 aa, Zea mays
  Clone ID: MRT4577_140196C.1.pep
GQNPKTPLKTTGTNEKKNDPTKKRVFWKKNYRKKGGKKFRNSPKKKTKHFFGPPNGVGGKKKETSLGAQKISLGPRPPKNCWGGPPLGQTKLPIIGGKTGSGFFGFSKNGFKNKNGYRNFKPETGLKRGQPFTHPFFCLPNLNGIYPF

SEQ ID NO: 228733 - protein, 73 aa, Zea mays
  unsure (1)..(73): unsure at all Xaa locations
  Clone ID: MRT4577_140197C.1.pep
VRSLRILVKFLRETAGHVVTVELKTGEVYRRSXLKCEDNXNCQLKNITFTAKVYSLCLRYLRIRDRTPRVLFP

SEQ ID NO: 228734 - protein, 96 aa, Zea mays
  unsure (1)..(96): unsure at all Xaa locations
  Clone ID: MRT4577_140199C.1.pep
QRLPSGXFIPVNNILFDKGGRIFDLVDADYLRYHVMQEFDHAMHHLEQKYEYMTSDHHYISRKHEEDKVIVLEKGDFLFVLNFHCYISYFYYLYWL

SEQ ID NO: 228735 - protein, 157 aa, Zea mays
  Clone ID: MRT4577_14019C.1.pep
LLCKQKKHWKLLTKQGSSRCITSCSSSFGRCAKCQHAAHCYCTARHAMNARDRRNRQNFQPSIQATPQASPPPSVRGGWGRHEPTSFSSVPSEHDKKNLTDASAQAQPWVDAVQGVSLSRRCCSRHQQAAIRGPLRARTLDDQILLRWKKPFFCIFY

SEQ ID NO: 228736 - protein, 178 aa, Zea mays
  unsure (1)..(178): unsure at all Xaa locations
  Clone ID: MRT4577_1401C.1.pep
AALDASVRRGEKVAEKDVVQVTELLMNELLRLDAVVADGDVKAQRRMQVRSKDPAAVAHEFQPVEFHCRGXLSLNRFRPPPSQVKRVQKYVETLDAVAAKNAALVGKSGEKAAAKPAPAPAPAPAPPPRQQGQGQTRWEMFDLLSSLPSTSSASSTTTVSSTASSGAPPPSRPDWMLF

SEQ ID NO: 228737 - protein, 70 aa, Zea mays
  Clone ID: MRT4577_140200C.1.pep
FLLIFRFLNQGSGRWCYLTGEYKGLGIGAFMSTATCNGHIAWLCHNSGDHHIHHQQAIRLPMKRQPQTSS

SEQ ID NO: 228738 - protein, 91 aa, Zea mays
  Clone ID: MRT4577_140201C.1.pep
KSISYVFSEFSNLWTRRTITKICRGLSTSFLRLRTSLVRTAGSLLRSSGTLSRYCQAKGIAACEPSDQHQTRKIRSPGYERQRPSDLRSTV

SEQ ID NO: 228739 - protein, 129 aa, Zea mays
  Clone ID: MRT4577_140202C.1.pep
RHGLQTSDTCIICDQSSETLDHLVLGCVFSREVWGILLRRLQLGHLLVVEQPIFDWWLKARKTFNKPFRAGFDSFFFLMAWNLWKERNVRTFQGVQRSASKLADDIHQELNSWCSAGYRGLVALAARLA

SEQ ID NO: 228740 - protein, 40 aa, Zea mays
  Clone ID: MRT4577_140203C.1.pep
KGKKNRDPECISLAWSANGQTLFAGYTDNKIRAWGVMSRA

SEQ ID NO: 228741 - protein, 98 aa, Zea mays
  Clone ID: MRT4577_140204C.1.pep
TPLKGFFIPKEDFLDRRFSPPSTSFGVVVEVGVSPAPVIKPKENRSERGFSAEGATAGVEGVFEPSAASELRGAGEGAEATGTPPTRTLPAVEGRRRS

SEQ ID NO: 228742 - protein, 172 aa, Zea mays
  Clone ID: MRT4577_140205C.1.pep
IKEKKKKKKKKKKKKKKKKKKKKKKKKKKKKKKKKKKKKKKKKKKKKKKKKKKKKKKKKKKPPPPPPGERKIFGPPQQKGGPPKKRRCETPPPPPPKWSPPGPPKKRGSKKKGGGSSPNPAKKGTPREKQVPPTNAPRVVSIYPPPPRERKEMKPPPPPPPRGPPPENPPPF

SEQ ID NO: 228743 - protein, 52 aa, Zea mays
  Clone ID: MRT4577_140206C.1.pep
AIDGAKYRHHCKQRKLVSNFSSLISSFHMAALQDGLLHIPAQSDLLTITTFH

SEQ ID NO: 228744 - protein, 50 aa, Zea mays
  Clone ID: MRT4577_140207C.1.pep
MEMKKVLCAALVAAAGAAGGAAGPSASAAAAAAVPAAAALVVSFLASFLH

SEQ ID NO: 228745 - protein, 96 aa, Zea mays
  Clone ID: MRT4577_140208C.1.pep
SSNEFFSAQLSNPYMTDGRMLPIVMSPLSKKMTVPMNEKNISNACQAKTNLVEVIHLGGNHLVLQLPRGFCWVWFKRPLLVKNPTRKKQTKGGRRR

SEQ ID NO: 228746 - protein, 96 aa, Zea mays
  Clone ID: MRT4577_140209C.1.pep
AVWLQYRLILTFLPLFYLQEDSLKERLPEPAGLGSKKISTRVTQGGRGRQTKKETAGGGGGTKTKGGQAKQPLGTEVRATGRRQAGRHPRGGRSWG

SEQ ID NO: 228747 - protein, 60 aa, Zea mays
  Clone ID: MRT4577_14020C.1.pep
AGMLLICLLVIFLFGQVNRTAHLGICDCIKIATMCLPISICESRLLLVSCATKQVYGTSN

SEQ ID NO: 228748 - protein, 157 aa, Zea mays
  unsure (1)..(157): unsure at all Xaa locations
  Clone ID: MRT4577_140210C.1.pep
HACRTGPLLHGRPQRSQLQQLXELMKPCLANSQPQHKIPYXNKRLLMNPADYGPQQLPXSEITAVYPPKXLALNQLAALXNSAGYLQQXQSVPRIXQLPDVSPXATLTQQXMLPEYLHAGPNAXTLLQLAHMLPYNQHALTNPTTFYQQPIIGGALF

SEQ ID NO: 228749 - protein, 61 aa, Zea mays
  Clone ID: MRT4577_140211C.1.pep
MGAICCVYTRYFPLFYDLFRCYVGPFHIPMVALLLNCVFRKYFVFSYLYPLVKKILLLYVA

SEQ ID NO: 228750 - protein, 85 aa, Zea mays
  unsure (1)..(85): unsure at all Xaa locations
  Clone ID: MRT4577_140213C.1.pep
XHXXPKPWGGSFFFFERRWVFXEGGPDFSFSSRSHVXMGXRGPIWALTPPRIHPSXLLLXPGLSPGPFLDMRSSXSASAGPFYSF

SEQ ID NO: 228751 - protein, 77 aa, Zea mays
  unsure (1)..(77): unsure at all Xaa locations
  Clone ID: MRT4577_140214C.1.pep
NRXRVTDLLPNCKWAADDNIHPLPPFPWISLPAPIALVLQQAQIGGNGPYGMTRRQQRPWSRTLPPIPLPGAYCRRA

SEQ ID NO: 228752 - protein, 76 aa, Zea mays
  Clone ID: MRT4577_140215C.1.pep
PTRSNTRTTTRTSQNGHFMLSLVDLDSNAGTSLLLIHYARGRSTQTMVNEKMVSCQAARVLLAKGSMGLLLVRINE

SEQ ID NO: 228753 - protein, 116 aa, Zea mays
  unsure (1)..(116): unsure at all Xaa locations
  Clone ID: MRT4577_140216C.1.pep
VCAPLGCVVPWAGAAPPFVCPCPGSPSXXXGXVVRGPAPLSLALVPAAVAXGPVLFVPWVXPXFRPGAAPWWXASGCSSSGAPCPVCPAASVPPPPVCLRSFSVGVVPLSLASVSL

SEQ ID NO: 228754 - protein, 54 aa, Zea mays
  Clone ID: MRT4577_140217C.1.pep
SNSFNWYNFTFSYFICTKVQIVELNPLTSQVQVHKLNKYSTLVCTHLGGEWSII

SEQ ID NO: 228755 - protein, 266 aa, Zea mays
  Clone ID: MRT4577_140218C.1.pep
MSIKYEHNGSFRFEELSKRDEKCNKKDDNNILELESIARGCEQDRIKDDCGKLLHSDSRNGNTVAKNYSSVNEHTNSSSLVSSVAEVDDIQSSVGKNGDSSFFTGFLKKGLKDLSLFNQSVDSAKVYINGHPISERALRKSEKKVGPVGPGSYWYDYRAGFWGVFGQECRGIIPPFIKEFNYPMPKNCAGGSTGVFVNGRELHQKDFDLLVGRGLPRIPGKSYSVEISGSVIDDTTGTKLRGLGKLAPTIEKMKRGFGMHVPEETK

SEQ ID NO: 228756 - protein, 145 aa, Zea mays
  unsure (1)..(145): unsure at all Xaa locations
  Clone ID: MRT4577_140219C.1.pep
DLPNYEAFALGGPFFGKGFSKGELGGFKKNFEPGTEVGVPIKNPXVYAFSXHGAGPGSFQDVKRNPSEFFRGVGQGFSXGVGVQLWLVKGKVLVDPQAGSGAVFFQFGEKFLGCCPPVPWKAGFLGSFFNQVCGFIGLQRPWRFS

SEQ ID NO: 228757 - protein, 205 aa, Zea mays
  unsure (1)..(205): unsure at all Xaa locations
  Clone ID: MRT4577_14021C.1.pep
MGAYKFVSELWRRKQSDVMRFVQRVRCWEYRQQPAIVRITRPTRPDRARRLGFKAKQGYVVYRIRVRRGGRKRPVPKGIVYGKPKHQGITQLKFQRNKRSVAEERAGRRLGGLRVLNSYWVNEDSTYKYFEVILVDVAHSAVRNDPRINWLCKPVHKHRXXLRGLTSAGKKFRGLRGKGHRHHKNRPSRRATWKRNQTVSLRRYR

SEQ ID NO: 228758 - protein, 80 aa, Zea mays
  Clone ID: MRT4577_140220C.1.pep
RSRPARTMRLRQRTKDTTLRNNVTRIADDMTSHKGPEGIILIGDPISVNDTTFTATERASWTDNSYSQRVIEIACETKSS

SEQ ID NO: 228759 - protein, 106 aa, Zea mays
  Clone ID: MRT4577_140221C.1.pep
VSFSPSGKVCMRSLCGVLSRWSPGLCGVRLLDCRLRLGQCMCCGTPPPPGSGGSCSRAWCHALLCALARRAPALPLPSVWPLSAWGSTRFSPLMGPRRGCCVFVVI

SEQ ID NO: 228760 - protein, 88 aa, Zea mays
  Clone ID: MRT4577_140222C.1.pep
IYCSFRIVGEEFTKEGWGFVSSSCLFSVFIHFTSFGHSCHRISGKHKSVPGTVLEMIYSAPLFSFAGIPERLPPRCRFIDGNPSNFRE

SEQ ID NO: 228761 - protein, 62 aa, Zea mays
  Clone ID: MRT4577_140223C.1.pep
IVVYMHIHPARCINDLCMQGSLGSSSGKLIDPKIIMQKLMRGMPHATPQLRVASYVIIFYVE

SEQ ID NO: 228762 - protein, 110 aa, Zea mays
  Clone ID: MRT4577_140224C.1.pep
MDNDMKEVRQGQHRVFPWEMLKVFLLLGLGLFAAGVLMARHGHEVAADTLFRPWLGVSAAAAEGLEHSMMDEELLWHTLFAPGVRRYPFQRVPKVAFMFLTCSPLTLAPL

SEQ ID NO: 228763 - protein, 91 aa, Zea mays
  unsure (1)..(91): unsure at all Xaa locations
  Clone ID: MRT4577_140225C.1.pep
SAPXRLALAPRGPALXSLXARXAVPPWPGGFFVPPLGFRFRPAVPFSAPLXCSVPPRGRWSAXSXAVSLVRLXSGXAACFLVXFASPALLA

SEQ ID NO: 228764 - protein, 86 aa, Zea mays
  unsure (1)..(86): unsure at all Xaa locations
  Clone ID: MRT4577_140226C.1.pep
LCSCSVGFRLSVDGRSCEDINECSTSPCSQECANVYGSYQCYCRRGYQLSDVDGVTCADIDRSRLPNGGHICSHXCINIPGSLQCS

SEQ ID NO: 228765 - protein, 67 aa, Zea mays
  Clone ID: MRT4577_140227C.1.pep
IDVAPRAPAKDQKCPRSLNISSKASASTLIHWTTPSGSSWMNFCSEEYAPTLANMSFNFLTHAKDMS

SEQ ID NO: 228766 - protein, 251 aa, Zea mays
  unsure (1)..(251): unsure at all Xaa locations
  Clone ID: MRT4577_140228C.1.pep
MSSMMQPQIILLKEGTDTSQGRAQVVSNISACTAVADTVRTTLGPRGMDKLIHDDKGTTISNDGATIMRLLDIVHPAAKILVDIAKSQDSEVGDGTTTVVLLAAEFMKEAKPYVEDGVHCHNIIRSYRSAGNMAIERVKELAVSIEGKSLEEKKSLLAKCAATTLSSKLISGEKEFFASMVVDAVLAIGHDDRLNLIGIKKVPGGTMRDSFLVNGVAFKKTFSYAGFEQQPKKFLKSKILLLNIEXLELKS

SEQ ID NO: 228767 - protein, 116 aa, Zea mays
  unsure (1)..(116): unsure at all Xaa locations
  Clone ID: MRT4577_140229C.1.pep
MGSEHKGTTLVXMLCLLALQRAEVLKYKDPKQSVXASIKDLMGRMTLGEKTGQMTHIERENSTADAXLSKYCIGSGLTGGGRLPXPHAVAQTCAAMVTEMHKGAVSTRLGIXPIIY

SEQ ID NO: 228768 - protein, 75 aa, Zea mays
  Clone ID: MRT4577_14022C.1.pep
FKVGGRKNNLFFFLVLVIFVGFFFLFLGGLFVKKRFSQAMPWGAHHLSIFFTGFGQMHFFILKKTKKNSLEEFNL

SEQ ID NO: 228769 - protein, 87 aa, Zea mays
  Clone ID: MRT4577_140230C.1.pep
MTQKQTLFKGQSKKKTIPPNRHGKAPHVRKGKRAVKPTKFTKDMDAEKELTKFINQCNEIKAANLASKEGGDLNIVKADGEESKSKK

SEQ ID NO: 228770 - protein, 64 aa, Zea mays
  Clone ID: MRT4577_140231C.1.pep
LLDSFNSRSALLEVRATNVLQVICVREWCVPLFVWSEAHACMTYLALLRIYSVPCLKRFCWIRR

SEQ ID NO: 228771 - protein, 58 aa, Zea mays
  Clone ID: MRT4577_140232C.1.pep
PSTPKRILNSMFGRGEENLEKCARERAPTTAKKFSVFFLYHVPRNFVLFACVNVYISK

SEQ ID NO: 228772 - protein, 83 aa, Zea mays
  Clone ID: MRT4577_140233C.1.pep
SRYNNAYMLTWFYFFPYTSKHCINDSVKTQKPNSTGFNTPTSQGCKHHNSSTFDSRTTYNRIFVGAIGTNHTGTDNCYNSCVA

SEQ ID NO: 228773 - protein, 40 aa, Zea mays
  Clone ID: MRT4577_140234C.1.pep
IMIIHVIIISAFPTPIIIDLPHMRLCNLLGKKSIPRPNNR

SEQ ID NO: 228774 - protein, 60 aa, Zea mays
  Clone ID: MRT4577_140235C.1.pep
QREPVMELGQCQLQFVPRNFNNCHPIFFRGCCSHHWRHMWFTSHSNVGCVIWHDKKMGQL

SEQ ID NO: 228775 - protein, 101 aa, Zea mays
  unsure (1)..(101): unsure at all Xaa locations
  Clone ID: MRT4577_140236C.1.pep
DGDTTHVFFGCIKGDTPWNHTXEGIYLCDKDPNGHYNQDCLYKTRDKYEIIVKKICVXKIXLTNKSLYDETIHSHAYDGHSLYYXQHAKYEHSAPLFEQIG

SEQ ID NO: 228776 - protein, 229 aa, Zea mays
  unsure (1)..(229): unsure at all Xaa locations
  Clone ID: MRT4577_140237C.1.pep
RAWVTIHHNLPSPPASFPNQVFKIFCRANENYCLCRRDGAGVLAPVNPKDDHQCWYKDMCFSIRVMDQVGMPAFELVNIDTELAIPHSLGHCHPGELAPLTPDQDDTSGLWTDSQDVCKDFRCIRMGNHSRLNFHVFRVDNDHRVVDYGTCDALWKWYKAENQSWKILPWGPEDISAAXSVRTVRRVRLLRGRXQDYEHSLRNDTAWLASTNPGDEYQHWVKDMRHPTR

SEQ ID NO: 228777 - protein, 68 aa, Zea mays
  Clone ID: MRT4577_140238C.1.pep
ICPYAPNPHSLMGQYKATSLVPLASETDRKFARAMPLGPLRHLRQKAEMLIMRPTPPPPRAFTSYPRC

SEQ ID NO: 228778 - protein, 94 aa, Zea mays
  Clone ID: MRT4577_140239C.1.pep
GAGSLKFQTQAKETWQRRDDTKKQSQMQCNLISNQNFQVSFLYSSFPYSRLSKSQLVLAPEGEHPLVFCRGKLARQQGKWLFFAVAGSTFDWFR

SEQ ID NO: 228779 - protein, 33 aa, Zea mays
  Clone ID: MRT4577_14023C.1.pep
RVRCSTLILDLNAICSVLSHLMICYLTTVFASV

SEQ ID NO: 228780 - protein, 150 aa, Zea mays
  unsure (1)..(150): unsure at all Xaa locations
  Clone ID: MRT4577_140240C.1.pep
HQQQQQQGEASKQSVPRTSHXLVQHAGASGDDQFLRDPLLHPAVTAVGDLHLWARRGQRAGERRWRRGAGLGIGTVQGKGKRGGVGTKTTRSTRQSPPWCDRIGHGGDSSAPGSARRCMAMDAMPRLGDSQRRPTPTPRSTRWGGVGWGI

SEQ ID NO: 228781 - protein, 242 aa, Zea mays
  unsure (1)..(242): unsure at all Xaa locations
  Clone ID: MRT4577_140241C.1.pep
MGRDERFPVWEAALGAGVAAAFAAGLVGVYLSMPDSDYSFLKLPRNLEELQILXVLVGYCAVYIFMQTFMIPGTIFMSLLAGALFGQLRGLALVVFAATAGASSCYFLSKMIGKPLVFTLWPDKLSFFQRQVAKRREKLLNYMLFLRVTPTLPNTFINLASPIVDVPYHIFLLGTLIGLIPAAYVTVRAGIALXGELTSLSDLYDTQSIALLFLIGVVSVTPALLGKDEAQEKPSEMAVGAS

SEQ ID NO: 228782 - protein, 254 aa, Zea mays
  Clone ID: MRT4577_140242C.1.pep
MGRDERFPVWEAALGAGVAAAFAAGLVGVYLSMPDSDYSFLKLPRNLEELQILTGHLENYTSDYTLQVLVGYCAVYIFMQTFMIPGTIFMSLLAGALFGQLRGLALVVFAATAGASSCYFLSKMIGKPLVFTLWPDKLSFFQRQVAKRREKLLNYMLFLRVTPTLPNTFINLASPIVDVPYHIFLLGTLIGLIPAAYVTVRAGIALGELTSLSDLYDTQSIALLFLIGVVSVTPALLGKDEAQEKPPEMAVGAS

SEQ ID NO: 228783 - protein, 279 aa, Zea mays
  unsure (1)..(279): unsure at all Xaa locations
  Clone ID: MRT4577_140243C.1.pep
MGRDERFPVWEAALGAGVAAAFAAGLVGVYLSMPDSDYSFLKLPRNLQELQILTXFFLTFACPLSSSFFSLSGWLVPVVXESFRLLSVFSYEIXPICPMIICTQVVCILLMDGHLENYXRLHPTGLRGVALVVFAATAGASSCYFLSKMIGKPLVFTLWPDKLSFFQRQVAKRREKLLNYMLFLRVTPTLPNTFINLASPIVDVPYHIFLLGTLIGLIPASYVTVRAGIALGESGSLSDLYDTQSIALLFLIGVVSVTPALLGKDEAQEKPSEMAVGAS

SEQ ID NO: 228784 - protein, 36 aa, Zea mays
  Clone ID: MRT4577_140244C.1.pep
VAVQAVHYGASRPYYGIQTTLNEQGCGVLIVKFSGD

SEQ ID NO: 228785 - protein, 115 aa, Zea mays
  Clone ID: MRT4577_140245C.1.pep
VPFVKGDRGVLGDVGKAADLENLYRSTGTFFQQSSFECHPCSTRAWDPLQAVSVASITSAALTVPWPDPRNSMQIPQVPGPRCRVASPWHQPTSITSEWLSAYHQPSAQPGTETE

SEQ ID NO: 228786 - protein, 96 aa, Zea mays
  unsure (1)..(96): unsure at all Xaa locations
  Clone ID: MRT4577_140246C.1.pep
GSPGFGFVGERIEMEPSHVEYPFLSXGLACPTDKQALHKAXFLTYREVLETKIILYRETQSSRAWGFDTFYTDEAMRNAHVGMNGMELDERNIIVN

SEQ ID NO: 228787 - protein, 60 aa, Zea mays
  Clone ID: MRT4577_140247C.1.pep
EKSAFVWGPRSHARQIQMARGNRWCKIPSKNPCLCCELGKGFLLIQPFTGPKEFFPGEIV

SEQ ID NO: 228788 - protein, 64 aa, Zea mays
  Clone ID: MRT4577_140248C.1.pep
ESCSCRDIGILIDDQSFSVKHVCYITVARFFVGSADQACPIRSGAVFMRDIVLVECSVCHMLLV

SEQ ID NO: 228789 - protein, 52 aa, Zea mays
  Clone ID: MRT4577_140249C.1.pep
VGLITRVSSSGLRCIVLLLSYLGWCGKEFVVVTVDAARVGSDIFCKSTRQGR

SEQ ID NO: 228790 - protein, 204 aa, Zea mays
  Clone ID: MRT4577_14024C.1.pep
MGAYKFVSELWRRKQSDVMRFVQRVRCWEYRQQPAIVRITRPTRPDRARRLGFKAKQGYVVYRIRVRRGGRKRPVPKGIVYGKPKHQGITQLKFQRNKRSVAEERAGRRLGGLRVLNSYWVNEDSTYKYFEVILVDVAHSAVRNDPRINWLCKPVHKHRELRGLTSAGKKFRGLRGKGHRHHKNRPSRRATWKRNQTVSLRRYR

SEQ ID NO: 228791 - protein, 93 aa, Zea mays
  Clone ID: MRT4577_140250C.1.pep
MADDVTPVMRLHEWRTNGRMAWSQSLGCCADELHGGELGTARAGLDGGRGNGESAREMELEEEESSAEGGRRDSSPIYRGRGEGESAGVIKHH

SEQ ID NO: 228792 - protein, 243 aa, Zea mays
  unsure (1)..(243): unsure at all Xaa locations
  Clone ID: MRT4577_140251C.1.pep
MADGVTPVMRLHEWRTNGRMAWSQSLGCCADELHGGELGTARAGLYGGRGNGESARERELEEEESSAVGGRRDPSPIYRGRGEGDIKMSPFEALYGRKCQTPLMWSNVGEKTLEGPAFIKEAEEKVXQKSYADNRRRELSFEEGDFVYLKXIGPATYRLKLPESMSYIHNVFHVSQLRKCLKVPESHIEEERIQIQRDLQYREKPVKILDSAILKTRNSEVKLCKVQWSREGEEEATWRVRIL

SEQ ID NO: 228793 - protein, 138 aa, Zea mays
  Clone ID: MRT4577_140252C.1.pep
PRAWREVLDPTAFSCPDSCGEARARARRNLAYFRANYALAALALVFLGLVYRPASMLAFLALFIAWLGLYFGRGGGEPLVCLRREVDDRVVLAALSAATVLAVALTRAGLNLLVSLVVAVADIGAHASFRVNLYLDET

SEQ ID NO: 228794 - protein, 156 aa, Zea mays
  Clone ID: MRT4577_140253C.1.pep
GGCLGLKFFFFFFFFFFFFFFFFFFWQTRQGPPHYGGARTNLGQIYKAKGGGGGVFFLFFWSNHQPFSHFFSFSIFERPPGGAPCPSKEGRKKIMWPAPQKKRGDNWESGGAKMFFPLSQGDKPGNSFSFPFPMQAKLGNHSEDEANAAPGPLGLH

SEQ ID NO: 228795 - protein, 82 aa, Zea mays
  Clone ID: MRT4577_140254C.1.pep
SVVNGAETRLSETSSGSFSRAPAPSRAETASTILSLSPLLASGIHHVAIGLLQLHLLGEQELHASSACACTMNILQTHTRCL

SEQ ID NO: 228796 - protein, 261 aa, Zea mays
  Clone ID: MRT4577_140255C.1.pep
MREREVASSNLTIHARVVESCSYNFKKKKGRNNNIQLSLPIHLTSYQTYLNMKYATATIAAVTMALASAKDCNLPPISEAVVPGDVFKLVALPKVANEIECEPFQAKNNDLLIGDSFQSANCTTRLPRDHASFVLNGQGLLFLYTGDTPDNFEAQEIFVDRSGMGQGNIQYTTGLPANIGRNQELGPFKITETSDLVFDNGNGAVTAFQACPPADGDKLTGWKVWLAGNDKPAGSEGCVELNARAVKETNPEACEYSVYKA

SEQ ID NO: 228797 - protein, 130 aa, Zea mays
  Clone ID: MRT4577_140256C.1.pep
MCNSNVDAVAKYTEKQMASLSADYGLDLGTVRGTVNNACRIIEVRRDLGSLDRYVWAFVNNRPLSPSYKYSRKIPAKTSKSECISKDMVRRRFRFVGPTVVHSFMQAVGLTNDHLVSCPRHRACSAAAVN

SEQ ID NO: 228798 - protein, 377 aa, Zea mays
  Clone ID: MRT4577_140257C.1.pep
MCNSNVKSAGVAQIDGRPVLQPAGNRVAAPDAARPLKKSLHKSFSMPPSYDNNATVPARPAPAENTRAAPAPPSLLPPTTPAPAPAAARATKAAGAVPAEKPRSKARKPGAVLPVATFAAPEAFEPAGSIAAARREHAAQAQAQRKSRIAHYGRTASFSRVEGRVGATATAEPAVPASPTTGLDEKRCSFITPYSDPLYVAYHDEEWGVPVHDDELLFEMLTLSGVQVGADWTSILKKRHVYREAFSGFDVDAVAKYTEKQMASLSADYGLDLGTVRGTVNNACRILEVRRDFCSLDKYVWAFVNNKPLSPSYKYSRKIPVKTSKSESISKDMVRRGFRFVGPTVIHSFMEAVGLTNDHLVSCPRHRVCSAAARVNN

SEQ ID NO: 228799 - protein, 318 aa, Zea mays
  Clone ID: MRT4577_140258C.1.pep
TRPPTRPPTRPAENTRAAAAASLLPPTTPAAPAAARATKAAGAVPAEKPRSKARKPGAVLPVATFAAPEAFEPAGSIAAARREHAAQAQAQRKSRIAHYVRPRVRFPGRSRAATAAERAVPASPTAHDEKRCSFITPYSDPLYVAYHDEEWGVPVHDDELLFEMLTLSGVQVGADWTSILKKRHVYREAFSGFNVDAVAKYTEKQMASLSADYGLDLGTVRGTVNNACRIIEVRRDLGSLDRYVWAFVNNRPLSPSYKYSRKIPAKTSKSECISKDMVRRRFRFVGPTVVHSFMQAVGLTNDHLVSCPRHRACSAAAV

SEQ ID NO: 228800 - protein, 93 aa, Zea mays
  Clone ID: MRT4577_140259C.1.pep
HTRSLPNACRLFSCFFLFLFFVFVFFYYFCFFVFVIFYLFLFSFYFCYLFVSFILFKKEKSGTSKGETNEYQTGQQWPRQKSHSNIGDLDGII

SEQ ID NO: 228801 - protein, 38 aa, Zea mays
  Clone ID: MRT4577_14025C.1.pep
YHHASNSQSNVVIYLSGFLSRTAPRRHSNKCNHTLGLV

SEQ ID NO: 228802 - protein, 431 aa, Zea mays
  unsure (1)..(431): unsure at all Xaa locations
  Clone ID: MRT4577_140260C.1.pep
MCNSNVKSAGVAQIDGRPVLQPAGNRVAAPEPDASRPLKKSLQKSLSMPVYYDSNATAGARPAPAENTTRAAANSSPLPPAKATTKAAGAFPAEKSGRPKAARRPGAVPPPVVAFAALEALEPAGSIAAAQREHAAQAQAQRKLRIAHYGRTASFSRVEGRVVGAAAAAAERAVPASPTGHDEKRCSFITPYSDPLYVAYHDEEWGVPVHDDELLFEMLTLSGVQVGADWTSILKKRHVYREAFSGFDVDAVAKYTEKQMASLSADYGLDLGTVRGTVNNACRIXRYRDPYVSXPQSLKDTSSSSSSSSSTILQRKDEGRRSMNGEEEXIKKNHLMALFVXVFQVRRDLGSLDRYVWAFVNNRPLSPSYKYSRKIPAKTSKSECISKDMVRRRFRFVGPTVVHSFMQAVGLTNDHLVSCPRHRACSAAAVN

SEQ ID NO: 228803 - protein, 1028 aa, Zea mays
  Clone ID: MRT4577_140261C.1.pep
MPKPAAAEPFSIRGYAMRMRAVDAAECYPFVGGCCSEGEGELPPRFPQMDRKPLPRWWKHELAAGQAQLLAGAKGGEAAAAGCRGGGLRKGTKRKGSHSSSTGERARKRRRVRSFLTNKERTAKPQSTSRLHEHKLHMALLRKHKSSTVHTSTELEPRKKLEEARERKPTHENSVNKRSRERTYPSSEMDSNLFRIKEVTSSVNKQGIEVNGSTNNPTNGGYEMVKTSTGTKDDIFGDLPLLELESSKIMFRTGVHELPTVIEESFITNQTEADSIPEAVPLRLIDASDITAHTPSPLEDLVKSEDNEPACISHSDVEGSYPSTVGIDGVPNHKNINMVKPGLGDMQLKLAEVCALGSHSVLRSKYGSGNPLQGCFDVNKNCSQEIKKHGSNSTSSPPTMRTRTEETKYKDAPVKCKSTDITDTVAALPAPANHSYQASVLPSAVSRTVFSTSVDSNDVSSFRSLPAKECIPITRSGNFRTNMCNGSKKHVDPCAALSTDNQGTSHSKLDPIFSPANIGMAFMKLPGLQRMEILNYNAKIGENRFSNAESMNTVRYQKQQLLSGMTYVMQGQKQIGLGSSQVKRPALDDYGGQGDHHLQQPTVRLMGKTVSVCSHSKDHNVSTMDKVSPNNVAIEASRLSTISCQLPPKRSFPCQNSVTQRVHLNNSSDFLARIPNNSVPGQNTTLHELHDQRPQPTNSSATVKGCTWNFGNQFVCQAELDKAAMVSANSQTRHLELHQPPHLISIPQNQQSHLWTPAAHTRKDQCFVGPAVNQSSPVPKSLLNASMKEKYQNSTLLSYNDPSSMPIRQPYQIPGAKSSSASVISFFEYGADNSLSRSSSPGLSLSLTTGLANESVSTSRAACAGSLTNADGRKAASFVEPIRSAYADNVSQPPAKPISNRTVYAADNVSQQPAKRQLVTGRKDFMSMGPNIVNHSPGWSLSDAVGPQVLDFSKRMGRDAAQMSKNESDNPRASSGSVPPIETWSRPGVVAGANTNTMLNPGQNLNDHSKLLYSTKFSVDSGINSVIL

SEQ ID NO: 228804 - protein, 109 aa, Zea mays
  Clone ID: MRT4577_140262C.1.pep
LRRPSFSARSKHVTLVLVSWSWGVFSSPGPSVMVMKTAPSFYMAAVVARACPQKWDHMHLSVVSRGVLLLILLPHPTPPQTYLHAIPPLRLRLHRHHTLLESAHHLPWI

SEQ ID NO: 228805 - protein, 54 aa, Zea mays
  Clone ID: MRT4577_140263C.1.pep
YRRPYCFRLMHFHILCYVPFLFIRVSDRLCIVCCWASHRSSDISCNYDFLPVCH

SEQ ID NO: 228806 - protein, 65 aa, Zea mays
  Clone ID: MRT4577_140264C.1.pep
KIKKRYAMVGTYGIAYYSKHIHHIAFGDARIYICMQLHPDKSQSLASCSVIYIDFPNDLLYCTHF

SEQ ID NO: 228807 - protein, 85 aa, Zea mays
  Clone ID: MRT4577_140265C.1.pep
RHCIARTTYLCNRACWFVKLVFSSQGLLRGRFLRNGALEEERPPSVAARELGQLRQSHRMPALRPESIASSQDVSQSDASVVESV

SEQ ID NO: 228808 - protein, 94 aa, Zea mays
  Clone ID: MRT4577_140266C.1.pep
GNHLVHIVKYHPLESMCTSQCKNSECKDIRWYHAVTIIGVSYKIYAFTIYIWTRSDHGARQAQITTGVKDPEVPTATIQNEVFSPVRVSVSRAV

SEQ ID NO: 228809 - protein, 91 aa, Zea mays
  Clone ID: MRT4577_140267C.1.pep
SFLLEHGELSKVIVKYNLIYENANEKQQRLPQRKKKKKTNKKNKRKKRQTQKRKTCIQVTQNTRQELGCWMALLAAWKLVKAHRDCCRSPI

SEQ ID NO: 228810 - protein, 106 aa, Zea mays
  unsure (1)..(106): unsure at all Xaa locations
  Clone ID: MRT4577_140268C.1.pep
VPDGWGEALVLALALLFLAVGAPPEFGLFGGGGNLPVPWAXVFNVFWRFLEGAMGAVFVFLFSGFGNLVLLMVNILPPPKRFFFFLGRVFSGEKRNPFPWGAGSPL

SEQ ID NO: 228811 - protein, 68 aa, Zea mays
  Clone ID: MRT4577_140269C.1.pep
HMPQATTTKSGRSDMNLSEATRPYKPRISLTQSRLILHGMQFLLPPWMIGQLVNLCHRRRSALHITHV

SEQ ID NO: 228812 - protein, 204 aa, Zea mays; identical to SEQ ID NO: 228790
  Clone ID: MRT4577_14026C.1.pep

SEQ ID NO: 228813 - protein, 58 aa, Zea mays
  Clone ID: MRT4577_140270C.1.pep
HRASPAKSSPLQYHNEVNIRGGMFTRVGCNFYQKRKKYKNAVYQLRFRAFDSHINCGH

SEQ ID NO: 228814 - protein, 128 aa, Zea mays
  unsure (1)..(128): unsure at all Xaa locations
  Clone ID: MRT4577_140271C.1.pep
PPPHPHSPPPPPSPPPPPPPAPPPNETPPHPPXPRPPPXKTPPPPFVNGPPPKGPGPPPSKPXPNKGLSHPXGPMVSPPPPFMIAPPFSFAPPPRGRLKXSPSPPPXPTPGSPLLPGTVPRPPGPTSF

SEQ ID NO: 228815 - protein, 89 aa, Zea mays
  Clone ID: MRT4577_140272C.1.pep
PAGSGINSMSALNQFLKKSQKPEIYPLIGILTCALSGAAYVGYHAAKAPDVAWNHKSNPYPWQEIKDGEQVKLVALNQKYDHPWNRTKW

SEQ ID NO: 228816 - protein, 75 aa, Zea mays
  Clone ID: MRT4577_140273C.1.pep
VVRTCQVHIVPAAPRRMFPRTLSSVLGVRYVESFAARFVALLECVVLRADVWHIHERRGRLYAPKPCSWLATQEI

SEQ ID NO: 228817 - protein, 56 aa, Zea mays
  Clone ID: MRT4577_140274C.1.pep
SSAYVEASVTLTNNILFTDLFYLTFTFFGCCNIKYFFNPKLQGVISFLNKYVLLCI

SEQ ID NO: 228818 - protein, 77 aa, Zea mays
  Clone ID: MRT4577_140275C.1.pep
HGVYVMWFLASILIGPTDWSWSRPSGWYWGPCWSPVGLRSARSPALVNWRVSRLSLFLSHRPAHLLRNELSGSPAAP

SEQ ID NO: 228819 - protein, 77 aa, Zea mays
  Clone ID: MRT4577_140276C.1.pep
GPFSIPPPREAGKKVFPQNVPPAKGKPKPVYPSNGQFLKTLNSPPFPRPPGVWPPPPQLIKLGAPPPPPKKYWAPPI

SEQ ID NO: 228820 - protein, 188 aa, Zea mays
  Clone ID: MRT4577_140277C.1.pep
MADTARLFMLVAVATAALAGRSATRRGWVSILSQSFFFFLSETRLPPPLAVIIVSRGRPWNPEDGAWCVCRSDLADSALQKTLDYACGGGADCKPILQSGACFAPDTVKAHCSYAANSFYQRNGQNPQACVFSGTAALSNVDPSANGCTYPATPRYWFREMPHLAVATLWSLDNLKISPARLAVAAHL

SEQ ID NO: 228821 - protein, 158 aa, Zea mays
  Clone ID: MRT4577_140278C.1.pep
DVFTSLLASTPPYGLSKHSERPLRVCALVRASSGGMLTRRHGGFRLGRKLLSVWRWALCRRRRRRVRGRGYLRLQPCQRGGGTTKSPSPSPMESHAVASIKMMQHQKQKHDDSAGSPRMLTRGRTLARRLRLLRRHGGGGGKDRNDGGRHLKCHHVQG

SEQ ID NO: 228822 - protein, 70 aa, Zea mays
  unsure (1)..(70): unsure at all Xaa locations
  Clone ID: MRT4577_140279C.1.pep
KAYDGVDIIKGNVKPMGKLQKAHRSSPTTSXSCLGVRVPVPMTWVKIRCYDALVERIEVHNSSGLPCSFI

SEQ ID NO: 228823 - protein, 62 aa, Zea mays
  Clone ID: MRT4577_14027C.1.pep
CSSTNHKKHVHSIMCIAKKSHVHSGATQGLWYSVLLPICSPEETELLACEKEVTPMSEVTLC

SEQ ID NO: 228824 - protein, 108 aa, Zea mays
  Clone ID: MRT4577_140280C.1.pep
FEKITQTQASHTLDDGLILLKPEGSYVKGVMRRGSCESRPSDLVSRAQIQTLFIIEPVYKRPPDRDLKVTSCPCPDATGALRCTYHSSIQRNFMLPLILATHLEIDGH

SEQ ID NO: 228825 - protein, 64 aa, Zea mays
  Clone ID: MRT4577_140281C.1.pep
SLRAKREKLEGCYILRLGGKINVSYKLLILHKAETNTYYGMEMVSFYSRRILLPQYRNSMRNES

SEQ ID NO: 228826 - protein, 94 aa, Zea mays
  Clone ID: MRT4577_140282C.1.pep
FSSLYRWKDAFPRVKNKTLVFFFPNKPFLKKTKKILFPSGNLKRIFYSRILFLERIFTLFFTNIRDPIPAFGAFKSIVESPVPCKKYVVWLKIY

SEQ ID NO: 228827 - protein, 77 aa, Zea mays
  Clone ID: MRT4577_140283C.1.pep
HPWVGACVVYLDSSVCMLLFALLLCFGNLSCSVYTPWLGGSLTSSIWQYNVFPSAIVIAQCSRCYPCNPSLVEPSYK

SEQ ID NO: 228828 - protein, 192 aa, Zea mays
  Clone ID: MRT4577_140284C.1.pep
NCLSPPPYCRETRRSACAYSRQPPSAACPCGIRRALRSSGPRPRPPASSERRALPRLTTAPCRRPRASVGHCGDVLLQPGSLSLRSSGPRSRPPTSSKRRALPRPMTAPRWCPVHLLGTAAMCSSGPALRPYVLPTASSASSERRALPRSTTAPRWRPRASIVHCSDVVLWFRRHPLNPLGGGRRTHGFRLL

SEQ ID NO: 228829 - protein, 70 aa, Zea mays
  Clone ID: MRT4577_140285C.1.pep
KTDKSDFFGHLLYINTSHTTAPFLGPLDPHVVPTRGKDPRVSYEGHSCVCTPSPFPTRCNLTLVSIFSVL

SEQ ID NO: 228830 - protein, 208 aa, Zea mays
  Clone ID: MRT4577_140286C.1.pep
PRGRPGSNPSNFDRTARALLPVAARRGAPRVHTVASHPAPCVLAASVGLCVLAFFWPPPASSCILRAAGAAQVDDHPCRRPRVSVGHCGDVLLQPGSLSLRSSSPRSRPPTSSERRALPRSTTAPRRCPVHLSGTAAMCSSGPALRPYVLPTASSASSERRALPMSTTAPHWRPRASIVHCGDVVLWIRRHPLNPLGGGRRTHRFRLL

SEQ ID NO: 228831 - protein, 438 aa, Zea mays
  Clone ID: MRT4577_140287C.1.pep
MAEKENILMQRYEMGKLLGKGSFAKVYHARNVKTSESVAIKVIDKDKIKKCGLMDQIIQEISVMKLVKHPNIVQLYEVMATKTKIYFVIEYVKGGELFKKVQRGRLKEDVARAYFQQLISAVDFCHTRQVYHRDLKPENLLLDGSRNLKISDFGLSALPNCKRKDGLLHTICGTPAYVAPEVISQKGYDGAKADIWACGVILYVLLAGYLPFQDKNMMDMYKKICKAELKWPSWFSSDVRKLLRRILHPNPNRRISIEEIRTHPWFRIGLDARLFDSTTRDHVPSDMDLALNSLNSNMVECNSAAEKLTILNAFDIISLSNGFDLSGIFENSNKESKFMSTNTAMTIITKLMEVAKSLDLKVITKTGGLLNMEAAKSGIKGVMSINAEIFQITPNYHLVEIKKINGDILEYHNFMNQSMRPALEDIVWAWHGEQPDEK

SEQ ID NO: 228832 - protein, 86 aa, Zea mays
  unsure (1)..(86): unsure at all Xaa locations
  Clone ID: MRT4577_140288C.1.pep
MAEKENILMQRYEMGKLLGKGSFAKVYHARNVKTSESVAIKVIDKDKIKKWGLMDQIIQEISVMKLVKHPNIVQLYEVMAXKTKIY

SEQ ID NO: 228833 - protein, 73 aa, Zea mays
  Clone ID: MRT4577_140289C.1.pep
EYTQKGAGNGQLGPDRKTHSAQIERREVNQVARVRVGVMGLAGHKAPSHGVGAPVEVLFAGEELASWGWGRPP

SEQ ID NO: 228834 - protein, 103 aa, Zea mays
  Clone ID: MRT4577_14028C.1.pep
ALLSNINHPAHESAMSLIAVPVVRAGEVLPSTEVVVVWPGETAWNASRVVQCHMAPELHEAGKLQAVVVTSVRSAQSPAIIAGTIYPYFLLLAGPKQYLTTKL

SEQ ID NO: 228835 - protein, 152 aa, Zea mays
  Clone ID: MRT4577_140290C.1.pep
MDLALNSLNSNMVECNSAAEKLTILNAFDIISLSNGFDLSGIFENSNKVSKFTSTNTAMTIITKLMEVAKSLDLKVITKTGGLLNMEAAESGIKGVMSINAEIFQITPNYHLVEIKKINGDILEYHNFMNQSMRPALEDIVWAWHGEQPDEK

SEQ ID NO: 228836 - protein, 38 aa, Zea mays
  Clone ID: MRT4577_140291C.1.pep
NCTYSANDRHSLDYVNQHTDRGENGSHVHKSFTPSNSQ

SEQ ID NO: 228837 - protein, 101 aa, Zea mays
  Clone ID: MRT4577_140292C.1.pep
RLPPQSAAEAPPRASPWSCALHARVAPPRRRSSPSHGGSLYRSPSSCSDVVQLGAPTAPLRRTAHLPACRVSLYFPRVFFFLLRFSDALAPCTRWSTTSSI

SEQ ID NO: 228838 - protein, 296 aa, Zea mays
  Clone ID: MRT4577_140293C.1.pep
MQSPEPSSSSPVLLNIGGKKYATTVETLMQREPDSMLAAMFSGRHTLHDHPTTGKGVVFVDRDGKHFRHVLNWLRDGAIPVLSESDYQQLLREGLVDYINERLGWKETDNSEAELTRKDVIKCIQTQRVRFRGVNLSGLDLSKLDLSEVDFSYACIKNTDFSYANLYKAKFGQVEASSSSFQNAILRECEFIGANLEESILDGANLRSANLQDACLTRCSLILTDLHSAHLQTANLTQADLRGANLEAANLKGAKLSGTNLQGANLQRAYLREVDLRDTQLTGAKLGGANLLGAIR

SEQ ID NO: 228839 - protein, 64 aa, Zea mays
  Clone ID: MRT4577_140294C.1.pep
PPPPPPPVIGLPRSELARSDRVFPLPPIIRFPRVLSGRCSCCAPRICACQCCLHPPQKKKKKSG

SEQ ID NO: 228840 - protein, 255 aa, Zea mays
  unsure (1)..(255): unsure at all Xaa locations
  Clone ID: MRT4577_140295C.1.pep
MQSPEPSSSSPVLLNIGGKKYATTVETLMQREPDSMLAAMFSGRHTLHDHPTTGKGVVFVDRDGKHFRHVLNWLRDGAIPVLSESDYQQLLREAEYYQLLGLVDYINERLGWKETDNSEAELTRKDVIKCIQTQRVRFRGVNLSGLDLSKLDLSEVDFSYACIKNTDFSYANLYKAKFGQVEASSSSFQNAILRECEFIGANLEESILDGANLRSXNLQDACLTRCSLILTDLHSAHLQTANLTXSRLKRANLEA

SEQ ID NO: 228841 - protein, 105 aa, Zea mays
  unsure (1)..(105): unsure at all Xaa locations
  Clone ID: MRT4577_140296C.1.pep
QGGLGAAPGKDRHSPGGGRGGGRGGKGGGGKKRGGKGXETGKKAGGRGEGGKKGGTAGGTKEKGRKKLPKGRQKNAKRKKMKAKKGTGEGSHRKAPGAPQGGAET

SEQ ID NO: 228842 - protein, 97 aa, Zea mays
  Clone ID: MRT4577_140297C.1.pep
SRTQIFLLFKNKSVPRMILSRTILSSTNFIGKDGVYVLFFVRRPLIGSLESSMLAVRAETITASTFAGPRLHGQMTVLCYSKKKKKKKKKAPSRGPS

SEQ ID NO: 228843 - protein, 110 aa, Zea mays
  Clone ID: MRT4577_140298C.1.pep
HVAQAQHGRVREGYAAALGHQDAVDVAARLELALAAIDHLVDPGLVAVHGDHRPLVRQGAVPPDLLQDDRLASDGHMMLVRGQLRGGLLVRRHCPAVNLSGEVCRVHFNT

SEQ ID NO: 228844 - protein, 70 aa, Zea mays
  Clone ID: MRT4577_140299C.1.pep
EDSDSSMRVIPQHCAQCMARWMAHMVRLAIESLRRIVVPPGDLLPMFMVKLPARALGALLALHATRCWKT

SEQ ID NO: 228845 - protein, 204 aa, Zea mays; identical to SEQ ID NO: 228790
  Clone ID: MRT4577_14029C.1.pep

SEQ ID NO: 228846 - protein, 129 aa, Zea mays
  unsure (1)..(129): unsure at all Xaa locations
  Clone ID: MRT4577_1402C.1.pep
GMLVQKRGGGGGGDDEPSPSVKPVPTIRVKAKHAGVTHEIYISSEASFGXQPSALSLSLARADGCCCAGELKKLVAAKTGLHPDDQKVLYKDRERDSKAFLDTAGVRDRSKVVVLEDPEARARRLIXER

SEQ ID NO: 228847 - protein, 124 aa, Zea mays
  unsure (1)..(124): unsure at all Xaa locations
  Clone ID: MRT4577_140300C.1.pep
NVNGVRRIPVPPAGDTALAKVDAVGGAAAYAGMNSLYNGKSGHRAIFLNRIQRIXDKGYPXGTQLMIPWIEPPIIYDARARPNLVERTTASPHRHMSKIVLRALTRXMPERLPNSVRNSEIEIQ

SEQ ID NO: 228848 - protein, 112 aa, Zea mays
  unsure (1)..(112): unsure at all Xaa locations
  Clone ID: MRT4577_140301C.1.pep
QCPVKIYQTFPNLDFXLTFSQCLMFLSQLKSVASILDKLIYGSKDDALLAYQTAFDLAENENXAFLLNVRNHLGALSSHTSAHVYPLCRLVVQSNQTNAASYRCYIADTCLA

SEQ ID NO: 228849 - protein, 56 aa, Zea mays
  Clone ID: MRT4577_140302C.1.pep
GGKLPRPQSTDPEFRAPPTRSFETNQQHYRGAVSSNSKETLQTKIYSFLKLSAIIA

SEQ ID NO: 228850 - protein, 74 aa, Zea mays
  Clone ID: MRT4577_140303C.1.pep
LCMPPGLSAALLYGSKARHSRAQGGVPTCTGPQFNTRGVVTKVTTKKTEDKPFGEPPDTPLFPSKEATGPPPPP

SEQ ID NO: 228851 - protein, 405 aa, Zea mays
  Clone ID: MRT4577_140304C.1.pep
MLIICFFFLQSKRRPKLFWISAAAPLTSVVLGSVLVYLTHAENHGIEVIGYLKKGLNPPSVTSLQFSPPYMMLALKTGIITGVIALAEGIAVGRSFAMFKNYHIDGNKEMIAIGTMNVLGSLTSCYLTTGPFSRSAVNYNAGCRTAMSNVVMSLAVMVTLLFLTPLFHYTPLVVLSAIIVSAMLGLVDFGAALHLWRVDKVDFCVCAGAYLGVVFGSVEVGLVVAVAVSLLRVLRFGARPRTTVLGNIPGTMVYRRMDQYAAAQTVPGVLVLRVDAPVYFANASYLRERISRWIDDEEERTKSQGEMGVRYVVLDMGAIGSIDTSGTSMLDELNKSLDRRGMQIVLANPGSEIMKKLDSSKVLEQIGHEWVFPTVGEAVASCDYVLHSHKPGMAKDSAAAHESMV

SEQ ID NO: 228852 - protein, 76 aa, Zea mays
  Clone ID: MRT4577_140305C.1.pep
LSLLVVVLAVVAVVANVSHTKPLTPDGRMVHYIHSNFMDGPWDPSHTIFYCGRDRSCTTDCSYGYHGTHAHGYELH

SEQ ID NO: 228853 - protein, 37 aa, Zea mays
  Clone ID: MRT4577_140306C.1.pep
PISSGQGIGLIPATYRPVRNRVYGLYHKPQLEGPEAT

SEQ ID NO: 228854 - protein, 81 aa, Zea mays
  unsure (1)..(81): unsure at all Xaa locations
  Clone ID: MRT4577_140307C.1.pep
XYSPDASTXFSXXTHITXDVXXGXIXRYXXANGASICXICLFXHCGRGLYXGSCLYSETXXIGIILLXATIAXAFXGDVLP

SEQ ID NO: 228855 - protein, 84 aa, Zea mays
  Clone ID: MRT4577_140308C.1.pep
GGGATSGAPGGSGCGTPPKTGGNCGWGPRPPTLLLGTERLAPPPQVILFSPGDVFPPPEGLFSNASCLLFPICVFPWKVPPRPF

SEQ ID NO: 228856 - protein, 125 aa, Zea mays
  Clone ID: MRT4577_140309C.1.pep
FPWAASGFGPGVSPFGLRGCRGPLTPFKFVRFFGLLCARGGGGPGGVCGALWAGGGSPFREPWFCGCFPCLAWFVPLFPLGVSVGFLVFGPFVLVFRALCPLMVPPGFVFCPLGLCCFCIWAFSS

SEQ ID NO: 228857 - protein, 116 aa, Zea mays
  Clone ID: MRT4577_14030C.1.pep
KCLSLRLSPVHSLSLALPRQLSPPLSPLLLQCTGCSRLQPQAIAHVDQSETATHCRPSLSPAKTPSSTRRPALACLSPGGSSSARRVALARLQPRSRLLLGAIALTIACIGTSLSL

SEQ ID NO: 228858 - protein, 88 aa, Zea mays
  unsure (1)..(88): unsure at all Xaa locations
  Clone ID: MRT4577_140310C.1.pep
AEDKFGTLVLGLAPDKLAVFSGXYAELESVLSGLNVLAATYFAVVPAASYRTLSXLSGATVYGXDLVRGSALLALVPSAVSPAACPPL

SEQ ID NO: 228859 - protein, 85 aa, Zea mays
  Clone ID: MRT4577_140311C.1.pep
IKWSWGDPNPQGYGPFAFDFLHPPSNQAKIGCKGAPLFPHGFKKIGCFFGPLSATLWSFGHGGKMKNFNHPHKRPSKAPPVAFPF

SEQ ID NO: 228860 - protein, 95 aa, Zea mays
  unsure (1)..(95): unsure at all Xaa locations
  Clone ID: MRT4577_140312C.1.pep
GGRNSGGHIXXILLTDXDTSTHGXGCVSNRAADHPPPPMDYNQLRPKKKPACQGLXHGAKWKIRHIYRGQPRKHLLTTGWSSFVKKKKLLTRDAV

SEQ ID NO: 228861 - protein, 70 aa, Zea mays
  Clone ID: MRT4577_140313C.1.pep
QKRNVISRSLASLNSVKHQRRFRTIIYTPHIHPHIHPHIHPHIHPHIHPHIHPHIHPHIHRHINQPKVPS

SEQ ID NO: 228862 - protein, 60 aa, Zea mays
  unsure (1)..(60): unsure at all Xaa locations
  Clone ID: MRT4577_140314C.1.pep
QAPWGGNKGSGFGRKFEKGGINNSLRANQVPGYIFDDPGGWYQSPXQVVNGHKNLFVPLK

SEQ ID NO: 228863 - protein, 74 aa, Zea mays
  Clone ID: MRT4577_140315C.1.pep
SIASKNTLRIAMNTSTCIKKHASKYKIISLTTLGCCVLQGFGPMRLLISSLFVLHHYLLFIQNYSYCIVNLIIY

SEQ ID NO: 228864 - protein, 69 aa, Zea mays
  Clone ID: MRT4577_140316C.1.pep
AYPSEVVWFYGHLPSSKRALFQHLGYRSEGAGHSRAEILADHARNTRRSHHPVDNSHRAWFQGPNGAMY

SEQ ID NO: 228865 - protein, 113 aa, Zea mays
  Clone ID: MRT4577_140317C.1.pep
HVVSRTRAWSVSLDRVYVAQSRLMWMQYSVGAVLGGPDRRRGPSNDVLRGADVQVEERPDQQRDSADLGVGQVSSSAGCWGGLCSCRTADISWCSSTGLIRCRWWCVCLMHSL

SEQ ID NO: 228866 - protein, 76 aa, Zea mays
  Clone ID: MRT4577_140318C.1.pep
QDYLVDLVVVTENGAMRNRFDGLPLQELDGEQAHVLLLPLHLCSPAPRYCHWIHALSPACAVGLSKVLAAAVCVAT

SEQ ID NO: 228867 - protein, 124 aa, Zea mays
  unsure (1)..(124): unsure at all Xaa locations
  Clone ID: MRT4577_140319C.1.pep
VSYYILITTXRGSPLSILARLKLAFSLSLSFPGSAKLSLCRTAGLFFRIRRTNSKAINSLPTTFSLLQASHTTSSPSSHPFPNSYLHPPPNLLYHPNRSPYANGIPLRPYRSTSAVALVLLCSP

SEQ ID NO: 228868 - protein, 92 aa, Zea mays
  Clone ID: MRT4577_14031C.1.pep
TDPILPHINQRKAPSETAQHSPSYPLQPLNPCSSFWTRYHYYHTTQVTPDNPASFTPQQLAPPYHQQGPTHPTLLLPLQQLASFQHAFTDPP

SEQ ID NO: 228869 - protein, 150 aa, Zea mays
  Clone ID: MRT4577_140320C.1.pep
MSPLPRRRLGALALLAAAVGARGSAGSLRGGGNNRLPKNGLRKGFIRDSATSNSFNKATGAFKIHLARTCYVHFGSHLVNYERTITGKFSRGAISDLSGVKAKKFFLGVYVRGRAAHPDQGTIEFQAGFVSKSLSPSMFNKGRTCGSRVG

SEQ ID NO: 228870 - protein, 182 aa, Zea mays
  unsure (1)..(182): unsure at all Xaa locations
  Clone ID: MRT4577_140321C.1.pep
SPLCQPDVYTYSTIIKACVDAARFDLTDTMYKDMAERSISPNTVTQNIVLSGYGKAVRLDDMERVLSDMLDSVSCKPDVWTMNIILSLFGNRGEVELMERWYEKFRGYGVEPETRTLNILIGAYGKRRMYDKMSAVMEHMRKLAFPWTTATYNNVIEAXXXXXXXXXMEHAFNQTSPPTQGG

SEQ ID NO: 228871 - protein, 76 aa, Zea mays
  Clone ID: MRT4577_140322C.1.pep
CRGGEANLAMLPGINLFFKKNLIGSCNFSGQNQICLLKTPQPVFFFELKNNCFPLGFEKKILQLRLNFPPKPFSCN

SEQ ID NO: 228872 - protein, 382 aa, Zea mays
  unsure (1)..(382): unsure at all Xaa locations
  Clone ID: MRT4577_140323C.1.pep
MLLLTLIANRWRQVFEMLKEQPFYHPXEGTYMKLIVLLGRSGQPTRAHQLFDEMLQQGCQPTPELYTALIGAYCRSCLLDEALQLLNDMKSSPLCQPATRTSSTTIKACVDAARFDLTDTMYKDMAERSISPNTVTQNIVLSGYGKAGRLDDMERVLSDMLDSVSCKPDVWTMNIILSLFGNRGEVELMERWYEKFRGYGVEPETRTLNILIGAYGKRRMYDKMSAVMEHMRKLAFPWTTATYNNVIEAFAEAGDAGNMEHAFNQMRSEGMRPDTKTFCCLIDGFSRAGQFHKVVGMVKLAERLDVPVNTPFHNAVLGACARADDLVEMERVFRRMKHTQCEPDASTYSILVEAYRKEGMTDKIYALHQENPALVPADFVMV

SEQ ID NO: 228873 - protein, 246 aa, Zea mays
  Clone ID: MRT4577_140324C.1.pep
RRVKQLYNKFNIISGTSMACPHASGVAALLKAVHPEWSPAMLRSAMMTTASALDNTGASIKDMGNRNHPASPLAMGSGHIDPARAVDPGLVYDAAPEDYVKLMCAMNYTAAQIRTVVAQSPSSSSYAVDCTGASLDLNYPSFIAFFDPNGGSVERTFTRTVTNVGDGPASYSVKVLGLSGLTVIVSPDKLAFGGKNEKQKYTLVIRGKMTNKSGDVLHGSLTWVDDAGKYTVRSPIVATTVSSDRF

SEQ ID NO: 228874 - protein, 42 aa, Zea mays
  Clone ID: MRT4577_140325C.1.pep
KPGVKGERGNETLLWVCARCLAPFNYGCSDIEPAIQFKGGYG

SEQ ID NO: 228875 - protein, 54 aa, Zea mays
  Clone ID: MRT4577_140326C.1.pep
GPTFLRQPVLQQNGPTLNQVGLANPAGYLQQMRPFHQMTGSKLAGYLRQRPPVI

SEQ ID NO: 228876 - protein, 61 aa, Zea mays
  Clone ID: MRT4577_140327C.1.pep
LTRICEIGNDFPIQTICRAYSRCYTKFTHTTIQSLDIFSWGFFCPRDHNLEASRRDRHRDG

SEQ ID NO: 228877 - protein, 756 aa, Zea mays
  Clone ID: MRT4577_140328C.1.pep
MWRLKIGERPSNPLLRSPNGFLGREVWEFDPAAGTPEERAEVDRLRQEYTRNRFTRRQCSDLLMRMQYAKQNLHNTNLPAIKIDQDSDVTEETILITLRRALNQYSSLQGPAGHWPGDYGGISFILPLMIFALHVTRSMDEVLSIEHIREICRYIYNMQNEDGGWGTHTLGPSSMFGTCVNYATLRILGEVLDGENDALSKGRSWILSHGSATAAPQWAKIYLSMIGVYDWAGNNAIIPELWMLPHFLPIHPGRFWCFCRMVYMPMAYIYGKKFVGPITTTILEIRDELYIWPIVKINWNKACNSCAKEDLIYEPSWLQSIAMAYLNKFIEPLSNLWPMNKLRERAMSDLMEHIHYEDETSNYVGLCPINKALNMICCWIEKPNSNEFRQHLPRIHDFLWLGEDGMKSKVYVGCHSWETALIVQAFCSTGLTEEFCSTLQKAHQFLKNAQVIENIPDYKSYYRERTKGSWTLSNGENFWPIADTTAEALKAILLLSNIPSELVGDPIKQERLYDAVDCLLSFVNKDGTLSSAECKRTTSWVEFINPSESFRNIIVDYPYPECTSSLIQALVLFRGKHPIYRRDEIDKIIKSGASFIEKVQRKDGSWYGSWAVCFTYATFFAIKGLVAAGRTYRNSLAIRKACNFLLSKQLGTGGWGENYLGCQIEEYVDSGSPHGVNTAQAMLALLYAGQVEQDPAPLYRAAKELINMQMENGEFPQQEIVGNFNSSLFFNYPNYRNLFPIWALGEFRRRLVAKKG

SEQ ID NO: 228878 - protein, 54 aa, Zea mays
  Clone ID: MRT4577_140329C.1.pep
QLVTLGPRLEDPAVSSAIVGFLIKSCVSHRGRPSSCMCSKAKQIQLYYPSPLIM

SEQ ID NO: 228879 - protein, 53 aa, Zea mays
  Clone ID: MRT4577_14032C.1.pep
PLQQKHRHTKLYFKPSTNTHTSIPNSNRKSHHSLITHILHKPLRTFFIKTHIS

SEQ ID NO: 228880 - protein, 222 aa, Zea mays
  Clone ID: MRT4577_140330C.1.pep
KYLPGLGRWQSGTSDSSKSRRRVVSFNLAKASSPSSMPPLDQIALLETILSLLPEKRGRSFCKFLLGLLRVAFILGVDGNCVKKLEKRIGMQLELATLDNLLILNYSDSETLYNVDCVERIVRHFVSSLSSSSSQLPEFSPPSLDPVTSPSPAPLKKVAKLVDSYMAEVASDVNLKPDKMRSLAAALPESSRPLYDGLYRAFDIYFKEHPWLSDRDKEQLCN

SEQ ID NO: 228881 - protein, 40 aa, Zea mays
  Clone ID: MRT4577_140331C.1.pep
FDFILSVYELVFTICKSVVVPINNNSQRGRSSCVASHGCF

SEQ ID NO: 228882 - protein, 67 aa, Zea mays
  Clone ID: MRT4577_140332C.1.pep
MESGGAGELLSGPAGSPVTSKPGGGRGGWRAALFIIVMGFFERIGFVGVSANLITYLTGPLGMSTAA

SEQ ID NO: 228883 - protein, 61 aa, Zea mays
  Clone ID: MRT4577_140333C.1.pep
FLATDNTPQGVCFFIRHPQKTPQLQSCLRSSLPHSAPSHAHYLSIDISLTPLYDIPQLITT

SEQ ID NO: 228884 - protein, 762 aa, Zea mays
  Clone ID: MRT4577_140334C.1.pep
MDKRTRNRREEEDEELMLFLFPALYLITNGGREKRARHASILPGKERLKEILEGHEKNCLVAFRMEPRIFKDIATFLREEHILRDTRGVTVEEKLGMFLFMLSHNASYEDLQHEFKHSGETIHRHIQSVFHVIPTLMYRFVKPATGISVHWKISTDERFFPYFQNCIGAIDGTHVPITISAEKQAPYRNRKGTLSQNVMLVCDFDLNFTFISSGWEGSATDARVLRSALLAGFHVPEGKYYLVDGGYANTPSFLAPYRGVRYHLKEFGHGHQRPRNYKELFNHRHALLRNHIERAIGVLKKRFLILKVGTHHPIRNQVKIAAAAVLFHNIIRMHNGDEARMFGRGSPRMNLIQAATMKKISPRSTTNKRKKRTSPKVGRLRANWNSGLEKGLVEILQDHNNDCYKGQNGWSSEAWNRIVKLFHEKFSYVTFTKCQIQDKEKELKRDYKALKEARQQSGVSWDERLCRIEAEEPIWNNLTTSNERLKKFRTKSFPLFEALGELYDGNIAEGTMNFTSIEPSRPPVTQPCQGAATQPSQAAFTLTQPSQIAFTQPSLAAFARPSRTAFRHPSLAAFPQPSQAAFAQPSQTIFTQPSEATFTQPSEATFTQPSEATFTQPSQAAFTQPSQANISQAICDEDDELRVLDPPAPASVSKRAKNVGTGNSRTRINKRTQDGNVVEMMGRFLEMKEKQAEADERATTNANEDDFPIQTCIAIVDGMEEFSDDEKVDSYDVFKDAQNRAIFMTAKDATRIKWLRKKIART

SEQ ID NO: 228885 - protein, 74 aa, Zea mays
  Clone ID: MRT4577_140335C.1.pep
AIGFLEGGRDPSLSSRASAATASSHRTPLTPHLPIRAVFLQVRCWPYRRRHPRSRRVCVLSPRVFDRFRYMKLK

SEQ ID NO: 228886 - protein, 65 aa, Zea mays
  Clone ID: MRT4577_140336C.1.pep
PKGSRQMVPVWWEILNSDHWLQSSRRKLSRKMRQPRLVKKERQGWLLVAIHLRAFRAVRVCCCSL

SEQ ID NO: 228887 - protein, 167 aa, Zea mays
  Clone ID: MRT4577_140337C.1.pep
PRIFPYELCFSKFAAGHIDVVILDPDECVCYLHGSSTDLDCIVPRIRKMDKRTRNRREEEDEELMLFLFPALYLITNGGREKRARHASILPGKERLKEILEGHEKNCLVAFRMEPRIFKDIATFLREEHILCDTRGVTVEEKLGCVCVCFSFFPPELAKGAMPPVFK

SEQ ID NO: 228888 - protein, 504 aa, Zea mays
  Clone ID: MRT4577_140338C.1.pep
MLGRYTLIPGGQKNPHPRDGRHRRSPRVRAPPLHLPIDLRRPRIFPYELCFSKFAAGHIDVVILDPDECVCHLHGSSTDLARMFGRGSPRMNLIQAATMKKISPRSTTNKRKKRTSPKVGRLRANWNSGLEKGLVEILQDHNNDCYKGQNGWSSEAWNRIVKLFHEKFSYVTFTKCQIQDKEKELKRDYKALKEARQQSGVSWDERLCRIEAEEPIWNNLTTSNERLKKFRTKSFPLFEALGELYDGNIAEGTMNFTSIEPSRPPVTQPCQGAATQPSQAAFTLTQPSQIAFTQPSLAAFARPSRTAFRHPSLAAFPQPSQAAFAQPSQTIFTQPSEATFTQPSEATFTQPSEATFTQPSQAAFTQPSQANISQAICDEDDELRVLDPPAPASVSKRAKNVGTGNSRTRINKRTQDGNVVEMMGRFLEMKEKQAEADERATTNANEDDFPIQTCIAIVDGMEEFSDDEKVDSYDVFKDAQNRAIFMTAKDATRIKWLRKKIART

SEQ ID NO: 228889 - protein, 61 aa, Zea mays
  Clone ID: MRT4577_140339C.1.pep
EGLLWGASKLVPVGYGFKMLQFLLAFVDDLVSVGTLIEDFLCVEPVGEFVQSCVIVAFNKI

SEQ ID NO: 228890 - protein, 116 aa, Zea mays
  Clone ID: MRT4577_14033C.1.pep
YKTPSEIETIRSSSAPKRVLMCNIISLSIVVRYCFVYKYKNTHKSYTHELQIIVFFLSRVLLDNLLPLRVYVPRSGSFFSRSFVSVSQAKLRPFLARRFEPRIASLSFSNTWNMFD

SEQ ID NO: 228891 - protein, 102 aa, Zea mays
  Clone ID: MRT4577_140340C.1.pep
MLNMFVGLCVRTVVQVQHSERGLLVVYGTDGHQLLWKRAMDVPVSHSMPVYGIGENSHTIRAEVCSDFGPDFDPKVFAELCTLASGRVKHLVLSRSSSDGGS

SEQ ID NO: 228892 - protein, 76 aa, Zea mays
  unsure (1)..(76): unsure at all Xaa locations
  Clone ID: MRT4577_140341C.1.pep
GGKNPPRRSPEEPSRKRKQNPEKRCFPPPRFGLAIKEXGQTPTHPNKKPSVEPAVQCTEFLYNSMFISPHSPVMLM

SEQ ID NO: 228893 - protein, 180 aa, Zea mays
  Clone ID: MRT4577_140342C.1.pep
LSCANFGKCKCRRLEGKVAVITAATLGIGYAVAERLGHEGAHVVISSRYLSQVDAAVAELTKQGIAVTGLTCHVGNEPDRQKLFKLVEEKFGGFDILVSNAAVNPFFGNILDTSEDSWQKIFDVNVKSTFLLIKEAIPLLEKKGGGSIVIVSSQGGYEVNPVIAAYSISKTALLGLVKGL

SEQ ID NO: 228894 - protein, 534 aa, Zea mays
  Clone ID: MRT4577_140343C.1.pep
MTEEAKLTEETKLFEEKKVADPYIAGFVESMAKTNTEKITKEIMEGLSEDSDGSDSYDMESGDEDSEDRPWRPSHTIFGKNDYQAKFREKFDEPNDDWLKCIEATSDELLGAYSNAEDNAQSAAFGGWGKKRLNRVFDAIDFIYPDYCFPLRGQRKKRKATASVAIVVSAEPKNKKIKVLTHRSRYIEPAIVPELGEGASSTAEARQAAPIAQSVEEPTVVPKIPTVGTAKAEDDKAEEPQVEKAIKKEGMANVLDAVLETTKALSPAPTKKVVEAAKAQAEAETGQAEAEATKAQAEAKAGPSAPVAAKPAALEEKTTGLIAPEKIETPAPEAPIKIVDYIIRHASGKKLSDEEILEAKHYARKLKYPKGALVFNGTNDDDFLYCLPDNKEISICREIAILEKAGCDHVKTMAQAEAAFSVDDTKDPSAEATLMGGKFYNDVWVNNGREMAHEIIKKSEKDTHDAQAKARQVEEAAEREKRIAELSPPPEPYDPLADPEMKESLDIISMAESIVDEVVNKLLNKVAEKVLKEE

SEQ ID NO: 228895 - protein, 258 aa, Zea mays
  Clone ID: MRT4577_140344C.1.pep
MHSYRAMHPYTHHSYQHHTAAVAPTKHGHGHGHGHGHGDEEDDQSMLLLSLWPPGHHHGNAAASSACSSPPICASATTTSMAAAASSPASYPWLTHQSLYNNAGCGGGSSSSSHSSFLFQEHQQEPGVSISLSIAPPCSNNAASSCGGGGFAAPPAAPSTVTTTVTPGGGQVPRQYWIPSAAEILVGSTQFSCAVCNKTFNRFNNMQMHMWGHGSQYRKGSESLRGAITVGTAPPASLMRLPCYCCAEGCRNNIEHPR

SEQ ID NO: 228896 - protein, 63 aa, Zea mays
  Clone ID: MRT4577_140345C.1.pep
LTASARDSRRNQQWRWVASYYNLHGETCIHGYIHTLLLKTTMPGPIYIFTEELGVPCIGIWTP

SEQ ID NO: 228897 - protein, 124 aa, Zea mays
  Clone ID: MRT4577_140346C.1.pep
WLPQFPWVQPKIWFPLLAFGEFLHWVKAEFFPRVVRLFYFPSSPVSAFVIHRFIFLRRHPVRFANAFPDTCNIIFIKKNFCPRNSFFLGVSLEGPRPVVFTLERAIPEGHYFFISGLIQTPGPP

SEQ ID NO: 228898 - protein, 104 aa, Zea mays
  Clone ID: MRT4577_140347C.1.pep
PIFIRRIFISEYPTYISHHTLISTTTAITIEPAHTRGNQSSPLPTYLYTTTTSNRHHGSRRSYPGQGPLQGLQRRLHRLPRQRGRLPKVARRQVGAAGPGRVVI

SEQ ID NO: 228899 - protein, 478 aa, Zea mays
  unsure (1)..(478): unsure at all Xaa locations
  Clone ID: MRT4577_140348C.1.pep
PPKRTAYEVMSEVHSNIALGKAIGVGFDKPLRVDGSLSYLKKVLHMYPDCSLVRNQLGSLLLWSGDWMASHKAIRVTSLSHGHTSSMGLRSPHHIQACAMVSCYATCCTYTKFSFATCEHQYLSGPDAIHHLQRWVHCEPWNQDARYLLVLAIFQKAHEEKYPKHTCVILKKLIMQVLSNISNPHEKEAMQYQVFLLLLLSSEVCLQSLDYENCITEAKEALKLTPSSRVDTFFANLQLCRAYVVHGDLLNSRNEYMKCLRNHTNTEIGWVMLKQLESACSLEGFSDEIDIKLHECVKRNGSDSSKWTSLFNLACAQCFLWGGNFESAEKALAQACSQVDPDSCILFLNGSMLFEIKAHISCQGFINSFAVYGMKQNRELGCFFPSIKILXNLVAIGSTNFLPVLLDFDKHSLYWFXMLLTIRYANSKLRKAKKKKKKKKKKKKKKKIQSPELWLLRAIHLNPSCHRYWKALLQQIYV

SEQ ID NO: 228900 - protein, 72 aa, Zea mays
  Clone ID: MRT4577_140349C.1.pep
DAGGPSALLGARWQLHGPGERQCGCLWVCPGSGSSADGGHGLVPPGDPPDGARCGQEPVRISSFPLGNGAFK

SEQ ID NO: 228901 - protein, 93 aa, Zea mays
  Clone ID: MRT4577_14034C.1.pep
SSTGQARGPNICLAGIFPGNQRFIGSVNSGCIRLTRVGPSLQIGKLFWASQLGPSLTIGLSPVKMVNAGHLCTPFFRLEQNPRRFVPPSIDFL

SEQ ID NO: 228902 - protein, 67 aa, Zea mays
  Clone ID: MRT4577_140350C.1.pep
LPPGKKCLWKKKSTILHIPTWHSLFFSRRAGPNITHSITKDKINGGDPRRTRTTIPKPHFIYRDYFL

SEQ ID NO: 228903 - protein, 183 aa, Zea mays
  unsure (1)..(183): unsure at all Xaa locations
  Clone ID: MRT4577_140351C.1.pep
MAGLGASSTGALGAKQRLALAXASPRPDATLVGTRAAAEDFIETLACSEKTLSAAXALYRGLLSSXRSAPPPEAVDTAKIEPCXQSKASDKRENNSTKKISAWLKKXWSDNDPILDTEDMIKKTNSXLELQIVLXLLCGANGLPHLSICGEQPHWIXYKSPGLLVLYIEHPDTLRTLRATSST

SEQ ID NO: 228904 - protein, 100 aa, Zea mays
  Clone ID: MRT4577_140352C.1.pep
VGEVLLQFVPIGTILTPVLNEHVTPVSCYCSLALLLRAAYMLMLVFESLNPPVKMLVSVWKALCAFVVFITLGNSALPRLTWTCLNKLVTVFSPYDILKI

SEQ ID NO: 228905 - protein, 364 aa, Zea mays
  unsure (1)..(364): unsure at all Xaa locations
  Clone ID: MRT4577_140353C.1.pep
LEARVFLGDARAFPGHQEVLAFLDAFAEECGVAARVRLRSEVLRVAGAPLGQRERWAVSWRREDGEVAEEVFDAVVVCNGHCTVPRVPGIRGIDNWSGKQIHSHNYRTPEPFRDQNVVVVGFSTSGIDIASEISRLAKEVHVADRYSKDRLGKMALYQNVWIHAEVDCIQDDGKVRFAEGSVVDADVILYCTGXVELKLVFSVLHLPSLSSLAFRIYIYDDDMIVKSNAXTEFSRXYRYHFPFLDLDGLTVDDNRVGPLYKHVFPPMYAPNLSFVGLPVKTSGAGAGSQNCCESKTLCVPSQTIVFQELEQEAKWVAAVLSGRATLPSEEDMMASVRSHYQLMEEAGRPKRHTHALAAQWVSQR

SEQ ID NO: 228906 - protein, 71 aa, Zea mays
  Clone ID: MRT4577_140354C.1.pep
VCYAWWVLFPLEGMMRPIGFFPHGIHSFDNSGHIFIFLAEGPCPKLLCEYPARPFLFSPQANMPGVAFWGN

SEQ ID NO: 228907 - protein, 261 aa, Zea mays
  Clone ID: MRT4577_140355C.1.pep
MRNLRPRPHHTPLPSLHLLPPTPVLLERRESLARVRRTLFHVSRRPPSPPSAASTLATPRGRSSRAATALTPCVDLGPSFGANNRRRSGATFPAPPLLSRMLSPTTRPAARTDERSGTSPEKPLLRRWVLRAPSRGSTWLGLQSPSAMRSRTPSPTTLCTGSGTMSAGGEAEMKELPEELACLACETSAQVVAAGPAASAPLMCRMKKGEPIKLVFTGKKKGITPVASFSALDKEGEDPTPSAAAEPKPSNDPAEDDISTL

SEQ ID NO: 228908 - protein, 79 aa, Zea mays
  Clone ID: MRT4577_140356C.1.pep
KWGPNGSFPFTNPTIKWLNSLFLGPNTLLSPKRINGIFRTRPNAFFYGDLLPTGGGGILMVKSLEILSMRQEFLPFFIH

SEQ ID NO: 228909 - protein, 59 aa, Zea mays
  Clone ID: MRT4577_140357C.1.pep
YGERKKGEPIKLVFTGKKKGITPVASFSALDKEGEDPTPSAAAEPKPSNDPAEDDISTL

SEQ ID NO: 228910 - protein, 137 aa, Zea mays
  unsure (1)..(137): unsure at all Xaa locations
  Clone ID: MRT4577_140358C.1.pep
PPRAAKILALLALLALXAGVATATIIPQCXQQYLFPVTAARLESPTIQSYRLQEAITASILRSLALTVQQPYALLQQPCLVNLYLQRIATQQLQQQLLTTINQVVAANLAAYLQQQQFLPFNQLSGVNLAVYLQAQQ

SEQ ID NO: 228911 - protein, 127 aa, Zea mays
  Clone ID: MRT4577_140359C.1.pep
MAQKDAEDESTRIAFENLRSEVISLRNEALEKDKILLSLVERLKSSDARLASLSEVEQKMEKFEKKKEADAKRIADLEYALSIQARLQRFEVEGLEKKLDEITENFNVEQTEREISESKRLRVSRNG

SEQ ID NO: 228912 - protein, 120 aa, Zea mays
  Clone ID: MRT4577_14035C.1.pep
KPTSKVRNVCNEASLSNRYRHSFAESRPFCCKFVSDQLQVNTRFLLFGACASIFVLVFHDYVCNVAFIIVGTVLIMSYVANLVAFIDCLLVAWLAKWCKHFSVLEGPPPPQFGSNKKKKG

SEQ ID NO: 228913 - protein, 165 aa, Zea mays
  Clone ID: MRT4577_140360C.1.pep
KISLSPFFSHRLIYARTIAFHAHLNRVPSDEHDALPPPHILPIHQHWISSQSRKYPTTEPKLNSASPCILRIHNANASVRHPRSRLPPQSSVSSCRASSSPTSPSTVPLQCLSFDRSSCSLYPMTAAPLAHRLLGRHLLDLSSQGLFELLVPTHRFQLGLMNVVL

SEQ ID NO: 228914 - protein, 86 aa, Zea mays
  Clone ID: MRT4577_140361C.1.pep
MWCASCLASACAGCTCNLCTSAASAVSRRSARLAYCGLFAGYLILYFLLRQLGEITVWEEQWGDEGTHAPIAYELFGGVRCDCEYE

SEQ ID NO: 228915 - protein, 32 aa, Zea mays
  Clone ID: MRT4577_140362C.1.pep
FKSLHEKIDYRPVMHCHIIMVSFLAREETIII

SEQ ID NO: 228916 - protein, 415 aa, Zea mays
  Clone ID: MRT4577_140363C.1.pep
MWCASCLASACAGCTCNLCTSAASAVSRRSARLAYCGLFAASLILSFLLRQFAAPLLKHIPWINAFDQTPPEEWFQMNAVLRVSLGNFLFFAIFSLVMIGVKDQNDRRDAWHHGGWIAKIAVWAVLIVLMFCVPNIVITIYEVLSKFGSGFFLLVQVVMLLDFTNNWNDSWVEKEERKWEIALLVVTVVCYLSTLAFSGVLFMWFNPSGHDCGLNVFFIVMTLILAFAFAIVALHPQVHGSVMPASVISVYCAYLCYTSLSSEPDDYECNGLHRHSKQVSMSALILGMLTTVLSVVYSAVRAGSSTTFLSPPSSPRSGAKNPLLGDEEDGKGDGKESEPRPVSYSYTFFHLIFALASMYSAMLLTGWTSAASESSELMDVGWTTVWVRICTEWVTAGLYIWTLIAPLLFPDRDFS

SEQ ID NO: 228917 - protein, 175 aa, Zea mays
  Clone ID: MRT4577_140364C.1.pep
MGIDLKAGGRIPNRNIKPTRTVNPYHKLLIRLYKFLARRTDSPFNKAVLKRLHQSRTNRYPISVSRIAKNLKGREDKIAVCVTSVTNDVRLLELPKLTVCALRFTEKARERIVAAGGQALTFDQLALKAPTGKNTVLLRGAKRREALRHFGPAPGAKGSHTAPYVRGKGKKQERV

SEQ ID NO: 228918 - protein, 75 aa, Zea mays
  Clone ID: MRT4577_140365C.1.pep
CPLSSTCAGFSSLSVPSPLSLVCLIGPFFSVCYFCAALLCFFFPFFFFFFFARPFFFFYPLFNNQLRLLIVCYYI

SEQ ID NO: 228919 - protein, 88 aa, Zea mays
  Clone ID: MRT4577_140366C.1.pep
GTLQVSHISIYSQGQWWKECPVYTVTINLLKPVCVCDPGMSLSFDEEKVYTTTKRHQPQAHLSHWSKTSSPLRSQNHCLHNCIWLFLH

SEQ ID NO: 228920 - protein, 61 aa, Zea mays
  Clone ID: MRT4577_140367C.1.pep
IELNDSLLQPLWQGSSFSENNFDSRSLASLKEPELFYNSFEKTVFLMFISNDVLGKRRRSR

SEQ ID NO: 228921 - protein, 356 aa, Zea mays
  unsure (1)..(356): unsure at all Xaa locations
  Clone ID: MRT4577_140368C.1.pep
MAELKRLSESRDLTRIERIGAHSHIRGLGLDSSMEARDASEGMVGQLPARRAAGLILQLIRQGKIAGRAVLLAGQPGTGKTALAMGIAKSLGAETPFASVAASELFSLDLSKTEALTQAFRRAIGVRIKEETEIIEGEVVEILIDRPLSASAAGGSSAAPTGATAAGKSGRLTLKTTDMETVYELGGKMIEALVKEKVQSGDVIALDKASGKVTKLGRSIGRSRDYDAVGPHTKFVKCPDGELQKRKEVVHCVTLHEIDVINSRXVREQIDTKVAEWREEGKADIVPGVLFIDEVHMLDIECFSFLNRALENDMAPILVIATNRGITSIRGTNYRSPHGIPPDFLDRLLIITTHPY

SEQ ID NO: 228922 - protein, 125 aa, Zea mays
  Clone ID: MRT4577_140369C.1.pep
ILEGHCHALVPAGRARYFKSSSKGNQEHPGGGGITTATGFWRGTNFGPKLGYGGTRTTCAWGIIPQGGGNKHTKASLTSGSQISGRRRLRGSSTYGGGTGRGTKGRAGGTKGRGAPGPGGGAFWA

SEQ ID NO: 228923 - protein, 478 aa, Zea mays
  Clone ID: MRT4577_140370C.1.pep
MAELKRLSESRDLTRIERIGAHSHIRGLGLDSSMEARDASEGMVGQLPARRAAGLILQLIRQGKIAGRAVLLAGQPGTGKTALAMGIAKSLGAETPFASVAASELFSLDLSKTEALTQAFRRAIGVRIKEETEIIEGEVVEILIDRPLSASAAGGSSAAPTGATAAGKSGRLTLKTTDMETVYELGGKMIEALGKEKVQSGDVIALDKASGKVTKLGRSIGRSRDYDAVGPHTKFVKCPDGELQKRKEIVHCVTLHEIDVINSRTQGFLALFTGDTGEIRAEVREQIDTKVAEWREEGKADIVPGVLFIDEVHMLDIECFSFLNRALENDMAPILVIATNRGITSIRGTNYRSPHGIPPDFLDRLLIITTQPYTEDEIRKILDIRCDEEDVEMSADAKVLLTKIGVETSLRYAINLITSAALACQRRKGKVVDMEDISRVYQLFLDVKRSTQYLMEYQSQYMFNEVPGEADGEDAMQS

SEQ ID NO: 228924 - protein, 148 aa, Zea mays
  unsure (1)..(148): unsure at all Xaa locations
  Clone ID: MRT4577_140371C.1.pep
VQVDSTPILFVEKKDGTKRMCIDYRSLNEVTIKNKYPLPRIEDLFDQLRGVGLFSKIDLRLGYHXLKIRPSDVLKIAFITKYGLYEYTVMSFGLTNALAFFMYLMNSVFMDYLVKFVVVFTDDILIYSXNEEEHEEHFEMVLQRLRKH

SEQ ID NO: 228925 - protein, 149 aa, Zea mays
  Clone ID: MRT4577_140372C.1.pep
MKIVLKVAITCKKCKTCVLGITSKVNGIKSLTYDDEKSTLTVVGDVDVVVIVDALRKAKHPAEVVSVTDEKKEAEEKKKKEEEEKKKKEKEEEEKKKRCCPKPPCKPCPPPPCTPCPPPPCPPPPCPPPYLKPCYIPIEDEYPGPCTIV

SEQ ID NO: 228926 - protein, 478 aa, Zea mays
  Clone ID: MRT4577_140373C.1.pep
MAELKRLSESRDLTRIERIGAHSHIRGLGLDSSMEARDTSEGMVGQLHARRASGLILQLIRQGKIAGRAVLLAGQPGTGKTALAMGIAKSLGAETPFASVAASELFSLDLSKTEALTQAFRRAIGVRIKEEAEIIEGEVVEISIDRPLSASGVGGSSVAPSGATAAGKSGRLTLKTTDMETVYELGGKMIEALVKEKVQSGDVIALDMASGKVTKLGRSIGRSRDYDAVGPHTKFVKCPDGELQKRKEIVHCVTLHEIDVINSRTQGFLALFTGDTGEIRAEVREQIDTKVAEWREEGKADIVPGVLFIDEVHMLDIECFSFLNRALENDMAPILVIATNRGITSIRGTNYRSPHGIPPDFLDRLLIITTHPYTEDEIRKILDIRCDEEDVEMSADAKVLLTKIGVETSLRYAINLITSAALACQRRKGKVVEMEDISRVYQLFLDVKRSTQYLMEYQSQYMFNEVPGQADGEDAMQS

SEQ ID NO: 228927 - protein, 149 aa, Zea mays
  Clone ID: MRT4577_140374C.1.pep
PLPVAVSASQLPGGQAPSQLQPGSTTRPPSPPLLQPGRRLLRATGLPEPPLCVTSDRSRPCARPEHPLRGCARPESGASPARDQSRPCARPEPPLRATADRSCPCARLEPPCASMTARFCFLGPNVYFGPILYFGPLLFSGRPFKARHV

SEQ ID NO: 228928 - protein, 111 aa, Zea mays
  Clone ID: MRT4577_140375C.1.pep
TMPMADSSSGTAVYQQRIIPALLLEDQNMATKVIELHITIDNTSSEEYLSDRIQPLFCTLQRLFLLTSIITGLPSSTRSIALSSPANDWNLGYLEICLRDLYKYVMTYDPP

SEQ ID NO: 228929 - protein, 138 aa, Zea mays
  Clone ID: MRT4577_140376C.1.pep
HNNNNGAVYRHQKNPPKRGKGNRTTGGPTNGTKNNFWKPRKKKRPGNATTPRGGKTTDSGRPLGVKTSLRKKGKPPKTTGNFSRKKGGGPQKKRNPPLGPQKPKLKNWGNWRKKKPKKGSPTGRESLEGGKIGFTHPK

SEQ ID NO: 228930 - protein, 96 aa, Zea mays
  unsure (1)..(96): unsure at all Xaa locations
  Clone ID: MRT4577_140377C.1.pep
PAPGPPKMGPFPPPPXPGPPWPXPPLPSKMLPGSAPPPDAPAPSPPXGIWRPDGPGXPPLCFRPPRPFRRKGQPHLPPPSGLLPSPALWQPPPLCF

SEQ ID NO: 228931 - protein, 92 aa, Zea mays
  Clone ID: MRT4577_140378C.1.pep
RWYQCQPNIFLINQYLLGRHVFSLWYTPKDLDACPRFYVHLHSMGRELTNGGVCQLLGRIPSHIHRGHDRNFEPVSHRQWAHELEDINYSVH

SEQ ID NO: 228932 - protein, 121 aa, Zea mays
  Clone ID: MRT4577_140379C.1.pep
MASISLEDVRNETVDLETVPVQEVFQHLKCSKEGLSSAEGDNRLKIFGPNKLEEKSESKLLKFLGFMWNPLSWVMEAAAIMAIVLANGGGKPPDWQDFVGIVVLLFINSTISFIEENNAGN

SEQ ID NO: 228933 - protein, 120 aa, Zea mays
  Clone ID: MRT4577_14037C.1.pep
MMMMPDGGVVSCSPPLPPRALLAASSVLCCVVWVQHGSRLAMCPAVLCHHPSIIILYLYPTFCVKKKKKKKKKKKKKKKKKKKKKKKIAKRKKQESKNRKKRPIYRTSQHSIFSYGWPRN

SEQ ID NO: 228934 - protein, 95 aa, Zea mays
  Clone ID: MRT4577_140380C.1.pep
PCSSDHQRDGLCNADTMLCIFCVVFVVVIIPHHKGLSSPPLGPSGGCFRAVGGAARRVASRVSRSTSTWSSVQIGSGSRWMGLRISTRSKVIAAG

SEQ ID NO: 228935 - protein, 78 aa, Zea mays
  Clone ID: MRT4577_140381C.1.pep
DFYKSGCHVFSLQHESFIPLDISPLDDFAATSDHGPHLDYHSRFVRFLQQLTPKWFAHECYCRLCIHDCLLLYLALDA

SEQ ID NO: 228936 - protein, 64 aa, Zea mays
  Clone ID: MRT4577_140382C.1.pep
VVLLVEGRCGTCVRSPLLYCYPWPRVLYAAFFLKDPLSAKLQGRPSHYGVVTSARAEFRAYAAC

SEQ ID NO: 228937 - protein, 86 aa, Zea mays
  unsure (1)..(86): unsure at all Xaa locations
  Clone ID: MRT4577_140383C.1.pep
GGAQNAKLRLAPVWNGEEPTLARLAAPRGRRRRARVRRWXKRTTRPLTTWRRDRSGRGGSSSNGRGVAPPAVPHGSAAHAVGSGQR

SEQ ID NO: 228938 - protein, 131 aa, Zea mays
  Clone ID: MRT4577_140384C.1.pep
FFKSFLFVALDIALRRNDRDWVETLPSEIDDEISIKLYYGHFLCHVFHQDYIVRKGRDCLDLEHRMWRLLDARGAEYPAEHNVGHLYRAKPALAEFYRELDPCNCFNPGIGQMSKFANYREPEARHEAARP

SEQ ID NO: 228939 - protein, 87 aa, Zea mays
  Clone ID: MRT4577_140385C.1.pep
RINGFQARDQIGAMLNSFNRGGLSEYSGALENLTLKKPSEVFASQSPRLPIARRTCLQALKTICAKFHRTCKALNLLVTPALSGVCL

SEQ ID NO: 228940 - protein, 81 aa, Zea mays
  Clone ID: MRT4577_140386C.1.pep
NTCVILHNNMNTDKFIIPLDVLIHNSPIDTQARTPSILATTAAAKTLSTEEPKSQPSEKNTNPTTWIRSKLSCGRETQSNP

SEQ ID NO: 228941 - protein, 179 aa, Zea mays
  Clone ID: MRT4577_140387C.1.pep
MAASSSSPAAAAVGRAVEEVRSALNEHADVVAELFGRVSTELRGGFGPAVDTFVGFFHAVDWKEPWLIGMISFHVILLLVTIISRRNINFQLILSALTFSGVFLAEKINTFLGQNWKSFSSQNYFDPQGLFISVMWSGPLLLITILILVNTLVTLCMLMVRWKRAELKHRAREARSKQE

SEQ ID NO: 228942 - protein, 124 aa, Zea mays
  unsure (1)..(124): unsure at all Xaa locations
  Clone ID: MRT4577_140388C.1.pep
MDAQQQLDLVMRHQSMATVCESEDALGSSESDPARPARPRGKRSRAAEVHNLSEKRRRSRINEKMKALQTLIPNSSKTDKASMLDDAIEYLKHLQLQVQMLSMRNGLYLPPGNLXSGAPETLAP

SEQ ID NO: 228943 - protein, 193 aa, Zea mays
  Clone ID: MRT4577_140389C.1.pep
MTLPSHRRESDLEINGASQDTVGAKKTACKTTQRQILRSEIEKLKNRVRAFTGAFVVMISPVLLAIVLKKVSLTGTGGRYQGRIRLRALEAFVDLVQRRFAHLAAVTLQMGIMPFLCVMVAEACASLPPLSYVAPRLVAACRVLVFLSNLLLMALGCGILLLFHSNALLVLTICSAMALGVAAVQIRYLCRGV

SEQ ID NO: 228944 - protein, 57 aa, Zea mays
  unsure (1)..(57): unsure at all Xaa locations
  Clone ID: MRT4577_14038C.1.pep
HASAHAXRXPLQEGGAWWDXVEPGGKWSMXXLSXKPXXNXQQXXLXXIXXNMXSHXX

SEQ ID NO: 228945 - protein, 84 aa, Zea mays
  unsure (1)..(84): unsure at all Xaa locations
  Clone ID: MRT4577_140390C.1.pep
LTKGLLSSSSAGCFNATVANVRLXVTPXTPAAAAARRNLPVWTQAPTPKIGMPSPALYAAXTAHGTPSWGPTHMVRTGSPLVKS

SEQ ID NO: 228946 - protein, 96 aa, Zea mays
  Clone ID: MRT4577_140391C.1.pep
PSTRNRGGGATKKKKKKKKKKKKKKKKKKKKKKKKKKKKKKKKKKPKKKKKGGAFLGAHFLPPGGGGALFFFFPQIKSPGPGFKPRGVEKHWGSPL

SEQ ID NO: 228947 - protein, 83 aa, Zea mays
  Clone ID: MRT4577_140392C.1.pep
LWHSKCKLKKYVPSRPPLRRFIHQGENLSLIFLNQTAELVGFVTQALKAWPARFGNKPGQIEGGLKIVKPVPRHQGHKIKHLE

SEQ ID NO: 228948 - protein, 86 aa, Zea mays
  Clone ID: MRT4577_140393C.1.pep
MVDDGGRLMAVCSRDQVVRVDARRMSSLETRVELFHVDLQEETLSRIGDLADEAKKDKDCFQETRSSGSVNTAELGLQMGGCKWVF

SEQ ID NO: 228949 - protein, 73 aa, Zea mays
  Clone ID: MRT4577_140394C.1.pep
NRIGFFFFFLFRVFSQGLGFSLKRFLINHPFPKQKKKKKKKKKKKKKKKKKKKKKKKKKKKKKKKKKKKKGRP

SEQ ID NO: 228950 - protein, 48 aa, Zea mays
  Clone ID: MRT4577_140395C.1.pep
KQIINCGSHIGDISSYYTLTNINSSQNKHTPEQLKHVKNKRMGPFRSS

SEQ ID NO: 228951 - protein, 42 aa, Zea mays
  Clone ID: MRT4577_140396C.1.pep
NIRGSIPTGKIYYIKPMANLSVINQLHVYKVSMERGMSILGW

SEQ ID NO: 228952 - protein, 68 aa, Zea mays
  Clone ID: MRT4577_140397C.1.pep
LVSGSPFCFYFARRCIWSCAVVVTDFDQQKNNPYSRIRRVTPRDIARIPSIYPARLGHDETWHTLEPN

SEQ ID NO: 228953 - protein, 103 aa, Zea mays
  Clone ID: MRT4577_140398C.1.pep
RPATRPVQYHPRSGAGHVPRHRLRHLRHCGCDAVHHRRHLYVKELFSRTIIVFEVDSRGSCSRVGARYDSSLCGGCNSRKISSGDVLSIIFPGGPWLSVSQVL

SEQ ID NO: 228954 - protein, 71 aa, Zea mays
  Clone ID: MRT4577_140399C.1.pep
PVHPHPHRASNLHGTGGPGAQDDRLTLNRFITIGPAETLWDIQHKGTYRAMPRVRRHKGRRLMAIHLLATT

SEQ ID NO: 228955 - protein, 88 aa, Zea mays
  Clone ID: MRT4577_14039C.1.pep
TKVKEIQFFVDITTYVNKEVKEEIIFLGVEIVIVVVVVVLMVVFLFMLIQDEVLLLKVVKKVVLEFMFLVIVFVINVVLFVIQLMNKV

SEQ ID NO: 228956 - protein, 127 aa, Zea mays
  Clone ID: MRT4577_1403C.1.pep
CSCSYSCRISQGRFDFITGIWSSFFTISSLSQCNLGCQHLVSLIFMRCQVQHRLYKVGLHASGPLVAARRTAPRCVLLHPVKKFIDPGANRIHHDWLPGLPRRSSHGRGSSTSSSCTPYPGVPVKPG

SEQ ID NO: 228957 - protein, 76 aa, Zea mays
  Clone ID: MRT4577_140400C.1.pep
AVEQSNPCAICLGAMGADGGQAMATFTAECSHTFHFHCISASVAHGHLVCPLCNAQWRELPSVRPSHPLSMPPILP

SEQ ID NO: 228958 - protein, 194 aa, Zea mays
  unsure (1)..(194): unsure at all Xaa locations
  Clone ID: MRT4577_140401C.1.pep
MASSTDNRLYLGLLLLLVASATVFLDVSGDAGLTPGGNTATPPPPFRTAYAFGDSFTDTVNTRSTTAPYSFGYVSSPPYGDTFLHRSTNRYSDGRLIVDFLDDALALPXLPPALTRRVXSNDNGTVAGIGGNFAAFGDKVIENDVFAGTTLSIDVNEKYIVNXMGWSEVKLILLYSSSVGQEGVHHMMWIGLIG

SEQ ID NO: 228959 - protein, 37 aa, Zea mays
  Clone ID: MRT4577_140402C.1.pep
CILTYHAAMDTHMCVYTHIYMYIYIHGPSIGGRLGVD

SEQ ID NO: 228960 - protein, 67 aa, Zea mays
  unsure (1)..(67): unsure at all Xaa locations
  Clone ID: MRT4577_140403C.1.pep
REPVESRPPRRRRPRTRRRPSCPPSPPPRLSSPLQRRGARSTAXPRRRRCWLVAPRRRCFECSLSLW

SEQ ID NO: 228961 - protein, 81 aa, Zea mays
  Clone ID: MRT4577_140404C.1.pep
VQTCLYPLLHHCMECSNLILLPMPCAVYAITTCCNGSSTPMGACMAGCTGLAHYASTQGPPYWELLCIPSPVKANKAEFIS

SEQ ID NO: 228962 - protein, 76 aa, Zea mays
  Clone ID: MRT4577_140405C.1.pep
KNKENAKHGTEHRTTRNGRQRKKHAPSAAATKEHKKGAPTPAGATKKKTREGPPPPPKKKKKKKKKAWTSLKIIIS

SEQ ID NO: 228963 - protein, 59 aa, Zea mays
  Clone ID: MRT4577_140406C.1.pep
WVYFLWSFFSYHPEILQCFVITSFNLICYSCFDNLRVSYKRNFNAIDDSDKVTTFQHIQ

SEQ ID NO: 228964 - protein, 137 aa, Zea mays
  unsure (1)..(137): unsure at all Xaa locations
  Clone ID: MRT4577_140407C.1.pep
PASPHGRTPGAPTPTAGPQPPTAPGAPPGTXRDPGHGDPEDPPSRPPTSGPARAPAPPPPRKAATGEATRRRQTGARGGPPPTSPGRGGSPPRRRSRLGHEAPPPPRKKRRVGSACAPPPLPKDQARCDSXPPPPPS

SEQ ID NO: 228965 - protein, 75 aa, Zea mays
  Clone ID: MRT4577_140408C.1.pep
MTTGTSQADCAVITIDYTTVGFEAGIPKDDQTCDHAIYASNLGAKQMTCRCNKMDAITPNYSKAILSGLYPTFLR

SEQ ID NO: 228966 - protein, 100 aa, Zea mays
  Clone ID: MRT4577_140409C.1.pep
APCGGEGAREDSSRFSADLRWLGGVGGPRERDCASVRWPAATEISCGLRELSMERAEEGKRWRSHRLCALELGVGEPAAAVKVLLAAMAVRRPCETMQRC

SEQ ID NO: 228967 - protein, 55 aa, Zea mays
  Clone ID: MRT4577_14040C.1.pep
RPTTLFWRKVFLRPFLKKGIRGLFYKGFLHTRGGEPAGFDNFIRNWAETLSSMYF

SEQ ID NO: 228968 - protein, 100 aa, Zea mays
  Clone ID: MRT4577_140410C.1.pep
PHGRPVRRPPPRHVGPPGSRGCLWCQLVRRSSLLQIHPRGVHPPRHLKNDQHHQHQRLTSLTRPSAPKKPWPACPLTIGPVSTTWCILITWAPQYRTLPD

SEQ ID NO: 228969 - protein, 257 aa, Zea mays
  Clone ID: MRT4577_140411C.1.pep
MARTGLADATAPEADAMPAASKDAADVRMISTKELQAHAAADDLWISISGDVYDVTPWLRHHPGGEVPLITLAGQDATDAFMAYHPPSVRPLLRRFFVGRLTDYTVPPASADFRRLLAQLSSAGLFERVGHTPKFLLVAMSVLFCIALYCVLACSSTGAHMFAGGLIGFIWIQSGWIGHDSGHHQITRHPALNRLLQVVSGNCLTGLGIAWWKFNHNTHHISCNSLDHDPDLQHLPLFAGSTKLFHNLWSVCYERTL

SEQ ID NO: 228970 - protein, 86 aa, Zea mays
  Clone ID: MRT4577_140412C.1.pep
IKPRSSRYRGDQYVPFDVNIPQNFTSSQRELIEQFAKQDQGGDQKNAKAAAEASGGYPVLGATVVPFSWYLYRDRRPVSNSQRKDL

SEQ ID NO: 228971 - protein, 179 aa, Zea mays
  unsure (1)..(179): unsure at all Xaa locations
  Clone ID: MRT4577_140413C.1.pep
QCLRPSGLCSPVVHVAQPLVRPIVQPSLQRLSSSSAALNPLPPRRRAARRDVPTSSICLHDGAPHHDFNLPPHDLNRSASSATSARTTSTSPDSASSATFSPPTSMCGIRYQTKRREENTSPQPRPCPWCSPFTAQAHSIAPSTRTPTTTAPSLLMVMPPREPXRLQRSRTRCRQWLPT

SEQ ID NO: 228972 - protein, 56 aa, Zea mays
  Clone ID: MRT4577_140414C.1.pep
DVVELSMIQATRAFGKPERWKASLVLNPAQISDSTSRKDSGGVRVGGAKQWQKRVP

SEQ ID NO: 228973 - protein, 193 aa, Zea mays
  unsure (1)..(193): unsure at all Xaa locations
  Clone ID: MRT4577_140415C.1.pep
MLVYQDLLSGDELLSDSFTYNELENCVLWXLGXKWVTQGSVEVDIGAXPSDEGXEYENVDDTVRRCDIDDTFRLQEQPPIYKRSFGSYIRKYIQNLTAGMQTEKADDFKKGVXIATKFLLSKLKDLQFFVAEAMKDDASVIFTYYKDDATNPTFLYFSHGLNEIKCYACSAIIYAGCVLSMYYYYIANYSCPG

SEQ ID NO: 228974 - protein, 208 aa, Zea mays
  Clone ID: MRT4577_140416C.1.pep
SFPSSGRQSFYRNPIKEVVRFLDKKHRNHYRVYNLCSERAYDPKHFHNRVVRIMIDDHNVPTLHQMVVFTKEVNEWMAQDLENIVAIHCKGGTDRTGTMVCAFLIASEICSTAKESLYYFGERRTDKTHSEKFQGVETPSQKRYVAYFAQVKHLYNWNLPPRRILFIKHFIIYSIPRYVRDLKIQIEMEKKVVFSTISLGKCSVLDNI

SEQ ID NO: 228975 - protein, 114 aa, Zea mays
  Clone ID: MRT4577_140417C.1.pep
DPVERVGSVVRGAQALAPQLSGRDRSRERSQDGSDVSGCTRSTGNARYGVRRLTKPERRLRRAPAISRVECGSGPAFACSPVAKLGLGAEPNTASEDMPAAWRRQRRRGRKRPN

SEQ ID NO: 228976 - protein, 127 aa, Zea mays
  Clone ID: MRT4577_140418C.1.pep
GVCTPPIMLEVNDSPPPGRCTQSLGPYYAQAILYLGQAESNGGNHGLLLEFAIRLYAYPRRCSGASSTEGSLPAGGHNRHPWTRCNTAVCSPTTASTTRKYLPENPGRQEPDVLPLHWVPRAANFPG

SEQ ID NO: 228977 - protein, 47 aa, Zea mays
  Clone ID: MRT4577_140419C.1.pep
LLAILPFYFSPYFWLLFCLVRPFFYWPNGRLMNNFYCFRANGEKFRH

SEQ ID NO: 228978 - protein, 67 aa, Zea mays
  Clone ID: MRT4577_14041C.1.pep
SEHCRCTWLAMEVRCFRLRPPLPPPGVPLPVPGPGASRPSTPAGSRQTPCPWLGRGCACTEWCLVAS

SEQ ID NO: 228979 - protein, 93 aa, Zea mays
  Clone ID: MRT4577_140420C.1.pep
NTPSLRGTNFLNGGTKASKPLVLYSPVFHYFRLQLDNGTMPIPGGGAPSRGWDKGGTKNQTLGKCQTRKEPLPHAGFKTNGLAQKNCLYCLNL

SEQ ID NO: 228980 - protein, 39 aa, Zea mays
  unsure (1)..(39): unsure at all Xaa locations
  Clone ID: MRT4577_140421C.1.pep
XXXWNTGDSCSGLMDPCXSCPTSLRQESLVIYRLRACSA

SEQ ID NO: 228981 - protein, 54 aa, Zea mays
  unsure (1)..(54): unsure at all Xaa locations
  Clone ID: MRT4577_140422C.1.pep
RGGQGTGYESGLEGEKVMYWWEWVMXRVFSDCLVEKSCITTLANVLLVYLFQFG

SEQ ID NO: 228982 - protein, 60 aa, Zea mays
  Clone ID: MRT4577_140423C.1.pep
VRNAAKEGRFFFFFFAGTVDFINQEPRYGKKFKNYMIFVTKYRLYGSETLIWIKKQQTEI

SEQ ID NO: 228983 - protein, 154 aa, Zea mays
  Clone ID: MRT4577_140425C.1.pep
MLMGFPVGYSETPKLLLHLLFLLDHLRRLSSWLLRLAGAADADADTDAGHPRHPCAAAQRLEEHSPALRFDSLSCGSGGGVTAPRPLPEGCCVCLGDFHAAAEVRRARGCRHVFHRACLDRWAAHGHRTCPLCRTPLLPPLPLPLPLPLPLPPS

SEQ ID NO: 228984 - protein, 155 aa, Zea mays
  unsure (1)..(155): unsure at all Xaa locations
  Clone ID: MRT4577_140426C.1.pep
GIITFELWRRMWKSWTPPKCKFFLWLAIRNKCWTXDRLERRGLDHPESCLLCDQTQETIQHLLCTCIFARQFWHIIFFALGIWXLSPSEDEISFADWWRKVCKRIHRNKRKGMNNVIILGAWCLWIHRNKAVFNGENPLLGTIRCVFRDELIVLD

SEQ ID NO: 228985 - protein, 38 aa, Zea mays
  Clone ID: MRT4577_140427C.1.pep
LPIHIIKYKLTQAFYVALSSNAAVLFCLAKWKDKIDEA

SEQ ID NO: 228986 - protein, 81 aa, Zea mays
  Clone ID: MRT4577_140428C.1.pep
PKRAHPQTTPVGKFFYNIEAPNKSCSHQPINLSLNPRSRFLTSPVSPHGYLYIAGATQYEYIRHLARLRVKSQLCVSSVDK

SEQ ID NO: 228987 - protein, 217 aa, Zea mays
  Clone ID: MRT4577_140429C.1.pep
MLEKNVEELRESKERCFEKSLDCVRKLKTSFAKVGAYSSKEKFIRGDPEGIIDWIGEEAEAFEDILSDHGDICAFAGAWGVAAILEKAGCDHVKAVAQTETAFSTDDTKDPSAEATLVGGKFYSDVWVNGGREMTNKIIKKNEKETHDAQEEAKRAEEAAERARRIAELSLLPEPYDPQADPVMKEALDVMSVTNTIVDEVIDRLLNEATEKILKED

SEQ ID NO: 228988 - protein, 88 aa, Zea mays
  Clone ID: MRT4577_14042C.1.pep
YRLQSGHSLRLHSRTTYYVVNPDNNENLTLITLAIPVNKPGRFDRFFLSSTEAQQSYLQGFSRNILEASYDTRFEDIHKVLFSREEGQ

SEQ ID NO: 228989 - protein, 76 aa, Zea mays
  Clone ID: MRT4577_140430C.1.pep
LPTCSLLVDLANLLLLIARSWMEPGMSLQVAHITAVYEVLFCYLVHQDRQGGSSWCYPQMRAECQQHALMQCAIQY

SEQ ID NO: 228990 - protein, 58 aa, Zea mays
  Clone ID: MRT4577_140431C.1.pep
CILANTGTQAALVLYTGVRCSRHTLSGSVHRRWLPLVTNFLRNGSLFLYSEFYAETSS

SEQ ID NO: 228991 - protein, 74 aa, Zea mays
  Clone ID: MRT4577_140432C.1.pep
LVQEPLPASGNPGSLLLVNTLHRSLHGAHRDPMGWGLTDFSTDLPSHQVTEPHELRTKSRYAQGIKYIPREQLT

SEQ ID NO: 228992 - protein, 41 aa, Zea mays
  unsure (1)..(41): unsure at all Xaa locations
  Clone ID: MRT4577_140433C.1.pep
HKGNGCALHKFTTTGHGTSLVHVXEQFTEARFTLDILHLHV

SEQ ID NO: 228993 - protein, 128 aa, Zea mays
  Clone ID: MRT4577_140434C.1.pep
FSPRFGCPPRGPIPGPNCWWPPEGQGPSGFPRGLWWLSGFRMQGVAPRFFPPAKVVMVVHPCLPTRWWIFKYLFSPSKPNFPKAGFDPPLFHVSCFGLPSPVSSLVAPPPPGWDLLNLVFSGVASPQI

SEQ ID NO: 228994 - protein, 62 aa, Zea mays
  Clone ID: MRT4577_140435C.1.pep
FDRLPTLPLPLFPLFYISSQTSISSKVTFSYLTPHKSSILLPKSNSLYLNFHPTHFKIHNSS

SEQ ID NO: 228995 - protein, 138 aa, Zea mays
  Clone ID: MRT4577_140436C.1.pep
MKPSCAALVSGLLLLLATFAAGAGAASSSSPPSSSLGKHPAELVLLGRKGRELGQLSSSSAYRYYQHQSKQTQQPEEAVAMEVKQPEEEEEEKAKLRWTAGQGADAEAGLIYSADYSGVAMHAGSPPTTKPKHRHPRP

SEQ ID NO: 228996 - protein, 63 aa, Zea mays
  Clone ID: MRT4577_140437C.1.pep
CNSEQVACLQAHLLKEESTIFQVMVSETSSLKVKCLFLEQVAGLILCIPSCHLIYKLMCESGV

SEQ ID NO: 228997 - protein, 1087 aa, Zea mays
  Clone ID: MRT4577_140438C.1.pep
MEASAGLVAGSHNRNELVVIRRDGDPGPKPPREQNGQVCQICGDDVGLAPGGDPFVACNECAFPVCRDCYEYERREGTQNCPQCKTRYKRLKGCQRVTGDEEEDGVDDLDNEFNWDGHDSQSVAESMLYGHMSYGRGGDPNGAPQAFQLNPNVPLLTNGQMVDDIPPEQHALVPSFMGGGGKRIHPLPYADPSLPVQPRSMDPSKDLAAYGYGSVAWKERMENWKQRQERMHQTGNDGGGDDGDDADLPLMDEARQQLSRKIPLPSSQINPYRMIIIIRLVVLGFFFHYRVMHPVNDAFALWLISVICEIWFAMSWILDQFPKWFPIERETYLDRLSLRFDKEGQPSQLAPIDFFVSTVDPLKEPPLVTTNTVLSILSVDYPVDKVSCYVSDDGAAMLTFEALSETSEFAKKWVPFCKRYNIEPRAPEWYFQQKIDYLKDKVAANFVRERRAMKREYEEFKVRINALVAKAQKVPEEGWTMQDGTPWPGNNVRDHPGMIQVFLGQSGGLDCEGNELPRLVYVSREKRPGYNHHKKAGAMNALVRVSAVLTNAPYLLNLDCDHYINNSKAIKEAMCFMMDPLLGKKVCYVQFPQRFDGIDRHDRYANRNVVFFDINMKGLDGIQGPIYVGTGCVFRRQALYGYDAPKTKKPPSRTCNCWPKWCFCCCCFGNRKQKKKTTKPKTEKKKLLFFKKEENQSPAYALGEIDEAAPGAENEKAGIVNQQKLEKKFGQSSVFVTSTLLENGGTLKSASPASLLKEAIHVISCGYEDKTDWGKEIGWIYGSVTEDILTGFKMHCHGWRSIYCIPKRVAFKGSAPLNLSDRLHQVLRWALGSIEIFFSNHCPLWYGYGGGLKFLERFSYINSIVYPWTSIPLLAYCTLPAICLLTGKFITPELNNVASLWFMSLFICIFATSILEMRWSGVGIDDWWRNEQFWVIGGVSSHLFAVFQGLLKVIAGVDTSFTVTSKGGDDEEFSELYTFKWTTLLIPPTTLLLLNFIGVVAGVSNAINNGYESWGPLFGKLFFAFWVIVHLYPFLKGLVGRQNRTPTIVIVWSILLASIFSLLWVRIDPFLAKDDGPLLEECGLDCN

SEQ ID NO: 228998 - protein, 151 aa, Zea mays
  Clone ID: MRT4577_140439C.1.pep
PSPTLSDVLSSCSGPMPSSQPPYCHLPDALPPLFHGRAHPCRSSLWRLDFEFPMSSFSPTCSPDVDLHRPPARELQVLASFLQLAPVADAVVAQPLVGSAQPLRNIINSARCRCRASCIASSTKIPRLWTAYAQLKSDRLGCLMCILLIII

SEQ ID NO: 228999 - protein, 71 aa, Zea mays
  Clone ID: MRT4577_14043C.1.pep
VNIRHDGASVCCHDNLYIAHPGPIGALEQRPQDQQHHSHRNDLAGGRAPSPSLYGIMNFPSVQRSYNRSGM

SEQ ID NO: 229000 - protein, 69 aa, Zea mays
  Clone ID: MRT4577_140440C.1.pep
ADTGISELEGVGYQGDISDALGYTVYATAADRKKGSLGTIAPIGIGFIVGANILDAGPFKHGSKNPDRS

SEQ ID NO: 229001 - protein, 117 aa, Zea mays
  Clone ID: MRT4577_140441C.1.pep
MEASAGLVASSHNRNELVVIRRDGDPGVRARFNFSGWLARGASVTVLFFPFLPLLPVACALACVQPKPLREQNGQVCQICGDDVGLAPGGDPFVACNECAFPVCRDCYEYERREGTQ

SEQ ID NO: 229002 - protein, 257 aa, Zea mays
  Clone ID: MRT4577_140442C.1.pep
WSSMERKGIARDVLSYVSMLCCFSKAGSLDSVMKLFNRMNEAGVAPDRKVYNAIVFALAKGRCVKEAKMLVRSMEEKQVAPDTATFNSLIGPLCKARQFQEAMEMFDAMLQRKLSPSVRTFHALLNVARNSTEVFDLLDKMKQLRCEPEMDTYIMLIRKFCRWREHESVEKLWSAMPANGLSPDRSAYIVLIHGLFLNGRLEEAARYYEEMKSKGFLPEKKTEEMVMAWLEGKELAKASVISSKGGRGPVSLKLPKK

SEQ ID NO: 229003 - protein, 858 aa, Zea mays
  unsure (1)..(858): unsure at all Xaa locations
  Clone ID: MRT4577_140443C.1.pep
HQTGNDGGGDDGDDADLRLXMDEARQQXLSRKIPLPSSQINPYRMIIIIRLVVLGFFFHYRVMHPVNDAFALWLISVICEIWFAMSWILDQFPKWFPIERETYLDRLSLRFDKEGQPSQLAPIDFFVSTVDPLKEPPLVTANTVLSILSVDYPVDKVSCYVSDDGAAMLTFEALSETSEFAKKWAPFCKRYNIEPRAPEWYFQQKIDYLKDKVAANFVRERRAMKREYEEFKVRINALVAKAQKVPEEGWTMQDGTPWPGNNVRDHPGMIQVFLGQSGGLDCEGNELPRLVYVSREKRPGYNHHKKAGAMNALVRVSAVISNAPYLLTWDCDHYINNSKAIKEAMCFMMDPLLGKKVCYVQFPQRFDGIDRHDRYANRNVVFFDINMKGLDGIQGPIYVGTGCVFRRQALYGYDAPKTKKPPSRTCNCWPKWCFCCCCCGNRKHKKKTTKPKTEKKKLLFFKKEENQSPAYALGEIDEAAPGAENEKAGIVNQQKLEKKFGQSSVFATSTLLENGGTLKSASPASLLKEAIHVISCGYEDKTDWGKEIGWIYGSVTEDILTGFKMHCHGWRSIYCIPKRPAFKGSAPLNLSDRLHQVLRWALGSIEIFFSNHCPLWYGYGGGLKFLERFSYINSIVYPWTSIPLLAYCTLPAICLLTGKFITPELNNVASLWFMSLFICIFATSILEMRWSGVGIDDWWRNEQFWVIGGVSSHLFAVFQGLLKVIAGVDTSFTVTSKGGDDDEFSELYTFKWTTLLIPPTTLLLLNFIGVVAGVSNAINNGYESWGPLFGKLFFAFWVIVHLYPFLKGLVGRQNRTPTIVIVWSILLASIFSLLWVRIDPFLAKDDGPLLEECGLDCN

SEQ ID NO: 229004 - protein, 98 aa, Zea mays
  unsure (1)..(98): unsure at all Xaa locations
  Clone ID: MRT4577_140444C.1.pep
KSERYTGGKWRXRQSLCSWAVEYSICKCLIVQHSLLLGRNIDGLSRTARYFDSALLPCTNLVLNKAGRNASASGTEQPAHYLCMPVHWRACSLHVRLY

SEQ ID NO: 229005 - protein, 75 aa, Zea mays
  Clone ID: MRT4577_140445C.1.pep
TLSCCMCSLRPSFSSSVELCVFTGDCFRCSILLFALYEGVELVDDALAYFPHVIPLYLRAFIQPSNVVCLLAPFA

SEQ ID NO: 229006 - protein, 95 aa, Zea mays
  Clone ID: MRT4577_140446C.1.pep
KISRLFKTPPPCFRPSAPRGPRFTQFLRGFKSFPHVVFTKGVHPGKNKFFNFANPPEIRMFHGRGFAPQVFRPVFTPPRWTTQNKALYAFGSSPF

SEQ ID NO: 229007 - protein, 117 aa, Zea mays
  unsure (1)..(117): unsure at all Xaa locations
  Clone ID: MRT4577_140447C.1.pep
MAAKIFCLLMLVGISARAATATIFPHCSQAPIASLLPPYLSPAVSSVCETQFFNPYGAQRVFAGVLSLLPPLLLQSSSPLXQLPLVHILSQKIMAQQLLQLVLANHAAYSYQQPVFF

SEQ ID NO: 229008 - protein, 129 aa, Zea mays
  unsure (1)..(129): unsure at all Xaa locations
  Clone ID: MRT4577_140448C.1.pep
MGTQISKKKKFXVADGVFYAELNGMLTLELAEDVYSGEHVRAXPMRSWIMXSATRRTXNVLVEKGRMIRELTYEGHKRFHFPESGDKLYAXKGVKRARCDIAQGEALRYELRGVLAARRACYAVHRSDV

SEQ ID NO: 229009 - protein, 68 aa, Zea mays
  Clone ID: MRT4577_140449C.1.pep
HLSLMSIPSTTYTSQMFCQNICLYFAKNDFIQIKTPLRTVFWGYYTLVRSSQFNSAERVINLNINSFS

SEQ ID NO: 229010 - protein, 299 aa, Zea mays
  Clone ID: MRT4577_14044C.1.pep
MERAVPVRKPHTSTADLLSWSATAPDASASPAASSRPSLKPAAGITPAMFGAPVTEQEAEDLSKSERKFCSGSKLKEMSGSGIFAEKSENGDSEASNPDNKTSLRMYQQTVTGISQISFSADGSVSPKKPSSIPEVAKQRELSGTLEDADAKINKQLSEAKTKELSGSDIFGPPPEIPARPLAARNMELQGNVDFSLPQRSVHTSVKVSNPAGGPSNISFSEEPVVKTAKKIHNQKFQELTGNNIFKEDVPASAEKSLSSAKLKEMSGSDIFADGTPAPREYLGGIRKPPGGESSIALI

SEQ ID NO: 229011 - protein, 218 aa, Zea mays
  Clone ID: MRT4577_140450C.1.pep
FGPRDVAAIKKRLPPRLRDTATSYEALTAAIWRARTAALELAPGEEVSLVVVANCRGVRGLGIPDGYYGNAVAYPVARATAGALGLGNAVELVREAKAAVTAEYVRSAVDLLARRRGCPPALATMANVFAVSDNRHAGFHRVDLGWGVPVFGGVVTTVFGASFLVPVSGSDGKEAVAVPIVLPRPAMDRFASEIEMTLTLTCHAAVGSAAPPPPRGRL

SEQ ID NO: 229012 - protein, 112 aa, Zea mays
  Clone ID: MRT4577_140451C.1.pep
MATPLIAGLAVAATALAGRYGVQAWQAYKARPIVPRMRKFYEGGFQPTMNRREAALILGVRETANAEKVKEAHKRVMVANHPDAGGSHYLASKINEAKDVLSGKTKGGGSAF

SEQ ID NO: 229013 - protein, 158 aa, Zea mays
  Clone ID: MRT4577_140452C.1.pep
GLRIGSKGGEGVLGRRRLRTRRGQLPPISAPSSSKAVLVCYSSNSMEKVYAIKTPHKKRKSQGELSNPKLPPLKCKFRKRLSCHRVESATTESLGYDCIFMNKTSVTDMVSTPEVLDSCESTIRLFGGCIELVDSKTGIQEQSLRKTIEIRTSASSRS

SEQ ID NO: 229014 - protein, 93 aa, Zea mays
  unsure (1)..(93): unsure at all Xaa locations
  Clone ID: MRT4577_140453C.1.pep
LCYCKARRPLEALRGLVKLHALVRSNIVRRQAAETLXCMHALVRVQARARACLAIRSKHDVDYTDPTYAGTIRSGGCSKHARTDLEENSTQDS

SEQ ID NO: 229015 - protein, 55 aa, Zea mays
  Clone ID: MRT4577_140454C.1.pep
FFFFFFLNPNQSPMPLELGQISRLHLICPTVTGGERKLVPVHTNTHQLMNWHRTY

SEQ ID NO: 229016 - protein, 133 aa, Zea mays
  unsure (1)..(133): unsure at all Xaa locations
  Clone ID: MRT4577_140455C.1.pep
EYRSNSGATKANKILSMLMLLALSGCVAKANIFPQYSQASIDDFITPYLPYNDRXVCENLFFFPYRLQQAIATSNIPLXPLVLEQSPDLSLVQXIVXQTIRAQQMQXLELTEINQVALAXNLSAYSEERQWVA

SEQ ID NO: 229017 - protein, 76 aa, Zea mays
  Clone ID: MRT4577_140456C.1.pep
KAAIGAAKGLSWGHDAEYQVIYRDFKASNILLDSEFNAKLSDFGLAKAGPTGDRTHVSTQVMGTRGYAAPEYVATG

SEQ ID NO: 229018 - protein, 105 aa, Zea mays
  Clone ID: MRT4577_140457C.1.pep
LSWLGGLSSTPQVLGLTPRGNEFQAVVKKIPSSIPTPKHRSKAQPRSWSFSHGLRCRCVWVGQGFGGFLDLREKVFFLTQCPGAVLPPAGRVFLESLATTMTVFH

SEQ ID NO: 229019 - protein, 44 aa, Zea mays
  Clone ID: MRT4577_140458C.1.pep
NSNCAQLRTKMAWTGQGGLSFKKRTAHSHHTDEEKALTLNRLIA

SEQ ID NO: 229020 - protein, 57 aa, Zea mays
  Clone ID: MRT4577_140459C.1.pep
LSAGGASAAESRVGVRRRAPWGWTYTPGGTDQHVSPCRQAKSEQMLRQRKRAKRIFY

SEQ ID NO: 229021 - protein, 105 aa, Zea mays
  unsure (1)..(105): unsure at all Xaa locations
  Clone ID: MRT4577_14045C.1.pep
KKKLLCLTNFFTLLGMIPMLNTIYKGMLGTGAXLNSSIIPFASKRVFPRNITTRQFNFRGVEGDTFWAGRRHICFLEGVFFQGASCSSQKSLSLPTGSPLCTYPL

SEQ ID NO: 229022 - protein, 113 aa, Zea mays
  unsure (1)..(113): unsure at all Xaa locations
  Clone ID: MRT4577_140460C.1.pep
AIGRDPXTWERPEEFVPERFLGGGAPTNVGFKGQHFXKLLPFGPGRRMCPGIAFPEGNPQMALASFLYHFDWEVNRGQNREGTFSLDMTQMSGITVHIKSGFPLVTKPWSGSP

SEQ ID NO: 229023 - protein, 152 aa, Zea mays
  Clone ID: MRT4577_140461C.1.pep
MGETRSWSSLLVHILVIALCLTAFGFAIAAERRRSTGSIVTDINNSTYCTYDSDISTGYGVGAFLFLLSGQSLLMGVTKCMCFGQPLAPGGSRAWSIIYFVSSWITFIIAESCLIAGATKNVYFYMYYTKSTRQAAKKTNKATANVGMAGYA

SEQ ID NO: 229024 - protein, 57 aa, Zea mays
  Clone ID: MRT4577_140462C.1.pep
FVGPWLPSAFPVCPVFCLPPCQPHRSVPLIFALVRCGLGLYIASEYMVRWASACAFT

SEQ ID NO: 229025 - protein, 191 aa, Zea mays
  Clone ID: MRT4577_140463C.1.pep
MGETRSWSSLLVHILAIALCLTAFGFAIAAERRRSTGSIVTDINNSTYCTYDSDISTGYGVGAFLFLLSGQSLLMGVTKCMCFGQPLAPGGSRAWSIIYFVSSWITFIIAESCLIAGATKNAYHTKYRHMIYAGSWTCDSLRKGVFISGAVFVVLTMTLNVYFYTYYTKSTRQAAKKTNKATANVGMAGYA

SEQ ID NO: 229026 - protein, 114 aa, Zea mays
  Clone ID: MRT4577_140464C.1.pep
VLCHYLRFETGHKPNTFIEKYIHVRHILFFFIVLCNSLVSYSFIHAYGYLTAIFGFGITWLLGVYIWLWKSTFNLTHMHFPEEIRPKYDKTNDNAEDFNELLTYKSLLKKDSKN

SEQ ID NO: 229027 - protein, 36 aa, Zea mays
  Clone ID: MRT4577_140465C.1.pep
WRRATMVLLPIAPAFFIALLGNETCRSMVAEIPARP

SEQ ID NO: 229028 - protein, 68 aa, Zea mays
  Clone ID: MRT4577_140466C.1.pep
RFPKKKKKKKIKKKKKKKKKKKKKKKKKKKKKKKNKKKKKGAGGFKGPKFTSPGGQQIIFFIGPPKLN

SEQ ID NO: 229029 - protein, 86 aa, Zea mays
  Clone ID: MRT4577_140467C.1.pep
QSKPRRWTLCCPAHQMGSCRMGATARDGAVDARGESWEAGSLYVCDGSVLPGAVGVNPMVTIQSVAYCLATGIADSLRRGPVSRKD

SEQ ID NO: 229030 - protein, 36 aa, Zea mays
  Clone ID: MRT4577_140468C.1.pep
AHACADAWEMIHFTQSSERPRLYRRPTKAIMNPRAA

SEQ ID NO: 229031 - protein, 95 aa, Zea mays
  unsure (1)..(95): unsure at all Xaa locations
  Clone ID: MRT4577_140469C.1.pep
MYTMVARDKHHHHHLFHHKKDEEQLAAGGYGXSPXYTEATVTGVGSTGENESDXYNKEEKEHKHKQHLGEASAIVDGAFSLYEKHEAKKDPEHAH

SEQ ID NO: 229032 - protein, 80 aa, Zea mays
  unsure (1)..(80): unsure at all Xaa locations
  Clone ID: MRT4577_14046C.1.pep
ETHQRRGEVGKGPKKKGNKKGTDPKKDNRKHLKAEPKDGSEEAKNTADVVNERSMEITRTLENHPINAKRAXEGKNKQMP

SEQ ID NO: 229033 - protein, 135 aa, Zea mays
  Clone ID: MRT4577_140470C.1.pep
MSRSLGIPVKLLHEAAGHVVTVELKTGEVYRGSMIECEDNRNCQIENITFTAKDGKVSQLEHVFIRGSRVRFMIIPDMLKNAPMFKRLEARIRGKGSAIGVGRGRAVAMRARAAGGRGGGPPVGGGRGGAPPVRR

SEQ ID NO: 229034 - protein, 136 aa, Zea mays
  Clone ID: MRT4577_140471C.1.pep
EWLSLFRWCFFVCCWGFMGPLPCGSLISLGRRSSVSYFMGCRLARVRPFSVRGFVCLCWCTFVWFGPAPFCICPSVSRCGLCCGGFSFCISVLWMSCLCAGGLLTPGVVHMTPPVCLRALCAMNFLGMSLEPNVLA

SEQ ID NO: 229035 - protein, 90 aa, Zea mays
  Clone ID: MRT4577_140472C.1.pep
LYLSRRSRHEYAKANSLVDQALGSIKTVYSFTAEKRIIQRYTAILDKTIKLGIKQGIAKGLAVGFTGLSFAIWAFLAWYGGRLVVFHHVT

SEQ ID NO: 229036 - protein, 76 aa, Zea mays
  Clone ID: MRT4577_140473C.1.pep
GRDQKHFHLHGSFSAYGCNSTICLRTHLVNDVRSVAAPGDFFVSALDFADQSLPVYPIPTISRTPGRRGSLSMALM

SEQ ID NO: 229037 - protein, 68 aa, Zea mays
  Clone ID: MRT4577_140474C.1.pep
RYGYAVSHSPVSLSLLSASLSRTRVHLAAFSKCDQMAPLGDGGAAAAALSNNLGDVVRRDADRLRSRR

SEQ ID NO: 229038 - protein, 89 aa, Zea mays
  Clone ID: MRT4577_140475C.1.pep
PARTCRDLRLSHPEWSSGYYWIDPNQGCTMDAIKVYCDSTTGETCIRAQPENIPAKNWYRSSKDKKHVWLGETINAGSQFEYNVEGVTS

SEQ ID NO: 229039 - protein, 198 aa, Zea mays
  Clone ID: MRT4577_140476C.1.pep
MSHARASPLWRCPLPGTHPHKASASPIRREPPTARPQGACACSRCSFLMATACHLAAPLGLAPLPRGCASAGVVAVVRCARSSGSKIPRGVAVRATSGGEGATEEVPEIVKAAQDAWDKVEDKYAVATIGVAAIVALWTVVGAIKAIDKLPLLPGVLEIVGIGYTGWFTYRNLVFQPDREALIGKIKSTYKEITGSSN

SEQ ID NO: 229040 - protein, 130 aa, Zea mays
  Clone ID: MRT4577_140477C.1.pep
ILTSSLVSADAAVGLPCPEDAPVHFSHQLSRESGRTSDGTPRELPSPLTLHDGDQHQLSLHEYLHAFPMHQERDLPHAAVRHPRKGRHPDPRHDRESLTSSIIDVTAATKRKRACTERILQNTLESTPML

SEQ ID NO: 229041 - protein, 84 aa, Zea mays
  Clone ID: MRT4577_140478C.1.pep
RLKGPKLNNGGKQTKLNTPRPKKGLNKKKRQTWGGAPQKGTNFKGLPKNGGGQGAPHYRGHPGRGETGPAATGGKKRGGLTGGV

SEQ ID NO: 229042 - protein, 65 aa, Zea mays
  Clone ID: MRT4577_140479C.1.pep
PTSILGNRSYPFRVPKAHGKPIKNPGKLSPTPFQLPHHGQTPSTQLVWPPVYIDITRPPKPPSNP

SEQ ID NO: 229043 - protein, 62 aa, Zea mays
  Clone ID: MRT4577_14047C.1.pep
YVHGRLHESALEASSEGNTYINSCLRLNEEMRGLESLPMQLYILRKNVDSLDLAYIQLVRLP

SEQ ID NO: 229044 - protein, 82 aa, Zea mays
  unsure (1)..(82): unsure at all Xaa locations
  Clone ID: MRT4577_140480C.1.pep
RVRFCFRCRWVPCSFVVRAAGCPCLSLAVASLLVPLRRACVSLSSAVVCRRRRLPLVFVAPVVGCLGWGXLCCRGRRGGRSV

SEQ ID NO: 229045 - protein, 71 aa, Zea mays
  Clone ID: MRT4577_140481C.1.pep
CKELKQDLVSRHHGEASGVRIALTTWIRSSGGLCPEVCALPSSCRGRATSPHPVGSTSNVKLDRELDLEPN

SEQ ID NO: 229046 - protein, 103 aa, Zea mays
  unsure (1)..(103): unsure at all Xaa locations
  Clone ID: MRT4577_140482C.1.pep
RPDATMYTVLIDXYCHRRKLQDAARIMDEMETAGVQPNEDSYSVVVKATARRENPHXACDLAREMLEAGEREIAMEPFLPVLVIKCSTHHLEPSSHEHEHMFT

SEQ ID NO: 229047 - protein, 725 aa, Zea mays
  Clone ID: MRT4577_140483C.1.pep
MSPPAPAAAAAAPPRTVASAVLRVQMALLDGAAVSSEALIHAAASALLSRADYDDVVTERTISDACGNPACPNPLPSSSAAATGPRFHIALSEHRVYDLEEARKFCSERCLVASKALAASLPHDRPYGVPLDRLAAVVALVEGAAAGDGSGLGFQGLDGNGKVEDGGRKVEIKEKQVAGAGEVLLQDWVGPSDAIEGYVPRHDRSAHGQKPQVQQNEGAGPELSRTENVDYGAAAPGEDGMTSSPSLVKTHVSSEVIVERMGSLVLGENTRTPRKKKTKTPSKMLEQEEDNSMLSSCISDSIAKQLEDVVLEERKGSQKNKMSKASSRAQKGKSTKRPASTNMEENAMNQYNYLSSSVLVDNHPSSSQSSEKDSTQAYSEQLCEEFSEAVNIGNDETSDEKMRPAWKSSLKVAGSKSSRQSVTWADENGSVLETSKAYESPSSSIKRPEEGIDNSLRRASAEACAAALVEAAEAISSGTAEAEDAVSNAGIIILPDMLNQQEHDNGKNSGGDDDPEIDRDVIKWPKKPVLLDTDLFEVDDSWHDMPPEGFSLTLSAFGTMWAALFGWISSSSLAYVYGLERGSVEELLIANGRECPEKTVLKDGLSLEIRRALDSCVCNAVPVLISNLRLQIPVSKLEITLGYLIDTMSFVDALPSLRSRQWQAVVLVMLDALSVHQLPALAPVFSNSKLVQKMLNAAQVSREEYDSMVDLFLPFGRSVQAITPM

SEQ ID NO: 229048 - protein, 46 aa, Zea mays
  Clone ID: MRT4577_140484C.1.pep
ASYLDCGERDSIAVTCSSRSPAISAYRQSRDPHQSGPVLARYSGRP

SEQ ID NO: 229049 - protein, 186 aa, Zea mays
  unsure (1)..(186): unsure at all Xaa locations
  Clone ID: MRT4577_140485C.1.pep
AALFGWISSSSLAYVYGLERGSVEELLIANGRECPEKTVLKDGLSLEIRRALDSCVCNAVPVLISNLRLQIPVSKLEXLWFSLMLVADSYIGGXHDETTPCLYQGYLIDTMSFVDALPSLRSRQWQAVVLVMLDALSVHQLPALAPVFSNSKLVQKMLNAAHVSREEYDSMVDLFLPFGRSVQAIT

SEQ ID NO: 229050 - protein, 50 aa, Zea mays
  unsure (1)..(50): unsure at all Xaa locations
  Clone ID: MRT4577_140486C.1.pep
PRPEKFQVSPGASGPPSLGKETAKPANRLAGAPPSSATWVQXLLGIEKQC

SEQ ID NO: 229051 - protein, 44 aa, Zea mays
  Clone ID: MRT4577_140487C.1.pep
SCKNLYYHTISSRVHVHNMQVSYICICVPCWCAAPIILSKSYNL

SEQ ID NO: 229052 - protein, 96 aa, Zea mays
  Clone ID: MRT4577_140488C.1.pep
ALFFDLTCSVTALFFGGKKRKSPVCRSLPHVPQPPALSQPMSHAATSLLCGTNASVASLPPSAVLCLLCGRQPKIITGLEHHQPHGDKYGLWKPTL

SEQ ID NO: 229053 - protein, 139 aa, Zea mays
  unsure (1)..(139): unsure at all Xaa locations
  Clone ID: MRT4577_140489C.1.pep
GTTRAGRDKKGSPFSKLLSKWPXWALICANAMHSWGYFVILSWMPVYFKTVRLHSASIFLSIXLLFPVFNLILLSWXQIYHVNLREAAWFSALPWVMMAVLGYVAGVVSDMLIRNGTNITLTRKIMQVCCFNKNSSASQ

SEQ ID NO: 229054 - protein, 73 aa, Zea mays
  unsure (1)..(73): unsure at all Xaa locations
  Clone ID: MRT4577_14048C.1.pep
DSQFMSXXTNKQITLKNFXPCAENIKTPADLIQYXKRHKVIAQDFYXXACSSQKDGTSEGPNLFLKEKKVFLA

SEQ ID NO: 229055 - protein, 44 aa, Zea mays
  Clone ID: MRT4577_140490C.1.pep
TGSSLPDKNWSGAEGCPVAYLKGLPTVYAGIVSGRQGLHSLRWP

SEQ ID NO: 229056 - protein, 75 aa, Zea mays
  Clone ID: MRT4577_140491C.1.pep
PPWPNPARTPCPVPPPRPPRRPRPPRVPNPAPMPRPLPRPTPPPQPAPCPLPPPRPRPPLPNRPPMSCPIPPPVP

SEQ ID NO: 229057 - protein, 68 aa, Zea mays
  Clone ID: MRT4577_140492C.1.pep
MPGRDHSIHAQTPVLATGKGAHAYKLAECDTLVTCPTGCIAHDLDCYRRAQIGTRALRSLLRVRERPR

SEQ ID NO: 229058 - protein, 79 aa, Zea mays
  Clone ID: MRT4577_140493C.1.pep
SEITTTRMVRILAAATTRRVREEGLNKSSFYGFRPTFARFRRNQSWYGCKLAPLWRRWNVWYYALNKFLLMSHLLTQPH

SEQ ID NO: 229059 - protein, 96 aa, Zea mays
  Clone ID: MRT4577_140494C.1.pep
EDACVNYIGSVRIIVLPHVDHFIDSRYLEIAWRHSHSHVHPDLQCVSFSDQVAYCGSHMVSWSWQVTSGDISVSSTGQRRRGATPQLRRGGCRRRS

SEQ ID NO: 229060 - protein, 44 aa, Zea mays
  unsure (1)..(44): unsure at all Xaa locations
  Clone ID: MRT4577_140495C.1.pep
GKHPLIXSGGTLXIEKFEXPEQPNXGGGGGGVCLSFVISVHASS

SEQ ID NO: 229061 - protein, 120 aa, Zea mays
  Clone ID: MRT4577_140496C.1.pep
MTAILERRESESLWGRFCNWITSTENRLYIGWFGVLMIPTLLTATSVFIIAFIAAPPVDIDGIREPVSGSLLYGNNIISGAIIPTSAAIGLHFYPIWEAASVDEWLYNGGPYELIVLHFL

SEQ ID NO: 229062 - protein, 60 aa, Zea mays
  Clone ID: MRT4577_140497C.1.pep
MAAHKRLHDGFEQDPDQPEKKRMERSVSFSTVIREAMVMKQVQSVFLVLEPLLRRVVQEE

SEQ ID NO: 229063 - protein, 207 aa, Zea mays
  Clone ID: MRT4577_140498C.1.pep
MDTVSQSEHLCYVRCTYCNTVLAVGVPCKRLMDTVTVKCGHCNNLSYLSPRPPMVQPLSPTDHPLGPFQCQGPCSECRRNQPLPLASPTSTDLTPRMPFVVKPPEKKHRLPSAYNRFMREEIQRIKAAKPDIPHREAFSMAAKNWAKCDPRCSTTASTATSNSAPEPASRVVVPTPHVTEPRFDLEDRAKEHVIESFDIFKQIERTI

SEQ ID NO: 229064 - protein, 68 aa, Zea mays
  Clone ID: MRT4577_140499C.1.pep
DNEGHRDCGRNTEISYPTSICLSHYKSRRQPPRNLYSYPLSEAAIRLAFCFLDFVVSKNGDNANFGTA

SEQ ID NO: 229065 - protein, 51 aa, Zea mays
  Clone ID: MRT4577_14049C.1.pep
ENFRVAWPGGITWGPLKGPPLFFFFFFFFFFFFLVFFFGLSHTSIISYVFF

SEQ ID NO: 229066 - protein, 75 aa, Zea mays
  unsure (1)..(75): unsure at all Xaa locations
  Clone ID: MRT4577_1404C.1.pep
YDRYSSGHKKKKKKKKKKKKKKKKKKKKKKKKKKKKKKKKKKKKKKKKKXGGXGGKRKXFLFSGGPWGPLGKLLE

SEQ ID NO: 229067 - protein, 200 aa, Zea mays
  Clone ID: MRT4577_140500C.1.pep
MDMVSQSEHLCYVRCTYCNTVLALQVGVPCKRLMDTVTVKCGHCNNLSYLSPRPPMVQPLSPTDHPLGPFQCQGPCNDCRRNQPLPLASPSSTELSPRMPFVVKPPEKKHRLPSAYNRFMREEIQRIKAAKPDIPHREAFSMAAKNWAKCDPRCSTAASTETSNSAPAEPRVVPTPQLTEPRFDLEVLQSLLPSLFSVDK

SEQ ID NO: 229068 - protein, 74 aa, Zea mays
  Clone ID: MRT4577_140501C.1.pep
TINTGGLYIQENLFFMFPCLYKKQRGLKEIKFKRKWKSTFLVKCLALQHLGGCRTHFSLSFRKRFLFLLTPCQY

SEQ ID NO: 229069 - protein, 127 aa, Zea mays
  Clone ID: MRT4577_140502C.1.pep
AGLVATLHAFTFGDPDMSGGNFYLPNVISEAAPLTTVRHVAADMFASMPSGDSILMKAILHEWSDAHCATLLKNCYDALAANGKVIAVECVMPVNTDVTDKAHGVLHVDMIMLVHNLGGNEPYEREF

SEQ ID NO: 229070 - protein, 54 aa, Zea mays
  unsure (1)..(54): unsure at all Xaa locations
  Clone ID: MRT4577_140504C.1.pep
QNPLKXILIDLTSPPPPPPLXALPRVMVCSRSVLWFRRNAKPKVVFSKTPPHGV

SEQ ID NO: 229071 - protein, 106 aa, Zea mays
  Clone ID: MRT4577_140505C.1.pep
YDSHSSAMFGCRSRGPGTPSFVLKLGGWGPADPWTEGPASGALVLSSGEGEWTLELLLAPLPFVPESPGSPPPGLLSYLLRLRSVGVLPHLHGEVFDDDPQFLGSI

SEQ ID NO: 229072 - protein, 41 aa, Zea mays
  Clone ID: MRT4577_140506C.1.pep
VRMRIVSEEDRIGLRYSNSMPFFDAQKPIRSQRNHHVSCQH

SEQ ID NO: 229073 - protein, 91 aa, Zea mays
  Clone ID: MRT4577_140507C.1.pep
MATAVSTPADLSPTPAPRRRGRPPKNPAPAEAPGSPADQAEVIGDYERERDARIRENMERMQKLGILDLAHTLSHCAAASGRGTGSGRWRR

SEQ ID NO: 229074 - protein, 186 aa, Zea mays
  unsure (1)..(186): unsure at all Xaa locations
  Clone ID: MRT4577_140508C.1.pep
PAHARRSYQAGPRSDREVTPQGLALIETTGXKKKQDNGVWFDDSSAPVRAQTIDQLHLVQRKRSEPSTPKRSETTTPIKGGAHSPLVVAICEEERHTLQMQSMSAXLACLTRETGPNVVKGDPAAXGDAVVQGAPLTPRAHQQLRXPMSALIAYSDSLIKLIYVFNNLYXVEMFELAINYEKGLFI

SEQ ID NO: 229075 - protein, 180 aa, Zea mays
  Clone ID: MRT4577_140509C.1.pep
TGTGGPRVIRFPPTGIPVEQARVGGPPGALVVAFSSPVPYTALRAEVYAPFVKAFYPAAPGPNFPWMSRVPPVAPFDRCYDSPKLPQSLFGYPVPQINVILEGGQKFPVVGGNSMGQVNGNPACLGFVQAPGQTPAAVIGGFQLENPLFLLHVDKKQLGFPPFLNPIGVSCSSFNFPLAR

SEQ ID NO: 229076 - protein, 127 aa, Zea mays
  unsure (1)..(127): unsure at all Xaa locations
  Clone ID: MRT4577_14050C.1.pep
ALGLFFFFLWKPLGISQKPVTILRYPLHPGMKRSSTSGSTSSCPAGLARPGVSLGKLSPAFHPCXAFFSFLPREDSLVQGAQRKNKKKNDVPCKISGDPKRPFSGCPIFYVRRGFWFLFASSVCSFP

SEQ ID NO: 229077 - protein, 208 aa, Zea mays
  unsure (1)..(208): unsure at all Xaa locations
  Clone ID: MRT4577_140510C.1.pep
RLENSFYEAPVFADPNGRGLCALLRPXIYSISDHARCTVVSELSNEDFDSYVLSESSLGGYPYKILIKTCGTTKLLLGIPRILELAKELSLPLVATKYSRGTFIFPDAQPSPHKNFVDEVTFLNHFFDGLRFGGNAYVIGDSAKHKQKWHVYYATTEHPXELVVTLEMCMTRLDKKRAYVFFKTSIDGYTSCAKDMTKPSVASSRSAS

SEQ ID NO: 229078 - protein, 38 aa, Zea mays
  Clone ID: MRT4577_140511C.1.pep
RKTRWRLGLVSRLPTGSRKSMCFCLTYRVLTTIIYTPL

SEQ ID NO: 229079 - protein, 121 aa, Zea mays
  unsure (1)..(121): unsure at all Xaa locations
  Clone ID: MRT4577_140512C.1.pep
MMQATWFGGNAYVIGDSAKHKQKWHVYYATTEXPEELVVTLEMCMTRLDKKRAYVFFKTSIDGYTSCAKDMTKPSVIVIAFYLLFLLNSSFKTKNIFKNLTRSQASTMSRLACMIWLVLVC

SEQ ID NO: 229080 - protein, 50 aa, Zea mays
  Clone ID: MRT4577_140513C.1.pep
SCFSLTDQVKIVCGLTKATSGFHGEIWKRWKFGPLTFSKLAEGKNFINLF

SEQ ID NO: 229081 - protein, 93 aa, Zea mays
  unsure (1)..(93): unsure at all Xaa locations
  Clone ID: MRT4577_140514C.1.pep
SLKVKGPVEYVPXCFIXQKDQVPVXQKMRVVFLDAERPSPQMGKLKRQLXNKNSPLXARKKPPKGNGPRIFCXGLFIFEWKEPKKRFLSFPQI

SEQ ID NO: 229082 - protein, 47 aa, Zea mays
  Clone ID: MRT4577_140515C.1.pep
YGLKTLYDQMGPICRFTRLLKLDEGERRNIAYLSIQEGSCRLDSPMK

SEQ ID NO: 229083 - protein, 111 aa, Zea mays
  Clone ID: MRT4577_140516C.1.pep
GRSWPKPPPNSSTPRFFALTKTPKPGPSLKKFLKPPPPFKKGGGGAKKKGPPAFLFSKGPPSFPPKKFSPLGPSPTPNGPLFFPLSKNGYCFFFSPRGGGNFFIISPPPLL

SEQ ID NO: 229084 - protein, 154 aa, Zea mays
  unsure (1)..(154): unsure at all Xaa locations
  Clone ID: MRT4577_140517C.1.pep
KPKKEPGNPDLKRKDKKGEKGSQTNKLKKKGGKGGQPKSPGNRTPPGPTGFPPAHGPTGKPGPGPPRGXPDGAPCPPGGGTKPGPSHTKKPGRVGGPPGPNKKPGRAAPFAGPGSEPGKPATCAPSXPPAPREETGXRGGGGYKGPGGPPFGGG

SEQ ID NO: 229085 - protein, 67 aa, Zea mays
  Clone ID: MRT4577_140518C.1.pep
KSFGFPMTLWPLKNGFDHPYSSQNLFFSSRKGPQKSHFKTIVPPPPPRPKYKNVFNPPACRIKSNRF

SEQ ID NO: 229086 - protein, 254 aa, Zea mays
  unsure (1)..(254): unsure at all Xaa locations
  Clone ID: MRT4577_140519C.1.pep
PTSATSRNLGRDSAYSSRHRHNRPQPRERDPQIERPSPIDFCAPRARGGDGTVLGDLPENCVVEVLLRLDPLEICWMARLSRTFHDAASGDGVWESKLLTNYVRLLAVAAAGDGEAGQAAGSAPEAEPLPKKELYARLCRRNRFDGGXKEFWLDKGGGGLCMSISSRALSITGIDDRRYWNFIPSDESRFRTVAYLSQIWWFEVRGEVEFFFPEGTYNLFYRIHLGRPFKRNQRSSGRDHQVAHRCPWANTHSQ

SEQ ID NO: 229087 - protein, 94 aa, Zea mays
  unsure (1)..(94): unsure at all Xaa locations
  Clone ID: MRT4577_14051C.1.pep
QLQAVFVNVNGWEPRAVTIYTWFAXTMCLWAFVPQAMAPKLWGVPLVPWLPSACISINIFLARSIDYNSFMRYTFWTGGLLVYYMLIWLYACYD

SEQ ID NO: 229088 - protein, 148 aa, Zea mays
  unsure (1)..(148): unsure at all Xaa locations
  Clone ID: MRT4577_140520C.1.pep
TPNPPRRVGSRGKKKKRKAAAGGENSGGEGEGEXXXRXXXGHKGKXGHEXXEXEXRPDGKXRXAGGANXKNDTXXRKEXXXXPPXPREARRXXQEXDXXKEDDSNXPEPDRXGRQEPEXXXGNEHXXXTXXKXGXXXXGQPSKDPEGP

SEQ ID NO: 229089 - protein, 26 aa, Zea mays
  Clone ID: MRT4577_140521C.1.pep
RAPSIGDEARRASRVAGFQGKRSCSV

SEQ ID NO: 229090 - protein, 63 aa, Zea mays
  Clone ID: MRT4577_140522C.1.pep
RQHHPWAMAETLNNPNTAAALTTDGLITTPKTEHQVGGALLLDIGICKGATILHLFSGKNQTL

SEQ ID NO: 229091 - protein, 83 aa, Zea mays
  Clone ID: MRT4577_140523C.1.pep
WEGPHWSHLGGFYYFLTMSSGGFFSLVGTGLLGAPEVQGPFVLIQPWSPMIPKKKRPAGFSGVLVNSGPPFSKILGSGGKKTG

SEQ ID NO: 229092 - protein, 35 aa, Zea mays
  Clone ID: MRT4577_140524C.1.pep
IGPYKIIGPFINLVQPKTLQKGQGNYYPTTSNKKR

SEQ ID NO: 229093 - protein, 79 aa, Zea mays
  unsure (1)..(79): unsure at all Xaa locations
  Clone ID: MRT4577_140525C.1.pep
AVVTTQSTRDAGMAYHHIIQSHHHPSPQPVXMVAGNFGYEYADPTRPQVYYSQAAAAPPTLPPQYQPIVSPDAGQAEKH

SEQ ID NO: 229094 - protein, 69 aa, Zea mays
  Clone ID: MRT4577_140526C.1.pep
NQNFVHDLFGRGVEKNKVALSIFEKKKKKKKKKKKKKKKKKKKKKKKKKKKKKKKKKKGRPVLKEPKLK

SEQ ID NO: 229095 - protein, 67 aa, Zea mays
  Clone ID: MRT4577_140527C.1.pep
FSRPLTRGWKDELVKRASGLVGSSRMVYDADLGTLIIPQAKDRLCKVGQRGVDSGSPLLLDGRKILV

SEQ ID NO: 229096 - protein, 104 aa, Zea mays
  unsure (1)..(104): unsure at all Xaa locations
  Clone ID: MRT4577_140528C.1.pep
LVCALCDNGGKIVRGWSTSLATNSSHGEGAFCLYLYLLCWSTGQTINGQHRHHLSGKLEVTEIFNFSQDDLLTEGMMILDTHXEVFVXMGQCVETKEKQKAFEI

SEQ ID NO: 229097 - protein, 100 aa, Zea mays
  Clone ID: MRT4577_140529C.1.pep
AHAIDQLSRLSQCDRWIEPYKCHLDLGLDRYGHKTDLTCLILWVDVQGNDTLCSFDKLVIVKCTYCNLRNQSNACDLQARSNRQEAATTAMAASASLSAL

SEQ ID NO: 229098 - protein, 127 aa, Zea mays
  Clone ID: MRT4577_14052C.1.pep
SSRRTTGGHVSHSAPTRRTWWRSAPWGRLGAGRRPSPTLSHRRPGVVSCIPRARGQSFATESRARSARRAARSVSLASSAALSRSSSPRLETAIELVTLSSCRTSPASPQTRAIGVSGWSPVAMLDR

SEQ ID NO: 229099 - protein, 43 aa, Zea mays
  Clone ID: MRT4577_140530C.1.pep
DPDMLSLLNFKSEIFFKDNLYKKFCCNIFFMKGLSLAPFLINP

SEQ ID NO: 229100 - protein, 144 aa, Zea mays
  Clone ID: MRT4577_140531C.1.pep
MAGRNNSSGKLLGIILPIMFVVVVTAIVLFVCKKRRYRGIKLPHGTHMAEDFESIKSTLLSLSSLQVATSNFDENNKLGEGGFGVVYKGDLSGQQVAVKRLSKGSGQGLEELKNELVLVAKLHHKNLVRLEGFCLEDGERLLGY

SEQ ID NO: 229101 - protein, 81 aa, Zea mays
  Clone ID: MRT4577_140532C.1.pep
HPDHRGNKTLTGVGNSPFETKTKNKPPPVSKSTLFFLPPGRDKKKELFGEKTPPSGCSLLFIDGSGLGPGGNFICWRAFPQ

SEQ ID NO: 229102 - protein, 154 aa, Zea mays
  Clone ID: MRT4577_140533C.1.pep
MSSWLHYSDGQRRSWKRSWAARALSSCSLPPPGLLAFFAIVVFFLAVSGYVDYKAIERRAEIGARVFAAPLALATVFLLFVALSWRRRYWATRRRKAAHHYPWSSSSSSQHEADAVAPWGVLAAVAILLLMMTFQQSVHSMWFRPLWDSDYYDP

SEQ ID NO: 229103 - protein, 135 aa, Zea mays
  Clone ID: MRT4577_140534C.1.pep
NTLASNPSVLHTELHVCPVQGGCAWCTDLLPCLVWLLHWRMDSKRRLQGPFSLRITNESGETLVAYQVIPANWAPNSYYRSNIQYEAFGSAAGQATGSAVGLVISSAARLHTLITRIIGLICLVLLYHLQGIEVP

SEQ ID NO: 229104 - protein, 107 aa, Zea mays
  Clone ID: MRT4577_140535C.1.pep
VACRAVIVLPVMIQDLQAVSWYHSGHGMQYQVRERHDLAPHRSVLPRVFSSQPLQLPLPPRTNQDHPCQRQRSPARVADSRKFPPQRVKEGKHIHGRLGLSDLQVRT

SEQ ID NO: 229105 - protein, 314 aa, Zea mays
  Clone ID: MRT4577_140536C.1.pep
MSVQSKVVALGALIFFLVSYGSCTRIVNFNASHITTDPYWVAARATWYGAPTGAGPYDNGGACGFKNVNLPPFSAMTSCGNQPLFKDGKGCGSCYQIRCVNHPACSGNPETVMITDMNYYPVAKYHFDLSGTAFGGMAQPGRDNELRHAGIIDIQFRRVPCIYPGQTVTFHIEHGSNPNYLAVLVEFEDGDGDVVQVDIMEANSGWWMPMRESWGSIWRMDSKRRLQGPFSLRITNESGDTLVAYQVIPANWAPNSYYRSNIQYEAFGSAAGQAAGSAVGLVISSAARLHTLIIRIIGLICLVLLYHLQGIEVP

SEQ ID NO: 229106 - protein, 127 aa, Zea mays
  Clone ID: MRT4577_140537C.1.pep
MSVQSKVVALGALIFFLVSYGSCTRIVNFNASHITTDPYWVAARATWYGAPTGAGPYDNGGACGFKNVNLPPFSAMTSCGNQPLFKDGKGCGSCYQIRCVNHPACSGNPETVMITDMNYYPVAQYHF

SEQ ID NO: 229107 - protein, 54 aa, Zea mays
  Clone ID: MRT4577_140538C.1.pep
LSAYVQSGTVDCNALNVWLPYHNNLSMILPRPSQHPNGLSSKPPRPLPEQIAIK

SEQ ID NO: 229108 - protein, 163 aa, Zea mays
  unsure (1)..(163): unsure at all Xaa locations
  Clone ID: MRT4577_140539C.1.pep
GGFETALNESVKNCKALAEAAEQKEADRVAMSEAISAFYRALGLDDVPSGSSPQSHLWALGGHVCSRLRGALHHDVRRAFAVLASHYDVDLERVSEGYCLPDEXEAALAEVQRLDAAVEGPSAVLASSFEVEVLLPVLPSEAGPDPAEGGNDAEGAVPPPADV

SEQ ID NO: 229109 - protein, 45 aa, Zea mays
  Clone ID: MRT4577_14053C.1.pep
FYISQLFPLLSHLQLPFFVWLHNIYLTDHSLPKQSLITKPLRLPG

SEQ ID NO: 229110 - protein, 336 aa, Zea mays
  unsure (1)..(336): unsure at all Xaa locations
  Clone ID: MRT4577_140540C.1.pep
MDLVKRRQHLALHLLSAIPGSSHCDAPDPLARAPPQTPLGHCRLLPTCSRHTPPLRSQIRWPQPQTRPRRRTSRPRXRAPSSAPHRPSLPQPPEXTQHSSHSPTRRKPRGAAXQNVAPAGSNSAATXARAPPQSPPSGLPRRSQRTGPAESPMPLCADPRLDLPADTRVDGLRLEEAQLSVALAPPTAHDGDDRSRSTSEARRQSVTPSQRRPATHGRLGLSRRPTSSVARATARPSTATATVGTVPPRAPPPMCRAISHQIHAKHPAAAILGAKPASGRPSGGGKGRGERICGRRRQGCGAPPWASRPGGGDAGASNPTTPQHSIITTDKGKSRP

SEQ ID NO: 229111 - protein, 128 aa, Zea mays
  Clone ID: MRT4577_140541C.1.pep
MQIFVKTLTGKTITLEVESSDTIDNVKAKIQDKEGIPPDQQRLIFAGKQLEDGRTLADYNIQKESTLHLVLRLRGGIIEPSLKALASKYNCDKMICRKCYARLPPRAVNCRKKKCGHTNQLRPKKKLK

SEQ ID NO: 229112 - protein, 67 aa, Zea mays
  Clone ID: MRT4577_140542C.1.pep
MAPKAEKKPAAKKPAEEEPAAEKTTAGKKPKAEKRVPAGKSAGKEGCEVKRRKMNGKTTVDTYKIYI

SEQ ID NO: 229113 - protein, 216 aa, Zea mays
  Clone ID: MRT4577_140543C.1.pep
MESATAAVRSASLARARPAPLVHGRARGAGRVVGAGLAARARRRALVAVASHQEHHEPLPPRAQEGGAVAVATQADEAEVHAIDAPAAAAETSSSQLAAGKTVRVRFVLKRQCTFGQSVCLVGDDPALGLWDLSNAFPLKWAESHDWTLEKDLPANKLIEFKFLLQDSTGKLHWQGGPNRSFQTGETAANTLVVFEDWDDVKNQKIVEGGEWRLLG

SEQ ID NO: 229114 - protein, 52 aa, Zea mays
  Clone ID: MRT4577_140544C.1.pep
IKSLEGVGVMIRVECFKFRVCFDKSGGTGALDVVVGVTQIVQFRLVLLGTSV

SEQ ID NO: 229115 - protein, 73 aa, Zea mays
  Clone ID: MRT4577_140545C.1.pep
IQNEMQFLKSTHAYSCWLYIELQGLLTRTFNYVKVNLPKSYPIFAGCGMDQSGDVSITHEEHDTLRIHSSVPS

SEQ ID NO: 229116 - protein, 126 aa, Zea mays
  unsure (1)..(126): unsure at all Xaa locations
  Clone ID: MRT4577_140546C.1.pep
QNNKKGGFSPLKKKGGGGQGTPLPRGQGPFDRALGLKGIPGLLVINSRVKGIGLGSGGSIXQGTTIGGLSEGNLVFKKIANHLNKGGSPFVRNTATMGGNIIMAQRLPFESNITTGLLGAGTKVTI

SEQ ID NO: 229117 - protein, 95 aa, Zea mays
  Clone ID: MRT4577_140547C.1.pep
SPLRVLQAPFVCAPSEAPPGLPPSGFSVRGSAPGVLWGLFLPWGFFGAGFSSGFRLWCSLLWVLLFPLCALASAFFFLRFLWGVCVRAVVQNCYP

SEQ ID NO: 229118 - protein, 80 aa, Zea mays
  Clone ID: MRT4577_140548C.1.pep
VLTWLGVLHRSRHGARQRPRLLRRLLCRRDAHLPDVVQSDAVQGSQPHGDITERAVTRARVASGHPVADTITRGSDVTPA

SEQ ID NO: 229119 - protein, 347 aa, Zea mays
  Clone ID: MRT4577_140549C.1.pep
HLPLPLSPPSSDLLAAADDRRRRCRCRCEPFVNLRCPVFNVAGVPIEWEEHYVGTEVDPRTESFLTWESLESVRRNKVGLKGPMATPIGKGHRSLNLTLRKELGLYANVRPCNSLPGYKTRYDDVNLVTIRENTEGEYSGLEHQVVRGVVESLKIITRQASLRVAEYAFHYAKANGRERVSAIHKANIMRKTDGLFLKCCREVSEKYPEIQYEEVIIDNCCMTLVKNPGLFDVLVMPNLYGDIISDLCAGLIGGLGLTPSCNIGEGGICLAEAVHGSAPDIAGKNLANPTALMLSAVMMLRHLQFNDKADRIHNAILQTIAGGKYRTADLGGKASTSEFTNAVCDHI

SEQ ID NO: 229120 - protein, 47 aa, Zea mays
  unsure (1)..(47): unsure at all Xaa locations
  Clone ID: MRT4577_14054C.1.pep
GDKVVAGEAGGFGAAWPRRRRRRCRGRGIEAAWXRAXGRWXDPEXGP

SEQ ID NO: 229121 - protein, 166 aa, Zea mays
  Clone ID: MRT4577_140550C.1.pep
LISCRRHPVLPPRLCLSISAARSPPLHALRPFLLVGAQLAVDEQRRTSSGGRDRRVTRANTAAITGRAERSRRGGRARSGELVGGDARYGPARPTQRSDLDEMTGAGFLTMLRPVPRQVSCVVVLFDDGGGRHAHQCPCAPTDVDCLRWAIAAACSSRRVDCLIGQ

SEQ ID NO: 229122 - protein, 44 aa, Zea mays
  Clone ID: MRT4577_140551C.1.pep
SWGFHLCIQRIKKKKKKKKKKKKKKKKKKKKKKKKKKKKQKKTK

SEQ ID NO: 229123 - protein, 365 aa, Zea mays
  Clone ID: MRT4577_140552C.1.pep
MALRRLLQGSVLPRIIGRDLAPAVAPFSTESGETIRATLFPGDGIGPEIAESVKQVFNVAGVPIEWEEHYVGTEVDPRTESFLTWESLESVRRNKVGLKGPMATPIGKGHRSLNLTLRKELGLYANVRPCNSLPGYKTRYDDVNLVTIRENTEGEYSGLEHQVVRGVVESLKIITRQASLRVAEYAFHYAKANGRERVSAIHKANIMRKTDGLFLKCCREVSEKYPEIQYEEVIIDNCCMTLVKNPGLFDVLVMPNLYGDIISDLCAGLIGGLGLTPSCNIGEGGICLAEAVHGSAPDIAGKNLANPTALMLSAVMLLRHMQFNDKADRIHNAILQTIAEGKYRTADLGGKASTSEFTNAVCDHI

SEQ ID NO: 229124 - protein, 87 aa, Zea mays
  Clone ID: MRT4577_140553C.1.pep
PEGLLPLKKGPNEGLGSPFAQLKALEGLFYGKPKWGPLGFPPRDIAHGSPPDQLAKGGVNPSPIPGGGFTILGQNKKALPIMAAPNG

SEQ ID NO: 229125 - protein, 47 aa, Zea mays
  Clone ID: MRT4577_140554C.1.pep
CCVEAMLNRVSSLRLEKASGISPVRFMPPIQRYVRLVSLENSVGTGA

SEQ ID NO: 229126 - protein, 83 aa, Zea mays
  unsure (1)..(83): unsure at all Xaa locations
  Clone ID: MRT4577_140555C.1.pep
SVGCEVDNEKMELLLSQLSGKDITELIAARMEKFASVPCGGRGVGVAXAAPAAGVVAXATEAXEEEKVEEREXSDDDMGSALR

SEQ ID NO: 229127 - protein, 313 aa, Zea mays
  Clone ID: MRT4577_140556C.1.pep
MALRRLLQGSVLPRVTGRVSAPAVAPFSTESGETIRATLFPGDGIGPEIAESVKQVFNVAGVPIEWEEHYVGTEVDPRTESFLTWESLESVRRNKVGLKGPMATPIGKGHRSLNLTLRKELGLYANVRPCNSLPGYKTRYDDVNLVTIRENTEGEYSGLEHQVVRGVVESLKIITRQASLRVAEYAFHYAKANGRERVSAIHKANIMRKTDGLFLKCCREVAETYPEIQYESHIIDNCCMTLVKNPGLFDVLVMPNLYGDIISDLCAGLIGGLGLTPSCNIGEGGICLAEAVHGSAPDIAGKVRSWNSFCCLP

SEQ ID NO: 229128 - protein, 240 aa, Zea mays
  Clone ID: MRT4577_140558C.1.pep
MKALWCGLSTEGGGRATVTLLRRAIQPTPTDLHRTQGHGRVRRCMARVPHTRSKLSQVTDGLRATARTRLSRQIYGGGGPSPKVPNDERAEAGMGSKDRPCVFIQLRGEKIGRVCSWPREDHGDSVVVRARLGEEDGDDTDPTAPPSRFKVVDLRRALLKIHTPKRYKQIFRGMLKKLNSAEVKFSWKAQLQLKKLNSAEVKFSWKAQLQLKKLNSAEVKFSWKAQLQLKKFSCFSTRTL

SEQ ID NO: 229129 - protein, 60 aa, Zea mays
  Clone ID: MRT4577_140559C.1.pep
ASTLIKTSLRSAHSLRLSELIPSFRLQLLRTHLRSIIIKTPLYKHISLLSRINTLAITVP

SEQ ID NO: 229130 - protein, 246 aa, Zea mays
  unsure (1)..(246): unsure at all Xaa locations
  Clone ID: MRT4577_14055C.1.pep
MVAKEAIPLLTPHRIGRFELSHRVVLAPLTRCRSYANVPQPHAAAYYSQRATKGGLLIAEATGVSATAQGYPETPGIWTQQQVDAWKPIVDAVHRKGALFFCQIWHVGRVSTNDFQPDGQAPISSTDKQITPDAESGMVYSKPRQLQTDEIPLIVDDFRRAARDAVEAGFDGVEIHXAHGYLLEQFMXDSSNDRTDEYGGSLENRCRFXVEVIDAIVHEMXADRVXIRLSPFVDYMDCFDSDHMHS

SEQ ID NO: 229131 - protein, 233 aa, Zea mays
  unsure (1)..(233): unsure at all Xaa locations
  Clone ID: MRT4577_140560C.1.pep
MAWNGRFGDDEEGSGLELSLSLPGYFSGSPTQAAAGFEDKADGGSAAAAAAGRAKGSNGFKARPAAAAPVVGWPPVRAFRRNLASASSKPSRDPPPXTEETSPRAAGGKAVEGGNKGLFVKVNMDGVPIGRKLDLAAHAGYDTLSAAVDSLFRGLFAAQAAGPGGERQAVAGXERXGGGEHTLVYEDDEGDQMLVGDVPWQMFAATARRLRVLRSSDLNPSSLRAATRKRAAA

SEQ ID NO: 229132 - protein, 80 aa, Zea mays
  unsure (1)..(80): unsure at all Xaa locations
  Clone ID: MRT4577_140561C.1.pep
VSSPISKTAAAAIXRVKVLIQNQNHIIKSRMLSKPYNRFFNFSIPTIKDXSFSSLWRGNTANVIRYFPTQAFNFSFKDYF

SEQ ID NO: 229133 - protein, 144 aa, Zea mays
  unsure (1)..(144): unsure at all Xaa locations
  Clone ID: MRT4577_140562C.1.pep
FRILIDGEGCLIFRDRICVPRNSELFQMILNEAHSSXYXVHLGSTKMYNDLKQLYWWRGMELPISKFVIKCLICXQVKAEHQVSSGLLQPIMILEXKXDKITMDFVSGLPLSPSKKDAIPVTVDRLTKSNHFIPVRTDYSFDKL

SEQ ID NO: 229134 - protein, 227 aa, Zea mays
  unsure (1)..(227): unsure at all Xaa locations
  Clone ID: MRT4577_140563C.1.pep
MAWNARFGDDEEGSGLELSLGLPGYFSGSPDQAAGFEEKASRGSAAAPPPPPPAAARAKGSDGFKARPAAAAPVVGWPPVRAFRRNLATSSSKPSSHGGKEPAASADGGNKGLFVKVNMDGVPIGRKLDLAAHAGYDTLSAAVDSLFRGLFAAQAAGPGGEQQAVAGXERXGGGEHTLVYEDDEGDQMLVGDVPWPMFVATARRLRVLKSSDLSPSSLRAARAAAEC

SEQ ID NO: 229135 - protein, 71 aa, Zea mays
  Clone ID: MRT4577_140564C.1.pep
IVGSRGRPRACDVERPRSGCGGRSRTAAGPAGGRRRGTGQSRGPPNGSASSPPPRDGGAWVGADAAHSGRR

SEQ ID NO: 229136 - protein, 54 aa, Zea mays
  unsure (1)..(54): unsure at all Xaa locations
  Clone ID: MRT4577_140565C.1.pep
GSGPWIFAVIDLGSLNGGXEERSRTLAELDDACIDWGFFWVENHGVDAPLMDEV

SEQ ID NO: 229137 - protein, 64 aa, Zea mays
  Clone ID: MRT4577_140566C.1.pep
FRSNPKNTDRIGARPITYEALELTKLSSTGSQFITGINSQACKSTHPTCTCSNARHAVSVCVLS

SEQ ID NO: 229138 - protein, 90 aa, Zea mays
  Clone ID: MRT4577_140567C.1.pep
VNEHKTCIYSIYLITAHEISRLACASNLPLDLIKVARQLLQQSCCSSKKARTNTSCSNSHGFSEAEQEDAHTSDPILRHQPHRGLHRLRR

SEQ ID NO: 229139 - protein, 106 aa, Zea mays
  Clone ID: MRT4577_140568C.1.pep
PRVRGRVGIAVSALALEWRFDESRRVLLDMLDCGRKPDMITYRTLLEEMCRAGRTEEAFEVLEELKGRKRGTLDQRMYSELLDGLHWISQPLQNNSQPALHKGSDD

SEQ ID NO: 229140 - protein, 55 aa, Zea mays
  Clone ID: MRT4577_140569C.1.pep
PIIWFLKNALRHIPALLWGIAMTPRGAKKNICQTVKGRNNLTAQGGIYLEGKQIN

SEQ ID NO: 229141 - protein, 141 aa, Zea mays
  Clone ID: MRT4577_14056C.1.pep
NPQLPRRSGDNKFRGVLGKGLASARRNLITVGIFSLVVNLLVLSIPIYLFDMSDRVLTSRSVDTLIKLSSIVILAIAAHVLMDMLRRFILMRIAVETKARLGGPVLSAAAKAAQNGSSREFQALADLQNMRAINTGPVLLT

SEQ ID NO: 229142 - protein, 164 aa, Zea mays
  unsure (1)..(164): unsure at all Xaa locations
  Clone ID: MRT4577_140570C.1.pep
TGEPQERPPTTNTPPSNPHPKQPHXXXASPKTPXPTPNRDTHXDTRKNTTPTGPKPXQQTTPQGPPHRPRRTEPTTTEQAQPTPRGKXQTEKPHPKXTGPPKDSGQTRKNKKPTTXKQPPPNPAQENPGTPEKRAPAKPPTPQKPPKRPQRPKHREPRQTTHTP

SEQ ID NO: 229143 - protein, 97 aa, Zea mays
  Clone ID: MRT4577_140571C.1.pep
MAAKGPSPTRRLLPQPPPPLAGVLASDGCGRVGGQGTGGGEENPPIRWRKGDLIGSGAFGQVYLGMDLDSGELLAVKQVSDGSSNATREKAQAHVTE

SEQ ID NO: 229144 - protein, 107 aa, Zea mays
  Clone ID: MRT4577_140572C.1.pep
YGCCNEAVSVSTMCPAPQRRLRCPVPCHCRSGRALCPRVSYSRNLQFAIVERHPLSTRIVTVCGRRSEPRRWTFFLVLSSASTKRRADEFDLDRNTLRTCGSRRSFR

SEQ ID NO: 229145 - protein, 90 aa, Zea mays
  Clone ID: MRT4577_140573C.1.pep
VHGFLMGDLDYQLPLSFSLVSGSTLRHSGALERPRSTLYFSGYALCLFDSSIPWERLTGSDPRNAHQEIMRYTVLVQELKRWGSYFICGK

SEQ ID NO: 229146 - protein, 79 aa, Zea mays
  Clone ID: MRT4577_140574C.1.pep
WIRLIRLSNAKDTLGTVYSVYHELYHRHIHPKLLSGLSCLEQIPYLALLPGRHHIQDDVYHRPWLLMSPLCSGLTRIAA

SEQ ID NO: 229147 - protein, 101 aa, Zea mays
  Clone ID: MRT4577_140575C.1.pep
LAVYERVFGPGKIKDLFEGEEKPEDQQQHQVEQGGEPGAEPGTQQPMQPGRSDTVNLAQDVMNQNTNQLDTEREMERHEDEKEDKEKKKKGFFSRFKRSNS

SEQ ID NO: 229148 - protein, 55 aa, Zea mays
  Clone ID: MRT4577_140576C.1.pep
MTGIQGTNYVLLDLDIRGMLSIISGTDLVLKQIWMNVTVGTAYCGQYGPLHDGVN

SEQ ID NO: 229149 - protein, 78 aa, Zea mays
  Clone ID: MRT4577_140577C.1.pep
TAPDPWWPCFRKVLSSFCIWWILNFFFGSNCFSHVRVKTIKVFLPKQLHGGFKKKKKKKKKKTQKKKKKKKKKKKGGR

SEQ ID NO: 229150 - protein, 51 aa, Zea mays
  Clone ID: MRT4577_140578C.1.pep
AARRPSRQLGSVTCLYTAPETHTPAVGSSVGLAARRGPPPWAFASTTDEVG

SEQ ID NO: 229151 - protein, 170 aa, Zea mays
  unsure (1)..(170): unsure at all Xaa locations
  Clone ID: MRT4577_140579C.1.pep
LGPRGGRIADASPGEPVVECTGQGVWFVEAAASCALADVNYLERPLLIPKEELLPRPPPEEKLEDLVLMAQVTKFACGGFAVGICFSHLVFDGQGAAQFLKXPPPSFTAFSFVTQVVEISPESIARIKDDFKDATGQTCSTFDAVTAXGXKXXXXXMXLPDXAEXRLXFA

SEQ ID NO: 229152 - protein, 471 aa, Zea mays
  Clone ID: MRT4577_14057C.1.pep
PRSRPAHLAPPPLISITHRPSTPVSHSPISQRPSNRHAHAPMEDSATNGHGVVTAVPASWNFEPNETLLGLPALSVRGVLTRVMAGMLPDGGRAVVRLGSGDPTAFPCFRTAPEAVDAVASAVQSGQYNSYSTSVGLEPARRSIAQYLSCDLPYKLSPDDVYLTSGCTQAIEILCSALARPGANILLPRPGFMFYEARAIFNGMEARYFNLLPGNGWEVDIDGVQALADKNTVAMVIVNPGNPCGNVYSYEHLAKVAETARKLGIFVIADEVYAHLTFGERKFVPMGVFGAVAPVLTLGSISKRWMVPGWRLGWIVTNDPNGVFQRTKVVHSIKSYLDISSDPATFVQGAIPKLVENTKEEFFEKTIEILKRCVDICCEKLKGINAITCPSKPEGSMFVMVKLDLSCLEGIKDDMDFCCRLAKEELVVVLPGCAVGYKDWLRITFAIDPSSLEEGLDRLKSFCLRYRKPTK

SEQ ID NO: 229153 - protein, 139 aa, Zea mays
  Clone ID: MRT4577_140580C.1.pep
LQYVKTQLFNHIGFNKQSQQATYLYRPCCVNNRQPYLWCSHWYKPSGHNSCSNSCYLVDHSGRVGASCALADVNYLERPLLIPKEELLPRPPPEEKLEDLVLMAQVTKFACGGFAVGICFSHLVFDGQGAGQFLKAAGE

SEQ ID NO: 229154 - protein, 240 aa, Zea mays
  Clone ID: MRT4577_140581C.1.pep
MAAKIFSILMLLALSACVLDATIFPQYSQAPIAALLPPYLPSMTASVCENPTLQPYRLQQAIATSNLPLSPLLFQQSPALSLVQSLVQTIRAQQLQQLVLPLINQVALANLSPYSQQQQFLPFNQLSTLNLAAYLQQQLLPFSQLATAYSQQQQFLPFNQLAALNPAAYLQQQILLPFGQLATTNRASFLTQQQLLPFYQQFSANPATLLQLQQLLPFVQLALTNPAAFYQQHIIGGAIF

SEQ ID NO: 229155 - protein, 77 aa, Zea mays
  Clone ID: MRT4577_140582C.1.pep
LLLLDEPTNHLDIETIDSLAEALNEWDGGLVLVSHDFRLINQVAQEIWVCENQAVTRWEGDIMDFKAHLKSKAGLSD

SEQ ID NO: 229156 - protein, 82 aa, Zea mays
  Clone ID: MRT4577_140583C.1.pep
NQLAALNPAGYLHQQILLPFSQLGAANRVSFLTKQQLLPFYQQFGANPATLLQLQQLLPFVQLGLTDPGASYQQHIIGGALF

SEQ ID NO: 229157 - protein, 595 aa, Zea mays
  Clone ID: MRT4577_140584C.1.pep
MVSEASKKKAAQKKAAAAAKRGGKASVASSSSSSAAAAADKVANGVVALKLSDRTCTGVLASHPLSRDIHIESLSLTFHGHDLIVDSDLELNYGRRYGLLGLNGCGKSTLLTAIGCRELPIPEHMDIYHLSHEIEASDMSALQAIVSCDEERVKLEKEAEILAAQDDGGGEALERVYERLDAMDAGTAEKRAAEILFGLGFDKQMQAKKTKDFSGGWRMRIALARALFMNPTILLLDEPTNHLDLEACVWLEETLKKFDRILVVISHSQDFLNGVCTNIIHMQNKKLKLYTGNYDQYVQTRSDLEENQMKQYKWEQEQIASMKEYIARFGHGSAKLARQAQSKEKTLAKMERGGLTEKVVRDRVLVFRFTDVGKLPPPVLQFVEVKFGYTPDNLIYKSLDFGVDLDSRIALVGPNGAGKSTLLKLMTGDLAPLDGMVRRHNHLRIAQYHQHLADKLDLDMPALAYMMKEYPGTEEEKMRAAVGRFGLSGKAQVMPMRNLSDGQRSRVIFAWLAYRQPQLLLLDEPTNHLDIETIDSLAEALNEWDGGLVLVSHDFRLINQVAQEIWVCENQAVTRWEGDIMDFKAHLKSKAGLSD

SEQ ID NO: 229158 - protein, 125 aa, Zea mays
  Clone ID: MRT4577_140585C.1.pep
FEDYSQQQHVLPLSQLGSAYAKQQQFLPYTQLAALNPFAYFQQQILLPFGQLDTTSPASFLTQQQLLPFYQQFVANPAPLLQLQQLLPFVQLALSNPAAFPPPHIIGGAFFRLLISCNSIMKFFG

SEQ ID NO: 229159 - protein, 98 aa, Zea mays
  Clone ID: MRT4577_140586C.1.pep
SQVAFAYFQQQKLFPFNQLAALNPPVYLQQQILLPFSELVAPSCASFLTQQQFLPFFKQFGGNPPTLFQIQQLLPFVQLGLTNPAASFQQHIIGGAPF

SEQ ID NO: 229160 - protein, 151 aa, Zea mays
  unsure (1)..(151): unsure at all Xaa locations
  Clone ID: MRT4577_140587C.1.pep
PTVSTVNDQWRSIYFASLSVLALHVCVGNTSIFXNTGQXTMAALTSPYLSSTTAPTWENPAVXPYRLQQAIRTSNLPLSPLFLQQSPSLPLLQPLVQTIRAQQLQQLVLPVISQVALANLSPYSQQQQFLPFNQLSTLNPAAYLQQQQLLP

SEQ ID NO: 229161 - protein, 81 aa, Zea mays
  Clone ID: MRT4577_140588C.1.pep
QLAALNPPAYLQQQILLPFSELAAASCVSFLTQQQLLPFYKQFGANPPTLFQLQQLLPFVQLALTNPAASYQQHIIGGALF

SEQ ID NO: 229162 - protein, 76 aa, Zea mays
  unsure (1)..(76): unsure at all Xaa locations
  Clone ID: MRT4577_140589C.1.pep
MAAKIFSILMLLALSACVANATIFPQYSQAPIAAXLLPPYLASMNXASVWGNPVLQPYRLQQAIATSNLPLLPPCF

SEQ ID NO: 229163 - protein, 113 aa, Zea mays
  Clone ID: MRT4577_14058C.1.pep
WSTTRATEATVGSQSTVAPDLLEPLGVDSYPHYDGAGGAQRAPSVLVILTQRSDLYDSSAYLRWSPRLIGLSGDGTRSGHRPRLQQLQFFGPALVDQHRPLDLSQVMAHDIFS

SEQ ID NO: 229164 - protein, 105 aa, Zea mays
  unsure (1)..(105): unsure at all Xaa locations
  Clone ID: MRT4577_140590C.1.pep
MHSSRDCSNGRRPKTVGHECHSYAQGHAHKKVRISRRTEXTYAPYHEGXQWRQYRQNMIQGSNYPRCDHRCTDHQHHGCAAPRHVEQMTSHDAPQYRVIDTHEHT

SEQ ID NO: 229165 - protein, 51 aa, Zea mays
  Clone ID: MRT4577_140591C.1.pep
ALRSELCVVYELVCLVDIAVDAVGVKQCQLSHGLEQVLCLCPPCPGWSTSD

SEQ ID NO: 229166 - protein, 44 aa, Zea mays
  Clone ID: MRT4577_140592C.1.pep
VRNAISALTWVLVSVGGLHESAGSHADVRKHSGDVLGCKSVRAL

SEQ ID NO: 229167 - protein, 149 aa, Zea mays
  unsure (1)..(149): unsure at all Xaa locations
  Clone ID: MRT4577_140593C.1.pep
LRKSGPAPRGVKKPPRFRPGPVAFREIPQFPKSPELLLRKLPLPRLGGEIAQNFKTDPWVPSSPVPPLQEAPQGDLVGFFXGPNLWALPPQRVPLMAQGIQVAPRLKGERARMLLCFPGFVKFEIGEGLYRFLSRHRGPMFLAKPFGCF

SEQ ID NO: 229168 - protein, 116 aa, Zea mays
  Clone ID: MRT4577_140594C.1.pep
RTRGRTRGVAAYPALIADYLGQAVPTGGAARTGAVAGLTVLLSLVNFTGLSVVGWGAVALGLVSLAPSVLMTGMAVPQVRPRRWTVTVEGGIMDWRLFMNTVCWNLNYWYSASTMV

SEQ ID NO: 229169 - protein, 86 aa, Zea mays
  unsure (1)..(86): unsure at all Xaa locations
  Clone ID: MRT4577_140595C.1.pep
RKLVEMMCSVFVASWTGVIKYHGPRPSTRPHQVFVANHTSMIDFIILEQMTAFAVIMQKHPGWVGIXIQKTIXXEVVGCIWFNRND

SEQ ID NO: 229170 - protein, 433 aa, Zea mays
  Clone ID: MRT4577_140596C.1.pep
MVLDLNVASPADSGTSSSSVLNSADGGFRFGLLGSPVDDDDCSGEMAPGASTGFMTRQLFPSPTPPAEPEPEPVAAPVPVWQPQRAEDLGMAQRPVAPAKKTRRGPRSRSSQYRGVTFYRRTGRWESHIWDCGKQVYLGGFDTAHAAARAYDRAAIKFRGLDADINFSLSDYEDDLKQMRNWTKEEFVHILRRQSTGFARGSSKYRGVTLHKCGRWEARMGQLLGKKYIYLGLFDSEVEAARAYDRAALRFNGREAVTNFEPSSYNAGDNNLRDTETEAIDDGDAIDLDLRISQPNVQDPKRDNTLAGLQPTCDSPESSNTMASQPMSSSSPWPGYHQNPAVSFHHQRLYSSACHGFFPNHQVQERPVERRPELGAQPFPSWAWQAQGSPHVPLHHSAASSGFSTAAGANGGMPLPSHPPAQFPTTTNPFFFP

SEQ ID NO: 229171 - protein, 31 aa, Zea mays
  Clone ID: MRT4577_140597C.1.pep
CEFYHDFKEHNISTFTLQFSSFNITFANRFV

SEQ ID NO: 229172 - protein, 121 aa, Zea mays
  unsure (1)..(121): unsure at all Xaa locations
  Clone ID: MRT4577_140598C.1.pep
SRLVIXXPLXDXFIHPISXXXIXCSFFTXKIPXFFXXSGVLPSEALHXDPRMXPPQASSQITQKSILGWKXXXGRXEGCSGRMAKDGTXSXEXPARLPGSGTRGXDTASCPNSCSPRADPL

SEQ ID NO: 229173 - protein, 77 aa, Zea mays
  unsure (1)..(77): unsure at all Xaa locations
  Clone ID: MRT4577_140599C.1.pep
KKLSXNXITVSTKVIIXHXQANIAIXXYVFHXTTARMXTRRDILXFPRXNQQAXTAPDXIXHFFLWQQPSSPWXQLG

SEQ ID NO: 229174 - protein, 81 aa, Zea mays
  Clone ID: MRT4577_14059C.1.pep
FIPFFFFFFFWCFFWVFFRFFSRGNARKKISHNRKKYRKLTGRRKGPKFLNFHKWPKRIWLNRKPINHPSRGRSKQGLGEN

SEQ ID NO: 229175 - protein, 127 aa, Zea mays
  Clone ID: MRT4577_1405C.1.pep
EYLVEVRNNRMKRMLMEIYILTQHTPNSKPLVQLYKKNKPRLRPWINEQRKWWPFRTTRCPQLKKVKSALHTDHFIQRKSDVHQNLEPNKRMSPNKRSRGSPPHPAPGTGLADRGSEHGGRVGACRV

SEQ ID NO: 229176 - protein, 113 aa, Zea mays
  Clone ID: MRT4577_140600C.1.pep
VLMVVLVMFILTATAQIAGIKVDLPKASSSIALSQPKTKAISVNDAGQVFLDAYPVTLPELEDRLRTEKALNPDFPVIVRGDSAVQYQKVVEVLDLLRRLELAQVGLVTGKPK

SEQ ID NO: 229177 - protein, 89 aa, Zea mays
  unsure (1)..(89): unsure at all Xaa locations
  Clone ID: MRT4577_140601C.1.pep
QKNGGGKQSFSEIKKPIPPTLLPQYQRGGIKPYTVGCNPPPAGWIKPAGTFPRWDPLGAVPGLAGAPXPDDPAXFERFFLVTLRGGASP

SEQ ID NO: 229178 - protein, 64 aa, Zea mays
  Clone ID: MRT4577_140602C.1.pep
PMIIWNTIGLFRMLGIKTTPSNGKDLPYNDAGSSEAQVLSIGPRMIHRKNPSQLFILELRPVGR

SEQ ID NO: 229179 - protein, 201 aa, Zea mays
  Clone ID: MRT4577_140603C.1.pep
RGRVDVDGKRRPALFVLERACLEVGKVGKTMQILNSDDHANYLRKQNRNPADYRPDIIHQAVYVRTEKGVLFEIKPHVRMPRTFKRFCGLMSQLLQKLSITAVGKREKLLNVVKNPVTRYLPVGARKIGLSFSAEKSVNLFDYVAKSNDDEPLVFVVGAMAHGKIDKEYTDDYIQICNYPLSAACCLNRICSALEQKWNIQ

SEQ ID NO: 229180 - protein, 286 aa, Zea mays
  Clone ID: MRT4577_140604C.1.pep
MGRPYAVKGRKKKRKLEEAAAASDAAPPVEEAEELPPPEVRSGEEKSSEEDEAAAGEEEHAAADGLPILPRTVDGKRRPGAIFVLERACLEVGKVGKTMQILNSDDHANYLRKQNRNPADYRPDIIHQALLAIFDSPLTKAGRLQAVYVRTEKGVLFEIKPHVRMPRTFKRFCGLMSQLLQKLSITAVGKREKLLNVVKNPVTRYLPVGARKIGLSFSAEKSVNLFDYVAKSNDDEPLVFVVGAMAHGKIDKEYTDDYIQICNYPLSAACCLNRICSALEQKWNIQ

SEQ ID NO: 229181 - protein, 72 aa, Zea mays
  Clone ID: MRT4577_140605C.1.pep
KLLGMLDIRGANGTGLGNNSASLALYLSVCVCHVCASAECRGRASVGVMWVVWSVVLIRIKILSLRFYRKHY

SEQ ID NO: 229182 - protein, 230 aa, Zea mays
  Clone ID: MRT4577_140606C.1.pep
MAAGNPRFPDFAILDAIAYISDLRDATAAWTLTTAGLTLQVSLVVAAPPRLSYFCVCCVGRDKTTFTDAPDVVCSVGDHALIRVGFTTGDSTEHFIYRARGPDGRPSLDLLPDFDDYTDAENLLLPLGFVSHRKHLVIAALSDGPTDLQYYLHTRSTEPHSRWSKKLLRVEFPRGAARKSAMNDPVKVIALGGGLLGWVNLMEGILICDVLDPGVTALRFVPMPKLLPSN

SEQ ID NO: 229183 - protein, 96 aa, Zea mays
  Clone ID: MRT4577_140607C.1.pep
VDLYLLALGFGHVRLWLLTVGIIGLCRRCSGRIVRGLDGGQLVSRHSRSCNSIVLLYGIGSCVLGQVGAHWCSSAPRVCGPVECEKNGWQTRPRAE

SEQ ID NO: 229184 - protein, 47 aa, Zea mays
  Clone ID: MRT4577_140608C.1.pep
PVISGGRFCVTDFYSLNLEYFVNFDKINNVSFCINTMDYLKKKKKNL

SEQ ID NO: 229185 - protein, 161 aa, Zea mays
  Clone ID: MRT4577_140609C.1.pep
MDEGKMDENEWGYHGEGNKSLVVAHAQRCVVLRFLKFPPSRKKTSEEIFEHLQNIVDFSKNVMREFLGESYVHCGEVVQLPLDFVKQLCVKIQSERPESRCDKDLDTLSGYALCLPNLARLQTYCFAEHRPILCVEIKPKCGFIPFSSDVMHEVKHKVCRY

SEQ ID NO: 229186 - protein, 124 aa, Zea mays
  Clone ID: MRT4577_14060C.1.pep
MAAAAGGGAVRALSQKEQDIQMMLAADVHLGTKNCDFQMERYAFKRRTDGIYIINLGKTWEKLQLAARVIVAIENPQDIIVQSARPYGQRAVLKFAQYTGAHAIAGRHTPGTFTNQLQTFFTVP

SEQ ID NO: 229187 - protein, 38 aa, Zea mays
  Clone ID: MRT4577_140610C.1.pep
RLQVRSRRSCCPLRSLRVGHVTSVVLRLSRRPRVRASV

SEQ ID NO: 229188 - protein, 83 aa, Zea mays
  Clone ID: MRT4577_140611C.1.pep
LNIPTTAYGCNKGKMVDTQNLTGQLTVLHMSSYKKPYPYQGSLLSYQNNRSPTLAIPFINPSRTYKACELLLAQFSNCALIVP

SEQ ID NO: 229189 - protein, 247 aa, Zea mays
  Clone ID: MRT4577_140612C.1.pep
EKEWVAHVDPGVLITFLSLPRGGNGLKRIRFSRETHASGQAQRWWTENYEKVMELYNVQKSNSQVDPLPSIPRSDSEISKDDTPATAPLNKGQLLRTSPRPLKGSEAIGYSSSDCPQHQSSHLRNVYRKDRYLGHQFCDPVELASTPELSSISGAKTETSIGASVRTSSSPEEVDGSGELSASVSNASDEEREWVEEDEPGVYITIRALPGSIRELRRVRFSRERFSEMHARLWWEENQARIYEQYL

SEQ ID NO: 229190 - protein, 61 aa, Zea mays
  Clone ID: MRT4577_140613C.1.pep
VEHPVPLQRQRDQANRRARQRRPQERHQVEHVIVRGHRQSSSRPTCAHEAARQPHGPVQIS

SEQ ID NO: 229191 - protein, 141 aa, Zea mays
  Clone ID: MRT4577_140614C.1.pep
VLNVQLHGIHLLNHILQLFATNLVSNPCTVVTHLKWPVFTSTFYFLTQCSLNFLHVEHELAAVGDDGLAAGTLRVPQLLHDQPSPPAPAPALSASRRGGGARASCSGPGKTSPQARMDGGGLAVGCGGAGRRWGSRGWIRV

SEQ ID NO: 229192 - protein, 103 aa, Zea mays
  Clone ID: MRT4577_140615C.1.pep
VSTVIAISSSHAAALIMPGTQSSFLVSIHIKHLIIARLLQSPDRHSTVSQEQGASSGEYGVAHPVQSIGRLDIDESLFANSTKNVFHALMRGHYYESRHMQVM

SEQ ID NO: 229193 - protein, 83 aa, Zea mays
  Clone ID: MRT4577_140616C.1.pep
PDGLPTPFLLVWAPLFPWICCWSYVPLTHLGSSYCIVVYVCRRPPIVAIPHSEVVGHASPICPCASLPSGRCCLVNVHRSRCF

SEQ ID NO: 229194 - protein, 85 aa, Zea mays
  Clone ID: MRT4577_140617C.1.pep
PSQHPQISRKELGFSQQKKNLEVQPHPFFKKETRNSKTKMQFGRGGGKKGQPQNPRPKFWAKRGGGGGLTKNYKTGVHFSWAKTE

SEQ ID NO: 229195 - protein, 102 aa, Zea mays
  unsure (1)..(102): unsure at all Xaa locations
  Clone ID: MRT4577_140618C.1.pep
MGRPSHTVHLTMYFARIGPTRTCLVAHRRVGAHLPTHGISYITVKVAVCHLXPEAPTHPTPLKLLHIVRLELRYTRYCLPVDSIQPDPLAVASLDSIHGQWE

SEQ ID NO: 229196 - protein, 35 aa, Zea mays
  Clone ID: MRT4577_140619C.1.pep
YPSVARNTSCPALSISCSLRRSCVYREISCKRMLA

SEQ ID NO: 229197 - protein, 61 aa, Zea mays
  Clone ID: MRT4577_14061C.1.pep
SFHVQKSFNNKFRVKLIEIFIIRFVTQLFPIYNQDDSRHLKERRSKIKSIAPTSKKALFIL

SEQ ID NO: 229198 - protein, 103 aa, Zea mays
  Clone ID: MRT4577_140620C.1.pep
KGEKVGPRKRGLRPVFSGREPPHFFCFITIFPPPPKGSPEHSMGSLIKAKGSVKNAPPCAVNKSPGVFWHQPPQVGRWGKEKTFRVCHFWGLFSERQWKKKKK

SEQ ID NO: 229199 - protein, 178 aa, Zea mays
  Clone ID: MRT4577_140621C.1.pep
LSRGMERSMRSEPATRKVSTVATDPVGVSASDRNLPPRRPPSPLPPALALLLLSYPLPIPHESRPTDRTSAYHIEASAMVGRAEVALGEGKLSLRIKMKAQAETKTRPRPRPRRCGNAEVAAVSGTGGGVTPSPSVGQEGGGGWKREGKWGILEKDGLGGAQKRDVSPSLRFSRSISV

SEQ ID NO: 229200 - protein, 126 aa, Zea mays
  Clone ID: MRT4577_140622C.1.pep
PPSPLFSRGFKPRVWDSPPSLFFFGAKVRFRGFGLNGQKWAPVCTLFFGAFAPAGKGYVPPGKGGDFLGPFPPVFLGSPQRCPALFVSCIERFCFVFQKIFNGHSKDIKKNKKNKKNPKKNENKKK

SEQ ID NO: 229201 - protein, 90 aa, Zea mays
  Clone ID: MRT4577_140623C.1.pep
GRKREANYKRLDKLRYDVVAWPRPETGLEKLRMVTTARPFVINKDACCGSYKRAQSTPSTPTTPVTPSSSTTPHGACNMWRSVFHPGSIP

SEQ ID NO: 229202 - protein, 143 aa, Zea mays
  unsure (1)..(143): unsure at all Xaa locations
  Clone ID: MRT4577_140624C.1.pep
GTKPNPGPLTPPGDPGAGPSPPXPKFMGNPPSNQKGFGSXLKPPPPEFQGPPPKKTPRKAMARFPPGPPPISQGKPFXSPPPNPGGPGKPPPGNLKLMGEGEGPPAGGGPPPPKPLNXSAPGVYPKRGTKPPLGGAPGGGVPS

SEQ ID NO: 229203 - protein, 95 aa, Zea mays
  Clone ID: MRT4577_140625C.1.pep
ATPCLRLFSSRGLFYDGSSELAHDQAHMWYDVDQVQAMRGRGSGSAGWREARRHRRLAIGGRDLVGDTLRRSWRTRTCIRRATLNEGSRPASRYP

SEQ ID NO: 229204 - protein, 128 aa, Zea mays
  unsure (1)..(128): unsure at all Xaa locations
  Clone ID: MRT4577_140626C.1.pep
MRGMLFAGSAREGHAGTLLQLQHQRQGLAAGKLSGAGDLWEPTSVLDRRHSPSPSPPTSVPTLSSPLGAATAGVAALAGANAKNVSPPPVAAAADGPWGGGAEEAVAXKEEWQLTPLDMGLGAGEGWD

SEQ ID NO: 229205 - protein, 95 aa, Zea mays
  unsure (1)..(95): unsure at all Xaa locations
  Clone ID: MRT4577_140627C.1.pep
NPQQFIPTNQRAALNSPANKQQHHXRPXSQQAGESPATFLKQPQLGPFNQHAAPNAGTLXQRQQLRPFNQLALTNPAASPQQPIIGGALFKISNE

SEQ ID NO: 229206 - protein, 129 aa, Zea mays
  unsure (1)..(129): unsure at all Xaa locations
  Clone ID: MRT4577_140628C.1.pep
GKDQLEPGCAILMHIKALAVVVVYGDEVDPTVPVHKGEKDLLRLQGDIGGWDAQIXQDIYDAVALLLTHAKLYEDIAIRPPKGAILCGGPGTGKTLLAKAGAYYTASTFLRLVGSALISKEPRWLPLTC

SEQ ID NO: 229207 - protein, 305 aa, Zea mays
  Clone ID: MRT4577_140629C.1.pep
MLRTLARMAPKNWTKESFTLNTGAKIPAVGLGTWQSKPGEVREAVKAALQGGYRHIDTALAYGNEKEVGQGIKDSGVPREEIWVTTKLDNPWHKRVEEGINSSLSSLGLDYVDLYLMHWPSSTDPDDLKKHYPDWDFKDTWAEMQKLPESGRVKNIGVSNFAIKNLEKLFADSRFKITPAVNQIELHPNNPSPKLLDYCKEKGIHCTAYSCLGSTDSPLYKNEKLKKLAESKGKSVQQVLLMWGLQRGTSVIPKSVTASRIMGNFELDGWELTDEEMKEISSLPERFKVCGDAWLPVKVFFGDDE

SEQ ID NO: 229208 - protein, 51 aa, Zea mays
  Clone ID: MRT4577_14062C.1.pep
WLACWITDWCLLELGIQVTFLSDSERPNRTIGTASSHSLLVNTELTIYRSS

SEQ ID NO: 229209 - protein, 217 aa, Zea mays
  unsure (1)..(217): unsure at all Xaa locations
  Clone ID: MRT4577_140630C.1.pep
PSHAFHPECIDPWLQSRATCLLCRAKVPVLVPPVXASAVLXPSRLPEAVAVPVLDDELEEDSDKEDDRKEEAIELEMLRMARRAATRSLXAAGGNAKEEGDHERFTLRLPEQVWDQVLWSRRLCHATSLVNLSDMCSESEEGSSRGGRRVAGAGSVGNGGSSHSGRRWXSFLARTVSWARGGDGSVQKGWDGSTRRGRDDCESSEKGAASALPAGQS

SEQ ID NO: 229210 - protein, 70 aa, Zea mays
  unsure (1)..(70): unsure at all Xaa locations
  Clone ID: MRT4577_140631C.1.pep
TQSAGAISSVASLLLLATTATTSXAAITCTHANSAISPCLFYPRGTRSGPCTSCCTRVTNLNSTCSTDDD

SEQ ID NO: 229211 - protein, 106 aa, Zea mays
  unsure (1)..(106): unsure at all Xaa locations
  Clone ID: MRT4577_140632C.1.pep
HRCEXQAGTAPGRHCPQGGSPRSQPLXPHINTALHVEDKAISDCRPSRPSHTLSSLATEASGGPPVSKAPTMDAQQDRPKSQDCLGLVAPLASAAEVPSTAPVSGK

SEQ ID NO: 229212 - protein, 42 aa, Zea mays
  Clone ID: MRT4577_140633C.1.pep
LYLVQLVRLMRWCLYEEQLSQPSRRYGVQYVHHGQKIGAITV

SEQ ID NO: 229213 - protein, 199 aa, Zea mays
  unsure (1)..(199): unsure at all Xaa locations
  Clone ID: MRT4577_140634C.1.pep
MDKSSALEYINQMFPTEASLSGVEPLMQKIQSEIRRVDASILAAVRQQSNSGTKAKEELAAATNAVQELMHKIHEIKTKAEQSETMVQEICRDIKKLDCAKRHITTTITALHRLTMLVSAVEQLQVMASKRQYKEASAQLEAVNQLCSHFEAYXDCPKITELREKFKNIKXILKSHXVFSDFSSXGTGKGTEDSMLLQQ

SEQ ID NO: 229214 - protein, 66 aa, Zea mays
  Clone ID: MRT4577_140635C.1.pep
EQETEEGEREAVAVTRACTWLQASDPPKVSCGAASCLPFRPLLSASLELLSSPCNRGGSRVPHFVW

SEQ ID NO: 229215 - protein, 148 aa, Zea mays
  Clone ID: MRT4577_140636C.1.pep
MNICRGLSYEKLSPECCKHMLRNGEFPTTAAVQALASQHTVLKSVVLREPGQLKSVSPSPTASTGKRRDGYDDDNGGGENDGQVILYARRLDLSVENQNLRSLLDGMHWRVVELEKVCSRMKTRMSKMKQARRGGGGRTARSLPRICS

SEQ ID NO: 229216 - protein, 46 aa, Zea mays
  Clone ID: MRT4577_140637C.1.pep
TDPRPRLYVASAIRSSKSLRHNKASSCNVLDQESLLCVVYSVQLPV

SEQ ID NO: 229217 - protein, 46 aa, Zea mays
  Clone ID: MRT4577_140638C.1.pep
SRLCTLCSPLVCWVGPAADEHATQEPSQLVDPYSRAEIGSSEIRTS

SEQ ID NO: 229218 - protein, 187 aa, Zea mays
  Clone ID: MRT4577_140639C.1.pep
GGGVPTQKRGGGKFGKKPPPKNPKGPMGKRGKAPPRARGPFYWGGSKPGKGKVTNRQPRGNGKHWDPKNFLGGGPPKRERKGKKTRGGASFFLGGLGFGFAKKSFGFFGPKIGVFFWGGPRVPFPQKIGEKVTLFLRPGGGLPKKWGGILPFFSLGGPRTPVGTPLKRLCLWERSTQKKRAFFKVFP

SEQ ID NO: 229219 - protein, 43 aa, Zea mays
  Clone ID: MRT4577_14063C.1.pep
YKNLEIRELEKKYFYKEKFYSLVTITLYIQWSSSKVWFGLCLD

SEQ ID NO: 229220 - protein, 111 aa, Zea mays
  Clone ID: MRT4577_140640C.1.pep
HSVKTQATPGQSQPVGMRATQEAYHIPNTRHATPAAHEDTRLFIHEIVWPRTIKEIDRGRRDDAPFVELLPAAVVVIVVVRVIVGSGDRRGGIAGSELDGGRDGCGPSADL

SEQ ID NO: 229221 - protein, 118 aa, Zea mays
  unsure (1)..(118): unsure at all Xaa locations
  Clone ID: MRT4577_140641C.1.pep
RTRATTHAGGNVKGNLLCLPPETPCWGCSHRDTAYHNGYWVQPTDCTNCTDDTXIALEEIVGPGMPIRTYKTEEEGAKRANATDAGLTAGVSTKEPNPAHRASGQREAGITCGNTEGG

SEQ ID NO: 229222 - protein, 109 aa, Zea mays
  unsure (1)..(109): unsure at all Xaa locations
  Clone ID: MRT4577_140642C.1.pep
RELATGHSSSAHEERYELPGGHSLTIGAERFRXTEDLLQPALIDLDAGGMRETPYNHLMRCDERIWNDLYGCIALSGGSTMTRVIAGRRIEAEHXLGPRSRRIKDWCSS

SEQ ID NO: 229223 - protein, 69 aa, Zea mays
  unsure (1)..(69): unsure at all Xaa locations
  Clone ID: MRT4577_140643C.1.pep
MATRGEQPAEVVSVEMPAPDGXTKKFTPLRRGRSEIDFVSPTGEEIKNKRQLSQYLKAHPGGSADSESE

SEQ ID NO: 229224 - protein, 68 aa, Zea mays
  Clone ID: MRT4577_140644C.1.pep
KGRRCYQLNCVVLLWIFTRALIGDQHYPIRISMPKISFLGFFVEIFLHEKFIGVKPSLLSKMIVYGHF

SEQ ID NO: 229225 - protein, 192 aa, Zea mays
  unsure (1)..(192): unsure at all Xaa locations
  Clone ID: MRT4577_140645C.1.pep
MAPTVEVLTSEVVVPAEETPAGSIWLSNLDIAARRGYTPTVYFFRPNGDPGFFAADVVKGSLARALVAFYPLAGRLGLDGTGRVQVDCTGEGAVFVTARSDYALDDLMREFVPCREMRDLLVPPTPAPNPPCALLFVQVTYLRCGRRRAGPVHAHSACDARGAAHFLXTWASIARRRRHHRERSRATVLRLR

SEQ ID NO: 229226 - protein, 84 aa, Zea mays
  unsure (1)..(84): unsure at all Xaa locations
  Clone ID: MRT4577_140646C.1.pep
SNRDHAGXLHFFSLQILFSVSVAEQIQSASCXKYGGEQISLSSLSLRVAPSKYPPAWTNPVEVGRPWRVRGGITALGRALYGVC

SEQ ID NO: 229227 - protein, 44 aa, Zea mays
  Clone ID: MRT4577_140647C.1.pep
PLRIVSARAGFFASLMIMLHGFVYSCVFVSHYGLGGSKIYCGKV

SEQ ID NO: 229228 - protein, 38 aa, Zea mays
  Clone ID: MRT4577_140648C.1.pep
NTKTPPSPSCSRTALESPGPLFLRNPSHPCARGQPTTR

SEQ ID NO: 229229 - protein, 85 aa, Zea mays
  Clone ID: MRT4577_140649C.1.pep
PQQSSFHLAVARVSREVCYPDRSREQPLRRPNNSRFLRPSPRKHRQLEHLEEVVFEGVCSNACSSSGWSYLTKGWVEGFWDLLLQ

SEQ ID NO: 229230 - protein, 103 aa, Zea mays
  Clone ID: MRT4577_14064C.1.pep
VKAFFLVANVLGFRPPVCRLFPPHLQPLFILNTPVKVCFFELVVFFPPGKKVLPRINFFLRNFLNYVGCFLVVGLALLALFLSGLCVPVDLLFKSVLFFPPMF

SEQ ID NO: 229231 - protein, 393 aa, Zea mays
  Clone ID: MRT4577_140650C.1.pep
MAIRRGGSQSYGFPIYCAAWLPLAHILKPDRPAAEADADAPSPSPPPPPMVLLGGGGGKGRNGVPNKLVMAALAAGEEAAPALSPDTVIEVRTQEEVPYRMAVHPRGDGVFCAFPNGCKLYRWESQEGEGLQNLSLEPDQEALAELKDVGLQLAVSFSGEGSILAIGGEDGYLRVFNWPTMGSVLTEIDTKTSIKDLTISSDEKFLAVNRSSGPCRVWDLQSSEVVASLPRETGEIFGFCRFSNKADNSHVLFITVMEGDYGKIVSWNTTSWTRTGSKKITREAISAFAVSPNGALLAIGTIEGSVIIVGSKDMRTLVTVKKAHLGIVTTLTFSQDSRTLLSTSFDSSARVTSVGSPKSNGTSIWPMLLVVILAILVYYCTQHKEDILAMLQR

SEQ ID NO: 229232 - protein, 62 aa, Zea mays
  Clone ID: MRT4577_140651C.1.pep
SSRAPTFNGHIAHGEAHHHIPKSKRGGCLLFTNKKKKANKATGRQFVLKTGPRMTTSTWVGV

SEQ ID NO: 229233 - protein, 110 aa, Zea mays
  Clone ID: MRT4577_140652C.1.pep
PKGPGFLPQGGRIFFPSVSAEGYPPTPWDKVFPWSLNKLLTLGHNGGSGFTRGFPQTGHFDNFTSFHDTPTQLCQTGGHKNYKMLLIPPDFFCSQFEFLGPPKSSRELVI

SEQ ID NO: 229234 - protein, 58 aa, Zea mays
  Clone ID: MRT4577_140653C.1.pep
EQKRQPPNRTMELVGSNGGGFALAVVCNKALFPVRVPITIGLKPPVARALNRWRLVKN

SEQ ID NO: 229235 - protein, 48 aa, Zea mays
  Clone ID: MRT4577_140654C.1.pep
KEKFTNHIIQTAMRQTFHPSVRDTLTFHIHSSPPIYRNHHSSKFPNRI

SEQ ID NO: 229236 - protein, 250 aa, Zea mays
  unsure (1)..(250): unsure at all Xaa locations
  Clone ID: MRT4577_140655C.1.pep
MDRAQLLLVGLPALLFFSDLTHIFAPPPXPPPPPPSPPSSPPTSASAASSPLASSPSAPAASSXPHPPHHHQHPDPSTAIIQEPRVDEAGFGSTVELQFCASCSYKGTAVTMKRMLETSFPGIHVVLHNYPPPFPKRVLSKVIPIVQVGAVATIMAGDQIFPRIGMVAPPWYYSLRANRFGTMATIWLFGNFAQSFLQSSGAFEVYCNGDLVFSKLAEQRFPSEFELRDLVGTRLPGSPFGRNPGKTLAL

SEQ ID NO: 229237 - protein, 53 aa, Zea mays
  Clone ID: MRT4577_140656C.1.pep
FIRGRTRGLANDLVKVGIPTFGPSSEAAALEGSKDFMKKLRDKYNIPTAKFYG

SEQ ID NO: 229238 - protein, 95 aa, Zea mays
  Clone ID: MRT4577_140657C.1.pep
MSSGGADKPGSGGGAVKTPSDFLKSIRGRPVVVKLNSGVDYRGILACLDGYMNIAMEQTEEYVNGQLKNKYGDAFIRGNNVLYISTTKRTLADGA

SEQ ID NO: 229239 - protein, 39 aa, Zea mays
  Clone ID: MRT4577_140658C.1.pep
RVYHYLFYAILSQLAADVSTLVASPDLLGCPSMAVIVAH

SEQ ID NO: 229240 - protein, 172 aa, Zea mays
  Clone ID: MRT4577_140659C.1.pep
FSRKAAKASPEGSRAFRVARPRKEKTLESTWKAITEGRGPPLARPLKKSDTWDARPGPRPSPGGRNGEVDPPPVAPAGAIRKAQTFNPGGGPGRSKALLAPVRREPSLGQDELNPRVEAFIPKFNMEIRLQRQESFKHYSDMFGRGIRYLKGLGANPCGSQEGLYAFFFFVP

SEQ ID NO: 229241 - protein, 74 aa, Zea mays
  Clone ID: MRT4577_14065C.1.pep
ADCLALLCVILCIGVTIYTTPYRTRFSHLQPLYDLPIRIYTRMCRVSPWMMLTTMEIELNKVLSIHLEYKERKE

SEQ ID NO: 229242 - protein, 58 aa, Zea mays
  Clone ID: MRT4577_140660C.1.pep
GHLIMPLFLFKMGLLRNPSIIEEGSISQEIQGHLERTLHSHTCHYIHQAPVYFIGSSS

SEQ ID NO: 229243 - protein, 66 aa, Zea mays
  Clone ID: MRT4577_140661C.1.pep
NTRLSTIRNNKTQHYDLPYEYDKPTFYSATVLTTSLTDRGLDLEGLDKPRSTRKLSMDPSYEVRHA

SEQ ID NO: 229244 - protein, 279 aa, Zea mays
  Clone ID: MRT4577_140662C.1.pep
MGDWVPRGRPGKTNSKKQNPLLPPALHYLPSRPSSTPPNPPGQTLEKAIGISPTASGRKRTIMPRRRRDKGQALIDLDSDAEDECQSKGSQTSRTTTLKTSGRLKNVLTTTLKTSGRRSKNVLPSFYDNLPQGRASRHATSRRNKTNQDKLNTDIFELYMEDLWKHIDEDKKSAYAYLDSLWFNMYYHGSNKPNVLKWIKAKRIFSRQYVFVPIVCFGHWSLLVLCHFGDANCSDIKKGPRMMVLDSLNTTDPTRLRSAIRKFIIDITRLRSGKKASSS

SEQ ID NO: 229245 - protein, 166 aa, Zea mays
  Clone ID: MRT4577_140663C.1.pep
MPRRRRDKGQALIDLDSDAEDECQSKGSQTSRTTTLKTSGRLKNVLTTTLKTSGRRSKNVLPSFYDNLPQGRASRHATSRRNKTNQDKLNTDIFELYMEYVVLFVFTFPVSWSSEEICILIAAITSCTEIFGSTLMKIGRVLMRTWILYGLTCITMGVINLMSLNG

SEQ ID NO: 229246 - protein, 43 aa, Zea mays
  Clone ID: MRT4577_140664C.1.pep
VVLASITRVISFVCATTRHAYGISTSKFECYLEAPKKKKKTKR

SEQ ID NO: 229247 - protein, 76 aa, Zea mays
  Clone ID: MRT4577_140665C.1.pep
THQTFSGSSPISITTTSHSSSESLKLSQLAATVEPQVSPCRAAAGSSSSRRRSRRRRRTWRSRRSSPASTRTATAG

SEQ ID NO: 229248 - protein, 343 aa, Zea mays
  unsure (1)..(343): unsure at all Xaa locations
  Clone ID: MRT4577_140666C.1.pep
AGMILLGGDSTGHTTIAAAHVLPASYLNSQDAAAVRQYINTSSKPTASIVFNGTALGTAPAPVVAYFSSRGPSTASPGILKPDVIGPGVNVVAAWPFKVGPTTNTAGRDRDDDDQHGAAAATFNSVSGTSMSAPHLSGIAAVIKSAHPDWSPAVIKSAIMTTAYVVYGNNKNQPILDEQLSPASHFSVGAGHVNPSQAVSPGLVYDTDVEQYVLYLCGLGYTDSQVETITHQKDACGKGRRKIAEAELNYPXVATRASVGELVVNRTXXTNVGDAVSSYAVEIDLPKEVEATVSPAKLEFTXLKEKKTFTVRLSWDASKTKHAQGCFRWVSSKHVVRSPIVIF

SEQ ID NO: 229249 - protein, 109 aa, Zea mays
  Clone ID: MRT4577_140667C.1.pep
VLRFRPGGHAGAGRAPAAELDEAPREGCWAQLPLDLLRMINTMGVIYRWFYQSWLEVTQTSFVLCSIQGIVDSSSEGRRLRSIQIDMCFLGQSWLDSSSEDLDSTKTVL

SEQ ID NO: 229250 - protein, 87 aa, Zea mays
  Clone ID: MRT4577_140668C.1.pep
LQMNQSFLSEASARSPTASGPKASLPHHVEVGHPPRPRQGYQKVYGELPHVANRYRWLQPGDSDTKCNRRASVKTTKNSIPGSNNQW

SEQ ID NO: 229251 - protein, 67 aa, Zea mays
  Clone ID: MRT4577_140669C.1.pep
SREIIIRNKLSLGCYIIQVRDTPIRLIEHMFCRASGGRFYASSYFCKSRRGTVNPGFFFIYVHATCQ

SEQ ID NO: 229252 - protein, 74 aa, Zea mays
  unsure (1)..(74): unsure at all Xaa locations
  Clone ID: MRT4577_14066C.1.pep
VTSLLDLTLSKLRNSTMLTPPSTFPISLLGSLPHLLALPLQPPHALLLPLGPHSRLLSCXIGASPTDASTSGSR

SEQ ID NO: 229253 - protein, 64 aa, Zea mays
  Clone ID: MRT4577_140670C.1.pep
MAPPQPKSGLFVGINKGHVVTKRELPLRPSHRKRKATKMVSIVMVLIRDVAGIAPYEKRITELL

SEQ ID NO: 229254 - protein, 112 aa, Zea mays
  Clone ID: MRT4577_140671C.1.pep
PYLREFINRGASISEGKNRETTRGGRRPPPGSNTPQKKTQTHPNKTRHTQTEERAKPPNQRRGNAQADYPPRTHWVVDTKHNNPPGGSNGETPHQTLTEAEQLSYETPFYKE

SEQ ID NO: 229255 - protein, 36 aa, Zea mays
  Clone ID: MRT4577_140672C.1.pep
SSVTIYHISSFTDRRILTGLGHSGRQLNENSQQHTR

SEQ ID NO: 229256 - protein, 81 aa, Zea mays
  Clone ID: MRT4577_140673C.1.pep
VIFWVWIASFSRLPCIDWGPPLSLATCPASTLYALCSKFLLKATVIYSFMAGLKLYCLMYRGVSFFFHRSGAYLTWGDGVL

SEQ ID NO: 229257 - protein, 87 aa, Zea mays
  unsure (1)..(87): unsure at all Xaa locations
  Clone ID: MRT4577_140674C.1.pep
KQPNHTKPGDHRGPKTDKIENVPAPAXANAHGQLPGEXTRKEVDDEERPDEAHHRDVNQKKSDSPPQGXQRKETPAPIEDQGTSGVL

SEQ ID NO: 229258 - protein, 127 aa, Zea mays
  Clone ID: MRT4577_140675C.1.pep
NSPRPFPNFKKKGNNGGPRWETLFFPPRKTGKFPENKPPFFPPKKKKAPPCCPQNFLGLLITPFLWANFYPRKIFFFKRGGREKFLIWKLGPRFGIQLFLGGGGAVKGSPKTPQKIPYNSGPPPWAL

SEQ ID NO: 229259 - protein, 87 aa, Zea mays
  Clone ID: MRT4577_140676C.1.pep
VDFQLPIAPPQPLFKMIAASATRARLANAFVTRLAFSTTRAQLASPYHYAEGPRSNIPFNPKTKYFFFRYWAFMITGFGAPFAIAVW

SEQ ID NO: 229260 - protein, 267 aa, Zea mays
  unsure (1)..(267): unsure at all Xaa locations
  Clone ID: MRT4577_140677C.1.pep
PAGFLRTKMPHGQIADGTKFFGALTFGLITIMFNGFAELQLTIKKLPVFYKHRDFLFFPAWTFGVANILLKVPISLVESVVWVVLTYYVMGFAPAAGRFFRQFIAFFATHQMAMALFRFLGAVLKTMVVANTFGMFVLLIIFIFGGFVIRRNDIKPWWIWGYWASPMMYSQNAISINEFLASRWAIPNNDTTIDAPTVGKAILKSKGLFTEEXGFWLSIGALIGFIILFNSLYLWALTYLSPSSGSNALVSEGEDDVNIALKERSRD

SEQ ID NO: 229261 - protein, 59 aa, Zea mays
  Clone ID: MRT4577_140678C.1.pep
SIVCAPVHPCADVRSNTSDCDIQYIVDVTFWPLLVQIHHKVEYAHEIMLLWLIHWKLSA

SEQ ID NO: 229262 - protein, 68 aa, Zea mays
  unsure (1)..(68): unsure at all Xaa locations
  Clone ID: MRT4577_140679C.1.pep
NFALYXAPKSPYFPPRVFEYIFDXKVSPNFHINPQNCFLFKAFAFKNPNQNFNWPVPKGEGAPGSPVI

SEQ ID NO: 229263 - protein, 109 aa, Zea mays
  unsure (1)..(109): unsure at all Xaa locations
  Clone ID: MRT4577_14067C.1.pep
TPPVAQGAPRQAGSSRRRWGLSQCHRPSGLERPNADQITLPADAPGASLHSDLDACSHNPAHDILTPLAFQPSAITNCVNQRLLSYXAELLCASGHHMGPTNLSDDKCK

SEQ ID NO: 229264 - protein, 84 aa, Zea mays
  Clone ID: MRT4577_140680C.1.pep
HPAFEHQILAGLSKALHATRRAGDSLRPLLPYMIRACRPYAVHWFARETLSTTYATGTCTSYAGEHLNKLLTIIYHRTHIEPLL

SEQ ID NO: 229265 - protein, 105 aa, Zea mays
  unsure (1)..(105): unsure at all Xaa locations
  Clone ID: MRT4577_140681C.1.pep
RPRPSGNTYKVFATDLWTDPTPWPFKEXPISFRVGGKHGPFGKVPYYGTAPGVVHQPNFAATFTFIAGEGAKGLMKSQPGCNFRVHPLMHHVPFRILRSKGFLDK

SEQ ID NO: 229266 - protein, 162 aa, Zea mays
  unsure (1)..(162): unsure at all Xaa locations
  Clone ID: MRT4577_140682C.1.pep
KKKTRILPFFEGGGPWSRGGRGRDKTLSRESPTKKKGARTPPPPPKGFWPPPHGXKRKKPPXPKRKNPPPGAPPQRKGGPQKGGEGPPPRGGPPPKGPVWGKTLSIPPPXGGGDLQKPLGESNLCPKNLGGGGLKAGKGKAQGNQKPTFTGRKQQLVEKKKG

SEQ ID NO: 229267 - protein, 246 aa, Zea mays
  unsure (1)..(246): unsure at all Xaa locations
  Clone ID: MRT4577_140683C.1.pep
PGRAGGVGSNKYPSPRWSDCHCANCNPADTGRLFVHVEAPPAGDGGVATEEDVLFIHGFISSSGFWTQTVLPHVSPQARSRRRLFAVDLLGFGRSPKPADSLYTLREHVEMIERSVIERHGVKSFHIVAHSLGSILALALAVRYPAAVKSLTLVAPPYFPVPRGEVGTQYVLRTVAPRRVWPAIAFGASVACWYEHLSRTVSIVLCKHHRLWELAFRVFTLYRVRTYLMDGFFCHTHIXSWHTLHN

SEQ ID NO: 229268 - protein, 84 aa, Zea mays
  Clone ID: MRT4577_140684C.1.pep
GRRALASQPFWWSGSTPTIYVNFHMETTGAAPLLFCWKPKIQKLEWSRSILHSSTKHTLRDTRSLLENTVRLIDLNYELSKLRT

SEQ ID NO: 229269 - protein, 126 aa, Zea mays
  Clone ID: MRT4577_140685C.1.pep
SEFGSSIILPIVGNAAEHVTAIKVAYKNHMDLAIGVAVGSSIQIALLLTPVMVILGWIMDKDMSLYFTLFETVCLFVSAFIVNFLVLDGRSNYLEGALLCAVYIIIAVVAFFYPNKDEASEWGGGT

SEQ ID NO: 229270 - protein, 35 aa, Zea mays
  Clone ID: MRT4577_140686C.1.pep
CMNKMTYVTRWQHSISDSLSKMRSCSVSSQSIYMD

SEQ ID NO: 229271 - protein, 115 aa, Zea mays
  Clone ID: MRT4577_140687C.1.pep
MCIRPMYTQITFTKNLDYRCVPGEYTVRFCLGNGCVPNGSVVRFYRGPLNNSISQQKKKKKKKKKKKKKKKKKKKKKKKKKKKKKKNKKKKKKKKKKKGGALLKGPSFFSRGFNP

SEQ ID NO: 229272 - protein, 91 aa, Zea mays
  Clone ID: MRT4577_140688C.1.pep
VAESNDCRARVESLCAYLEVPPPGVIVQIAVVQLVLKLQRLSASLQVSAVSSAADRLNSSAHHDTCLNSSSPYTAASAVHGRRVLAERRSQ

SEQ ID NO: 229273 - protein, 87 aa, Zea mays
  unsure (1)..(87): unsure at all Xaa locations
  Clone ID: MRT4577_140689C.1.pep
GVSLLRSLWSWWWPRPALPHRGAQNSLKEWSIQIEKANSAKKLVVIDFTATWXPPRRAMTPIFADMDKKSPNVAYQKVDEDETNTPA

SEQ ID NO: 229274 - protein, 65 aa, Zea mays
  unsure (1)..(65): unsure at all Xaa locations
  Clone ID: MRT4577_14068C.1.pep
NLPGNKPDKTXNSGGGMLQEHPRFYSKPMDNSDLWDTQGNNTARQDKRAQANTLHMLERNPRLTP

SEQ ID NO: 229275 - protein, 541 aa, Zea mays
  Clone ID: MRT4577_140690C.1.pep
MARCVAGSCPPVTFACCPRRTGRSAVVQCGTASSTPAISGTGPSSSGSSGLVQDCTAPLVCALQLTARQDVSCFHFPGHNRGKAAPSSLSKLIGSGAFLHDLPELPELDDLFSPKGVILDAQRRAAQLFGSSKTWFLVNGTTCGIQASVMATCSPGDYLIVPRNCHISVISALVLSGVVPKYIIPEYNSGWDIAGGITPLQLDEAVKELEEDGKRVGAVLVTSPTYHGVCSNVQGIVSVCHPRGIPVIVDEAHGAHFRFHDSLPSTAIEQGADLAVQSTHKVLCSLTQSSMLHMSGDLVDVDKVSQCLQLLQSSSPSYLLLSSLDAARDQLSQNRNIFDEPLAIASETKDLLARIPGISVLDLPCFASDFPAIDPLRITLSASDLQLSGYEADDILYEGHQIVSELVGTRAVTFAVNLGTRVQDAEKLVQSAKHLSEKHFFANSLKPVKENRVHGPLENISVHLSPREAFFTEKRRVKIEDSLGEICGELICPYPPGIPVLIPGEVVTHDSLSYLMSVRHQGITISGAADAELNSILVCDL

SEQ ID NO: 229276 - protein, 108 aa, Zea mays
  Clone ID: MRT4577_140691C.1.pep
LTRARGDLPMELALPTAFTVVVYLMAALNPSPVPFGLTLAVVLAYVLVAGGLGLAVGALMMDAKLASTLVTVIMLAYLLTGGFYVHSVPRFMVWTQYTSFTYYCYRLL

SEQ ID NO: 229277 - protein, 113 aa, Zea mays
  unsure (1)..(113): unsure at all Xaa locations
  Clone ID: MRT4577_140692C.1.pep
YWPLNCDDAIRVMLMIRIMHXHQLIMXKQRIPCLDYDLDKDNMLFWASFKMYFELHINSLRNANLNTLWEDDVHLHYITRRYAELTASLFHLNSDHGHGQLDLNLERLQMAIE

SEQ ID NO: 229278 - protein, 88 aa, Zea mays
  unsure (1)..(88): unsure at all Xaa locations
  Clone ID: MRT4577_140693C.1.pep
ILLSLAHXTKADHLHLWLALXHPPSPATPSLPHSLLCLAQSAPIPQALGPNNLPQIHNSLLSPQLTHDYLLNFPIHISLREHKLVSDP

SEQ ID NO: 229279 - protein, 69 aa, Zea mays
  Clone ID: MRT4577_140695C.1.pep
GTGCAGKGRRKSQGNSIEEAQTTPNITKGRWGPACSVPAKSPALLALSTHLHSKDPTESPGQQQGITYH

SEQ ID NO: 229280 - protein, 86 aa, Zea mays
  Clone ID: MRT4577_140697C.1.pep
PPPPQGGRGPFYFPKCSHTHTKFTMNLQDPPPHHVCTEQTPLTLWLQNNNLPRTKAQKKLARTHSKNSLQNSDKDQSHSDLGSGGL

SEQ ID NO: 229281 - protein, 48 aa, Zea mays
  Clone ID: MRT4577_140698C.1.pep
SPNSAPTREIALGSRTPIADWRSKAAVAGESPGVGCGMMRVLARCCGR

SEQ ID NO: 229282 - protein, 157 aa, Zea mays
  Clone ID: MRT4577_140699C.1.pep
MESFLGLDLTRNYSFFTVPAAFFIITFPHAYTITAGAKGTYDNCNPRSHRDRIASCQTLDKSHKQFLLRAKAATENGLETIGCYAAGILAANFADVPAPTINILGLGFVGSRLLYNIAYLWLQDIPRISRVRSLVWVTSIGFIMSLWVKAGNKMLSM

SEQ ID NO: 229283 - protein, 116 aa, Zea mays
  unsure (1)..(116): unsure at all Xaa locations
  Clone ID: MRT4577_14069C.1.pep
TSKPAXQCGHGARKLARKHQCGRARYGIRLRASASTASGSGPPALRDWRLTVAGDGASALWPLWAAAPGGGGLASERAGGRAPGGGGLTGELEPGEDRGGQEQEARAAGERAAALE

SEQ ID NO: 229284 - protein, 107 aa, Zea mays
  unsure (1)..(107): unsure at all Xaa locations
  Clone ID: MRT4577_1406C.1.pep
FASPRGWGETCPKPGGARKKKNTLRGPFCNNRPRIFVKRQKKSFVRAPVVSGSLFGRFPPKTVPFFFLKPKGSFLLKNKKKKKKKKKKKKKKKKKKXKKKRTLGGRP

SEQ ID NO: 229285 - protein, 71 aa, Zea mays
  Clone ID: MRT4577_140700C.1.pep
MAQGRMSCVFLACLVAVASVSASTAYPFEFKAGRTGEWRVPVAVGSSNGSLHIAWAQRIRFRVGDALRFTF

SEQ ID NO: 229286 - protein, 82 aa, Zea mays
  unsure (1)..(82): unsure at all Xaa locations
  Clone ID: MRT4577_140701C.1.pep
TWCGPQPHNXHNXTRQTPYPHRESTQTLYIIRKKQSTAHPNSLSKHAQDTITTAVKPNPEDRPSATKLLEHPFVNKPIKSPP

SEQ ID NO: 229287 - protein, 140 aa, Zea mays
  unsure (1)..(140): unsure at all Xaa locations
  Clone ID: MRT4577_140702C.1.pep
ETIISFFSVIPQFSKSKYMVGTTVECLQLFXPHFQPTSDAIKQXTQLPTQEFSWVPYVDHWHKRHWDDLHSLSTXWFRPNPLXCKQRGQHSRGTVHASPDSVVEVNLQCWVSLSFEHNGHRTSLSYSRMVWVLRSCPGLL

SEQ ID NO: 229288 - protein, 108 aa, Zea mays
  unsure (1)..(108): unsure at all Xaa locations
  Clone ID: MRT4577_140703C.1.pep
TQAALVMDATSPIAEDAKAKTRMLTETVXLQSVLKNYDPQMDIPFTRAAIGPPMPRAKMTVGMLRNAQPLEEADTMGLDSMDGEALXRPDLNKELVKRLALKYHAALG

SEQ ID NO: 229289 - protein, 105 aa, Zea mays
  Clone ID: MRT4577_140704C.1.pep
HADLIITSTFQEIAGNKYTVRRWYLHMGLTMPGLYRLAHCIDVFHHKLNIVSPLAHLSIYLPYTYSHNTLTCLHPEIEELLYTQSANTEHNFILNDWINPIIFYM

SEQ ID NO: 229290 - protein, 237 aa, Zea mays
  Clone ID: MRT4577_140705C.1.pep
MRKGQLLLLLLLCAAGSTTASAKTDPQDAAALRSLMKRWKNVPASWRKSKSPCDSWDGILCDENGRVTSLNLFGMGMGGTLSDDIGSLTELTVLDLSSNRDLGGPLPAAIGKLIKLESLALIGCSFSGPVPSELGNLSQLTFFALNSNKLTGSIPPSLGKLFNVTWLDLANNQLTGPLPTSRDNGTGLDQLLNAEHFHFNQNMLEGSIPDSLFSSSMHLKHILFDINRFTGQIPASI

SEQ ID NO: 229291 - protein, 82 aa, Zea mays
  Clone ID: MRT4577_140706C.1.pep
KTNLIILVELIKAAHKAFQVSQKWDFRNEYASRSCTTNIHPKNHQTTNGLILHTFIILAYYYGKLHTSQRDKAAYKRYFTPK

SEQ ID NO: 229292 - protein, 69 aa, Zea mays
  unsure (1)..(69): unsure at all Xaa locations
  Clone ID: MRT4577_140707C.1.pep
PPPSPPPPPPPTNPPPPPPRQPPAAAPRLPRSLAPPAQXAPPSSPPRSFGSPPVTTSRPSPGRPPWRPQ

SEQ ID NO: 229293 - protein, 80 aa, Zea mays
  Clone ID: MRT4577_140708C.1.pep
APWAQTFNSLRFIGCPGLWPFRPPRVPLPELPPPPVTLLCSPILGFETLLFGFARPFQSVDTRRWVNQPSHFWRPFLSFY

SEQ ID NO: 229294 - protein, 66 aa, Zea mays
  Clone ID: MRT4577_140709C.1.pep
KKTPHPDKNKSQSLSTTKRKIKRVASNKFKGFPPTKRGNRYRIAPGGGGECLTHFSRPKGGPLFQI

SEQ ID NO: 229295 - protein, 141 aa, Zea mays
  Clone ID: MRT4577_14070C.1.pep
GWIHPSEDPSYHVRLFAILQFLVPNSLAINAARLSIARWLSQAHSTARHGAKMSFKFKLGSMRKSHGGHVSLQSYSNSWKGTQGKTRLVWEELFGLVRLFLISFRRLAAFRIWYKTRLSGDNIALKNFGKRSKKEKKGGPF

SEQ ID NO: 229296 - protein, 181 aa, Zea mays
  unsure (1)..(181): unsure at all Xaa locations
  Clone ID: MRT4577_140710C.1.pep
LGQLCFVYIFFYLIIHPLILFCVSLQKRRDRINQKMKTLQKLVPNSNKTDKASMLDEVIDYLKQLQAQVQLMSRMGSMMMPMAMPQLQMSMMAQMAQMAQMAQMAQMNMGSLGQPGYAGLTPPMMHPPPFVPVSWDTTXTVTTFLAPQAGSGTVPADAFYAFLACQAQQNGQQQPGSMEAY

SEQ ID NO: 229297 - protein, 85 aa, Zea mays
  Clone ID: MRT4577_140711C.1.pep
YPPPWVIPVERITPEKGNGSPLKVGIPPPKVIVPKIKVHKDPKGFFYPKGRGRPPHKGKGKFFSQKVPSPPPGGAPPGAFFQEKE

SEQ ID NO: 229298 - protein, 174 aa, Zea mays
  Clone ID: MRT4577_140712C.1.pep
AGRSDTVAALVAVPLNLKQTDKASMLDEVIDYLKQLQAQVQLMSRMGSMMMPMAMPQLQMSMMAQMAQMAQMAQMAQMNMGSLGQPGYAGLTPPMMHPPPFVPVSWDTTAPHHLLAPQAGSGTVPADAFSAFLACQAQQNGQQPGSMEAYNRMVALYQKMNQTQQSAPSNPSKQ

SEQ ID NO: 229299 - protein, 85 aa, Zea mays
  Clone ID: MRT4577_140713C.1.pep
GTVFYHASLYMLMLKRRMPKIRNYDALYPKFSKIEHVYIFNDKIPSQTFIFLCIRPAKGRTIKSSTKLVHCKSIEPRKLSKYSLQ

SEQ ID NO: 229300 - protein, 96 aa, Zea mays
  unsure (1)..(96): unsure at all Xaa locations
  Clone ID: MRT4577_140715C.1.pep
PTSKXHTQHTQGTXNXQASHPQPPXHTXXAADTXKHTTPPTXTTQRRGRTMHRNSKNRXSXRPXAQDGXRPAKPTRMPRPHDAGDDGEGQGPEGWL

SEQ ID NO: 229301 - protein, 160 aa, Zea mays
  unsure (1)..(160): unsure at all Xaa locations
  Clone ID: MRT4577_140716C.1.pep
EQDEEARGRSKEPPERPPXXSPPKKXPPKGXGGNRPXHXXTGGTPPGPRPTKEKXXTHRAQEHPTKXNPQPANPNPKKNPRETPPXQQGGKGHPXPAXQRGPXTQGNKNKPDKXKRXNPPRKAQKTGPEPQKGSAPNPPGTDQHGKKGKPQQXDRTEQAP

SEQ ID NO: 229302 - protein, 78 aa, Zea mays
  Clone ID: MRT4577_140717C.1.pep
CLLLVRTALMAQKCPYFKPPFKASYLLQSFFFWKPRPWGYGGVSPFWAHLKKLGHLNPAGGRFLISSKGGRALNPQKS

SEQ ID NO: 229303 - protein, 109 aa, Zea mays
  unsure (1)..(109): unsure at all Xaa locations
  Clone ID: MRT4577_140718C.1.pep
PTRPSYNALLDSPLLARAGXYDASAETFRSSHDLFRAAFPRGFAWEVLKVYSGPPLLXFKFRHWGHKEGPYKGHAATGDKVEFFGVAVLKVDDELRAEDVEVYYDPGEI

SEQ ID NO: 229304 - protein, 60 aa, Zea mays
  unsure (1)..(60): unsure at all Xaa locations
  Clone ID: MRT4577_140719C.1.pep
KVXKEHNELXXXXFXXISPQLTHRDLVYHSVHVTLTFLICLCKRNITYCKYLACLPDVMH

SEQ ID NO: 229305 - protein, 40 aa, Zea mays
  Clone ID: MRT4577_14071C.1.pep
MAPKAEKKHPVKKPPEEEPATYKAHKAPAGNKPKAEKRLP

SEQ ID NO: 229306 - protein, 123 aa, Zea mays
  unsure (1)..(123): unsure at all Xaa locations
  Clone ID: MRT4577_140720C.1.pep
IVPPISLTQKPLNHLNXMRADRXQVLCLNIGVNRGGCSGMSYPMEFENRENPTPHDSVVEYDGFAIVCPPKTPLFMFGMDLXYXHPLIGGGFLFQNPNATKPCGCGNSFATGKEEPRAPTCHH

SEQ ID NO: 229307 - protein, 83 aa, Zea mays
  Clone ID: MRT4577_140721C.1.pep
PAASAPPPPCQPRRRRRRRRRLRPQPARAAGAVRGRGRRRGAQPARVQEAPLHDPGLVSAVLSSCGSAAHLFVTCAPCLGLFI

SEQ ID NO: 229308 - protein, 80 aa, Zea mays
  Clone ID: MRT4577_140722C.1.pep
ATVFTGLGVCKWMVRWIKIRGWYMVVKWSDGWGYKFGHPKRGGAAVWRSSCYFRLPFVVPRPLFFFFFFLYFVIFCFFLF

SEQ ID NO: 229309 - protein, 44 aa, Zea mays
  Clone ID: MRT4577_140723C.1.pep
TLSDDCIISCAYYKGSIYSSTAQVHIISGCGRWLTPGAADRIYR

SEQ ID NO: 229310 - protein, 273 aa, Zea mays
  Clone ID: MRT4577_140724C.1.pep
LETTLRRRARLESFALHCNVFVTNRDASCEWDWDTPVEVDLLGPPALRDAYLSHIGCDTRLDTEHNMLYPSLCLDVVLARILTICSVVLLHVDSLSWLDPFKDMPNLEELQLLMDYEGYCLEAVSGFFKLIPLPVLQRLFVRLHIDHEPEGEGSSSAAVWSVENDDSEDMAPREEIVLDQLTFVKFVNFSGTWCQLQLLSFFLDKSPVLQQLVLVTPEGEEALGDDRLKVIYERVAALEKASSEASITMCRPKEDDTPNHPHTRYFHEEYETM

SEQ ID NO: 229311 - protein, 80 aa, Zea mays
  Clone ID: MRT4577_140725C.1.pep
HNIFLNRLTRLSRGCSWTTFWTADAMRNAVLGVNGKDLVGRNIADNWALTQGSRTGRMRWYGWGLPWQEIPTNQSHVTGT

SEQ ID NO: 229312 - protein, 175 aa, Zea mays
  Clone ID: MRT4577_140726C.1.pep
PACGSSSSSSPTSTSSSSSSSSSSSGSGGAKSTSTALAPLRRPAAIHPMTSCPSRSDGQTSATRNTSRGVPSSAWSRRQRSTVAADSAGGWPRAKSGSSVRLTTGEPARARIHWDSHHRESAPVRTACLSESLRRMDWRTSSGRQLSRSFWSMVPLRGGSRVVEAVATHGTAHAS

SEQ ID NO: 229313 - protein, 97 aa, Zea mays
  unsure (1)..(97): unsure at all Xaa locations
  Clone ID: MRT4577_140727C.1.pep
LAILPGTIVHXRRCSPVGPHGSGMKKRQARMGVGTTQAAKVGRSRQNAPCRTGLEPPGWLHGAHPRVVAAPPYHPGITTVRVSFALHQMNTAKSSPT

SEQ ID NO: 229314 - protein, 891 aa, Zea mays
  Clone ID: MRT4577_140728C.1.pep
MHRKALKEYLKTCSAAVKLETKKHRLLSRMMFPIPLPTLRKLVRAAGLGCNAANSIGVAIRINAQSFVMLSPLPPPLLLAYKSPNFASSTVSKHAHFCLKTFPASSASTPLVPGGVVTAWDSDVFDLMSSISRSFSLTTTFSSHLTDTPLTITNVYVPSNHQDSPTFLAELADLLPSISGPWMLVGDFNMLRGTADKNRGHLDNHLCSLFNSTIDYLGVAELQLQDCLFTWSNMCSVPTLARLDRAFVNNSHTSSFPSTSHTTLPRKTSDHKPLLVSMSTSIPKSQIFKFENAWLYHPLFLPEVLPAWHLELPCPDAAARLAEHMCMPPAEQQVKAVCHERLALALKAKAAFWKQRSKHRAIVEGDTHTAFHHANATHQMRRNQIQAITVGGRELSSHASKSVAVMDFFRELRSCKNPASVKIVSKILTTRLQHEIHSLISLDQTGFLKGRSISENFVYALELIQCCHKRRSPTIALKLDFAKAFDSVHWDALQCVLRARGFSERWQSWIDQLLNTSMTSVLMNGCLGPWWSCSRGLRQGDPLSPYLFLLAANVLQTLIKHDGRVKHPLTPAEPCVVLQYADDTMIVMEGDPTNVCVLKKLLAIFSSTIGLCINFQKSVLVPIYMDEPTVQQCVSLLGCRCEGFPQTYLGLTLSLTKTRLSTFVPYTAKTDKYLAGWQAALLNPMGRLVLINSVLDSQLVYIMSSLQLLPGFVKKVDSKRRSFLWSGKDSCSGAKCLVGWVRGRVCLATLTGDLSGDHWMTLHALLPLYRSITTCLIKDGRSTTFWFDAWHGEDDLSTKFPSLFSHAKKTEVSVREVLETGLAAHLVPRLTPQAVEERDALQLVLDDVMLSEAPDMRYCPIVGVGGNLHIGSLYRVMRNGEGVLSVEAVFV

SEQ ID NO: 229315 - protein, 78 aa, Zea mays
  Clone ID: MRT4577_140729C.1.pep
TIIVNKSSIMAICNNKFKAISSDLIENFYGSKNVHMLHYYVNWESSPCSCCVDGCLPPPDGMLRSPHASGKPIGGFCF

SEQ ID NO: 229316 - protein, 144 aa, Zea mays
  unsure (1)..(144): unsure at all Xaa locations
  Clone ID: MRT4577_14072C.1.pep
LAAAXAAAPAARADGDDEEAPTEPRXRRRXRKDRGAPDEXDAPGRGHSKKXXPENERRGARXKKAKAGPNXKEDRDEHKXEGSKXGEPGEPTSQXRPKGPGEPKKEEGQRTAXEAPGEKHKTEGGTKEKPATQTNKGRRAPTPE

SEQ ID NO: 229317 - protein, 191 aa, Zea mays
  Clone ID: MRT4577_140730C.1.pep
MQTEARVGVVVDGGAAVGRCQEQRHIGTAAHLAAGGFAGAVSKTCTAPLARLTILFQVAGMHSDVATLRKCSIWHEASRIFREEGIGAFWKGNLVTIVHRLPYSAISFYSYERYKNLLQTVPGLDRDSNNVGVVRLLGGGLAGITAASLTYPLDGVRTRLATQKTTRYYKGIFHAVSTICRDEVVKGLYKG

SEQ ID NO: 229318 - protein, 50 aa, Zea mays
  Clone ID: MRT4577_140731C.1.pep
QKGGEPPHAFNSTRSVSDVFLITSLLSLGGGGTSPHLGGHGFGFSLILTG

SEQ ID NO: 229319 - protein, 159 aa, Zea mays
  unsure (1)..(159): unsure at all Xaa locations
  Clone ID: MRT4577_140732C.1.pep
RPRVAASLTYPLDVVRTRLATQXKTTRHYKGIFHAVSTICRDEGVFGLYNGLGATLLGVGPSIAISFSVYESLRSYWQTERPHDSTAVVSLFSGSLSGIASSTATFPLDLVKRRMQLQGAAGTASVQKSTISGTVRDILQREGLRGFYRGIAPEYLKVV

SEQ ID NO: 229320 - protein, 61 aa, Zea mays
  Clone ID: MRT4577_140733C.1.pep
SGNPEKGRGNPTWGSSGSLFSGNGLFPEMGARSQSSHKKQGHHGRFGLPVLGFLAGFAHAS

SEQ ID NO: 229321 - protein, 94 aa, Zea mays
  Clone ID: MRT4577_140734C.1.pep
RASRAPRDMALALAPISSTPAGGPHPPDSSSTAAASPSAVPRSTPTPSAAARPPQSDKKKPKQDPRLPSPRGGRHIITGKASETTRCHRLRQPQ

SEQ ID NO: 229322 - protein, 133 aa, Zea mays
  Clone ID: MRT4577_140735C.1.pep
PSSRHFYSPPPMPPPEPPPPPKPPPEPPPKPPPLPPPKPPPAPPRPPPAPAPPPAPPPAPPPRPPPPPTPPPAPPPNPPPAPPPSPPPPPAPPPRPLPAPAPPPAPPPRPPPPPTPPPAPPPNPPPAPPPSPP

SEQ ID NO: 229323 - protein, 74 aa, Zea mays
  Clone ID: MRT4577_140736C.1.pep
SNYITSTFHYFILISNFSLPFFFSNNISFYISNITLPFIIHYISLLFLFTTHIYHFYFLIFLLIYFFIIIFFIF

SEQ ID NO: 229324 - protein, 112 aa, Zea mays
  Clone ID: MRT4577_140737C.1.pep
LISLTIGKSFMPEGNGKELIPGSTSSLGGGRPFILFLPVMQVLTLSCFFFASFRDTVKIQTVGIQYMYTYISSPQRPLASEELQLAAPRAPAQPCSSRIPSLRTRACDVIAL

SEQ ID NO: 229325 - protein, 112 aa, Zea mays
  unsure (1)..(112): unsure at all Xaa locations
  Clone ID: MRT4577_140738C.1.pep
MAPKRILKELKDLQKHPPTSCTAGTXGEDMFNWQGTIMLPHXSPYARGVFLGNILFPPDYPFKPPKVSFKIKVFHPNINCNGSICLDILNKQCNPAXLTISNVLSLICSLLI

SEQ ID NO: 229326 - protein, 124 aa, Zea mays
  unsure (1)..(124): unsure at all Xaa locations
  Clone ID: MRT4577_140739C.1.pep
PAISGESSVVAESAPLQLSSPDSRAQCRRRPPSIRRRRRRPPPPTARRRRRRGXHERRXSSGRRPCTWATGRRRRCRRASRSPRRGRRRLRRRRRRSGLARPRCWRSTPPPWRRRRCRWRAGCR

SEQ ID NO: 229327 - protein, 36 aa, Zea mays
  Clone ID: MRT4577_14073C.1.pep
KKKKKKKKKKKKKKKKKKKKKKKKKKKKKKKNTQHP

SEQ ID NO: 229328 - protein, 45 aa, Zea mays
  Clone ID: MRT4577_140740C.1.pep
LQRCQLLGGVTCKLEPFQLGSWHWTFFRGPRAPKPVFFQLPSCRS

SEQ ID NO: 229329 - protein, 60 aa, Zea mays
  Clone ID: MRT4577_140741C.1.pep
RGCSRQPAHHPRCGGRRCPRACRSFRSRYSDLNLAHGDWRVEHLGGRRVDETRAAEAADA

SEQ ID NO: 229330 - protein, 94 aa, Zea mays
  Clone ID: MRT4577_140742C.1.pep
GQSNRPPFIYRSQNKRGGEKKHWPPGPTLMGALNLPTGGGGVAPLFPTGNETPGGPRPFLGVGNPGPKKIGGARNNREGPQRGGQKGAPPLPPA

SEQ ID NO: 229331 - protein, 63 aa, Zea mays
  Clone ID: MRT4577_140743C.1.pep
PQTNQPPKYKAYQYILWVVALVLLLVGFVISLVMLFKGKNGNDGCHWCHYLNCVPTSKWKCNT

SEQ ID NO: 229332 - protein, 91 aa, Zea mays
  unsure (1)..(91): unsure at all Xaa locations
  Clone ID: MRT4577_140744C.1.pep
QDSSVQPIFEITSHTLXKVLTALNACTECGQDFILDSMSRYIAADVRDAVNIVXRVIPRLXHANCADVHSAVMIILLQMELITSTDVVRNL

SEQ ID NO: 229333 - protein, 327 aa, Zea mays
  Clone ID: MRT4577_140745C.1.pep
MASDGDGKGRVATAPGAGGYGYGYGYAGFEGEEDRKWWPWLVPTVIVACIAVFVVEMYENNCPKNRSQLGGDCVAGFLRRFSFQPLRENPLLGPSSSTLEKMGALDWNKIVHQNQGWRLISCIWLHAGLIHLVVNMLSLLFIGIRLEQQFGFVRIGAIYLLSGFGGSVLSALFLRNNYISVGASGALFGLLGSMLSELLMNWTIYSNKAAAIITLLFIIALNLAIGILPHADNFAHIGGFATGFLLGFVLLARPQFGWMEHHELPQTNQPPKYKAYQYILWVVALVLLLVGFVISLVMLFKGKNGNDGCHWCHYLNCVPTSKWKCNT

SEQ ID NO: 229334 - protein, 324 aa, Zea mays
  Clone ID: MRT4577_140746C.1.pep
MASDGDGKGRVATAPGAGYGYAAYGGYQGAEERKWWPWLVPTVIVACIAVFVVEMYENNCPKHGSQLGDCVAGFLRRFSFQPLRENPLLGPSSSTLEKMGALDWNKIVHQNQGWRLISCIWLHAGLIHLVVNMLSLLFIGIRLEQQFGFVRIGAIYLLSGFGGSVLSALFLRNSYISVGASGALFGLLGSMLSELLMNWTIYSNKAAAIITLLFIIALNLAIGILPHVDNFAHIGGFATGFLLGFVLLARPQFSWMESHELPHTNQPPKYKAYQYILWVVALVLLLVGFVISLVMLFKGKNGNDGCHWCHYLNCVPTSKWKCNT

SEQ ID NO: 229335 - protein, 56 aa, Zea mays
  Clone ID: MRT4577_140747C.1.pep
HKPLIGTLEEAPHLKLNGENPRTLAIKEGRITKGAGRYGASKCIGPAGGNPPPHRV

SEQ ID NO: 229336 - protein, 247 aa, Zea mays
  Clone ID: MRT4577_140748C.1.pep
GTAPRCRPAARQCSRGGRAPGLCSVQSRQPSWRWRPGAGRGLACRGSPAGGSGGGGAAKGAASDESSEDSRRSGEPKDGSASQEKNHATSQIPALAPEYLAPYSQLELNQSIASAAYQYPDPYYAGMVAPYGSHAVAHFQLPGLTQSRMPLPLEVSEEPVYVNAKQYHGILRRQESRAKAELEKKVVKARKPYLHESCHQHAMRRARGNGGRFLNTKKSDSGAPNGGENAEHLHVPPDLLQLRQNEA

SEQ ID NO: 229337 - protein, 240 aa, Zea mays
  Clone ID: MRT4577_140749C.1.pep
MATSSKTQEALALMALAMLVTNAAVAADDASPSCPRLTLHNLCPYPVWPLVTANAGYPSVAGTDSRLNGNGEGLVTMALPQGAWSGRVVARTGCADDGMSCDDNCSPQCKTGNTPPVTVAQVSVGGSGGLAEYSVSLVDGFNVPMVVTPCDFAAGAQCPTLGCAVDLTQDQECCPAAGAGARAPEGGCGAAGTEAALFKNRCPDTRTTSTDVEATPQNCIAPGELKVVFCPARDCPPSCN

SEQ ID NO: 229338 - protein, 89 aa, Zea mays
  Clone ID: MRT4577_14074C.1.pep
GGPLCFFPGFSRGFGLFLGHSSGVGAPSFSLGFGGLLFLGSPFVFLWFPGRFPRPSGLFPPPFSVPRSCFLSLFPSLGSWGFLVLFSFV

SEQ ID NO: 229339 - protein, 117 aa, Zea mays
  Clone ID: MRT4577_140750C.1.pep
PLPHAGLLNRLIPVPLPGATATTAGETAPSTAPELVHHGCTAWPPDGSAAPCPMGSTRFVRPGRDSMLLILAALLAAPLRPWPSLFQWHQEDERWKSQTEMNSGSTSQTRIDNESRI

SEQ ID NO: 229340 - protein, 74 aa, Zea mays
  Clone ID: MRT4577_140751C.1.pep
RQSHGILRRRQSRAKAELEKKVVKARKPYLHESRHQHAMRRARGNGGRFLNTKKSDSGAPNGKAEPEKASTIVA

SEQ ID NO: 229341 - protein, 63 aa, Zea mays
  Clone ID: MRT4577_140752C.1.pep
VHSHLSDLVDVMLDARLPTLVLVSFAVGLDRNVSIKIAEPKGGRRLETVGPGIIPGGPQACCF

SEQ ID NO: 229342 - protein, 114 aa, Zea mays
  unsure (1)..(114): unsure at all Xaa locations
  Clone ID: MRT4577_140753C.1.pep
MRGIHHRDPLXTYVFILIMXVLNSIFSKAGEFGLLHPLANDLQKQXIPIYANDVVLFIKPMDXNATPNLQKSCVIPIQCDPDQVEXEMAEQTLPCVHSEFPCTYLGLPICNRKL

SEQ ID NO: 229343 - protein, 207 aa, Zea mays
  unsure (1)..(207): unsure at all Xaa locations
  Clone ID: MRT4577_140754C.1.pep
XKPPHPNSRSAQPFPHPTFRPLRVAASPPSCSAPPPGQTPAPRCLVLPCIPRIPSHWPWQSVPRSLCTASACSSKPGRAVPTFGRLLVIAPAAFFLIRSSSQNCSLCNQRARPVSQIQNRPCPNFFSYAVRRPPDRVRPRGGRPRRARCDHAAAGKPEPPSQSAGVAPPVFAVHLAGAHPRHPRSSPRRLRSVPELRGIDGQTSATK

SEQ ID NO: 229344 - protein, 71 aa, Zea mays
  Clone ID: MRT4577_140755C.1.pep
SCLEANSVRVNRMSVQMCQHRSNYEVSCTLGGYKGIGVATRCKEIYKDNDADLDWSNAWAKAWADAWSDAW

SEQ ID NO: 229345 - protein, 46 aa, Zea mays
  Clone ID: MRT4577_140756C.1.pep
SIRQNKLQKSQVAPLLWDKIPQQLTAMCGLQQPTPCPYGAAGVFPH

SEQ ID NO: 229346 - protein, 75 aa, Zea mays
  Clone ID: MRT4577_140757C.1.pep
GWVPPRAGPGKKKKKKKKKKKKKKKKKKKKKKKKKKKKKKKKKKKKKTPPHHQGGGGPPFLFPPNFFGGGLVNFP

SEQ ID NO: 229347 - protein, 167 aa, Zea mays
  Clone ID: MRT4577_140758C.1.pep
MELAVAQVQPRYIVLDLSGGGLRRRLGPPPPAAGVPPDAPAMAALEAHHRTRRSGAEDDLATSRPMIQSGAVMARSVHAETTGADADAVSGAGTSGSEAAEEESGDEADSFDASFCQEGFARKIEALAELVGMDGACEPVAVLSEVVRVLRSIDTHRHSEYIPCASD

SEQ ID NO: 229348 - protein, 73 aa, Zea mays
  Clone ID: MRT4577_140759C.1.pep
IVSLKKKKKKKTFKKKIFLKKKEPSIKSTLPYSTTPLLTYSLSSPNLIFFHYIFISPPSSIPKTPPPIPLSNN

SEQ ID NO: 229349 - protein, 63 aa, Zea mays
  unsure (1)..(63): unsure at all Xaa locations
  Clone ID: MRT4577_14075C.1.pep
TEHGSQPEGHAXGEKTAGQHHDAQGRXFSQTGAGKHAPRASYEGLEPPEADEVRTGTHRQLHH

SEQ ID NO: 229350 - protein, 60 aa, Zea mays
  Clone ID: MRT4577_140760C.1.pep
DDLVDATRQIPPPQSATNHGEDMGRNVEGSLLVQAEIHGGASSLLSRSSQSVESSTMIWD

SEQ ID NO: 229351 - protein, 78 aa, Zea mays
  unsure (1)..(78): unsure at all Xaa locations
  Clone ID: MRT4577_140761C.1.pep
PGGDPRACGNTSQRNAGDGATRAXLERTDWPLAPFVDSYRGLHVDGCEDSAEARYCASQGARCWDRGGRGDLYAAQAS

SEQ ID NO: 229352 - protein, 45 aa, Zea mays
  Clone ID: MRT4577_140762C.1.pep
AGVSFVICAWWYIFLYSYGPTQVILKFASTTTKAVMEQLGNMLKL

SEQ ID NO: 229353 - protein, 109 aa, Zea mays
  Clone ID: MRT4577_140763C.1.pep
HERRWRRILLHGRVIHIRRRNLHVRVLWGIDEASAVAGAAAARCEPVDCFQFQGSKPLRSCPRFNRGGQRTPGDTWRPARPQHNGLTPCSCSPLRFLYLVTCPSSLRRF

SEQ ID NO: 229354 - protein, 91 aa, Zea mays
  Clone ID: MRT4577_140764C.1.pep
GHQQDLLGLPWMPAGHVLGGWTHARPSTEPCMRWSLYKVPSLFKRGESKSSFRAVSLFPRNIYVPLPHVRSCMILPPFFYLPHFSKKCTSG

SEQ ID NO: 229355 - protein, 54 aa, Zea mays
  Clone ID: MRT4577_140765C.1.pep
RNNQSPMLLKRVNAQQPLMGRNQTQDRMLTYHTATQNTLMILNIIILTPTDDTF

SEQ ID NO: 229356 - protein, 245 aa, Zea mays
  unsure (1)..(245): unsure at all Xaa locations
  Clone ID: MRT4577_140766C.1.pep
MAEAPTTPPRKAKPPMSRLMRLSIKVVDRVTDATRRADGTLNRFALSLLDPRVPAISSPCRGVASRDVILDGALRLRARLFHPATTSKSTAPLPVIVFFHGGGFAYLSAASPAYDTACRRIARYASAAVLSVDYRRAPEHRFPAPYDDGIAALRFLDDPKNHPTPLDVSRSFVAGDSAGGNIAHHVARRYAXDVASFRNIRVAGLIAIQPFFGGEERTPSELRLDGAAPIVXIDRTDWMWRAFLP

SEQ ID NO: 229357 - protein, 56 aa, Zea mays; identical to SEQ ID NO: 192902
  Clone ID: MRT4577_140767C.1.pep

SEQ ID NO: 229358 - protein, 47 aa, Zea mays
  Clone ID: MRT4577_140768C.1.pep
SLTTVVLQRDNGALADSNVTYMHILSTTYILMQSTSHGQTKHYDVLV

SEQ ID NO: 229359 - protein, 56 aa, Zea mays; identical to SEQ ID NO: 192902
  Clone ID: MRT4577_140769C.1.pep

SEQ ID NO: 229360 - protein, 118 aa, Zea mays
  Clone ID: MRT4577_14076C.1.pep
MHTFKAGKQSRLSMIHNAMQETPTISIDGHDIILLDLEGSYTLHDVYYSLNVHVCHCIALLYYDDYPPGYYNMVSTTLFIDNAKSASAVIRYSSASRTAPATNMNKPSDRLAIAINHT

SEQ ID NO: 229361 - protein, 56 aa, Zea mays; identical to SEQ ID NO: 192902
  Clone ID: MRT4577_140770C.1.pep

SEQ ID NO: 229362 - protein, 135 aa, Zea mays
  Clone ID: MRT4577_140771C.1.pep
MKFLKVGRVVIITRGRYAGKKCVIISPLDNGTKSHPFPHALVAGIETYPSKVTRRMSKTKQAKKSKVKPFVKQVNYTHIMPTRYTIELENLKGVISADTFKEVSQREEAKKTVKKAFEERYQSGKNRWFFTPLQF

SEQ ID NO: 229363 - protein, 56 aa, Zea mays; identical to SEQ ID NO: 192902
  Clone ID: MRT4577_140772C.1.pep

SEQ ID NO: 229364 - protein, 108 aa, Zea mays
  unsure (1)..(108): unsure at all Xaa locations
  Clone ID: MRT4577_140773C.1.pep
MRNHIGIHMXQAGIQCXNLCWHQHCLEHDIQAHGDMTIDRSIDAGDNAFNNTVTETDAPKHVPGAVEASVVPNVMTEAXTEIYHHVLLIEQMVDANDDSAHNYYSIDY

SEQ ID NO: 229365 - protein, 56 aa, Zea mays; identical to SEQ ID NO: 192902
  Clone ID: MRT4577_140774C.1.pep

SEQ ID NO: 229366 - protein, 56 aa, Zea mays; identical to SEQ ID NO: 192902
  Clone ID: MRT4577_140775C.1.pep

SEQ ID NO: 229367 - protein, 270 aa, Zea mays
  unsure (1)..(270): unsure at all Xaa locations
  Clone ID: MRT4577_140776C.1.pep
LAPNRDPLPLAVTAAPTRVTADLVPMTQKKCRLRRRSPREGSSRRRRGEEGASLSGSHVESDSSSTLDEPAGRTSSAPPSGSLDEPPVAWPARESRYHEILASRLAELQLQLCAAAADDDISNLPSDEIVQALTRSNFYDDEMRAALVEYQIQKFLSEPHGPGVGERNSVEDMGDDIPEEEFVNYSEKLKACRRAGIDTETRLNQEEFRMLHVKYVRYRIKAYLLLKGKHIDEQDEATSESKYPLELALENTCFSPYLEXWCLLAGISTL

SEQ ID NO: 229368 - protein, 142 aa, Zea mays
  unsure (1)..(142): unsure at all Xaa locations
  Clone ID: MRT4577_140777C.1.pep
MVWSAGMAMRGASAALLVLALVATVARAEDPYHFFEWKVTYGTKTIMGTPQKVILINDMFPGPTINCTSNNNIVINVFNVLDQPLLFTWHXMCPIQPNTNFTYHWQPKDQIGSFFYYPSTGMHRAAGAYGLISVHRRDLIPV

SEQ ID NO: 229369 - protein, 41 aa, Zea mays
  Clone ID: MRT4577_140778C.1.pep
MPCIVRNVRILLVRIISLPYHSSQLQKSSLAPEKSSVHISL

SEQ ID NO: 229370 - protein, 557 aa, Zea mays
  Clone ID: MRT4577_140779C.1.pep
MVWSAGMAMRGASAALLVLALVATVARAEDPYHFFEWKVTYGTKTIMGTPQKVILINDMFPGPTINCTSNNNIVINVFNMLDQPLLFTWHGIQQRKNSWQDGMLGTMCPIQPNTDFTYHWQPKDQIGSFFYYPSTGMQRAAGAYGLISVHSRDLIPVPFDTPADDFPVLVGDWYTKDHTVLAKNLDAGKGIGRPAGLVINGKNEKDASNPPMYNVEAGKTYRFRVCNVGIKASFNIRIQNHIMKLVEMEGSHTMQNDYDSLDLHIGQCLSFLVTADQKPGDYLLAVSTRFIKEVNSITAVIRYKGSNAPPPAKVPESPSGWAWSINQCRSFRWNLTASAARPNPQGSYHYGQINITRTIKLAMGRGKVDGKERFGFNGVSHVDPETPVKLAEYFNTTDGVFQYDIIGDVPPSKSAPTKMAPNVIRAEFRTFIEVVFENPEKSIDTIHIDGYAFFAVGMGPGKWTPASRSTYNLLDTVSRHTIQVYPRSWTAVMMTFDNAGMWSIRSNIWERQYLGEQLYVSVISPERSLRDEYNMPETSLRCGKVVGLPMPPSYLSV

SEQ ID NO: 229371 - protein, 194 aa, Zea mays
  unsure (1)..(194): unsure at all Xaa locations
  Clone ID: MRT4577_14077C.1.pep
MQLNAMSSFSAGHGRRPKKKPYHREPGLDKAMDLQKKPALLLRLRDLILAQKTGSLLVRDLEKEVGFVQKWDFLSLIGRHPNIFHVSGGSASRKPISVTLTEKARKISCEDADARELMEPILVRNLRKLVMMSMDCQIPMEKIELIQSELGLPKNFKSNLIPRYPXFFSIHDVKGLDRLCLEHWDSSLAVTIRE

SEQ ID NO: 229372 - protein, 203 aa, Zea mays
  Clone ID: MRT4577_140780C.1.pep
ARASPPARDGVVGWDGNDMFPGPTINCSSNNNILVNVFNMLDQPLLFTWHGIQQRKNSWQDGMPGTMCPIQPNTNFTYHWQPKDQIGSFFYYPSTGMQRAAGAYGLISVHSRDLIPVPFDTPADDFPVLIGDWYTKDHAVLAKNLDAGKGIGRPAGLVINGKNEKDASNPPMYNVEGGKTYRFRVCNVGIKASFNVRIQDHIM

SEQ ID NO: 229373 - protein, 208 aa, Zea mays
  Clone ID: MRT4577_140781C.1.pep
RPGINITRTIKLAMGRGKVDGKERFAFNGVSHVDPETPVKLAEYFNASDGVFKYNLIGDVPPSNTAPTKMAPNVISAEFRTFIEVVFENPEKSIDTIHIDGYAFFAGGMGPGKWTPASRSTYNLLDTVSRHTIQVYPRSWTAVMMTFDNAGMWSIRSNIWERQYLGEQLYVSVISPERSLRDEYNMPETSLRCGKVVGLPMPASYLSV

SEQ ID NO: 229374 - protein, 239 aa, Zea mays
  unsure (1)..(239): unsure at all Xaa locations
  Clone ID: MRT4577_140782C.1.pep
MDEDWELLLASPKAASAAEPYAGGGEDDAGAIKHDYFDLGSDAKYPRRASLSTGDEEEGVEEGLLRASDNASWVEPDPDDLLFPGRDRAALWSDSSSDGERPEIEATDPVERAREEAGATAAEADGVEGAVAKGGXAWWXLPLDALRVWAMRAARGAWSVPFAVALLGFAVLGRRLYRMRRQSKAAARVRLVFDEMKASQFKGQSSRLNESTTMVRRTPFIKPMLPANGVTPWPVLGHL

SEQ ID NO: 229375 - protein, 557 aa, Zea mays
  Clone ID: MRT4577_140783C.1.pep
MVWSAGMAMRGASAALLVLALVATVARAEDPYHFFEWKVTYGTKTIMGTPQKVILINDMFPGPTINCTSNNNIVINVFNMLDQPLLFTWHGIQQRKNSWQDGMLGTMCPIQPNTNFTYHWQPKDQIGSFFYYPSTGMQRAAGAYGLISVHSRDLIPVPFDTPADDFPVLVGDWYTKDHAVLAKNLDAGKGIGRPAGLVINGKNEKDASNPPMYNVEAGKTYRFRVCNVGIKASFNIRIQNHIMKLVEMEGSHTMQNDYDSLDLHIGQCLSFLVTADQKPGDYLLAVSTRFIKEVNSITAVIRYKGSNAPPPAKVPESPSGWAWSINQCRSFRWNLTASAARPNPQGSYHYGQINITRTIKLAMGRGKVDGKERFGFNGVSHVDPETPVKLAEYFNTTDGVFQYDIIGDVPPSKSAPTKMAPNVIRAEFRTFIEVVFENPEKSIDTIHIDGYAFFAVGMGPGKWTPASRSTYNLLDTVSRHTIQVYPRSWTAVMMTFDNAGMWSIRSNIWERQYLGEQLYVSVISPERSLRDEYNMPETSLRCGKVVGLPMPPSYLSV

SEQ ID NO: 229376 - protein, 559 aa, Zea mays
  Clone ID: MRT4577_140784C.1.pep
MVWSAGMATMRGASAAALLVLALAAAVARAEDPYHFFEWKVTYGTRTIMGTAQKVILINDMFPGPTINCSSNNNILVNVFNMLDQPLLFTWHGIQQRKNSWQDGMPGTMCPIQPNTNFTYHWQPKDQIGSFFYYPSTGMQRAAGAYGLISVHSRDLIPVPFDTPADDFPVLVGDWYTKDHAVLAKNLDAGKGIGRPAGLVINGKNEKDASNPPMYNVEAGKTYRFRVCNVGIKASFNIRIQDHIMKLVEMEGSHTMQNDYDSLDLHIGQCLSFLVTADQKPGDYLLVASTRFIKEKSSTTAVIRYKGSSAPPPAKLPEGPSGWAWSINQCRSFRWNLTASAARPNPQGSYHYGQINITRTIKLAMGRGKVDGKERFAFNGVSHVDPETPVKLAEYFNASDGVFKYNLIGDVPPSNTAPTKMAPNVISAEFRTFIEVVFENPEKSIDTIHIDGYAFFAVGMGPGKWTPASRSTYNLLDTVSRHTIQVYPRSWTAVMMTFDNAGMWSVRSNIWERQYLGEQLYVSVISPERSLRDEYNMPETSLRCGKVVGLPMPPSYRAV

SEQ ID NO: 229377 - protein, 90 aa, Zea mays
  unsure (1)..(90): unsure at all Xaa locations
  Clone ID: MRT4577_140785C.1.pep
MSSAFSVNVSFLLTNFLESANLKYVRLRYHYLIMHGVYLGQHPXIVLTCETKLSTLSRNQLRHKVSAKGTYDLATVLALHHRPQLHHLRL

SEQ ID NO: 229378 - protein, 64 aa, Zea mays
  Clone ID: MRT4577_140786C.1.pep
RTFSHHFDIHSIQKRIQPLLPLFYFFTTFLKVDRLCIVKCSGNIHIFLLNNHLSFQGMGDFILL

SEQ ID NO: 229379 - protein, 91 aa, Zea mays
  Clone ID: MRT4577_140787C.1.pep
QRAARAFRRSMSRARVRTVKDLAEERASVLAASSKVSDEAAAAATAEPSAGAKTFSSNDARDGAMDSVQDEPHQQCHDDYHPEIVPYKIIH

SEQ ID NO: 229380 - protein, 107 aa, Zea mays
  unsure (1)..(107): unsure at all Xaa locations
  Clone ID: MRT4577_140788C.1.pep
GQERDDSPTNKSGVQEETRPNAQSQGKSRNNQRAIGTRAADKREQEERRVRHDSLATDPENVALDDASRYQSETENERGSKENHTEVGREDPXEXNRFLDDKLGEHQ

SEQ ID NO: 229381 - protein, 45 aa, Zea mays
  Clone ID: MRT4577_140789C.1.pep
VKDRQLELHKVCAQLLRHKTADGKLRLSVLMLRGACNRGIMHYLY

SEQ ID NO: 229382 - protein, 114 aa, Zea mays
  Clone ID: MRT4577_14078C.1.pep
MIAADRIINYVLLTASRLLEVRRLTVNTDPRLVSSDKLGIGGGDAKSILPDTDLARRNIRDVVASPGNLIAKRLAVDLGTVLRTMRLPTHISSLSANLTSISQSTLPRNIIREK

SEQ ID NO: 229383 - protein, 181 aa, Zea mays
  unsure (1)..(181): unsure at all Xaa locations
  Clone ID: MRT4577_140790C.1.pep
MADDKHDSEHALSDSDTTTDEQQVLAQTSEAEEKRLLRKLDLRLLPAVSILYLLSFLDRSNVANARIEGLTKDLKMTGNQYLTGLTLYFVGYVLFEIPCNIVLKRTTPRFWLPTLTVAWGXVATLIGIVQNLTGFLIVRFFLGVTESGLFPGVVYYLSMWYKRNERQYRISLFXSCASLAG

SEQ ID NO: 229384 - protein, 84 aa, Zea mays
  Clone ID: MRT4577_140791C.1.pep
ESTLNIHLNDSNTLLLAQTPTTRYLITNPKNIPQDYPLAEYVFGPTYKLPYKNKPAAHLKQLAHNGLLSNPNKYAPMSHSQSHS

SEQ ID NO: 229385 - protein, 68 aa, Zea mays
  unsure (1)..(68): unsure at all Xaa locations
  Clone ID: MRT4577_140792C.1.pep
HSSSTSEVAWLESVSLAPRRRGCRPWHNGXGILRRVAGRRRRGVYGATRQWHWGGAGGGTAPLGMRRS

SEQ ID NO: 229386 - protein, 81 aa, Zea mays
  Clone ID: MRT4577_140793C.1.pep
RLTPGPPNPLPFSEISPPPPGTSVGRLFPVRTYPIARHHCLDAALPLGIIAEHALHHGQRPLFHPQCTSTACRSTYLTICS

SEQ ID NO: 229387 - protein, 226 aa, Zea mays
  unsure (1)..(226): unsure at all Xaa locations
  Clone ID: MRT4577_140794C.1.pep
MKFSTSVILPLLPALSTAAVIPRQNGDGPQGSTDSTQGDLGARPPPRFPFPVTKFPVPTETVVLKEAMYIAAGQVFDGQMKRYGRVEGSCSEQAEGTDADAVFNLLPGATIRNVIIGKHQSEGIHALGDAWVENVWWEDVCEDALTSKGLNTQLRVIGGGARNATDKIFQDNSLGGKVNITGFYAENFGTFYXSCGNCXHQAKRNVTIXNVIAVKGTRMGIINPKL

SEQ ID NO: 229388 - protein, 216 aa, Zea mays
  unsure (1)..(216): unsure at all Xaa locations
  Clone ID: MRT4577_140795C.1.pep
MASDPPGDGTSGEETAPGPAPAVEAPPAPAVPARSRWAAEIXSTPVSTPAKTLXPPESAADPVSVPSPAPNPLSETLSSXPLHPPXTEAVDAAALSDPAAPASVPTRAPSGERGAASGDPSSGLNRVGGGIPNGHGDDRAAAAAVKAEKARKRRLRSELRRCLAGELDQVRVLSRRLKEAAEALAQQEASEPVPLPLMVLPTQQQVVDAGYVQHQL

SEQ ID NO: 229389 - protein, 42 aa, Zea mays
  Clone ID: MRT4577_140796C.1.pep
VALGFSFYILILLRGPKNTQRITCRKWRTKRAKFVSGRVFKS

SEQ ID NO: 229390 - protein, 52 aa, Zea mays
  Clone ID: MRT4577_140797C.1.pep
LGTVCFVCFNVGLGIRCIWMFVCATTVALQSVYRLLCIKLVFVVQLVIHVSI

SEQ ID NO: 229391 - protein, 27 aa, Zea mays
  Clone ID: MRT4577_140798C.1.pep
EKGGTIITLLTSSEPLAAHLENRTYFY

SEQ ID NO: 229392 - protein, 122 aa, Zea mays
  Clone ID: MRT4577_140799C.1.pep
YISISQWTTPQNPNNYRGTDYSHTLTPREVEEFKASPGQSGRGTDAQPSGEPWEEPFFCSSPCPPLLLLPGPLPWSSSPHLPPAFAAPCQLLNDPLIPYPRQKPIPGGQRPQPPNILPSPKS

SEQ ID NO: 229393 - protein, 144 aa, Zea mays
  Clone ID: MRT4577_14079C.1.pep
WLVLCQVARETSKGIADFVDGNRQGFSVASAVLLSLVPWIQGCATLLHLALLAFNAAMLAILSRLEQKGESVFAKKEYARAVILVASQKTLPVLVAVVEQLGGAFGESGFLVIPCVAAHINQIIIDSIIVNWWRQKDQQFTSAK

SEQ ID NO: 229394 - protein, 79 aa, Zea mays
  Clone ID: MRT4577_1407C.1.pep
FVSDSRSAVGTADRSVRLVRYRSARAIILVDRAGGDYDLPLAGNKAPHFEADAEFDQELINVKVSEYIGKKHAAMVLYP

SEQ ID NO: 229395 - protein, 73 aa, Zea mays
  Clone ID: MRT4577_140800C.1.pep
QLHEIPSDFADLNYRNLIYSDQIETSRREFVTSLIYGTTPCKDRNSALRALCSSQAVYQLKLMLRNTDLLQCR

SEQ ID NO: 229396 - protein, 49 aa, Zea mays
  Clone ID: MRT4577_140801C.1.pep
LATLCLTFLPKVSSSIRATNLRQSVAQLATNQTCLKTMSTLALLTAAVI

SEQ ID NO: 229397 - protein, 61 aa, Zea mays
  Clone ID: MRT4577_140802C.1.pep
STSSLSILLLGADIRYRYSFSFFACCCALTTSIFHYGGSRHHQPHGARRYATHECAPVRAH

SEQ ID NO: 229398 - protein, 106 aa, Zea mays
  Clone ID: MRT4577_140803C.1.pep
QGALLEVEKKNAGKAGPLFAPFDASGGFFVCPVDKSGRSHIKVPFPLAKGPDFKNQFFPKAAKEGMVQLKGPRFVGGVRPPFYNAIPLPGVKKLFPFLRAFPPRTP

SEQ ID NO: 229399 - protein, 122 aa, Zea mays
  Clone ID: MRT4577_140804C.1.pep
MVSAEKGMGERGVSDGLHLTTMNNSESMDDDTWSFSGRRDASFGWVGEGRPRWVRAKGKGRDEGEREEKVGPAAGEAGGRGCGGVGARARRLRTLLAYRWAAHTATGPRRGLGGSAQSWAAG

SEQ ID NO: 229400 - protein, 115 aa, Zea mays
  unsure (1)..(115): unsure at all Xaa locations
  Clone ID: MRT4577_140805C.1.pep
ITPLFTSGTGVFLHCSKHTSVLCLITTIXKACDAARSTTQSSPPVNHHILARNSRGVHHPMTRLPTTLRASFQRQRKSSQSLTPLVQHPGPALLLLPAARGAELELETVACPVRK

SEQ ID NO: 229401 - protein, 53 aa, Zea mays
  Clone ID: MRT4577_140806C.1.pep
GSCRMELVPIPVISSLTHCQAPWRCQIPTGLGPPVGFRRNVNFPPLILKEGSP

SEQ ID NO: 229402 - protein, 53 aa, Zea mays
  Clone ID: MRT4577_140807C.1.pep
FISKSVGQLFIDFVPMFGKCVLPVEHTSSVIILASSTCVSLYAIVKNAKWYCQ

SEQ ID NO: 229403 - protein, 130 aa, Zea mays
  Clone ID: MRT4577_140808C.1.pep
MPQALSTGPVFVSAPSAGNSSPASPRLLSVSLLATTGLPPPQAPYARCPGLGPFSGTEHPPAEYTMEVRPMVALRAALVGGVAAFAKIGGAMKAAGGVKIGAAAAAVTAATSAAISGKDAKEDTSKPETK

SEQ ID NO: 229404 - protein, 181 aa, Zea mays
  unsure (1)..(181): unsure at all Xaa locations
  Clone ID: MRT4577_140809C.1.pep
MAVTATTVAAAITMLAAVAAVFLTVLLCFYIVLCAKQYRGEAPXRAAAAAPGRGCCAPCSAAGVRTAAAAPPSGATRAGSTTRPWRGCPGGRXAGEALDCAVCIAEVAAGEAARVLPRCGHPFHVGCVXAWLRSHSTCPLCRCPAVDDPPAVATPVADRESPNFPTNVLFFGSQDDVSTGR

SEQ ID NO: 229405 - protein, 352 aa, Zea mays
  unsure (1)..(352): unsure at all Xaa locations
  Clone ID: MRT4577_14080C.1.pep
MMLGMLSRTRLAGAALRVALTALLPLVLPAYYVYKLTTYLLGAVFPEDVXGKVVLITGASSGIGEHLAYEYAKRGAYLALVARREASLREVGDVALGLGSPGVLVLPADVSKPRDCEGFIDDTISYFGRLDHLVNNASIWQVCKFEEIQDVRHLRALMDINFWGHVYPTRLAIPHLRRSRGRIVGVTSNSSYIFIGRNTFYNASKAAALSFYDTLRMELGSDIRITEVVPGVVESEITKGKMLTKGGEMKVDQDERDAILGPTPAEPVGDFARTVVRDVCRGARYVFEPRWYMGVYLLRACLPEVLAWNSRLLTVDTVGASTTDTLGKWLVELPGVRRVVQPPSLRSPEIKD

SEQ ID NO: 229406 - protein, 73 aa, Zea mays
  unsure (1)..(73): unsure at all Xaa locations
  Clone ID: MRT4577_140810C.1.pep
RERTPSPPTTVPIQMMLTEASSFSVMVSNHLFYGAEVTTVPARVTAHRSVVSLXSSSSSAXGKEVLNCFVSQP

SEQ ID NO: 229407 - protein, 84 aa, Zea mays
  unsure (1)..(84): unsure at all Xaa locations
  Clone ID: MRT4577_140811C.1.pep
TTTPTTPSLTHFQTHPTNHIGAIHTTVATTILSLLALLALYPNSTIAYIIPQCSLAPTSIITHFLPPLSXIGFEHPNVHTYNLQ

SEQ ID NO: 229408 - protein, 99 aa, Zea mays
  unsure (1)..(99): unsure at all Xaa locations
  Clone ID: MRT4577_140812C.1.pep
VLQLLEYPNLTXLETTLKTIEALLPIVFARETRHLNECLVDTVMGRAFLXRVTTXAESFKEFNIDNICGTICVLLQIFVVLTFGTQMPVNRGQDTPSTP

SEQ ID NO: 229409 - protein, 153 aa, Zea mays
  Clone ID: MRT4577_140813C.1.pep
PRGRPGSSFKYPCTCISTSPASGGGITMVAAAAAAFIALVAFGSASSSPKSFVKSTVSAHDVVIFSKSYCPYCKRAKAVFKELELKKEPYVVELDQREDGSEIQDALLEIVGRRTVPQVFVHGKHLGGSDDTVDSYESGKLARLLNIGVKDDL

SEQ ID NO: 229410 - protein, 180 aa, Zea mays
  Clone ID: MRT4577_140814C.1.pep
MATPAPAGAAMPELAPGQGREAKHGRAGGGPRQSAGARLLSLSVQAAVMAATLAVLLVFAAASALLLLVLVLAARAFRHHRVTSLDLAPSSPPPPLRAGLSPVDIRRLPSFAFPSTRGGAGDDTAAASPSCVVCLDAARGGERWRAMPACTHAFHAACVDRWVARTPVCPVCRAAVAVPI

SEQ ID NO: 229411 - protein, 135 aa, Zea mays
  Clone ID: MRT4577_140815C.1.pep
MVALLGRRIGVAAAAAAFIALVAFGSASSSPKSFVKSTVSAHDVVIFSKSYCPYCKRAKAVFKELELKKEPYVVELDQREDGSEIQDALLEIVGRRTVPQVFVHGKHLGGSDDTVDSYESGKLARLLNIGVKDDL

SEQ ID NO: 229412 - protein, 78 aa, Zea mays
  Clone ID: MRT4577_140816C.1.pep
PCAFFKKFIPFNQMDGVKFCGVLKKGPQFFYPPRGGYPLVGAFLKQEKIVPINQFFFNNPSLVVPATHGGGALLLDYI

SEQ ID NO: 229413 - protein, 38 aa, Zea mays
  Clone ID: MRT4577_140817C.1.pep
VNQSVYSMNQPKSKSSNHWVSSGSMKSVFSLSDDASCR

SEQ ID NO: 229414 - protein, 124 aa, Zea mays
  Clone ID: MRT4577_140818C.1.pep
KRGLGGQTLKLGGENETSKGRGKNTPLFWANPDLPDGVSRNQHREGKSLGGFKAPWNLTQHPGGGGRGLRAILQKKSRSRFCLGRRSFGVPQKLKFQTPTKNFFKLFQGLKIKFLRGALDLGLK

SEQ ID NO: 229415 - protein, 63 aa, Zea mays
  Clone ID: MRT4577_140819C.1.pep
IKVGFFIAEGSGPIKGRRGKCGAGSQLNPLLPPEGGVMLSNHCRCFWILEAACSCTGFDQPQL

SEQ ID NO: 229416 - protein, 405 aa, Zea mays
  unsure (1)..(405): unsure at all Xaa locations
  Clone ID: MRT4577_14081C.1.pep
MITHHPSLIRPSVLTLRADVLRRRPTLHAVASAPPPRLWSLRATTGGTSPVSGDGGKRAXAQRXRRGPALLGFVRSNFLPLALIGGIILGLLDPTLGCLAHKYSLSKYSTFGIFVISGLTLRTRELGAALEAWPAGLYGLGSILLFTPFLAQFIMQVQFFPPEFITGLAMFCCMPTTLSSGVTLTQLVGGNSALALAMTVASNLLGIIIVPLSLAKYISNGVGVSLPTEQLFKSLVTSLLIPLIIGKVARETSKGIADFVDGNRQGFSVASAVLLSLVPWIQVSRSRPLILSVQVKSFAVAVTIGVLLHLALLAFNAAMLAILSRLEQKGESVFAKKEYARAVILVASQKTLPVLVAVVEQLGGAFGESGFLVIPCVAAHINQIIIDSIIVNWWRQKDQQFTSAK

SEQ ID NO: 229417 - protein, 84 aa, Zea mays
  Clone ID: MRT4577_140820C.1.pep
PDSSLLFLLLFSDGRSGGRFTLIGGSSGSYFLFLNLRCLGRRLTRVRLILSDSSFYAASSSSVLSRPRLSARPRPYRGDQRKPL

SEQ ID NO: 229418 - protein, 55 aa, Zea mays
  unsure (1)..(55): unsure at all Xaa locations
  Clone ID: MRT4577_140821C.1.pep
SQVLILDQQAGTLKIXPRAVLDHRAQACLSTGHWEDVGTLKSFLDANLALTEHPS

SEQ ID NO: 229419 - protein, 93 aa, Zea mays
  Clone ID: MRT4577_140822C.1.pep
FLNSVSAVWSVKIILVTSAKMIAGGGYFDGSHDHILMEGSMIHDSLQSSIYDNTDVVQQNFRFAPFIIEDHSNPANLTSEAARVIDQIQHQLG

SEQ ID NO: 229420 - protein, 99 aa, Zea mays
  Clone ID: MRT4577_140823C.1.pep
QRSRGFLFFTFSTEEAMPRGIYGMSGRELHRRNITVNQAQSRRGRRGRRRGKLTGSRRADATADLDTMMPGSVTWVSVDTAAAAITAAAACPTVFRTEE

SEQ ID NO: 229421 - protein, 74 aa, Zea mays
  Clone ID: MRT4577_140824C.1.pep
AYYYDDEEETQQRIHTMESEYPPRHASALSLLVRSGRTSCRHLNLQPSLAQQLRRCSYQIRSGLLHSSIRRPPH

SEQ ID NO: 229422 - protein, 87 aa, Zea mays
  unsure (1)..(87): unsure at all Xaa locations
  Clone ID: MRT4577_140825C.1.pep
MSYYGQQPPVGVPPQQGXPGKDGYPPAGYPPAGLPPPAQGYPLQGHPAQYAQPPPPQHEQISGPSFMQGCLAAICCYCPLDRCLLKV

SEQ ID NO: 229423 - protein, 125 aa, Zea mays
  unsure (1)..(125): unsure at all Xaa locations
  Clone ID: MRT4577_140826C.1.pep
MAPSRTGAGAXASGRVVVLPSPVHGQLNWSMRLARALHARCLGITALDSGALDPADYAGYYRLVPVTVQAEPKLLPSEDMACIATTLNARXDAPLRARLSALLTAQGRDRVRSVFPDFRWIAWLT

SEQ ID NO: 229424 - protein, 77 aa, Zea mays
  Clone ID: MRT4577_140827C.1.pep
LLILFIYGSLLSRHVVHNTHACSIINDQLSLSTIDITFAYTYLHNNIFGGSLFFYNKCFIVRNPNSFSWEIYIYTYL

SEQ ID NO: 229425 - protein, 43 aa, Zea mays
  Clone ID: MRT4577_140828C.1.pep
GVKQRLIMPSGVKEHTKNPHGGKYYGRKPRDMQGQLDKTEVAP

SEQ ID NO: 229426 - protein, 43 aa, Zea mays
  Clone ID: MRT4577_140829C.1.pep
YEESWRARRLRSCIAGAIYAFDLELTQSLDAKHITHAVLRSLP

SEQ ID NO: 229427 - protein, 97 aa, Zea mays
  unsure (1)..(97): unsure at all Xaa locations
  Clone ID: MRT4577_14082C.1.pep
MYNNMYFDKPLHKLFIFLSDGTVVTDVEAFRKLYEEVGLGWVYAVTKYEPVASMANAVYGVWAKYRMQITGRPPLEEIMASRRAAGDXCKDDKVCKM

SEQ ID NO: 229428 - protein, 48 aa, Zea mays
  Clone ID: MRT4577_140830C.1.pep
HHYLQQSRKKKDNDFWYDVCGWVILGAGIVAWVGLARASMPPPTPPAR

SEQ ID NO: 229429 - protein, 62 aa, Zea mays
  Clone ID: MRT4577_140831C.1.pep
RTRTSGRRRGASPGRRGRRLHAHTGKHVTYDQLQLAVCFLPKRKKKVKVYYVTYLFIRKKYM

SEQ ID NO: 229430 - protein, 55 aa, Zea mays
  Clone ID: MRT4577_140832C.1.pep
GIVSFRKSAHSNYTKRTVMASLSVVDNLGDLDDAGLVEDVRESLAVDRTRGWTRG

SEQ ID NO: 229431 - protein, 183 aa, Zea mays
  unsure (1)..(183): unsure at all Xaa locations
  Clone ID: MRT4577_140833C.1.pep
CRFVGNLELCGLSIQKACRGTLGFPAVLPHSDPLSSAGGVSPISNNNKTSHFLNGVVIGSMSTLALALIAVLGFLWICLLSRKKSVGGNYVKMDKKTVPDGAKLVTYQWNLPYSSSEIIRRLELLDEEDVVGCGGFGTXYRMVMDDGTSFAVKRIDLXRQSRDRTLEKELEFLGRIRHMNVGT

SEQ ID NO: 229432 - protein, 80 aa, Zea mays
  Clone ID: MRT4577_140834C.1.pep
LRGPSATKQAPNRPHTPLPRKRGRVPLRGLYNVPLASENPLQSRKRSIGIPRLKSHRSKISPTTSLYRPLPYCPCLFRVR

SEQ ID NO: 229433 - protein, 68 aa, Zea mays
  Clone ID: MRT4577_140835C.1.pep
ALSPIVNLADRRIHGTTSDCSLATLSANLQDRLDKANSPFRHNGRHRQATHCRPGCCLSAHEAKELRC

SEQ ID NO: 229434 - protein, 84 aa, Zea mays
  Clone ID: MRT4577_140836C.1.pep
PMASTLGPLAKLSSSLFLHTVHGYCSSPPCHVKSTSRVEFVVCFHPTMVWVGMDFTTGCELTRMFSRTLMPYPECICSLNFPSL

SEQ ID NO: 229435 - protein, 127 aa, Zea mays
  unsure (1)..(127): unsure at all Xaa locations
  Clone ID: MRT4577_140837C.1.pep
MRVLLVGLALLALGASATCTHTCGGCGCQPPTAVHVPPAVHVPPTVHLPPPVHLRPPVHLPSTVHLAPTVHVPPSVDLPRPPCHYPTQPSRPXTHCQAHSCPCRQSHPSPCQLHGTCRVGSTAILGQ

SEQ ID NO: 229436 - protein, 122 aa, Zea mays
  Clone ID: MRT4577_140838C.1.pep
LMRNNGRTHPSHMRAFRRPVAGGGGDGYRMRRRRTRGRSRPQSTHRTRGRTSDGHLTPNDEKRGGLLEPRQRAGGDGDTIPGPKAGARPPYLQGPTFTIHNQDPLVPFSCLIGKRPRPVAVH

SEQ ID NO: 229437 - protein, 49 aa, Zea mays
  unsure (1)..(49): unsure at all Xaa locations
  Clone ID: MRT4577_140839C.1.pep
DLNVXIXHQNLIGQSGKLHQEPXRWXKXKRSTXNSLGKHVDPERAPXSP

SEQ ID NO: 229438 - protein, 61 aa, Zea mays
  Clone ID: MRT4577_14083C.1.pep
LQGSILLFTPFLAQFIMQVQFFPPEFITGLAMFCCMPTTLSSGVTLTQLVGGNSALALAMT

SEQ ID NO: 229439 - protein, 49 aa, Zea mays
  Clone ID: MRT4577_140840C.1.pep
SHAIDTPAHGPPTVPVAARGWARHTHPLYVTLTHYVCRYATLRYATVPR

SEQ ID NO: 229440 - protein, 291 aa, Zea mays
  unsure (1)..(291): unsure at all Xaa locations
  Clone ID: MRT4577_140841C.1.pep
MAFISNVAVKAAGVAALLVVAVVSPAARAAAVAVAGGAPSVPAGPLDIAQLGAKGDGKSDSTPMILKAWKNACEATGVQKIVIPPGNYLTGGLELKGPCKSSIIIRLDGNLLGTGDLSAYQRNWIEIQNVDNLSINGHGTIDGQGALVWNKNECQRSYNCKILPNVRASSFSVCPLLRKVMXVNRNGERVQSLVLDFVTNAQIRGITLLNSKFFHMNIFGSKNVVIDKVTIKAPGNSPNTDGIHIGDSSNVTISGTTIAVGDDCVSIGPGSKTIRVKDVKCGPGHGISVGS

SEQ ID NO: 229441 - protein, 134 aa, Zea mays
  Clone ID: MRT4577_140842C.1.pep
PSKLSVRARDWSGMTQFKGSTVKRSATTFCGGETLFLTTNSSRAQREDSVSTTGTKRSRNTPKTKTKYLMNPWSRQSLELAGVVTSGGEDNKQLTLLCTGQDHDQSRDVNTAERTHDWFVSRVQTLEECSKSRD

SEQ ID NO: 229442 - protein, 75 aa, Zea mays
  unsure (1)..(75): unsure at all Xaa locations
  Clone ID: MRT4577_140843C.1.pep
RLIEIKRRRMEKLXDLLVSMLELXNLMDTPSDXQKGIQGMACNIDAFEDEITDPGALSMAFIRNRDADVMRLDNL

SEQ ID NO: 229443 - protein, 189 aa, Zea mays
  Clone ID: MRT4577_140844C.1.pep
MAFISNVAVKAAAVAALLLVAAVSPAARAAAVAVAGGAPSVPAGSLDIAQLGAKGDGKSDSTPMVLKAWKHACEATGQQKIVIPKGNYLTGALDLVGPCKSYIIIRLDGNLLGTGDLNAYKRNWIEIQNVDNLSMNGHGTIDGQGALVWNKNVVIDKVTIKAPGNSPNTDGIHIGDSSNVTISGTTIAV

SEQ ID NO: 229444 - protein, 57 aa, Zea mays
  Clone ID: MRT4577_140845C.1.pep
VAYRHAGALRHRGSTRHSLPPLCLKLRTSLTVLGYTNPPTPTTYTLASRPGFITMPF

SEQ ID NO: 229445 - protein, 413 aa, Zea mays
  Clone ID: MRT4577_140846C.1.pep
MAFISNVAVKAAAVAALLLVAAVSPAARAAAVAVAGGAPSVPAGPLDIAQLGAKGDGKSDSTPMILKAWKNACEATGVQKIVIPPGNYLTGGLELKGPCKSSIIIRLDGNLLGTGDLSAYQRNWIEIENVENLSINGHGTIDGQGALVWSKNQCQHSYNCKILPNSLVLDFVTNVQIRGITLLNSKFFHLNIFECKNVLIDKVTVKAPGDSPNTDGIHIGDSSNVTISSTTIGVGDDCISIGPGSKMIRIHGVKCGPGHGISVGSLGRYKDEKDVEDVQVTGCTIAGTTNGLRIKSYEDSKSSLKASKFLYEGITMDNVSYPIIIDQKYCPNNICVKSGASKVAVNDVVFKNIHGTSNTPEAITLNCANNLPCQGVQLVNVDIKYNGSGNKTMAVCKNAIGKSIGLAKELACI

SEQ ID NO: 229446 - protein, 132 aa, Zea mays
  Clone ID: MRT4577_140847C.1.pep
FGTRPEALSPAVGDGDGDGDGDGDGDGAGPTPVVDGGRHGIILFRSTTTFPTGRGGTHLIPPSPTWHRTSPLHHSLLPSSSRLAVASCSSSSAADVAASCRFSPSGHTSTASSSKVSSHGLRPLPRLRPRGQ

SEQ ID NO: 229447 - protein, 155 aa, Zea mays
  Clone ID: MRT4577_140848C.1.pep
GHNQMGGNQKKDFKSKQNSQTRWGKKKEKKGRKPKPKLGKKPKTPGKKNRVYWDPPPGRFFRIKFQTRGLRAKPQNGGEPLGNLNHFLGKRGGPKNIGGLEEHMGKALCLKGTKKTLPGGGGKNKKRFSKTEQKRVWGTLLGPPGGGLNLGFKGP

SEQ ID NO: 229448 - protein, 101 aa, Zea mays
  Clone ID: MRT4577_140849C.1.pep
ASSSRSEDDSAGACEEPIVLKQITISRGPRRSSKDSKSLYPKRRRERINEKLRTLQQLIPNGTKVDMSTMLEEAVQYVKFLQLQIKCSALRVPWKYASLLS

SEQ ID NO: 229449 - protein, 38 aa, Zea mays
  Clone ID: MRT4577_14084C.1.pep
SSVTIILVACERTFHWLRFTDCFVLPQGECKDDKVCKM

SEQ ID NO: 229450 - protein, 516 aa, Zea mays
  unsure (1)..(516): unsure at all Xaa locations
  Clone ID: MRT4577_140850C.1.pep
TLLXXMRKPLYLLVSAIMLMTMSCLFLMGTVSYLFKGRSLRQAPFRVIFGSTLXHLDEVLVLAGMFLYVISLGSSSFVEEEQYTWHFLTSTLYLIFLAKAVQSMLKGSNPTLGHKAEGNNFDRSSFFYATSYELTPGKRNGYKLCTILIVLVAGRVIRAWHQGGINWVHFPDISKLLAQADPSVVKSLQIISVLAVVVLXNFTHFTQSKTRVCYRSMXLTHISCGFLVLLHVWGNHIGTSLPINHTTASVARQFYVIASVSVSVTVLASPWVFPIFSTEAKSASSGSSPVKAIHGIRKSLVLTGMTYTAFWGLLQLLLQQPINAIPLFLIFLQTVSSAVHFSLDKTLHKQWVQVVAMHFLGMAGHFGLGNTNSLASIDVAGAFIGISSYSTVLSGILMFMITYASPLMLYLGLVLHASVKDVDDASNLRQLKWSYILDKIVTLPCXSFAHQFSCVDFIHHCFASHEESLICLERILTKVPLCLRSNSVHICRSIHHSYDCIIQLCCFQVQGEKLQG

SEQ ID NO: 229451 - protein, 106 aa, Zea mays
  unsure (1)..(106): unsure at all Xaa locations
  Clone ID: MRT4577_140851C.1.pep
STSSRGPSRSSKDSKSLYAKRRRERINEKLRTLQQLIPNGTKVXFCFVDMSTMLEEAVQYVKFLQLQIKVGTKVAAVSLKTNTTTHKILGVLTKGDTQIGSGITGA

SEQ ID NO: 229452 - protein, 67 aa, Zea mays
  Clone ID: MRT4577_140852C.1.pep
STSSRGPSRSSKDSKSLYAKRRRERINEKLRTLQQLIPNGTKVDMSTMLEEAVQYVKFLQLQIKGRR

SEQ ID NO: 229453 - protein, 46 aa, Zea mays
  Clone ID: MRT4577_140853C.1.pep
SLYLLIIFLHVSTSNYRGLTPLKTYNHTFSLLFLQNTFIILQPTYD

SEQ ID NO: 229454 - protein, 56 aa, Zea mays
  Clone ID: MRT4577_140854C.1.pep
RAREVFFKEWDPQRNGYPDSSNADKLRNFIKHVYVERRYTGERSTDRPPRAKDDDE

SEQ ID NO: 229455 - protein, 129 aa, Zea mays
  Clone ID: MRT4577_140855C.1.pep
MIIALDDEEVDQGYGYGAMSSELELCVARIRDLRAELEFERRMRRKAEALSEALAAELADERRRSEAAEAECRALREEAGAARAEAERALEGVEEERRMLRVAELWREERVQMKLADARAALDEKLREI

SEQ ID NO: 229456 - protein, 47 aa, Zea mays
  Clone ID: MRT4577_140856C.1.pep
MLSSRDFIDASACGPVVTSQRQPQRGLPGSMTEGVWPVLCSAARDRQ

SEQ ID NO: 229457 - protein, 121 aa, Zea mays
  Clone ID: MRT4577_140857C.1.pep
MAFENKSPTLVPTSGVLTSKIFGKASTFVMPPKKIIAPGAALQPLDTNEETLSLREARSQKRKAASPTLQEEELDQEIRDLEIFHQQVQRKKEKMARLADLQKKIDEATEEVCHLTQDDHD

SEQ ID NO: 229458 - protein, 134 aa, Zea mays
  Clone ID: MRT4577_140858C.1.pep
WARYYFWGVKKCCTNLNNAFGFLPQATRATRDKGDPGRANTPGTKNLPPHKPNERKTPGTPPAWTHHPKKTQALLLGRKTRKTVGDRKGALRGKTRCGALQTRKAVRRRGTGRPRRPKRGGGGGKVSTTPGWGG

SEQ ID NO: 229459 - protein, 112 aa, Zea mays
  Clone ID: MRT4577_140859C.1.pep
HKIYAINPRGGPPKNPKGKQKVQAHAGKLSPGKVFARAQTKKGEGFSPTFSRGGAEIQATKSCIKGDGSNRCRGWGGKNGAAEKNPKNGGATLKGGAGGLNKSGALTPGKPG

SEQ ID NO: 229460 - protein, 68 aa, Zea mays
  unsure (1)..(68): unsure at all Xaa locations
  Clone ID: MRT4577_14085C.1.pep
RYARAVILVASQKXLPVLVAVVEQLGGAFGESGFLVIPCVAAHINQIIIDSIIVNWWRQKDQQFTSAK

SEQ ID NO: 229461 - protein, 49 aa, Zea mays
  Clone ID: MRT4577_140860C.1.pep
KIDKSGLAQNYYGTNILDCGKNINRKKLRQSMNNIGLQHMLTLKQKGAF

SEQ ID NO: 229462 - protein, 97 aa, Zea mays
  Clone ID: MRT4577_140861C.1.pep
VLHALLFKGKWLGIFYHFKSPFTAFSHITFGLSLPLFSLLSCLRIPLHTGTSICLRLDMFKPSQTVLDKFFCNWWLVLSLVYHIYHRSGFDPFFVWP

SEQ ID NO: 229463 - protein, 91 aa, Zea mays
  unsure (1)..(91): unsure at all Xaa locations
  Clone ID: MRT4577_140862C.1.pep
QIIRTIPSYVCITVSERLIGDGADNDVDMNLVITLFDGICLFDNQIMDGSVHTDMNFCYLLDIPGLVERPMXYVDXQGEEKQFAIEDISLY

SEQ ID NO: 229464 - protein, 310 aa, Zea mays
  Clone ID: MRT4577_140863C.1.pep
MTAGQLLRTEPSAQPQRVRHSTPPAALQADIVPSYPPPESDGDESWVWSQIKAEARRDADAEPALASFLYATVLSHASLDRSLAFHLANKLCSSTLLSTLLYDLFVASLAEHPSVRAAAVADLIAARSRDPACAGFAHCLLNYKGFLAVQAHRVAHVLWAQGRRALALALQSRVAEVFAVDIHPAATVGRGILLDHATGVVVGETAVVGDNVSILHHVTLGGTGKAVGDRHPKIGDGVLIGAGATVLGNVRIGAGAKVGAGSVVLIDVPPRSTAVGNPARLIGGKKGEEVMPGESMDHTSFIQQWSDYII

SEQ ID NO: 229465 - protein, 59 aa, Zea mays
  Clone ID: MRT4577_140864C.1.pep
IKYIYIDVADVYIFHLGCQTPTLSHLTASSNSDVFHLIEFRTHKNISIIIQERGIIFVF

SEQ ID NO: 229466 - protein, 68 aa, Zea mays
  Clone ID: MRT4577_140865C.1.pep
NQICPPPPHQITVISMERFPIGMTHAPFNFWKLELQIRLFYFNPTHFFLNLNIIEFTHVSFLNLVLKT

SEQ ID NO: 229467 - protein, 79 aa, Zea mays
  Clone ID: MRT4577_140866C.1.pep
MPISKKDRRNKEHKRADAAGTRAPVKANGLPVKPPKPTSICQNCRKEIVNTNKLQLEVHAETHDAKLWPKEKCWPNDFQ

SEQ ID NO: 229468 - protein, 68 aa, Zea mays
  Clone ID: MRT4577_140867C.1.pep
RFPLYQQALHPLPFKWPSLRSLGYASRIQTRFLMPRLSGRSRPRCRLSCCPQKGELLSFPFFEQASSP

SEQ ID NO: 229469 - protein, 60 aa, Zea mays
  Clone ID: MRT4577_140868C.1.pep
VFSLIFWVFFTCWAQLYFFINPNRKRGLSGRTKTGYFPWARGVLYQLFFKRENPQITLKF

SEQ ID NO: 229470 - protein, 140 aa, Zea mays
  Clone ID: MRT4577_14086C.1.pep
MITHHPSLLRPSVLTLRADVLRRRPTLHAVASAPPLRLWSLRATTGGTSPVSGDGGKRAVPLPTRGPALLGFVRSNFLPLALIGGIILGLLDPTLGCLAHKYSLSKYSTFGIFVISGLTLRTRELGAALEAWPAGLYGLV

SEQ ID NO: 229471 - protein, 175 aa, Zea mays
  Clone ID: MRT4577_140870C.1.pep
AIGILEAGRERRASDAATPHTPCFPPRCGRTPRPPAWQPPWPTCPLSAARTPQSPRVRANTFLSCTHRRRRGKSRAFGAGGRISDLAEELGRRRGRGHPTRWGHQNRLGTFTSSLQALLLRRKPPVHLTPPMDRFVDFWLTQQCSGQWHYDRQREVQERSGRSPPLMPGLLRVAL

SEQ ID NO: 229472 - protein, 133 aa, Zea mays
  unsure (1)..(133): unsure at all Xaa locations
  Clone ID: MRT4577_140871C.1.pep
LSGLIGDAVLSVLFVTMRPFXKSWYRRINIFLGXTVWLQLVWSVDXRAGVKVQLDADEDTYRSTIQEHALIIXNHRSDIAWLMGWIXAERSGRLGSTLAVMTNXSKFLPVHGWALWQAEYLFLDRSWGQDEKT

SEQ ID NO: 229473 - protein, 45 aa, Zea mays
  Clone ID: MRT4577_140872C.1.pep
LKKGVAPLLERNEHIMQAMCQFGGYYACWNLIVANKTWVMNVYPP

SEQ ID NO: 229474 - protein, 47 aa, Zea mays
  Clone ID: MRT4577_140873C.1.pep
SSFGDLQFNASQFIIVNKIIMFVKLLCHRQNNFYSFIAKIFLAYDKI

SEQ ID NO: 229475 - protein, 80 aa, Zea mays
  Clone ID: MRT4577_140874C.1.pep
CICTRVKTGSRTYVSHSIPHLVPVPIESVCVRTNYNVLVVVDRECLSPVLEKVHHACVVVSFGKYKCLLLACETKPSGFS

SEQ ID NO: 229476 - protein, 109 aa, Zea mays
  Clone ID: MRT4577_140875C.1.pep
ELIWNSHTHTPVIPCYSYLNLFFHSTKWVKSGQRMWHMVELQLPVKNRQKVVKLRGVDQEEIAKLTVTDFTCTSRDARYRLWACSAGCKPTLLQLFGLLQLQSIERKIL

SEQ ID NO: 229477 - protein, 167 aa, Zea mays
  unsure (1)..(167): unsure at all Xaa locations
  Clone ID: MRT4577_140876C.1.pep
MVDYQDLLSGDELLSDSFTYKELENGVLREVEGKRVTQRPVDVDIGASPSGEGGEDQSVDDTAANARDIADTFRLHEQPPFDKKSFVFYITKYIQNLTACDVAXKACDFKKGVXGATKFLLNKLNDLQXLLVETMKDDASVVFAYYKDGATNPTFLYYSHGLNEIKC

SEQ ID NO: 229478 - protein, 46 aa, Zea mays
  Clone ID: MRT4577_140877C.1.pep
FFFFFLASNILSIFDYNVKTNVVQGIEDFMGNIVYLCPNLSNVHNF

SEQ ID NO: 229479 - protein, 537 aa, Zea mays
  Clone ID: MRT4577_140878C.1.pep
NFVNEYFAPNAKKRWCVSLYGSGRQTTGVFPQDVWHCEICNRKPGRGFETTVEVLPRLCQIKYASGTLEELLYIDMPRESQNTSGQIILDYTKAIQESVFEQLRVVREGHLRIVFNPDLKIASWEFCARRHEELVPRRSIIPQVSNLGAAVQKYQAATQNSTSLSAQDMQNNCNSFVACARQLAKALEVPLVNDLGYTKRYVRCLQIAEVVNCMKDLIDHSRQTGSGPIDSLHNFPRRTPSGASTIQPQQQQTEEKQAIPQNSNQSGQNSAPMAGVQPSASANGDVTSNNSHSCAPSTSAPSPSVVGLLQNSMNSRQDHPMSGTNGGPYNGGNVAIPKVNSTSSLHSNPPTSFPSPAPTTSNNSMMHAPQNTNQLSSPTTSPSIPPMQPPAARPQEAEPSDSQSSVQKILQDLMSSQMNGVGHSGNDTKTPNGLTHGANGVNCLLGNAAANNSGIGGMGFGAMSGFGHGMRTAMAINPMAMGARMGMNHGSHDLSQLGQLQHQQQHQQQHDIGSQLLGGFRSGNSFNNMQYDWKPSQ

SEQ ID NO: 229480 - protein, 64 aa, Zea mays
  unsure (1)..(64): unsure at all Xaa locations
  Clone ID: MRT4577_140879C.1.pep
MYIQNYINYIHNTVYTTKNESPDMLTTHTTHPVSFXPHDKYYRQRYLLKNTFVLMPTQNPALNY

SEQ ID NO: 229481 - protein, 569 aa, Zea mays
  Clone ID: MRT4577_14087C.1.pep
AKVPTPSSSSSADAKSIGAVAALKLSDRTCTGVLASHPLSRDIHIESLSLTFHGHDLIVDSELELNYGRRYGLLGLNGCGKSTLLTAIGCRELPIPEHMDIYHLTHEIEASDMSALQAVVCCDEERVKLEKEAEILAAQDDGGGDALDRVYERLEAIDASTAEKRAAEILYGLGFNKQMQAKKTRDFSGGWRMRIALARALFMNPTILLLDEPTNHLDLEACVWLEETLKKFDRILVVISHSQDFLNGVCTNIIHMQNKKLKLYTGNYDQYIQTRSELEENQMKQFRWEQEQIASMKEYIARFGHGSAKLARQAQSKEKTLAKMERGGLTEKVVRDKILVFRFTNVGKLPPPVLQFVEVTFGYTPDNLLYKKLDFGVDLDSRIALVGPNGAGKSTLLKLMTGELVPLDGMVRRHNHLRIAQFHQHLAEKLDLDMSALQYMMKEYPGNEEERMRAAVGKFGLSGKAQVMPMRNLSDGQRSRVIFAWLAYRQPQLLLLDEPTNHLDIETIDSLAEALNEWDGGLVLVSHDFRLINQVAHEIWVCENQAVTRWEGDIMDFKEHLRSKACLSD

SEQ ID NO: 229482 - protein, 127 aa, Zea mays
  unsure (1)..(127): unsure at all Xaa locations
  Clone ID: MRT4577_140880C.1.pep
DTGQATKGAHGGCILTERDEFKTLDYQNIYNNMXQNPTLQPSTKNNIEKXHKLKEIGYIIYGRGKTLYSWLKDIAQDRLIPPRQAMDRIPGKKRKQAGRQPSITLEERRLLYRSRLGGSLKKGRTGC

SEQ ID NO: 229483 - protein, 58 aa, Zea mays
  unsure (1)..(58): unsure at all Xaa locations
  Clone ID: MRT4577_140881C.1.pep
PPPATPNTCAFTASQVRGAWAPVQNVCAKRIVVDARHHMLGTXILDHSQGAAQWAKGG

SEQ ID NO: 229484 - protein, 182 aa, Zea mays
  Clone ID: MRT4577_140883C.1.pep
PSTCPRGLPSQIHRTRLRGRPSRRPRFRRWAESREGRSRILNSNMKTPEGTTYPFQPSALIWGNPGGWGKNQGPWAFPPENLGKKRISLNFGAKGFFFFRPPKLGGGWVFFKKKFPPTGGGQKKKRGGGKNPPFKKNPFSPQKFLGGEKKGGGGGGKKKKRGVFFWGGKKNTPPKKRGVCFI

SEQ ID NO: 229485 - protein, 90 aa, Zea mays
  unsure (1)..(90): unsure at all Xaa locations
  Clone ID: MRT4577_140884C.1.pep
MGTRYYTSLCSLYLTACVANATXVILNSSQATIAPLLPQYLSSIIVSLRKNTTLQPYKLQQAISSCNIPISXLXIQQSPAISLVHSLVQT

SEQ ID NO: 229486 - protein, 79 aa, Zea mays
  Clone ID: MRT4577_140885C.1.pep
ECHERVNLVRLQVLVACIRSVDYVCMFFRPIIDFEVTGEVPATGGRCWRNGSSSHSGSGSHTGRPPGCSAASKSFRGRG

SEQ ID NO: 229487 - protein, 89 aa, Zea mays
  Clone ID: MRT4577_140886C.1.pep
EAFLGSRSGLWAGGPAPGQFYRIPSTPDSFMDPASALYRGPITRTQNPMVTGTSVLGVKFEGGVVIAADMLGSYGSLARFRNISRIMRV

SEQ ID NO: 229488 - protein, 87 aa, Zea mays
  Clone ID: MRT4577_140887C.1.pep
CLHLQAAKPILLVGAVFLNLLLENDRAFDILYCITFKLMDQKWLEMHASYMDFNTVIKSTRRQLERELLLEDIQRIEDMPSYRFLAC

SEQ ID NO: 229489 - protein, 266 aa, Zea mays
  Clone ID: MRT4577_140888C.1.pep
MEQNAGSFLAVRRLSGGAIHHHRHHSSPAEVVGVSTAWLGKGLSCVCAQRRESDVRLSFDLSPIQEECLNRLQNRIEVQYDGSNLEHQKALEALWRSSFPGTELLGLVSDQWKEMGWQGKDPSTDFRGGGFISLENLLYFSRNYPKSFQELLRKQNGDRALWEYPFAVAGVNITFMLIQMLDLQAAKPTSLVGAVFLNLLLENDRAFDILYCITFKLMDQKWLEMHASYMDFNTVIKSTRRQLERELLLEDIQRIEDMPSYRFLTC

SEQ ID NO: 229490 - protein, 161 aa, Zea mays
  Clone ID: MRT4577_140889C.1.pep
WIYPGKYTYNDDMTAEDMKKVVMENYDPNFVNLVQAGDVLVGGFNFGTGSSREQAATAIKSRGIQIIVAGSYSDIFKRNSVNNALLLIESPELVNDLKQEVGTLELSKRTGWKVDIHVAEGKVQVQKENGEKKLYKVGALGKSVQEIWLANGLEGWVKERL

SEQ ID NO: 229491 - protein, 79 aa, Zea mays
  Clone ID: MRT4577_14088C.1.pep
MIIWYYNDIYSSWLLLQHSRMPIKADCNCALMTSFNNILERFRDNFYRLLEVRCEQMIKYLNFSYIRTIVNVHDDVHIF

SEQ ID NO: 229492 - protein, 54 aa, Zea mays
  Clone ID: MRT4577_140890C.1.pep
AGGGQIEDATLLCCSLIIPPPNQNVWNHALNDSNLRIQLLHTPVLPNRTNNAFR

SEQ ID NO: 229493 - protein, 106 aa, Zea mays
  Clone ID: MRT4577_140891C.1.pep
VSQARIRRYQSRNNFLPEIPKVVVSSLRSLRLLLHFQRGLATEHRALRSPETEKGENCVAAALGKIGRWDRGYRTVRGCAFTMRNRFGRRWRGQCVFDFDLSRWCV

SEQ ID NO: 229494 - protein, 144 aa, Zea mays
  unsure (1)..(144): unsure at all Xaa locations
  Clone ID: MRT4577_140892C.1.pep
VDSLVQNIKLLKLQQLVLXNSCLATTNYQEXTITSTQLTVLNYSSYXRQQQLPFSQLXVGYNYNYXPFNXLAVLNSPALFTAAQLLPFSQLSAVSHTTFLIQTQLLPIXQHAEPNAVTLLQLLQLMPFNQLALTNSAAFYQQPI

SEQ ID NO: 229495 - protein, 124 aa, Zea mays
  Clone ID: MRT4577_140893C.1.pep
YIPFGIVGLMYPDNTFGHVDLELMVGRILTYYEGSLPGLMGPAHLEHGPRRWFHLTEEHPPAFGWVTGQRGIELKLVLVLFFQYQPALLEYWRPFHEKGTSPPFRAKRVERLQAPIFFQAAKII

SEQ ID NO: 229496 - protein, 112 aa, Zea mays
  unsure (1)..(112): unsure at all Xaa locations
  Clone ID: MRT4577_140894C.1.pep
MSTSELATSYAALILADDGVEITADKLQSLIKAAKIEEVEPIWTTLFAKALEGKDVKDLLLNVGSGGGAAPXLVLPLAVPLXWRXADAAPAAEEKAEEKEESDDDMGFGLFD

SEQ ID NO: 229497 - protein, 193 aa, Zea mays
  Clone ID: MRT4577_140896C.1.pep
MEATATPRTQEVMKPEPGTAKVTVDEVTLRKFELSDVDAMMAWASDPQVAAVCRWEPYESTEPLLAFIRDVVLPHPWFRAICLRGEPRPVGAVSVSPTGDPCRAELGYVLARAHWGRGVATAAVKRTVATVFGEVPGLERVEALVDVANPASQRVLEKAGFTREAVLRKYGAIKGVVRDMVMSSFIDTDAVPE

SEQ ID NO: 229498 - protein, 65 aa, Zea mays
  Clone ID: MRT4577_140897C.1.pep
VSPPLLPTSATPLFPISGCHLAPSPPPSGVGRSVMYFVLHQFMPIFMYNMFTAWVNYYFTLISLQ

SEQ ID NO: 229499 - protein, 88 aa, Zea mays
  Clone ID: MRT4577_140898C.1.pep
SAGRRESTEVVFLTPHTTVFFREETERVGERLTLHFQAAAPAALGHLPSRAADSIPFTTAAQPAVLALLDVAPGSSRAAAMAETLRTC

SEQ ID NO: 229500 - protein, 112 aa, Zea mays
  Clone ID: MRT4577_140899C.1.pep
FLLRLSPTGWCLTACVHRVSPRVIAFCTRVFLFLVLLFLSLSTLSSAPRVSALMFFRCRLPCLCVPPGPRLVPTVLVYMLPFSVSFFPVRLEHCTIPLFHYVTITTNICIHY

SEQ ID NO: 229501 - protein, 129 aa, Zea mays
  unsure (1)..(129): unsure at all Xaa locations
  Clone ID: MRT4577_14089C.1.pep
WVPLEGRHGENTETRTFLCDSHGPRPPPTTPPGSVGTRHPAPHTCRRPASPWRATRPPPPPCGTARSTRRRAEAQGRRRRWARRRGGRGPSGGRRXKXXXXTLCGFDVYVNMALEDVTEYEYTGQGRRL

SEQ ID NO: 229502 - protein, 144 aa, Zea mays
  Clone ID: MRT4577_1408C.1.pep
MGSQAIESPRAGPEVVPGGNPLCRKKSIELLEELGLPKGFLPLVDIQEFGATPETGFIWLVQGKKKVEPPFKKINQTVLFPPEGPAFPQKGKFRKIPGVKTKELMLWLRVVEVYVPKASPEKVSFKTGPGLSDPFDAFAFGVGE

SEQ ID NO: 229503 - protein, 91 aa, Zea mays
  unsure (1)..(91): unsure at all Xaa locations
  Clone ID: MRT4577_140900C.1.pep
FWLLKDHLQASSFRLAASLLKKQRCXHATFLLRTPTWIPSLISLLVLHQQNLGDHFSSRNIHAWMIGSSTSLLQTFFFFSIAGTLLEHYPT

SEQ ID NO: 229504 - protein, 92 aa, Zea mays
  unsure (1)..(92): unsure at all Xaa locations
  Clone ID: MRT4577_140901C.1.pep
IITLKPLLSNKAWPYVQNDHGLRASYVLSDLKSVIASXPKEVKHSLKELTGKLFSTSLDVDQAAKIKSTPVRPIQYLAASKDAPVDVLAQLA

SEQ ID NO: 229505 - protein, 109 aa, Zea mays
  Clone ID: MRT4577_140902C.1.pep
IRLLKGVMLTYPIEPSNFEDHWWNSFFWRAFTLPCGGSLGLQLESSFACSKLYFRFFIHRSRELFGAWVIAYFPILLGGLFGTVFYTKLLTCKSILENRIRWSIHVLIE

SEQ ID NO: 229506 - protein, 43 aa, Zea mays
  Clone ID: MRT4577_140903C.1.pep
YLRCISANTPPPSPPPQPSTCVPSSPSALPPSLAWSLLRTLPR

SEQ ID NO: 229507 - protein, 91 aa, Zea mays
  Clone ID: MRT4577_140904C.1.pep
KNAKLWAKGCSVLQSTVANWTNAVSFPQPLQQCLKNSPPGIPIFTLTQLQPTPQLLGVARNYKKNIPSHWLALKNTKATLHLPKPQVDRIL

SEQ ID NO: 229508 - protein, 91 aa, Zea mays
  unsure (1)..(91): unsure at all Xaa locations
  Clone ID: MRT4577_140905C.1.pep
ILWPNVFETSPHVKEAVMGALEGLRVAIGPCRMLQYCLHGVDHPARKVXRCNWKIYNSIYIGSQDALIAHYPRIYNDDKNTYIRYELDYIL

SEQ ID NO: 229509 - protein, 113 aa, Zea mays
  Clone ID: MRT4577_140906C.1.pep
QPSIAYFWAAWLLPAVSSVGETPIASTVRHPTGNPDKAVTLITVVPPTTHTPITAHTFGGGGGHITSGRQPLRQLGLANLAAYCSATCFILHSTNWLHCTLLVICNTNSHSAS

SEQ ID NO: 229510 - protein, 141 aa, Zea mays
  Clone ID: MRT4577_140907C.1.pep
MAVRCSCTALFPLLFCFMICQLCYGTVTDIQCLKKLKASVDPDNKLEWTFNNNTEGSICGFNGVECWHPNENRVLSLHLGSFGLKGEFPDGLENCSSMTSLDLSSNSLSGPIPADISRRLPFVTNLDLSFNSFSGEIPEAL

SEQ ID NO: 229511 - protein, 113 aa, Zea mays
  Clone ID: MRT4577_140908C.1.pep
DACGSGPEFPGRPTRPKKYQELSRQRRECCKKGKVLCCLFKTRAGRKKRREKERREVWSPRLKPFQKLITTIAAARGGERLFFHPNCTSPVSSSASPQLFSARSPRPAPACIT

SEQ ID NO: 229512 - protein, 168 aa, Zea mays
  unsure (1)..(168): unsure at all Xaa locations
  Clone ID: MRT4577_140909C.1.pep
MADRWLELPNLALQVVGILPEVQRPSSMVPRCQKVAYTAISLLIYLVGSQLPVYGYGVRSPSVADSQYWVDMPDCNSVMSAGIMPLVLSEAVLHFLLWCKVLRANNPEDRMLLSRVQKLVGIIFAADFSVCRVLISPILXKLTLGQSILIVLQHFFGSVIVIYLDDLL

SEQ ID NO: 229513 - protein, 48 aa, Zea mays
  Clone ID: MRT4577_14090C.1.pep
SSISARLCVRTLSGLIKYFNAPSPKSQAIDSGMSDISTFAVPPVLRDD

SEQ ID NO: 229514 - protein, 77 aa, Zea mays
  Clone ID: MRT4577_140910C.1.pep
QSGPAFSLVPKTTHMWTSLNERTAHTTWRKAGNTSMLQSFQSWDSSKTLLPGISKQTSGSNGATAFFETIIFFKKKF

SEQ ID NO: 229515 - protein, 97 aa, Zea mays
  Clone ID: MRT4577_140911C.1.pep
KQGTTFFLVGGASLIQTRDTTNTNSARGKTTYTVHLPTGGARTRRLQEPRPQKNFLPPHHARTIFWVTNRQGLYLSTKFRGLSSCLDPGINTYRPCG

SEQ ID NO: 229516 - protein, 98 aa, Zea mays
  Clone ID: MRT4577_140912C.1.pep
KPTTISAFNQVGQENESEAKGRVTSCCRNERCKELNESERCNHVTIHKAAKQDDFNIINSFPAKGESKEKHILTNLMFMESVPEERQMFIDKYYLTEA

SEQ ID NO: 229517 - protein, 93 aa, Zea mays
  unsure (1)..(93): unsure at all Xaa locations
  Clone ID: MRT4577_140913C.1.pep
GPGATXRGXXEGGGRQAAGRGGXRXPXXGXXXGXXRGXPPPPKGXGXGXXQEGXXPGGQGRDXGXRKGGPRTPQARERKQTTTRAAARVLEPR

SEQ ID NO: 229518 - protein, 99 aa, Zea mays
  unsure (1)..(99): unsure at all Xaa locations
  Clone ID: MRT4577_140914C.1.pep
GDYGWDTGWLSADPETLSKNRQLEVIHSPWGMLGALGCVLLELLSLNGVKIGEAGWFKGGSHIFKEGGLDYLRNLSLIHAQSILCIWAXQVVLMGAVEG

SEQ ID NO: 229519 - protein, 479 aa, Zea mays
  Clone ID: MRT4577_140915C.1.pep
EQAAKASAVNHCQDNIGAKEEVMKDVKLVFGEDIRCAQMPANCSLPQLREIVQNKFPSLKAFLIKYKDKEEDLVTITSSEELSWASNLADSQVPIRLYVVEVNHVQELGVDGVRRRPSFATLERNRDIMLDIGTIGHDVEHKHYADDWMVQFAQIFKNHVGFSSDAYLDLHDLGLRLHYEAMEDTIQREEAQEIFEVAESKFKEMAALALFNCGNVHMSRARRRPCLAEDPLQEFILEKVNVSYDWACTEYAKAGANIEEAVKTKSDFFEGLIALGQQKFEQAKLSWYYALACKINMETEVLELFNHAEDNMEKGMDMWERMETLRLKGLSKPSKEKVVLEKMVLEGFVKDISADEAFEQASSIRSHINILWGTILYERSVVEFNLGLPSWEESLTVAMEKFKIGGASQADINVIVKNHCANETTQEGLSFKVEEIVQAWSEMHDAKNWRSGPLYFRLQPVFRRRAPKLHHILEHMHYA

SEQ ID NO: 229520 - protein, 78 aa, Zea mays
  Clone ID: MRT4577_140916C.1.pep
PAGDYAYGRRSAAQATVSALTSRAPPRSAPEMRPAPTGQGIWPRTPPAEVLFNPRFHFISVSVFDSFLELSWIPLLNN

SEQ ID NO: 229521 - protein, 43 aa, Zea mays
  Clone ID: MRT4577_140917C.1.pep
IPLWLKVNKFTELFQLTDACMLQPYMKQRIYSFLGLHAGEDQK

SEQ ID NO: 229522 - protein, 105 aa, Zea mays
  Clone ID: MRT4577_140918C.1.pep
IPSFTTHFRKLGLKKLSLGAPGDSCGRQSKNQATRPIPGGPGAEVPAAGPGTANSKNRPPVNARVLIFLVRPYRGHKLGPYVPRIYRSFTRKKESGAGLPPRPLP

SEQ ID NO: 229523 - protein, 152 aa, Zea mays
  unsure (1)..(152): unsure at all Xaa locations
  Clone ID: MRT4577_140919C.1.pep
MATKQSLLAAAAVCLLLLPAAYAFTDVEYCNKGKNYPVKVSGVEXVPDPVERGVPATFKISATTDKNITEGKLVIDVKYWIFNVYSETDDICTKTQCPATSNFELSHSQTLPSITPPGSYTIQMKMLGKHDEELSCISFGFSIGFLAPVALS

SEQ ID NO: 229524 - protein, 117 aa, Zea mays
  Clone ID: MRT4577_14091C.1.pep
PQQLRSPGGAGGGKPPNSPSFLVPRVSIRPKKAGFVGNYGTRYGATLLRQISKMEVSHNPKYFCDFCGKFAVRRKAVGIWRCNDCGKVNAGGAYTMSTASAVTVRSTIRRLREHTEA

SEQ ID NO: 229525 - protein, 267 aa, Zea mays
  unsure (1)..(267): unsure at all Xaa locations
  Clone ID: MRT4577_140920C.1.pep
HSYWFPVFWIGVGVALSAAFSMVSSMVKKYAMEQAFKSMMTQAPQNTFGANSPFPFSMPPQAGSTAPSSYPYSGPRKNTPKGATVDVSATEVAATGSSEAADVAETSKPSKKFAFVDVSPEELQKQKELQSSLQTVDVKSDSTESETKGDTEQVPTNGAAXSRVKIPLPGXESSKSGPMLSIDTIEKMMEDPAVQKMVYPYLPEEMRNPDSFKSMLQNPMYRQQLEDMLNNMGASPGQWDNRMVDHLKNFDLSSPESRQQFAQVGMT

SEQ ID NO: 229526 - protein, 73 aa, Zea mays
  unsure (1)..(73): unsure at all Xaa locations
  Clone ID: MRT4577_140921C.1.pep
GSXACAFLCSASWAGSLGRASRGAWRPRAGPPRCSPPGGACPGRSGPLSPALPWLSGFRRRPLRPSGGAPLAP

SEQ ID NO: 229527 - protein, 54 aa, Zea mays
  Clone ID: MRT4577_140922C.1.pep
IITLDRAAHLYEQGQEVYLSMVWIHRPCRARCKSGNLCKDSIRWSDFELTDKKP

SEQ ID NO: 229528 - protein, 167 aa, Zea mays
  Clone ID: MRT4577_140923C.1.pep
SFQRLFWPPRKMFWIQPTRFFPLEGPCFPPFVSPKAASSVSLEGAPSALFISLRPRGNFFSSPPPSRLSRRRGTSPRFRMAPRSPPRVGPWGGITQSFFPLAPPPMNNESFCLCLEPYVFFRGGLVSVFPMGVLCVPKTIIFFFCFCLLTLFFFSPILFLVSPFSLV

SEQ ID NO: 229529 - protein, 42 aa, Zea mays
  Clone ID: MRT4577_140924C.1.pep
KSEGIKDLIDLVLYGSYIVLEISTPLFFYSLVLFYFFAIKEL

SEQ ID NO: 229530 - protein, 141 aa, Zea mays
  unsure (1)..(141): unsure at all Xaa locations
  Clone ID: MRT4577_140925C.1.pep
PERGGPTLPVALNQKIKGSLLPEXVMGLYGPYLGSRGLSSEPRDYKCKGLKNXTKKLXTGSLTWGLLTTALFGANFVVRPGSFETVFWQPNXTXTDKPLFPLRRAADQEDKKDVPRPGTYSNFFFNLIFSLARMYSAMLLT

SEQ ID NO: 229531 - protein, 92 aa, Zea mays
  Clone ID: MRT4577_140926C.1.pep
GFRSKLCLFQVFQRPVQAVETNGADEETGCTLVSDAAVVSAADGSPLSGPLGDDTEEETAPVDEKSCAQFFLYRRGRPRAFIYMKCKILDAC

SEQ ID NO: 229532 - protein, 181 aa, Zea mays
  Clone ID: MRT4577_140927C.1.pep
HASAHASAHASAHASDDMYKDCMETCSQSGDRELSEDLLVYFIEQGKKECFASCLFICYDLIRPDVALELAWMNNMVDFAFPYLLQFIREYTSKVDDLVKDKIESQNEERAKEKEEKDLVAQQNMYAQLLPLALPAPPMPGMGGPPPPMGGMGMPPMGGMGMPPMGPGPMPAFGMPPMGSY

SEQ ID NO: 229533 - protein, 219 aa, Zea mays
  Clone ID: MRT4577_140928C.1.pep
ERLRESVDMHDNFDQIGLAQKLEKHELLEMRRIAAYIYKKAGRWKQSIALSKKDNMYKDCMETCSQSGDRELSEDLLVYFIEQGKKECFASCLFICYDLIRPDVALELAWMNNMVDFAFPYLLQFIREYTSKVDDLVKDKIESQKEERVKEKEEKDLVAQQNMYAQLLPLALPAPPMPGMGGPPPRVGGMGMPPMGGMGMPPMGPGPMPAFGMPAMGSY

SEQ ID NO: 229534 - protein, 218 aa, Zea mays
  unsure (1)..(218): unsure at all Xaa locations
  Clone ID: MRT4577_140929C.1.pep
LALRLDHTRVVDIMRKAGQLHLVKPYMVAVQSNNVSAVNEALNELYVEEEDYERLRESVDMHDNFDQIGLAQKLEKHELLEMRRIAAYIYKKAGRWKQSIALSKKDNMYKDCMETCSQSGDRELSEDLLVYFIEQGKKECFASCLFICYDLIRPDVALELAWMNNMVDFALPHLIQFIREYTSTVADLVKDKIXSQKDERAQEIEEKDLAAQQNMNAQ

SEQ ID NO: 229535 - protein, 118 aa, Zea mays
  Clone ID: MRT4577_14092C.1.pep
AAGDMMEYVPPADAVLLKCVLHNWSDQDCVKILTKCKEAVAQGAKAGKVIIIDAVVGSPSHSQQVLEAQVLMDMQMMMLFMSKEREELNWQKIFTEAGFSHYKIQHVLGMRSIIQLYP

SEQ ID NO: 229536 - protein, 97 aa, Zea mays
  Clone ID: MRT4577_140930C.1.pep
GRRAPAPHDGGVQGSLAGDAGDHGGHGLGGHSETGADLLRGNTTTRAATSAGGTASGWPGLCISRLEGVQGDEWSNTPDMVRGGEEWFTVVAKGVKV

SEQ ID NO: 229537 - protein, 1239 aa, Zea mays
  unsure (1)..(1239): unsure at all Xaa locations
  Clone ID: MRT4577_140931C.1.pep
CRVAVAYPNVADAILANGMFSHYDRPRIAQLCEKAGLYLRALQHYSELPDIKRVIVNTHAIEPQALVEFFGTLSREWALECMKDLLLVNLRGNLQIVVQAAKEYSELLGVDACIKLFEQLKAYEGPTATAAEFAFRVEEDAVWSQAAAPQGRLAPSSARTGPARKGEPGRRRGEPLWVGRTCMRSCFLSLCRRRQCLXGWSSTSDGWNGHASHGRDGYAADGPWSDASIRNGRLLXWFCRELRTCCAYSPCKPEGPAPCRGRGLCCLGSRSKVLWMLLARLTVPKHGRRSVLLVLTPRSSVLHKFVVSIXIQAEVLEGVGEDYQECGCCSIRINVFCSRHYLYTNNILRPIEGYVQKVNPGNAPLVVGQLLDDECPEDFIKGLILSVRSLLPVEPLVDECEKRNRLRLLTQFLEHLVSEGSQDVHDXSLMNNXSFDSNNNPEHFLTTNPFYDSRVVGKYCEKRDPTLAVVAYRRGQCDDELINVTNKNSLFKLQARYVVERMDGDLWDKVLQPENEYRRQLIDQVVSTALPESKSPEQVSAAVKAFMTADLPHELIELLEKIVLQNSAFSGNFNLQNLLILTAIKADPSRVMDYVNRLDNFDGPAVGEVAVEAQLYEEAFAIFKKFNLNVQAVDVLLDNIRSIDRAEEFAFRVEEDAVWSQVAKAQLREGLVSEAIESFIRADDAAHFLDVIRAAEEANVYNDLVKYLLMVRQKAREPKVDGELIFAYAKIDRLSDIEEFILMPNVANLQNVGDRLYDEELYEAAKIIYAFISNWAKLAVTLVKLKQFQGAVDAARKANSAKTWKEVCFACVDAEEFRLAQICGLNIIVQVDDLEEVSEYYQNRGCFSELIALMESGLGLERAHMGIFTELGVLYARYRSEKLMEHIKLFSTRLNIPKLIRACDEQQHWKELTYLYIQYDEFDNAATTIMNHSPDAWDHMQFKDVCVKVANVELYYKAVHFYLQEHPDLINDMLNVLALRLDHTRVVDIMRKAGQLHLVKPYMVAVQSNNVSAVNEALNELYVEEEDYERLRESVDMHDNFDQIGLAQKLEKHELLEMRRIAAYIYKKAGRWKQSIALSKKDNMYKDCMETCSQSGDRELSEDLLVYFIEQGKKECFASCLFICYDLIRPDVALELAWMNNMMDFAFPYLLQFIREYTSKVDDLVKDKIESQKEERAKEKEEKDLVAQQNMYAQLLPLALPAPPMPGMGGPPPPMGGMGMPPMGMPPMPAFGMPPMGSY

SEQ ID NO: 229538 - protein, 114 aa, Zea mays
  unsure (1)..(114): unsure at all Xaa locations
  Clone ID: MRT4577_140932C.1.pep
MNNMVPTRPVDFAFPYLLQFIRDYTSKVDDLVKDKIESQNEERAKEKEEKDLVAQQNMYAQLLPLALPAPPMPGMGGPPPPMGGMGMPPMXGWACPPMGPGPMPAFGMPPMGSY

SEQ ID NO: 229539 - protein, 92 aa, Zea mays
  Clone ID: MRT4577_140933C.1.pep
CPSSIESPSGTWPTSEAVEQQIVVPSLHAMPDFARVYSFLGSIFDPDTSGHLQRLKVMDPIDIQTVLLLMRNLSWDLRSPDFEQHLWWWGPC

SEQ ID NO: 229540 - protein, 76 aa, Zea mays
  Clone ID: MRT4577_140934C.1.pep
WHGPPYMVFAWWAVYVLAAVAASHICLLNDLSMGSHQYAGYIVLVSLLLCSPPPRSASCGGVESSRGVEGGKESPA

SEQ ID NO: 229541 - protein, 169 aa, Zea mays
  unsure (1)..(169): unsure at all Xaa locations
  Clone ID: MRT4577_140935C.1.pep
RALCLLSVPVSPPASELRLSLRTRPSXRAHSVTERGSVRARGSAPASPRASARSFTRLARLVARLAARQCAALCVCEFARSSARAFSPSPPARSFCVCVCVLAVCLSQYFSLSLRPARASSPLPAPLSGCPSPSRSLSLSLVLPPVCLPPARERERERERERERERERE

SEQ ID NO: 229542 - protein, 67 aa, Zea mays
  Clone ID: MRT4577_140936C.1.pep
LIWGRSGSGTAWRLIRWSCGRRRPSRMPWGMKCCPPRRVWIRIDKKGGGELVPLLSYFSTLVCRDES

SEQ ID NO: 229543 - protein, 57 aa, Zea mays
  Clone ID: MRT4577_140937C.1.pep
EQAGLSTLNRLQKTRRTPSLKKGPTHIFAPDAKKFNADSGKNDSFTTYQAKYIAIYG

SEQ ID NO: 229544 - protein, 123 aa, Zea mays
  unsure (1)..(123): unsure at all Xaa locations
  Clone ID: MRT4577_140938C.1.pep
SRLVSSFHRATSDPYVXXXAFLRFLSLSFLLCFLFLAVRSPFPSYXCXFLLLASCFPXLFFLFXWFDSGGLPLLSLFXXXXWXLTFCLALFLSFILVCPGGFYPFSFSVLVCRWLLPSWACCS

SEQ ID NO: 229545 - protein, 86 aa, Zea mays
  Clone ID: MRT4577_140939C.1.pep
TSRPAGPGFLSPATRTPAPGSTQIPLASSPPAQSRPIVLSREAMPARARTIDAVDTDKATTRSSYGVLQNHRRRIFPFTTLYAAPS

SEQ ID NO: 229546 - protein, 90 aa, Zea mays
  unsure (1)..(90): unsure at all Xaa locations
  Clone ID: MRT4577_14093C.1.pep
MPARSYSSQPQLIHPAAVLAATLLLLSAXAXTASTHVTYSQVTSSIAPCLANTMSNTTSTSEASCNGLRSLNNRASSAAHRHATCNCLNS

SEQ ID NO: 229547 - protein, 187 aa, Zea mays
  Clone ID: MRT4577_140940C.1.pep
MGIDLVAGGRNKKTKRTAPKSDDVYLKLLVKLYRFLVRRTKSNFNAVILKRLFMSKTNRPPLSMRRLVRFMEGKGDQIAVIVGTVTDDKRISEVPAMKVCALRFTETARARIINAGGECLTFDQLALRAPLGQNTVLLRGPKNAREAVRHFGPAPGVPHSHTKPYVRSKGRKFEKARGRRNSRGFKV

SEQ ID NO: 229548 - protein, 96 aa, Zea mays
  Clone ID: MRT4577_140941C.1.pep
IQASTISAVLNVLSVSLVAASATRRLDASPGCPIRPLRSPMTTDQEGCQAQRSACVCTGSSTVPVCAAQASTISAVFLLINTLFYPLFSLHSGRLF

SEQ ID NO: 229549 - protein, 72 aa, Zea mays
  Clone ID: MRT4577_140942C.1.pep
VLYRVHRFRACLLYEFSVAFPVDHYIFPICKGSIPPSLLYSCNLATPFGLSGKTIKKNPPKKKKKGGHHQVS

SEQ ID NO: 229550 - protein, 154 aa, Zea mays
  unsure (1)..(154): unsure at all Xaa locations
  Clone ID: MRT4577_140943C.1.pep
TPRALAAKLTRLXSLRERLGATXFSSHPNELTAXLLSRYXVHQGKGXMLQRHQXLLAEFDXALFDXSDKEKVMHPFEAILRAAQEANCASPQWVCTLLLRPRPXGVWDYIRVNVSDLAVEXLSVSEYLAFKEQLVDGQSKATFVLELDFEPLMP

SEQ ID NO: 229551 - protein, 166 aa, Zea mays
  Clone ID: MRT4577_140944C.1.pep
PPFESIAMARSWSWLRGATRQPATTLSSAPCSCRRPPFPGSQLLPSAAARDQASPRRCLPYPAARARPRLRLSVSLVAASATRRLDASPGCPIRPLRSPMTTDQEGCQAQRSACVCTGSSTVPVCAAQASTISAVLNVLMDCRLAVFLLINTLFYPLFSLHSGRLF

SEQ ID NO: 229552 - protein, 149 aa, Zea mays
  Clone ID: MRT4577_140945C.1.pep
GKAGGARLKGTGRGNARGAPGRPLLKGRAQGARAGRHSRLEKGVGRGGMVPGHGHYSTRGRQGERGYPGGTRMGVPPGFSAVTTAAQWRGHRPGKSGGGWADGRPAGLHAAGGRAVSRILPIVWSLVWCLFLFFFFVFFFFFTCPGGRS

SEQ ID NO: 229553 - protein, 86 aa, Zea mays
  Clone ID: MRT4577_140946C.1.pep
KHKQPIQKPWPPCKKACRRAQRFYIHSRKQTSGERKTKFRSESKAQSDVEAIRIASNQKDPKYVYIKIYRKETRTRPVLTEEETSR

SEQ ID NO: 229554 - protein, 39 aa, Zea mays
  Clone ID: MRT4577_140947C.1.pep
NKFDLTNYFFLLAKSLYRSFIYDKKCFVIVFAFLAGENP

SEQ ID NO: 229555 - protein, 206 aa, Zea mays
  Clone ID: MRT4577_140948C.1.pep
ARWSLPANNRLRSASKGKAAVVSPAADAPPTISAPRRAKPSSDVSKSMCLDLSVKDNSAKPPRRHSIQTKPGASPRPTPSGTVTPVSGVRSKRSESQGRFDTPTSEVSMSISRRKFSTLSSISYWMTQIRLAEAASKHSVSLGFFKLALESECEPLDRMREELKSYVARHGLATELEDPVKDILQGYDILDDFGKLEDLCRALTAT

SEQ ID NO: 229556 - protein, 346 aa, Zea mays
  Clone ID: MRT4577_140949C.1.pep
MATSGEQSAGGGSAARASKLRYPLRSASKGKAAVVSPAADAPPTISAPRRAKPSSDVSKSMCLDLSVKDNSAKPPRRHSIQTKPGASPRPTPSGTVTPVSGVRSKRSESQGRFDTPTSEVSMSISRRKFSTLSSISYWMTQIRLAEAASKHSVSLGFFKLALESECEPLDRMREELKSYVARHGLATELEDPVKDILQVYDILDDFEKLKISAEPSQQPKKSDKAARTVTNVSPNGNLKPRSLNSDATESKEAVKKEGIQKVNPGARVRGSCNRNPVKNTTAKEAVAKNTGKETKKGAKGQQEVSEAPSALPNQESADVVKEITHEDKENMGDIEMAVDVAVAQDI

SEQ ID NO: 229557 - protein, 51 aa, Zea mays
  Clone ID: MRT4577_14094C.1.pep
LFQHDLIQIKYHKYLFILTSHMNIIIKFNHYSITLYSFKITLYKLYPSNTP

SEQ ID NO: 229558 - protein, 351 aa, Zea mays
  Clone ID: MRT4577_140950C.1.pep
MATSGEQSAGGGSAARASKLRYPLRSASKGKAAAVSSAADAPPTTISAPRRAKPSSDVSKSMCLDLSVKDKSVKPPRRHSIQTKPGASPRPIPSGTVTPVSGVRSKRSDSQGRFDTPTSEVSMSMSRRKFSTLSSISYWMTQIRLAEAASKHSVSLGFFKLALESECEPLDRMREELKSYVARHCLATELEDPVKDILQVYDIVDDFEKLKISAEPSEQPKKSEKAARTVSNVSANCNLKPRSLNSGATESKEAGKKEGIQKAKPDARVRGSNNRNPVKCTTAKEVVAKNTGKKTKKEAKGQEEVSNGDSDASSALPDQESVDVVKEITHEDKENMGDNEMAMDVAIAQGI

SEQ ID NO: 229559 - protein, 98 aa, Zea mays
  Clone ID: MRT4577_140951C.1.pep
MAMAPSSSSSGGGGGDGANAADAMALVQGYTAEELAIAGEFLTTWLPFLSAGLCPSCASSLRGRVDSLITRGRAAEESPPVDQIEPSGWDSDPAGPQN

SEQ ID NO: 229560 - protein, 43 aa, Zea mays
  Clone ID: MRT4577_140952C.1.pep
GNKGRCTTNRVPILAKVIHDNFSTVEGLMTTVDAITATQKTAD

SEQ ID NO: 229561 - protein, 131 aa, Zea mays
  unsure (1)..(131): unsure at all Xaa locations
  Clone ID: MRT4577_140953C.1.pep
GAIFEPPTRGNPPGLGPIPKPRVGNQFFWKMGGGPPKKIYIPPPPGGGGKIFTPGWGQSPAPGQKTLKWGQVPRGEPPPLGQSWAFAEGKNWVGGGGFFLWKKTPMAFPPRAKKSPNQYFLNQGVKLRXXE

SEQ ID NO: 229562 - protein, 105 aa, Zea mays
  Clone ID: MRT4577_140954C.1.pep
AWLLADRTLLIHPLSLSLHFYFSRTSICTSLSQLQPLGAGRRCSLWPLGKLRSFSLLLCTELLFVDFFSFLLAALLLDRQGELDICTVQLNSNLVLIYSNPLRCD

SEQ ID NO: 229563 - protein, 72 aa, Zea mays
  Clone ID: MRT4577_140955C.1.pep
MTKRTKKAGIVGKYGTRYGASLRKQIKKMEVSQHSKYFCEFCGKFAVKRKAVGIWGCKDCGKVKAGGAYTMK

SEQ ID NO: 229564 - protein, 197 aa, Zea mays
  Clone ID: MRT4577_140956C.1.pep
MKSSLLTVFGLVAAAAAQSSGDLPQCGQTCAGNMVSAAKSKELGCDAGDVSCLCTNQDFIYGLRDCSAAICNSEQAAAVVAYGLALCRQAGVQITTGSAGSVSASATGTGAVRTVLSTLVESDTTITSAVSTISGTATGGNEDDLSVSTYTSVFTNSAGDEVTSTIKEILGGVALTTYTSGGSHIIEPIETASASAS

SEQ ID NO: 229565 - protein, 71 aa, Zea mays
  Clone ID: MRT4577_140957C.1.pep
PCKALVHESRVTLSAKVLSGHYSCFRGFLLRRSSLAPSIPPELWSSLSYVPCAYLIKLTKRCTTTIYICRR

SEQ ID NO: 229566 - protein, 70 aa, Zea mays
  Clone ID: MRT4577_140958C.1.pep
FVIPAPRMIHFQNLREGEKVFTQPRPGGVPCVPFRITAPMFLCRALRFEKSKIVCIQKKKKGRAAADKRA

SEQ ID NO: 229567 - protein, 157 aa, Zea mays
  Clone ID: MRT4577_140959C.1.pep
SLYLVGWPMNDSQSLLTFFGLLIFLCGGIYQCFFFLPGLVFFPIFPASCSLFHCGVGSRMLFFSPPGLSCSALLAFRVFFLRRFCCLFGVGPLQVPLLSFFCVLRVVAGPFPFGLGGGPPRSCFVVLLLPPRRVPAGFLGGHPAGSLLSSLLLVPLG

SEQ ID NO: 229568 - protein, 186 aa, Zea mays
  unsure (1)..(186): unsure at all Xaa locations
  Clone ID: MRT4577_14095C.1.pep
TGPISPPPRRRPAGRPGRPRLPASRWRRQVADRGGVRADGGDVHDLALPLGMSFAAVLAQVLNRCAGSEGGLRPDVLSKMCTSAVKESLTNIYGDRFQSFMSNFXKAFGSTLRTIHLINETPVFEQDVEQCSYKDDDSVPQIKLGGADSLPEIKVGGADSQRQIHDVQTDMPSSSMNSQIVLITGI

SEQ ID NO: 229569 - protein, 68 aa, Zea mays
  Clone ID: MRT4577_140960C.1.pep
LFRSRGLVRAHVTVSRILRQYCRHSCVIHRFCNSALCSILRMLCLWVIVFLVAPVFFPEFWITQAHSQ

SEQ ID NO: 229570 - protein, 49 aa, Zea mays
  Clone ID: MRT4577_140961C.1.pep
LSLVEAAGPPDRLHADGAGNGDADADAEAGWKAGWRRRASPSSRRGWLR

SEQ ID NO: 229571 - protein, 100 aa, Zea mays
  unsure (1)..(100): unsure at all Xaa locations
  Clone ID: MRT4577_140962C.1.pep
IEGKXRXKKVCMXXRSRCRLGGQEEXXFGKGFRGGVYPPPPIGKTKIYARASNKGNAWVIGCPCDVHLRPVNCDSGHMRPPRALXRQAERPPVXXIXQNS

SEQ ID NO: 229572 - protein, 43 aa, Zea mays
  Clone ID: MRT4577_140963C.1.pep
TSCGRLLMSSSTSYSTPYRNLWDAQLSLYGIRLELDDLIKLAA

SEQ ID NO: 229573 - protein, 49 aa, Zea mays
  Clone ID: MRT4577_140964C.1.pep
KSIDNLINSTCIKSILTKYPEQPQFQKKKKYANPYTTSKLTYTCIQRHT

SEQ ID NO: 229574 - protein, 51 aa, Zea mays
  Clone ID: MRT4577_140965C.1.pep
ENNVSLKRSFSCQSIPHTVRLSLEIRIGQQMNLMCGVFKHRMQSLSTNIVP

SEQ ID NO: 229575 - protein, 126 aa, Zea mays
  Clone ID: MRT4577_140966C.1.pep
WRSVQQAEATHNDTTQHTWWRAVQCSPPPALTVVRSTLLCFMDMQSLSFLPSSSSSATIPSPPPSPHPLWPNSGSKKKHHLYLPPHTTPHHCCVRLIIHRARSLINLQPKPRHPAALPVSTFSRCQ

SEQ ID NO: 229576 - protein, 70 aa, Zea mays
  Clone ID: MRT4577_140967C.1.pep
SRPVPHPPGPVLNPPNWFPVLEKMPRGPVPALPFLTDSHNACTASWLVVPPQQVFVLVCSIVFSMWPNEW

SEQ ID NO: 229577 - protein, 40 aa, Zea mays
  Clone ID: MRT4577_140968C.1.pep
DQHSTPWGICLKHYLTLAGILGTIFVYVSSSITCFVCASN

SEQ ID NO: 229578 - protein, 117 aa, Zea mays
  unsure (1)..(117): unsure at all Xaa locations
  Clone ID: MRT4577_140969C.1.pep
PPPSGGDHLLRHPFLKKGVPILAAPERRVADLIGPPAAVGHPLFVVLSPAGEERGRGVPLLVVGWCRLGGGDSSIAQTRNRCPTRSFFFFFFFVFFFFFFFFFFLVFFFFPPPVXKX

SEQ ID NO: 229579 - protein, 124 aa, Zea mays
  Clone ID: MRT4577_14096C.1.pep
MNGAHIAAASPEAGGSSSSASSSGVSASGRSWLLKGVHLRRRRRWRRQVAVRGGVRADGGDVQDLALPLGMSFAAVLAQVLNRCAGSEGGLRPDVLSKHYTDAVSDKFTNIDESSAHDSMYHLP

SEQ ID NO: 229580 - protein, 126 aa, Zea mays
  Clone ID: MRT4577_140970C.1.pep
GLGSRSCWVGARWFLVAGSPAPGLIHGGRCPLRAAVEGPHVRRRLGPLCRLGPVRWVAVGLRRSGRHQCLSVASGAGGAVPWFAAPCCVVPSRSLSSLAALFLLLVCSALCCFLSPRPTRPRTRAT

SEQ ID NO: 229581 - protein, 75 aa, Zea mays
  Clone ID: MRT4577_140971C.1.pep
LVPVTGPGGNTVLMLKASKKPQLLHMPHTVYTSNYLTFGGTTARVSCSHRELSTLRKLKLQPSHSLNNFKPSARP

SEQ ID NO: 229582 - protein, 99 aa, Zea mays
  Clone ID: MRT4577_140972C.1.pep
VLASASACPPAPARSLLSPRSWPRPVAPLLRRCGRAFVGSCAWGGRLCSSPCRLSASGSGASCACRGLSPSSAPVWGAALWVAFARSLAGLPRSVACCV

SEQ ID NO: 229583 - protein, 323 aa, Zea mays
  unsure (1)..(323): unsure at all Xaa locations
  Clone ID: MRT4577_140973C.1.pep
MALTRIGLAGLAVMGQNLALNIAEKGFPISVYNRTTSKVDETVQRAKLEGNLPLYGFHDPASFVNSIQKPRVVIMLVKAGAPVDQTIATLAAHLEQGDCIVDGGNEWYENTERREKAMEERGLLYLGMGVSGGEEGARHGPSMMPGGSLEAYQYIEDILLKVSAQVPDSGPCVTYIGKGGSGNFVKMVHNGIEYGDMQLIAEAYDVLKSVGKLTNGELQQVFAEWNKGELLSFLVEITADIFSIKDDQGEGYLVDKVLDKTGMKGTGKWTVQQAAELSVAAPTIEAFLDSRFLSXLKDERVAASKIFQGDYSSGETVDKAQLI

SEQ ID NO: 229584 - protein, 308 aa, Zea mays
  Clone ID: MRT4577_140974C.1.pep
MPGQELRTVNGSQMLLVLLVLSWLPHGGALSLAEASRASFPGPSELHSEDSRFRELRKRYEDLLTRLRANQSWEDSNTDLVPAPAVRILTPEVRLGSGGHLHLRISRAALPEGLPEASRLHRALFRLSPTASRSWDVTRPLRRQLSLARPQAPALHLRLSPPPSQSDQLLAESSSARPQLELHLRPQAARGRRRARARNGDHCPLGPGRCCRLHTVRASLEDLGWADWVLSPREVQVTMCIGACPSQFRAANMHAQIKTSLHRLKPDTVPAPCCVPASYNPMVLIQKTDTGVSLQTYDDLLAKDCHCI

SEQ ID NO: 229585 - protein, 113 aa, Zea mays
  unsure (1)..(113): unsure at all Xaa locations
  Clone ID: MRT4577_140975C.1.pep
GNIPLWSLLLEQXTALSLAPAYEQTIXAQPLQKLELPLIIQVALAYLSTYSQQQQFLTCNQLCTLNPAAYKQQQLLPFSQLATAYCQQQQLLTFNQLGALNPGAYXAAPILLP

SEQ ID NO: 229586 - protein, 128 aa, Zea mays
  Clone ID: MRT4577_140976C.1.pep
SAGEVFALARAQVDYVLGSNPRGMSYLVGYGARFPARVHHRAASIVPYKHSKEFIGCAQGFDDWFVRKGANPNVVVGAIVGGPDRRDRFRDHRENYMQTEACTYNTAPMVGMFAMLNRLARDEAGVNR

SEQ ID NO: 229587 - protein, 229 aa, Zea mays
  Clone ID: MRT4577_140977C.1.pep
MLAVARDGADLILSLPEDVLALISAHLRPRDLLALSAASRRLRRALSADKAWLAQCRRLLPSQPHLLAWRAAAAGSSLAVCRFLHSAAPLLGLWAHQNPELGNLVAAVPGFLSVVAARAIPQELSPRLRWAPVFELLADAHGRPALLFLHGHHHAHLFPGLLASLQPHANVIFLEAHIARDPFASSSSSSPHRFARLSFGDRRRLLDSLVAACRVTLPDLVDAPLFACS

SEQ ID NO: 229588 - protein, 62 aa, Zea mays
  Clone ID: MRT4577_140978C.1.pep
MGKVHGSLARAGKVKSQTPKVEKQEKSKVPKGRALKRLKYTRRFVNVTLTGGKRKMNPNPGS

SEQ ID NO: 229589 - protein, 85 aa, Zea mays
  unsure (1)..(85): unsure at all Xaa locations
  Clone ID: MRT4577_140979C.1.pep
MGKVHGSLARAGKVKSQTPKVXDSNKHQPRTPTNKRSLTIGPTXEKQEKSKVPKGRALKRLKYTRRFVNVTLTGGKRKMNPNPGS

SEQ ID NO: 229590 - protein, 116 aa, Zea mays
  Clone ID: MRT4577_14097C.1.pep
PKEFSPVAGGKGPAGFFFPQKGGYKGQLGPPQPVGFPKEGALALLPLVFQKFGLGRPPLSLIALSPPRLFFYSRFLRPPPIFSKLVGIKPQFFFPWFPNLFLKKERNPKFFLGGFP

SEQ ID NO: 229591 - protein, 108 aa, Zea mays
  Clone ID: MRT4577_140980C.1.pep
KPVNRALFFLSCRALGFFFVGELPGGGSQQIQCGPPPAFGPQGGRPHNPGGFKWGGGGLFFLGPWGKEKIFFWVKKGGPPPPPLGGPFSPWEMGFFIHGGGEPPFFLF

SEQ ID NO: 229592 - protein, 72 aa, Zea mays
  Clone ID: MRT4577_140981C.1.pep
FEHVLLLSPWPRSQAVSLGSQGTPLIWNRFISQCGTVGKHQCDASARMQQLALSIGLLSHGDRSSASRARGQ

SEQ ID NO: 229593 - protein, 59 aa, Zea mays
  unsure (1)..(59): unsure at all Xaa locations
  Clone ID: MRT4577_140982C.1.pep
PXTSTXAXCXXXXXHYAPXLXTCKXDDSLSTQNRPHVLPXXIXLTTXLPTYLPFDATKL

SEQ ID NO: 229594 - protein, 133 aa, Zea mays
  Clone ID: MRT4577_140983C.1.pep
EDDGTSSTKSKKRPRRDLSDPAEPGAAKKQKADHGDSTLSGEANDEGNHPTQNPSSGGLEGDPDLNARNYEESGGVVYMDARTDVGVGSNSIDAKPGSRADDNTASWQSLPEQNKTSTALPEDTSMDGTPGPA

SEQ ID NO: 229595 - protein, 75 aa, Zea mays
  Clone ID: MRT4577_140984C.1.pep
ILSTLGFWPNSGPHSQLVAPWLFTHSFPSPTSAYLFYLHTHSITSYCCLPTFLPFTTGSIDSAYFTHTLHSARVV

SEQ ID NO: 229596 - protein, 50 aa, Zea mays
  Clone ID: MRT4577_140985C.1.pep
HVRLFRTQANKVHWQGPKLVNHGHICQDCQSKACPLYFPSILFDDRYQVL

SEQ ID NO: 229597 - protein, 271 aa, Zea mays
  Clone ID: MRT4577_140986C.1.pep
MTQCYNIPRGIIDVAPKPIAEVASRLRLLSCAIFEAYVSADGRHVDYQSIQGSEEFKRYIRTVEELQRVEIDYLSREEKLAFFINLYNMMAIHALVTCGHPAGPLDRKKFFGDFKYIIGGCAYSLSAIQNGILRGNQRPPYNIAKPFGQKDRRSKVALPYHEPLVHFALICGTKSGPALRCYSPGDIDKELMEAARDFVRNGGLIVDPEAKIASASKILKWYSTDFGKNEMEVLKHAANYLEPAESEQLLELLASTQLKVMYQNYDWSINI

SEQ ID NO: 229598 - protein, 70 aa, Zea mays
  Clone ID: MRT4577_140987C.1.pep
KRFFFWPIVFIWGGRNLAARAPLRARWGHQGGGRGGPKPGINQGCNGFIFQFRLKTYLATIEVDVRGGGG

SEQ ID NO: 229599 - protein, 83 aa, Zea mays
  Clone ID: MRT4577_140988C.1.pep
AFCTEGLVLGHQPESGLASSRASRSSSSLTAATPAPPVAAAETSATPALSMRTAMGMRTWGAHPCLLRREPGTTRLGTAFGCD

SEQ ID NO: 229600 - protein, 34 aa, Zea mays
  Clone ID: MRT4577_140989C.1.pep
HAFVFASGQVDIIRVKGSRRRRAMTMALLSSIYT

SEQ ID NO: 229601 - protein, 104 aa, Zea mays
  unsure (1)..(104): unsure at all Xaa locations
  Clone ID: MRT4577_14098C.1.pep
GAVRDKVTENEHPXYSGYAVICYEGLCSFRLRSPYRFCTTGRQTTRTRQRMSGRPRELCQGMCSNSHVALRLTCALAXLPEIPDSARDXXRVHDVTTXVSSTIP

SEQ ID NO: 229602 - protein, 82 aa, Zea mays
  unsure (1)..(82): unsure at all Xaa locations
  Clone ID: MRT4577_140990C.1.pep
KVPSYAWVAFFMLHEXXVHSGLERWMQLPISQLGDSKTRDHSHALRAPPLPIGLMIGCLQLRALHSLGSVRNLVVLLGRLLG

SEQ ID NO: 229603 - protein, 78 aa, Zea mays
  Clone ID: MRT4577_140991C.1.pep
AEPTRHILTETILEFFNTNVDQQHDHAHLPKTPIKIIPVTSEIPPAATCPNGALNNVASSITQSRAHMSTTPTHTWIP

SEQ ID NO: 229604 - protein, 150 aa, Zea mays
  unsure (1)..(150): unsure at all Xaa locations
  Clone ID: MRT4577_140992C.1.pep
PAAERPPDPGPRELRTRPLKXRFYPPPXLPPPEAPVRXQESAPVILDLQPLFAQKHWPSVMTALRLRASSXRYALKAVISSKAPKEEKKDLQALPGKLFAPLDGLDPAAQIQSPPEAQKXXGXXPPPPGXVLAXXGGPPGRAAFPFFVPF

SEQ ID NO: 229605 - protein, 73 aa, Zea mays
  Clone ID: MRT4577_140993C.1.pep
KFVFFNTPLKPSILWWHPVSQPFDPFGGDFFLEFGIVFSILPRGQFFFSGKILPNFFCWPGVQTGGFPGRNSP

SEQ ID NO: 229606 - protein, 86 aa, Zea mays
  Clone ID: MRT4577_140994C.1.pep
RCLRCAVTTDVANALKHALSVWSTGSSNGVGSPKTGPTATPATIPDTVREHMRIYMRIYETIDARILRRVVSIVGRQLGTIVLSMV

SEQ ID NO: 229607 - protein, 82 aa, Zea mays
  Clone ID: MRT4577_140995C.1.pep
WNSARGSNTRSPVTVTALGTPAATSPLSHSRPRLLSSGTPARAARVQRVRCALSRPSPALFLVAVTTRCLPYTAVLHPRRRL

SEQ ID NO: 229608 - protein, 73 aa, Zea mays
  unsure (1)..(73): unsure at all Xaa locations
  Clone ID: MRT4577_140996C.1.pep
PFSVMILEGNGQXTSILQVKGAASKSPISQTGFYRLSHXLPCSHVNPTCNAYAGTIRPRGVQCSVLADAVRPP

SEQ ID NO: 229609 - protein, 99 aa, Zea mays
  unsure (1)..(99): unsure at all Xaa locations
  Clone ID: MRT4577_140997C.1.pep
MATKMGCXLMLLGLSAIAASATIAQQCSQCAIASLATMYLSPAASSSWENTLLPPYMIQQALAGGVRALXHLIVQQSSLLLQQLPLEHILAQNIGQQLL

SEQ ID NO: 229610 - protein, 62 aa, Zea mays
  Clone ID: MRT4577_140998C.1.pep
SYFYVSFDKYGSEINGVYFFMRFQKFWHFCGGVELYGLEFYELNVLVGLVKSMNFFGDLWWG

SEQ ID NO: 229611 - protein, 43 aa, Zea mays
  unsure (1)..(43): unsure at all Xaa locations
  Clone ID: MRT4577_140999C.1.pep
RYIYIFIRAILSIALSRSSLLPXXXNFIRLXLRGACLSHITSV

SEQ ID NO: 229612 - protein, 208 aa, Zea mays
  unsure (1)..(208): unsure at all Xaa locations
  Clone ID: MRT4577_14099C.1.pep
TXLQGXXHQGRXLXXXPGLPXXHXTXXRCXXAPAPPLXPPRXARXGXXWVXXPRPSPSRRPDAXRGVLGGGGRXAAGGARAPXAQLRRGRLLRAAXSPRXXGSCXXPRPRTXVRHACXAGVPPPXRRVRVAXARPYLXGTAXPSRRPXRSSREYRKIRCWWEIYRFHTSRGGGAWAPIAVHLPGQQPAPGGAWPAAHTYGLPDGLLGL

SEQ ID NO: 229613 - protein, 568 aa, Zea mays
  Clone ID: MRT4577_1409C.1.pep
EAAPSAAPPSSRGHRFRLCPRISLRHRFLRRGAATTEGDPVAVAFNTMVTPPTVEEEDEEMLVPRQEAVDTDAAQPMEGVVVAQTEVVSTAESQPVEDPQTSRFTWTIENFTRFSEKKHYLEVFVVGGFKWSVLIFPKGNNVDHFSMYLDVADSTSLPYGWSRYAQFSLAVVNQIQPEFTIRKETQHQFNARESDWGFTSFMPLSELYDASRGYLVNDTVVVEAEVAVRRMVDYWTYDSKKETGYVGRKRGGATCYMNSLLQTLYHIPYFRKAVYHMPTTENDIPSGSIPLALQSLFYKLQYSDSSVATKELTKSFGWDTYDSFMQHDVQELNRVLSEKLEDKMKGTVVEGTIEQLFEGHHINYIECINVEHKSNRKESFYDLQLDVKGCRDIYSSFDKYVEVERLEGDNKYHAENHGLQDAKKGVLFLDFPPVLQLQLKRFEYDYMRDSMVKINDRYEFPLQLDLDRDGGKYIAPNADRSTRNLYTLHRYKFDDERVTKEDAKKALEEQYGGDEELPQINPGFNNAPFKFTKYSNAYMLVYIRESAKEKIMCTVDEKDIAEHLRVRL

SEQ ID NO: 229614 - protein, 48 aa, Zea mays
  Clone ID: MRT4577_140C.1.pep
AERHQREGRSIAPLNQGSLRPRMHTPTRTCLPRTYTLTMQTLSTTTTA

SEQ ID NO: 229615 - protein, 124 aa, Zea mays
  Clone ID: MRT4577_141000C.1.pep
ILHTLPTFTILPTAQTITEHGALLTRESPAMATALNTYCMSPSIGAAAHLMPAQSTRFTFQASYPRPTNSSSNDMIHPQRHYYELHTILTTDYHMHDIPLSHPYLVASMHVITILFRDLHHLYT

SEQ ID NO: 229616 - protein, 66 aa, Zea mays
  Clone ID: MRT4577_141001C.1.pep
GTRSNDDRVTGLLDEKLHNEVRFYDHMQRQIYKRRLKLLHTIHVESSDFDLEIHYAFHDEPHILLA

SEQ ID NO: 229617 - protein, 64 aa, Zea mays
  Clone ID: MRT4577_141002C.1.pep
WIFVNLTVRFCILGKESFYDTFHTVADMMYFCQMLAVVETINAAIGVTTSPVLPSLIQLLGRNF

SEQ ID NO: 229618 - protein, 94 aa, Zea mays
  Clone ID: MRT4577_141003C.1.pep
GAPEKPLSQVFWAWARVFLFKGGFRLKFFWSPSWGDRAKKIPSFFPIFPVMGRKNPFFLVPHPIQLRAKKFPFFKDVLFSVFAGVVLCPKLFCP

SEQ ID NO: 229619 - protein, 67 aa, Zea mays
  Clone ID: MRT4577_141004C.1.pep
PQLHISYIVMSQQLRNVAMGYFGVNVQWWLCNGSFNPYHVHHKSMISNNVKQTMYDDAPKTIQNAGH

SEQ ID NO: 229620 - protein, 89 aa, Zea mays
  Clone ID: MRT4577_141005C.1.pep
MGRWGFSRKRKERKWGSSRGHEPGDKGPTQGLRHRASPARIMKLYPHLTAGQREMIEGAGFGGLLRLQCPTVPARLSTWLLRRFVTDSS

SEQ ID NO: 229621 - protein, 152 aa, Zea mays
  unsure (1)..(152): unsure at all Xaa locations
  Clone ID: MRT4577_141006C.1.pep
MNTDVRRPRAPSYFFSDNSLRCEEGPTGAPLAADKVYIMGHSASRKSRLRTQVTYNVKLIXTPEGEXVELLVHDDVHILQQGEEDCIDLPYSCRAGSCSSCAGKSLSGSVNQTDQSYLDDGHSTCGWVLSCHAYTTSDGGIDTHKEDELTEA

SEQ ID NO: 229622 - protein, 86 aa, Zea mays
  Clone ID: MRT4577_141007C.1.pep
RTTCAISDLDGYIKVINFQGEKQSDPLSGAHVQMIDHTPLNGPGPRCSRKLTVRLQQQDFMLLIELQAHQSDRTGLCPLQLHRQAQ

SEQ ID NO: 229623 - protein, 154 aa, Zea mays
  Clone ID: MRT4577_141008C.1.pep
QQLIMSSSCMHGRRRWSSYLGGCVSWQWEAACASWASARRRLAVGRRAIELPPAAHTMLLTRTDGGHGLSASVAAAPAPSFTSLLRLWCNLYPLAIVLIYLGLSVGCPVTVYGDVLIVLNWSWIGVHATARLAIAGPWHHTCKHAHRHTHTRTK

SEQ ID NO: 229624 - protein, 102 aa, Zea mays
  Clone ID: MRT4577_141009C.1.pep
GAAAPRLPRVLVHGRMGGRVGGRTGADAATLLVSSIRTSRRPLAIVLIYLGLSVGCRVRVYGDVLIVGSRPWGPMLRVVGPKIHAPPPHLIHLMRDDGIHNM

SEQ ID NO: 229625 - protein, 88 aa, Zea mays
  Clone ID: MRT4577_14100C.1.pep
LGFSLLCRFFWDALVIFFPPLSRIVSVSQCSFFLMLLKAFKKFWYIWISNPVWFNLEIQKKKKKKKKNHKNPHKKKKKKAALELRFCP

SEQ ID NO: 229626 - protein, 63 aa, Zea mays
  Clone ID: MRT4577_141010C.1.pep
EVTFPGFVSCVCIGATRWLILANGLGYRLANTNSNWSDTVLWNPRCKMEAKDKYFVCVKKANI

SEQ ID NO: 229627 - protein, 402 aa, Zea mays
  unsure (1)..(402): unsure at all Xaa locations
  Clone ID: MRT4577_141011C.1.pep
MADSRRTWSWDVSGFEPPQPATTQAASAPTAMPRAPPTAMMPRPSAGAPRAXPAQXAVADQLDQLVDSVQLAREDCLELRQEASDLLEYSDAKLGRVTRYLGFLADRTRKLDQAALGTARGSTGLIHEKKRLFNDLLTLKGNVKVFCRCRPLFEDEGPSVLEFPDDFSIRVNTGDESLTNPKKDYEFDRVYGPHIGQGELFLDVQPFVQSALDGYNISIFAYGQSRSGKTHTLEGSSHDRGLYLRSFEELFDLSNSDTTSTAHFNFYFTACELYNDQVRDLLSESSSTVPKVRMGVQESFVELVQEKVENPLEFSAALKIALQNRSVNSPKAMVSHLIITIHIHYRNYVTGEHLYSKLSLVDLPASECLLEXDANRDNVTDFLHVSKSLXSVXXDAFASLKR

SEQ ID NO: 229628 - protein, 132 aa, Zea mays
  unsure (1)..(132): unsure at all Xaa locations
  Clone ID: MRT4577_141012C.1.pep
HWVPRGRPGTFIISASSHLILCMKPTASANRLLIRSHSPSLARSYSLTFTSLAASRAIVPRQQTYFHRSSSLVISYRPHSSTCCKIDTMASSSKPGPSGTEPKTPVFIQEVTPEITXVRLPXSVXFGILAPS

SEQ ID NO: 229629 - protein, 75 aa, Zea mays
  Clone ID: MRT4577_141013C.1.pep
ATNWPSTGRGPSARPAVPARRLVPTYWHGPGSPRDAPVDPCRAPLVVTARQAAPLAVWRARVGPHAGAERVGGSR

SEQ ID NO: 229630 - protein, 75 aa, Zea mays
  Clone ID: MRT4577_141014C.1.pep
TFFIYINWPKGGFCRQGRYKDICWVMCWRGTFPVFKHYFITKPDRGGKASGYKRSKALWGMFPQQTTTNVQHFFT

SEQ ID NO: 229631 - protein, 94 aa, Zea mays
  Clone ID: MRT4577_141015C.1.pep
PLSIPEKKVVPRGLLFLPVQKLGPPLKRPSPKYHFWHVGRVLLSPPLFRPVHRREGVFGLITPGPYEPGNGSTRRGWSRFLIRGKKRMPRLPLC

SEQ ID NO: 229632 - protein, 54 aa, Zea mays
  Clone ID: MRT4577_141016C.1.pep
KMNVWCLSVYTPSLCTTMEKCYKSLWYCWSKIIMTGINKLSRHMYVVALQLQLV

SEQ ID NO: 229633 - protein, 76 aa, Zea mays
  Clone ID: MRT4577_141017C.1.pep
AVVRSSIPSNIYTKSLELMYVRITYSPVTRRRSVGHSPTPYSSAGSPAAEVHGLAERLVGAGLPAPVGAGRPRPGQ

SEQ ID NO: 229634 - protein, 60 aa, Zea mays
  Clone ID: MRT4577_141018C.1.pep
PPSPRRRPWRAVVGLPAPRACCPRLASPCVWVLWVRVEGFRRLLRYRVHSGAVCLLAFVV

SEQ ID NO: 229635 - protein, 55 aa, Zea mays
  Clone ID: MRT4577_141019C.1.pep
SASPLFFFFFFFLPETSRLRTENRAISSIFLLRFVVVVWGHHYLFQLATQATLAT

SEQ ID NO: 229636 - protein, 56 aa, Zea mays
  Clone ID: MRT4577_14101C.1.pep
MANRGAAAGKLTVTETFSNLREHGKVRAFDTSRPCFASSLPLGANSREHPHFSWCS

SEQ ID NO: 229637 - protein, 114 aa, Zea mays
  Clone ID: MRT4577_141020C.1.pep
WVQKCCLPVCLSICLVGVELIQSTDLFRALEDPTQAWQPSSCILGLPSSPGSPLPGPTSARWAEPLPHTRPSSRALPWKPALPEGPSAQLGPSWALPPYLFSVPGPLRMRPLEA

SEQ ID NO: 229638 - protein, 44 aa, Zea mays
  unsure (1)..(44): unsure at all Xaa locations
  Clone ID: MRT4577_141021C.1.pep
LTPRWEGPFIITKVLEPGTFKLCNEEAQAYDNAWPIEXLRRFYT

SEQ ID NO: 229639 - protein, 280 aa, Zea mays
  Clone ID: MRT4577_141022C.1.pep
MFGFLKQRRQTPSGFSSSSAAEEVTAGIDGSGLVAIVTGASSGIGAETCRVLALRGVRVVMGVRTPSAGERVKEEIVKNVPAAGIAFSPFTLSDDGIELQFATNYLGHFLLTNLLLEKMKITAMESGIEGRVVIVASDSYKHTYREGIRFDKLNDASGYKGILAYGQSKLANILRSNELSCRLKEEDAKVVVNSLHPGVVATNITRHLGIIKDILSPIAKLVLRGVEQGAATVCYLALHPQVAGVTGKYFVDFNAVELKPPATDKELSKKLWDFSVSLLQ

SEQ ID NO: 229640 - protein, 74 aa, Zea mays
  Clone ID: MRT4577_141023C.1.pep
LRRGIYLLLFKLYHCLLLIVLQGAATVCYLALHPQVAGVTGKYFVDFNAVELKPPATDKELSKKLWDFSVSLLQ

SEQ ID NO: 229641 - protein, 47 aa, Zea mays
  Clone ID: MRT4577_141024C.1.pep
TTALTPRCSGQKCLSRPCACQPPRCVMCEYFVGSCNASCCARLWYGS

SEQ ID NO: 229642 - protein, 206 aa, Zea mays
  unsure (1)..(206): unsure at all Xaa locations
  Clone ID: MRT4577_141025C.1.pep
MFGFLKQRRQTPSGFSSSSAAEEVTAGIDGSGLVAIVTGASSGIGAETCRVLALRGVRVVMGVRTPSAGERVKEEIVKNVPAAXIDVLQLDVSSMSSVKRFADNFNGLNLPLNILINNAGIAFSPFTLSDDGIELQFATNYLGHFLLTNLLLEKMKITXXEVDXKGRVXVIVASDSYXTRIEEGIRFDKLNDASGYKGILAYGXSS

SEQ ID NO: 229643 - protein, 46 aa, Zea mays
  Clone ID: MRT4577_141026C.1.pep
SNQPLEQPPYFFFYLYFFIFLFCFFFFFFFFFFFFFFRTAWVDASV

SEQ ID NO: 229644 - protein, 177 aa, Zea mays
  unsure (1)..(177): unsure at all Xaa locations
  Clone ID: MRT4577_141027C.1.pep
MGISXDSRHKRSATGARRAQYRKKRKFELGRQSANTKLGSKRIHLVRVRGGNFKRRALRLENGNFSWGSEGISRKTRVLTVVYNASNNELVRTNTLVKGVVIQIDATPFRQWYESHYALPLGKQKSGEEAASAEKKSKSVEKKIAARAATAAIDPLLNDQFNAGRLYAVIXSRPGQS

SEQ ID NO: 229645 - protein, 99 aa, Zea mays
  unsure (1)..(99): unsure at all Xaa locations
  Clone ID: MRT4577_141028C.1.pep
INLVKGGVAHNVGGDNHNHWKRAQAVRIKSLIVPTIDMDNICFHLEEKTRGKMVYRSINMIILDRGRCYDPQKRLWXPSTVRKPLASIYPKLGQNVAEG

SEQ ID NO: 229646 - protein, 162 aa, Zea mays
  Clone ID: MRT4577_141029C.1.pep
MSAALTGTTRSGGHQAAGAGFERAGPAVSYSEEYGLSFGIGHSTSSSTEDGQPLYVSRNSSFNTADDGRMGRDGKLHRLMGYSSASEVLQHSPDLFESFGRRAAGARAHVGGKGKGVCVAENDACERDGGAVERSKVRSGGWPVHGILKKGIHGLESLKLRS

SEQ ID NO: 229647 - protein, 51 aa, Zea mays
  Clone ID: MRT4577_14102C.1.pep
VWVLCVTWSKNVIYKKGGCDIGILEEFGSEQITLYVLLRFRGYYIFGRVFL

SEQ ID NO: 229648 - protein, 46 aa, Zea mays
  Clone ID: MRT4577_141030C.1.pep
HKNLSFLLGYKNNAPSNHSIMLLYQGHDTDIDLANIEQMNSFNTTF

SEQ ID NO: 229649 - protein, 75 aa, Zea mays
  unsure (1)..(75): unsure at all Xaa locations
  Clone ID: MRT4577_141031C.1.pep
PPSFPKKQKHKTQNQNIIKTQPKELKGQEYQQAHPSHNDPYPSSRTKLDLTPVPLLQRPKRAHXQTERAVLRXPG

SEQ ID NO: 229650 - protein, 75 aa, Zea mays
  Clone ID: MRT4577_141032C.1.pep
YSKGVFTGPCGTNLNHAVLVVGYGTTSNGINYWIVKNSWGKGWGENGYIRMKRNVGTKAGLCGIYRMPMYPIKNK

SEQ ID NO: 229651 - protein, 74 aa, Zea mays
  Clone ID: MRT4577_141033C.1.pep
NYRGVRPTGRKKVLKFAFWPLKKFNYSPNRTRKHFFGSQGSNKVKTLRNLVLPPREKEPLQGAHGGSHQRGDIN

SEQ ID NO: 229652 - protein, 41 aa, Zea mays
  Clone ID: MRT4577_141034C.1.pep
PNNKKSYTLVRFVLSISLGLYVAVNNATCCLYIYNLTDVKW

SEQ ID NO: 229653 - protein, 68 aa, Zea mays
  Clone ID: MRT4577_141035C.1.pep
SKSSPIRAGFLICESNSHCKQVSMFFSHQIWHSVKHGSIATLMNSHFSVHSFYRHLPLYSMQGTCKLY

SEQ ID NO: 229654 - protein, 139 aa, Zea mays
  Clone ID: MRT4577_141036C.1.pep
MSEALEKDKEIDEEEEEYVLLELDNCLYSDMSPGAPFVLSGLDTLTPTLIIGDSLKMIGEYEETIGTCYLFSETEAEPKPTSNEMAPSEENTDKQVSSSKEAPSKEVNHLASVQKILKFRPINAEHSQHRAYQHKDKEF

SEQ ID NO: 229655 - protein, 100 aa, Zea mays
  Clone ID: MRT4577_141037C.1.pep
KQKHFGFSSLFPKGLNKMGGPPKPLKLLYLRGGFGADPPICMGPSPLNFQDIPPPNLWETGLKTRKGPGHSFFKFFPKLGSFVRGAHQTANHGVDPNVFF

SEQ ID NO: 229656 - protein, 112 aa, Zea mays
  Clone ID: MRT4577_141038C.1.pep
KIYYWGPNKKRFQQKQPGQPKGGETHGPKHKDGPQTCKEGEQKEEPKNRVAQTDTTQYQPKEKSWLAAKNGKPPPQPRKPKTLCPEAQRTKREPEGLKLRPGPQLQTWGGKG

SEQ ID NO: 229657 - protein, 61 aa, Zea mays
  Clone ID: MRT4577_141039C.1.pep
GVMGFIVYKLDYVCLFAQFTRSTCWIFLLLWPRVLYLSLISVVLGLQKKKKKKKGRPPPRW

SEQ ID NO: 229658 - protein, 92 aa, Zea mays
  unsure (1)..(92): unsure at all Xaa locations
  Clone ID: MRT4577_14103C.1.pep
AWFVFFFFPLLLLCDDNGSNNSPPMTTVATVTSSYTSCRRLSYFYSVGLRKGGGGGFFFFGHXPPPNXGPECDHFYVASLLADTLPRRHSTF

SEQ ID NO: 229659 - protein, 211 aa, Zea mays
  unsure (1)..(211): unsure at all Xaa locations
  Clone ID: MRT4577_141040C.1.pep
LGPYQNDCVTLLSGCSPTPQQPRTAPNVRTPPRVPDXRPPSATAAASPSTLPXSPAPPXPPAPAPPPSSPSAQSPPSTRPVSSSARSPPPSRPRTPSSTPTPERTSSPPPSASAPSSATPQPPPKPPSSPRSPATAVPTRRSPSSRPPRPXSPPRRATLLPCLLLPTRVRRSPRAGDARLQDQERGSSGFLQLGRCGAGRLVPEARKWGCG

SEQ ID NO: 229660 - protein, 49 aa, Zea mays
  Clone ID: MRT4577_141041C.1.pep
TGGSFLTFFGKVEMRGFDQKPVRTYCLLFTARHGFFFFFFYRGLFDSFY

SEQ ID NO: 229661 - protein, 51 aa, Zea mays
  Clone ID: MRT4577_141042C.1.pep
VESFVIDSVKQPQTRKAKEKRHFLSVLSSPLTQEKKCPRHQFSQTSMIIAG

SEQ ID NO: 229662 - protein, 132 aa, Zea mays
  Clone ID: MRT4577_141043C.1.pep
MSLLVPDTSTTPESEHAAPHPPPPPHHHYHLSSIVIISPPSSPEPSRSDPCRCLFASGGGHSSRAAEAPPPPPPPRHEPDQVVSGPPPAADGASGYSSPLPEVIHPAPAPETNGQTVRKQAGRSTTPLGPCK

SEQ ID NO: 229663 - protein, 40 aa, Zea mays
  Clone ID: MRT4577_141044C.1.pep
WGWADFLGLKNLKDPAGGYVVGSSCVVKADLTIVGSSNDG

SEQ ID NO: 229664 - protein, 72 aa, Zea mays
  Clone ID: MRT4577_141045C.1.pep
RWHHAAAAAIESPSPHSQPPRRSRRYRRKYAGACLCALLVRPEDVSGFLVAALALFSVLVARDAVVTKVRRK

SEQ ID NO: 229665 - protein, 63 aa, Zea mays
  Clone ID: MRT4577_141046C.1.pep
EMEGPEQVREDAAKLRSSLYEYVPSILRVEKLGFWLKCDDPSHFYSVVNSGYFSSSLIYIWGF

SEQ ID NO: 229666 - protein, 480 aa, Zea mays
  Clone ID: MRT4577_141047C.1.pep
MAAAPTADAMDVDAPARTLTTSPATKLRSPHDLLAETRASIEKVAARILAIKKDGAPKSELRELVTQMSLHLVTLRQVNREILMEEDKVKAETEAAKAPVDSTTLQLHNLLYEKNHYVKAIRACLDFQTKYPGIELVPEEEFQRSAPADILEKTLAADASHDLMLKRLNFELVQRKELCKLHEKLGQQRGSLLETIANQKKFLSSLPSHLKSLKKASLPVQQQLGMQHTKKLKQHHAAELLPTPLYIAYTQLLGQKEAFGENIEVEIAGSTKDAQIFAQQQAKKENSTLSSGDNRMDDDVIDDEEDAQRRRSRSKKNVVKEANNPAVAYQLHPLKIILHVYDTEDSGSKRRKLITLRFEYLAKLNVVCVGIEDSEGLDSNILSNLFPDDTGLDLPHQMAKIYVGEVPNFSDKDSRPYKWAQHLGGIDFLPEVPPSVGDDSSRALNTADLSSGLALYRQQNRAQTILQRIRLRKVAQMALM

SEQ ID NO: 229667 - protein, 57 aa, Zea mays
  unsure (1)..(57): unsure at all Xaa locations
  Clone ID: MRT4577_141048C.1.pep
LLRRWGRAARXVVHVKVQVRRSRLXQSHXRAGGEAPEQSQQQFSGEXGPXQRRDXRP

SEQ ID NO: 229668 - protein, 149 aa, Zea mays
  Clone ID: MRT4577_141049C.1.pep
MGNACGGALRSKYQHSFKHAASSQRHASSEYSASAVADDSPRKPPQAPATTDAHAPPPATATATAAMRRGGAGAPPDLGSVLGHPTPNLRDLYALGRKLGQGQFGTTFLCTELATGVDYACKSISKRKLITMEDVYDVRREIQIMAHLS

SEQ ID NO: 229669 - protein, 102 aa, Zea mays
  Clone ID: MRT4577_14104C.1.pep
KKVPWEVPKGEKGVNKDVRPQNFFFQPLLRHLFFWKSHLGGAPLKGLILDPPGVNSFGGLASGLLFLGFVFLHKRRALQPLMGGGISCSSSELHLGGLFCFF

SEQ ID NO: 229670 - protein, 62 aa, Zea mays
  Clone ID: MRT4577_141050C.1.pep
HPPLKLKTPSLVIRTSFFLPPRKKVLPKLIFFSPECLKLCSGDPRGLLNITGPNFAGCMCCP

SEQ ID NO: 229671 - protein, 155 aa, Zea mays
  unsure (1)..(155): unsure at all Xaa locations
  Clone ID: MRT4577_141051C.1.pep
RSTVSISFASDRRNVRLRLVANDFNPFKIMSTSYNTWLVVLVLYNLPPWICMKQSSFILSMIIPGEKGPGNDVDIYLQPLIEELKXLWSGVETYDVLRKENFNLRAALLWTINDFPTYANLFGWSTKGRYACAYCAAQTCLKWLYNGKKFSYMGA

SEQ ID NO: 229672 - protein, 79 aa, Zea mays
  unsure (1)..(79): unsure at all Xaa locations
  Clone ID: MRT4577_141055C.1.pep
KLILNPFQHLSNYSNICDSSAIIKGPSITPHKYCITQLTIXITNYNPILTHQFQFLTKIIHPNVHYNTFXICFDILNIS

SEQ ID NO: 229673 - protein, 96 aa, Zea mays
  Clone ID: MRT4577_141057C.1.pep
KKPTGHNYPPTKRKRQPSQRTLTMYRTNHLKQFHPCILILTGICTHHHKLTLSHILLPNMDIHTHLSPCSHPLNTTEDHKTTESHDTLTLSPKQNG

SEQ ID NO: 229674 - protein, 67 aa, Zea mays
  Clone ID: MRT4577_141058C.1.pep
QIINGVHVLTDKDHHLTLCNNSFQQKGGKGSTKKYVLFCFFLSMNCFIYCTNIADYSVGHSFFCQTV

SEQ ID NO: 229675 - protein, 224 aa, Zea mays
  Clone ID: MRT4577_141059C.1.pep
MASIVGAEVVAAEEVLVADRITATIRAPGLRLFGFDSLSLPLERRRGRGHCCSGVRPEAIAAAVWPHGAEVVVAAAGAGGGGPPGALSPRGPSNVGGCSYPRGRNRSSACNGTLSAGGYSLWLSGPEHDRRRSRVAEATSRADVLGGQLAEASGWSAELSGPDSWRRPWQRWPRHSADVVLRSGYPPTALPSEARSGFAEGVVDTEGAAAPLRRGRSLQDRFIL

SEQ ID NO: 229676 - protein, 50 aa, Zea mays
  Clone ID: MRT4577_14105C.1.pep
CSPISSVPSTHCFCHLRLLLPKATTQMEYAPYGGMDSKPNWQDHCTGRAD

SEQ ID NO: 229677 - protein, 168 aa, Zea mays
  Clone ID: MRT4577_141060C.1.pep
MRTTPFSLDESVLEPFFSSLRRRRPTCFRHALPLPPHAGQSSTHRGSSCSSCHHTIFHHSHLQSTPPSANPLDPETTMAPGLKAAAKSTKPSEVPLTEYDKLRAENLMRNNQKLQRFDVTKLASILTILLQRAKVTLVKNLDLCMRSMKVKVLKMRKSISVQQDKETN

SEQ ID NO: 229678 - protein, 262 aa, Zea mays
  Clone ID: MRT4577_141061C.1.pep
MAPGRKTTAKSTKPTEVPLTEYEKLRAENLMRNNQKLQRLGVTTLASILNHTSAKSKVDTHEKSGSLYEVQEGEGSEDEEVNQCATKRRNRLKRVLAPAQQDEPTRFTRQNTRDLALTFSPELQQVETLGLSTITSTPQQDQNNSSDQGALEATIDPNGKRNRSMGRELDRISRDLCTNILIHIAEGKIRPEAPMQAAKLASEGGIILRQQMPILRHWKEYKKDKSIVTNYIGKVAAQFTMDTNNNAIKAACADLLKVDNDR

SEQ ID NO: 229679 - protein, 186 aa, Zea mays
  Clone ID: MRT4577_141062C.1.pep
GHLTPSLQRRVPLLLPSVPRRAPSAPAPPSWPRVLCLLVPSLCFLSTAARKAPSLSLPVVSPWCRARASLGPVWCSPRHGASADRALSSHGALDRSSASPAPLRAPSSSRPRPTSPLCRRLARTRPSRELAELPLPWPAMLQPLRARFSIPARWRSVPDAAPSCSAPWRLPVPGRSFGRVLCFFFS

SEQ ID NO: 229680 - protein, 92 aa, Zea mays
  unsure (1)..(92): unsure at all Xaa locations
  Clone ID: MRT4577_141063C.1.pep
LDPTVWHLEGHVPSQHATSPHNANGTVPILVKHVAIXGHEXCRKKFXRGNYVKLWNAIXKEXYRYVHMISGSDASSRALEHPADTYDXHVYT

SEQ ID NO: 229681 - protein, 49 aa, Zea mays
  unsure (1)..(49): unsure at all Xaa locations
  Clone ID: MRT4577_141064C.1.pep
LICYRLCXRIPKLLVLLCFVPTIRSEVSPFGGXSFSSFLFLXSFFFCRL

SEQ ID NO: 229682 - protein, 130 aa, Zea mays
  Clone ID: MRT4577_141065C.1.pep
PRIREQTVSASGRRRMDAATNPPGSQGKLQSSSLPRRAQLWPRRWTGDGWSTARPFPLGIRGRHDGAGRTGRLVRRGEARMVALRSSWAQAFATTGAGWFIMKHHSRDLKVPLRRPDFMAAVTLPGVVNS

SEQ ID NO: 229683 - protein, 61 aa, Zea mays
  Clone ID: MRT4577_141066C.1.pep
VFNLRAITSVGMFEATCKLDTSVVIIIWFHVSIFYTLITSSVVQKIKKKKKKKVLCVVTTG

SEQ ID NO: 229684 - protein, 99 aa, Zea mays
  Clone ID: MRT4577_141067C.1.pep
RTACCQCSLSSSSSSSSAAASLRLSVLLSLPSHVSLPPASALPPPAAPVIHQFYLLREQRPGRSPEKRTHTGREREGERDGLAGLVRGGVVELTSMLHL

SEQ ID NO: 229685 - protein, 569 aa, Zea mays
  unsure (1)..(569): unsure at all Xaa locations
  Clone ID: MRT4577_141068C.1.pep
MGCPPRLLCCLFLSLSLAAVVARAATRHQEWEISYQFKSPDCVRKLAVTINGETPGPTIRATQGDTVVVRVKNSLLTENVAIHWHGIRQRGTPWADGTEGVTQCPILPGDTFTYAFVVDRPGTYMYHAHYGMQRSAGLNGLIVVAAAPGGPDAEPFRYDGEHDVLLNDWWHKSTYEQAAGLASAPLVWVGEPQSLLINGRGRFVNCSAAGACDAAHPECATPVFAVVPGRTYRFRIASVTSLSALNFEIEGHEMTVVEADGHYVKPFVVKNLNIYSGETYSVLIKADQDPNRKYWLASNVVSREPGTPAGTAVLSYYGGRSSPRRSPPTAPPAGPAWNDTAYRFRQSVATVAHPAHVEPPPPRADRTILLLNTQNKIDAHIKWALNGVSFTLPHTPYLVAMKRGLLDTFDQSPPPETYAHRGYDVYAVPPNPNATTSDGLYRLRFGSVVDVVLQNANMLAPNKSETHPWHLHGHDFWVLGYGIGRFDPAVHPASYNLRDPILKNTVAVHPYGWTALRFRADNPGVWAFHCHIESHFFMGMGXIAFEEGVDRVAPLPPQIMGCGKTRGGH

SEQ ID NO: 229686 - protein, 92 aa, Zea mays
  unsure (1)..(92): unsure at all Xaa locations
  Clone ID: MRT4577_141069C.1.pep
FKFXHENLGQVKMCGAQKATRGVERNSDRGVVLEKENMYWEKEKGALESENDNYFEINFESYNVNNFRTEGVSQSIDYLVFPHQSFFIISTE

SEQ ID NO: 229687 - protein, 83 aa, Zea mays
  Clone ID: MRT4577_14106C.1.pep
EKGRPQEETSSPPARHPARRGKQPQEETTTTDTRPKGEEPQKAAKSAQPKKPGRANTTTTKTTAKRAKPRETRTTTKPTHRRT

SEQ ID NO: 229688 - protein, 183 aa, Zea mays
  Clone ID: MRT4577_141070C.1.pep
MASFPLASAARSLPTLGSHLPAAATTRSVSIPASPVPAAKNATSCSFSTRSCRPTVRRNAAETYVPGSGKYIAPDYLVKKVSAKELEELVRGERKVPLIVDFYATWCGPCVLMAQDIEMLAVEYEDSALFVKVDTDEEYEFARDMQVRGLPTLYFFSPDQGKDAIRTEGLIPIEMVRNIIENE

SEQ ID NO: 229689 - protein, 54 aa, Zea mays
  Clone ID: MRT4577_141071C.1.pep
RSFSLSNCNKFQYPYFNNHNSIDSYDFLIPNTILFNINLFYLFNTTFIYLYILL

SEQ ID NO: 229690 - protein, 146 aa, Zea mays
  Clone ID: MRT4577_141072C.1.pep
SKLVSPIICVGQFNHQRWLGTRCKPNSLSAAHLGHAQCVCLPTQDHAAHAQGGPCRLPTRIHAANPPAKALAAASPWPHVPRCTSARVRHDPGQSNEHGTVVASPWPLATRRGPARTDHGEGQPRLRAVEPQCGQAPAAERPGAGT

SEQ ID NO: 229691 - protein, 43 aa, Zea mays
  Clone ID: MRT4577_141073C.1.pep
QEFTTHITSSTLPHLPFPKTELSEPHLDTHCDSPVCYCICHFS

SEQ ID NO: 229692 - protein, 87 aa, Zea mays
  Clone ID: MRT4577_141074C.1.pep
ILIRPFCSPLNPSFPGGRKKASFFLRKHLFKTRILLYLKSGWLIIGHVNPPFPLMKSVFFGNYFPPPGVFSLRSFQTKTLFFEKSLN

SEQ ID NO: 229693 - protein, 61 aa, Zea mays
  Clone ID: MRT4577_141075C.1.pep
NSFRYFSSDPNPRVNSSQAFEPPVHCVSSSDISHVTRFSPQKETWLARYVAKRFHRMPRTR

SEQ ID NO: 229694 - protein, 65 aa, Zea mays
  Clone ID: MRT4577_141076C.1.pep
TQSKRLGFFWKPMVSAYVQAQQFLKRVPHAHNRESIKAPPFMEQKIPRVAGTGTSKKVYLGEDQP

SEQ ID NO: 229695 - protein, 78 aa, Zea mays
  Clone ID: MRT4577_141077C.1.pep
KTSAHTSVLRIVYLLQQRDYSCSRLTSGHRLKEANCHIPKPDIQDVQDDDQGTVTRGSMRHVTRSSDKRPPNITEWRK

SEQ ID NO: 229696 - protein, 65 aa, Zea mays
  Clone ID: MRT4577_141078C.1.pep
NVICRSLASLKSVKHQRRFRTFNIHSVDLSRIFIRISHFYIYLYFFPQIHPQIHPQIHRHINQPK

SEQ ID NO: 229697 - protein, 33 aa, Zea mays
  Clone ID: MRT4577_141079C.1.pep
SFKLADLILGANVKSYTTRIHALYIKSTCRTLT

SEQ ID NO: 229698 - protein, 47 aa, Zea mays
  Clone ID: MRT4577_14107C.1.pep
MKSFLGMDACSPRKKKKKKKKKKKKKKKKPKKKKKKKKKSTLRCYHC

SEQ ID NO: 229699 - protein, 65 aa, Zea mays
  Clone ID: MRT4577_141080C.1.pep
GMNLLPGFPVFKRWFWAMLLGWEIRFFKGLWFFLGSSLFLRLGHWFNLSLGGFIGLVKIYEGVWF

SEQ ID NO: 229700 - protein, 86 aa, Zea mays
  Clone ID: MRT4577_141081C.1.pep
SLPRFSRRGKSPRTDRPACSQPPPCSCYWVQGFFFPPLVKVWSGHTLCDWLLFHVKGPAETVGSWRKRLRRYPTSRNRPRVSEKDS

SEQ ID NO: 229701 - protein, 79 aa, Zea mays
  Clone ID: MRT4577_141082C.1.pep
IDVLLSVFHCFEGENMEIASHPMKNDSMLANLLFCYVESAAMKETVGVIDHCDRLHRSTCFWIANHISSQIRACRSIIR

SEQ ID NO: 229702 - protein, 120 aa, Zea mays
  unsure (1)..(120): unsure at all Xaa locations
  Clone ID: MRT4577_141083C.1.pep
MFVVVLALVTAIARASTGGGRAEAECDPKSLVVCNPAFMDGAKSSSTFCSTLRSQDVCLCVYAKDPYFAKYINNHNIXKALSRXGICLPKCLASALRRCCSCSCYSEQHIQLMNTLCGSV

SEQ ID NO: 229703 - protein, 63 aa, Zea mays
  Clone ID: MRT4577_141084C.1.pep
YTRTYTCSYCFCDNFVDDDLGASSNGPTDALREARPKERPIAHALAQHRGGRCRDHCPIHCQL

SEQ ID NO: 229704 - protein, 73 aa, Zea mays
  Clone ID: MRT4577_141085C.1.pep
TGSVNFNTFSSENSMLDAIENMNGRELDFLYITVNQTQSRGGGGGGGGYCGGRGGGGGYCGGRRDRGYGGGGG

SEQ ID NO: 229705 - protein, 54 aa, Zea mays
  unsure (1)..(54): unsure at all Xaa locations
  Clone ID: MRT4577_141086C.1.pep
LQACAGQLNSDLRRRCWRXENVTLVGASPTRLAIYNVKFLCVPSIQMYVIQDVN

SEQ ID NO: 229706 - protein, 179 aa, Zea mays
  Clone ID: MRT4577_141087C.1.pep
SYGRLGPSRPAGPLYTAQERVPVLASDAGILAALLTIYKLSVAFGFWTVVRLYGVPVLIVSVLFVLITNLHHTHLALPHYDSSEWDWLRGALATMDRDYGLLNRVLHNVTDTHVLHHIFPNMPHYHAMEATRAMRPLLGEYYMFDDTPIVKATWREAKQCIYVEPGEEHKGVYWYNNKF

SEQ ID NO: 229707 - protein, 44 aa, Zea mays
  Clone ID: MRT4577_141088C.1.pep
KNNKSYSLHLHHLPNYILFSILSPLTFKKFLQIDSLFLIPACNI

SEQ ID NO: 229708 - protein, 69 aa, Zea mays
  Clone ID: MRT4577_141089C.1.pep
EYTLAYSVKQSNYVKVHIKLQLFLVLEKKHLNLCKRYVLLGLELSGPHEIVMSVHFIFCSKALIKNDKT

SEQ ID NO: 229709 - protein, 83 aa, Zea mays
  unsure (1)..(83): unsure at all Xaa locations
  Clone ID: MRT4577_14108C.1.pep
MRRPVGGALELATMARGXKKHLKRLNAPKXHWMLDKLVGSFAPKIYSGPHKFRVCLPLILFIMNSLKYALTYREVISYLMQHL

SEQ ID NO: 229710 - protein, 48 aa, Zea mays
  unsure (1)..(48): unsure at all Xaa locations
  Clone ID: MRT4577_141090C.1.pep
HHPARFCQWXGXWGXPVPXAMANLGRCQLVVSNQGPDKVLRLPRQPRV

SEQ ID NO: 229711 - protein, 86 aa, Zea mays
  unsure (1)..(86): unsure at all Xaa locations
  Clone ID: MRT4577_141091C.1.pep
LYLNALLFFFLPSPYLTRGFKKEPNLFLKTLILYFYQPNFIFFIITHISHIFFFFIHHXNPQNHLFVSYSFKLPFLKTLLTLLFYF

SEQ ID NO: 229712 - protein, 46 aa, Zea mays
  Clone ID: MRT4577_141092C.1.pep
FFLEKWARNLYLFISVNACKYEYAYETIALMSASIRQKKEQCEDST

SEQ ID NO: 229713 - protein, 607 aa, Zea mays
  Clone ID: MRT4577_141093C.1.pep
LITTYDIVRNNYKLIRGNSYNNSNDDDDEEGTLWNYVILDEGHLIKNNKTQRAQSLYEIPCAHRIVISGTPIQNNLKEMWTLFNFCCPDVLGDKQQFKIRYETAILRGNDKNATAREKHVGSNVAKELRERIKPYFLRRLKSEVVFDTGASEEKTLAKKNELIVWLKLTPCQRKLYEAFLNSELVHLALQPKASPLAAITILKKICDHPLLLTKKGAEGVLEGMGEMLNDQDIGMVEKMAMNLADMAHDDNALEVGQDVSCKLSFIMSLLRNLVGEGHHVLIFSQTRKMLNLIQEAIILEGYAFLRIDGTTKVSDRERIVKDFQEGCGAPVFLLTTQVGGLGLTLTKATRVIVVDPAWNPSTDNQSVDRAYRIGQTKNVIVYRLMTSATIEEKIYKLQVLKGALFRTATEQKEQTRYFSKSEIQELFSLPQQGFDVSLTHKQLQEEHGQQVVLDESLRKHIQFLEQQGIAGVSHHSLLFSKTATLPTLSENDALDSKPRGMPMMPQQYYKGSSSDYVANGASFALKPKDESFTVRNYIPSNRSAESPEEIKARINRLSQTLSNAVLLSKLPDGGEKIRRQINELDEKLTSAEKGLKEGGTEVISLDD

SEQ ID NO: 229714 - protein, 203 aa, Zea mays
  Clone ID: MRT4577_141094C.1.pep
MLSLASRTYARNSARDSIDVDMVEQEQTDEINADNEDIGTEEAEQADQRLDASDDMEEGDMAQHSDGVVDNEGEHVEDANTDAGEMDSHQLDKADSLMPLSQGLQPDNMQINSNGESEANLANSSDMHGAVAPSVNFSGNEVPNMEISMPNTGNDSILSSNSKPDMQNDAQQHIKQTNPFRSIGDALEDWKERARVSADTQDH

SEQ ID NO: 229715 - protein, 71 aa, Zea mays
  unsure (1)..(71): unsure at all Xaa locations
  Clone ID: MRT4577_141095C.1.pep
VDKVAVPSSNRSSGGGNGNTKLEYGYNWRKYAQKYVKGIENPRTYYKCTYHSCSMKXNVDTALSDGRITQI

SEQ ID NO: 229716 - protein, 120 aa, Zea mays
  Clone ID: MRT4577_141096C.1.pep
AHPRKAARQRSRREEAAVAAGPSTPWRWARPPRSSSRRRPRPRAAHRCSTSRPSPSSARCPTSSASGTTAASPRGPPPATPPPRSLSPPPSPAPPPPRRPPSRLPPRDRSTSPRTTRRRG

SEQ ID NO: 229717 - protein, 70 aa, Zea mays
  unsure (1)..(70): unsure at all Xaa locations
  Clone ID: MRT4577_141097C.1.pep
PQQSRCPRFSCFIYLITXSTRCSPEVVRKMLTLLLLKILYRKTQFHFGGCNWRIQRDACLYTEVLCIWRQ

SEQ ID NO: 229718 - protein, 69 aa, Zea mays
  unsure (1)..(69): unsure at all Xaa locations
  Clone ID: MRT4577_141098C.1.pep
VAYVLCPWPDHVAYRRREIGRDVRAHLLKVDEIGLKRALSDSLPCCNMLGGSVSCYRVFNLRNLXGRVG

SEQ ID NO: 229719 - protein, 244 aa, Zea mays
  Clone ID: MRT4577_141099C.1.pep
MLVRRSLSRQESSLLYPGLRRPGAVGQTVPTPSVPGTDLTIGGAPARDGVPCALSVGASKQNPDAVKPAGLVLFGRTILTEHQMSLSSSGGATSPAATGNSSLCWTAEKGPNVSEGSGSGSGSGVIQNSPTGKNTSSERLPWFGDGSSQQASEPGLEPGQCKVFVESDTVGRNLDLSALGSFDELYGRLSEMFGVEGAEMRSRVLYRGATGEVRHAGDEPFSDFVKSARRITILTDAGSDNLGS

SEQ ID NO: 229720 - protein, 141 aa, Zea mays
  unsure (1)..(141): unsure at all Xaa locations
  Clone ID: MRT4577_14109C.1.pep
GPVLPHNTSKPEELLGPSVAAHHLSLLKYSDQPGIQVEWGTCSIDRRHPTGGSCVTGGGLSHNGRXIYRHASSHGQRVSMVDFYLTXVNEVXGQIDVLFAIVDSHGGGKEAEAVXKNTCPTIMNXPKYISGTKGSLYEAYQ

SEQ ID NO: 229721 - protein, 40 aa, Zea mays
  unsure (1)..(40): unsure at all Xaa locations
  Clone ID: MRT4577_1410C.1.pep
AALXSPLSNALLILLLPPNNHHALYQSLIIILTRSLHHIP

SEQ ID NO: 229722 - protein, 146 aa, Zea mays
  Clone ID: MRT4577_141100C.1.pep
EGIIGQPQEEDSRLEQDEDPIIEMTEQRVHVTTRRSTASIINQDKEAKRMKKDSLEGLVGRYLDLKSKQVEDEVTQMAKGKESAQGNDFSIMRCIYVLRSMNVTEDEKIKAAEVFDIPNNRETVISFSIDEPKTALLWLRRKIDKL

SEQ ID NO: 229723 - protein, 167 aa, Zea mays
  unsure (1)..(167): unsure at all Xaa locations
  Clone ID: MRT4577_141101C.1.pep
MMFTRGSPKILMLSKAAQKKVSPKASTSKKCGGGVQRAAWNSELEKSLVDLLFEHNVPPYRAQNGXSPDAWNKIVTEFNKKHEYVTFNKIQIQEKERELKRDYKMLKEARKQSGVSWNEKRCMIVADPPIWENIIKSFPRAKKFQKKSFPLFDALGELYDGHIAQGT

SEQ ID NO: 229724 - protein, 123 aa, Zea mays
  unsure (1)..(123): unsure at all Xaa locations
  Clone ID: MRT4577_141102C.1.pep
SWSSPRCWLPHTHLCTMCGKGFKRDSNVRMHMRGHDDEYKXRVTLAEPLRDXRARSRSRXKRRYSCPFAGCNRNNLLESLQPLKTILCVKFQYRRSLCXKIHTCVRCRANMLSIVPDLRTHKK

SEQ ID NO: 229725 - protein, 63 aa, Zea mays
  Clone ID: MRT4577_141103C.1.pep
HSFIHSIITIPNLTFFPISRMNLKFYRDLINPSIYFYLIYHHQTIHLFNHIFTTYPFKIISNH

SEQ ID NO: 229726 - protein, 93 aa, Zea mays
  unsure (1)..(93): unsure at all Xaa locations
  Clone ID: MRT4577_141104C.1.pep
ETAAPDAEHRRPXGGPARATDNHTHHNANNTNGEAHEPKNTHERQTQRDRGTGPGTXXTEEATRNANEGXNGKEQDGRIFFLXPPPPRGGRGG

SEQ ID NO: 229727 - protein, 93 aa, Zea mays
  Clone ID: MRT4577_141105C.1.pep
PSSRPLCCDYRMHQNRRLTATDIPKIEDECVIYSALKKQIIISHECYDHWPGTNAFDSDLHTLPLYSTLHYGIQRQDAKCSCVVRMDSAMSYL

SEQ ID NO: 229728 - protein, 40 aa, Zea mays
  Clone ID: MRT4577_141106C.1.pep
NRISKLAPIKDYFPSNAYIRINLQNVFTGSKLNLGHSYCH

SEQ ID NO: 229729 - protein, 109 aa, Zea mays
  Clone ID: MRT4577_141107C.1.pep
TAAVTTSLLPPSTAERNNYFFSAPFERKLFPFTVPLQLYRDHGPGSFCIRGALFSSGIFFNFFWVRLAFHSVLYPYFEPPSKNTPPLNPFWKIEKAGVQITLSPPLLLL

SEQ ID NO: 229730 - protein, 57 aa, Zea mays
  unsure (1)..(57): unsure at all Xaa locations
  Clone ID: MRT4577_141108C.1.pep
LXFSSPSPSYSNSSTSSRFTFLGERIHIXLPIFNTSSSSTYSLFPLTTTPFTTPSSP

SEQ ID NO: 229731 - protein, 67 aa, Zea mays
  Clone ID: MRT4577_141109C.1.pep
FLLPQVGAFGLRRSFKTIFYRGFKGVRGDRVLWALGQKGRPPKIPRVASPKLVTRKVWPGCQKRNPL

SEQ ID NO: 229732 - protein, 120 aa, Zea mays
  Clone ID: MRT4577_14110C.1.pep
VKARFSTSFHRAKTLITSRAPKYPRRSIPHQPRLDEHKIIVHPLNTESAMKKMEENNTLVFIVDIKSNKAQIKLALKKLYDIDCVKVNTLIRPDGTKKAYARLTPDVDALDIAANKLSLI

SEQ ID NO: 229733 - protein, 133 aa, Zea mays
  Clone ID: MRT4577_141110C.1.pep
NLDHPSRSNGEGMFFFPWLPGAAALRATRRSTRRRGHSQCHNAQNHELTGATQSREDGGHEERHGTLEHVAVDSVHDKAPIWAEFRGDKKFQGPRGGLLPHPHGFGTYASACSIYMIFQGWGELLRQRRHASS

SEQ ID NO: 229734 - protein, 82 aa, Zea mays
  Clone ID: MRT4577_141111C.1.pep
MSTTRSHAVDSQNESVVPNAVQRNAPEGLERTLPDSVHNTDPNKDERSVSHATGPSIVPEAIQKAAPEGLERALPESIHPTK

SEQ ID NO: 229735 - protein, 146 aa, Zea mays
  unsure (1)..(146): unsure at all Xaa locations
  Clone ID: MRT4577_141112C.1.pep
QACSQVDPDSCILFLNGATCMXIARRFVAPQFISRAASSLRKAQQPAHASLPLVSLLLAQAEGSLGSKTKWERNLRLEWFSWPPELRPAEVYFQMHLLARQSSAAVSQQNQLVETIQSPELWLLRAIHLNPSCPRYWKALLQQIYV

SEQ ID NO: 229736 - protein, 84 aa, Zea mays
  unsure (1)..(84): unsure at all Xaa locations
  Clone ID: MRT4577_141113C.1.pep
MAAPKLQTMALRELLTATVMPPPAAWRAAMSCSTAHSTXLMTRLPFVQISSSMTPSASCGRIRSLLQQDKNTPYRRSICCCLKN

SEQ ID NO: 229737 - protein, 180 aa, Zea mays
  unsure (1)..(180): unsure at all Xaa locations
  Clone ID: MRT4577_141114C.1.pep
PAHWPLLPPPCXHSPLPPPXPRRPPEPXPXPPPCPPPQPPRDSPTPPPPTPPPPPHPPPPPPPHPPPSPPNPPPHPPPPPPLPPPPXPPPPPPPPPPPCYPPPHPPPPPPPPPPPXPPPPPPPPPQVSYTSPPPPPPXPPSTPPPLPPVPIPXPPHKGNTPLPPPPPPPPPPPPTPPPPP

SEQ ID NO: 229738 - protein, 78 aa, Zea mays
  Clone ID: MRT4577_141115C.1.pep
FFQRGWEWLNGGGGGGHSRREEANGAGGAPFVAVLENPDNAAADNGRSLGGGPFFATCHAQVETAPAGLLGKSPDALI

SEQ ID NO: 229739 - protein, 225 aa, Zea mays
  Clone ID: MRT4577_141116C.1.pep
MQAWFSSGSGPSSSSAASSSQPSLLAEWNSYAAARSAEDAGDGFGIDIEAAVRSANDRVAGTFGVVSKGVKGFPGSFKSTTSSVPSGRSLMYFGLFLGSGVFLVFIAFTIFLPVMVIMPQKFAICFTVGCAFIIGSFFALKGPKNQLYHMISKERLPFTMGFVGSMVATIYVSMVLHSYILSVFFSVLQVLALAYYAISYFPGGSAGMKFISSAVVSSVLRCFGR

SEQ ID NO: 229740 - protein, 131 aa, Zea mays
  unsure (1)..(131): unsure at all Xaa locations
  Clone ID: MRT4577_141117C.1.pep
LEAXPGLPSPSSPAGNRANRREITAMARSLRPVVDLRVTKNPEPAEDPAPSPIVWPNALAPSSSSTPPPSRPAIHRSADRRATAAMGFHRAAITQRGHVPSEEQVGTWNLKSQVKSRYHRMRRVEDAVMSS

SEQ ID NO: 229741 - protein, 76 aa, Zea mays
  Clone ID: MRT4577_141118C.1.pep
SSCTAAPLFFFFFLTTTKPKRILFREGRTNKYTLKNPLAHQPLNSGTRSPPSKPGGAEICFYRNTIASQKGMVHSI

SEQ ID NO: 229742 - protein, 313 aa, Zea mays
  unsure (1)..(313): unsure at all Xaa locations
  Clone ID: MRT4577_141119C.1.pep
CAADRSAGVIASPPSRGPRVPVCQEGGWGCCACWRAAADLTMYIARETSKVWRKVATEVSVELQLLREKWGLLLAGLIFQYIHGLAARGVHYLHRPGPLLQDLGFMALPELGQDKGYLSETIFSSIFISFVLWTFHPFIYHSKRFYTVLIWRRVLAFLVASQFLRIITFYSTQLPGPNYHCREGSKLATLPPPNSVLEVLLINXSLLIIASRKHYSVDVVVAWYTVNLVVFFVDNKLPEMPDRTSGLHLLPLSSKEKEGRQKEEKDSKLKDEFHKLLNGNHADPTDRRQRAQMNGRHDEDINHALSEATANGT

SEQ ID NO: 229743 - protein, 92 aa, Zea mays
  unsure (1)..(92): unsure at all Xaa locations
  Clone ID: MRT4577_14111C.1.pep
KLVLPRRATYARYPKTIRLTDPSWLYLPVAGPVLGDGNRASSCSTLIRLRNLSKGITYXIHKIIGITGSYLRSLHIVMLLLRAKNAHTFRVN

SEQ ID NO: 229744 - protein, 69 aa, Zea mays
  Clone ID: MRT4577_141120C.1.pep
AHCTKWDGNDTEPRSVIPYVARRQNTEPLPASGLGHSQSISFFTGEEWAESLMLKTHTSRTTGTRRGAL

SEQ ID NO: 229745 - protein, 117 aa, Zea mays
  Clone ID: MRT4577_141121C.1.pep
LFIKFLAWFMAIIQSLLIIASRKHYSVDVVVAWYTVNLVVFFVDNKLPEMPDRTSGLHLLPLSSKEKEGRQKEEKDSKLKDEFHKLLNGNHADPTDRRQRAQMNGRHDEDINHALSE

SEQ ID NO: 229746 - protein, 225 aa, Zea mays
  Clone ID: MRT4577_141122C.1.pep
IGYVEAGRGFYTVLIWRRVLAFLVASQFLRIITFYSTQLPGPNYHCREGSKLATLPPPNSVLEVLLINFPRGVLFGCGDLIFSSHMIFTLVFVRTYQKYGSKRFIKFLAWFMAIIQSLLIIASRKHYSVDVVVAWYTVNLVVFFVDNKLPEMPDRTSGLHLLPLSSKEKEGRQKEEKDSKLKDEFHKLLNGNHADPTDRRQRAQMNGRHDEDINHALSEATANGT

SEQ ID NO: 229747 - protein, 760 aa, Zea mays
  unsure (1)..(760): unsure at all Xaa locations
  Clone ID: MRT4577_141123C.1.pep
MYAPGPQQQPIDFQLKETSPTLGGGRVIGGRVYPGEKAGAYDLVEKMQYLFVRVVKARDLPNMDITGSLDPYVEVRHGNYKMKTKYFEKNQRPEWDEVFAFPKEVMQSATLEVVVKDKDVIRDDYVGRVSVDLSEVPLRVPPDSPLAPEWYRLVGKDGMRDRGELMLAVWYGTQADECFPSAIHAXVNVLEAHDVYPMAENRVPDVLVKVRLGHQLLRTRQVRSPTRNFMWNEELMFVAAEPFEDDLVVSVQDCVAQNKDEVIGEAVIPLARLPRRADHKPVPPQWVDLRRPGLIDDVDQLLKKEDKFYAKVSLRVCLEGGYHVLDESTQYCSDLRPTMKQLWKPPIGMLEVGILSANGLNPTKPRNDRGSCDAYCVAKYGSKWVRTRTIVDSLSPRFNEQYTWEVFDHGTVLTIGLFDNCHISGDNGSSAGHMDKPIGKVRIRLSTLDTGRVYTHSYPLLFLGPSGVKKMGELHLAIRFTAASLINVLFTYSRPLLPKMHYAQPLSIVQQEMLRHQAVQLVAQRLGRMEPPVRREVVEFMSDARSHLWSMRRSKANFFRLMQVFSGVIAAGKWFADVCQWKNPVTTVLVHVLFIMLVLYPDLILPTIFLYMFLIGLWNYRFRPRFPPHMNTRISYADVANPDELDEEFDTFPTSKSPDLIRMRYDRLRHVAGRIQTVVGDIATQGERLQSLLSWRDPRATAMFLIFCLITAIILYVTPFQAIALCLGFFSMRHPRFRHKVPSAPANFFRRLPAKTDSLL

SEQ ID NO: 229748 - protein, 53 aa, Zea mays
  Clone ID: MRT4577_141124C.1.pep
SRVRKVKEIKNGRLSISFIYQHLDPCLCYRLLLQWINYARILTKRSEATILSF

SEQ ID NO: 229749 - protein, 96 aa, Zea mays
  unsure (1)..(96): unsure at all Xaa locations
  Clone ID: MRT4577_141125C.1.pep
RGGRESQGTGPKFNFGLKLKGWWPLLGSKLQRLEGXVFSQNKTPLFPFFFGCGGHPPQNRKFVVSLKKKKKKKKKKKKKKTPHKKKLKKKNTPGRP

SEQ ID NO: 229750 - protein, 164 aa, Zea mays
  Clone ID: MRT4577_141126C.1.pep
MSDDPTNGGGGDRVEDVVRAEGETQPRDDGLSKSKDRDKDREKDKDRDRRRDRDRDRGRDRDRDRDRDRDRDRDRDKDRQSRHHRERREQRDRPDDHRVRDSERRRERDKDGHRRHRSRSRSRGRDRRSRSRSRSKRVSGFDAPPPQAMGSTFPVIPTPSNHVW

SEQ ID NO: 229751 - protein, 273 aa, Zea mays
  unsure (1)..(273): unsure at all Xaa locations
  Clone ID: MRT4577_141127C.1.pep
MSDDPTNGGGGDRVEDVVRTEGETQPRDDGLSKSKDRDKDREKDKDRDRRRDRDRDRGRDRDRDRDRDRDRDRDKDRQSRHHRERREQRDRPDDHRVRDSERRRERDKDGHRRHRSRSRSRGRDRRSRSRSRSKRVSGFDAPPPQAMGSTFPVIPTPSQLPGSSLPNIGGMFPNMLPFGVAGQFNPLVIQPQAMTQQATRHARRVYVGGLPPSANEQTVAIYFNQVMAAIGGNTAGPGDAVLNVYINHDXKFAFVEMRSGEEAXNAMALDGIM

SEQ ID NO: 229752 - protein, 315 aa, Zea mays
  unsure (1)..(315): unsure at all Xaa locations
  Clone ID: MRT4577_141128C.1.pep
TLGTTGESPQNPRTLKKAAPKNVRRPHPTAAAVNSVEDVVRAEGETQPRDDGLSKSKDRDKDREKDKDRXDRRRDRDRDRGRDRDRDRDRDRDRDRDRDKDRQSRHHRERREQRDRPDDHRVRDSERRRERDKDGHRRHRSRSRSRVEIEXRSRSRSKRXVDSTPHXRKQWVQHFQLLSKSKRVHSFDQAPTQXSACCVGAGVIPGQLPGVTAPIPGVGVLPNLYNLAAGQPQAMTQQATRHARRVYVGGLPPTANEQTVAIFFNGVMAAIGGNTAGPGDAVLNVYINHDKKFAFVEMRSVEEASNAMVLDGIMF

SEQ ID NO: 229753 - protein, 98 aa, Zea mays
  unsure (1)..(98): unsure at all Xaa locations
  Clone ID: MRT4577_141129C.1.pep
XPLXXRXVSPSXPXASSCXXSXCAWRXCRRAPXGPALPFSXRRWPGVXAXLAWXPRRRRXGGXARSGARGXALSPSPSCSXLGPRRRRWCGVVVGXRV

SEQ ID NO: 229754 - protein, 199 aa, Zea mays
  Clone ID: MRT4577_14112C.1.pep
METPFTVKAQPGTDVWKQPPSTDVFTAPFRPHSIAPLKHFISATITFRTTYVHQYDQACLLLTFTKPGAPRKWIKTGIELYNEHPRYSTVTCDSWADWSVEAVGPNDEAGVMSGEKSVTIKAMKVEDALGVCLWVYRVDENGEKTPLRQTNWVYGDEGGEGWELEVSAAVARPDPHKNIKDDLEATFDKLDVEWEKPTA

SEQ ID NO: 229755 - protein, 508 aa, Zea mays
  unsure (1)..(508): unsure at all Xaa locations
  Clone ID: MRT4577_141130C.1.pep
MSDDPTNGGGGDRVEDVVRTEGETQPRDDGLSKSKDRDKDREKDKDRDRRRDRDRDRGRDRDRDRDRDRDRDRDRDKDRQSRHHRERREQRDRPDDHRVRDSERRRERDKDGHRRHRSRSRSRGRDRRSRSRSRSKQVSGFDAPPPXNGFNISSYSNPKQPCMVTRPILGHLPHFYQWNELPTIALMYKEESVRRFDIVMFIFNXSTXTSFMXLHIYFCSCTYVVNSLTXYCIAGXDLYSLLGAYTNTLLIAXIMLPTRNLLXSAGQLPGSSLPNIGGMFPNMLPFGVAGQFNPLVIQPQAMTQQATRHARRVYVGGLPPSANEQTVAIYFNQVMAAIGGNTAGPGDAVLNVYINHDKKFAFVEMRSVEEASNAMALDGIMFEGAPVKVRRPTDYNPSLAAALGPSQPSPNLNLAAVGLTAGSNGGLEGPDRIFVGGLPYYFTEAQVRELLESFGPLRGFDLVKDRETGNSKGYAFCVYQDLTVTDIACAALNGIKMGDKTLTVRRAN

SEQ ID NO: 229756 - protein, 50 aa, Zea mays
  Clone ID: MRT4577_141131C.1.pep
MGKCMKKKKKKKKKKKKKKKKKKKKKKKKKKKKKKKGGALLKNQIFPPGG

SEQ ID NO: 229757 - protein, 58 aa, Zea mays
  Clone ID: MRT4577_141132C.1.pep
RGLFFFFFSFFFFFFFLKKRAKNIAWAKIRTQSSNPQRASQQKAVTNGTDKEIRSPAG

SEQ ID NO: 229758 - protein, 50 aa, Zea mays
  Clone ID: MRT4577_141134C.1.pep
YRQLISTDDASLYLDQASIQLAACVGNDQIMLCPQQCVSRCLRCHHVHCR

SEQ ID NO: 229759 - protein, 90 aa, Zea mays
  unsure (1)..(90): unsure at all Xaa locations
  Clone ID: MRT4577_141135C.1.pep
AFGEDGEGDDLDLWTVRCSGQHWEREASVRFQHVGTSVFLSVTGEQXINPIRGQHEVHGMPSANAHNTSKAMEGIFIKPGADPSTGHDEL

SEQ ID NO: 229760 - protein, 79 aa, Zea mays
  Clone ID: MRT4577_141136C.1.pep
SGLTRCSAITVGGVFRRSILRCTRCVASGSVWSNRFIPRVFLLFGVSGLLVGCVGWPPLREFFAFAKIILYADGRSEDQ

SEQ ID NO: 229761 - protein, 122 aa, Zea mays
  unsure (1)..(122): unsure at all Xaa locations
  Clone ID: MRT4577_141137C.1.pep
PALWTSPPPPPHRLSPPPPTLPPYPPHPPPPAPPXLPXRXCLPVPPGSPSSPAGRRCLPSPAAPAXGPXRRPPSFVALCSLSRARCLPGCFLLPLPPVAGRAPRVVPLVGSRGFLPALLGGC

SEQ ID NO: 229762 - protein, 189 aa, Zea mays
  unsure (1)..(189): unsure at all Xaa locations
  Clone ID: MRT4577_141138C.1.pep
MAGSTSLVPLPVPAPPSRHRFHTSTSASPRHLRPSPATRLRAARRRHPDAVVVVPDARPWVGDLSGAAASYRDGSEEDEDDADEDEDEDEDRSLDLLARFLHSVFRKASRRARRAARXFSVNGVLVLTFLWILKGLLEVVCTFGSMVFASILLVRGIWSGVTYIRENRYSYIHRIDNDENRWSRVQTAG

SEQ ID NO: 229763 - protein, 80 aa, Zea mays
  Clone ID: MRT4577_141139C.1.pep
VGHKQEFGGCPITTQQPGCETPVGPCHGQQDPRGPCNHSLLGQLPAASGHTGEQNASRVIGHMRIRTCLQQIKTDHHKQT

SEQ ID NO: 229764 - protein, 180 aa, Zea mays
  Clone ID: MRT4577_14113C.1.pep
WVFFFFFFFFFFFFFFFFWGHTSHRSHLLLNTIIDPCQKKRSEYRITGTPRGGGGFFFFFFFFFFFKKKRNTRHKCHGWDLKQGGGTKSLGGHTACFPRKSYYIPHNLGEYNKQTIGKPPNERKQGYKWGRAQTTLTCFGGAPRPRIPPPHKKGDPGTGGTRTPKRSCCSQLRGTPFYPC

SEQ ID NO: 229765 - protein, 201 aa, Zea mays
  Clone ID: MRT4577_141140C.1.pep
MAGSTSLVPLPVPAPPSRHRFHTSTSASPRHLRPSPATRLRAARRRHPDAVVVVPDARPWVGDLSGAAASYRDGSEEDEDDADEDEDEDEDRSLDLLARFLHSVFRKASRRARRAARSVLPPSVPAELVKFSVNGVLVLTFLWILKGLLEVVCTFGSMVFASILLVRGIWSGVTYIRENRYSYIHRIDNDENRWSRVQTAG

SEQ ID NO: 229766 - protein, 38 aa, Zea mays
  unsure (1)..(38): unsure at all Xaa locations
  Clone ID: MRT4577_141141C.1.pep
RVSKAGGGSYGSIGRLVRXGQTNKYGGGLXRWIGWEWS

SEQ ID NO: 229767 - protein, 74 aa, Zea mays
  Clone ID: MRT4577_141142C.1.pep
LHMYVSLSSVHLPPFFFFFFFFFFFFFFVFYTFLRFFFYLKKGGQNCWLFWVYPFNFKIFLPKFLLPCKTNFIH

SEQ ID NO: 229768 - protein, 157 aa, Zea mays
  Clone ID: MRT4577_141143C.1.pep
MKIVLKVAITCKKCKTCVLGITSKVNGIKSLTYDDEKSTLTVVGDVDVAVIVDALRKAKHPAEVVSVTDEKKEAEEKKKKEEEEKKKKEKEEEEKKKRCCPKPPCKPCPPPPCSPCPPPPCTPCPPPPCPLPPCPPPYLKPCYIPIEDEYPGPCTIV

SEQ ID NO: 229769 - protein, 53 aa, Zea mays
  Clone ID: MRT4577_141144C.1.pep
SLLALLRELLVARACVLSIPPASTFSWGPRPYDCQAARRVTVTSLFSKYPMLE

SEQ ID NO: 229770 - protein, 61 aa, Zea mays
  unsure (1)..(61): unsure at all Xaa locations
  Clone ID: MRT4577_141145C.1.pep
FLGYQAFLGNVGHMMHRIVVARSFVXERTQWDGKXSTMFNACSVYLCISQWVCIYRRQLSF

SEQ ID NO: 229771 - protein, 123 aa, Zea mays
  Clone ID: MRT4577_141146C.1.pep
SDDIENKTHPSPTNLTSNPEQTNSTLKGHLDQQVNSMAVLGNQVQPLTNQTSLELDSPPNGTLALVTDAKKSTSGAGDDGSNSTSPSTHVDKKTDGGDGPKEDVDVSTKIMNKAISEDEVVPE

SEQ ID NO: 229772 - protein, 74 aa, Zea mays
  unsure (1)..(74): unsure at all Xaa locations
  Clone ID: MRT4577_141147C.1.pep
SSTEYSTLMPCLPFVQMGRAMPPQTCXXIPSLLEQANNTPDRRTICGCLKNVVNGANGSGTYISRAVALPNKCG

SEQ ID NO: 229773 - protein, 48 aa, Zea mays
  Clone ID: MRT4577_141148C.1.pep
CIIRNKGLIIPNSTIYVESNNKCRPHYYFGCIPFLTENEIAVKRPGRP

SEQ ID NO: 229774 - protein, 84 aa, Zea mays
  Clone ID: MRT4577_141149C.1.pep
AFHPPLLPSSSISRVRHSRGQQKCQASPLLPPAFSQLLPLSWEPGARAGFAGRVRGRLGSRPTQGPANPQPWQEPGPPPSALYL

SEQ ID NO: 229775 - protein, 124 aa, Zea mays
  unsure (1)..(124): unsure at all Xaa locations
  Clone ID: MRT4577_14114C.1.pep
LHSPKVGGNPDQKXVGYRTXKVKEVLKVVQARLDQVKVLCGRFLSLAGLNQGFGHFGLVGTPHGNXLDPXPEFEGRWDGFKERPAGQKGIAPNEPIALNGLPCQRLKGKTQIVQGWLAGQVRCL

SEQ ID NO: 229776 - protein, 35 aa, Zea mays
  Clone ID: MRT4577_141150C.1.pep
SFRNLHQVHWGVLIFHAYLSEQVQGKFSHTKSLKI

SEQ ID NO: 229777 - protein, 56 aa, Zea mays
  unsure (1)..(56): unsure at all Xaa locations
  Clone ID: MRT4577_141151C.1.pep
MAKSKXHTENNQSLKAHKNGINKPKRHRQTSTKGMDPTLLKNXRYSRNANKKSGRG

SEQ ID NO: 229778 - protein, 35 aa, Zea mays
  Clone ID: MRT4577_141152C.1.pep
TWWWRGKASDKAEVRGRSVPSCVLGLGKYGEGRRE

SEQ ID NO: 229779 - protein, 65 aa, Zea mays
  Clone ID: MRT4577_141153C.1.pep
FFIIIPVILSPEFIHHGFLSLRCIVCVLQTSLMLPCSAPSRIPRSPDMSRRVSYMPLALNLALGL

SEQ ID NO: 229780 - protein, 211 aa, Zea mays
  unsure (1)..(211): unsure at all Xaa locations
  Clone ID: MRT4577_141154C.1.pep
ASRGPVDPARATCGLVVPARVTCGPVVPACVAHGPIGPVALVCARRXRRLHPSQHATLIPPMSTNSVXHPASLVSSAAPTYSSAPSHEEPPVYHLVALHRDLGHVHLMVTQRAAGVLWPVDRLVLLASSSPALSPKLSSVRSAFVDPNWWLAMEEYEALQANHTXDLIPRPSGANVVTGKWIFKHQLKTDGSLDRYNARWVLWGFTHVPGG

SEQ ID NO: 229781 - protein, 367 aa, Zea mays
  Clone ID: MRT4577_141155C.1.pep
MAISQISRIFLAILLLAAAFAAAPAALADGDDVVALTESTFEKEVGKDRGALVEFYAPWCGHCKKLAPEYERLGASFKKAKSVLIAKVDCDEHKSVCSKYGVSGYPTIQWFPKGSLEPKKYEGQRTAEALTEYVNSEAATNVKIAAVPSSVVVLTPETFDSVVLDETKDVLVEFYAPWCGHCKSLAPTYEKVASVFKLDEGVVIANLDADKHRDLAEKYGVSGFPTLKFFPKGNKAGEDYDGDRDLVDFVKFINEKSGTSRDTKGQLTSEAGRIASLDVLAKEFLGASGDKRKEVLSSMEEEADKLSGSAARHGKVYVTIAKKILEKGNEYTEKETKRLDRILEKSISPSKADEFIIKKNVLSTFSS

SEQ ID NO: 229782 - protein, 144 aa, Zea mays
  Clone ID: MRT4577_141156C.1.pep
LRAESNPALNAGLENVQSTRVVEHYQGSGASDGGWVAKIAALLVGEDPSQSYALICGNCHMHNGLARKEDYPHITYYCPHCHALNTSKNLMGQYSGSNSGPSTPVAPADVISATSSVVESELINMATVQELPKEEHAEKEVEAS

SEQ ID NO: 229783 - protein, 69 aa, Zea mays
  Clone ID: MRT4577_141157C.1.pep
KKKKKKKKKKKKKKKKKKKKKKKKKKKKKKFKKKKKKKKKKKKRGALFKDPNFPSPSFQLFIFFFVPPN

SEQ ID NO: 229784 - protein, 166 aa, Zea mays
  unsure (1)..(166): unsure at all Xaa locations
  Clone ID: MRT4577_141158C.1.pep
FFLWFKVEHPLDGYELDLDSXETEEDELXIPVVKETCVIGKDEHNNTIRQXAATASKSSLDLEXKSRNYSDDSDDDESYDSDEDDSDDYHDGEESSPDECDYDSRHXDDTNYDDXNXTSTAKKPTASKKRCSLNAFKTPLSDKKANVVTHPVHNTGGKKGATHVAT

SEQ ID NO: 229785 - protein, 292 aa, Zea mays
  Clone ID: MRT4577_141159C.1.pep
MTGEENFRGIQKPPIKHVFKRRGKKQPVTTEAINKSPSNKMDKEVAPHSQSNATRTGASTGCDMLDQKECSKMEPKRELNMEGITPAGESKKAEKIGACRNSEYSKVASTTIKSKKTQILGDTSRAPRDELITKYPKGDGMDQMGSSAQGDEKEDASIIDTGLLPNSEEVGVYDSFSEMGLQENLLKGIYQYGLEKPSAVHQRGIVPLCKGFDVLHRSLSGTTETICSGVLQRVDYGSAECQALILVPTPDLAQETLKVLEALGEFLGVTAQTCTGGTSAHADQQALLSGAQ

SEQ ID NO: 229786 - protein, 81 aa, Zea mays
  Clone ID: MRT4577_14115C.1.pep
PRTNSMSSSIWSAMSSHPDHSIIGINTPWQTIFNPQKSLEQQRQTHQLGEVVVVRGLFPPGLHVPVRRSLSPSQRMSSSSD

SEQ ID NO: 229787 - protein, 48 aa, Zea mays
  unsure (1)..(48): unsure at all Xaa locations
  Clone ID: MRT4577_141160C.1.pep
MHAMQGLWMPPQQASKEXVCVPPLHLESAKVPPLNTYKPKEPFTDTIV

SEQ ID NO: 229788 - protein, 60 aa, Zea mays
  unsure (1)..(60): unsure at all Xaa locations
  Clone ID: MRT4577_141161C.1.pep
XPSDPERAXALPHXGSTTQPAXXSPRTAKXXPXGXTETXFTDQXKTXXXRRXKHSXSKIQ

SEQ ID NO: 229789 - protein, 131 aa, Zea mays
  Clone ID: MRT4577_141162C.1.pep
RIPLSAQFDIIRAKKKKKKKKKKKKKKKKKKIKKKKKKKKKKKKKKKKKKKKKKKKKKKGGGEKKKKKKKKKGGGPWKTPGLPPWVGKKNFFFWGAGKKIKGPDFNNLRRGKPPGLPNLTLLETTLFWRGG

SEQ ID NO: 229790 - protein, 491 aa, Zea mays
  Clone ID: MRT4577_141163C.1.pep
MGFGFVRLAARAAVSRRGMTPATSARRALAPPAVPAEPRCGSHWLVAARGHVGHSHHHGGEDEGETSERIFRLGLAADVVLTAGKAVTGYLSGSTAIAADAAHSLSDIVLSGVALLSYRAAKAPRDKEHPYGHGKFESLGALGISSMLLVTSGGIAWHAFEVLQGVMSSAPDIIGNTLHAHHDHGSSGHHHGIDLEHPVLALSMTTLAISIKEGLYWITKRAGEKEGSGLMKANAWHHRADAISSVVALVGVGGSILGLPLLDPLAGLVVSGMILKAGIKTGYESVLELVDAAVDPSLLAPIKETILRVHGVKGCHRLRGRKAGTSLYLDVHIEVYPFLSVSAAHDIGETVRHQIQKEHNQVAEVFIHIDPSYLVGPTMDLKRILKDSDGTNSEAIPRQQSAEAIVSNIISSHFSEKMALEHLMLHYVQGRVLLQVQVSMSPEILIRDAMEVAKQAEEEILRADASISQISLQLRLGQQIKQLQLASQERR

SEQ ID NO: 229791 - protein, 437 aa, Zea mays
  Clone ID: MRT4577_141164C.1.pep
MTPATSARRALAPPAVPAEPRCGPHWLVAARGHVGHSHHRGGEDEGETSERIFRLGLAADVVLTAGKAVTGYLSGSTAIAADAAHSLSDIVLSGVALLSYRAAKAPRDKEHPYEDIGSHISYSPFVQGHGKFESLGALGISSMLLVTSGGIAWHAFEVLQGVMSSAPDIIGNTLHAHHDHGSSGHHHGIDLEHPVLALSMTTLAISIKEGLYWITKRAGEKEGSGLMKANAWHHRADAISSVVALVGVGGSILGLPLLDPLAGLVVSGMILKAGIKTGYESVLELVDAAVDPSLLAPIKETILRVHGVKGCHRLRGRKAGTSLYLDVHIEASPRLTPYRLKDPSYLVGPTMDLKRILKDSDGTNSEAIPRQQSAEAIVSNIISSHFSEAQRWSDDGGLASFAGASADSRPQASYKECCFPPDPPSIILLLRLMATVG

SEQ ID NO: 229792 - protein, 60 aa, Zea mays
  Clone ID: MRT4577_141165C.1.pep
KNQSLGRLGPEEVQKPPLAPALAERAPLHGRDVDIDGDEVHQPGCRPRRRARLADNLDDL

SEQ ID NO: 229793 - protein, 93 aa, Zea mays
  Clone ID: MRT4577_141166C.1.pep
RWAQRRRCGGFGDGGRINIDRRRRLIGGADSGVRTTRRTWGWRGGHVGRRGRGTARARPWHEARGEDGFLRAAADRIDHVVKLGRWECSGPWP

SEQ ID NO: 229794 - protein, 184 aa, Zea mays
  Clone ID: MRT4577_141168C.1.pep
MVGTGKRERIAIRRIDNLAARQVTFSKRRRGLFKKAEELSILCDAEVGLVVFSATGKLFHFASSRQMRGEELQRLSVEQLQELEKTLESGLGSVLKTKSQKILDEISGLERKRTQLIEENSRLKEQVTRMSRMETQLGADPEFVYEEGQSSESVTNTSYPRPSTDTDDCSDTSLRLGLPLFSSK

SEQ ID NO: 229795 - protein, 55 aa, Zea mays
  unsure (1)..(55): unsure at all Xaa locations
  Clone ID: MRT4577_14116C.1.pep
NKPLLLLATSFLSCGLLVAVDYAPMTLAVVNNCPYLVWPDIQGGXGHNFLEGGGL

SEQ ID NO: 229796 - protein, 416 aa, Zea mays
  unsure (1)..(416): unsure at all Xaa locations
  Clone ID: MRT4577_141170C.1.pep
MATASLALLDQTLLPSPLAYNGGSDRLSQEIFSILESNFLFGASPLEGGACSAGRVRVLSIDGGADGGALAAAALVRLERRLQELSGNPAARVADFFDLAAGSGAGGFLAAALFACRMPAEAARDVVAKNRKVLSGRGGGLMSFRRPEAAFRKVFGDLTVRDAAKPLLIPCYDMATAAPFVFSRADAVEADAFDFPLWQVCAAACGVGPAEVASLDGRTRLRAASGAGAGGGGASAAVANPTAVALTHVLHNKREFPFAAGAGDLVVLSLGGRAAASLGRLSSSSLLRIAGACQADMXADCFVLQVDQAVSMVFGESRATNYVRIQGNGIAPGETAEAALAERGVESVLFRGKKLMAQTNGERLDGVAEQLVREHHRRLESKTPVVLVKPSATPRTSSSSASTLITVSTNSSSESP

SEQ ID NO: 229797 - protein, 132 aa, Zea mays
  Clone ID: MRT4577_141172C.1.pep
KKIKKKKKKGGKEKKKKKKKKKKKKKREKKYKRYQRYVGGRASVFAGLLRHLSSFFWPFFWGGGVVNCLPFPNLRGGGALPFLAGWRPWRLGPFCSPWPTAWGVPRVGVLALLWAIWPGGGPLSGRVDRSLV

SEQ ID NO: 229798 - protein, 77 aa, Zea mays
  Clone ID: MRT4577_141173C.1.pep
CGNGPSAVVHELNETPQVTLSVRVEKHGERRLPMSPVHSTSAMETLVSGAHEGSILCQFSRGPGSVGVYDGCSRKGT

SEQ ID NO: 229799 - protein, 80 aa, Zea mays
  unsure (1)..(80): unsure at all Xaa locations
  Clone ID: MRT4577_141174C.1.pep
GFWAFSMEALSKKVHFAIRVDPFVGKSPKQPPKGPKGFPPQKFSFDQRKALFFXRFNQLNSSGGAVFAVWVSGLSLVPSK

SEQ ID NO: 229800 - protein, 143 aa, Zea mays
  unsure (1)..(143): unsure at all Xaa locations
  Clone ID: MRT4577_141175C.1.pep
GRGILNVNKSETLAWELSNQARGWSGKGGFRDVAGSLSLAAAGVPGLVFALLCPLLVEAQPLWPCDLQVLXNPQLRCQXPWKPRNGESAESDIPREEKGLVGTGGKRLWRDSGLPAVSSTIRAPSSPCLARPQSPSAIRWRLR

SEQ ID NO: 229801 - protein, 62 aa, Zea mays
  Clone ID: MRT4577_141176C.1.pep
SWNPLSVMGLISLHATTPPTGCDDEFARYSIRSILPGMTGGQTGVFFSASFLFFAKTMVCLR

SEQ ID NO: 229802 - protein, 55 aa, Zea mays
  Clone ID: MRT4577_141177C.1.pep
NLGEKECRMCITKSKPCTISLGVRDAKKSPQIEDYSSPESLNSETITKKYITTSL

SEQ ID NO: 229803 - protein, 61 aa, Zea mays
  Clone ID: MRT4577_141178C.1.pep
NGFRGAKKVACAAELVACRSGNFKAAPPAYVEFKFCFFCFFSPFFFFLSPLFFFFFFFYYK

SEQ ID NO: 229804 - protein, 309 aa, Zea mays
  unsure (1)..(309): unsure at all Xaa locations
  Clone ID: MRT4577_141179C.1.pep
MSEFYEAMERTNAEKIVHETLSGMSESSCDSEDFDAESENEGAEDQPWIPSHIVFGKSTIKQGQIDAMRGSFMKAGLQFPLDKILVEVLKTFEIFLHQLTPEAIIKIEIYIWAMRNQGLEPNAKCFCNMHELSYETKATGKEQYHNNFGCYDFITRSEVSNPVPTFRKRWPGAWMQEWFYVKNDLIEREDIKGIIQRPIWSHFSIRRPSLTLGNDIQACQAAFNTVCTYIDTRDLVQEXIAYRVWPLGSGWEMPKETATXPAKYMSQFDEPNDDWLNAIEATSDELLGAYSRAKDDAMTTAFGVEARRN

SEQ ID NO: 229805 - protein, 73 aa, Zea mays
  unsure (1)..(73): unsure at all Xaa locations
  Clone ID: MRT4577_14117C.1.pep
PGRPRVARARPRXPASGPAKTLRQRRRPTTRRTPLGSLPSYASSPLHLYLREAEVGKNWAPSHPEAAAARVGV

SEQ ID NO: 229806 - protein, 99 aa, Zea mays
  Clone ID: MRT4577_141180C.1.pep
MAAASSSSVLLLLLAGAAALADMSANGATFTITNNCGLTERPAATPMGGVTQLNPGGTCTVNETVGTSSGRVCCRTGCSFNGNSVSCQTVDCSGSLCCT

SEQ ID NO: 229807 - protein, 81 aa, Zea mays
  unsure (1)..(81): unsure at all Xaa locations
  Clone ID: MRT4577_141181C.1.pep
RERLCLEAERLRLSAMIMXKRGWGALRGGRLKRLXAIRDYCVHHCVCPGGRKRIPIGCLLKMSYIRKPANEPKFNAVPTNP

SEQ ID NO: 229808 - protein, 35 aa, Zea mays
  Clone ID: MRT4577_141182C.1.pep
LITLLVFLFWATKQKRSQTMLTHGSAPKIHQNLLF

SEQ ID NO: 229809 - protein, 130 aa, Zea mays
  unsure (1)..(130): unsure at all Xaa locations
  Clone ID: MRT4577_141183C.1.pep
GYLEAGRVHYFVRXLDILFTGPTXRIKNPVLXHTNFPDHSDFDSYTICDYDIYDAEIESTCHXYRLYDCITPITKWQQVKDILADCGRAAPHTLRSMNTPFRSSCEYGYQNIALNMMMNGXIAAATLFQS

SEQ ID NO: 229810 - protein, 67 aa, Zea mays
  unsure (1)..(67): unsure at all Xaa locations
  Clone ID: MRT4577_141184C.1.pep
GTAPPPRPPPPPPPPPPPPPPPPPPPPPPFGKKKPXGEIGFAKKLLCQNKIFRLYNTNPQGPGKHYM

SEQ ID NO: 229811 - protein, 56 aa, Zea mays
  Clone ID: MRT4577_141185C.1.pep
LGIGSSSSRFIFMDAGSEVQNNKSECTVLLEWRLTCYHGVFCYWSIYDHNMLIYFL

SEQ ID NO: 229812 - protein, 154 aa, Zea mays
  Clone ID: MRT4577_141186C.1.pep
MMEAGKFPGIIGAASGQDGGVNFCDMAYYQKLGEGSTMSIDSLNSMQTSMHGGSIMSVDNSSVGSTDSRTGMLNHPSHRGPVAVVSYSVGNSIFRPGRVSHALSDDALAQALMDTRFPTETLKDYEEWTIDLGKLHMGLPFAPGAFGKLYRGTY

SEQ ID NO: 229813 - protein, 60 aa, Zea mays
  Clone ID: MRT4577_141187C.1.pep
RFHASWRTRGSGELSLSLARNIMMRAHSSPGQLLRCLNYRSSEQGVHNCTQHRYTRKLDI

SEQ ID NO: 229814 - protein, 54 aa, Zea mays
  Clone ID: MRT4577_141188C.1.pep
KQECLGMTGLRASWGFWTRTMAGEPSSHLPECPFEGCFGWVWSRILYILRFCVS

SEQ ID NO: 229815 - protein, 58 aa, Zea mays
  unsure (1)..(58): unsure at all Xaa locations
  Clone ID: MRT4577_141189C.1.pep
GVRPRRGPNLNPKWMXVXGKKKKYDVPGISFWAEELARQLRSIFXPHPGLGFFPPPPP

SEQ ID NO: 229816 - protein, 97 aa, Zea mays
  unsure (1)..(97): unsure at all Xaa locations
  Clone ID: MRT4577_14118C.1.pep
MADGEDIQPLVCDNATGMDKAVFADDDAPRADFPSIDGRPLHTGVMIXMVHKDAYVGDEVQSKTCILMHKHPIDHRIESHWYDMETIWYHNFYNELH

SEQ ID NO: 229817 - protein, 70 aa, Zea mays
  unsure (1)..(70): unsure at all Xaa locations
  Clone ID: MRT4577_141190C.1.pep
GDAPHPCDLISSSSTGPAGGASSWPSPVASSGADAVVPPPPRPKYVSSXGALQSFEPXSCDQLASELPSE

SEQ ID NO: 229818 - protein, 53 aa, Zea mays
  Clone ID: MRT4577_141191C.1.pep
QPYPRTKDVHAWCRDRLLPIEDMNNTSSEGVTQPRDHGYDLGGGVKVELGSNL

SEQ ID NO: 229819 - protein, 73 aa, Zea mays
  Clone ID: MRT4577_141192C.1.pep
KGGPWNGLGGHRRRRKKLEARELKPSNFRGHAPLSLTFLENLASGFFFLLCSFLFFFFFFFFVLLFFISFDVL

SEQ ID NO: 229820 - protein, 71 aa, Zea mays
  Clone ID: MRT4577_141193C.1.pep
GRLVARLAGSARLGLGSRFFDFVGFFGGRPSYREMERQPSLLSTKPIVHISIFLASQSLSFSSLLYFPTGS

SEQ ID NO: 229821 - protein, 55 aa, Zea mays
  Clone ID: MRT4577_141194C.1.pep
RFKKWILCFPNSRPLNLWFNFKPAEMFIVFHTFLCFHWNFISTCADSSLEFTCFI

SEQ ID NO: 229822 - protein, 125 aa, Zea mays
  Clone ID: MRT4577_141195C.1.pep
GVFSMPEWGLTGALSFFTSLCSLLFSSCFGRRGLFTSVLTWSYCFSRFGVGFFLSLFLSAFILLLVPVGCHVLSPGALFCSRRGCFVGRRPCLFGFCWLLPSWCVCWGFLWCLSSPFRLRRFFSF

SEQ ID NO: 229823 - protein, 118 aa, Zea mays
  Clone ID: MRT4577_141196C.1.pep
KKKKKKKKKKKKKKKKKARTIKRKKNYGPLYGDILKACFFARARSPAGAVVALYVSRLSGSLWGCFFKVLCGQILHFFEFNNPVAYPLFACWTLTVLARLGFPYKGLFSLFFLWTRPV

SEQ ID NO: 229824 - protein, 150 aa, Zea mays
  unsure (1)..(150): unsure at all Xaa locations
  Clone ID: MRT4577_141197C.1.pep
MVAHMFHQYQVVARALXPTSTDDHPTIYRMKLCATNEDRAKPKFCYLLGELEKVKKINGQMLAINEILERNPATIKNYGMWLRSQMRTGYHTMFMXCRDTTLSGAVDHMYNEMAWRRRVGCPCVHIIKTGTVHFRLCNRGLSGLLRISAF

SEQ ID NO: 229825 - protein, 68 aa, Zea mays
  Clone ID: MRT4577_141198C.1.pep
TPAFTSKRVKEGDRFPSFPPPGWQGTRPYEAGIFFGRNQITPPLPKLRGGLWPGGFSYQRPFFHKIYP

SEQ ID NO: 229826 - protein, 90 aa, Zea mays
  unsure (1)..(90): unsure at all Xaa locations
  Clone ID: MRT4577_141199C.1.pep
EPFIVIFTXXAAMILILNSAHPLTRAMFQYFLILNPPPPNCCTENLSFFGTILTFSSFGSTNNSKCAHCITDLNYYSKSRMITLSKSINA

SEQ ID NO: 229827 - protein, 88 aa, Zea mays
  unsure (1)..(88): unsure at all Xaa locations
  Clone ID: MRT4577_14119C.1.pep
LGDGRSLAVYNIQKESTLXLLLRLRGGMPILAKTLTGKTITVXVESSNTIDKVXAMIQDMEGIRSDQHXLILRGKHIEDGRTVLDYNM

SEQ ID NO: 229828 - protein, 59 aa, Zea mays
  unsure (1)..(59): unsure at all Xaa locations
  Clone ID: MRT4577_1411C.1.pep
RTPLTSETATAKEENKDGVGRSDGPGTHTPRNAVRGSIAQLPLLKAIGRPCIPTXRDGQ

SEQ ID NO: 229829 - protein, 253 aa, Zea mays
  unsure (1)..(253): unsure at all Xaa locations
  Clone ID: MRT4577_141200C.1.pep
VRLQVPVRNSRVDPRVRTTPAQWEDITGTTPLTFVNECVSFTTNVSARFWLIDCRQIQESVAFASQVYREIICVPYMAKFVVFAKSHDPIEARLRCFCMTDDKVDKTLEQQENFSEVARSRDVEVLEGKPIYVDCFGNLVPLTKSGQHHIFSFFAFKENRLPLFVKVRDTTQEPCGRLSFMKEPKSTRGLVHQAICNLNITLPIYAKESESDQEPXEEIGMTSEKNPQDEQERMEERLAYIADHLGFSWTELA

SEQ ID NO: 229830 - protein, 75 aa, Zea mays
  unsure (1)..(75): unsure at all Xaa locations
  Clone ID: MRT4577_141201C.1.pep
LPHSIRAGVHGVSQRIKACLRTXNVRXQNVNLGAGMDTTFWRLKDEDLLPSKYFEVDFPMIVTRKLHSIKCKPPL

SEQ ID NO: 229831 - protein, 189 aa, Zea mays
  Clone ID: MRT4577_141202C.1.pep
MAPAATSTASAPSSFHSTGRHRARVGARPSLVSLRVRAANPNVTADPAPAFQSVTAFAPATVANLGPGFDFLGCAVADASLSLGDTVTATLDPSLPPATVFISSATSPSRPNLAERLSRDPLRNCAGVAAIAALRALGVRSHAVSIQAQGDSNRRAARYPWCQGHRHVILELTKDSESGTAIVSPNQEE

SEQ ID NO: 229832 - protein, 380 aa, Zea mays
  Clone ID: MRT4577_141203C.1.pep
MAPAATSTASAPSSFHSTGRHRARVGARPSLVSLRVRAANPNVTADPAPAFQSVTAFAPATVANLGPGFDFLGCAVADASLSLGDTVTATLDPSLPPATVSIASVTSPSRPNLAERLSRDPLRNCAGVAAIAALRALGVRSHAVSIHLTKGLPLGSGLGSSAASAAAAAKAVDALFGSRLGRDDLVLAGLESEKAVSGFHADNIAPAILGGFVLVRSYDPFHLVPLSFPPALRLHFVLVTPDFEAPTSKMRAALPRQVDVQQHVRNSSQAAALVAAVLQGDAGLIGSAMSSDGIVEPTRAPLIPGMAAVKAAALQAGALGCTISGAGPTVVAVIQGEERGEEVARRMVDAFWSAGKLKATATVAQLDTLGARVIATSSLN

SEQ ID NO: 229833 - protein, 62 aa, Zea mays
  Clone ID: MRT4577_141204C.1.pep
MGKVHGSLARAGKVRGQTPKVAKQDKKKKPRGRAHKRMQYNRRFVTAVVGFGKKRGPNSSEK

SEQ ID NO: 229834 - protein, 59 aa, Zea mays
  unsure (1)..(59): unsure at all Xaa locations
  Clone ID: MRT4577_141205C.1.pep
SKLTHTLXQHNLPPHPPNNPLYPXKKKQNTNITHHTTITILNPTPSPNPHPLNTPPHVF

SEQ ID NO: 229835 - protein, 187 aa, Zea mays
  Clone ID: MRT4577_141206C.1.pep
NSARGCVTYSPSSPWQLLPSSPPSSPRSPPSASRSAHIPCPRRALERLSLTTPVAAAAVAASTTSPDFLAVGAVLGKPTMLVGSGREDLPSLSRSLASPPSASRSTTFSLARASSAPAPVTITDISLAADDKTDELFAKICLRLGPPYWLVELASLLGAETLGVGERIGTDPIHPLGEAALSARVHQ

SEQ ID NO: 229836 - protein, 112 aa, Zea mays
  unsure (1)..(112): unsure at all Xaa locations
  Clone ID: MRT4577_141207C.1.pep
GLLXIFXXWXPRGLLXXHSXXTTPQXXFFFFXXVXXWAWAGASGXGXXLVRPXSAKVATXAGYXDVWFXVGCXQKXPGNXXIAXVWVXLIDGLGFIFXTEFPXXNGRGTVFF

SEQ ID NO: 229837 - protein, 71 aa, Zea mays
  Clone ID: MRT4577_141208C.1.pep
LHPRLIGQGRRYNDVADNSGVLVAPGIGKKGENGRTEVALRQFVSALSKCGIYLRSSSSLAYPLVELPCRC

SEQ ID NO: 229838 - protein, 98 aa, Zea mays
  Clone ID: MRT4577_141209C.1.pep
SSSAHRRCGRCWLLSLWSQFHASCLFKFFVVKFLRDLSDEAALPGCGDRAVLAVDEARLPECRRLAAADLDALPSGTSRASSCRGSCHARAGAIYCED

SEQ ID NO: 229839 - protein, 234 aa, Zea mays
  Clone ID: MRT4577_14120C.1.pep
MGFPSTPNLKLEPRPRTRRLLRCALSSEPVPPMTVSITGATGFIGRRLVHKLLSDDHKVCILTRSASKAASVFPASTYPGLTIAQQGDWEACVRGSTAVVNLAGMPISTRWSPEIKQEIKQSRVNVTSKVCREWEATACQVNQEDVRLVLLRIGVVLGKDGGALGCCVSFNSFSPLLSFYFPSSREGPFQFTLLIHLVHLSICSKDDTPFYDVCWWSSGDGTPMVASLSCATDL

SEQ ID NO: 229840 - protein, 44 aa, Zea mays
  Clone ID: MRT4577_141210C.1.pep
ARGRPASLDLPKSGRLRGHHAPPPHSLGPNLHSEVIGFCSLILG

SEQ ID NO: 229841 - protein, 51 aa, Zea mays
  Clone ID: MRT4577_141211C.1.pep
MAKLALALLLLLAEAASAVVSSASHLDLDLGLLYSGERPRESRGTVAECLA

SEQ ID NO: 229842 - protein, 69 aa, Zea mays
  Clone ID: MRT4577_141212C.1.pep
KRKICLNKKFRLVTVSKKCAKIIFSKRKDRGATQKTKEQETTCRLRSPNLRSSTVCTMHSYGFFKYIKL

SEQ ID NO: 229843 - protein, 63 aa, Zea mays
  Clone ID: MRT4577_141213C.1.pep
GGFSGLLQGGKDAVHVGDICGLLPGLRVKSHSCAPTLGHSLVSSQWLCCPAICLRFLYCSLSH

SEQ ID NO: 229844 - protein, 85 aa, Zea mays
  Clone ID: MRT4577_141214C.1.pep
NQLESLRVTLRQLINGWFYCQYTTFKKRSTDLHRRTANLLHSLQDTAIPKRHVFDEEQCRDDKGIWTVPKHKSASKACSTKVIKT

SEQ ID NO: 229845 - protein, 63 aa, Zea mays
  Clone ID: MRT4577_141215C.1.pep
GLTQALPPSMTTIPLDDKTFRSHACLVLIFLYFLLHSQHINSYNSPVSRHYHTDHQLSSTYDP

SEQ ID NO: 229846 - protein, 145 aa, Zea mays
  Clone ID: MRT4577_141216C.1.pep
VPVVGGHAAATILPLLSKARPKAAFTDDEVEELTARVRDAGAGGSATLSMAYAAARFLEASLRGLDGHGDVYECAYVQSQVVPELPFFACRVRLGRDGVEEVMGSELRALTDYEARALEALKPTLKASIDKGVAYVQQHQEAALN

SEQ ID NO: 229847 - protein, 119 aa, Zea mays
  Clone ID: MRT4577_141217C.1.pep
MVQRLTYRKRHSYATKSNQTRVVKTPGGKLVYQYTKKRASGPKCPVTGKKIQGIPHLRPTEYKRSRLSRNRRTVNRPYGGVLSGTAVRERIIRAFLVEEQKIVKKVLKIQKTKDKTTSK

SEQ ID NO: 229848 - protein, 1094 aa, Zea mays
  Clone ID: MRT4577_141218C.1.pep
MEASAGLVAGSHNRNELVVIRRDRESGAAGGGAARRAEAPCQICGDEVGVGFDGEPFVACNECAFPVCRACYEYERREGSQACPQCRTRYKRLKGCPRVAGDEEEDGVDDLEGEFGLQDGAGHEDDPQYVAESMLRAQMSYGRGGDAHPDFNPVPNVPLLTNGQMVDDIPPEQHALVPSYMSGGGGGGKRIHPLPFADPNLPVQPRSMDPSKDLAAYGYGSVAWKERMEGWKQKQERLQHVRSEGGGDWDGDDADLPLMDEARQPLSRKVPISSSRINPYRMIIVIRLVVLGFFFHYRVMHPAKDAFALWLISVICEIWFAMSWILDQFPKWLPIERETYLDRLSLRFDKEGQPSQLAPIDFFVSTVDPTKEPPLVTANTVLSILSVDYPVEKVSCYVSDDGAAMLTFEALSETSEFAKKWVPFSKKFNIEPRAPEWYFQQKIDYLKDKVAASFVRERRAMKREYEEFKVRINALVAKAQKVPEEGWTMQDGSPWPGNNVRDHPGMIQVFLGQSGGRDVEGNELPRLVYVSREKRPGYNHHKKAGAMNALVRVSAVLSNAAYLLNLDCDHYINNSKAIKEAMCFMMDPLVGKKVCYVQFPQRFDGIDKNDRYANRNVVFFDINMKGLDGIQGPIYVGTGCVFRRQALYGYDAPKTKKPPSRTCNCWPKWCLSCCCSRNKNKKKTTKPKTEKKKRLFFKKAENPSPAYALGEIDEGAPGADIEKAGIVNQQKLEKKFGQSSVFVASTLLENGGTLKSASPASLLKEAIHVISCGYEDKTDWGKEIGWIYGSITEDILTGFKMHCHGWRSIYCIPKRPAFKGSAPLNLSDRLHQVLRWALGSVEIFFSKHCPLWYGYGGGLKFLERFSYINSIVYPWTSIPLLAYCTLPAICLLTGKFITPELTNVASIWFMALFICISVTGILEMRWSGVAIDDWWRNEQFWVIGGVSAHLFAVFQGLLKVFAGIDTSFTVTSKAGDDEEFSELYTFKWTTLLIPPTTLLLLNFIGVVAGISNAINNGYESWGPLFGKLFFAFWVIVHLYPFLKGLVGRQNRTPTIVIVWSILLASIFSLLWVRVDPFLAKSNGPLLEECGLDCN

SEQ ID NO: 229849 - protein, 55 aa, Zea mays
  unsure (1)..(55): unsure at all Xaa locations
  Clone ID: MRT4577_141219C.1.pep
LIRLERRAVPQPRSEXDAFHQVLNGLARKPPHPKDVFLKPGQKVLNWTEGAQDDL

SEQ ID NO: 229850 - protein, 47 aa, Zea mays
  Clone ID: MRT4577_14121C.1.pep
VPGVWNLGFGSRGPPFWFINNPKKAILPPKYQAPLLLITTQVESTKS

SEQ ID NO: 229851 - protein, 58 aa, Zea mays
  Clone ID: MRT4577_141220C.1.pep
SLAKETSPVKTFVPLVGLFHHFVRQILVQSSGISFLPRFGFGVTNQTQFLIFRKFLRP

SEQ ID NO: 229852 - protein, 438 aa, Zea mays
  unsure (1)..(438): unsure at all Xaa locations
  Clone ID: MRT4577_141221C.1.pep
AKPKTEKKKRLFFKKAENPSPAYXLGEIDEGAPGADIEKAGIVNQQKLEKKFGQSSVFVASTLLENGGTLKSASPASLLKEXIHVISXXYEDKTDWGKEVYIPYNLTQKASDXLLEMYCTKXPPVPXIGWIYGSITEDILTGFKMHCHGWRSIYCIPKRPAFKGSAPLNLSDRLHQVLRWALGSVEIFFSKHCPLWYGYGGGLKFLERFSYINSIVYPWTSIPLLAYCTLPAICLLTGKFITPELTNVASIWFMALFICISVTGILEMRWSGVAIDDWWRNEQFWVIGGVSAHLFAVFQGLLKVFAGIDTSFTVTSKAGDDEEFSELYTFKWTTLLIPPTTLLLLNFIGVVAGISNAINNGYESWGPLFGKLFFAFWVIVHLYPFLKGLVGRQNRTPTIVIVWSILLASIFSLLWVRVDPFLAKSNGPLLEECGLDCN

SEQ ID NO: 229853 - protein, 95 aa, Zea mays
  unsure (1)..(95): unsure at all Xaa locations
  Clone ID: MRT4577_141222C.1.pep
SLSSPLFSNSASLTQCRSPPPSPRGGGGXGAAGRWCGLVVLVLMALEAGAAAETSPSDVAAMRAVAKALGADKTLGWDVAGDPCSPKRRDGVSCH

SEQ ID NO: 229854 - protein, 414 aa, Zea mays
  unsure (1)..(414): unsure at all Xaa locations
  Clone ID: MRT4577_141223C.1.pep
ITLHCSPGADIEKAGIVNQQKLEKKFGQSSVFVASTLLENGGTLKSASPASLLKEAIHVISCGYEDKTDWGKEXYTIYNLIQRLLTVLFKXIYCTKWIVVCXIGWIYGSITEDILTGFKMHCHGWRSIYCIPKRPAFKGSAPLNLSDRLHQVLRWALGSVEIFFSKHCPLWYGYGGGLKFLERFSYINSIVYPWTSIPLLAYCTLPAICRRFFLFPPELQLTNVASIWFMALFICISVTGILEMRWSGVAIDDWWRNEQFWVIGGVSAHLFAVFQGLLKVLAGIDTSFTVTSKGGDDEEFSELYTFKWTTLLIPPTTLLLLNFIGVVAGISNAINNGYESWGPLFGKLFFAFWVIVHLYPFLKGLVGRQNRTPTIVIVWSILLASIFSLLWVRVDPFLAKSDGPLLEECGLDCN

SEQ ID NO: 229855 - protein, 1094 aa, Zea mays
  Clone ID: MRT4577_141224C.1.pep
MEASAGLVAGSHNRNELVVIRRDRESGAAGGGAARRAEAPCQICGDEVGVGFDGEPFVACNECAFPVCRACYEYERREGSQACPQCRTRYKRLKGCPRVAGDEEEDGVDDLEGEFGLQDGAAHEDDPQYVAESMLRAQMSYGRGGDAHPGFSPVPNVPLLTNGQMVDDIPPEQHALVPSYMSGGGGGGKRIHPLPFADPNLPVQPRSMDPSKDLAAYGYGSVAWKERMEGWKQKQERLQHVRSEGGGDWDGDDADLPLMDEARQPLSRKVPISSSRINPYRMIIVIRLVVLGFFFHYRVMHPAKDAFALWLISVICEIWFAMSWILDQFPKWLPIERETYLDRLSLRFDKEGQPSQLAPIDFFVSTVDPTKEPPLVTANTVLSILSVDYPVEKVSCYVSDDGAAMLTFEALSETSEFAKKWVPFSKKFNIEPRAPEWYFQQKIDYLKDKVAASFVRERRAMKREYEEFKVRINALVAKAQKVPEEGWTMQDGSPWPGNNVRDHPGMIQVFLGQSGGRDVEGNELPRLVYVSREKRPGYNHHKKAGAMNALVRVSAVLSNAAYLLNLDCDHYINNSKAIKEAMCFMMDPLVGKKVCYVQFPQRFDGIDKNDRYANRNVVFFDINMKGLDGIQGPIYVGTGCVFRRQALYGYDAPKTKKPPSRTCNCWPKWCLSCCCSRNKNKKKTTKPKTEKKKRLFFKKAENPSPAYALGEIDEGAPGADIEKAGIVNQQKLEKKFGQSSVFVASTLLENGGTLKSASPASLLKEAIHVISCGYEDKTDWGKEIGWIYGSITEDILTGFKMHCHGWRSIYCIPKRPAFKGSAPLNLSDRLHQVLRWALGSVEIFFSKHCPLWYGYGGGLKFLERFSYINSIVYPWTSIPLLAYCTLPAICLLTGKFITPELTNVASIWFMALFICISVTGILEMRWSGVAIDDWWRNEQFWVIGGVSAHLFAVFQGLLKVFAGIDTSFTVTSKAGDDEEFSELYTFKWTTLLIPPTTLLLLNFIGVVAGISNAINNGYESWGPLFGKLFFAFWVIVHLYPFLKGLVGRQNRTPTIVIVWSILLASIFSLLWVRVDPFLAKSNGPLLEECGLDCN

SEQ ID NO: 229856 - protein, 101 aa, Zea mays
  unsure (1)..(101): unsure at all Xaa locations
  Clone ID: MRT4577_141225C.1.pep
MLRRKVGVSSNDAVLGYRNPDKVTVATTXAEYVDEATGAYTDHATAAAHLTCGAKKRGISAPTQDSHHDAGAVNEKEYKSDINIXLHASXTTNCLXPLARH

SEQ ID NO: 229857 - protein, 116 aa, Zea mays
  Clone ID: MRT4577_141226C.1.pep
LGCLLQRCRPGVPRASHRGWSGPFRVPGGRGLPDRGMAVQPPRRVRQGLPWVLGPVHPGGVDAQLPAGQDGLSPRGLRLPLRARPDGQCLPEGGRTVPPKAPEHQLKKELGWTSSR

SEQ ID NO: 229858 - protein, 48 aa, Zea mays
  Clone ID: MRT4577_141227C.1.pep
NSLTRQPPIFTSFITYITLPLSQDDFSPLFYYYSFYFYLFFLFIFFVF

SEQ ID NO: 229859 - protein, 82 aa, Zea mays
  Clone ID: MRT4577_141228C.1.pep
PNPLQRTTGQTAGKNTLTSRRGNEQISQPRYRGYAHAPNRLLRITRGVHSTDTRLIVLAPSWMTNIHTRCRSEWAGPKRLQD

SEQ ID NO: 229860 - protein, 101 aa, Zea mays
  unsure (1)..(101): unsure at all Xaa locations
  Clone ID: MRT4577_141229C.1.pep
KKKNKKIKNNHQKKSKKEKKHTNTIEKKKKXNNKKERKRTRKEKKKKQKRINREKRKKLKKKKINKEDTQRKLEDRYSXSQKHLTTKIKIKKNEHHYYNEH

SEQ ID NO: 229861 - protein, 338 aa, Zea mays
  Clone ID: MRT4577_14122C.1.pep
MGFPSTPNLKLEPRPRTRRLLRCALSSEPVPPMTVSITGATGFIGRRLVHKLLSDDHKVCILTRSASKAASVFPASTYPGLTIAQQGDWEACVRGSTAVVNLAGMPISTRWSPEIKQEIKQSRVNVTSKVVKYINHAGNADTRPSVFVSATAIGYYGTSEIHSFDESSPSGNDYLAEVCREWEATACQVNQEDVRLVLLRIGVVLGKDGGALAKMIPLFMMFAGGPLGTGRQWFSWIHLDDLVNLIYESLTNPTYKGVINGTAPNPVRLSELCERLGRIVGRPSWLPVPGFALKAVLGEGASVVLEGQKVVPAKAKDLGFSYRYPYVEDALKAIARDL

SEQ ID NO: 229862 - protein, 62 aa, Zea mays
  Clone ID: MRT4577_141230C.1.pep
VPTSFMLYTYIYCFYLNCCSPRLIICSRILVCMSPPFYVSHPLFKYGSSFIWHHHFFFLIKV

SEQ ID NO: 229863 - protein, 84 aa, Zea mays
  Clone ID: MRT4577_141231C.1.pep
GELTPGNCKSWINLLHITRPHHGRLHIWRAREHLISLLTCWDFTSACLRAPYWRSANTSGPSCLMGPPTKNWRLLELVHVGNLW

SEQ ID NO: 229864 - protein, 47 aa, Zea mays
  Clone ID: MRT4577_141232C.1.pep
AKCKETLHRCLSFNSNHPMYKVAKTKFRICTVLLRNSPITETLNSYS

SEQ ID NO: 229865 - protein, 83 aa, Zea mays
  unsure (1)..(83): unsure at all Xaa locations
  Clone ID: MRT4577_141233C.1.pep
TGEIATLEERFLRAISYRLFVGGQEFRGLCEVLEKVPLPPCGCCASRKRQADAVVGDEEEHRRVRARLPSPVVMPPWPHYESX

SEQ ID NO: 229866 - protein, 94 aa, Zea mays
  Clone ID: MRT4577_141234C.1.pep
QGKQPFYARAYGSKTAPMAQPHLVWGIINKFIFPILPQGGPPVQLDFCQPARLDPILCSFGSKQFLRFTCKYERFSSLIKRGDQPGGFCPFWAK

SEQ ID NO: 229867 - protein, 101 aa, Zea mays
  Clone ID: MRT4577_141235C.1.pep
SRSRLESAIRHCDNFQVTESDVEKIIDRENTFPKLSEIPIKPARCILMDITVLPRVDEPAGMRDMTPKLPCDPYKINALIPVNAVINHAWRVYAATTYYAF

SEQ ID NO: 229868 - protein, 31 aa, Zea mays
  Clone ID: MRT4577_141236C.1.pep
LHYFRTPYFSAPRKGHNSLQGRAYYQLLECL

SEQ ID NO: 229869 - protein, 193 aa, Zea mays
  unsure (1)..(193): unsure at all Xaa locations
  Clone ID: MRT4577_141237C.1.pep
MARAKAPRRKPPQAVSRRLLGFCGLSFAAALYVGIDYLRYLSPTWHNRLQPVLWAALALAAAARAPFYRHWDVELRAVLPFLGSIVFMLSAFLIEMISVRFVSVLMGLQWHGSAAPLPDTGQWVLLALNEKLPGSVVGLLRAHVITLHHYLMLFMMLRLSGLLDCIKAPGLGIPTRYLSPMXVGRFASAPQLL

SEQ ID NO: 229870 - protein, 51 aa, Zea mays
  Clone ID: MRT4577_141238C.1.pep
ICSRCIRFKQLSKVISIVVLFISTLKHNIVDEEGPPFWWISQSMLAKWHIL

SEQ ID NO: 229871 - protein, 45 aa, Zea mays
  Clone ID: MRT4577_141239C.1.pep
DRTRKQAPITAPLAVVFILLVSSPFTLGREGAAPLASLLPCAWKL

SEQ ID NO: 229872 - protein, 145 aa, Zea mays
  unsure (1)..(145): unsure at all Xaa locations
  Clone ID: MRT4577_14123C.1.pep
VRSSTALQRPSGRRERXRAVVITRGGGGPEVLEAQEVEDPAPLGDGEVLLQVVAAGVNRADTLQRHGRHPPPAGAPPPXPPLFPGLXCSXXFLXLGPSAPXRWAVGGXVCALFFGGGSAXLVVVPAGLLLSVPVGVSLAVAAGFP

SEQ ID NO: 229873 - protein, 452 aa, Zea mays
  unsure (1)..(452): unsure at all Xaa locations
  Clone ID: MRT4577_141240C.1.pep
SFLGNPGLXGYWLDSAPCPRIMQCIAHEEXPLEQRXMLAAIGFGSKLLAVMLVILLVPSRPHNSPVLKDVSVNKPDNLASASNNIHPKLVILHMNMALYVYDDIMRMTENLSEKYIIGYGASSTVYRCDLKNCKPIAIKKLYAHYPQSLKEFETELETVGSIKHRNLVSLQGYSLSPSGNLLFYDYMENGSLWDILHASSKKKKLDWEARLKIALGAAQGLAYLHHECSPRIIHRDVKSKNILLDKDYEAHLADFGIAKSLCVSKTHTSTYVMGTIGYIDPEYARTSRINEKSDVYXLRHCLAGAAYRQKACRRRXNLHHLILSKAAENTVMETVDQDITDTCKDLGEVKKVFQLALLCSKRQPSDRPTMHEVARVLDSLVCPAGPPPKQAQAQAQAQASEKPSTTAPSYVSEYVGLRGGGGGSALSCTNSSSASDAELFMKFGEVISRSTE

SEQ ID NO: 229874 - protein, 147 aa, Zea mays
  unsure (1)..(147): unsure at all Xaa locations
  Clone ID: MRT4577_141241C.1.pep
LSFGWLFLCGRGLVPLLFAGGGVRRPRGVGVGXRSPLCGVGVLARALLGAGPVGGAPVAVVSVAAGVWVLLRGALLVAVGLVRVSPPLPWWWSSSACACAPGWLAPSPLSACWLAPSPARCGARALGSSPPCVLPVPPAPARAPAAR

SEQ ID NO: 229875 - protein, 187 aa, Zea mays
  Clone ID: MRT4577_141242C.1.pep
PYAVRGCHDKGPTVSEALTVATLVPLGGLLLLLLGLALAGFTVGLPLATPVILLFSPVLLLIALLIGTVVTGFLTSVALGLCVMCLLTCLGNTVQHAFHYTQDYLQEARHTMADAAEHTGHKTDQVEHRIQNKAHDAGAGTGTSCCRTTSSISKSCMDACVSMSARCSRNALLCTWVTVSWYACSSA

SEQ ID NO: 229876 - protein, 149 aa, Zea mays
  Clone ID: MRT4577_141243C.1.pep
KKHGPHTKKQPQFVISKQKHKKERLPDSTTGRGRLKQKQKKDPPKKEGGPTGGGPDYHLLRDKKTTQNGVATQGAGQPPQPGGKKKPFKPRLKKRDERAEKTGSDPPNQVPPQKTPDKGGGKQKPRPDPKKPPPGAPRKGRKNKPYYNG

SEQ ID NO: 229877 - protein, 63 aa, Zea mays
  Clone ID: MRT4577_141244C.1.pep
PGEDDRDHRQDAVAVRQEHMGIPAHEELPVRTCYHPPIAPEEDRCRRGQCSVGDRRSPGRRSA

SEQ ID NO: 229878 - protein, 86 aa, Zea mays
  Clone ID: MRT4577_141245C.1.pep
PLTRPVDDAVAAVLTLTITSDDDDHDDDEKDIARREHKPRSNRSRGGGNLEQFTLSRIKIIFLSRPPTRTRFSLNHTLHHHRHIAE

SEQ ID NO: 229879 - protein, 133 aa, Zea mays
  unsure (1)..(133): unsure at all Xaa locations
  Clone ID: MRT4577_141246C.1.pep
VRPDGVTFVALLSACGQAGLVVEAREFFFQMLPVFGLPPQPEHYGCMVDLLCRVGHVDEAARLVQAMPGRPNAKVLGALLLDAHVLXRWQEDGVRLGXWAARRISELDLHDGAAYSLSNGYASLQRWDRVEEH

SEQ ID NO: 229880 - protein, 37 aa, Zea mays
  Clone ID: MRT4577_141247C.1.pep
GAEPCKYTFLYRKETTLVLQPQVTQDSPKAPAFIIYH

SEQ ID NO: 229881 - protein, 69 aa, Zea mays
  Clone ID: MRT4577_141248C.1.pep
APFYIPTGQMVERANGQELWEIPGSAQKGIFSKATRFGNSGTLSRNDDVTRRPMKFSIPYNQTPLFIFA

SEQ ID NO: 229882 - protein, 45 aa, Zea mays
  Clone ID: MRT4577_141249C.1.pep
DSRARRADWQSWCQTGLAPVLWRSRVPVRLPRVRRVRVQCCSPGR

SEQ ID NO: 229883 - protein, 56 aa, Zea mays
  unsure (1)..(56): unsure at all Xaa locations
  Clone ID: MRT4577_14124C.1.pep
PLSWLLLPFLLAAYLRXIGRGSLLGLGSSWVFSASPGAVFPRLPRLGATGGERWAT

SEQ ID NO: 229884 - protein, 228 aa, Zea mays
  unsure (1)..(228): unsure at all Xaa locations
  Clone ID: MRT4577_141250C.1.pep
MDRAELTTEQVLKRDIPWETYMSTKLITSTCLQLLRRYDHKPESQRGPLLDEDVPSYVRVFLNILRSISKEETVEYVLALIDEMLAANPKRAALFYDNSLSGEDIYDPFLRLLLKGNWFVQEKSCKILTHLISARPKLQNGMVPNGEASNSKSKLTSIHDVLKGLVDWLCSQLRSPTHPNCSIPTATHCLATLLRETYVRTLFVQADGVKLLIPLISPASTQXSIQLL

SEQ ID NO: 229885 - protein, 151 aa, Zea mays
  Clone ID: MRT4577_141251C.1.pep
RGPPPVVVGILQVGPPPPVVKVGKKRGAPRDFHRFSKTLSLPLRGVFWKSPVFQGRLFFLGPPLGGEWLPFLGPPPPNKFFCLPRGGPRDLRGCPPPVVNAASWVPCGSLGEVLSVGFWFGFCTPVYAFGFERAGAFLPQKWKMGPKLFFP

SEQ ID NO: 229886 - protein, 123 aa, Zea mays
  unsure (1)..(123): unsure at all Xaa locations
  Clone ID: MRT4577_141252C.1.pep
QSGYIFGTIWWGIALNLMAYFVAAHAVGACWYLLGVQRASKCLKEQCLQAAGCARGSAVACAAPLYYGGSPSPGVVGGDRLVWAENAQARSTXLASCDNYYYGAYTWTVMLVANPSPMERMML

SEQ ID NO: 229887 - protein, 162 aa, Zea mays
  Clone ID: MRT4577_141253C.1.pep
MASFHDLTATAVLLLLFSILSGGLAPLQVQAQQPYGSQIADCTNQHNSSGLLGYFCSGWRNSWTRRCRRGAVRRTPWSWWSGSSRGASGKTQRAVPQPGRWRSASSSCLGSRWSAGGTRRSRPAAPAVEKASCTSRVIVIANHRCHWTRNVKVPERNLTVLS

SEQ ID NO: 229888 - protein, 84 aa, Zea mays
  Clone ID: MRT4577_141254C.1.pep
PVGTPLPGAVVRPWPWTEQAAPGNIGIRHRTRARPVDVESGRSSAGSRLGSCRAGRHGEASVTTTRTQAPIGGQTAQALWREHR

SEQ ID NO: 229889 - protein, 131 aa, Zea mays
  unsure (1)..(131): unsure at all Xaa locations
  Clone ID: MRT4577_141255C.1.pep
MSWLSYVDEHLMREIEGXHLTAAALVGHDGSAXVGTPXFPELHAEVAADIIKDFDEPGXFAPTALFLAXSRXMMIHGDPGVVIRXKYVTAGITIERYGLPLIIGVYDDAMTPAPCHMVPERLXDYLIVAPL

SEQ ID NO: 229890 - protein, 97 aa, Zea mays
  Clone ID: MRT4577_141256C.1.pep
MEGEKKAAAVAEDEVVVVAAGDVSLKDLSKKLNDFARERDWEQFHSPRNLLLAMIAEVGELSELFMWRGEVRKGLAGWDEAEKEHLGEELSDVLLYL

SEQ ID NO: 229891 - protein, 81 aa, Zea mays
  Clone ID: MRT4577_141257C.1.pep
NRTVRPLKMELHHGSLKNPGCAQGQLKPEPPTKEEKARLGKKTSRRLARPGRPPKLTGTGLDGNTRKNLQLERAAGGGLGV

SEQ ID NO: 229892 - protein, 105 aa, Zea mays
  Clone ID: MRT4577_141258C.1.pep
FSKKELNSPSHNNPLSKPEKKQPAPKPPLKKPGEGPPLVAPGRTGNDSQKAVRVPPKKGFAPPKEIPGGPQGGGQHLDPNSPRGPPKWKWIPSPGPVWMPLQRGP

SEQ ID NO: 229893 - protein, 60 aa, Zea mays
  Clone ID: MRT4577_141259C.1.pep
HCLPHHESLMIAIHVGMMLMAGGRHTHHLRPCWMAANVCLTHLRSVQLWWLDITQTQVEH

SEQ ID NO: 229894 - protein, 146 aa, Zea mays
  Clone ID: MRT4577_14125C.1.pep
QIFACRLAVARGTGNNYIRIAASNNYFGRSVAGFTTTTWKMSTRSLYRRVFQQRNGSSPFGAHVAHFRFQSQSCITAQSIGASTYSSAMLTAREARRLTCIICTVVSELTVSWAVKIASADLHYNFPTKHRGANGLTYGVLGAGPV

SEQ ID NO: 229895 - protein, 124 aa, Zea mays
  Clone ID: MRT4577_141260C.1.pep
MTPPATGQGGGGHKNRTRLVLAIALPLAAATAILALAVACLYYRSRRRTTAQRDSSGKPCSPSPDDIDKSIDSLLFDLPALRAATNNFAESNKLGEGGFGAVYKGILSEGQQVAVKRLSLGSTQ

SEQ ID NO: 229896 - protein, 531 aa, Zea mays
  Clone ID: MRT4577_141261C.1.pep
MSSPCVSHQQQVRLRLRAASRLPAPDTASFAPPAPRRLRVAHAAMSAKAPLGVAPAEEGAGTPGQQAVLGQMVDDAAVWCAVHGLVVGDRANQRSGTVPGVGLVHAPFSLLPARFPASFFNQACELAPIFNELVDRVSLDGEFLQAALSRTKQVDEFTSRLLEIHDKMMSINKKEDIRLGLHRSDYMLDSETNSLPRVELGAIASSFPGLGSLVSELHRTLLKQYGKVLGLDPKRVPQNWAATQFAEALGRAWAEYNNDSAVVLMVVQPEERNMYDQYCLVNHLKESYGVATIRKTLAQVEAQGQVLTDGTLVVDGRTVAVVYFRAGYAPTDYPSEAEWRARLLMEQSSAVKCPSIAYHLVGTKKIQQELAKPNVLERFLDNKDDIAKLRKSFAGLWSLDNEEIVRSAIQKPNLFVLKPQREGGGNNIYGQDLQDTLIKLQKEQGEALAAYILMQRIFPKASLTPLVRGGDCFEDLTISELGIYGAYLRNRDKVILNNQSGYLMRTKVSSSNEGGVAAGFAVLDSVLLTDE

SEQ ID NO: 229897 - protein, 188 aa, Zea mays
  unsure (1)..(188): unsure at all Xaa locations
  Clone ID: MRT4577_141262C.1.pep
MATKILALPCASLTSYLLDLHQMQLIDCQHGHDIVSLRAHYATVDSHQLLQRVCEHAHQRSYSLRLALPASALQQPIAQXDSMCLGQLTLQTIGTQQQPQQMLSSLTHLSDGNPVTYLRQQLXAYNPLALPNAGAYQQQQHAQQXLPVLTRLAMGNPAVYLQLLSSIPLAVGSAPTDLQQQLLQQIVP

SEQ ID NO: 229898 - protein, 55 aa, Zea mays
  Clone ID: MRT4577_141263C.1.pep
VHRIAINQSVMSIHIKQLFLHQVCYISSTGILLNKAPFIYCQAKTKVDSLQNQIT

SEQ ID NO: 229899 - protein, 94 aa, Zea mays
  unsure (1)..(94): unsure at all Xaa locations
  Clone ID: MRT4577_141264C.1.pep
RNSARARAFFFRGIIADEEWLHFEEAVQHDFVTGSGKKLSSLLDXCLSEYDTEAIYLDXEGSISLSRQQLASKLLQIVTSAXYQSFLGHLHTRT

SEQ ID NO: 229900 - protein, 86 aa, Zea mays
  Clone ID: MRT4577_141265C.1.pep
PLCPPLLRGSSAPKSLQGSPPLVLPSRVCHSFSSTTPCLSTISVSVCVSSSFPMEVCLSAFVAPCLAFTLRSPRVLVPSFLHPSSH

SEQ ID NO: 229901 - protein, 83 aa, Zea mays
  Clone ID: MRT4577_141266C.1.pep
PKPSARGSELICVSKQDYHPMAPGAQVHRRDPRALRPRPLVILDRGGGHIPEFLAPWRSLPGHCPQHDYSSSSRSPLCLDRIA

SEQ ID NO: 229902 - protein, 67 aa, Zea mays
  Clone ID: MRT4577_141267C.1.pep
IGPCVTSSSCILLCSNRDGWSLIHSGIVFDNYVEGVIDLGDVTEHDQKNFYSKVDTEHAGYGKTYSG

SEQ ID NO: 229903 - protein, 44 aa, Zea mays
  Clone ID: MRT4577_141268C.1.pep
DAHVWLVKNWDALLPVEQDNRGLDNLCPSVPFQKGSPIIVHMHH

SEQ ID NO: 229904 - protein, 79 aa, Zea mays
  Clone ID: MRT4577_141269C.1.pep
SLDGVALPPMLVVAAARDLLRDRAADYAARLKARGKPVELVEFEGQHHGFFAVEPYGDAGSEVVRLVKRFVYGNGGASD

SEQ ID NO: 229905 - protein, 198 aa, Zea mays
  unsure (1)..(198): unsure at all Xaa locations
  Clone ID: MRT4577_14126C.1.pep
MAATTVASRKRGTAAFLDDPFSFPGDLPCLQTKRGRCSSSIVAADLGLSFPLEFDPVEALHLIFPGEDRQVLQNHLQASGNVLDAAIRAYKDYLAERSKESASAINYVPSDNEEGDSILSESESDVYLKEETIPTNCSGWAEVIVKEMSSASDLTDAKNRAFKILKLFEKSADRSSSPDXKERSEQEHEIVKQMLGSL

SEQ ID NO: 229906 - protein, 71 aa, Zea mays
  unsure (1)..(71): unsure at all Xaa locations
  Clone ID: MRT4577_141270C.1.pep
MPVKGGSKCIKYLLFGFNFIFWLAGIAVLAIGLWLRFDSQTKSIFEQETNHSSFYTGVYILIGAXGLMMLV

SEQ ID NO: 229907 - protein, 61 aa, Zea mays
  Clone ID: MRT4577_141271C.1.pep
SYTKLTSLADVVQRHVWGDPGETQLIRLAALPPFAGWRSPHTAPFWSPLLHQLAASGNGDW

SEQ ID NO: 229908 - protein, 69 aa, Zea mays
  unsure (1)..(69): unsure at all Xaa locations
  Clone ID: MRT4577_141272C.1.pep
FMKRGQGWRERWGHAGPRGASRAMQRDPWRPLQQYGYLKILCPSRXIQRVGWKGKGLVWPWMLLGPRAT

SEQ ID NO: 229909 - protein, 398 aa, Zea mays
  unsure (1)..(398): unsure at all Xaa locations
  Clone ID: MRT4577_141273C.1.pep
MRPTRSAVSATALLLLAVALALAATAAARHSYTTTTTRVPAPAERADEEVRRMYEAWKSKHGRGGSSNDDCDMAPGDDEQEEEDRRLRLEVFRDNLRYIDAHNAEADAGLHTFRLGLTPFADLTLEEYRGRVLGFRARGRRSGARYGSGYSVRGGDLPDAIDWRQLGAVTEVKDQQQCGGCWAFSAVAAIEGVNAIATGNLVSLSEQEIIDCDAQDSGCDGGQMENAFRFVIGNGGIDTEADYPFIGTDGTCDASKEKNEKVATIDGLVEVASNNETALQEAVAIQPVSVAIDASGRAFQHYSSGIFNGPCGTSLDHGVTAVGYGSESGKDYWIVKNSWSASWGEAGYIRMRRNVPRPTGKCGIAMDASYPVKDTYHXDPGTATATAAAMDVIKMVLA

SEQ ID NO: 229910 - protein, 167 aa, Zea mays
  Clone ID: MRT4577_141274C.1.pep
HHVSSLGPRVRPRVRRSLRKINVAHSLHEIEACVLSKLSTIGETLTVLRLDGLEIFASNLQAIGSTCKNLVEIGLSKCNGVTDDGIVSLVARCRDLRTIDVTCCHLLTNAALAAIAENCRKIECLRLESCPFVSEKGLESIATLCSDLKEIDLTDCRINDAALQQLA

SEQ ID NO: 229911 - protein, 119 aa, Zea mays
  Clone ID: MRT4577_141275C.1.pep
VSLVSLQILWKTTRKFVLPARLSKDYCVGLTFVVGKGRIRVERDPALCGRLNEEVGHLGGVTEPRDKSCVSCVLAHCVCSCSSFSHHSVEDLFISFWCVDFEKCPFLRILLLLKPLWII

SEQ ID NO: 229912 - protein, 89 aa, Zea mays
  unsure (1)..(89): unsure at all Xaa locations
  Clone ID: MRT4577_141276C.1.pep
RLVSKDGKSKGIAYIEFKTEADAEKTFEEKQGTEIDGRSISLYYTGEXGQNQDYRGGKNSTWSGKKLGLLQGFRIGGGNSFVSLYFISL

SEQ ID NO: 229913 - protein, 36 aa, Zea mays
  Clone ID: MRT4577_141277C.1.pep
CILDFGYWYYLKRRRNIKVEDNKINFADCPLDEWSV

SEQ ID NO: 229914 - protein, 71 aa, Zea mays
  Clone ID: MRT4577_141278C.1.pep
QIFLLVTPPFKKIQQIPIVFLAMQKKIGGGTHAWVKMVVAPRIKFYWGLGVLENSNFTPLGTFFFRFPSWR

SEQ ID NO: 229915 - protein, 92 aa, Zea mays
  unsure (1)..(92): unsure at all Xaa locations
  Clone ID: MRT4577_141279C.1.pep
WRVSCEAVWLKATSQIFSEGELDYRWDPSLIHAQSMVAIWAXQVVLMGAIEGYRVAGGPLXXVVDPVYPRSCFEPLGLADYTDAFWELNVKE

SEQ ID NO: 229916 - protein, 72 aa, Zea mays
  Clone ID: MRT4577_14127C.1.pep
TAAECLDCLTHYEYNVCSLCPPSTGIYGMDFYDLLQRVCYRAERRRSCKMRVGIQHRYTKEDSIKCFHVKNE

SEQ ID NO: 229917 - protein, 67 aa, Zea mays
  unsure (1)..(67): unsure at all Xaa locations
  Clone ID: MRT4577_141280C.1.pep
MVKIWCIGAGSEGGPTMXEVGLKCPDIEVAVGDISTPQIEACNSDTLSSYQPRLDDDVMQCRTWNVI

SEQ ID NO: 229918 - protein, 159 aa, Zea mays
  Clone ID: MRT4577_141281C.1.pep
FRFIRAPTSCYNLRGGGSEAARREVQDDEQQQWRHDDEAALTEFLSSLMDYTPTIPDELVEHYLGRSGFHCPDLRLTRLVAVATQKFLSDIASDSLQHCKARVAAPIKDNKSKQPKDRRLVLTMDDLSKALREHGVNLKHAEYFADSPSAGMAPSTREE

SEQ ID NO: 229919 - protein, 122 aa, Zea mays
  unsure (1)..(122): unsure at all Xaa locations
  Clone ID: MRT4577_141282C.1.pep
IRLELDLTAICLLHAHTDSPGGLLKSDVGNRTALDNCYLLLESINQIQYRTTNLPTASNTIAGXPTTKANEHSWPCSDRTISNALTTGTNHIKRSLLTRTTTNMDDISRGERLFYSKTRIFA

SEQ ID NO: 229920 - protein, 153 aa, Zea mays
  Clone ID: MRT4577_141283C.1.pep
MMNNNSGGGAGGPGGGMGTGVGGGGDGRHDDEAALTEFLSSLMDYTPTIPDELVEHYLGRSGFHCPDLRLTRLVAVATQKFLSDIASDSLQHCKARVAAPIKDNKSKQPKDRRLVLTMDDLSKALREHGVNLKHAEYFADSPSAGMAPSTREE

SEQ ID NO: 229921 - protein, 128 aa, Zea mays
  unsure (1)..(128): unsure at all Xaa locations
  Clone ID: MRT4577_141284C.1.pep
SNXARVKTKDDATNDGFLGSCIGTAERWALTGAYLIFGWLDVVEDMAPLIFDCEDKCHSFVSQLRNKTGPYLLKCVKSLFKTLEQPNQDKDFVIDLHNRLLNWDKNVQGCEIFGDVILEMNKKFNLPL

SEQ ID NO: 229922 - protein, 146 aa, Zea mays
  Clone ID: MRT4577_141285C.1.pep
PAGLLLSLPNPPNAHLPLHTQNTPHQASREGQKPGTLGEGRRTFLRAETCRRSLQAPPDSHLTPPPTNSSSPSGEAGRPSTVRWGARKALERGQGHIVHPLPPRGRPHRRQDRGAHQQRDVSRSPDEHELENIHARRGGRRGGAGG

SEQ ID NO: 229923 - protein, 87 aa, Zea mays
  Clone ID: MRT4577_141286C.1.pep
WAPLRVKIFLWLAWRRRLWTADRRRRHGLDARTTCHLCNTAEETCDHLLATCSFSLRVWDGILSQLGLHKPSLTDCNSVLGWWQRVR

SEQ ID NO: 229924 - protein, 149 aa, Zea mays
  unsure (1)..(149): unsure at all Xaa locations
  Clone ID: MRT4577_141287C.1.pep
AQQLQQLVLLVITRVLXATFFPLYEQQXFFPFPPLFPLTPGVFLRQHFFPFRRVGCAFFYQQHFFLFTHWAALTPGVFLPQQIFLPFSQLGAASGVSFLTQQRLVLFSPGFGATPAPLLQLPHLLPFVPLVLTTPAASSPQPLWGGALF

SEQ ID NO: 229925 - protein, 129 aa, Zea mays
  unsure (1)..(129): unsure at all Xaa locations
  Clone ID: MRT4577_141288C.1.pep
RQSEILHAEQNDYKTADIYLVGAFEAWGSLDDPKAIFILKYILXCKIMANQTDYVTGIISPIAVLKYLGPNNHAMNADSYTYSNRSLKYFETALRDYKSHLYDDHIVHRHISSLYDTLLXHNLHRITEP

SEQ ID NO: 229926 - protein, 148 aa, Zea mays
  Clone ID: MRT4577_141289C.1.pep
QGPGRNGGDPRVREAARPSFVVRAAADPSGPIWFPGSTPPPWLDGSLPGDFGFDPWGLGSDPESLRWNVQAALVHWRLSMLESAGIFIPECLTKTAVLNTPFWYTVGEHTHLRRWTTVFIIELRLIGWAEGRRWADMVKPGSVHTHPI

SEQ ID NO: 229927 - protein, 58 aa, Zea mays
  Clone ID: MRT4577_14128C.1.pep
TRASSTTRTVKTSAHLPNYNTTLGLPTQPPAGSQQPTHQPLSHPSQPRPSPWNKLPPP

SEQ ID NO: 229928 - protein, 233 aa, Zea mays
  Clone ID: MRT4577_141290C.1.pep
MAAAADLEPQLGISPATPDIVRKLARPSGTTTAVGYCCTALYTSTAAGPGKVDGDGLASVPLHAHEHSQSAALDNLVQVDCDPVGTQESSTLPALVGESSGKVAQQEQQHKEGVDSARDAGAASPAPTSTPENMEPTPRRRGKKSTKGVQRLKVAKDKVMKLKVTTPSTVKKKKMTEDDIQHIGAHRSNSARRKLDLDLHSSESKTCFSRAELMINLKCIGKEYGLISELTTP

SEQ ID NO: 229929 - protein, 152 aa, Zea mays
  unsure (1)..(152): unsure at all Xaa locations
  Clone ID: MRT4577_141291C.1.pep
GKKNGGADQSATTGRFTDLHASNGCYDTRATLDKGXRLIPLCCXYGCTVAXFPQPFGAGYPRGSTCGFEICISITNPXDKGKVRISHKNYAGAIHMTGXDVTLLFAMAVKYKELLLMLVIDXKRLTXYSMELIFDSLGQCMHKHRKLMPTLL

SEQ ID NO: 229930 - protein, 55 aa, Zea mays
  Clone ID: MRT4577_141292C.1.pep
VKELKKGRFPMFSMVGVLVRAIVTGKDRLENVLVDIVVPVLVKVWAYATKFVPGN

SEQ ID NO: 229931 - protein, 237 aa, Zea mays
  Clone ID: MRT4577_141293C.1.pep
MSSLHATRAELGLVVLYLNKAEARDKICRAIQYGSKFVSNGQPGTAQEVDRSTTLARKVFRLLKWVNDLHALISPPAKGTPLTLVLLGKSKNALLSTFLFLDQFVWLGRTGIVKNKEATDRVARLSLYCWMASSACAGLVELGELKRLSRSMRKLARELRDTDKYENEQYQDKMRQSDERLLALVKAAMDVVVAVGLLQLAPKKVTPRVTGAFGFVTSLISCYQQLPSRAPVAKVKV

SEQ ID NO: 229932 - protein, 166 aa, Zea mays
  unsure (1)..(166): unsure at all Xaa locations
  Clone ID: MRT4577_141294C.1.pep
PSQRTPPLGEAKAPDKALANVQKKHHVSIKNTQRDAIQDIRKQSTLQQTTNSNRPSTQEVXGGKTGKGAGHLDHVSKTQEKTPTDAQQDLANKCPGGDQXDPPTDDEDHPHAEEKKNTAQDPELWEMAFKDRKXDENKVAVSSAEHRRTXGHNHEETHDRTPAATT

SEQ ID NO: 229933 - protein, 64 aa, Zea mays
  Clone ID: MRT4577_141295C.1.pep
TLKQVDMDQTGFLKGRSISENFVYATELVQCCHKRRTPTVVLKLDFAKAFDSVSWNGLLAVLRA

SEQ ID NO: 229934 - protein, 237 aa, Zea mays; identical to SEQ ID NO: 229931
  Clone ID: MRT4577_141296C.1.pep

SEQ ID NO: 229935 - protein, 113 aa, Zea mays
  unsure (1)..(113): unsure at all Xaa locations
  Clone ID: MRT4577_141297C.1.pep
RLTRMLPWRQRPTPDPFSLRSTSVLYSSSTPSIATRDILTFRGGIILTXFSNAWPSRNRECRASEHAVTSTSMQTLVCTSAQARSSHTCTSTGSYEHSVHHPQRNANDQVRPS

SEQ ID NO: 229936 - protein, 52 aa, Zea mays
  Clone ID: MRT4577_141298C.1.pep
MRAILSIQSHIIDSKLTILLNIFYSTQNHLNERAAYSTINDSTTAVKINSSI

SEQ ID NO: 229937 - protein, 30 aa, Zea mays
  Clone ID: MRT4577_141299C.1.pep
LTINLRKRSQYIVLDVINLIILAEKTLPIT

SEQ ID NO: 229938 - protein, 55 aa, Zea mays
  Clone ID: MRT4577_14129C.1.pep
LKNHAFDMRWTTCSGTHKLHGQHSIEEVQDVKMASQDMHGLLSLNAKFQPGPVLS

SEQ ID NO: 229939 - protein, 64 aa, Zea mays
  Clone ID: MRT4577_1412C.1.pep
VRTRVYDRLLRNGGLTGYISTQVVGTTTCERRANRRPQDTTEKKTLGHHRIPRQEQVLVLPEEV

SEQ ID NO: 229940 - protein, 60 aa, Zea mays
  unsure (1)..(60): unsure at all Xaa locations
  Clone ID: MRT4577_141300C.1.pep
YCLAXQATQLGXXLXXXTLVRTLVNLMSLPLSHVFFNNITVGIRRILHLHIRIIRVRIQA

SEQ ID NO: 229941 - protein, 59 aa, Zea mays
  Clone ID: MRT4577_141301C.1.pep
SIMESPGARHLYGQTVFRSVYHCRDLDKKGSCTRRVTLETFLARRRKRHYLSFYIATPG

SEQ ID NO: 229942 - protein, 119 aa, Zea mays
  Clone ID: MRT4577_141302C.1.pep
PRPNRCSHVAHAAHPCPRRRLNPLPHAGSIWSPSTPFPSPSPSPSHAPTPPLPPPFAPCCICSHAVARHLVPRRAVFVSLPAEEPAWSHCRDCDPFLSFEGSKIKRWRPSDLALRVLQG

SEQ ID NO: 229943 - protein, 83 aa, Zea mays
  Clone ID: MRT4577_141303C.1.pep
CQKLCITIDFNVKPVDCVRSPNMKNMRQLIRFSMDPPLFTNHQNLPFKISINSKYTGISLFIENHVWFICFKQERTFFPSLGQ

SEQ ID NO: 229944 - protein, 87 aa, Zea mays
  unsure (1)..(87): unsure at all Xaa locations
  Clone ID: MRT4577_141304C.1.pep
MGKGFASYLAMKTGPEGGDGAXXFAQGALIDADLRNLAFAARKLANHAFVLGGGLGFGPTFLKWVAFLAEVVLLILDRTNXWKNNML

SEQ ID NO: 229945 - protein, 141 aa, Zea mays
  Clone ID: MRT4577_141305C.1.pep
ASFVALRNLSWSEVLRKGTRHHCKELSRFCDQKMGCVASALMNWSRPCWAEPLLQCFFVACKCVWLLHLLAFSFSPPLAILRVEEGRAFEQTYMEDVLLDMQRSQDHEPPPSARVKLMVVPGFYVQDRLLKCRVLCSYISG

SEQ ID NO: 229946 - protein, 109 aa, Zea mays
  unsure (1)..(109): unsure at all Xaa locations
  Clone ID: MRT4577_141306C.1.pep
PPRFPQWACXHAPMGPPVPGPMVAPAPVGTPVMFPPGHPSPYVPPVGNPAPPPKMPQCLFPPGIWAVAQLHPFAGFFLISVRILGSQSYLSPLSSFPGFLFFSVPNKYL

SEQ ID NO: 229947 - protein, 66 aa, Zea mays
  unsure (1)..(66): unsure at all Xaa locations
  Clone ID: MRT4577_141307C.1.pep
HRYSFSSGLRACNAQYWWVRHYIIVTSSRSQAYEHQQGDHXKKYLSARCTGQVDKMSKLLYTACVT

SEQ ID NO: 229948 - protein, 53 aa, Zea mays
  Clone ID: MRT4577_141308C.1.pep
KIQTKRAFIEIPQLPTLPKGLKVAIHPPPLTEEPSGAHKILPTPLNREYLGPR

SEQ ID NO: 229949 - protein, 70 aa, Zea mays
  Clone ID: MRT4577_141309C.1.pep
VVKEQTHAHVPVGFSFEPINKPMSREIDPNSYPNRVTHQVLGKGYTLQSLIGWESNHWCMGEIHVQKPLR

SEQ ID NO: 229950 - protein, 175 aa, Zea mays
  unsure (1)..(175): unsure at all Xaa locations
  Clone ID: MRT4577_14130C.1.pep
TTHIFSRVSVEQPMXLRRTVRGAQLGEGNKGAMGDGELXSRAGGCRGNSAARSCAAERGSRAEASRYGEGTAEXARRHGDMLLLCLLGLQAVGGVENQQGAARLGNRGAMGLFQALKQWRAEGSGWGDFSGRHGWERLLQGSSARAADGDGSRRPWEGKAPARHGQQKGGRKGRS

SEQ ID NO: 229951 - protein, 117 aa, Zea mays
  Clone ID: MRT4577_141310C.1.pep
LRVVLRPGRLPPQAFAGVPPVDGPVRYSSSPLVDASRFFSARRWCGALLVLSGSFLCLLSAFVPRSVSLSLVSVFCLRPWGFPRRVVSLCPRPPGPSSCGVQKRLSLGTQRPAGRPL

SEQ ID NO: 229952 - protein, 37 aa, Zea mays
  Clone ID: MRT4577_141311C.1.pep
MALSCTVPWRGAVSSVVEVEASGVAVPHVELPTATSR

SEQ ID NO: 229953 - protein, 97 aa, Zea mays
  Clone ID: MRT4577_141312C.1.pep
MPNFGERVHMCTIIFFTVNVSGFLIRLYATLISLSMCCSLVILITLSIENFDLHIKIQNSRQHLNNSDLENTNHRSIEKLLRYCGNVAACERSGTFL

SEQ ID NO: 229954 - protein, 99 aa, Zea mays
  Clone ID: MRT4577_141313C.1.pep
KIPHLVQRKFAPFSTKTKVMNRFPILRKFKVFKIWVFFFKQQLKKNGPKNCNLLFRLLLVLEEPVQKLLLGPKKSLLSDQTQNPVVVAPLVGIPRHELF

SEQ ID NO: 229955 - protein, 97 aa, Zea mays
  Clone ID: MRT4577_141314C.1.pep
MPNFGERVHMCTIIFFTVNVSGFLIRLYATLISLSMCCPLVILITLSIENFDLHIKIQNSRQHLNNSDLENTNHRSIEKLLRYCGNVAACERSGTFL

SEQ ID NO: 229956 - protein, 203 aa, Zea mays
  Clone ID: MRT4577_141315C.1.pep
MSANSLNKIAPNSPSRQNPSEIETSIASALTDLENNVPDLKASLRPLQFVSAREIEVGHGRKAIVIFVPVPLLSNWHKAQQRLTRELEKKFSDRHVLIVASRRILPRPKRSNRSRTSQTQKRPQSRTLTAVHDAILTDLVYPVEIVGKRLRTREDGSKILKVVLDEKERGGVDYRLDTYSEVYKRLTGKGVNFEFPQSQQTDY

SEQ ID NO: 229957 - protein, 128 aa, Zea mays
  Clone ID: MRT4577_141316C.1.pep
MIANIVSKWKAACVGPYNLRKALGGKRLLPYRTHDIIYHRHAYLCSHTEVDIGSKSNHKQSYYISFPGKALYRDTPSTSTSFQNTSHDISHICAMLIPIQSLHQVIISIYNSSSRRCVIETTMHDRCS

SEQ ID NO: 229958 - protein, 117 aa, Zea mays
  Clone ID: MRT4577_141317C.1.pep
PFFLCPMVPQLLSQTHFLTNFESSPPSPSHSFSKSLSLSCSNLFNLDSGSETLLFCLSFSISLIDLRFDLISSLLLPRLMFNISAISIKALSSKFKIEPTSPRTRGRTRGRTRGSKG

SEQ ID NO: 229959 - protein, 328 aa, Zea mays
  Clone ID: MRT4577_141318C.1.pep
MSWCTIESDPGVFTELIQQMQVKGVQVEELYSLDVGSLSQLRPVYGLIFLFKWIPGEKDERPVVRDPNPNLFFAHQVITNACATQAILSVLMNRPEIDIGPELSQLKEFTGAFTPDLKGLAISNSESIRTAHNSFARPEPFISDEQRAATKDDDVYHFISYLPFEGVLYELDGLKEGPVNLGQCDGADDLDWLRMVQPVIQERIERYSQSEIRFNLMAIIKNRKEVYSAELEELEKRREQILQEMNNASSTESLSSSLTEVISAIETVTEKVIMEEEKFKKWKKENIRRKHNYIPFLFNLLKMLAEKQQLKPLVEKAKQQKSASPSTS

SEQ ID NO: 229960 - protein, 52 aa, Zea mays
  Clone ID: MRT4577_141319C.1.pep
KSTTSYGLGAPFSSQTHAAAVTGARGMKPTSFGLVTFQRATDMRIHRHALIL

SEQ ID NO: 229961 - protein, 151 aa, Zea mays
  unsure (1)..(151): unsure at all Xaa locations
  Clone ID: MRT4577_14131C.1.pep
LCWFETALRCSNLSGQGHAGXLGLLRRHNAPNDRLXGGGRSHLLNMLDXWSSHTAAGAGVNPAPTVPYTDYSNHLGPGYTLHMQPHXRRLPATTEDLXNIRNMITXNLSNIKHVPRTPFHEPPYEPGSADENYWDMNKESPHGSKILSERA

SEQ ID NO: 229962 - protein, 69 aa, Zea mays
  Clone ID: MRT4577_141320C.1.pep
SFFFSFFFFPDILVWLKHKIFKFKPQMSLGLVPQSQLKERWLEPNLRGETFPGAKGRIRSTTNRLYRSM

SEQ ID NO: 229963 - protein, 109 aa, Zea mays
  unsure (1)..(109): unsure at all Xaa locations
  Clone ID: MRT4577_141321C.1.pep
GPNTVKAKPKGGDTNTKPTKPKTKANRSKVKNCYPVKIPNTKPGRKKKEPKPKKQKKNQNKKKKNENTAPKPKKKTAKPAKKRNKXQKKKRARQRKKKICQWSLNNTQG

SEQ ID NO: 229964 - protein, 103 aa, Zea mays
  Clone ID: MRT4577_141322C.1.pep
MSCRRLTRLSIDSHPSPMLDAPLLCITFAYQIQQPHVPELVFRDSSIALTRTESGITFDLNGIDGDQEWKKEAQTPVGVPAVHQWKIMRITSDQPILNYHYSF

SEQ ID NO: 229965 - protein, 47 aa, Zea mays
  Clone ID: MRT4577_141323C.1.pep
NEVGYLIRRVSSSRISIGASPCLKGHPPQHRDRFYLKLAAEEEREFR

SEQ ID NO: 229966 - protein, 65 aa, Zea mays
  Clone ID: MRT4577_141324C.1.pep
LFELLARFCPRVGGGDIRGVSPETGRFPLPPPRKTVTKKDFFGAVNKVLKGYPKFSAPPQYMGSN

SEQ ID NO: 229967 - protein, 132 aa, Zea mays
  Clone ID: MRT4577_141325C.1.pep
LVLCFVVVCVLVVVGAFAFEAKEEETGADKAESMPACGGANLTGVEKNPGVSVIPRRSRGLSLGFPGGTFSRFFAAKNKVDVQPWHPRFLPVVPGVKNRTTGFCPCYYEEATSRYLNAYCLVGTRRFFLRSR

SEQ ID NO: 229968 - protein, 89 aa, Zea mays
  Clone ID: MRT4577_141326C.1.pep
DELNRALVEIDDLAKDLEDVAVQTQWEVENMAKSEVKEQPQQEEAVEDLLIHDGSEDELLIDEESPINYEDLVGYDDGRDYSTDDTYPY

SEQ ID NO: 229969 - protein, 49 aa, Zea mays
  unsure (1)..(49): unsure at all Xaa locations
  Clone ID: MRT4577_141327C.1.pep
GDQAPARADRGQAATLSPRAVRAAVSLXXICGKXXALGLLAKRPARAAH

SEQ ID NO: 229970 - protein, 695 aa, Zea mays
  unsure (1)..(695): unsure at all Xaa locations
  Clone ID: MRT4577_141328C.1.pep
MRYGSTASKTSSPSDMMRSEVTEAAKLLNLWNEWGLQILVLVSFGLQVFLLVFGGVRRHSSSTALTFFLWSAYLLADSTAIYTLGHLSVDSMSDEHQLVAFWAPFLLLHLGGPDNITAYALEDNALWLRHLQTLAVQVLGAAYVIYEYIASRGALLFLASLSMFFAGLLKYGERIWALKCGNISSIRSSISIRKIKTDPYQLLTLGTSEEDLLLGAHSQFDICKGVFADIIMLPTPLVRSQPKPRSVISYLGEDLYKLVEMELSLMYDFLYNKHAVIHTWYGCYIHFDSRFGTGTTFLLCRXELSXNNGNRYSRVDVAISYVLLVGALVLEIISVCRAVLSTWTCSLLHRRGRGWEWSLHIVTSLGQRVHPASRRLWSGSIGQYNLFHLCTRNTNEIGSRLATKLGLEDWWNKMHFSGTFPHANSSLSIQDIKKLVLQALRSKEQALQHQDTDLNSRGSFILKRMEAYKDFARWSVNIDFDESILVWHIATEVFIRKSKARHAKELLEATXGHCRTRFGDKDNPVAPSPASWNPYYILKELFHHDGPSCSRIPRREKLAEVAWSFSQFALGSVKAPNPHGDSIRDSANMYAILLANELMSIELQWQDQRDTLELILGVWVEMLLYAADHCSQESHARQLSNGCEFITIVSLLAHHFKYYSGAFRDADNLGEDKPASENNPVTVNNPMSENCANLV

SEQ ID NO: 229971 - protein, 150 aa, Zea mays
  Clone ID: MRT4577_141329C.1.pep
IFFGLIRLLKNGTVVWVFFKEIIPFLCSGPFWGISILKCGPPPMNKALGGPLCGVHFPKGKPFPFLTMFSLPKIICGPPGFLVPGKGPDFGRLVISGGISGPLIFCGGPAFFSIFFFWGQRIFPPPKSPLGGAPFWFLPFLFLMWALGWG

SEQ ID NO: 229972 - protein, 173 aa, Zea mays
  unsure (1)..(173): unsure at all Xaa locations
  Clone ID: MRT4577_14132C.1.pep
PPPLPSIFFSPLPGPPLGVGHFVPFGPPPIPLLWGPLIFFLAGFVLAGWPKFFPPPPIPPITEREGAWSPLSGFSPPLPIFFXGFFPPPILVSPAQMALGPMGPLSQSRLPVCADFPVVGPPPPQTPPFFFPPGPPPGARKKKKKKKKKKKKKKKKKKKKKKKKKKKKKKKKK

SEQ ID NO: 229973 - protein, 56 aa, Zea mays
  unsure (1)..(56): unsure at all Xaa locations
  Clone ID: MRT4577_141330C.1.pep
HAHISSMIKVMIGVECVDQPPVYNMQLLFLCTQFNSCLSNHEKXVVFNRDSGSXFT

SEQ ID NO: 229974 - protein, 148 aa, Zea mays
  Clone ID: MRT4577_141331C.1.pep
MMRSEVIEAGKLVNLWNEWGLQILVIASFGLQVFLLVFGGVRRHSSSTALTFFLWSAYLLADSTAIYTLGHLSVDSMSDEHQLVAFWAPFLLLHLGGPDNITAYALEDNALWLRHLQTLAVQVLGAAYVIYEYIASRGALLFLASLSM

SEQ ID NO: 229975 - protein, 80 aa, Zea mays
  Clone ID: MRT4577_141332C.1.pep
FGVSGVGALGPRVGRSGLVPGVSAVVSCGLVFVLAVFNRVVVAVGVRASLEHGLRRCRPLGCRSRSSGSHPVILLRSSGP

SEQ ID NO: 229976 - protein, 78 aa, Zea mays
  unsure (1)..(78): unsure at all Xaa locations
  Clone ID: MRT4577_141333C.1.pep
VKRTSTRPDWEAAKWAAKVXRSSAHAXSQSAIVKTTMQSGHFGEGGRLTQXDETSFECACVMNALGVDDVAEMYRAHA

SEQ ID NO: 229977 - protein, 135 aa, Zea mays
  unsure (1)..(135): unsure at all Xaa locations
  Clone ID: MRT4577_141334C.1.pep
MRYGSTASKTSSPSDMMRSEVTEAAKLLNLWNEWGLQILVLVSFGLQVFLLVFGGVRRHSNSTALAFSLWSAYVLADSTATYTLGHLSVDSRSNEHQLVVFWAPFPLLHLGXPDNITAYALEDNALWLRHLQILA

SEQ ID NO: 229978 - protein, 334 aa, Zea mays
  unsure (1)..(334): unsure at all Xaa locations
  Clone ID: MRT4577_141335C.1.pep
DWWNKMHFSGTFPHANSSLSIQDIKKLVLQALRSKEQALQHQDTDLNSRGSFILKRMEAYKDFARWSVNIDFDESILVWHIATEVFIRKSKARHAKELLEATEVLSNYLMFLLVVRCIILPGAARHNIHLTSCEQLEGHCRTRFGDKDSPLAPSPVSWNLCYIIKELFHHDGPSCSRIPRREKLAEVAWSFSQFALXASLTIQLKNISLGSVKAPNPHGDSIRDSANMYAILLANELLSIELQWQDQRDTLELILGVWVEMSLYAADHCSQESHARQLSNGCEFITIVSLLAHHFKYYSGAFRGADNLGEDKPASENKPVTVNNPMSENCGNLV

SEQ ID NO: 229979 - protein, 137 aa, Zea mays
  Clone ID: MRT4577_141336C.1.pep
MSAATEVAPVQQPSHPAAAGWLGLGLLFQILLRIIRSSWAQLLSFVRLRHRLLPVTASPELAFVQLPPEAPADASPPPLRRLMVRTSMPSACWAREMMVTLVVWTFGGPRISWKLELYMGLFVIRLVATVHSWPPLP

SEQ ID NO: 229980 - protein, 149 aa, Zea mays
  unsure (1)..(149): unsure at all Xaa locations
  Clone ID: MRT4577_141337C.1.pep
STTSCTHCANCSNRSKNSPSPQKPTKDALFLALSLLYXATTAYXVKPTXTGPVHPTSPVRSNPSPYSHGSCPIDALNVKGRANMLGLSKAALPQYEQCCTMMQALADLNALLCLCTAIYANIITIHLKTTLKLHFIIHNCNKICPEDFT

SEQ ID NO: 229981 - protein, 81 aa, Zea mays
  unsure (1)..(81): unsure at all Xaa locations
  Clone ID: MRT4577_141338C.1.pep
MTCGSWECICGVSFSCCSSCNCMFLDVETAVVSIIKTMVLAVPTTKASAGGFXMRSPXGGGFDCNTCNCCTSCAFFCSSCN

SEQ ID NO: 229982 - protein, 102 aa, Zea mays
  Clone ID: MRT4577_141339C.1.pep
IMSFTPACQHGSPYRLHGRGPYQAASFQSRAIHVVHLCIQVHQYAPASYSICHTGQRPPAWPLVKYVLILAQLLSCANTITTIPQGKRCSHGKKGSTGPRAE

SEQ ID NO: 229983 - protein, 118 aa, Zea mays
  Clone ID: MRT4577_14133C.1.pep
IYMIAFPTRRAYHDARQRDCRLEFVFLLAQSDTSHELLVERVERCHHCHLSAEVCYHRALLLLRLYCPLSFSALSPYSYSCHPPRRDCGRHYSLTFTHWMALASRTHPEMARPAHMPL

SEQ ID NO: 229984 - protein, 135 aa, Zea mays
  Clone ID: MRT4577_141340C.1.pep
FPGRPTRPPTRPGDTILGYRAVQVNWKDLDYCNVCDMDEEYEDNLFLQCDKCRMMVHARCYGELKQLDGGLWLCNLCRPGAPRVSPKCCLCPVTGGAMNPTTDGRWAHLACAIWIPETCLKDVKRMEPIDGLSII

SEQ ID NO: 229985 - protein, 148 aa, Zea mays
  Clone ID: MRT4577_141341C.1.pep
MAVSVELPKEYGYVVLTVVAYAFLNFWMSFQVGAARKKYKVFYPTMYATESENKDAKPFNCVQRGHQNSIEMMPLFFATLLLGGLQHPVVAAALGLLYTVARFFYFKGYATGVPENRYKLGGLNFPAIMGLIICTASFGINLVIREAI

SEQ ID NO: 229986 - protein, 75 aa, Zea mays
  unsure (1)..(75): unsure at all Xaa locations
  Clone ID: MRT4577_141342C.1.pep
MTKRTKNAGIVGKYGTRYGASLRKQIKKMEVSHHTKSLCEFCGKFAVKXRKAIXILWCMVCGKVNAGDAYTIYTA

SEQ ID NO: 229987 - protein, 34 aa, Zea mays
  Clone ID: MRT4577_141343C.1.pep
GTIPFSFYINRLIRVMVKTAPATMGEYETLLINH

SEQ ID NO: 229988 - protein, 148 aa, Zea mays
  Clone ID: MRT4577_141344C.1.pep
MAVLVERTKEYGYVVLTVVAYAFLNFWMSFQVGAARKKYKVFYPTLYAIESENKDAKRFNCVQRGHQNSLEMMPLLFVTVLLGGLQHPVVAAALGVLYTVARFFYFKGYATGVPDNRLKLGGLNFLAIIGLILCTASFGINLVIREAI

SEQ ID NO: 229989 - protein, 83 aa, Zea mays
  Clone ID: MRT4577_141345C.1.pep
NLAKGLRAGAHKFKMASRKQSMRVDLQVCHLASYLFEGPGQEGTYFHVQMPCFIPWIRYCFKPEQPMFLGVFPQGVKKKKKKK

SEQ ID NO: 229990 - protein, 58 aa, Zea mays
  Clone ID: MRT4577_141346C.1.pep
HDNAMAPVLILPGGSHIQKPLMVAADGHVPEIVVEVDDKDSVFEVDNSNVCVITLGIL

SEQ ID NO: 229991 - protein, 208 aa, Zea mays
  Clone ID: MRT4577_141347C.1.pep
AGYSPPTPTTREYTAPLLQKPSLFVFSALLGGFGPPRRGLVRPVPENLGEKCLVSARLVGGRRVPGAAASAMEAVAMSPSSVSSHNLDAASTSDDMPSSQEGLLFSDSLKDLRNLRSQLYSAAEYFEVFYTNNSHRSTVVTSLKDYAVEALVSTVDHLGFVSYKVDNLVNEKADEVNETEFRVSSVEQRVKICRQAIDQEGRSQQSLL

SEQ ID NO: 229992 - protein, 211 aa, Zea mays
  Clone ID: MRT4577_141348C.1.pep
MADIKDLHIAIMGAGMGGLGAALALAKRGFKHIDVYETASNLGFVGAGIQMPPNVGRILDRLGCWNDIEKEATRVAGSSIRQGSTNEELAHVDMPDLKGQYGYSHLCGHRSSLAGHMYEACKKQDSIKFHFSTSLVEVETFSPKVSFKLKPRDGEPYTSQADILLGADGIKSVTRSQILQQVDATPEEAETGQAAYRIMLNREDMAHDPEL

SEQ ID NO: 229993 - protein, 131 aa, Zea mays
  unsure (1)..(131): unsure at all Xaa locations
  Clone ID: MRT4577_141349C.1.pep
MVFVSVINDAXLKTMYNADKIRKRKVMIRTPAKVIIKVLTVMQHHGYIGEFEYDDDHRTVKIVVELNGRMNKXGVISPRFDIGEKDIEGWTARLLPSREIGYIVLTTSAGIMDHEEGRRKRVVCNALGFFY

SEQ ID NO: 229994 - protein, 69 aa, Zea mays
  Clone ID: MRT4577_14134C.1.pep
HRVRGCSRLCPPQSVTAPLQTFPAQLPILTLFSRSWSASAVCPGPAKLFTAERLSSHVLVPLIILQCFD

SEQ ID NO: 229995 - protein, 69 aa, Zea mays
  Clone ID: MRT4577_141350C.1.pep
GNLLATPVVTSPLPEFGQTLGGDHQSAVSPPRRDQKSQHEELKIQAEVAYMKRNLLRRLLIKWRSHVTG

SEQ ID NO: 229996 - protein, 155 aa, Zea mays
  unsure (1)..(155): unsure at all Xaa locations
  Clone ID: MRT4577_141351C.1.pep
EIPEGSSSQGVHLLAFSFMRAFDALIVSNSLLGNCRLPLHMILLSSPEPRHVSSRSCFCIRYSSRPVGCIRSGVLFYSYTQVSRVCGARRSIALRFAGRVVSVAPSHVLVLFPCECFGLRPILLVAVPLASGAPVVVFRPSSWGSXVRAVAWVVP

SEQ ID NO: 229997 - protein, 84 aa, Zea mays
  Clone ID: MRT4577_141352C.1.pep
PGPGSSPLPVEAIPPPPRPFFFCFQRKSCGPLWAVFVFYQAFPPLLFRPSVLVVSRACRVSRASPFLVFRRTFWGPPIFTCGDN

SEQ ID NO: 229998 - protein, 91 aa, Zea mays
  unsure (1)..(91): unsure at all Xaa locations
  Clone ID: MRT4577_141353C.1.pep
MLPVVSLSAVTAXTILPQXSRAAIASLRPPFISRAVSSXIXHNPILHLYRIQHGSAAGILPSSYYRRQQXAAYYSTXPLEHILEQNSGGPQ

SEQ ID NO: 229999 - protein, 77 aa, Zea mays
  unsure (1)..(77): unsure at all Xaa locations
  Clone ID: MRT4577_141354C.1.pep
FFFFFXXXXXXXXXXXXXXXXXXXXXXFKTNVMKVNFHSTGALDKICSHQVLYKTNKYHSRHPYHPSPAPCHACNSS

SEQ ID NO: 230000 - protein, 49 aa, Zea mays
  Clone ID: MRT4577_141355C.1.pep
FCFYCVKFQTRLPCMLIGSKIFTKQKDYECSSECNVQQDSAIQIQPVGG

SEQ ID NO: 230001 - protein, 73 aa, Zea mays
  Clone ID: MRT4577_141356C.1.pep
GEPPKGPLVFDYRPRLFQGGGVGPVGFCKTKRSIFFCTLGSYQASPAGVGLLFPFRRVSSFVSFVCPCPFLGV

SEQ ID NO: 230002 - protein, 60 aa, Zea mays
  Clone ID: MRT4577_141357C.1.pep
GMADRQQYMYFEVLQDTIQQNGYIMTLNTGSQYYMYINSEPYTSRLFNFNECRDQNTGLA

SEQ ID NO: 230003 - protein, 72 aa, Zea mays
  Clone ID: MRT4577_141358C.1.pep
QVQLFNRTLFHMAVEFRGRNYAFQIRCCNSSTIPYYFSYQLADSSRLIHMHVGLNHQEPAFPVVRLLNANVC

SEQ ID NO: 230004 - protein, 97 aa, Zea mays
  Clone ID: MRT4577_141359C.1.pep
MRHLQATVEHLAGVAATPPPASAGGGVHTDTFLILAAVLCFLLCVVGLAFVARCSRLCNPSSYSVDARTLPDVSTVGWRCPASVQLTPTPCTYSPDY

SEQ ID NO: 230005 - protein, 100 aa, Zea mays
  unsure (1)..(100): unsure at all Xaa locations
  Clone ID: MRT4577_14135C.1.pep
NLTXKQIKSLSDGLAWLTQPSCSRRSNGCPHETFDLTAPTHALPGNLFMPPALVIKKEKRLAYQLCSDFSSMSLEHAQRRCPQCRRRRRPPSPPAASTPA

SEQ ID NO: 230006 - protein, 214 aa, Zea mays
  unsure (1)..(214): unsure at all Xaa locations
  Clone ID: MRT4577_141360C.1.pep
MRHLQATVEHLAGVAATPPPASAGGGVHTDTFLILAAVLCFLLCVVGLAFVARCSRLXPLVLLRGRAGARRRRXDEAAMPAPRKGVDRAALEKLPTVPFAFEDEDAQDGERPECAICLAEFAPGDEVRVLPPCAHAFHAACVDTWLLCTSTCPSCRTALVLAQAQAPPASADPLMQCCACASAQASAGPAECPVLPLPLAVVVVERGPCRTSVP

SEQ ID NO: 230007 - protein, 179 aa, Zea mays
  unsure (1)..(179): unsure at all Xaa locations
  Clone ID: MRT4577_141361C.1.pep
VRRSGGRTKRGRRACHSSSAPAPHAGATKELSRARHCRRPCPRRVAAWPLPPRRSASSACSSNPTTPAPSPTASRSWSSTSATSSGPPAARPPRPRPPRPPRRPRPRPRPPASGGRFPPRPATSPPAAWGCPRSSPTPTXPPRAAAAASVMEGAGRTLKGRDLRRVRNAVWRTTGFLDL

SEQ ID NO: 230008 - protein, 117 aa, Zea mays
  Clone ID: MRT4577_141362C.1.pep
GNSHLFSVPSSWHSTTLRKKKLPSGQGPSDPRQAAQVEWSGVTWPANERNETSKGKERPFSQVEEAGGAPHGVAHAPEVASLECASGAFHDRRRHGDGGRLVARARGVLLLRARGGR

SEQ ID NO: 230009 - protein, 243 aa, Zea mays
  unsure (1)..(243): unsure at all Xaa locations
  Clone ID: MRT4577_141363C.1.pep
VLSSKSWISAAANTTTNPPARTGALDTGSPAPGDPSRRHHAPIIHCPRPPSPPLASARPPIITLPKQRPKPATRSAGPXRPPAPAPAXTRAPPXAEPSPXCRRPCPRRVAAWPLPPXVAPLPRPAQXNPTTPAPSPTASRSWSSTSATSSGPPAARPPRPRPPRPPRRPRPRPRPPXPREADXPPRPATSPPAAWGCPRSSPTPTTTTRPPRPSRPPRARRSSTPRARATSRPPSPCRPGPRR

SEQ ID NO: 230010 - protein, 114 aa, Zea mays
  unsure (1)..(114): unsure at all Xaa locations
  Clone ID: MRT4577_141364C.1.pep
YLQYRTPLNTKNRHKKTDALLPALKAPRAAERAHSEARQTQSPPACSPDAQRPAGNPSRGRSSLGRSTETASTWTLARGRRPSRRRLRPLGREPLTWVGAGGEQRXRLLAWILT

SEQ ID NO: 230011 - protein, 53 aa, Zea mays
  Clone ID: MRT4577_141365C.1.pep
GERVTHNKTNITFTTASHFTFTTKIWLYNYPLKTADTHSKTTIKNTCSSYPLP

SEQ ID NO: 230012 - protein, 154 aa, Zea mays
  unsure (1)..(154): unsure at all Xaa locations
  Clone ID: MRT4577_141366C.1.pep
MKPSTAGDASAAAAASSSGPSTSASTSASTSTADATHYIAKRVLRGSAVLHVAEGCFRSPDSADVVLAKETSLELVAVGDDGVLQSICEQDIFGIIKDIGVLQWHSRXWFNSTDRXKDLLVVLSDSGKXSLLYFWSEMHRFFAIANNELSKQEI

SEQ ID NO: 230013 - protein, 151 aa, Zea mays
  unsure (1)..(151): unsure at all Xaa locations
  Clone ID: MRT4577_141367C.1.pep
ILTWRGASARAVHXPIALCXALHICWRLKEEFADGQALPAIGGVDTGNDAXAALIFIGAAAVQVCAGAMIHAPPLVKNTIAERPDLIREHNFLXLEESCGAYVAHFTTRTDTVHRPQEAGMQRKGINKGLQSDNAWSDEGFVKETESIVFI

SEQ ID NO: 230014 - protein, 76 aa, Zea mays
  Clone ID: MRT4577_141368C.1.pep
PRVRQFQSPPSVAHLTRSEPEEGGRRSRAAGAGGREEEDVRPVAGLLLPGVEAQQAHLHGDCQYRLHHHQDDGQLH

SEQ ID NO: 230015 - protein, 54 aa, Zea mays
  Clone ID: MRT4577_141369C.1.pep
RGPPCQQPGPPNLPSGFLPKPFGLTAATLPLKPCRGRIIKKVSFIPATRIGSVF

SEQ ID NO: 230016 - protein, 590 aa, Zea mays
  Clone ID: MRT4577_14136C.1.pep
LEYLRIYNSFLIDGRLKDCVDLLESMEQNGLLDMRKIHHASFFSMCKKQRAVLEALRFCRFIGNPKISTFNMLLSVCASSLDFDGALQVMELLKEAGLKPDCKLYTTLISTCAKCGKVDAMFEVFYEMVSAGIEPNVNTYSALIDGCARAGQVAKAFGVYGIMSSKKVKPDRVVFNSLISACGESGALARAFDVLSEMTAESSESKGWKPIVPDHVTVGALMKTCILAGQADRAREVYKMLQEYNIKGTPEVYTIALRSCSLTGDLGFALKIYEDMNRIGVKPDEMFLSALVDVAGHARRADAAFEIMKDARAKGLLVGTIAYSSLMGACCNADDWKKALQLYEEIKSIKLTPSVSMMNALITSLCDGDQVLKAVDILNEMNILGVHPNEITYSVLFVACERNGEAQLGLDLFEQLKMDGIDINPTIIGSLTGLCLQMFNIDFSLGNIIVNFSSGKPQIDNKWTSSAVMVYREAVSAGLLPSSDVLSQVLGCLRLPHGSSLKSTFIENMGVSCDIPQYPNINSLFEGFGEYDIRAFSILEEAASLGAVASISIKETRIVIDARKLKIFTAEVSLLRTLRSLKHRLAAGEC

SEQ ID NO: 230017 - protein, 70 aa, Zea mays
  unsure (1)..(70): unsure at all Xaa locations
  Clone ID: MRT4577_141370C.1.pep
KRXPASPQFRVIDEIAPVFRGGRGEQLTHQSHQSHQSHHXRSCRVCSKSVVLSCPKSDQSQMSYRSIELP

SEQ ID NO: 230018 - protein, 95 aa, Zea mays
  Clone ID: MRT4577_141371C.1.pep
GCPLPSSWGHSWLCHRRPFCRSVLARLLLGSLVGRRCFLRRLFFAGLAPFGCGCGAVFFVVRVPSRPSLAWRLPSRVFFSYLPCCCIFGSKKIKT

SEQ ID NO: 230019 - protein, 214 aa, Zea mays
  Clone ID: MRT4577_141372C.1.pep
AGVRFRPSQSHSKARRQNLERHRHAHAFARTSPVLPGRRERNRGSRSIGAAGSRGLFPRTPDSASHWPRQTEPVACDTSREVAKLKSRLVFLERKNAAFKMQMKELSMKLQLAGQGENEALYKAGPFGTVKALRTNPTVTPDLSINPRLASLLEQVAVKKELIVALANSNVKEMLEVWFTNIKRAGISNYLVVALDDNIESFCKSKDGPVLRRD

SEQ ID NO: 230020 - protein, 71 aa, Zea mays
  Clone ID: MRT4577_141373C.1.pep
SDAPMPFISPNKNGLKGRGTPWPGPTSPGPIYPASPSPHGFGREVWNFLINRWKRPPRGGRQSNSSDHVWV

SEQ ID NO: 230021 - protein, 82 aa, Zea mays
  Clone ID: MRT4577_141374C.1.pep
VAVVQVGAQTETALKEKKLRVEDALHAAKAAVYEGISVGGERTLLRLASKADSIIETVDNYEHNVGADIVKKALSYPLKLSA

SEQ ID NO: 230022 - protein, 69 aa, Zea mays
  Clone ID: MRT4577_141375C.1.pep
KTHTRSRRTLTRRKRAWHHLKEMPQHKYPSSTQQRQQTGTHRQTHHGRPPRKHCPGPRGGHKVEGGPYT

SEQ ID NO: 230023 - protein, 74 aa, Zea mays
  unsure (1)..(74): unsure at all Xaa locations
  Clone ID: MRT4577_141376C.1.pep
GEGVVAPGPSWSSGPPXWRPACXXCGFAWAPLPFGSWGWIVGGVGWGGREVEGLNXEETEEXHVPSVVCSVIYI

SEQ ID NO: 230024 - protein, 140 aa, Zea mays
  Clone ID: MRT4577_141377C.1.pep
PTFVNLVMSLPHLSLRRADRHATARPGLQPLHLPPSGSSIPSWKARPRLPARGASLDLPHHSRLPARGDSLDLPHLPACGASLDLPHLPSTKQKETQQPLTIFFLASCSSSYLVGRLQTAKVRRKMSGNACGKRSWKKKR

SEQ ID NO: 230025 - protein, 247 aa, Zea mays
  Clone ID: MRT4577_141378C.1.pep
MDCRMDGCAIGSNGSGSKSCGPLSDYRIPDYILKPDSERVIVDNAPSCPVVVFINSRSGGQLGSGLIKSYREVLNEAQVFDLSEESPDKVLHRLYANFRRLKSNGDLLAIQIEKSLRLIVAGGDGTASWLLGVVSDLKLTHSPPVATVPLGTGNNLPFSFGWGKKNPATDQEAVKSFLGLVKEAREMSIDSWHIIMRMRVPQEGPCDPIAPLELPHSLHAFHRVTGSDEFNVEGYHHSRGGFWNTLV

SEQ ID NO: 230026 - protein, 80 aa, Zea mays
  Clone ID: MRT4577_141379C.1.pep
DPRVLPTSLLPYPSIFNTLHSSPSRSTLTKCFISPTYKLTHSKSTSSTFSLPILYLFLCLTRFSLYPLSSLHLFSNLTTL

SEQ ID NO: 230027 - protein, 45 aa, Zea mays
  Clone ID: MRT4577_14137C.1.pep
RTLLIVSHVNLQNVKGVFDAAIKVVLQPPKAKKKKKAQRGACSIL

SEQ ID NO: 230028 - protein, 90 aa, Zea mays
  Clone ID: MRT4577_141380C.1.pep
RTRGVTRGAKKPLARCYISELELGPWSLKLLVNLLSSLCFVPVSVFLLLVTVSQITWKCTFSLLVIFCRDDTLYYMFCLYWDMEYHLLTC

SEQ ID NO: 230029 - protein, 64 aa, Zea mays
  Clone ID: MRT4577_141381C.1.pep
PRDRRGPRHRRVPGAGARGRSFMGRLTPLAPESCRREGPHPRALDRSWGAEDRREMIASRARGR

SEQ ID NO: 230030 - protein, 202 aa, Zea mays
  unsure (1)..(202): unsure at all Xaa locations
  Clone ID: MRT4577_141382C.1.pep
TPSGLPRDXIYPPXSGSPXXKASTATVAYMTTAPATAEIGTREANWDAVVEQGPTTEFAAATLQRAPRTNRPLPPPPSQRPAEQLPGLGQVQAAASVGLSNSHKVQVVPAPERPLEPRARDDPTPALVSDGSAAAQCPASAPAVQPSLPEKLREGARAPPLHLRAESVPVYPSCGFPAPAPPTSSTDAPSTSSYHPFVTASS

SEQ ID NO: 230031 - protein, 61 aa, Zea mays
  Clone ID: MRT4577_141383C.1.pep
SQKLYHPRSLIYRLTQTFLVLQRSMMPFSFAMDGSACFLPTTFFNMSQACSTSHVGFLKNE

SEQ ID NO: 230032 - protein, 74 aa, Zea mays
  Clone ID: MRT4577_141384C.1.pep
HASGILPHACNVSSSTHVVLLRCQKKKKKKKKKKKKKKKKKKTNTIKDPTLLTNKCNLITFSIVQTKLNKHSIV

SEQ ID NO: 230033 - protein, 45 aa, Zea mays
  Clone ID: MRT4577_141385C.1.pep
GTKLTNHMDCITPQARCEQLLCAYAMKGRWNRSYYRTEEPKKAGT

SEQ ID NO: 230034 - protein, 69 aa, Zea mays
  Clone ID: MRT4577_141386C.1.pep
EGASDDVLVTPGPYADLVSFAGAALLRLGFPVVMLGWPSVMAIGKGGYVVTFYELTDFAAVVVIIAASS

SEQ ID NO: 230035 - protein, 80 aa, Zea mays
  unsure (1)..(80): unsure at all Xaa locations
  Clone ID: MRT4577_141387C.1.pep
EXNESHGQRFVVATMLNHGGAARPILSAMDHRPPSKLGTHLSAAAEEAHAQIAHKRAHACMPTDQEPQPTEPYNITPQDP

SEQ ID NO: 230036 - protein, 148 aa, Zea mays
  Clone ID: MRT4577_141388C.1.pep
PGVVSDAEDLALVWKIPAGGGGGVLDLGGGGAYPAGARSGRSQRHVRCGEGGGKGWWWSTETAILEEDMGVNHEDDGDGSIWERRCSIWCVDATYAASPSRSGGGFTMAEGGGRRRGWWLSGMQGKAEDGGASGLRERPHRERGREDR

SEQ ID NO: 230037 - protein, 54 aa, Zea mays
  Clone ID: MRT4577_141389C.1.pep
MASHRSLLLLLLATALVAALTSVTSSDYSNPMPTILTPVAHTPLGSFDSIQCLL

SEQ ID NO: 230038 - protein, 111 aa, Zea mays
  Clone ID: MRT4577_14138C.1.pep
VRAGMKSRRAPRLTGLASLPTRARDDRCSPGNPFRSDRRLRNLHIIRRGNRGAESPARLRARTRSGCTCQYNAAIRTAAARRPPDNKYTTRTGDAPKMASTDSLTSPVSSP

SEQ ID NO: 230039 - protein, 61 aa, Zea mays
  Clone ID: MRT4577_141390C.1.pep
KKKGKKRGQSQGSPSFFTQILVGSSRCSLKALPSESWNRCCCLGSATKDHPQKPAFSKEIQ

SEQ ID NO: 230040 - protein, 86 aa, Zea mays
  Clone ID: MRT4577_141391C.1.pep
GSGVARAAAVTQRRTVKWFNDTKVFGFICPEDGSKHLFVHQSYIKSDGFHSLADGDDVEFSIYHGDYGRTKAVDLTIPDGSFLRGC

SEQ ID NO: 230041 - protein, 60 aa, Zea mays
  Clone ID: MRT4577_141392C.1.pep
VPHFQRTHYFSHMASSATTGHDIHVRISIQLTHAARINNCVLQLRRVVAKHRDPGRPRGT

SEQ ID NO: 230042 - protein, 56 aa, Zea mays
  unsure (1)..(56): unsure at all Xaa locations
  Clone ID: MRT4577_141393C.1.pep
GGFFFLKNKSAVIYTDTREGSEKQAARPVCFMGRFIHLTKSHTFFSTHXHRGGGGG

SEQ ID NO: 230043 - protein, 221 aa, Zea mays
  Clone ID: MRT4577_141394C.1.pep
MEKAGQHEHVIGIPVNNRAFGIEEPDFPSNGPAKNAAAGAGGRRRVTGDRVAQGLKEHVTLGPKLYGTGRGKLSLGARILRAGGVGKVFRRWFSSPVGGGGERLLRASQCYLSTTAGPIAGMLFVSTERVAFRSDRSLALPLTSPAGGGSGTTTVLRVPYKVSIPLRRVAAARPGQNRDRPEHKYVQVVTRDGFDFWFMGFVRYQASLQELEKAVAQSQSQ

SEQ ID NO: 230044 - protein, 93 aa, Zea mays
  unsure (1)..(93): unsure at all Xaa locations
  Clone ID: MRT4577_141395C.1.pep
PTRPPTRXLTXCRTRGLARRGLRPLCLASMRPHSSGRKHSHTRRRDPCQWLDLPQRWLPIRPRCGPAARRRVCTFYSEQKPQICASPALLSTS

SEQ ID NO: 230045 - protein, 109 aa, Zea mays
  Clone ID: MRT4577_141396C.1.pep
MEGRRSNEVSSAEAVLVGALSSGVNAPTWFVLKITFLLLALCFTAMLALAFSSKNFVIVAHVLLLVTIGTVLFVLLNRFLAEVGLVPVEQQMKEMGIHKTEATDEDKRN

SEQ ID NO: 230046 - protein, 123 aa, Zea mays
  unsure (1)..(123): unsure at all Xaa locations
  Clone ID: MRT4577_141397C.1.pep
RGTKKKRKIFGATDPIFWPKVAPVSGVSPLGVGTFGGDMFRPKNPVLKKVWAPGSLFHFVPPPGVVGGAIPKGPKVFGGVPPAGIGVFFGTGYPVGFFXNRKFFFPAPLGGFGFIFAWGSPLF

SEQ ID NO: 230047 - protein, 41 aa, Zea mays
  Clone ID: MRT4577_141398C.1.pep
PTRPPTRPKKKKKKKKKKKKKKKKKKKKKKREEEQKVKKFN

SEQ ID NO: 230048 - protein, 130 aa, Zea mays
  Clone ID: MRT4577_141399C.1.pep
TKEFLNTGMRSLDEHSGFHRKLKHFAEQCQTDVSLLQEEEKKIRSLVRGTVDYFHGSTGKDEGLRLFVVVRDFLAMLDKVCKEVKEASKVAPKKTKTAQPSQASFNDPRRKLFPAIQDLRADSSSSDEDD

SEQ ID NO: 230049 - protein, 39 aa, Zea mays
  Clone ID: MRT4577_14139C.1.pep
FWSPFKKKKKKKKKKPKKKKKKKKKKKKKKKKKKLVLDR

SEQ ID NO: 230050 - protein, 78 aa, Zea mays
  Clone ID: MRT4577_1413C.1.pep
GWYSPLGQAWYPAGRAPQVSVGLHESPDVGCLLACSLRVLGCQRPACSSLGPLCAIEFGTVACLLSFAWLCIIICAVA

SEQ ID NO: 230051 - protein, 67 aa, Zea mays
  Clone ID: MRT4577_141400C.1.pep
AQANQTHGVRRQRRGDGVRQLRHGAAGSVLAIQVGYFLRQGGASADAPVRGHHGRGDPGAGAPCGGG

SEQ ID NO: 230052 - protein, 88 aa, Zea mays
  Clone ID: MRT4577_141401C.1.pep
HGSCALGPPETGFLCVSVHAVRCVIFSLSCSCGCSLWSRVYRKPNTVRHSVNACGERGWTQAGNQSSCMRTKHTRSKSSIIMRTSRSM

SEQ ID NO: 230053 - protein, 155 aa, Zea mays
  Clone ID: MRT4577_141402C.1.pep
MSLVSRRSSNVFDPFSLDLWDPFDMFRSIVPSAASSGGGSETAAFANARVDWKETPEAHVFKADLPGIKKEEVKVEVEDGNVLVISGKRSREEEDKNDKWHRVERSSGQFMRRFRLPENAKVDEVKAGLENGVLTVTVPKTEVKKPEVKAIEISG

SEQ ID NO: 230054 - protein, 58 aa, Zea mays
  Clone ID: MRT4577_141403C.1.pep
ITYESSLPFVALLPIASQSFCSFCHSHLFGYLIFSSTSSSVTIISNISFKAIWSLEAC

SEQ ID NO: 230055 - protein, 89 aa, Zea mays
  Clone ID: MRT4577_141404C.1.pep
IQKNRQNGQAVSVLRGDSKVSGMVEVKHEYDHDKDTISWDVMENDSDDKGGFHVHTFGDNTSGWTSVENHYCHHNKTYGVPSDENRQVF

SEQ ID NO: 230056 - protein, 97 aa, Zea mays
  Clone ID: MRT4577_141405C.1.pep
HHRIAGIVVLRRRLRLIVGARRKIEVGAIELPVANLERCPFFSYFPRSLSRVSCSRYVRVLRRLTPNLPTKRPLFSSLLRSLVFSSTPPTLSRPTVR

SEQ ID NO: 230057 - protein, 73 aa, Zea mays
  unsure (1)..(73): unsure at all Xaa locations
  Clone ID: MRT4577_141406C.1.pep
RKVIITTAENSNIPRREITKEVLESILYEVFYRIQDPNLVYPYYHLNPYHAYDXRNLSWLAPTYAEPATMFIA

SEQ ID NO: 230058 - protein, 123 aa, Zea mays
  unsure (1)..(123): unsure at all Xaa locations
  Clone ID: MRT4577_141407C.1.pep
MWRRALAMVLFMAGAALLPGAAGAGAQQGVWSIITRPMVQNMLNHPGDSGWQGAFXTXEAFIEGANKVPRFRNTGEQKNPKGEVPPLFRQKTHQNTRGRANAPEGPVCWGKRPGKETKKTGPP

SEQ ID NO: 230059 - protein, 112 aa, Zea mays
  unsure (1)..(112): unsure at all Xaa locations
  Clone ID: MRT4577_141408C.1.pep
FSWSCWGPVLVFGVPPCALPGLPWPWGLFLVSCGFGVGRPAGGPFLGALVCVLGGCVPVGWFGLWLFRVGWFGLLFFXXCVPLVGWARLLPPWGPSXVFFFXXVXKGXAAAL

SEQ ID NO: 230060 - protein, 183 aa, Zea mays
  Clone ID: MRT4577_141409C.1.pep
AGRAGMQLYSHSRLDLASLHLQIHPELSEGRPRHGNVDAHHSPAALADVERPSHSRLLRLAAVPRVRDAPATVKLSFSRCASMSAVVDVGLLSCCLLIPTTLHADYRAVPAVLAADGIRATPTTISTRRSWGCTPSSATTCRPSCPCPTVSRRWQDEVPPSVVSVLRSCTASPSSTRAPSCCH

SEQ ID NO: 230061 - protein, 448 aa, Zea mays
  unsure (1)..(448): unsure at all Xaa locations
  Clone ID: MRT4577_14140C.1.pep
MATVDCPLPSPADLDDNGFPALPSSPXTRPERLYPHPPLPVAAGFAEDFYRGGTDWSSLRAPPPLGPPRRAPGVKERGGGSAVQSSLFQAWGIEKPRRDGRGAGDSSLVQRSLFQAWGIERPQREGLGAGDSSPSSSLSGSLLARKRRRGSTEEERVAAKKPLACPFYKKIPGKGFFVXSFSHLQYEYCGALILKDFHGDMYGGAITAWLLETCFCFTFNCSCXLEXETEYFIDRVTVTLLEANHCPGAALIHFRLSDGKTCLHTGDFRASKTMQSHPLLQRGRVNLVYLDTTYCNPKYKFPPQEDVIDFVVRFPPQEDVIDFVVRTTLRYLKKQPKTLIVXISQALEAHIYTDASRRRILYSFGWPDLSKRLCSCNQSSSLHVLPLGSINHENLKKYLETLNGRFLAVLAFRPTGWTFSEATGKHLDLIKPSSNANVTIYGRICWLY

SEQ ID NO: 230062 - protein, 158 aa, Zea mays
  Clone ID: MRT4577_141410C.1.pep
NCINTLKMSAKAICVLKGDATGVLNFVQQGDAVHITGEVSNLSPGQHGFHVHEFGDTSNGCISTGAHFNPAGKTHGAPTAEERHAGDLGNVIAGADGIAKVDITDKQIALTGPNSVVGRALVVHADPDDLGLGGHELSKTTGNAGARVGCGVIGLTAN

SEQ ID NO: 230063 - protein, 33 aa, Zea mays
  Clone ID: MRT4577_141411C.1.pep
QSSIVTTNGRSRGNHGDNSVKPRRGHGGDHRTA

SEQ ID NO: 230064 - protein, 260 aa, Zea mays
  Clone ID: MRT4577_141412C.1.pep
MPPRIKESENGVPTYWGQSGRMLQVLVTIVAVTDFLLFGYDQGVMSGIISAPAFQSAFPQVKGDSTYEGFVVSIYAVGCFLGACFIFVFGDKLGRRKSIFLGAFVMVIGVIIQIACVPPNGGATAQFIVGRCITGVGNGINTSTIPTYQAECCKAKNRGKVICIEGSMVAIGTLIAYWIDYGCLYGPDDFTWRFPIAFQCVFAFVVIIMMTSLPESPRWLLNHHREDEAATVLAGLNGVPRDDPRVLIQMQVIRDGVNAS

SEQ ID NO: 230065 - protein, 85 aa, Zea mays
  Clone ID: MRT4577_141413C.1.pep
IMTWANKVLGPSLTALYNPLQPAFSTVLSTVFLGAPVYTGSIIGGLFIIAGLYLVTWARYDEAQRATTDDYLDPLLVGHPRITKT

SEQ ID NO: 230066 - protein, 148 aa, Zea mays
  unsure (1)..(148): unsure at all Xaa locations
  Clone ID: MRT4577_141414C.1.pep
VLLPLRLVAPRDVETQPFEEGGSLHMRWHTDISSVADVTDSKLERVEIVYWTGGRILDYNSXHDMKSVDLTITHYLSGPLRIVNSEGVPDIPGDLLAVEIINLGPLPGDEWGYTAIFERDNGGGFLTDHFPTARKAIWYFEGIYAYSP

SEQ ID NO: 230067 - protein, 90 aa, Zea mays
  Clone ID: MRT4577_141415C.1.pep
GRLQASGTSGSAHQVTRRIQTTPRLMVGTTKTMILGPAKIRISKCEEACAGVQGIVVIKHRWCRHRLWACFYHREAPVQGNWQAAQDRLP

SEQ ID NO: 230068 - protein, 64 aa, Zea mays
  Clone ID: MRT4577_141416C.1.pep
KTLGWLIGIDVSDRGHVCRLDAQIHQAFVLTKSYFLTSGAWHGFQREITVRTANQATIMFYRCI

SEQ ID NO: 230069 - protein, 97 aa, Zea mays
  Clone ID: MRT4577_141417C.1.pep
AEPSPRQTPFFAGPFAFFFFWRFFTTQSELGFFLGRSKVYVGVMFFLSFCKPVFFFPTAVFFLVRPPPPIPGCGCPFELWSLGFLSPHIGSPRGMAG

SEQ ID NO: 230070 - protein, 35 aa, Zea mays
  Clone ID: MRT4577_141418C.1.pep
LLDAPSIPISSLADSTYLKSAKVLFGSHICNVMGN

SEQ ID NO: 230071 - protein, 69 aa, Zea mays
  Clone ID: MRT4577_141419C.1.pep
ALRASAKGSLKRQTSITNANTRAVQQVMMEGNTQTLPRGPGHKQRFFNTTTWLDRQTDSCEQSSICICN

SEQ ID NO: 230072 - protein, 80 aa, Zea mays
  Clone ID: MRT4577_14141C.1.pep
DLFTKGELLRKSNPVYMKVPVLIHDGKPICESLAIVQYGDEDWAATGPSILPADPYDRAAARIWAAYADSKLLPDWVGIM

SEQ ID NO: 230073 - protein, 73 aa, Zea mays
  unsure (1)..(73): unsure at all Xaa locations
  Clone ID: MRT4577_141420C.1.pep
FKKETKFLKNGKDGIVRWIKTKLMVVKTFXAYPHLGRFNVHYMSQKVGVGEIKSVDKKDLTGVKVXKEAAKKK

SEQ ID NO: 230074 - protein, 72 aa, Zea mays
  Clone ID: MRT4577_141421C.1.pep
FRSNSSDMYTYDLALLKIARCQYFLAEGKILRCQNAHLGLIGCLLSKHGSHHRSRTRLFFAKLALCNRLLFV

SEQ ID NO: 230075 - protein, 159 aa, Zea mays
  Clone ID: MRT4577_141422C.1.pep
EDADIARLREFGAAVATVFGTDLAAGSEARASSERGARFAARNVMDGRDDTYWAPTAEDGRRNGYWIELRRRPGARARAFNVVRIQEHVALGQRVERHAVYVDGAPVANGTTVGHKRLHRLPCPVAGTTVRVWITALRGPPLLSAVGLHYDPFVASDTM

SEQ ID NO: 230076 - protein, 79 aa, Zea mays
  Clone ID: MRT4577_141423C.1.pep
GDQDKRECRYRTQPGLSDQSVRRILLLDESHGYRWLSPVDNTDGTLHLRQVERPQCCSQGSFIHHRTTTARLFATLRLH

SEQ ID NO: 230077 - protein, 89 aa, Zea mays
  unsure (1)..(89): unsure at all Xaa locations
  Clone ID: MRT4577_141424C.1.pep
AFRLHLALSDADARLEQCPSYTRLTNPDGATSSACILAIPTSRSNXFSALFYTHALICPQSYARIMRFCEHKGRDSRSRKSGSPSTKPK

SEQ ID NO: 230078 - protein, 256 aa, Zea mays
  unsure (1)..(256): unsure at all Xaa locations
  Clone ID: MRT4577_141425C.1.pep
MAVRSLLLPLALLALAASSAAVAQLEIGFYRKTCPDAEKIVRGEMAKIIAAAPSLAGPLLRLHFHDCFVRGCDASVLLESTDGNVAEKDAKPNKSLRGFGSVERVKAKLEAACPGIVSCADVLTLMSRDAVVLAKGPFWPVALGRRDGRVSSATEASKELPPASGDVPLLAKIFASKGLDLKDLVVLSGAHTLGTAHCSSFADRLYNNTGENALVDQSLDSEYADKLXAQCKSVDDRTMLSEMDPGSFKTFDXSYY

SEQ ID NO: 230079 - protein, 112 aa, Zea mays
  Clone ID: MRT4577_141426C.1.pep
FYHTCLANSPNRIDVINNTQPLINSRHNDKLIDRVHAFDHLLNLLIYNVRDMYTHIPNTDKGKNNALHCEHRIRFLIKMLLHVDSLIIALRNPNRSAQPGTLQHLCPFSART

SEQ ID NO: 230080 - protein, 294 aa, Zea mays
  unsure (1)..(294): unsure at all Xaa locations
  Clone ID: MRT4577_141427C.1.pep
IGTLEAGRDAAARAVADNQKKQAVAKGAGVDPSVLERIVAEEREAKGKLPRYPGLERWTLLEKMGDGAFSNVYRARDNTGQWDEVAIKVVRKFEMNSQQRANILKEVQIMRQLDHPNIVKLIDFSESRQYYYIVLELCPGGELFHQIVRLTYFSEDLSRHTIIQVAKALQYLHEEAGVVHRDIKPENLLFYPIPFVPTKNPKPRGPDDEEKADEGEFVKGKGAGGIGLIKVADFGLSKVIWDTQTWTPXCGTVGYTAPEIVKDERYSKSVDMWXXLGCVLYTSSFAVPTIYDES

SEQ ID NO: 230081 - protein, 50 aa, Zea mays
  Clone ID: MRT4577_141428C.1.pep
KSIIIHDLCVLNASLTSTVARKFLLLVNRYRFQHGSTYSHRFDQAISASP

SEQ ID NO: 230082 - protein, 74 aa, Zea mays
  Clone ID: MRT4577_141429C.1.pep
PLVRGRVVGRVVRLGLPVPRPKGTRSLSPVLGRRRERLSPSPSFSCAWTRATFVVPFRLLTGKSAACLSTFYSR

SEQ ID NO: 230083 - protein, 155 aa, Zea mays
  unsure (1)..(155): unsure at all Xaa locations
  Clone ID: MRT4577_14142C.1.pep
RAASADGEDEDAAXICLKHSXPHLCSTTTRKHANKYKVLDAMTVLXMQVDAFNKRVKAARRLAKEEARTAATPEARRALNLCKTYYLDACDNLGACKCAIGLRDAATIRSTMMMSAQNTHSWEXEIRTPSSKNPLNDHLRWLIXEMSQICRTLST

SEQ ID NO: 230084 - protein, 529 aa, Zea mays
  Clone ID: MRT4577_141430C.1.pep
CQLIPSQELVAKELHGAKWKFRHIYRGQPRRHLLTTGWSSFVNKKKLVSGDAVLFLRGDDGELRLGVRRAIQLKNEALFDDFSCDSTKRHTLLAVADSLKHKSVFHISYNPRATASEYIIPHHKFLKSLNLPFCIGARINLQCHNEDVSERRSGMVVHVSEIDPMKWPGSKWRSLLVRWEDGVECNGQDRVSPWEIEIAGGSVSVAHSLSASSSKRTKLCPQGNLDVPTMYVTGNGNGCTDSVETGKFPRVLQGQDLMSFRTRHVPSAPQTVEAAKLQSSGASRFLSNACGCALGGPTSRLAVHNSDFTYQSVGFNESIGFSEVLQGQEISRAVPMFQGMMSEACSLKGGYGLHSYMRTPVAVTGLSATTQECSLTLSTPPGAQVPSVYPDNIFNRTVVRQLGLASKFDGGATNAQQSGPFDRPREIWSKPQHEISDQTKMDHFETRRASAPGDDAAKHGSGGEVVRKTSCRLFGFSLTEKILPADDDGIKEVTYEPECQNPRMLDLFGYNCSAPSAALPALCAAPFGM

SEQ ID NO: 230085 - protein, 143 aa, Zea mays
  unsure (1)..(143): unsure at all Xaa locations
  Clone ID: MRT4577_141431C.1.pep
VLRKTDPRYSCQREFALKHLPKDPLFQLVXWNLLSNFIYFFELNGFKCNLWLQVSKLYEVVPPILTELGKVKNPWPNVDAHSGVLLNHFGLSEARYYTVLFGVSRSMGIGSQLIWDRALGLPLERPKSVTMEWLENYCKNKAA

SEQ ID NO: 230086 - protein, 139 aa, Zea mays
  unsure (1)..(139): unsure at all Xaa locations
  Clone ID: MRT4577_141432C.1.pep
ASGCDKASSSYNVTGISNTHLCPVNHRRHNWDLQGGVCTITGNPYWPSAXAAPPRVNRALCVRCAAYGRGAMPPPXPCPCRPNTNXAIARKLVTLPLYEPLAGVGHLGGTYRLDAWAAGGVLDRSLYLLGLRAKARISD

SEQ ID NO: 230087 - protein, 108 aa, Zea mays
  Clone ID: MRT4577_141433C.1.pep
LVHGAALDLHVGVGVEVVGLEYLELVRELHSAIAASRTGRRRSPGTLRSGRRASDLNNLANAIVGPGETLPAEASPSGFLALAGCSARAVSHLRAAIGVTAFISGGVP

SEQ ID NO: 230088 - protein, 81 aa, Zea mays
  unsure (1)..(81): unsure at all Xaa locations
  Clone ID: MRT4577_141434C.1.pep
FLXGKKGDFLKYLLRGGPTYQEENFILRYIIKNRRRWPHRWGATKRRGDVSQTLGLKGATFVVVKKRQNFATICGGNSGKC

SEQ ID NO: 230089 - protein, 104 aa, Zea mays
  unsure (1)..(104): unsure at all Xaa locations
  Clone ID: MRT4577_141435C.1.pep
PGPRKKKKKKKKKTKLYXEVVPPXILTELGKVKNPWPNVDAHSGVLLNHFGLSEARYYTVLFGVSRSMGIGSQLIWDRALGLPLERPKSVTMEWLENYCNNKAA

SEQ ID NO: 230090 - protein, 42 aa, Zea mays
  Clone ID: MRT4577_141436C.1.pep
ECHAFHLCAPLVGVSWLPVEFDRYLDYGPCPHVCIYMFVLLS

SEQ ID NO: 230091 - protein, 88 aa, Zea mays
  Clone ID: MRT4577_141437C.1.pep
NKSGFSMIYIVSKENIADQLIYGDRRRNRINQHACGHTYMSTKTDAKHAERDSKLKNSASVYMHTHHTIPMYGSQLGLAYYCSTTTTS

SEQ ID NO: 230092 - protein, 110 aa, Zea mays
  Clone ID: MRT4577_141438C.1.pep
LAPGFALPYFQFSSEGDPNPESPPAKTSSRARAHTHTLLALCQRLGLWRRRKHLGDAFGGDGGEVLGYSGTVEPGRQTGLREEEKETEQARRYGFLRLLASLEVLAARPA

SEQ ID NO: 230093 - protein, 147 aa, Zea mays
  Clone ID: MRT4577_141439C.1.pep
MAEEQSNPKPQQAEEREVMVEQQQQPRRATKLRYLDFVQVAAAQAAVCLAGLYGLAKDHAGPLRPSVDAVESAVKGVVSPVYDRFGGLPLDVLAFVDRKVDDTVHEVDKHLPGALKAASVHVYAVVRGVPEVARELGAEAHRSGVRG

SEQ ID NO: 230094 - protein, 36 aa, Zea mays
  unsure (1)..(36): unsure at all Xaa locations
  Clone ID: MRT4577_14143C.1.pep
RSXXXXIDTTREGTAGGSDAKRKGVCSCLLIKRSLY

SEQ ID NO: 230095 - protein, 276 aa, Zea mays
  Clone ID: MRT4577_141440C.1.pep
MAEEQSNPQPQQAEEREVMVEQQQQPRRAPKLRYLDFVQVAAAQAAMCLAGLYGLAKDHAGPLRPSVDAVESAVKGVVSPVYDRFGGLPLDVLAFVDRKVDDTVHEVDKHLPGALKAASAHVYAVVRGVPEVARELAAEALRSGVRGAARAALAMTEPVARDVYARAALAMTEPVARDVHGRVEPVAKDLYVRYEPAAEHLAVSAWRSLNGLPVFPHVAEIVVPTAAHWADKYNRAVAAAAEHGYAGAKYLPAIPTERIAKVFSSAPEAEPLAEGQ

SEQ ID NO: 230096 - protein, 259 aa, Zea mays
  Clone ID: MRT4577_141441C.1.pep
MGEEKSNPQHQQAEEREVMGEQQQPRRAPKLRYLDFVQGAVAQAGVGLVGLYGLAKDHAGPFRPSVDAVESAVKGVVSPVYNRFGGLPLDVLAFVDRKVDDTVHEGDKHLPGALKAASAHVYAVVRGVPEVARELAAEAQRSVLRGAARAALAMTEPVARDVYGRVEPVAKDLYVRYEPAAEHLAVSAWRSLNGLPVFPHVAEIVVPTAAHWADKYNRAVAAAAEHGYAGAKYLPAIPTERIAKVFSSAPEAEPLAEGQ

SEQ ID NO: 230097 - protein, 55 aa, Zea mays
  Clone ID: MRT4577_141442C.1.pep
HFTILMLKVVCVAGAIQASNKSMETDIVVLLAATVPRVWTNAVLPRSQHPDDLAV

SEQ ID NO: 230098 - protein, 68 aa, Zea mays
  Clone ID: MRT4577_141443C.1.pep
ISGGEETYEGCASNGERTGSSPARGARSLVQLPGARPYFLVGGPIFPCPGSASRGFPFGLYLMTDFFS

SEQ ID NO: 230099 - protein, 261 aa, Zea mays
  Clone ID: MRT4577_141444C.1.pep
MAEEQSNPQPQQAEEREVMVEQQQQQPRRAPKLRYLDFVQVAAAQAAVCLAGLYGLAKDHAGPLRPSVDAVESAVKGVVSPVYDRFGGLPLDILAFVDRKVDDTVHEVDKHLPGALKAASAHVYAVVRGVPEVARELAAEAQRSGVRGAARAALAMTEPVARDVYGRVEPVAKDLYVRYEPAAEHLAVSAWRSLNGLPVFPHVAEIVVPTAAHWADKYNRAVAAAAEHGYAGAKYLPAIPTERIAKVFSSAPEAEPLAEGQ

SEQ ID NO: 230100 - protein, 184 aa, Zea mays
  Clone ID: MRT4577_141445C.1.pep
RPGPDISPESVLSIDERIGNQLPPPGHHRQVSYAPSERDPESATSEHSQVPLVGLPSSPKPGARFPSLPASPKPGQTFQRSNAPTAVRTGGSLPLRAYEPALASPYTIAQTTKQTVFERKGPLSPSGAMTPYTAGAVPYSPYQPFTPCMPVTPSLITKEDRKRMRRMVPKTPTLEMVQSSDDVW

SEQ ID NO: 230101 - protein, 260 aa, Zea mays
  Clone ID: MRT4577_141446C.1.pep
MAEEQSNPQPQQAEEREVMVEQQQQPRRATKLRYLDFVQVAAAQAAVCLAGLYSLAKDHAGPLRPSVDAVESAVKGVVSPVYDRFGGLPLDVLAFVDRKVDDTVHEVDKHLPGALKAASAHVYAVVRGVPEVARELAAEAQRSGVRGAARAALAMTEPVARDVYGRVEPVAKDLYVRYEPAAEHLAVSAWRSLNGLPVFPHVAEIVVPTAAHWADKYNRVVAAAAEHGYAGAKYLPAIPTERIAKVFSSAPEAEPLAEGQ

SEQ ID NO: 230102 - protein, 259 aa, Zea mays
  Clone ID: MRT4577_141447C.1.pep
MAEEQSNPQHQQAEEREVMVEQQQPRRAPKLRYLDFVQVAAAQAAVCLAGLYGLAKDHAGPLRPSVDAVESAVKGVVSPVYDRFGGLPLDVLAFVDRKVDDTVHEVDKHLPGALKAASAHVYAVVRGVPEVARELAAEAQRSGVRGAARAALAMTEPVARDVYGRVEPVAKDLYVRYEPAAEHLAVSAWRSLNGLPVFPHVAEIVVPTAAHWADKYNRAVAAAAEHGYAGAKYLPAIPTERIAKVFSSAPEAEPLAEGQ

SEQ ID NO: 230103 - protein, 62 aa, Zea mays
  Clone ID: MRT4577_141448C.1.pep
MPTRRSRGFKHTYTRMPTDIIHIVIPISNELRKAPRQLRLTTLCGLTSHWACSTCAFHYLRT

SEQ ID NO: 230104 - protein, 58 aa, Zea mays
  unsure (1)..(58): unsure at all Xaa locations
  Clone ID: MRT4577_141449C.1.pep
MGRGKIEXKRIENSXTNREVTFSKRRAGLVKKARVIXVLCDGGVXXVILFSGGWLHDY

SEQ ID NO: 230105 - protein, 77 aa, Zea mays
  Clone ID: MRT4577_14144C.1.pep
NITKRGSVPETAGGESNDYPVGPMVLGFLIFVVIGSSLFLMIWTVTSGGLACIYCAYTRNLSVLELGGCICVVLQTG

SEQ ID NO: 230106 - protein, 79 aa, Zea mays
  Clone ID: MRT4577_141450C.1.pep
LLPQCFERGLCSLLRCLALPICRCLACFSSPLFIRAYVPSFLGPGPLIGRRAPPPRVIVRLCFVCLIFPPPPFVLFGRI

SEQ ID NO: 230107 - protein, 69 aa, Zea mays
  Clone ID: MRT4577_141451C.1.pep
AQSHTCLLSARINATFRIIKIPTYPGKTLRWSCLFPKCCRSVIGNRTATVKKIVSLGHLFDHSSYVEAA

SEQ ID NO: 230108 - protein, 87 aa, Zea mays
  Clone ID: MRT4577_141452C.1.pep
MACTNNAMRALVLLVLLCIVHGETEESQGIDAKAFGPAGSFDITKLGAFGNGKTDCTKAVHDALASACGGTGKQTIVIPKGDFLVGQ

SEQ ID NO: 230109 - protein, 66 aa, Zea mays
  Clone ID: MRT4577_141453C.1.pep
DLSVRTICQSERMPVNELVVLPDLESDQDLANGRVIFDVAVHKACAPLRPIFLTLEPFPWPCLAGT

SEQ ID NO: 230110 - protein, 38 aa, Zea mays
  Clone ID: MRT4577_141454C.1.pep
SRHRLFKPLWSHPYFHKPHPLRIDHVCKIKIASGLEPN

SEQ ID NO: 230111 - protein, 86 aa, Zea mays
  unsure (1)..(86): unsure at all Xaa locations
  Clone ID: MRT4577_141455C.1.pep
DPRAPTRPSXXKAGEHKSPEQXARNPXGQTXARQEGXRXAXEARAQAKNAPRTRKKNEADPXREGNREEAATGDARTEGDAHTXNP

SEQ ID NO: 230112 - protein, 65 aa, Zea mays
  unsure (1)..(65): unsure at all Xaa locations
  Clone ID: MRT4577_141456C.1.pep
SWSRVRGRQGRRTTGTNGLSCGGAPLLVPAWRHHQSGXRGAXPGPPENAGDPPVGRRXARPGAHI

SEQ ID NO: 230113 - protein, 67 aa, Zea mays
  Clone ID: MRT4577_141457C.1.pep
DPPMTYKVLPTRVHVCLHKGGGLIPPVTAFDHCISENYRRLLVICCITIQLLDNQKIIRVAMFSLEP

SEQ ID NO: 230114 - protein, 298 aa, Zea mays
  Clone ID: MRT4577_141458C.1.pep
MNWCCLPSRRAKKEENPYSNSIGGIYSEKNIRLFSYAELRSATDNFNRTNKVGRGGFGTVYKGTIRNGREVAVKVLSAESRQGIREFLTEIDVITNVKHPNLVELIGCCVEGNNRILVYEYLKNSSLDRALLGSNSEPADFTWSIRSAICLGVARGLAYLHEEIASPIVHRDIKASNILLDRNYVPKIGDFGLAKLFPDNVTHISTRVAGTTGYLAPEYAWHGQLTKKADIYSFGILVLEIVSGTSSSRSILMDDKVLLEKTWELYEAKSLKELVDPTLVDYPEEEVIRYIKVALFCL

SEQ ID NO: 230115 - protein, 165 aa, Zea mays
  Clone ID: MRT4577_141459C.1.pep
KGKYVVFFFYPLDFTFVCPTEIIAFSDRAEEFKKLNCQVIGASVDSHFCHLAWVNTPKKQGGLGPMNIPLVSDPKRTIAQDYGVLKADEGISFRGLFIIDDKGILRQITVNDLPVGRSVDETSRLVQAFQFTDKHGEVCPAGLIPGSDTIKPDVHKSKEYFSKQK

SEQ ID NO: 230116 - protein, 119 aa, Zea mays
  unsure (1)..(119): unsure at all Xaa locations
  Clone ID: MRT4577_14145C.1.pep
GPKGPWGGPGFSCCPVGSSPKKGKKVKRGVFYFWALIWEPPTFFVVHIPTGKILVRTPFPVFLVGNGGKVVCPRWFWKDFSQNWLNVWGGPGLGWEKTAKTLKSSPCGWGCXKVYIRGX

SEQ ID NO: 230117 - protein, 62 aa, Zea mays
  Clone ID: MRT4577_141460C.1.pep
PVCERLGATPTEDDVYPVRKVPIDYMACVGLREPSCKAMGKAVSLCSRYVNNRADLKEPLEG

SEQ ID NO: 230118 - protein, 52 aa, Zea mays
  Clone ID: MRT4577_141461C.1.pep
VVELRGNLYIFGIESFLFHFIFVEVGLVFVSLVIFVEVGSENVYTLCLLSFI

SEQ ID NO: 230119 - protein, 106 aa, Zea mays
  Clone ID: MRT4577_141462C.1.pep
TSPMDGSPVEDPTSRRLMYCSFGFTITSGRGELAVDMSSARTMRTDKVGVKVGRPPADFRVSKLHVRQCAYWGCKKSNCPGTYCGIETCILPLATGSVGPYGHGDE

SEQ ID NO: 230120 - protein, 116 aa, Zea mays
  Clone ID: MRT4577_141463C.1.pep
YPTTKALLCLNHLLYKLEEPFFTYNPASFRINSPSFLRSPCTLLNTNPINLLSILQKFTDIPTPLFKSIQGRLSRPSNHIYPRLLLHSSFIVSLTLTFLSFTIKSTESKNTLFPQL

SEQ ID NO: 230121 - protein, 214 aa, Zea mays
  Clone ID: MRT4577_141464C.1.pep
FGTRLIIIRLVAVLAFFAWRIRHNKSDIMWFWTMSIVGDVWFGFSWLLNQLPKFNPVKTIPDLAALQRHFGYPDGGASRLPGIDVFVTTADPIDEPILYTMNCVLSILSVDYPVDRLACYLSDDSGALVLYEALVEVGKFAPLWVPFCRKYSIEPRAPESYFEHVAPPQAGRVTQEFLNDYRRVQMEYDEFKARLDHLPDTIRKRSDVYNSLRD

SEQ ID NO: 230122 - protein, 75 aa, Zea mays
  Clone ID: MRT4577_141466C.1.pep
MARGQQKIQSQQKNQKKMDAARRAGIDQKAAAMKALIHTCAVCKSQMPDPKTYKQHFESKHPKAPMPPELIDVQA

SEQ ID NO: 230123 - protein, 47 aa, Zea mays
  Clone ID: MRT4577_141467C.1.pep
PKLFKHRSQLGQLKVNGFVGLGSQSGAVAVKQERMGSLEPRDSEIAL

SEQ ID NO: 230124 - protein, 72 aa, Zea mays
  unsure (1)..(72): unsure at all Xaa locations
  Clone ID: MRT4577_141468C.1.pep
RXEKTGPTSSLVCNTHIGSNFISPCMLDNNWWVVSHNVKALPNILQHCYWENTGVTKLIRVTEINVSQQANI

SEQ ID NO: 230125 - protein, 46 aa, Zea mays
  Clone ID: MRT4577_141469C.1.pep
GRRLFSNGLNLLLLGLTADVSGGSDHRCSFLAPGSPRTWRPGRPSP

SEQ ID NO: 230126 - protein, 63 aa, Zea mays
  unsure (1)..(63): unsure at all Xaa locations
  Clone ID: MRT4577_14146C.1.pep
MGRMHSRGKGISSPALPYKRTPPTXWLKTAASDVEEMITEAANNGQRPLHIRERLRDQGGIPR

SEQ ID NO: 230127 - protein, 60 aa, Zea mays
  Clone ID: MRT4577_141470C.1.pep
PLCLCIVVLGFLVYLPFNVTFVLECLIYVLSLLFYSNEWVVGMCSHAVPFLQMHVLPARF

SEQ ID NO: 230128 - protein, 63 aa, Zea mays
  Clone ID: MRT4577_141471C.1.pep
MGLLDSLYRVVMRRNAVYVTFVVAGAFAGERVVDYGVHKIWEMNNLGKRYEDIPVLGQRPAEE

SEQ ID NO: 230129 - protein, 58 aa, Zea mays
  Clone ID: MRT4577_141472C.1.pep
SLKYSVLSHQNVHQPRARVKNQNVRQMNRPKRKFRIPCVFQCFCLFDILSTIYGGCFI

SEQ ID NO: 230130 - protein, 228 aa, Zea mays
  unsure (1)..(228): unsure at all Xaa locations
  Clone ID: MRT4577_141473C.1.pep
VPLAQQYIGISXRDYTKRSELFNTLCYEKVVESIKQGHQALVFVHTRKDTGKTARTLIDLAAKAGELELFSSADHPQFPLIKKDVSKAKSREVVEFFESGFGIHNAGMMRSDRSLMERLFGDGLLKVLVCTATLAWGVNLPAHTVVIKGTQLYDPKAGGWRDLGMLDVMQIFGRAGRPQFDKSGEGIIITTHDKLAYYLRLLTSQLPIESQFLGSLKXNLNAEXALGT

SEQ ID NO: 230131 - protein, 63 aa, Zea mays; identical to SEQ ID NO: 230128
  Clone ID: MRT4577_141474C.1.pep

SEQ ID NO: 230132 - protein, 65 aa, Zea mays
  unsure (1)..(65): unsure at all Xaa locations
  Clone ID: MRT4577_141475C.1.pep
SLYLSLISKKNPDPLLPHLFLFFPQPXLDCLRFTGGILGPFNLKNKKPLPLQFXXPLKLLAKNWV

SEQ ID NO: 230133 - protein, 79 aa, Zea mays
  unsure (1)..(79): unsure at all Xaa locations
  Clone ID: MRT4577_141476C.1.pep
CKAXAPVPRXXSDTIRPHQLFGXXSFGXHEEGPPXKKRXKARGLGVSSILKKAEKIFVSGPCLPVLTSLRLVCTCYXYL

SEQ ID NO: 230134 - protein, 118 aa, Zea mays
  Clone ID: MRT4577_141477C.1.pep
MAAVNLLAESAAVRLRAPAPPSAGEELAARLTECGFPATARRGGAVAGVGESARKWREMAARKEELLLRSRGRVAWTIVALCCGSHASHILHSLGIHVGHGINSLVLKGIEQTGSSVM

SEQ ID NO: 230135 - protein, 92 aa, Zea mays
  Clone ID: MRT4577_141478C.1.pep
TERDYLRKIIVQGRSSKSTKVGDIMTEENKLITVNPDTKVLQAMQLMTENRVRHIPVIDGTGMLGMVSIGDVVRAVVAEHREELNRLNDYIQ

SEQ ID NO: 230136 - protein, 92 aa, Zea mays
  Clone ID: MRT4577_141479C.1.pep
RFTIGKATAGGRYLEPHSISTEDRHVAPTPKQLKYLYKRSWRFPLFGRSKEQQAEPSSQDIPTQSRYPPSRVGSSARTYTPTSSSARLHQRA

SEQ ID NO: 230137 - protein, 145 aa, Zea mays
  unsure (1)..(145): unsure at all Xaa locations
  Clone ID: MRT4577_14147C.1.pep
MENLDLLKSGGKAWLAASGGANNSKLSLQERAALRKQEMAGEQPSYSSYSPQPQSPSPYSQPMYSPQQIASPPPAYTSHTHVPTAEKKKFVVALYDYHAQAEGDIQFXKSDRIELVTRTADANDWWTGRLNGMTGVFPGNYVAEL

SEQ ID NO: 230138 - protein, 213 aa, Zea mays
  Clone ID: MRT4577_141480C.1.pep
RPGKCPSSVFLLCRLPSSTPLPSPHHLQPRLSTAAQASLRLRSARAADVLKSKGKSADGSWLWCTTEDSVYDAVKSMTQHNVGALVVVKPGQNKSIAGIVTERDYLRKIIVQGRSSKSTKVGDIMTEENKLITVNPDTKVLQAMQLMTENRVRHIPVIDGTGMLGMVSIGDVVRAVVAEHREELNRLNDYIQGGYGRRVQRRPPPIAVSEVRL

SEQ ID NO: 230139 - protein, 194 aa, Zea mays
  unsure (1)..(194): unsure at all Xaa locations
  Clone ID: MRT4577_141481C.1.pep
MQRAVQAVRSHGNVLKYAVLQHISAPKPAMLPAAFSRFMSVSSARLEDRGFETATVADVLKSKGKSADGSWLWCTTEDSVYDAVKSMTQHNVGALVVVKPGQNKSIAGIVTERDYLRKIIVQGRSSKSTKVGDIMTEEVLQAMQLMTENRVRHIPVIDGTXMLXMVSIGDVLRAVVAEHREELNRLHDYIQGSY

SEQ ID NO: 230140 - protein, 205 aa, Zea mays
  Clone ID: MRT4577_141482C.1.pep
MQRAVQTVRSHGNVLKYAVLQHISAPKPAMLPAAFSRFMSVSSARLEDRGFETATVADVLKSKGKSADGSWLWCTTEDSVYDAVKSMTQHNVGALVVVKPGQNKSIAGIVTERDYLRKIIVQGRSSKSTKVGDIMTEENKLITVNPDTKVLQAMQLMTENRVRHIPVIDGTGMLGMVSIGDVVRAVVAEHREELNRLNDYIQGGY

SEQ ID NO: 230141 - protein, 71 aa, Zea mays
  Clone ID: MRT4577_141483C.1.pep
VFVGTEFVCAIARDSVARQIYWAQCMVVTPWLSAPSMDGQLSVRCHSLQCCLGSKIKPVGAPSSRIPSLRT

SEQ ID NO: 230142 - protein, 205 aa, Zea mays
  Clone ID: MRT4577_141484C.1.pep
MQRAVQAVRSHGNVLKYAVLQHISAPKPAMLPAAFSRFMSVSSARLEDRGFETATVADVLKSKGKSADGSWLWCTTEDSVYDAVKSMTQHNVGALVVVKPGQNKSIAGIVTERDYLRKIIVQGRSSKSTKVGDIMTEENKLITVNPDTKVLQAMQLMTENRVRHIPVIDGTGMLGMVSIGDVVRAVVAEHREELNRLNDYIQGGY

SEQ ID NO: 230143 - protein, 286 aa, Zea mays
  Clone ID: MRT4577_141485C.1.pep
MQRAVQAVRSHGNVLKYAVLQHISAPKPAMLPAAFSRFMSVSSARLEDRGFETATVADVLKSKGKSADGSWLWCTTEDSVYDAVKSVCPHFPMIVLTPSESMVMHQMIRLPFGTLNFLQMTQHNVGALVVVKPGQNKSIAGIVTERGDEQISVLLASNFWPVAVHHSTFGIKESQLFRALYSRYNRNCIKLKYTYYLRKIIVQGRSSKSTKVGDIMTEENKLITVNPDTKVLQAMQLMTENRVRHIPVIDGTGMLGMVSIGDVVRAVVAEHREELNRLNDYIQGGY

SEQ ID NO: 230144 - protein, 206 aa, Zea mays
  unsure (1)..(206): unsure at all Xaa locations
  Clone ID: MRT4577_141486C.1.pep
MQRAVQAVRSHGNVLKYAVLQHISAPKPAMLPAAFSRFMSVSSARLEDRGFETATVADVLKSKGKSADGSWLWCTTEDSVYDAVKSMTQHNVGALVAVKPGQNKSIAGIVTERDYXLRKIIVQGRSSKSTKVGDIMTEENKLITVNPDTKVLQAMQLMTENRVRHIPVIDGTGMLGMVSIGDVVRAVVAEHREELNRLNDYIQGGY

SEQ ID NO: 230145 - protein, 91 aa, Zea mays
  unsure (1)..(91): unsure at all Xaa locations
  Clone ID: MRT4577_141487C.1.pep
SRQPHGLAFFGANQVLPGGVGYKTVGDRSPYPGSFMLDQLTGFYAFVVFNKXNNNLLVAFDPNGRVPFFRGITRDSCIAFFDDIDMLKGSC

SEQ ID NO: 230146 - protein, 205 aa, Zea mays; identical to SEQ ID NO: 230142
  Clone ID: MRT4577_141488C.1.pep

SEQ ID NO: 230147 - protein, 289 aa, Zea mays
  unsure (1)..(289): unsure at all Xaa locations
  Clone ID: MRT4577_141489C.1.pep
MQRAVQAVRSHGNVLKYAVLQHISAPKPAMLPAAFSRFMSVSSARLEDRGFETATVADVLKSKGKSADGSWLWCTTEDSVYDAVKSMTQHNVGALVVVKPGQNKSIAGIVTERDYLRKIIVQGRSSKSTKVGDIMTEEVLPPLIFFVCVVCKIARTXSIRPVPGDDMTYISAERMLGHNLTGEPLXXNKLITVNPDTKGLQAMQLMTGNLVARVLLSEKKKXTRIXSAGKLVMIRCXQSSAQKTAVRHIPVIDGTGMLGMVSIGDVVRAVVAEHREELNRLNDYIQGGY

SEQ ID NO: 230148 - protein, 133 aa, Zea mays
  Clone ID: MRT4577_14148C.1.pep
RAMWGEQAQSQRMVPWTVPDPSGGSAGGYLFNVSQQAAHMQAAFGGQSQFFFQRGPLQSSNQPSERGWPESVEADNPMQHGGLSPAVSAIGFSPGVGFSGIRIPTRMQGDEEHNGGGNGDKPPPPSVSSASHH

SEQ ID NO: 230149 - protein, 64 aa, Zea mays
  Clone ID: MRT4577_141490C.1.pep
LDLVPHTYTQCLRRLTTEVVPPYYLAKDKAAFSPGFLSSHGNLLDPFHLMMYAVYVRHFESAYI

SEQ ID NO: 230150 - protein, 36 aa, Zea mays
  Clone ID: MRT4577_141491C.1.pep
RRPPPSSVSLAITPCPPCLSVLFIGDLASQAACLES

SEQ ID NO: 230151 - protein, 59 aa, Zea mays
  unsure (1)..(59): unsure at all Xaa locations
  Clone ID: MRT4577_141492C.1.pep
RKTRHTKGNAGTPAGTGPADPRRPTRTRTVRLSSAVKPWRSDSXIHDKEYRNAVSKYAM

SEQ ID NO: 230152 - protein, 104 aa, Zea mays
  unsure (1)..(104): unsure at all Xaa locations
  Clone ID: MRT4577_141493C.1.pep
KPKSESATVFCLRIPLASPNGCLLEKVCAHFISGAKKQKFCVKGPVRWPTKVFCFSTCKTPCGEGGKTWGRFPMGVPQGILDLPSPSGVVXPIPSINLGPGVEV

SEQ ID NO: 230153 - protein, 105 aa, Zea mays
  Clone ID: MRT4577_141494C.1.pep
STWLGIPSLQSQNSCYGPEKMGVKTPRRKLQTLTFSVSPKKKGFRERNDLQQFMAICTNCPPRENSQKFGGLLFPFDGALKGPPFVPIFQGAREQICSWAFFPWK

SEQ ID NO: 230154 - protein, 54 aa, Zea mays
  Clone ID: MRT4577_141495C.1.pep
LTCSVTKTMCHTARPPPVYLGVKATPQVGTTTSAGRCNHTLTTAYNKTGTYLKT

SEQ ID NO: 230155 - protein, 79 aa, Zea mays
  unsure (1)..(79): unsure at all Xaa locations
  Clone ID: MRT4577_141496C.1.pep
PRVFPPPAFPVLFKVFDLDGKGKISFKGLFEVFWGLTGFFLFEGQKEQVVTXVLEKAGVPRGFAFLLXGFFQVFGPSGL

SEQ ID NO: 230156 - protein, 176 aa, Zea mays
  unsure (1)..(176): unsure at all Xaa locations
  Clone ID: MRT4577_141497C.1.pep
KSSHTIASPTLPKPFLQICGRPQTLIYTSTRLSSGAHRATISAEAGRQNWDFGRFVKTLFFFNGFPSPAKXHFIQFSTSITREXGRKEREREVGMEYGSTNEYSLFLNCXFFDYLAEKISDPSPSEVISTMGTSDIVLVAGATGGVGRRVVDILRKKGIPVRVLVLLLTYLANKMI

SEQ ID NO: 230157 - protein, 60 aa, Zea mays
  Clone ID: MRT4577_141498C.1.pep
RASSVGGGGSLILMLLTEICNWGPLVPHGAISPPSSIRSSPVRMRIMLSDHGVPPRPAAS

SEQ ID NO: 230158 - protein, 56 aa, Zea mays
  Clone ID: MRT4577_141499C.1.pep
TPGAPPLRSSSPARPPSSNPASGTPPAPPGIQIKKLFFLLIPGFCNLAAGPGGAYF

SEQ ID NO: 230159 - protein, 56 aa, Zea mays
  Clone ID: MRT4577_14149C.1.pep
NTNILPLKPKCSKDLSPAREKGPCFGEPPGGETFAGPYCRNGSNTNSPYRSMPRES

SEQ ID NO: 230160 - protein, 195 aa, Zea mays
  unsure (1)..(195): unsure at all Xaa locations
  Clone ID: MRT4577_1414C.1.pep
MECENGHVAANGDGLCVAQPARADPLNWGKAAEELSGSHLDAVKRMVEEYRKPVVTMEGASLTIAMVAAVAAGSDTRVELDESARGRVKESSDWVMNSMMNGTDXSYGVTTGFGATSHRRTKEGGALQRELIRFLNAGAFGNGNDGHVLPAAATRAAMLVRVNTLLQGYSGIRFEILETIATLLNANVTPCLPLR

SEQ ID NO: 230161 - protein, 208 aa, Zea mays
  unsure (1)..(208): unsure at all Xaa locations
  Clone ID: MRT4577_141500C.1.pep
GPLDGRSRLELAARGQNIVFVTGEXSPXCKSGGLGXVCGSLPVALAARGHRVMVVMPRYLNGTSDKNYANAFYTEKHIRIPCFGGEHEVTFFHEYRDSVDWVFVDHPSYHRPGNLYGDKFGAFGDNQFRYTLLCYAACEAPLVLELGGYIYGQNCMFVVNDWHASLVPVLLAAKYRPYGVYKDCLTLVKGMPPRPFREYPLQSSIPFR

SEQ ID NO: 230162 - protein, 69 aa, Zea mays
  Clone ID: MRT4577_141501C.1.pep
NPATNEKEAAVSNHGGPEKPSPTHHTHQHHHLKHHKRDHKHAARPRHHKTAEHTHDTITKPSPTDDNQY

SEQ ID NO: 230163 - protein, 41 aa, Zea mays
  Clone ID: MRT4577_141502C.1.pep
LVSTARPFPSPVIRLQVYFCDGCMDESCVRLWSNYYTFYDL

SEQ ID NO: 230164 - protein, 63 aa, Zea mays
  unsure (1)..(63): unsure at all Xaa locations
  Clone ID: MRT4577_141503C.1.pep
MASQLSAAVPRFHGLRCYVAPRSAEAALPSXRXRNMSSSHGIRCYYIGSAINLIMVTTTTLML

SEQ ID NO: 230165 - protein, 87 aa, Zea mays
  Clone ID: MRT4577_141504C.1.pep
LFVPVRDSRVDPHVRTTWIKDDKIKFILEVLLPEAIICSISAVDGLDYEAAEAKYLKGPCVGYRERELFDAKIIYEKRRKPPTNEAH

SEQ ID NO: 230166 - protein, 80 aa, Zea mays
  Clone ID: MRT4577_141505C.1.pep
GGPSQFLEPLAGAPPVGKPGSPNFSQPKRGGSWPPPPPGEKIFIGPFSPTGGGGGYSLRKKQKAYLPTKPPFKEPGQNPG

SEQ ID NO: 230167 - protein, 51 aa, Zea mays
  Clone ID: MRT4577_141506C.1.pep
EKEPIAVQGNISYDIVKFITDTWLDVHESTIFFIEYGSKVRVALCHIVYKA

SEQ ID NO: 230168 - protein, 92 aa, Zea mays
  unsure (1)..(92): unsure at all Xaa locations
  Clone ID: MRT4577_141507C.1.pep
LPKVLGRGHPPQYPTRMEARAHGGDGVRISPLAVAKKKKKNPHPPFXWLGLISFFTRARSFICFPASRSDVNIFLLFLKDAVASVKKKKTPP

SEQ ID NO: 230169 - protein, 75 aa, Zea mays
  Clone ID: MRT4577_141508C.1.pep
WAPRSNHAGIGTRRLPGSNVILSSSGSNQLHTSDLVFEFHEVKTLNICLAKVVHIATTAQEKMKPTQEFQDYDEF

SEQ ID NO: 230170 - protein, 115 aa, Zea mays
  unsure (1)..(115): unsure at all Xaa locations
  Clone ID: MRT4577_141509C.1.pep
ANGARKKHARAPARERENCRNRPSERPPGQEHARGATPTXEERGDRKTKHGVTKKRPSQQKKNPPPPPQGNANTRQRDTKRKKKRGDRRKGNTEKQVNKIKAKKQRHRDKITTEP

SEQ ID NO: 230171 - protein, 134 aa, Zea mays
  unsure (1)..(134): unsure at all Xaa locations
  Clone ID: MRT4577_14150C.1.pep
VASFIPLGCLFFPVEGRPCFPPNLGWFLPSPGPPGFPPFSPGLPPLGPPPNXPPVPPGAPNYPKFPPPPPSPQKAPLPPPPPPFWPSPFPPPFLPXPGFLECLPGSPPPARCPLSFPPRPPKKFTTNNIQKKQS

SEQ ID NO: 230172 - protein, 71 aa, Zea mays
  Clone ID: MRT4577_141510C.1.pep
HQVEAEQTVIEGEDAESEEDYSILILTKPSHLDFEKSIAPEDDMPMMMKLGYFGEAESKLVRFAGGETTPV

SEQ ID NO: 230173 - protein, 106 aa, Zea mays
  Clone ID: MRT4577_141511C.1.pep
FVFCQVFNEINSREMEKINVFRGILKNWVFISILTTTIIFQVIIVEFLGTFANTVPLSWELWLLSAILGSVSLVISVILKCIPVESRKTDIKPHGYELIPEAPETV

SEQ ID NO: 230174 - protein, 585 aa, Zea mays
  unsure (1)..(585): unsure at all Xaa locations
  Clone ID: MRT4577_141512C.1.pep
MAMAISSALPCSLLVAALMLLASSVVQVQGITRHYDFNVTMANVTRLCASKSIITVNGQFPGPKIVAREGDRLVIRVTNHAQHNISLHWHGIRQLRTGWADGPAYITQCPIQTGQSYVYNYTVVGQRGXTWWWHAHISWLRATVYGPLVILPKLGVPYPFPAPYKEVPVIFGEWWLADTEVVIKQALQLGAGPNVSDAHTINGLPGPLYNCSAKDTYKLKVKPEKTDILRLINLPCKDELFFSVANHSLTVVEVDAVYVKPFTVDTLLIAPGQTTNVLLAAKPSYPGANYYMSAAPYSTARPATFDNTTVAGILEYEMYPDAPRPSAGSFNKALPLYRPTLPQLNDTSFVGNFTAKLRSLATPRYPAAVPRTVDRRFFFAVGLGTHPCPANATCQGPTNTTQFAASVNNVSFVLPTKALLHSHFTGLSSGVYSPDFPVAPLAPFNYTGTPPNNTNVASGTKLMVVPYGANVELVMQGTSILGVESHPLHLHGFNFFVVGQGYGNYDPVNDPPKFNLVDPVERNTVGVPAGGWVAIRFLADNPGVWFMHCHLEAHTTWGLRMAWLVLDGSLPHQKLLPPPSDLPKC

SEQ ID NO: 230175 - protein, 73 aa, Zea mays
  Clone ID: MRT4577_141513C.1.pep
AKDMVDFLVLVNQIICKFKSSASAIMEGKFPTNASRLSAILSQDAFSAGPASNTEEMRELQELQRTLYTFLHA

SEQ ID NO: 230176 - protein, 104 aa, Zea mays
  unsure (1)..(104): unsure at all Xaa locations
  Clone ID: MRT4577_141514C.1.pep
LQPQQAPLRQVSVAXPPQVLPFNELAAMNSTAXMXQQQLLQLNQLSXDRGPASLLTQPQLFDDFXHAEPNXAGTLLQLXHLLPFNQLALTTXQVFYQQPIIGWG

SEQ ID NO: 230177 - protein, 103 aa, Zea mays
  unsure (1)..(103): unsure at all Xaa locations
  Clone ID: MRT4577_141515C.1.pep
MSGGVKGGKGLCKGRCETAHRXKVLRYNIQGITKTAFRRLXARVGVKXRISGLIYXETPALRSHHLXENGVRDADTYSEHVRRKTATSMDGAHSLKRQGRTLY

SEQ ID NO: 230178 - protein, 60 aa, Zea mays
  Clone ID: MRT4577_141516C.1.pep
ALHVRGWGTFYCRNCECHIESVIQRQLALASRLTAITVRLTLYIQHNLREALTYNTYGLR

SEQ ID NO: 230179 - protein, 181 aa, Zea mays
  Clone ID: MRT4577_141517C.1.pep
MEQTGAAARGAPGAGVEGGDKTARKALKVVAAVDASEESLHALSWALDNVVRCHPDATLVVVHAQHAADHFAYPVAAHGIVYAPSSGVESVRAAQEESSRRVVARALDICKERQVDATGAVVEGDAKEAIRQAVERMQAGLLVLGSRGLGAIKRAFLGSVSDYLIHHACCPVLVVRPRPTK

SEQ ID NO: 230180 - protein, 92 aa, Zea mays
  Clone ID: MRT4577_141518C.1.pep
ALSLTDSMSDVYVHVITPNTQPPHQTTSTTQKTTVPSAASSAASSATPAPPASLLSLAGGVAVAASSARASGGGDSGGEDGSGTEMAVKCKN

SEQ ID NO: 230181 - protein, 52 aa, Zea mays
  Clone ID: MRT4577_141519C.1.pep
FFLVWLSQFLYFQLKFRLLIIFYSERALVSRYDDVTTLSSNSSTTTSDNPST

SEQ ID NO: 230182 - protein, 67 aa, Zea mays
  Clone ID: MRT4577_14151C.1.pep
AILGLVLQSISAAAAENGPVRGVVEWPKSPQIDGNLRLQPPGSMPLRCCRRCPPLKKVCAVVYPVGR

SEQ ID NO: 230183 - protein, 110 aa, Zea mays
  unsure (1)..(110): unsure at all Xaa locations
  Clone ID: MRT4577_141520C.1.pep
TPTLILNANALHHLLTYQKDHFLSLFHAIDGLSATIXLLDPLLHKFLSKRNIXNLASTVFLDTXANHDDALSRIEKLLEVNPMLCFHSCRRVNQLSTLNRAAYLQQHLLP

SEQ ID NO: 230184 - protein, 51 aa, Zea mays
  Clone ID: MRT4577_141521C.1.pep
MATNIEDVPSVELMTELLRRAKCSSKPDKRIILCYPPGSGKGTQSGLVEGE

SEQ ID NO: 230185 - protein, 180 aa, Zea mays
  unsure (1)..(180): unsure at all Xaa locations
  Clone ID: MRT4577_141522C.1.pep
GPLGSAASLPAPGSXPPPPESTPTTSTDSPAPXNPPVHCPPPHDGGXGPPGRPSSGLLGXAPPPGAXASAPRSASPSRLASPSPSSGPRSPRLPPPSRSLLSAHPSQLKLPHRQPPPTIAPPPAATAAAAGTLTGSPVPSRTATRSATLLLLDPIPIPTPPMSPSRRVPPQQRTITPSRL

SEQ ID NO: 230186 - protein, 48 aa, Zea mays
  Clone ID: MRT4577_141523C.1.pep
NSQANCESTDPELSVNPLFLRLVSITHLFPSFICPPFFLGRTRGQSSG

SEQ ID NO: 230187 - protein, 95 aa, Zea mays
  unsure (1)..(95): unsure at all Xaa locations
  Clone ID: MRT4577_141524C.1.pep
ATRSSTYLGPSASAAADHXLFFSYASYVNLNPRDRNGDPGGIACMQAQTMHCTRLMLVASKGRCVLNHDDDSRLNQPAILMWQTDVKLLHGGIGI

SEQ ID NO: 230188 - protein, 193 aa, Zea mays
  unsure (1)..(193): unsure at all Xaa locations
  Clone ID: MRT4577_141525C.1.pep
PAPGSRERRATPWAAHNPGTEPPAGAGASTAPGNAALAPPAPGTNHPGAAPNDPEKKEPHXEKGNRGGPSKTQXPDPDEGPPHGKPETRXDXAQNHGEEXRGDRKENXPNTXEKREHQKRQAPXKTXAGEKEAKPXKEKXEXEHRGNKRGDNXPARRPTQRGEQEGADXXKQGGHEGAKGKXPGSKAEKTRPQ

SEQ ID NO: 230189 - protein, 68 aa, Zea mays
  Clone ID: MRT4577_141526C.1.pep
LHHSPGRSDCVARDNGDLTTRLGQTCRSRYPADEWTLSTVRDMASELRPEHRTSNVMWHCSGRYDRCA

SEQ ID NO: 230190 - protein, 42 aa, Zea mays
  unsure (1)..(42): unsure at all Xaa locations
  Clone ID: MRT4577_141527C.1.pep
RLDSGSRFQGLCFVHASCVCPFFYSVVRIFAGSFLKSPQXAL

SEQ ID NO: 230191 - protein, 136 aa, Zea mays
  Clone ID: MRT4577_141528C.1.pep
CSFFSLFFFLLVFLLHTLSVFRLGRCEKCKRSPHKKKTPRRDHLPTGQANNPAKPPQQTHQKPSDKKGRTFQTRGKNTTQNQKNGRKKTQKNKLSKSRLPTPAGASIETAKEPSPHPREKKGQNQTRGDNKRPNRG

SEQ ID NO: 230192 - protein, 58 aa, Zea mays
  Clone ID: MRT4577_141529C.1.pep
SKRHHVCVARSLLHRSTYYRLQITTKCMLLQRVTIEICMQNSIYIRPLAPYTCVRVSK

SEQ ID NO: 230193 - protein, 66 aa, Zea mays
  Clone ID: MRT4577_14152C.1.pep
CLLLNSSDVELDTPNLHAHHDQELNALASQYICFLQCAINHPAMTPTRPQHCKFKQFTCKKNILLL

SEQ ID NO: 230194 - protein, 68 aa, Zea mays
  Clone ID: MRT4577_141530C.1.pep
QAAFVLALCPVQSDVAWFCRSHFIAATMTSRDRTVVHWRIALHVVSPMVAVGRRGRCSSESCRNYIRS

SEQ ID NO: 230195 - protein, 85 aa, Zea mays
  Clone ID: MRT4577_141531C.1.pep
PNVRVFVSKKGWPWAGGFGARVDNGGKYNQGLFGPVGRGTPKRAGPLEPFVFAMFTENQKGGGPPEKNLGLFLGNKQPGDPIRFN

SEQ ID NO: 230196 - protein, 47 aa, Zea mays
  Clone ID: MRT4577_141532C.1.pep
KLKFSVQCGWCLSEFLLKKKKKKKKKKKKKKKKKKKKKKKKKKKKGG

SEQ ID NO: 230197 - protein, 64 aa, Zea mays
  Clone ID: MRT4577_141533C.1.pep
EHLAAIYEKMGLACGDGRHRYDSTRLKIHKLTDLSEKYRDEGNPTWGGGHYCISYTKEIIVGSR

SEQ ID NO: 230198 - protein, 52 aa, Zea mays
  unsure (1)..(52): unsure at all Xaa locations
  Clone ID: MRT4577_141534C.1.pep
TITTYNSFASIESMHESQASSNQXEGKKKMMCGVGVWCMAVAVKIADTRQLA

SEQ ID NO: 230199 - protein, 55 aa, Zea mays
  Clone ID: MRT4577_141535C.1.pep
VCWFKIHIEVGLQVPHHSSPYSRVVWLTLSLIKKTYFFCQSVTPPVDISHSCCLP

SEQ ID NO: 230200 - protein, 73 aa, Zea mays
  Clone ID: MRT4577_141536C.1.pep
NIGFSRGGSSHFQQRVNKLPFESARSFMETFNHHWDTPPEVLFIIFFRPPLSKTYHGCIVVVVKKKLLTVIIF

SEQ ID NO: 230201 - protein, 40 aa, Zea mays
  Clone ID: MRT4577_141537C.1.pep
RTRPCQFHVTSSYPVSGIRRIVIFHIITFNTDMHSLNLLF

SEQ ID NO: 230202 - protein, 54 aa, Zea mays
  Clone ID: MRT4577_141538C.1.pep
SFFPLFVPFLFLSMIENRERLLFRKRCPIFLTALITHMTMFAKPMFHSRRHHAT

SEQ ID NO: 230203 - protein, 92 aa, Zea mays
  Clone ID: MRT4577_141539C.1.pep
NQGLGPLGAPPFRVFCSRILGSPPTGGLYALKKLGVGKNALGILGVGSGEKNPHGFPKTLKGWVYQGIPWYLPILFGLWACGGVFPPPQIRN

SEQ ID NO: 230204 - protein, 85 aa, Zea mays
  Clone ID: MRT4577_14153C.1.pep
LSNSKQGKLSLKLLFNSNANSGLSTCLKFINFRFRLFTPLLATFTHPFLNTKHQVVPITTPAQEKMKAMWRTFKSCRTSMSSRVD

SEQ ID NO: 230205 - protein, 183 aa, Zea mays
  unsure (1)..(183): unsure at all Xaa locations
  Clone ID: MRT4577_141540C.1.pep
KTLXRCERHPDGQFMCYLSVPILKEMNLVDTPGTNVXLQRQQRLTEEYVPRADLVLFVLSSDRPLTESEVGFLQYVQQWKKKVVFILNKLDLYRNSNELEEATAFVKENAMKLLTAEDVTLFPVSSRSALEAKLSYSKNSDGKHSTEAMYNDPRWRSSKFFELEDYLLSFLDSSTEQKKRRAA

SEQ ID NO: 230206 - protein, 151 aa, Zea mays
  unsure (1)..(151): unsure at all Xaa locations
  Clone ID: MRT4577_141541C.1.pep
CSLACLARSSAVVXLVRLSLGXCRSAAVLFLSXSLSSAPFSRASCVCAASLLXVGLAGGGVVLLGRPLXAGPSARPPCCGSAAPPPPXFSLRWRVACLRRGPLVCLPVLGAVLRGGGGAGRLSVVALLVSGWGPPPPPAGGLGFVSAPAGS

SEQ ID NO: 230207 - protein, 54 aa, Zea mays
  unsure (1)..(54): unsure at all Xaa locations
  Clone ID: MRT4577_141542C.1.pep
EPSXHFHHSTRFPKTSCNAVYPKKCSIRPKLYFRLESMPCITLPCCHHYFMICN

SEQ ID NO: 230208 - protein, 95 aa, Zea mays
  unsure (1)..(95): unsure at all Xaa locations
  Clone ID: MRT4577_141543C.1.pep
HRGPPTQYLLARTYFVFLLIYXDHPLYALFFSMSFXFIYSNPFLLFVPFYLFSFLFFFFQIILFIFFXFFSIFIFFFLFFFSFWLLFILXFFFFF

SEQ ID NO: 230209 - protein, 102 aa, Zea mays
  Clone ID: MRT4577_141544C.1.pep
SSPQKETIYNMKITVTYAASIYKMTNVVAYMLFSFFSTSVWSMPFPIQSSCVCCGIYLNSGLPIPSRSGPSPSTSLPCFSSLLVICGCAGVYICWVDNRFHC

SEQ ID NO: 230210 - protein, 106 aa, Zea mays
  Clone ID: MRT4577_141545C.1.pep
VVVAAVVLVAVSSGVAVRVVGPPRFVRGLRWGCGRGRSSLPVVLVRVPCLGVVCAFPGLVCAAWCPLFLSGRSLVRPGLRPGPTSGFSTKGPPAPPPPPPPRRGAP

SEQ ID NO: 230211 - protein, 66 aa, Zea mays
  Clone ID: MRT4577_141546C.1.pep
ACIVLCIMMNHEAESDVCATVSVLLTGSILDLRSNASTLEEDRIWHHRSAHTLVIHAWSHGLVKTR

SEQ ID NO: 230212 - protein, 73 aa, Zea mays
  Clone ID: MRT4577_141547C.1.pep
PGFKPWRYVGCGPVILSNRQDSLLLQAFVGREQGSCRGGVTLGHPKCVCIQLYLDTRVEGHEQVSIVKIWLNH

SEQ ID NO: 230213 - protein, 275 aa, Zea mays
  unsure (1)..(275): unsure at all Xaa locations
  Clone ID: MRT4577_141548C.1.pep
MAGLSLRCGDCGAQLRSVEEAQAHAESTNHANFVESTEAVLNLVCSNCGKPCRSHTEVDLHTKRTGHTEFADKTAEAARPIDLEAPLKPASDDATDVDASASATEETQETVVPEVNKEVLTDLEGMGFSTARATRALHFSGKAXIECAINWLSEHKXDADIDEMPLVPTXSKTEVTRPSLTPQKINIKAQQLRDRARKKKQQKDTRMEREREKXRLMCAGEQSAQPGHRKGRQVAXERIRIGKELLEAKRIEEQNERKRMIELRKLEKEEEKRAR

SEQ ID NO: 230214 - protein, 356 aa, Zea mays
  Clone ID: MRT4577_141549C.1.pep
MARPPSAALKPPYPAFQSHPSDLELVNFYLRPWVETGVKTGAFIHDADVYAADPNYLTRQFAPAVAQDGERAWYFYTPLRHKSVHGTRKTRTVATGGGCWHNEAKARPVYMVSNGMHQIAHRQSFSFVEKDGGVRVRTGWLMMELRLVEDGAAGQKPEEDGALGSRVLCKVYRSPRNPEPSGIEAATAPGQKAEADDDESCDDESSDATLDDDDSSNASLAAASGPKRESDEVESSDATVAAPSRHSAPNDEISGRSAVAPGRKEKTEIGEVSTETSAAVRKRRKADGSSSPGTPVSTTDMHCPQCGTHLMLTLNMAESKSETGLAKDESATAAPDQGGTGESSQKDVRVRFHQFL

SEQ ID NO: 230215 - protein, 166 aa, Zea mays
  unsure (1)..(166): unsure at all Xaa locations
  Clone ID: MRT4577_14154C.1.pep
MFSFISSALNEGKTCMYGVDLAKRECGCGXWELSGKPCTHAIYLFGTVKQRMRQLNIEDFVHDYYSVVRFKMVYQFXINPVSDKSGWPKVDVGFEIIPLPLQRAAGRPRKQRIKASGEPGKRRPHQCKRCFQFGHVEKDCSNATQAELEQELPPPRPKKGKKAKVM

SEQ ID NO: 230216 - protein, 417 aa, Zea mays
  unsure (1)..(417): unsure at all Xaa locations
  Clone ID: MRT4577_141550C.1.pep
MAGLSLRCGDCGAQLRSVEEAQAHAESTNHANFVESTEAVLNLVCSNCGKPCRSHTEVDLHTKRTGHTEFADKTAEAAKPIDLEAPLKPASDDATDVDASASATEETQEMVVPEVNKEVLTDLEGMGFSTARATRALHFSGNSTIECAINWLSEHQEDADIDEMPLVPANSKTEVNKPSLTPEEMKIKAQELRERARKKKEEEERRMEEEKGKKERVRXGKELLEAKRIEEQNERKRMIELRRLEKEEEKRAREKIRQKLEEDKAERRRKLGLPPEDPAAAKPSAPPPVEEKKSALPVRPATKAERMRDCLRNLKQQNKDDDAKVKRAFQTLLTYIGNVAKNPDEEKFRKIRLTNATFQERVGNLHVGIEFLELCGFEKLEGNEYLFLAREKVDKAILNTAGAELNSAITNPFFGVL

SEQ ID NO: 230217 - protein, 104 aa, Zea mays
  unsure (1)..(104): unsure at all Xaa locations
  Clone ID: MRT4577_141551C.1.pep
KSAHLFCYVAQTQXXEPLGFLVGAPAPGKISQEKTNDFNPICHHPLKGAPCLKRKNKAPEPKWDTPLGTFSQQGDLVLLKTFYKGFPPPTPKVLKFKPKVSGGP

SEQ ID NO: 230218 - protein, 52 aa, Zea mays
  Clone ID: MRT4577_141552C.1.pep
RPPSLTLKASFTSRCEKPKLGGEERLAAHIVSCSRSQCPAFRRHFTRTPPPG

SEQ ID NO: 230219 - protein, 161 aa, Zea mays
  Clone ID: MRT4577_141553C.1.pep
MAEQTEKAFLKQPKVFLCSKKTTKGNNKPGKEGNRFWKSVGLGFKTPKEAIEGTYIDKKCPFTGTVSIRGRIIAGTCHSAKMNRTIIVRRNYLHYVKKYQRYEKRHSNIPAHISPCFRVREGDHVIIGQCRPLSKTVRFNVLKVVPAGSKSGAVKKAFTGA

SEQ ID NO: 230220 - protein, 266 aa, Zea mays
  Clone ID: MRT4577_141554C.1.pep
MPPPAPLFLSLASTPPPALMPVHHPRAPQSLSLVPPVASSRKAAAVPACPVASPRHSDYFDPRAPPPPRGDGGYGRPPNGAQDGRVFTSYSIYKGKAALSFDPRPPLFVPLDSGAYKVAKEGFVLLQFAPAVATRQYDWTRKQVFSLSVWEIGTLLTLGPTDSCEFFHDPFKGRSEEGKVRKVLKIEPTPDGNGRFFNLSVQNRLINVDESIYIPITKGEFAVIVSTFNYIIPHLMGWSTFVSSIKPEESRPYSRPQSTSEYEWRR

SEQ ID NO: 230221 - protein, 74 aa, Zea mays
  Clone ID: MRT4577_141555C.1.pep
QCKMAQENRTRGPNCIQHDIEVLRRMSERTKLKTQYLGCIRVCHERSSERAGGAQKQAQEDETHCNTDAKQGSG

SEQ ID NO: 230222 - protein, 81 aa, Zea mays
  Clone ID: MRT4577_141556C.1.pep
FSFLGSLSVTLFISCMLSPMHHIIALFCEQTTGCMPLCLQCVLPLAEPSKCVVAWTVSATLFMVIAGDQLSRFHGPVLHCI

SEQ ID NO: 230223 - protein, 112 aa, Zea mays
  Clone ID: MRT4577_141557C.1.pep
QLAEKGFKIFKAHESKMVEKYNAVVSLWRRVSAMSKGLRYGDAVKLMSMLEDASNGFSSAVNSTISSLHPVQCTRERKVDVQLDLTTLPAFLAVFLLLWFLLRPRRPKPKIN

SEQ ID NO: 230224 - protein, 130 aa, Zea mays
  Clone ID: MRT4577_141558C.1.pep
KVFKKTPPPPKKSLKKRGGGGPPIPPLNNLGGGAGLKKTGGPRAGLKIFQNPYVPKRPPVSLNGPKGGSPPKAKGHLNFWPPGLKNLGPIPKGVPLENPPHLGLGKKKPPRGGLGGSPIFFCLFGAVEGP

SEQ ID NO: 230225 - protein, 89 aa, Zea mays
  unsure (1)..(89): unsure at all Xaa locations
  Clone ID: MRT4577_141559C.1.pep
IADPYALLAGASSRGSKKSHISTGAIAGIAVXGGILVIALIGMVLFALRQKRRVKEVTGRTDPFASWGVSQKDSGGAPQLKGARLFSLN

SEQ ID NO: 230226 - protein, 102 aa, Zea mays
  Clone ID: MRT4577_14155C.1.pep
MRVLLVYINLPCVFKKKKKKKKAVLGRGWRPGTLLCDSNRAPRQLHARGRTSTMDVTKDQSDAGPLRGRDSRDCAGSETACGHEDLKNHPGNWNLKCQEKNR

SEQ ID NO: 230227 - protein, 391 aa, Zea mays
  Clone ID: MRT4577_141560C.1.pep
MAPLHGGFSAGKSGLRWDLLVRRCGPSGSGYYLFKIDNITDEGWNDESINLGKRASVDRQGFGDLSLGKSVKKAKSGDDDSGRDVKGKSPLKVSSSHVNVAGSLSEQSESMKLGKGPEGTKGYLDSQGNDDEEYNESEDDLLDSKELEEFIKDDEFIPSPAQEKKKMNINVPDDASKNAGVKKGGPMEGDLAEGVRRSSRLESTEEMKIVDKADARAMAKDAFINKGRKRRVKIPFLNHEGVSVNDAEVLNNRLASCITKVISDSQYGFIKNRYIMDGVISLNEILHEVKRKNQSGVVLKIDFEKAYDKFPVLFDLAYDKDVTVNDAFTSNFETLTFRRRIVGNLRMLFDEMISCCNQVPLSDQEDKIVWNLGKKASQLTLCTKRKWKTKF

SEQ ID NO: 230228 - protein, 198 aa, Zea mays
  unsure (1)..(198): unsure at all Xaa locations
  Clone ID: MRT4577_141561C.1.pep
LFATCPFLLNRPANLTHLDDQRVTTPWQXKALTKLMGLNFQIIYKKGVENKVADALSRRADLQSDDTTLQLHVLSSSSMIPSWLTEVTKGYENDEVAQKILSALSTGHPLEHYTLVAGVIKHKGRVWLGHNQDLQTKVMSSLHDSAIGGHSGFPVTYRRIKAIFSWPGMKNQIREFVGTCSICQQAKPDRSKYPGTSV

SEQ ID NO: 230229 - protein, 127 aa, Zea mays
  unsure (1)..(127): unsure at all Xaa locations
  Clone ID: MRT4577_141562C.1.pep
MASSVAAAASTFLGTRLADPAPQNGRIVARFGFGLGGKAKPAPKKGAKTSXTSFDRPFGFPGPWPPNSLKGWLAANYGFNPSGFGRPXEDLQFQVDLLEQNLAQNXAAGXIGTRVEVFQVKFNPLQP

SEQ ID NO: 230230 - protein, 390 aa, Zea mays
  Clone ID: MRT4577_141563C.1.pep
MKGVSEGLIIGTTVGVVIGVLLALGTLLCLRRRRRSQTQIRSSSSRRASTVPIRTNGVNACAMLSNSTTGQESPTPRELEERGSSLWIQGPGRKSVISASGVPRYAYKELQKATSNFTTLLGQGAFGPVYKADMSSGEVLAVKVLSNNSRQGEKEFQNEVLLLGRLHHRNLVNLVGYCADKGQHMLLYAYMPNGSLASHLYGEDSAPLKWDLRVSIALDVARGLEYLHDGAVPPVVHRDIKSPNILLDQAMHARVADFGLSREEMVTRGDGAANNIRGTYGYLDPEYVSTRSFTKKSDVYSYGVLLFELIAGRNPQQGLMEYAELAAINADDGRRTGWEEIADARLGGAFDADELNDVAAVAYRCVSRASRKRPAMRDVVQALARWRRRG

SEQ ID NO: 230231 - protein, 70 aa, Zea mays
  Clone ID: MRT4577_141564C.1.pep
KPIHPTDILNQGTVFAYQQQQQLQQFLPALSQLVMVNPAVCLQQQQLLSSSPLAVGNAPTNLQQQLLQQS

SEQ ID NO: 230232 - protein, 169 aa, Zea mays
  unsure (1)..(169): unsure at all Xaa locations
  Clone ID: MRT4577_141565C.1.pep
MKCAPDYCNIYIAAKVNAGNVRLAKCCVRSMHRGADSPSDTDFVQESALYIHRGSRGHGHLPAVMPDARRSMDGRNTMSELDPVPQQXTGALSVKSDIYTLSVLLLRLLTGALPMGLTHHVEKAIDAGTFEQMLDITVKDWPVEEALGYAKLALKCTEMRRRDRPDLAT

SEQ ID NO: 230233 - protein, 276 aa, Zea mays
  unsure (1)..(276): unsure at all Xaa locations
  Clone ID: MRT4577_141566C.1.pep
AXAANNKTGXCPHLXWRXYDDFNEFFWSHKCFHLRWPWNLSDPFFSKPSRKYKGLLSRNHHXGKTSFVEHRTFLHLYHSFHRLWMFLIMMFQGLTIIAFNDGSFDRKTILQLLSLGPTYVVMKFIESLLDILMMYGAYSTSRGSAITRVAWRFCWFTIASVAICYLYIKTLQDGTESATFKIYVFVISAYVGIKIIFSLLMSVPCCHGLAEACYRWSAVRLVKWMHQENNYVGRGMHESHLDYIKYATFWIANHGAKFSLHYFLQXKPLVEPTRTI

SEQ ID NO: 230234 - protein, 38 aa, Zea mays
  Clone ID: MRT4577_141567C.1.pep
SHFITLFLQTYATRCPLKPLRWFPLPQLLLESHFPLAQ

SEQ ID NO: 230235 - protein, 137 aa, Zea mays
  Clone ID: MRT4577_141568C.1.pep
LSSHSLAVLAGGALLGLLLAALAVATTDARSPPRGRRRRVPWLAAGFVMSVLWAYTLARELVALLVAIGYVVGIKPSVLGVTVLAWGDSLGDLVSNVAMAVHGGPGGAQTVVSGCYAGPLFNTVVGLGLSLALAAGA

SEQ ID NO: 230236 - protein, 34 aa, Zea mays
  Clone ID: MRT4577_141569C.1.pep
RAEQCNTYPLVIHNWLISWYYWSDPNLNCFIEAM

SEQ ID NO: 230237 - protein, 114 aa, Zea mays
  Clone ID: MRT4577_14156C.1.pep
YVIREVTSHMWIFHCRRCSIRLGVHQSSSCRYSVPEHRTGWGQGWWRKRAGGFDDERGNVLFLTCTVKWRFMKVVFPVPSSSSSQMLEQSWQQGLGGQSAPHRCSVVAARGGER

SEQ ID NO: 230238 - protein, 524 aa, Zea mays
  Clone ID: MRT4577_141570C.1.pep
MAGGLPSPQSAMPAMSERFNNGGMGRDLMIGQPTGSEVGDCETSYESRGPSSRKRNLEEGGSTADNPQDRLQHADSIQGNFIDRDGEEVDDAAQDSDVPNKKSRGFDLFDAYRPSSGAGPSRNFVFGPHEDAGMFSHSRAIDLAAVERPTARDSLRASSVIAMHTIHTSEEDSMESVEYYPGDGNDIDMPSSSTQRNIEMNDALDLNYSNQAQQSANAHAGAGSDAREIGGSSTNEGEEVINAETVPPFGRDQLSLGISGGSVGMGASHEAEIHGNAGSLHRTESVVGDAEPIAELTETMGQTGESAPGPGLMDEFVPEVDRDEPHGDSQDTVSRSVGQADSGSKIYGYTKADSVESGEKIGHATGNGSSMRPSLSCNAGMCAGFDLSKDDVTHTGKILTTDDALMGLDYDPGNGLGATNGENDYESGLLEFDPVKHHNTYCPWVNGNVAAACCNNIGSSSSSSAPSGWQLTIDAVDTYQSLGQAQNQIMQSDSAASLYMQDDQITHNRKVGRRPSVSRSFGKC

SEQ ID NO: 230239 - protein, 63 aa, Zea mays
  Clone ID: MRT4577_141571C.1.pep
IRHEAVCRSPREAAALSAPSILLRVLVHAAPHLPRGHSHIQTQSWSFQAQELAGDHGGRPKMG

SEQ ID NO: 230240 - protein, 62 aa, Zea mays
  Clone ID: MRT4577_141572C.1.pep
FLCFLKFFLGKQQTIREFLPSPRHLTIPPSHEQLDWHNRHIPMGAGTHPNGPCNRVFLDHFL

SEQ ID NO: 230241 - protein, 44 aa, Zea mays
  Clone ID: MRT4577_141573C.1.pep
ESICNPIIFKMYQGVVQNMAGPVGMHEDAPAGIGGPGPKIEEVD

SEQ ID NO: 230242 - protein, 43 aa, Zea mays
  Clone ID: MRT4577_141574C.1.pep
YDQLTRALHDKYFSHLNMRKFHYDERKLDDAMNETEYVPTLDD

SEQ ID NO: 230243 - protein, 117 aa, Zea mays
  Clone ID: MRT4577_141575C.1.pep
WRGGSPLTATGLPGPLGQFLCPGGGAFFPTRLPPGFAPFFFAVGPPVFPPGIPPFSPPRFFCVCFLLGPLWLWDRVSGSSAVGFVRGYPFLAGPPFALFSPPLGAGVGPFRSAPRWV

SEQ ID NO: 230244 - protein, 74 aa, Zea mays
  Clone ID: MRT4577_141576C.1.pep
SELQSNGDGDEYVVWDLYALIALVYRLLVPRTEPLATFHVDVHDGDVLVTLEEGRQLPGAHRRAALRGHAVGAF

SEQ ID NO: 230245 - protein, 662 aa, Zea mays
  Clone ID: MRT4577_141577C.1.pep
RDRTGIDPTHPSFADDLSTDSYPVPAHYSGICEVTNDFPSGSCNRKLVGARHFAASAITRGVFNASQDLASPSDSDGHGTHTASIAAGNHGIPVAVSGHQFGNASGMAPRAHIAVYKALYKSFGGFAADVVAAIDQAAEDNVDIISLSITPNRRPPGLATFFNPIDMALLSAVKAGIFVVQAAGNTGPSPKSMSSYSPWIFTVGASAHDRVYSNYVVLGNNLTIQGVGLAPGTDDDCMYTLVAAPHALKNNTVSPTELSFGECQDSSRLDADLIRGKILVCSYSIRFVLGLSSVKQALDTANDVSAARAVGSCHASVLGFQLNPTPMHMPGLIIPSSDDSKVFLAYYNDSLVRDETSGQVVSFGGVAKILGGLNPDYGNSAPKVMFYSARGPDPEDNTLSNADILKPNLVAPGNSIWGAWSSLGLDSAEFSGESFAMLSGTSMAAPHVAGLAALIKQKFPSFSPAAIASALSTTTTLSDRQGKPIMAQRTYSNPDLTQSPATSFDMGNGFVNATAALDPGLIIDCSYDDFFSFLCGINGSSPVVKNYTGNSCVASTMTGADLNLPSITIAVLNQTRTITRTVINVAADESYSVNYSAPNGTAVSVVPTQFFIPSGQKQLVTFVVNATINSSTASFGNVGFQGNKGHRAIIPFSVISKAVYSS

SEQ ID NO: 230246 - protein, 331 aa, Zea mays
  unsure (1)..(331): unsure at all Xaa locations
  Clone ID: MRT4577_141578C.1.pep
MCSFCSLLQSEDQLKNQLSVKMSKGNCPALAAPRPLISSAKGLYTGIEEINLLKEIVDKARNLNAYLMQILDDSDCYHGEDLTVIFKSLLVALKATSASGLYDDNVSCRIESVLSRYLWKKQIHKLLYGGKKSSIQEVLCLDEEGSHLEICDQDFFKLEISKIKETSLQWLAKAEEVACDSGELALDLVYGLIAEGENLSVDFEKELKLLRDRSVLYCICCKPDDNRAMIACDQCDEWYHFDCINLXWTPXESFFCPACHPNNGEESVSLARSEDDEDRSSTGAGAHTPPDRVVERDLIKLLSCHSGSSWSESRRAPHRTARRRSSFVGLL

SEQ ID NO: 230247 - protein, 93 aa, Zea mays
  unsure (1)..(93): unsure at all Xaa locations
  Clone ID: MRT4577_141579C.1.pep
DTEAITNVEPSLFLCHLTYSASWALSVVAMGHAXAARSAWAASSLVTARNQGRVPTSFYSAPLKDGHPFVLNLSSPSFRWPLPQLLPKPTTER

SEQ ID NO: 230248 - protein, 140 aa, Zea mays
  unsure (1)..(140): unsure at all Xaa locations
  Clone ID: MRT4577_14157C.1.pep
HDTLRRRRIRTSSGRRNHTTLLTPDEQRSFSFTHGQGQHSHHLVVIVHVDSGKATTPEHLXIYKLEGIDKQVIEKLQKEAAXMNSRTFQYACPLDKLKDEREIRITIDIALCKFXTTNYXYCTDIDDPRHRDFIXEMITG

SEQ ID NO: 230249 - protein, 268 aa, Zea mays
  unsure (1)..(268): unsure at all Xaa locations
  Clone ID: MRT4577_141580C.1.pep
GRDAGPDYGTVTXCAPWVLTVAASTMTRRVVSRIRLGNGLVIQGEAGRRYKGLKPAPLIYVQGVFEDGALNTVDVRGKIVFCDRSETATMRGEMVRAAGGVGIIMFNDASEGGVTRFLGNVSIAAARVSEADGAKIMSYINSTANPTANLHFTGVMLDPSYQPAIAEYSSRGPCNMSNLGVIKPDITGXAAGGNGSAPSHTFGLLSGTSMAAPHXLSGIAAVLKRARPXWSPSAIKSAMMTTXDVTHPDGTPITDQITGKPAGPLLMG

SEQ ID NO: 230250 - protein, 641 aa, Zea mays
  unsure (1)..(641): unsure at all Xaa locations
  Clone ID: MRT4577_141581C.1.pep
MGCCQSRLERLEAVSRCKARRRYTKHLVQARRDMAAAHALYLRALRATGASLLHFASAEADHPHPHSSAAHHEPPPSPPPPPPPPPLSPSTTARSWTTNSSSISASAILPPPPPPPLPPLPSSWDFWDPFXPPPPAXADDADWDDAATTVVDAPIAAPPPVVTAAAAVAAPPSIVTATTTSTTPSELTVVAVPRGGAGKKDLAEIATELDEYFLKAADAGARVAALLEAPVCEPPEPTTNSSLPGKVLSYSKSLKPMGWAWGGGGYGKGNDGFTRFGRGDGGMPMGNGGGGGMLSHSSTVEKLYAWEKKLFLEVKSYEGYKQEHDKKVSLLRKQEVKGVDYLKMEKNKMEIESLESKMLVANQSIETTTSEIIRLRESELFPQLLELIAGLMSMWRGMYECHQVQTHIVQQLEYLNNARNTNPTSNGHRQAALQLEIEVDRCYSAFCSLVKSQRDYVYSLTGWLRLSLFCHHDPLTKAQNSDIYGLCEEWQLAIDRIPDKVASEGIKTLLTVIHAVVIQQAEEHKQKKRAESAFKEFEKKAEELRALESKYVGAEGYREMSRKSSVADKRAKVEALRSRADEEKIKYEKSIGVTRAMTLNNLQTGFPNVFQAMTGFASVCMEAFESVYNFKRSSDPKRLLT

SEQ ID NO: 230251 - protein, 124 aa, Zea mays
  Clone ID: MRT4577_141582C.1.pep
QHYSNHICIIYITLMHGHDRCPSLQTTRNASCLAWANIISRSGLIGQTALSPVICASPEVADKGNRVHDLAVDWTLWNGGKSVHSAGTFEATADGLSRCGSGDCCKDGKGGKGGLHNCGSLGLV

SEQ ID NO: 230252 - protein, 60 aa, Zea mays
  Clone ID: MRT4577_141583C.1.pep
LFRYEYQRMFQCYPHESPLQTGQQHEFHPGSVLSEEHSCVPPQDYAISPSSDAKLKSFPT

SEQ ID NO: 230253 - protein, 133 aa, Zea mays
  unsure (1)..(133): unsure at all Xaa locations
  Clone ID: MRT4577_141584C.1.pep
AILMLLALSTCVASTTIVTECSQAPIATLYTPYITXIIDRVCENPALXSYRLQQAIAASNIPLSALMRXQSPALSLVQSXVQTIRAQQVKQLELPVINQVALANLYAYSPGQQYLPFDQLSTLNPADYLRHQL

SEQ ID NO: 230254 - protein, 82 aa, Zea mays
  Clone ID: MRT4577_141585C.1.pep
NIVESEDDVPYGYGFFHFAFAAGSMYVRMVFVGWDTHHTMKQWSVDIGWMSTWVHIANEALVVVFYIAILAARIFGIGLLRH

SEQ ID NO: 230255 - protein, 71 aa, Zea mays
  Clone ID: MRT4577_141586C.1.pep
LHHGEHTHLIEKGHPNQPHTGRGRNGHFHLHRHPYTDHPWKQVVTKLIAPSCEKYLYFHTYIINTTQQQKV

SEQ ID NO: 230256 - protein, 81 aa, Zea mays
  Clone ID: MRT4577_141587C.1.pep
NHIIYVAPVSAGVQFVKKQSLLKLKSHPAYNLNSAFIHRGFTYTNTANLALQANDPQDLLTPQLKVHQVLVGCKEKDPKKL

SEQ ID NO: 230257 - protein, 83 aa, Zea mays
  Clone ID: MRT4577_141588C.1.pep
QNITRLVQATMRRARYVVTVRGASKPSAIPSRGKYKPGIRFDRRLAVLVVASYFAAGDERMVSCKCSSSRVAFFDLLPQQHRV

SEQ ID NO: 230258 - protein, 50 aa, Zea mays
  Clone ID: MRT4577_141589C.1.pep
MAVGDLAFKALTAGLGVATLYLAATFSVNVYRGLSWHSEQSKLEKAKTED

SEQ ID NO: 230259 - protein, 76 aa, Zea mays
  Clone ID: MRT4577_14158C.1.pep
GRDRYLPGVHYVLGQVSEVLHPEVSWSIGCLMILIVSCSRSSSCDATPVATRMPSKNKLRVPRLQKRSGGHGKFRL

SEQ ID NO: 230260 - protein, 51 aa, Zea mays
  Clone ID: MRT4577_141590C.1.pep
MIYKVNVLLHCSNWVSYLENIWKGSFPLAHKLRTDLEEKVIREEQHQEREA

SEQ ID NO: 230261 - protein, 69 aa, Zea mays
  unsure (1)..(69): unsure at all Xaa locations
  Clone ID: MRT4577_141591C.1.pep
CDEIFNLLDGGAHIYFCGVNGMMPVVQDTLKKVADXRFDSLDQRLAQLKKNKQWHVDVYYGSDCCCCDP

SEQ ID NO: 230262 - protein, 69 aa, Zea mays
  Clone ID: MRT4577_141592C.1.pep
TDYRYQATLEYTGFYRYTVRRVGLIGRVRDVRHGPFVSVLSEERPRDFPGISATRDNVCILSRLYSLTA

SEQ ID NO: 230263 - protein, 60 aa, Zea mays
  Clone ID: MRT4577_141593C.1.pep
ESAIQSHQLPSRGDHEIHVAGPPRRGYCVANATLIDHGSHAPMTSQHPAYLHMNKSTRLR

SEQ ID NO: 230264 - protein, 40 aa, Zea mays
  Clone ID: MRT4577_141594C.1.pep
LSTYFFLNHIFSSKTTIPFFHTQNLKIIIHYNQTSINHFI

SEQ ID NO: 230265 - protein, 74 aa, Zea mays
  Clone ID: MRT4577_141595C.1.pep
LSEWSYFRLSISVLSMLWKTLSSADQASCVMIVTRISSAQRRPMAPAAPPTCSNHPVSHGRRKNRIIDIASKRA

SEQ ID NO: 230266 - protein, 66 aa, Zea mays
  Clone ID: MRT4577_141596C.1.pep
PSKGLRMSQLAEFSGPNKKKIGWLRGSPRFYRLRGPLQLIFRLPTTQQQGTFQVMSENPNFFWNGF

SEQ ID NO: 230267 - protein, 84 aa, Zea mays
  Clone ID: MRT4577_141597C.1.pep
TKTRSPARAAHADRTSRMRVRTVEGSRSTQREVADIAAAAASAAIGTGWDGEGVIWVVMAAAAAGKEETRGRKGIIGFCLAWLV

SEQ ID NO: 230268 - protein, 138 aa, Zea mays
  unsure (1)..(138): unsure at all Xaa locations
  Clone ID: MRT4577_141598C.1.pep
PPTLLQQIDKLERAKAFIQVQTKSIVFQSQRPCRLSQQARNEPRAVTNRSINSLGSNSKQADKGSLINTRMNEAKPFFFRXAIRFHFTFDEVIXASKASISAHLETENSHCSYGTSHPLFKTEVSSFAQSQIAVVPWX

SEQ ID NO: 230269 - protein, 149 aa, Zea mays
  Clone ID: MRT4577_141599C.1.pep
KKKKKKKKKKKKKKKKKKKKPGQQNPREQTKGGATGNPNPLPRKGRGTKLTGGKLGGNKGTDPSKPINVSVGGKVNKVTSGRGFNGPGGANAVFGGREASRALGKRSKDKANVSGNLSGFTKKKLGAPANGKTKFQAKNPVVAQFAAKA

SEQ ID NO: 230270 - protein, 73 aa, Zea mays
  Clone ID: MRT4577_14159C.1.pep
STQGLGLAFGVTRKRGPGPGILHQHSRQEPAGAPSLTLLSPGCTWVLCPRGVWRRRCGHSRAWNGDVWPELEK

SEQ ID NO: 230271 - protein, 87 aa, Zea mays
  Clone ID: MRT4577_1415C.1.pep
KGGGGAGSLLNGFGTPFIVIFLAPKGWTKKCLVSGLFFFPLGWNGMGFFFVPINGIPQGIWIFLSYPVLSPGKSQGGFCIKLFFSIN

SEQ ID NO: 230272 - protein, 127 aa, Zea mays
  Clone ID: MRT4577_141600C.1.pep
PQKFFKLMPGEVILLSLQGFGKIWDLVEVFAKNFTPPPPVGPPFVVPPKSGEQPGEPPPNSPPATGNVFGAGWAVFKIKKPPPPKGNMKKFFFTQKAPPVVKKSLPRQKKKCPPPAGGSLAPVILYV

SEQ ID NO: 230273 - protein, 59 aa, Zea mays
  Clone ID: MRT4577_141601C.1.pep
MECIQVLQLDSGSRAPRGSHVVPGILCLFSQKHIHSFSLARKCFSISPPCFLPCRLRIT

SEQ ID NO: 230274 - protein, 97 aa, Zea mays
  Clone ID: MRT4577_141602C.1.pep
PRPGLRLAMSCTVAIPSSPVFSPSRRPLSCKAEAKESCSNVPDVLQDGAMTIDRQYALSNLQIRVFVSVPGSSVPQNDVPDSFYKLTGEEIRNEAKM

SEQ ID NO: 230275 - protein, 110 aa, Zea mays
  Clone ID: MRT4577_141603C.1.pep
KCVGWCRHIMGSGLNRDVLVGFVIDHSILVFVEINVFSVGFRKRIWVPVYGVATRIIVVASSGVAASDSMVLMRSTDAAPPTSTILNASRARVVDSCALSRRLCSRLWVW

SEQ ID NO: 230276 - protein, 47 aa, Zea mays
  Clone ID: MRT4577_141604C.1.pep
TVYVERKENQSICFILNNHNKLLQVLHVRVVCAFPGEHSIFKSAPVV

SEQ ID NO: 230277 - protein, 72 aa, Zea mays
  Clone ID: MRT4577_141605C.1.pep
LTSWTKPKTRVLLICIRTPKGNRRGLPYLAGTNLVAQSQAFALSGSPLWPTRFYSGPFPVTMPCSKNPIPIN

SEQ ID NO: 230278 - protein, 211 aa, Zea mays
  Clone ID: MRT4577_141606C.1.pep
TRPTDVTCRDIPLHPKRRRTPTKLILSTSAAAANHEIPSEVARPYKKRRIFVRSVSDLLKYAKREPSHGRSASMLSSILEKSLAASPVLNFSVCGDSKTSSDVISSAQRPKESSHDEDTSKSPENNPQVPNRSMKTPSKVVNELSPTFSPANPSKGSSRNLSKASVARELLKLDPENVLPNQQRKDSRRRKDMAHVSILLSHHLDDDVVKR

SEQ ID NO: 230279 - protein, 43 aa, Zea mays
  Clone ID: MRT4577_141607C.1.pep
DFFAEGEGSHNVSLGGDFSIQVSPDPPGLGFMKNYPFRFLGLG

SEQ ID NO: 230280 - protein, 62 aa, Zea mays
  Clone ID: MRT4577_141608C.1.pep
LNPLAVANPLVTTFQQKQQQLRPDNQFSLMTPPPQQPIVGGTKIKLHIRWTRQWCPQTDMFS

SEQ ID NO: 230281 - protein, 52 aa, Zea mays
  Clone ID: MRT4577_141609C.1.pep
PARARISDETFLLTHLVNLHEPWVSKLDSFFPGIGNFFIGFFGICSLLVIAT

SEQ ID NO: 230282 - protein, 38 aa, Zea mays
  Clone ID: MRT4577_14160C.1.pep
TSPSLKLKLKMCTLTKRKTSWIQETKNIVPLFIRKLIN

SEQ ID NO: 230283 - protein, 187 aa, Zea mays
  unsure (1)..(187): unsure at all Xaa locations
  Clone ID: MRT4577_141610C.1.pep
FGSRNQASVSVPTRNVPSGAPGITSRSLTRRAYYPVVGSSNSSVDVVPTICGSSGAAIFANGGYALNADAGTVSIYPNPAPATSSGSITMPMPMLHQMVIQSHPPATSAATSTSMWIAQPLPARTAAASRHARRVSAGLANNGRYRRARSSYYSLHPLMMVEAERYMMDQWXLRIRAAAGDPHRDMR

SEQ ID NO: 230284 - protein, 77 aa, Zea mays
  Clone ID: MRT4577_141611C.1.pep
TGGRFFSGGSVLDRQITNLFSRYSSSSPVFLSSSPTLSILVVCPISQSINRFGGGPRHLLLRSSCHTVWGGPGRPEW

SEQ ID NO: 230285 - protein, 160 aa, Zea mays
  unsure (1)..(160): unsure at all Xaa locations
  Clone ID: MRT4577_141612C.1.pep
MASALLSYLQALWPFSALLREEDDLRASARLVGSLSVPEETKQFVLALREXAGRRTTGTGTXAGVIYILAAQNLSEQSASDAERLIREVRPRAVVTQVARPALEDVRIEEDCLAGNGGGGVPVPASPFQVIKRCVTEKRSRDQYVKAAACQVLQENFGVG

SEQ ID NO: 230286 - protein, 46 aa, Zea mays
  unsure (1)..(46): unsure at all Xaa locations
  Clone ID: MRT4577_141613C.1.pep
CDGQLYVSINAQVYFISPSHSLSVFTSDMHTSTVGHSGLQFXGGCL

SEQ ID NO: 230287 - protein, 92 aa, Zea mays
  unsure (1)..(92): unsure at all Xaa locations
  Clone ID: MRT4577_141614C.1.pep
IRHEGTLPPPNAIRVSDPLVSPQLWPPSHPRPRXRLHRPXSTTSTSPPTTMIPPPPLLLPWLPPTPRHRTPRRSARPWLGATRPPVRSCRIR

SEQ ID NO: 230288 - protein, 37 aa, Zea mays
  Clone ID: MRT4577_141615C.1.pep
DESQLSTLHNHMAYTTVVYDNRLVVVFDTQTRNGTHR

SEQ ID NO: 230289 - protein, 88 aa, Zea mays
  unsure (1)..(88): unsure at all Xaa locations
  Clone ID: MRT4577_141616C.1.pep
RREHTPPHYPRNPPPAPDKEICRWEGRSVRKEEVVTKEYTINLHKRLXGCTFNKKAPNAIKEIRKFAQSHGTTDIRIDVNSXKHIWTA

SEQ ID NO: 230290 - protein, 93 aa, Zea mays
  Clone ID: MRT4577_141617C.1.pep
NKNKAWPGPTPKEKTKRAHGGGAIHAPRKGIKKVWKMRPGSRPLTIPGPKGSRILHPPARLSRWSFPPWNSPLEVSLSKGDPGQLSVLKRPTG

SEQ ID NO: 230291 - protein, 94 aa, Zea mays
  Clone ID: MRT4577_141618C.1.pep
MAYVERGVVKDKRTIWRLSIISDFFRAIVNFIRIFFDTLFSVDKTDSYKKGYGAGKKWDGGPGGGGGRGPYGGGGGGFGGGGGGSLPACGSCCG

SEQ ID NO: 230292 - protein, 55 aa, Zea mays
  Clone ID: MRT4577_141619C.1.pep
YINTMPKFTFNYLNKPYNNFQTPNLTIFKIKHNCNDILSFILFSSYYSPFLLLTF

SEQ ID NO: 230293 - protein, 83 aa, Zea mays
  Clone ID: MRT4577_14161C.1.pep
TLHKKKQTTQKRADTTKRKDKKRKGGEKKKKKKKKKKKKKKKKKKKKGTKKKKNGKKKKKPEKKKKTKQNKKNRNQKKTKAPE

SEQ ID NO: 230294 - protein, 110 aa, Zea mays
  Clone ID: MRT4577_141620C.1.pep
MAYVERGVVKDKRTIWRLSIISDFFRAIVNFIRIFFDTLFSVDKTDSYKKGYGAGKKWDGGPGGGGGRGPYGGGGGGFGGGGGGGRGPRTLSDIQSNDHSSLPACGSCCG

SEQ ID NO: 230295 - protein, 112 aa, Zea mays
  Clone ID: MRT4577_141621C.1.pep
MAYVERGVVKDKRTIWRLSIISDFFRAIVNFIRIFFDTLFSVDKTDSYKKGYGAGKKWDGGPGGGGGRGPYGGGGGGGGFGGGGGGGRGPRTLSDIQSNDHSSLPACGSCCG

SEQ ID NO: 230296 - protein, 77 aa, Zea mays
  Clone ID: MRT4577_141622C.1.pep
PTRGCGVKPFPRISSCVCREAGVFPKLRHSNLNSRLVRRKGVCTTYLVLTLRYLPQCYQTDITNWSVCPYHGHYLNR

SEQ ID NO: 230297 - protein, 89 aa, Zea mays
  unsure (1)..(89): unsure at all Xaa locations
  Clone ID: MRT4577_141623C.1.pep
RPLQGPVLAPHXXMGXQSXSPWSLVHRRETXXSLARNLCXGREGASEPXSRRVVXVVGLGEAFXSKYPNXIFGYGFGWKWWXWQPXCLI

SEQ ID NO: 230298 - protein, 222 aa, Zea mays
  Clone ID: MRT4577_141624C.1.pep
MKQQDGASPAKMFIGGLSRQTSMGTFKEYFGKYGEIIDAVIMKDRHTQKPRGFGFITYSDPAIVDRVIEDNHVIDGKQVEIKRTIPKGAAPLKDFKTKKIFVGGLPTALTDGEFKDFFSKFGKVVEHEIICDHSTNRSRGFGFIVFDAEKTVDELLAKKGNKIDLNGTQVEIKKAEPKKPSNPPHSLDSKPRRSPYADGYDGFASRYNNGWSLCPLITWFWR

SEQ ID NO: 230299 - protein, 157 aa, Zea mays
  unsure (1)..(157): unsure at all Xaa locations
  Clone ID: MRT4577_141625C.1.pep
XIVKFLVELGCDVNAQDSDGWTPLHCAASCNNLAMVRFLVDNGACIFATTLSDHETAAEKCEEDEEGFDGCSEYLYSVQEKLGIMNSGLVYAVFSYTAARSDELTFETGGRLHVLRKGDDSEREWWWCRDDAGNEGYVPRNLLGLYPRVXPHSKIKS

SEQ ID NO: 230300 - protein, 131 aa, Zea mays
  unsure (1)..(131): unsure at all Xaa locations
  Clone ID: MRT4577_141626C.1.pep
MATQRKPLSAESNGTPTTAETXAGNMRLPTSSARRSPFLPTRLEAQLIAIYPLTLLLGSVFSTLSPSTRNAPYSASLXPHPAEFAXSNFAQXXNVXNGYFVKVGWLWNHSISPFFPQFWTGWKHRGDGKHS

SEQ ID NO: 230301 - protein, 126 aa, Zea mays
  Clone ID: MRT4577_141628C.1.pep
KSFVCCLLLLFSLYGSLNAFVVNHQKASCPSGGKIGPDGKCYVFYGTGDVCNYNWGQSSDFCKKQGGHLPIIRDAFTNAFLRNLTQTSSTCDWAYHGSWIGLRAYTKGSQCCWQWNDGSDITYHNW

SEQ ID NO: 230302 - protein, 92 aa, Zea mays
  Clone ID: MRT4577_141629C.1.pep
IKNKIKIIFKKKTNKTKGGTFIRLPRLRSPGSAPIPFSFFLPRFCPLVVFFNRCFPPFPFPYCSSPPSLYSPPVISCIKLAAVAPPSSEKVS

SEQ ID NO: 230303 - protein, 64 aa, Zea mays
  Clone ID: MRT4577_14162C.1.pep
ELSHSVSIDILLLIRIIVTISYMTGCGGYEYIYRLYIPTNIKYHPYTSWIPISVHFCRRSRYQY

SEQ ID NO: 230304 - protein, 64 aa, Zea mays
  Clone ID: MRT4577_141630C.1.pep
KHASYVGLWSSLNLFVNWSLCCLISGPLVRPILSSSSPLFCSMVISVILIMFDKKPFHILTFFP

SEQ ID NO: 230305 - protein, 106 aa, Zea mays
  unsure (1)..(106): unsure at all Xaa locations
  Clone ID: MRT4577_141631C.1.pep
LLLIHLALYTXVAHATIMPQCSHAPIASLFAPYLLLIIGPQYVNPGLHPYRLXQAMRVRSIPLSPLMCQQSAALSLVQSLLHTIRAQQMKXLVLPAIKQVDLENLS

SEQ ID NO: 230306 - protein, 115 aa, Zea mays
  unsure (1)..(115): unsure at all Xaa locations
  Clone ID: MRT4577_141632C.1.pep
CADLHIQIPTAFDPLAEGNAGDSGAAARAKDYVHVSIQQRNGRKSLTTAHGLKKEXSYSKILKDLKIEGCXNDTGVQDPELGQVIQLHGDQKKIGSNCLALAGIVKKEHSKMHGS

SEQ ID NO: 230307 - protein, 92 aa, Zea mays
  unsure (1)..(92): unsure at all Xaa locations
  Clone ID: MRT4577_141633C.1.pep
SQNFPIMPLHARALEDKRARLALVKCMNHELXQLEPXVLHHNTAXLVAHIKFDVLLMSYGSNSITSYFLQKLESTKSIQFNLHINXWLAISQ

SEQ ID NO: 230308 - protein, 68 aa, Zea mays
  Clone ID: MRT4577_141634C.1.pep
RALGIPGSKSLDGPPLYENAPKNYSSCSSTTANSARSPDRQQTRATMPADLTALFRYTQTPSNVLDLL

SEQ ID NO: 230309 - protein, 70 aa, Zea mays
  Clone ID: MRT4577_141635C.1.pep
MPKILRYYLESEAMAMVPHGAGGSSVSMSYPVLSPASYTAWAIKVESILDAQGLWEAVSPPRWWRGERGE

SEQ ID NO: 230310 - protein, 39 aa, Zea mays
  Clone ID: MRT4577_141636C.1.pep
QEGLVMLLRYGHGGRLGELLEGGDGDGAGERCGCGEGCE

SEQ ID NO: 230311 - protein, 68 aa, Zea mays
  unsure (1)..(68): unsure at all Xaa locations
  Clone ID: MRT4577_141637C.1.pep
FQLFLSDXFSXXGXXSMXSNQXKXSRXXAPPKXLKLFRXLXKSLKGTQERGARNHXLSELRKXSCXXL

SEQ ID NO: 230312 - protein, 139 aa, Zea mays
  unsure (1)..(139): unsure at all Xaa locations
  Clone ID: MRT4577_141638C.1.pep
MTHSKATSAVTLRTRXKFMTNRLLARNEFELEVIHPXRDNVSKAKMNEMLDKAYDVNDPNTICVFEFRTHFRGGKPTAYXGLIYYNLEVDKKLQPKYRLIKNGRATKGDKYREKMKERKNTTNNIRGDKKTKAVDAYKK

SEQ ID NO: 230313 - protein, 105 aa, Zea mays
  Clone ID: MRT4577_141639C.1.pep
FYNARINKWLRAPDMLQKRHFFGSCVINNCLYVAGGECVGIQRILRSAEVYDPNRNRWSSIAEMSTGMVPSIGVVHDGKCDLKGLNSHCQVVSEVYLPASKKGEA

SEQ ID NO: 230314 - protein, 167 aa, Zea mays
  Clone ID: MRT4577_14163C.1.pep
AVKQSLMAINAQIDELARAARAGDFTMRGDAAAFQYQFKAMVEHLNGMMASSQASIADVSDVLRAISHGDLTARMDGEYDGVFARMRDDANTTTAQLTGIVRGIQVAADSINNAAQELAAGNNDLSRRTEQQAANLEEAAASMEELTSTVRQNAELARQADSEAHAA

SEQ ID NO: 230315 - protein, 97 aa, Zea mays
  unsure (1)..(97): unsure at all Xaa locations
  Clone ID: MRT4577_141640C.1.pep
RIKVHELRGKSKTDLQAQXKELKSEVTLLRVTKVTGGAPNKLSKIKVVRTSIARVLTVISQKQKSALLDAYKKKILLPIDLRTKKTRAIRRRLYKHQ

SEQ ID NO: 230316 - protein, 104 aa, Zea mays
  Clone ID: MRT4577_141641C.1.pep
PRTKQSKGKEKKGNQEHKKWFLKKERSCLEDAESSDEIHGGGEEQEQGSKVNAATGCDEPDGEVKDGALTMAHTAGTEEGEKQFGVWWKLPFKLLHYWAWKVKP

SEQ ID NO: 230317 - protein, 357 aa, Zea mays
  Clone ID: MRT4577_141642C.1.pep
QILKKLTRNARKACPPAIPHPDWVFKSKEIGGLPCKFEGILESPVVNGYRNKCEFSVGYSLEGKKTVGFMLGNFREGVTAVEEPENCPNVSEISCKYAQMFQDFLQSSSFPLWSKIDNSGFWRQLTVREGRCPAEAVVSQNAESQISEVMLIVQVCSTSVDEALMKEEFDKLSAALVQGAATCSPPLPLTTIVVQDHKGISNAAPTDCPLIPLLVPKGDQLDGTTEDKIRIHDHISNLKFSLSPTAFFQVNTLAAERLYTLAGDWANLNSDTLLFDVCCGTGTIGLTLAQHVGMVVGIEMNESAVSNACRNALVNGIKNCRFVCGKAEDVMGPLLTEYLGSPQQQAAASKSNSEIDD

SEQ ID NO: 230318 - protein, 142 aa, Zea mays
  unsure (1)..(142): unsure at all Xaa locations
  Clone ID: MRT4577_141643C.1.pep
TGRNSLLTHDTSTRPRPXXIFVSCRPGCRPAPQPRHSESPFLLSSPFLSPRRAAQSRRVASLEPLQRHLFRSTRSSSRVGSSFSRSARTLHWIRSSRTFDRSCVLCPSSFIGFGCCLLPLNFQDIMQTWVWTGLGAVTLVSL

SEQ ID NO: 230319 - protein, 43 aa, Zea mays
  Clone ID: MRT4577_141644C.1.pep
FSSSFLCKMTPIAIVSLSMISCYYYTGRVVVPDNVVVLATTLY

SEQ ID NO: 230320 - protein, 81 aa, Zea mays
  Clone ID: MRT4577_141645C.1.pep
AARVAFETGTAPIGNRIKDSRSYPLYRFIRQDLGAVYLTGEKLKSPGEECNKVFLALSEGKLIDPMLECLKEWDGKPLPIC

SEQ ID NO: 230321 - protein, 26 aa, Zea mays
  Clone ID: MRT4577_141646C.1.pep
SYQFSNGRCFNAHISRLHLFRCQKIN

SEQ ID NO: 230322 - protein, 169 aa, Zea mays
  Clone ID: MRT4577_141647C.1.pep
MENAVVLREWFDRVDAGRTGNITAAQLQGALAVGNLNFPISVVQQMIRMYDFDRNGTMNFEEFLALNKFLQKVQNVFSTLDRGRGFLSLEEVYQALIKLGFSLDSPAFYTVCESFDKSKKGMIQLDEFISLCIFVQSARNLFNSFDTSKQGRVTLDFNQFVYCTANCRI

SEQ ID NO: 230323 - protein, 256 aa, Zea mays
  Clone ID: MRT4577_141648C.1.pep
PRGRPGISISPETKQSPEQSSAERRSSGISHSTNEAPPSDPTRSAMAAGLKRPSFGTRAWRLLRLAVLWARKGGAAHSLRLRLLRTLRRHGHGLAGLGGARGDRLRCGEREYSIDETPAFRFRTPSARVLRLIPCIAPAVPDTPGLYGDDRYFFSAAAAAWETGEGAGCCYSDVEDEEENDEEPSCCGDGELLLERVVAEACRASTAGRSVAADSGEDAGVDVKADEFIARFYAQMKLQRQISWLQYNEMMERSIS

SEQ ID NO: 230324 - protein, 97 aa, Zea mays
  Clone ID: MRT4577_141649C.1.pep
HIKHFWVSNHTLQTQKKPNLFKNKKGSQKILHTLKLNGGNTPSPPKAANSLIQTGPTFGKPARLNFYKPQIFIKKTPAWLFSKKPNLNPQNSAHFKI

SEQ ID NO: 230325 - protein, 58 aa, Zea mays
  Clone ID: MRT4577_14164C.1.pep
LPINSKVLQCNVRRWLAAFYDCMPYKLNESGRGKCNPGQHFRWPYPLKKGWPLFPYET

SEQ ID NO: 230326 - protein, 44 aa, Zea mays
  Clone ID: MRT4577_141650C.1.pep
ILEFLEYTVRQNILIFSLTYISCTSIHNTSGANETILAKFNSLN

SEQ ID NO: 230327 - protein, 83 aa, Zea mays
  unsure (1)..(83): unsure at all Xaa locations
  Clone ID: MRT4577_141651C.1.pep
EDIDMRIRVRGGGKTSHIYAGRQAAAKGLVCYYQKYIYEAAKKEIKDICTRYDRTLLVDDPXRCEPXKFAXRRARAEFQKSYR

SEQ ID NO: 230328 - protein, 136 aa, Zea mays
  Clone ID: MRT4577_141652C.1.pep
AVYLAAQLISLFPEHLLDPCIHRDPWMHAAYVQPVGLHHAQGCARPAYCSQARAWFHGRCSAQLKSHDPSTWPRFIGMRARTFLCCRTSMSALMWACSKRASACLFLVTGAGFPAGSLSHGRILTLAIGWRCITPR

SEQ ID NO: 230329 - protein, 114 aa, Zea mays
  Clone ID: MRT4577_141653C.1.pep
GCVGAHRLGGGFWHAAPSVRSRAQGVLWAVSSGNSVESRFSVRSGGVCSSVVLLRDEGATGSCHPRRWRRRPRLNRRLPGSKREATTCLITSRSLSNRSSAGARPVAFAKARPA

SEQ ID NO: 230330 - protein, 83 aa, Zea mays
  Clone ID: MRT4577_141654C.1.pep
EREFLFLVRKSKWGGPRRVQIDELKIDLSKHFLEDIRLQLLNSNFKSQIHGIALLHRALLSSGKEAIELLVILLKWIGLRYSV

SEQ ID NO: 230331 - protein, 115 aa, Zea mays
  Clone ID: MRT4577_141655C.1.pep
GVASSSSGTTSSSTGASSSTGSSTGTSSSTGDASSSSSGVGTNSTSSSTGLTGGSSSSSSTGSPIGGTNSSSSSSSTGSGGVGVDPNNSASKMSTSFSWIISFFTALVAMKLTRQ

SEQ ID NO: 230332 - protein, 76 aa, Zea mays
  Clone ID: MRT4577_141656C.1.pep
YSVTVHLFIGMGRSPDKITFIPFTFTLSYNTSYQGLSSFSPLGRFRLPSKPKLLEPQLRRPSKSPLGCYSYHRPLS

SEQ ID NO: 230333 - protein, 79 aa, Zea mays
  unsure (1)..(79): unsure at all Xaa locations
  Clone ID: MRT4577_141657C.1.pep
RSLRGARSPCRMFLSSWLPSAPPCAYGWGRLIGPARVRPLGLGLRPALRASPWWVVCSVRGRPGSLGVLSRXACWCGLC

SEQ ID NO: 230334 - protein, 76 aa, Zea mays
  Clone ID: MRT4577_141658C.1.pep
KELNTYSSRTIPQMEILRIAKENSEFTTGRIMMNLDLNKGGSGRYLKTVNYGQLRRDDPDYPMKVVKRLKYGKPYD

SEQ ID NO: 230335 - protein, 200 aa, Zea mays
  Clone ID: MRT4577_141659C.1.pep
MASGAVPPQRVALLALAVLSVVSFPHLSLPASSHPLPQEAAAAAAAGAAAGGEASEPHGTAADGAAVARRACTYTVQIKTSCASPRSSADAVSLAFGDAYRNEVYAATVTPRRGFERCATDTFRVAGPCGYGVCYLYLRRSGRAAGWTPEWVRVYEPASGAPSTFYYGDPLPDGVWYGFDRCVKAGAGASAEHGAAARTL

SEQ ID NO: 230336 - protein, 43 aa, Zea mays
  Clone ID: MRT4577_14165C.1.pep
KSAFQIPAQRESVANVQYVAHQALHANPLTVLDMCNQWLAQYM

SEQ ID NO: 230337 - protein, 87 aa, Zea mays
  Clone ID: MRT4577_141660C.1.pep
GRWSSEVILANILGFIFSFNGVQSAGDTDINPISTVAKASQLIFGGVAKGQGLGQVDGMRLNLVGGIVAGGAAAQSTDMTGDLQTGH

SEQ ID NO: 230338 - protein, 256 aa, Zea mays
  Clone ID: MRT4577_141661C.1.pep
MAVQAQYPSNLLFHDRGEPDRKKAMDMPKPPQLAGVSPAAVYFSGGGASGNNRRKRAREAMAPPPAVKEDYVNLFALQQQQQQQSMPFANMALFQNQNRVSSSPSPAATALVSTGLRLAFDEQQQHLLQQQEGKQTNALRYSSPPSLFASVSDELAAQAKQHEEEVDRFVREQGEQLRRAVADRLRRHNRAILVKADQSAARRLREKAAEAEREARRGAELEERLARLRGEAAAWQAKALSEQAAAVALHAQLQQA

SEQ ID NO: 230339 - protein, 114 aa, Zea mays
  unsure (1)..(114): unsure at all Xaa locations
  Clone ID: MRT4577_141662C.1.pep
STADESRQYRPVEESEQWRGARGPISRXQTRVQGKSWRSEXKESELRSRVTKELKQAKQATERMPEPPVNENFTEVXDKIHSSLQEQEQLLRDTISRHQEDKPTHYPLSNIGVR

SEQ ID NO: 230340 - protein, 157 aa, Zea mays
  unsure (1)..(157): unsure at all Xaa locations
  Clone ID: MRT4577_141663C.1.pep
EKRRRTPFPRRTGGEXXXXXAKDGTGGXGNTPRAHXNKGTEGGXGRDAAKXEXKEPGXSXKERXGXSKXTDAEEKGXXTPGERXXKEPTSGNTGKGRGXKDAAKGNKXTPTKPAXKSKERRNXRRAKGGETGPTEPPPGXKGAGKKRGKRKKEKKPK

SEQ ID NO: 230341 - protein, 55 aa, Zea mays
  Clone ID: MRT4577_141664C.1.pep
NRYYDHKWSTWVASLQHTYFSNPWAIVSVVAAVFLLLLTMTQTFYSAYSYYRPPH

SEQ ID NO: 230342 - protein, 86 aa, Zea mays
  unsure (1)..(86): unsure at all Xaa locations
  Clone ID: MRT4577_141665C.1.pep
IGSKLPADSKKKIEDPFDGAISWLDPNQLPEGEEFXAKIKELESLCNPFFAKMYQGGGKKMGGPGGMEKDPPPGKGGPGPKIKEVD

SEQ ID NO: 230343 - protein, 57 aa, Zea mays
  Clone ID: MRT4577_141666C.1.pep
HISYNILNITQCRGWRDTIITIIICPIYMSVDLANPMSSYNWPHFQLHMSIPSKDSS

SEQ ID NO: 230344 - protein, 92 aa, Zea mays
  Clone ID: MRT4577_141667C.1.pep
NLNKQQPNATWADIIWPYEFIIFYNCFAMDCYSTPYMDPSETGNIYTCTKVKEHYYQLGLYYLEHITSLMLEGLCKYLSRSILQIPTFSRLL

SEQ ID NO: 230345 - protein, 139 aa, Zea mays
  unsure (1)..(139): unsure at all Xaa locations
  Clone ID: MRT4577_141668C.1.pep
MKEVNDAAPNAIEIPEMEPSQRPLGKKKAKEAARQGGNDACKEALKFLXAKKIEDDAEKEMKREERHAKSFALDKEMLELEKERIALKKEKVANEANNNFLKRIAEEDRIMTIDLSAMNEMQQQYYLSIQAEIMARRMN

SEQ ID NO: 230346 - protein, 85 aa, Zea mays
  Clone ID: MRT4577_14166C.1.pep
GTPPLAHRECSSYDNDVKHHLSRTRPCPKYFKYVNTSTKRKLLESVGPLKPKGSTAGRMGVTEKNKNSHSKLLLRWTNCLLLQKV

SEQ ID NO: 230347 - protein, 222 aa, Zea mays
  Clone ID: MRT4577_141670C.1.pep
MTSESATATVIQMDDGRAPVVAAPAPAQALGAAPRKTTTGLPFLLRSGAKGFRCCLAVVDLLLRLAALGTTLAAAISTGTADERLSVFTTTFQFHARFDDFPAFTSLLVANAVAAGYLVLSLPFSVVGIVRPSKAATGVGLLLLLVCDVVVMALLTASGAAAAAIVYVAHSGNRRANWVPICMQFHGFCQRTSGSVVATFLAVLIFVVLVLMAACAIRRRPS

SEQ ID NO: 230348 - protein, 77 aa, Zea mays
  unsure (1)..(77): unsure at all Xaa locations
  Clone ID: MRT4577_141671C.1.pep
RITAQNLQQRLVPTINQVVAAHLAAYLQEHQFPPFTQLAGVNPAAXYHAQELLPFNQLVGSPAAILLQQQLLGFRLQ

SEQ ID NO: 230349 - protein, 72 aa, Zea mays
  Clone ID: MRT4577_141672C.1.pep
RLKSLLGRVIVLMPPCTKPRSHPFLLGARFCFFDFPSPFSRPLDQMRVPCYFCQGGGIPDFRGFPFVLPPTC

SEQ ID NO: 230350 - protein, 48 aa, Zea mays
  Clone ID: MRT4577_141673C.1.pep
GVFGAAGGSHVSCTSAVKFHSRRRGRAESWSSFRSGSAKAYSARLAWH

SEQ ID NO: 230351 - protein, 130 aa, Zea mays
  unsure (1)..(130): unsure at all Xaa locations
  Clone ID: MRT4577_141674C.1.pep
PQIEGSLEEEGPKHEFFSPYPSQQNGVVERKNKPLLAMVRPLLDESKTXDRFWAEAVNPPCYALNRLYLPRIPKKTSYEPPTGKKPHVSNFKVFGSKSFILVKKGKKSQFAPKTVKGFFLGNDSNPPFFA

SEQ ID NO: 230352 - protein, 829 aa, Zea mays
  Clone ID: MRT4577_141675C.1.pep
MGRKKNPIVFLDVSVGDEPDERMIFELFADVAPLTTENFRALCTGELGIGQKTKKPLCYKGTLFHRVIKGFMAQGGDIAKENGSGGENIYSGKFTDETCVLLHDDRGLLTTADTGFKPSGSQFCITFKPNSHLDRKHTVFGKLVVGSDVLKRIEQVDVQSPDSTPVIPVTIVNCGELIERKDIGSMSIEIDKKRAAKSKLTRDITSDEESNEGQHKRRRNKSSKRRRKKRRYSYSESDSSSESETESSDYESDSDTYSSDSSDVSSSSDDRRRRRKRHSKKNKRKHSRRKRDHRRERRRRKRGRKSKQKSKRIVKGDSEAESTGDSSSEDARSKRHRRGRKFKASSQVSEENLAAVAALKDATSPQQKSGIQRSPAQDVSSLQNGEVHTNGVNDSKIERNAAVMPVLTGNRSKSRSQSMSVNHSMSKSMSISPRRSPMKRSSTSPKRSLSRSPVDNNRSRSPIRTPKRSVSRSPARRQSMSRSPARSPPRNSSRSLHISRSPVKAHRRSISRSSARSMQQRSPSRSLERTHVRKSISPSPPLAKGRSITRTPVASPLRSVSRSPARISRSPHRPSRRSPMRSPRWNIRRSLSRSPARIPRRSVSRSPVRGGRPRRNISRSPSPHRRVVTPPNNGRSPSRSGSPDGSPKRIRRGRGFTQRYSYARQYRSPSADRSHRYGGRNDRDRYMGYRGSRHRSPPRRYRSPPRGRVSSPRYRRRSRSASRSPVYRERGRGGGYSKSPIRSSSPPARKPRSHGDRARSVSRSHLSGSVSRSPPVHHPSPPDSPSVKHASDEKSQSASPALSLSGSPNRGGKKGLVSYGDGSPDSAGK

SEQ ID NO: 230353 - protein, 68 aa, Zea mays
  Clone ID: MRT4577_141676C.1.pep
MSYLSLQLFADVAPLTTENFRALCTGELGIGQKTKKPLCYKGTLFHRVIKGFMAQDARQMISTAFLII

SEQ ID NO: 230354 - protein, 96 aa, Zea mays
  Clone ID: MRT4577_141677C.1.pep
KRGGPGPRGKKKTAGQATTPGTILAFLGRGAHFSGYGQTDPILSTGGVKFLGKKPSDRKGRFPQEPSSLEPHPPLLKPSFNPHPFGPPEQPHPGGP

SEQ ID NO: 230355 - protein, 329 aa, Zea mays
  unsure (1)..(329): unsure at all Xaa locations
  Clone ID: MRT4577_141678C.1.pep
CFEFGTRFHLTLISRXXXXXXXXXMSKSMSISPRRSPMKRSITTTKRSVSRSPVHHNRSGSPVGAPXXXVSRSSARRQSISRSPARSLSKSPPRDARILRSVSRSPVRGGRPRRNISRSPSPLRRALTPPNNGRSRSRSDSPDGSPKRIRRGRGFTQRYSFARQYRSPSADRLHRYGGRNDRDRYMGYRGFRHRSPPRRYRSPSRGRVSSPRYRRRSRSASRSPVXXXXXXXXXXSKSPIRSSSXXARKPRSHGDRARSVSRSHLSGSVSRSPPVHHPSPPDSPSVKHASDEKSQSASPALSLSGNPNRGGKKGLVSYGDGLPDSTGKR

SEQ ID NO: 230356 - protein, 46 aa, Zea mays
  Clone ID: MRT4577_141679C.1.pep
IRRQESSPQMLKRFFCRLSPSTIYEIFCSKNMFTHLTRRSIYFCKS

SEQ ID NO: 230357 - protein, 89 aa, Zea mays
  unsure (1)..(89): unsure at all Xaa locations
  Clone ID: MRT4577_14167C.1.pep
FCPLXAFXPCVSWASPPPAWXFLVLGALVSCFXSLAPPRSLVXRSXAACPPRPPLVAAAAAALGXPASAAARASSLXRCAPVXXWLCWP

SEQ ID NO: 230358 - protein, 60 aa, Zea mays
  Clone ID: MRT4577_141680C.1.pep
APNLWADLCACALVLCVTGLSPFLLHCLLVLRVLFACPSMMLSKGRQKPARCVLRPRSLS

SEQ ID NO: 230359 - protein, 58 aa, Zea mays
  unsure (1)..(58): unsure at all Xaa locations
  Clone ID: MRT4577_141681C.1.pep
FLVNFVHSAFDPSCCSPAVQHMVQTADIDHRLAHVHSITHHIKPLVLRDSSXTVTSDA

SEQ ID NO: 230360 - protein, 917 aa, Zea mays
  Clone ID: MRT4577_141682C.1.pep
MEAAGNDRREAALGALSVLPDEVLCAVVDILSPADIGRLACVSRLGLCSENKEIWQKPRQFDGFNSLYLYRRWYRCFTTLNSFSFDDGHVERKDDFLLDQFRSQYDGKCPVLVTKLAETWPARTKWTLQQLTKDFGEVPFRISQRSPQKITMKLKDYVSYMELQHDEDPLYIFDDKFGESAPTLLEDYSVPHLFQEDFFDILDYDQRPAFRWLIIGPERSGASWHVDPGLTSAWNTLLCGRKRWALYPPGRVPGGVTVHVNDEDGDVDIETPTSLQWWLDIYPHLPEHEKPLECTQLPGETIFVPSGWWHCVLNLETTIAVTQNFVNQSNFQHVCLDMAPGHRHKGVCRAGLLAVPGKFVKDNKNHQSVTMSGWNHPDMSRKEKRLKGSEALRISNSINHCSAFEFSGVQESLENQDFSYDIDFLSQFIEKERDHYSSLWSPTNSIGQREAREWLRRLWVLKPDLRELIWKGACLAINVDKWYSCLEEICACHSLPPPTEDEKLPVGTGSNPVFIVSGNVIKIYAEGGLVYSVHGLGTELEFYDLLQKSGSPLINHIPEIIASGFLEYKDDIYSTVPWNGKGIPEILVKYYSLEVSCANSCFPLGLWSKQRFGMCSSADVSDRPIWPYMVTRKCKGDIFARIRDMLSKTDILHLASSLGVQMRNIHLLPLPPVEHVPESGNNDVKEVVGTCDDTTVLPEWQQLVSTLNRRKQNVKKHLANWGDSVPQVLVEKAEEYLPPNMGFLIKFVKDDGELLYPCPSWIHSDIMDDNILIEGIIKLSSSGERERVYDSDRDKINAIHIIDFSDLSIGDPICDIIPLHLDIFRGDSDLLKEFLRSYQLPLLRGESTTDVYRSVRNSKFSRASYRAMCYCILHEDNVLGAIFSLWKEMRAATSWEDVENLVWGELNRYQDSAVRSA

SEQ ID NO: 230361 - protein, 127 aa, Zea mays
  unsure (1)..(127): unsure at all Xaa locations
  Clone ID: MRT4577_141683C.1.pep
LNTSKKNAIHIIDFSDLSIGDPICDIIPLHLDIFRGDSDLLKEFLRSYQLPLLRGETRTDTRPPTRPPTRPRTRXRAMCYCILHEDNVLGAIFSLWKEMRAATSWEDVENLVWGELNRYQDSAVRSA

SEQ ID NO: 230362 - protein, 953 aa, Zea mays
  Clone ID: MRT4577_141684C.1.pep
MEAAGNDRREAALGALSVLPDEVLCAVVDILSPADIGRLACVSSVMYILCNEEPLWMSKCLSIGGPLEYKVSWKKTALCRLGLCSENKEIWQKPRQFDGFNSLYLYRRWYRCFTTLNSFSFDDGHVERKDDFLLDQFRSQYDGKCPVLVTKLAETWPARTKWTLQQLTKDFGEVPFRISQRSPQKITMKLKDYVSYMELQHDEDPLYIFDDKFGESAPTLLEDYSVPHLFQEDFFDILDYDQRPAFRWLIIGPERSGASWHVDPGLTSAWNTLLCGRKRWALYPPGRVPGGVTVHVNDEDGDVDIETPTSLQWWLDIYPHLPEHEKPLECTQLPGETIFVPSGWWHCVLNLETTIAVTQNFVNQSNFQHVCLDMAPGHRHKGVCRAGLLAVPGKFVKDNKNHQSVTMSGWNHPDMSRKEKRLKGSEALRISNSINHCSAFEFSGVQESLENQDFSYDIDFLSQFIEKERDHYSSLWSPTNSIGQREAREWLRRLWVLKPDLRELIWKGACLAINVDKWYSCLEEICACHSLPPPTEDEKLPVGTGSNPVFIVSGNVIKIYAEGGLVYSVHGLGTELEFYDLLQKSGSPLINHIPEIIASGFLEYKDDIYSTVPWNGKGIPEILVKYYSLEVSCANSCFPLGLWSKQRFGMCSSADVSDRPIWPYMVTRKCKGDIFARIRDMLSKTDILHLASSLGVQMRNIHLLPLPPVEHVPESGNNDVKEVVGTCDDTTVLPEWQQLVSTLNRRKQNVKKHLANWGDSVPQVLVEKAEEYLPPNMGFLIKFVKDDGELLYPCPSWIHSDIMDDNILIEGIIKLSSSGERERVYDSDRDKINAIHIIDFSDLSIGDPICDIIPLHLDIFRGDSDLLKEFLRSYQLPLLRGESTTDVYRSVRNSKFSRASYRAMCYCILHEDNVLGAIFSLWKEMRAATSWEDVENLVWGELNRYQDSAVRSA

SEQ ID NO: 230363 - protein, 219 aa, Zea mays
  unsure (1)..(219): unsure at all Xaa locations
  Clone ID: MRT4577_141685C.1.pep
MDEAALLAGAGVAAAAAPPAAAAGAAVMGVFKYNFAAQFLSRIIPFVFNIWFVRQLGADDGAVSAFALQLPLFMNCILFLSREGFRRACLRNDSQSDVLTSEAILMVAWMVIPVSILITSVGSILVLSLKRVKLSDPYAKAVLIIGFACILELLAEPLYIISQKKKYYNIRVYVEPTATLFRCLTTFILIKDIXSDKLVLXSLPQLXYGGCIPFGNWHI

SEQ ID NO: 230364 - protein, 96 aa, Zea mays
  Clone ID: MRT4577_141686C.1.pep
MASKALLVLTLLLAASFLPAFGSEQPKAAKKEKRVEVQGWRGGAGYPGPGGGGGAASPPCGWGCCTRGYHGGCRCCSPPGQKPPPMFRPGLVEAPN

SEQ ID NO: 230365 - protein, 122 aa, Zea mays
  Clone ID: MRT4577_141687C.1.pep
DFGPLAYFLGIECQHTTHGLILSQHKYIHDLLTRTNMLTSKPVATPMLPADKLQIQGGAPLSAEDATRYRSAIGALQYLLLTRPDIAFSVNQVCQFMVAPTADHWMAVKRILRYLHGTINMG

SEQ ID NO: 230366 - protein, 46 aa, Zea mays
  Clone ID: MRT4577_141688C.1.pep
LSIIICHHQPFLEFYFKKIPNFVSTRLVNPYFVILHPHRVPLHKKN

SEQ ID NO: 230367 - protein, 69 aa, Zea mays
  unsure (1)..(69): unsure at all Xaa locations
  Clone ID: MRT4577_141689C.1.pep
LNPILQPIFFQRNAQQDNTKEVDHEDLFWSQPQTTSLLPLARSPFLVMNXNQHLLKKKRPSPRDKQLLH

SEQ ID NO: 230368 - protein, 73 aa, Zea mays
  Clone ID: MRT4577_14168C.1.pep
NTNGPPGHGATRPVNFGALARESGLNDSLFHCPGNALGGTDTRSQGARGPRAKGPNSPLRGRNRGRAWSKGLG

SEQ ID NO: 230369 - protein, 69 aa, Zea mays
  Clone ID: MRT4577_141690C.1.pep
VSRADGYRSWSASLSTLTCLPHLGCKMERQAKMCSALKVTGAIVCLYLEAIELHYDGTGGRVGPPSSAA

SEQ ID NO: 230370 - protein, 323 aa, Zea mays
  Clone ID: MRT4577_141691C.1.pep
MFHRLLRRAMPLPPPQSPLPAPRMPGVTGGRLFASLPSPPPLQSRREVHVWYLLPDELKDASQLKMYTELLSPSERKTALSMNGEKLQKGAVLSRALLRTTLSRYTDCKVDPRSFEFKKNKFGKPEVLWRSDDSRMEWPLHFNISHTSSLIVCGITMDTPIGIDVEEKTRKTAKNILSLARRYFTPSEIDYLAKIPDPDAQQKEFVKLWTLKEAYVKALGRGFSGAPFNKFSIILAANGRIQISVAPKVSNGSDSIHDCLSENWQFALAELNSSHYMAICIEDDSTSSDSGNGRLPLGLKVWKTTPFVEDILVSGTEAVKLVS

SEQ ID NO: 230371 - protein, 75 aa, Zea mays
  Clone ID: MRT4577_141692C.1.pep
PKRELNNMPTFFMFLNIRDLELATNHMPTNNSLKCLYVYSLALLFTNVYQLLLLLYLPICDMTYSYLLCQLLYDT

SEQ ID NO: 230372 - protein, 82 aa, Zea mays
  Clone ID: MRT4577_141693C.1.pep
RLTYFLKKTPAGNLLCPIIAHVFCNMMGLPVFSSPRTKGAALVAFLAGSVAFFWLLFPATSPELYNSSFDRCSCWHGFCNWK

SEQ ID NO: 230373 - protein, 42 aa, Zea mays
  Clone ID: MRT4577_141694C.1.pep
LYASTCTVYTMLAHQSAECLSVVLCSFHCQQDPPPLQLLRRR

SEQ ID NO: 230374 - protein, 124 aa, Zea mays
  unsure (1)..(124): unsure at all Xaa locations
  Clone ID: MRT4577_141695C.1.pep
FLPXSXXXXSHLFXNLXHXXXLSXXXXLXXXXXXXPXXXSXXXFSXXLXNXXXXLXYSXYISXFHSPXPXIHXXSYXSXXXSHXPXXXXNPXXSXXXPXXTNTPHXTXFIFXIYLNIXNQXSLS

SEQ ID NO: 230375 - protein, 70 aa, Zea mays
  Clone ID: MRT4577_141696C.1.pep
CCRALRSFRCQVSQRTTATARSCATGRTGSRMDMTAIQEILVNRHYRDDDLDPNVVVARGMDTAVHGYVG

SEQ ID NO: 230376 - protein, 56 aa, Zea mays
  Clone ID: MRT4577_141697C.1.pep
GLVRYAAGGSPACFTPMMATEIENSCIGGGHGGVKDDHSLKKAFRAYGEVLLVQYH

SEQ ID NO: 230377 - protein, 56 aa, Zea mays
  unsure (1)..(56): unsure at all Xaa locations
  Clone ID: MRT4577_141698C.1.pep
MNVLIVALALLALAASAASSTSGGCXAQTPTFHLAPPFYMLPPFYLXAVQLPQSWR

SEQ ID NO: 230378 - protein, 93 aa, Zea mays
  Clone ID: MRT4577_141699C.1.pep
LGRRIVRPRVRDHRRKMEAIGAGAVGRLATRNSVKDLLLGIGKGRSGCEPLHLFPSAVLTVNRGPSPDFKTAHGIHQWWRPDLSLECTAHYYT

SEQ ID NO: 230379 - protein, 65 aa, Zea mays
  Clone ID: MRT4577_14169C.1.pep
LLVKIKSLRFFCGLLGRHGLSTDVLILVMQLCLVHHFSLKKLVAYKTSNANGMEVRNNRASVSTF

SEQ ID NO: 230380 - protein, 73 aa, Zea mays
  Clone ID: MRT4577_1416C.1.pep
AHVTGWGHLQKVPIEVCKPVASNSMPSLRVWVRALHTMYLHMGFNPVRSLPTDSGSPTTSLKKSPLAIYISRT

SEQ ID NO: 230381 - protein, 85 aa, Zea mays
  unsure (1)..(85): unsure at all Xaa locations
  Clone ID: MRT4577_141700C.1.pep
LLFNGTDANRLHSICNYSDASEFLSSDRVCRXAFRPASYCAARSLGIIGWRDLRFGQRVPSFIGPRCPGISLPLLNISLLGLTPM

SEQ ID NO: 230382 - protein, 126 aa, Zea mays
  Clone ID: MRT4577_141701C.1.pep
TTTRTIRGNKEIDSTKRKPNLMRASQHLRPIFVPGLFKPAAHGKTAGSEVRPEFLFYYSVRKREAAGAAWVSRRRDEFHGRIQAKRQRRAWLKMLARDCRAWHAEYTRGAGGEEGTSSCCSLQAPP

SEQ ID NO: 230383 - protein, 114 aa, Zea mays
  Clone ID: MRT4577_141702C.1.pep
ALAHSPVVAIAVATRRRSSGKPSVSAARPIQEKPATRTFNWPSLEIRPFPTTELTGHPWRCSAPPYPSSAAGAAGLLPLSRRCHLSSPRCLPGAQSPQLHLLKVGRIQFLLFAG

SEQ ID NO: 230384 - protein, 58 aa, Zea mays
  Clone ID: MRT4577_141703C.1.pep
NIKHKYGLKGEILLISLTLVGSFILAVSGAPWGGGCFVFFLEGGCLSALGLGDPLSLY

SEQ ID NO: 230385 - protein, 73 aa, Zea mays
  unsure (1)..(73): unsure at all Xaa locations
  Clone ID: MRT4577_141704C.1.pep
PKRGIPRLARRGGVKGISGFIYEETRGVFKFFLEKVIRDAVTYTENAPRKTVTPMEVVYAFKGQGRPLXGFGG

SEQ ID NO: 230386 - protein, 59 aa, Zea mays
  Clone ID: MRT4577_141705C.1.pep
NAPQPNPHKPAGKPGSGAGSVKGLGVHMYAWLRSASAKGPMKTCRWARRGLGVSAAGGA

SEQ ID NO: 230387 - protein, 84 aa, Zea mays
  Clone ID: MRT4577_141706C.1.pep
MQAACNRAKWAHLSDFQRARRGGPGPRVMRPARRMLRASNCTATHATATPPRLRNQYRDSRQPYARPSGASLARWSMRPKMGRQ

SEQ ID NO: 230388 - protein, 88 aa, Zea mays
  Clone ID: MRT4577_141707C.1.pep
QKARPPGLFFPPAWVSLPGVTPGVFGGVPVWDLAAPALFFGPLSVYPVGGGVLGRPWGVAPGAPVFVGVFPPLCQAVLLGPVLLLRVV

SEQ ID NO: 230389 - protein, 145 aa, Zea mays
  unsure (1)..(145): unsure at all Xaa locations
  Clone ID: MRT4577_141708C.1.pep
QPRDSTTPPPKPPRRRRPVSPRFXSAASPPXPPSPPPLPGSPFSPDPPLPXIPPHPNCSPXPPTTPAPAPPSYTTPLHSSSTPPRSISPRCNXFPAPPXPXEFPIPLSPPLSYTPNFTPPPSXQPPGRTHYAAPSXSRPPPPSNL

SEQ ID NO: 230390 - protein, 66 aa, Zea mays
  Clone ID: MRT4577_141709C.1.pep
TTCGGFSPGSPTAPLLRPHIRRFPVPAPSCYDLCSSAGAAGGASSCPWGVAPARGVLGRVQSQSQA

SEQ ID NO: 230391 - protein, 128 aa, Zea mays
  Clone ID: MRT4577_14170C.1.pep
SPLRVPVPADVAELCDSPQFFSATSSRPGSSRRGPFTPTAKSECSRSLFGGYSDYPNYMANTESFRAKARSQSAPKQRPQYERSSSLRRASAAQRSAAAAASSLHAKFTNKAYPGSGRLDRLGLPARY

SEQ ID NO: 230392 - protein, 96 aa, Zea mays
  Clone ID: MRT4577_141710C.1.pep
PHYKKIFMVYPRGTKVHNGYWLTPTTTKRTYLIWEWSQNNLTTSLKKTHSINGKTPPLTSTPFYWGYPPRTFESRDLIHTNILNEGGPGLASKQGY

SEQ ID NO: 230393 - protein, 144 aa, Zea mays
  Clone ID: MRT4577_141712C.1.pep
MDDDDGSLGIRNWGFYDTMKGNLGLQLMSSMPPDRDTKPLLPRAGFLQQHGHHNASHQLHAQQSQHYRDSTCGGGASGGMPTEQHSIHMDFSRNEAWLHPSHHHQHPHDQKVLHSRPTVPAGHGGHPGHGSHPVHGGHIVHHHP

SEQ ID NO: 230394 - protein, 275 aa, Zea mays
  unsure (1)..(275): unsure at all Xaa locations
  Clone ID: MRT4577_141713C.1.pep
KLLIPSYFPSKLSPKEACARCIALIKRSPTAGARFCEFALSEGSSPRSIVELVKYSITLALSQTGLNSDQIDGLIIASVNLIKSLSNERSSLAALREFLANGKLRLVLQVAVSERARAALLGIVPVVLPDELSVLHEECMDIVVNAARISKQEEYQETVLEAHKLIVLGGWSDELFEALTNTLQSKASDFAEIYGVEPPPCPVASSRRKKGKSLKKIPVRXCCWKGVXSKSKISNEELAVAAGAAWQVNEIVKTKDLRDAFLQSSYSEIVFSRQQ

SEQ ID NO: 230395 - protein, 72 aa, Zea mays
  Clone ID: MRT4577_141714C.1.pep
WNDLESFLQISFRTESDEVSFFVLIFQAESGVGIETILCKHFGSKSIEGGVDWARESANILVELDLYREDFV

SEQ ID NO: 230396 - protein, 51 aa, Zea mays
  Clone ID: MRT4577_141715C.1.pep
CAQNVQISTIVKFTTIIEHIRYKVPSFTPLLLMLHNMYPIIGRLLTDDFIP

SEQ ID NO: 230397 - protein, 56 aa, Zea mays
  Clone ID: MRT4577_141716C.1.pep
INCCHSTNLLCHTEQCSTNNPSSVDPSFRWLMSYMPMMIALQMMSRGVTRYIKVHL

SEQ ID NO: 230398 - protein, 58 aa, Zea mays
  Clone ID: MRT4577_141717C.1.pep
AKFSRFHHYVLPNDQLGMNKLVRRQLLHVRIRMDLVPAIVTFVIFEVLITDVVLFSST

SEQ ID NO: 230399 - protein, 106 aa, Zea mays
  Clone ID: MRT4577_141719C.1.pep
IKKKKKKKKKKKKKKKKKKKKKKKKKKKIKKKKKKKKKKVLSFGRNPLRGDFCKFPSPWGPFDLAFRGPISPFGGSFYISLAGFLQRGDWKNLGFPQFIRFGALPL

SEQ ID NO: 230400 - protein, 109 aa, Zea mays
  Clone ID: MRT4577_14171C.1.pep
SKISDHVRFMEYLDVERFMDPSCADKGSTLFRLAAVVVHIGMGSLKSGHYIAYVRARKLGCQQEEASWFCADDSQIRRVTIEQVLNSQAYILFYERMEDQDVSGMTRQN

SEQ ID NO: 230401 - protein, 44 aa, Zea mays
  unsure (1)..(44): unsure at all Xaa locations
  Clone ID: MRT4577_141720C.1.pep
LIVSDVDLINVFVELSYMCSRASSFNILPALVVXLLLEKKAWCV

SEQ ID NO: 230402 - protein, 110 aa, Zea mays
  Clone ID: MRT4577_141721C.1.pep
DRLHESNVQLSPVNDRLSMPTLSAYCKMRQCLPCNHLSALLRGSYWLHQLLARIKIDAVCQQKPHRFTLNDVNRPAPLCSYVDHPSTSINPDRYYIAVPSLQSKEQGLPV

SEQ ID NO: 230403 - protein, 53 aa, Zea mays
  Clone ID: MRT4577_141722C.1.pep
WHHRPWRDDHILEVGVNWGSQLSQPLVPCSVVKMLKANRIARVKTFDADFWAV

SEQ ID NO: 230404 - protein, 73 aa, Zea mays
  Clone ID: MRT4577_141723C.1.pep
HSSTTRPGSNLYDSSSLSTQHHNKQHKLPQPDSLSLKLNAFFKTKNNELPQLNPPLFQSNSKPPQPPQSFLQY

SEQ ID NO: 230405 - protein, 66 aa, Zea mays
  unsure (1)..(66): unsure at all Xaa locations
  Clone ID: MRT4577_141724C.1.pep
CTMTQHGQHAVTTAISTIEMFQSVYTLVEDXMIHHPAYLIAVIITIILNVSKARLNAPHNLYMMTA

SEQ ID NO: 230406 - protein, 46 aa, Zea mays
  Clone ID: MRT4577_141725C.1.pep
MIYDVNSPLFRSFLSQKGGADKRKMEEHKPKEQRPKANENKPVMNE

SEQ ID NO: 230407 - protein, 84 aa, Zea mays
  Clone ID: MRT4577_141726C.1.pep
GIILKTPQKKGGGGGFFLFGVKGGVLTIGKVKTGVLTLNPLGKGLRGGYTGGFFFFRGGMGLLRGLFQGIGPNSDPGPKKIPFV

SEQ ID NO: 230408 - protein, 128 aa, Zea mays
  unsure (1)..(128): unsure at all Xaa locations
  Clone ID: MRT4577_141727C.1.pep
VRFGYRLDLGTVRGPVXSRLAGFXVRGDFCSGVHYVWAFVTHKPLLPRYQGSRVIPVIPSQGESLGRVMVRRAFRFPVPPVIRSFMQAVGLPVAPLVWWPRPRVCSAPARVNTSLPYPPPSYTREGII

SEQ ID NO: 230409 - protein, 99 aa, Zea mays
  Clone ID: MRT4577_141728C.1.pep
GGGHPPPPPWSPRRPRFCGARPQGLRGHQPLPRGGPGAQGEFPPQGKLSRPGAGIQAGWGLPACLMYVCGCLVGQGLGTWLWKVHALSSCTNSANKLVP

SEQ ID NO: 230410 - protein, 77 aa, Zea mays
  Clone ID: MRT4577_141729C.1.pep
TNREVLSRKHSSTVRTEQNPVLHENTRAGPFFTLYVKLLKLGPQAQTKFLPSKLLDNSKKQYNTSVTSSPFFILPPL

SEQ ID NO: 230411 - protein, 142 aa, Zea mays
  unsure (1)..(142): unsure at all Xaa locations
  Clone ID: MRT4577_14172C.1.pep
WSSLCRTTRTDVFEIVLHRPTAAGPKPNIXLSRLAHYEFXSQCKLTIGGELATRALQSERKTIRRSLYAETAMLDRXRRXIASAYYTGCASALLAYDITQNQTFGDILRWLRELREHEDSNIVIMMAEIKLELNRVRMSPEE

SEQ ID NO: 230412 - protein, 99 aa, Zea mays
  Clone ID: MRT4577_141730C.1.pep
LNNRGGGFGITGTHNFFAKGGKGPLGSLAKGPIFGQGVSFQFFRGGKKRKGGPLKKKDHFPQKKNPPGYFEKAEKALTGPPNPEGGDPEGCPKKEKGQK

SEQ ID NO: 230413 - protein, 95 aa, Zea mays
  Clone ID: MRT4577_141732C.1.pep
PPAVGGPCSCLVVLSSSGRLCCLLRGPPSVLPPREVQGRGAPGFSLRPRGAFVRRGVPLCHHPLLKGAGVGAPRGPGGARVLFPALSGLLCPLVL

SEQ ID NO: 230414 - protein, 56 aa, Zea mays
  Clone ID: MRT4577_141733C.1.pep
EIDNMIADAMINVSHNGLGGREDGKSSDNYLYAEDGTHFDRGYICPHSVTDTDKMT

SEQ ID NO: 230415 - protein, 233 aa, Zea mays
  unsure (1)..(233): unsure at all Xaa locations
  Clone ID: MRT4577_141734C.1.pep
MRRHARSPRRSSLLPAREKRRADIFQRYRGRLWETVRHDTHFLLPXWQNTFIFDFRTRPHIFSSKSWNKDLPMTQLRLRCLSRPDDQHLPSIFDSLGVWYYDEEPPSIAKQGLLGRGSTFYWRXLVNHRPHKSXLVRDSLVQRELLHHKILLGRSSSNSLSDGIQEPTWSCTRITLLNSEFFHMNMHRCKDMLDQGRDRDAGRGKPQHRWHPHGRLIRDRDHQHRHLASLTTA

SEQ ID NO: 230416 - protein, 51 aa, Zea mays
  unsure (1)..(51): unsure at all Xaa locations
  Clone ID: MRT4577_141735C.1.pep
MVKICCIGAGYVGGPTMAGIALKCPDIXEVXVRLDICKPRMEAWNRDTLAI

SEQ ID NO: 230417 - protein, 72 aa, Zea mays
  Clone ID: MRT4577_141736C.1.pep
KNGSFIERRCLCALAFCSEASVRVFSSPGRRPDGYLGLCWASYNQKIVFFSLKGKIGITYRRTTKLNRQIIG

SEQ ID NO: 230418 - protein, 44 aa, Zea mays
  Clone ID: MRT4577_141737C.1.pep
YIVWTQLCYLEDASPGRDDVGFQSPYLSPCGGRCSNPDCWGPYS

SEQ ID NO: 230419 - protein, 57 aa, Zea mays
  Clone ID: MRT4577_141738C.1.pep
LIINNKTSFLLLSTLLQTLIPTSTPFSTCLCNKHNWIQCGLLTLHGVRHHGPPHAFA

SEQ ID NO: 230420 - protein, 56 aa, Zea mays
  Clone ID: MRT4577_141739C.1.pep
KEHANGEIKGALQCFGDFEHRACILKLTNGEAISLLTTVGPKLDIAGHDLFVTHLK

SEQ ID NO: 230421 - protein, 116 aa, Zea mays
  unsure (1)..(116): unsure at all Xaa locations
  Clone ID: MRT4577_14173C.1.pep
IDAGLPSRYRDSVRAIRPGLPLFLYNYSTHQLHGIFEXVQHSSHCSWLWFPFLASSSFAVLTGTRFRSSDRQAASFGGTNIDPTAWEDKKCPGESRFPAQVPYCTVCFDPQSSTLV

SEQ ID NO: 230422 - protein, 37 aa, Zea mays
  Clone ID: MRT4577_141740C.1.pep
IFIPVIDSKALFDLWTAKYLCLTTSVIFTGLECGQRP

SEQ ID NO: 230423 - protein, 88 aa, Zea mays
  Clone ID: MRT4577_141741C.1.pep
KKKKKKKKKKKKKKKKKKKKKKKKKKKKKKKKKKKKKKKFSQKNQKNRGIWGDLFNWKGKTPVPGAKKEKGGGEIKRVPPRGTGAPVT

SEQ ID NO: 230424 - protein, 186 aa, Zea mays
  unsure (1)..(186): unsure at all Xaa locations
  Clone ID: MRT4577_141742C.1.pep
SRPAGKTDPHSYGXRCEKPPIIYRDDGRPNPMTAYLPKMGQIMTPRPMKGMLTDPHTILNWPFLRNDQSKLETCYQIALAIKKEGEDLDAAAIQADPLSXADLRXDLPLRQSXEHAFYLDWDAHSFMITNXGTQYTTQIHTHMSYSNFDHIIHSIINMNAXANTIQNSRPDHNLLSILRSSSLKQR

SEQ ID NO: 230425 - protein, 133 aa, Zea mays
  Clone ID: MRT4577_141743C.1.pep
MGDAGDKCALRLAATARKWLEDVRVDREGRVHPAVASGGQALTWLATAGARVSLAEPGRVVCSLRVGAPLTDAEGRWHAGAIAVAADNVCAAAVFTALGADVLTVQYSLSYFSPAHLDEEVEMEGRVVGRKAA

SEQ ID NO: 230426 - protein, 75 aa, Zea mays
  Clone ID: MRT4577_141744C.1.pep
SWHAAWNRSCVAGAVVDWTMASYKRLTHRIVIPKLIAKDAILHLWYAWSYRPSSPALSTNRQLNKHVAAAFIYYS

SEQ ID NO: 230427 - protein, 175 aa, Zea mays
  unsure (1)..(175): unsure at all Xaa locations
  Clone ID: MRT4577_141745C.1.pep
GLLRCLGLCANTAAVSISRWCSQTTIGSLITASLLPAMCSVYENTSFLPYKVQRVTAASLLDWYHPVVLQQXSDLLQLPPLVHVXTHNIRAQLLRQLVLANLAAYYQQQSMPLVHLLAQNMMAQQLQQRLLANLADYSQPRQFXLPFKQLAALNSAAYLQQHXLLPFMQLAAAYP

SEQ ID NO: 230428 - protein, 105 aa, Zea mays
  unsure (1)..(105): unsure at all Xaa locations
  Clone ID: MRT4577_141746C.1.pep
FNQLSTLNSTSNLQHQQLQFSHLPXPYPHQSQSSNQLSPFNYPAYXQKQQLLPFIQLAALSPSTFLIHPQLLHFYQHSSPNAATLXLQLQQLLSFNQLSFTNPTF

SEQ ID NO: 230429 - protein, 66 aa, Zea mays
  Clone ID: MRT4577_141747C.1.pep
LTESLRISKGALRWLTCIGDSQTKDNYLRRRSCYKRHCCRWLLQTITKADLLTLDKTAVVQKEVFQ

SEQ ID NO: 230430 - protein, 526 aa, Zea mays
  unsure (1)..(526): unsure at all Xaa locations
  Clone ID: MRT4577_141748C.1.pep
MAPSSPPMVDARCNSEVLQCVGVFVQGREGEQRIHPRQASGQESYALWTVLIARGFFVGRTMLLMGQGPASTLWFYFKTKYQGREEKLKMVMMVMMELGMMFDLLYTKANVLQRRIGVLFLCASQALMVVALVLFMIRREEGAHNNKVNVAITYTLFSGAIFVETCCVAAAIASPWTRAHLKESSCLHGLSDSLFEAVHLCKSTANNMAQFNLLDHCISVNSKPRVFSKALSAIGLDKQWYVHHMDKQCYWWIINRVLEHLATLPDEFSGLATVHFTINAPTEHPVWFNQLSTSFEQVLYGLHLYTDLHLSRHFNNCSTGSVVQPPPPEIMRLKEECETLSNYMMYLMVVHPSMLPVNTVAAGDXFNNLLAGLLTTLDMGRRRPSXNSARVLKDLLHSGHRRTXQHRSFYYLHHLLTQIKEMWVRLLMYAAGKCSGEVHARQLGEGRELITFVWLLMLHHGLGDMAAEFKLLRSNDPNVAERGAWIVSPPGNYQEPTCAFNHVTFVVHCKRNVSMLFTHTLQQFFL

SEQ ID NO: 230431 - protein, 88 aa, Zea mays
  Clone ID: MRT4577_141749C.1.pep
KSGGRGVKKKEKKKKKEKKKKKKKKKKKKKKKKIKKKKKKKKKKKKKKSLYKPFFFFFFFFFCLATTGPFIYSQYKITDRYLTTHASN

SEQ ID NO: 230432 - protein, 41 aa, Zea mays
  Clone ID: MRT4577_14174C.1.pep
KFTPMVRLPIVHLPTKTSGNFISQMTVRKKKLMLLFKSIKP

SEQ ID NO: 230433 - protein, 55 aa, Zea mays
  Clone ID: MRT4577_141750C.1.pep
WWSKKKKKKKKKKKKKKKKKKKKKKKKKKKKKKKKKKKKKKKKKKGGEELNHKHL

SEQ ID NO: 230434 - protein, 73 aa, Zea mays
  Clone ID: MRT4577_141751C.1.pep
GPIRRHLQQVTAASASRALDLLRIGRGWHPLVSAPGPPRTYAQKKVLLLRSRMSPRDLFSPPPPSSSGEKGVW

SEQ ID NO: 230435 - protein, 73 aa, Zea mays
  unsure (1)..(73): unsure at all Xaa locations
  Clone ID: MRT4577_141752C.1.pep
WRKTAARMKAYAYSLTPFLQNVMPALWKDITTKIHHKVTENWMSGTLLLTPVSGTYQYAXMWYKEQXKVSHRY

SEQ ID NO: 230436 - protein, 43 aa, Zea mays
  Clone ID: MRT4577_141753C.1.pep
VFQGPCVLVTESCTLFSSPCTLYIPYVPCNQIKTALPWEKMSF

SEQ ID NO: 230437 - protein, 84 aa, Zea mays
  Clone ID: MRT4577_141754C.1.pep
MPRNGDGSSDNGPIEGQNIVHGNSGDATMDHTKKVAPMPEVEKGDGIEGMSASGGGEMPKKGITGQGKAATDSNKPPPVDQVTK

SEQ ID NO: 230438 - protein, 101 aa, Zea mays
  Clone ID: MRT4577_141755C.1.pep
PPKTHPPKDKKYGGAGQLFFTLYNRINPPLMANRPQGGGLWNVKTLLFHPRLNPPLNPTGHPPLKKGGEGKIGLPCPGEILENPQLAPVFGDPLLAFFTGG

SEQ ID NO: 230439 - protein, 56 aa, Zea mays
  Clone ID: MRT4577_141756C.1.pep
NILLDVLSVEGRIHDENRLLDPNKRITTTIIQKPQWTYIVSGACFLMHNISTKFAC

SEQ ID NO: 230440 - protein, 156 aa, Zea mays
  Clone ID: MRT4577_141757C.1.pep
LLSPAITPRSARFSRVFAPRGDRVLPPLCGSAGAARSRFFRFCRFRGFPCCPSWGPVLHPPFPLFFPVPFFGGFPFFSCFLPASFSFFFTFIFFPPLLLRFFPLLAPGGLFFGILGFSPFPPVALFPPPSGRLFSPSRSGPLGPRPAPGRDSREAP

SEQ ID NO: 230441 - protein, 131 aa, Zea mays
  Clone ID: MRT4577_141758C.1.pep
MAAAGSAAAPLRRLFLRLRDPPPLPFNTLLSRLAPHLQQGPTLAPAPAPALALPTSTPAQTPSGILRDALFSFHPGLQAHPCLDPIGGAPARDEAGPGAAEVWADSVKKKRKRKMNKHKLRKLRKRLRRQT

SEQ ID NO: 230442 - protein, 157 aa, Zea mays
  unsure (1)..(157): unsure at all Xaa locations
  Clone ID: MRT4577_141759C.1.pep
SRKADRGGPLEHLGAECVHSGSGGKTKRHKLFTAFSPVCFPPLLSTINNVTSWTAGAAFIRSIIISSKIRTCTEATLPTLLQTTHRGSNDQLNRGTLHDVPPLPLPLPPLSLTTNQTLLTSSIXLVLRLEGDRRSXVELIPLSQITVLKQTMSMATS

SEQ ID NO: 230443 - protein, 236 aa, Zea mays
  Clone ID: MRT4577_14175C.1.pep
MAGKLTAAGRPPQPQGPKVADLKKAAILGGRKVAGKQEDVHLLRLMDNSYLQYRFLNARAEAAGKAQAAAAEKSLYGVEERIASLRVSVAEKRAEVERMKREHILRSVVNEQVPYLIQWGEIEGCHASCLRGATTALSNTSLRLPIIGSVNVNCGEVTEVLKSAAQLLEPLSPCIENFLPKVEQTGDVASNLAQVIATERTLIEECGNLLYQAQNLQMRESSLRSQVMQLKQNEAK

SEQ ID NO: 230444 - protein, 57 aa, Zea mays
  Clone ID: MRT4577_141760C.1.pep
PGMDGAQPSQRSGRIEVIFMHGTYSPFLERGREIWSTIRVERLETDRCNERSFLSKL

SEQ ID NO: 230445 - protein, 96 aa, Zea mays
  Clone ID: MRT4577_141761C.1.pep
ERGPEFLKGKGKTPGKKKPPLFSGEKSETIPGGGPKKKGHGYYNNWEPTEAMAKPPKQNLKARGEKKKKGGGGRKKTGPLKITASFFFFEKKKIKI

SEQ ID NO: 230446 - protein, 64 aa, Zea mays
  Clone ID: MRT4577_141762C.1.pep
NQDTTNVSTEFNTRATSTTDRHNAPKYNAQLTTGEKPDHQRHKHRPTSTTATQIPHRRRLALQR

SEQ ID NO: 230447 - protein, 247 aa, Zea mays
  Clone ID: MRT4577_141763C.1.pep
RTKKTLGQREASRIESSSSRRRASEAAGMEDLSVEELASNLSTYKDQLREVRKFIKEKKDDAGISEYVDMEKELQEVITLTEELLATANPSESAQNDVGLSPPNYSAGVHSEALDDLSQSHEKFAVGTKVQAVYSEDGEWYNATIEGLTPIGYFVSYEGWGNKEEVDPANVRALDVEAADALGQAEKEAEATKMALKRKVEQAATSDYQIRSLPTKLKIDPNDPEDVKAAKRKKIHAFKSKARFEQL

SEQ ID NO: 230448 - protein, 73 aa, Zea mays
  Clone ID: MRT4577_141764C.1.pep
FPGTEGHPQGPHGAKTLAPLFPRFENSIGPLGSPVLPWAIGAVRLMQLISFRSPPGLPRFCPGCFRRVYCVPF

SEQ ID NO: 230449 - protein, 67 aa, Zea mays
  unsure (1)..(67): unsure at all Xaa locations
  Clone ID: MRT4577_141765C.1.pep
MLRNQVNTDVTTWSPQGRVHYVEYGMAAVKQGSAXVGLRSSTHAVLSGVNKPAYXLFSYQRKVVSRR

SEQ ID NO: 230450 - protein, 97 aa, Zea mays
  Clone ID: MRT4577_141766C.1.pep
STYVQQWQQNILLLMLLVFLQCCSEPFSHAHKLYSFFFPHTSTSGSSVCENPILTLQINRHPAALPYTLVPQHRSPITAVPLVHLCTKHKAHTQQLG

SEQ ID NO: 230451 - protein, 116 aa, Zea mays
  unsure (1)..(116): unsure at all Xaa locations
  Clone ID: MRT4577_141767C.1.pep
EHLRDWGENFWLKAGAEAYRRHDDGEEGAQGAPIXVVXDELIHARPNMVLRLTDCTARALGTILREPRLKLGTIELXNTELXSSCQPCLMGYAALHESQINXVVNATKAKAAIAIG

SEQ ID NO: 230452 - protein, 32 aa, Zea mays
  Clone ID: MRT4577_141768C.1.pep
CFTTAALFRAIEPSSVKVLIVNNTHSSLGPAA

SEQ ID NO: 230453 - protein, 46 aa, Zea mays
  Clone ID: MRT4577_141769C.1.pep
SRQKRAYAKPAERLQRGVKVVREKEYWVSPMTGARSHLVGSFRVGV

SEQ ID NO: 230454 - protein, 127 aa, Zea mays
  unsure (1)..(127): unsure at all Xaa locations
  Clone ID: MRT4577_14176C.1.pep
KVFFGIGGGPYVSRPMGFVLKNGVWGGPLLSGYSLPMDMPLQVNVKSXLKXVFGIWKPSLKVFFXATKAAFFGGEVFGPFFSKSFKGWQKNAFSCFFPGQNLRIGKPSDFLLRVSPPVLGRAGGKGF

SEQ ID NO: 230455 - protein, 66 aa, Zea mays
  Clone ID: MRT4577_141770C.1.pep
KNKNPPHHLPIQSPVRNSHHGQTIKAPTFEHFNISLSPMGFPPPKTPTPTRSWAKTPPPADYRDTG

SEQ ID NO: 230456 - protein, 55 aa, Zea mays
  Clone ID: MRT4577_141771C.1.pep
LITVFKDLGQPKRCTPAKVLHLYIIKSLWLPEMSNQSYLQQPYLKLPSVTLVHVQ

SEQ ID NO: 230457 - protein, 122 aa, Zea mays
  Clone ID: MRT4577_141772C.1.pep
RSSDGAGPRSAAEVSAAISTQHPQLSHADIRNQVDACCSCRHWRLVSHSGSGNKNAFKALIAAEYCGVKVELTKNFEMGVSNKNPEFIKMNPLGKVPVLETPDGDDIERNGRGRYVVRLKGE

SEQ ID NO: 230458 - protein, 57 aa, Zea mays
  Clone ID: MRT4577_141773C.1.pep
RTKISSKKGPKGEKLTLKYKTYITILKIYNIGKSPQLLSRCSQITFKKKFESPMITH

SEQ ID NO: 230459 - protein, 194 aa, Zea mays
  Clone ID: MRT4577_141774C.1.pep
MAAAAASATQAALALAHDLEDASERKAHFVLVPLMAQGHTIPMTDMACLLARHGARVSFVTTPLNASRIAGLIDHAAAAGLAIRFVRLRFPAAEFGLPEGCENADMLQSRDLFKNFMDACAALREPLAAYLREQEQPPSCIVSDMGHWWTGDIAREFGVPRLTFNGFCGFASLARYIMVRDNLLEHVEDENELV

SEQ ID NO: 230460 - protein, 82 aa, Zea mays
  unsure (1)..(82): unsure at all Xaa locations
  Clone ID: MRT4577_141775C.1.pep
PPFGGIVSGICPEFVLFLXEEVSVMCGFFCSRHPSAFTVFFFGRSKWNGQVGSLGLVIPLETPLDNMARPFFSVQLNGGFEF

SEQ ID NO: 230461 - protein, 87 aa, Zea mays
  Clone ID: MRT4577_141776C.1.pep
GPRSQGDGGYLPWKPSGAIKVLQQVLYLRLAVNNPTIVVFIGTTRVNPYVVAANSEWRPWTCLSVSTGATFTSRTFASMSRGCAHLP

SEQ ID NO: 230462 - protein, 52 aa, Zea mays
  Clone ID: MRT4577_141777C.1.pep
RGYGRLEESEDLSTQADGGNSEVVLVSVDGHVLTAPISSTEEGMEDVQLCDP

SEQ ID NO: 230463 - protein, 166 aa, Zea mays
  unsure (1)..(166): unsure at all Xaa locations
  Clone ID: MRT4577_141778C.1.pep
MAFTVSFSPANVQMLQARSGHGHATFGSCSAVPRAGPRQRXRAPSGRTIEECEADAVAGKFPAPPPLVRPKAPEGTPEIRPLDMAKRPRRNRKSPALRAAFQETSISPANFVLPLFIHEGEEDAPIGAMPGCYRLGWRHGLLDEVYKARDVGVNSFVLFPKXPDAL

SEQ ID NO: 230464 - protein, 241 aa, Zea mays
  unsure (1)..(241): unsure at all Xaa locations
  Clone ID: MRT4577_141779C.1.pep
MAFTVSFSPANVQMLQARSGHGHATFGSCSAVPRAGPRLRSTAVRVSSEQEAAAAVRAPSGRTIEECEADAVAGKFPAPPPLVRPKAPEGTPEIRPLDMAKRPRRNRKSPALRAAFQETSISPANFVLPLFIHEGEEDAPIGAMPGCYRLGWRHGLLDEVYKARDVGVNSFVLFPKVPDALKSPTGDEAYNDNGLVPRTIRLLRDKFPDIXIYTDVALDPYSSDGHDGIVREDAXIMNDET

SEQ ID NO: 230465 - protein, 116 aa, Zea mays
  Clone ID: MRT4577_14177C.1.pep
KGAGATQIFGGIFTWRSSTYNCSCAQEITDQTPSFHPKKKKNKLVQFGFTSKMKKKKTVLICTPSTDLTRHAWAPGQAGTKGTATQGVSFFCNQKPSQTLFHTQPPMFALQAMRRN

SEQ ID NO: 230466 - protein, 108 aa, Zea mays
  Clone ID: MRT4577_141780C.1.pep
EGREQHPFDVNHSWHSMQYWHMWYYTYTLTVLTTYIIEWLINLLIINYKCRPFYMIQTYLLFHSIFLLFYYCSLISIHFPFFYYFFIFNYPFLFLLFIFFILIFLLPF

SEQ ID NO: 230467 - protein, 426 aa, Zea mays
  Clone ID: MRT4577_141781C.1.pep
MAFTVSFSPANVQMLQARSGHGHATFGSCSAVPRAGPRLRSTAVRVSSEQEAAAAVRAPSGRTIEECEADAVAGKFPAPPPLVRPKAPEGTPEIRPLDMAKRPRRNRKSPALRAAFQETSISPANFVLPLFIHEGEEDAPIGAMPGCYRLGWRHGLLDEVYKARDVGVNSFVLFPKVPDALKSPTGDEAYNDNGLVPRTIRLLKDKFPDIVIYTDVALDPYSSDGHDGIVREDGVIMNDETVYQLCKQAVSQARAGADVVSPSDMMDGRIGALRSALDAEGFHDVSIMSYTAKYASSFYGPFREALDSNPRFGDKKTYQMNPANYREALIETAADEAEGADILLVKPGLPYLDIIRLLRDHSALPIAAYQVSGEYSMIKAGGALGMVDEQKVMMESLMCLRRAGADVILTYFARHAAAVLCGMGPK

SEQ ID NO: 230468 - protein, 156 aa, Zea mays
  unsure (1)..(156): unsure at all Xaa locations
  Clone ID: MRT4577_141782C.1.pep
MLLSHVFKSERIMLSVEAWLAITSSKXYRMVRSTHSVAAKAWYLYFEVKVLQLGSTGHTRLGWATWRXDLAXPIGCGGAYGYGYHDIDXGAKVHMSLQXKYGDDVYGKGDVLGLYITLXPHGERFELQVSERQGQAFSCKGQDARAHILGQHWLMF

SEQ ID NO: 230469 - protein, 68 aa, Zea mays
  Clone ID: MRT4577_141783C.1.pep
HSLTSFLQSGSLRPCVPATECSFLESGCSRSPSWFCPVPFHPTPGGTVASPCYSHCSPGSLLRSVSSD

SEQ ID NO: 230470 - protein, 249 aa, Zea mays
  unsure (1)..(249): unsure at all Xaa locations
  Clone ID: MRT4577_141784C.1.pep
MESAMLSATTAPLLQEGXLSEFSGVTSSXSLAMRRNATSDDFMSXVSFTTHXVGTSGGSRCSPTXAKLNVDINGFGRIGRKFLRCWHGCGDASPLDVIAINDTGVVKQGSHLLKYDSTLGIFHADDKCVRDHAICVYGXDIKGVSDRNPSKLPRGELGIDLGIDGTGVFVDREGARKHIQVVANKVLITAPGKGDIPTYVVGVNADQYNPXDEPIISYSLCTSNCLATFVKVLEQKFGIINGYMSTTRS

SEQ ID NO: 230471 - protein, 142 aa, Zea mays
  Clone ID: MRT4577_141785C.1.pep
LHGSNSHQGAMPLPWRLLSSRRRLSQPAHVHLPPHPPSLVQAQGAVPWPSSIPAGTPRSRRPLRRAPSSKLDASRAPLPVAAPPCEPPQQGAFPPARRISQARSRRAPCPWRCSSLGFTHGRPSAAHPSLSMAEIPWRSFPR

SEQ ID NO: 230472 - protein, 236 aa, Zea mays
  Clone ID: MRT4577_141786C.1.pep
LFRRRDSCPGNADLEWRPTSGRRRTDIWRLAQQVKVRQRVIATAITYFRCVYTRKSMTEYDPRLVAPACLYLASKVEESTVQARLLVFYIKKMCGSDDKYRFEIKDILEMEMKLLEALDYYLVVYHPYRPLLQLLQDAGITDLTQFAWGLVNDTYKMDLILIYPPYMIALACIYIASVLKDKDTTSWFEELRVDMNIVKNISMEILDFYDTYKIDPQRGLQEEKIINEMSMVILDS

SEQ ID NO: 230473 - protein, 50 aa, Zea mays
  Clone ID: MRT4577_141788C.1.pep
VLRIPVSSLRQPPSNQITLRCARGPDQPPLSPAIEPARATESVPASNSLQ

SEQ ID NO: 230474 - protein, 115 aa, Zea mays
  unsure (1)..(115): unsure at all Xaa locations
  Clone ID: MRT4577_141789C.1.pep
KAIKEKSCYAIMLKVKQIGFVNESIELVKMSKRSVCDVMXNHMSVEXQSSFXCILAVGLCAGHIKSVAPXRAQRLPEPSEHLRIDEHLGESALHPGVEFSAPEDAPLPCPDAMCF

SEQ ID NO: 230475 - protein, 225 aa, Zea mays
  unsure (1)..(225): unsure at all Xaa locations
  Clone ID: MRT4577_14178C.1.pep
DLSTLPSWSAXPWAVRMEYEIYKAANSIHGYCKVGELKPEKSIPDSILRQAKGLAIITEVKVGVMLTYKIGTGLVVARRGDGSWSPPSAISTCGLGYGVQAGGELADYIIVLRNKDAIKTFSGNAHMSIGAGVSASAGHFGRVAEADFRAGDGGYAACYTYSCSKGAFVGCALNGSVVSTRDSVNARFYGGPIKASEILLGSLPKPPAAATLYKALSVLFDKIEK

SEQ ID NO: 230476 - protein, 38 aa, Zea mays
  Clone ID: MRT4577_141790C.1.pep
NNTRPTRGPLVRMGTTKRVLCKMMEYASERDGVAPGKF

SEQ ID NO: 230477 - protein, 76 aa, Zea mays
  Clone ID: MRT4577_141791C.1.pep
SRNHLLAYGVPGTGFTCQVAHHVFFLPWDFLHLDQNRFGHWRCFHQSSMGYLLCAPFFNGRETNKVVPAVVFARSL

SEQ ID NO: 230478 - protein, 43 aa, Zea mays
  unsure (1)..(43): unsure at all Xaa locations
  Clone ID: MRT4577_141792C.1.pep
LEQVCNPIISGLYQGAGGRGSXGFGAQGPNGGSGSGPTIEEVD

SEQ ID NO: 230479 - protein, 261 aa, Zea mays
  unsure (1)..(261): unsure at all Xaa locations
  Clone ID: MRT4577_141793C.1.pep
MIGNFDNAFFRGVLDAPSVGSAKIPDIVFMLFQGMFAALTPALAIGAAAERGRILPTLVFIFLWTTFVYDFIACWTWSANGWSFVMGGLDFAGGTPVHISSGGAALAYALVLGRRSGDHKDFRPHSMSNVVIGTCFIWFGWFGFNGGSALSANLRAAMACVVTNLAASVGGITWVLLDYRHDRKLSVLGFCSGAVAGLVSITPGSGYVSPASSVAIGFLGACACNMAVRLKHYLKYDHALEVLGVHGVGGIVGNXLNGVFA

SEQ ID NO: 230480 - protein, 62 aa, Zea mays
  unsure (1)..(62): unsure at all Xaa locations
  Clone ID: MRT4577_141794C.1.pep
FGSRDDPRVVFVTELREETGVXHNXEVEVAATVWMTYDFPPDARANRKAQGGTDRTGQAEQW

SEQ ID NO: 230481 - protein, 1506 aa, Zea mays
  unsure (1)..(1506): unsure at all Xaa locations
  Clone ID: MRT4577_141795C.1.pep
MSDNRRRCNRRAQQEQHDQQEEQQRQPPPPPPMSVEQMFLMQTQAVQAIGQTLAAMQQAQQQPQPQLQVQMPQMPRDKRGEFMRGHPPTFAHSADPMDAEDWLRAVERELRTAQCDDREKVLYGPRQLRGVAQSWWESYLATHADPEAITWEEFSESFCRYHVPEGLMIVKKEEFLALKQGPLSVSEYRDKFLQLSRYAPEDVNTDAKRQYRFMRGLVDPLHYQLMNHTFPTFQHLIDRAVMTEKKRKDMEDRKRKMSGPQSGGISRPRFSGSSSQQGRPGHPQGYQNQNQRPHQQQFQRQYPQQQQQYRQHSQQGGNXSEAEQPGTSPSXPAANQSNQAAPAQGGGRGCFHCGEQGHWAMQCPKKMAQQQTNPNAPTRQGVLQPAAGNRSQAYNRGKVNHLEAEAIQDAPDVAVGMFSVESHPAKVLFDTGATHSFVTATWVELHNISVEAMMPPMRINSVGGKVQTDKICSNIMVEIREIGFPSDLIVIDTPGIDVILGMNWLMKYEANVSCDKRTVTLKSPSGEEVVAELRMPKSEEGVCHQISVDSKEPNPLEAIKVVSDFPDVFPEELTGMPPERKVEFAIELIPGTAPISKRAYRVSGPELVELKKQIDEMLEKGYIRPSTSPWAAPVLFVEKKDGTKRMCIDYRALNEVTVKNKYPLPRIEDLFDQLRGASVFSKIDLRSGYHQLRIRPSDIPKTAFITKYGLYEFTVMSFGLTNAPAFFMYLMNSVFMDYLDKFVVVFIDDILIYSQSEEDHVEHLKMVLQRLREHQLYAKLGKYGLAVDPKKVADILNWKAPKDVRGIKSFIGMAGYYRRFIEGFSKIARPMTALLAKKVEFKWTQKCQEAFEELKNRLTTAPVLVLPDVHKSFSVYCDASYTGLGCVLMQEGRVVAYSSRQLKIHEKNYPTHDLELAAVVHALKTWRHYLYGQKCDIYTDHKSLKYIFTQSELNMRQRRWLELIKDYELEIHYHPGKANVVADALSRKSQVNMLASYPMSYELAKEFDRLSLGFLNSTQGVTVELEPTLEREIKEGQKDDESINKIRQLILEGRGKDFRDDEEGVIWFKDRLCVPDLKPIRELILKEAHETAYSIHPGSEKMYQNLKRRFWWYGMKREITEYVAICDSCQRTKAEHQRPAGLLQPLRIPQWKWDEIGMDFIVGLPRTRAGYDSIWVVVDRLTKVAHFIPVKTTYTGATLAELYMSRIVCLHGVPKKIVSDRGTQFTSHFWQQLQEALGTHLNFSSAYHPQTDGQTERTNQILEDMLRACALQDKSGWDKRLPYAEFSYNNSYQASLKMSPFQALYGRRCRTPLHWDQPGERQVFSPDILLEAEENIKMVRENLKIAQSRQRSYADQRRRELSFEVGDYVYLKVSPIRGVRRFGVKGKLAPRYVGPYQIQAKRGEVAYQLNLPESLSAVHNVFHVSQLKKCLRVPEEQLPVEGLEVHEDLTYIEKPTQILEFADRVTRRNTVRMCKVRWGHHSEEEATWEREDDLKAKYPELFADQP

SEQ ID NO: 230482 - protein, 100 aa, Zea mays
  Clone ID: MRT4577_141796C.1.pep
CSVHLPLHWILRYNINLERCERSQDSLHTIRSIPFVPSYSVEQKLSCTYFSSAAAAANVFCSASAISAAHISVRASTKRTADDDATLLILTYLSIAIGDC

SEQ ID NO: 230483 - protein, 1912 aa, Zea mays
  Clone ID: MRT4577_141797C.1.pep
MWLLLPSTAMRASSVLFHRPRSALLLPSFRLMDLMGTAWTSNVESMALGMFLLKPISRLTMARLRHTARKSVIPFLPSRLAERPLHRTVSGQSSHLERLHHRLREEQERRRQHGEQQGSSSSPQQEVETVRPRSSVAQLEAPLVPPRDVPAVGGATEGATGGDPDDDDSDHSTESSEPQEAEGWVARPITRDAARGCHFHDALDTLLRQAFDRHTWSIEYRCVVYQHSRGRYPDRWEATCLVRRPEDDLRGAEAVSEHYSISERDTAEAAMQDAARRALSQYCSLFDGVADGLNLRYYPRRPTGSTESVVVSPVGEANPRLSSTVNLVAVLNTELDHSLDELSRARTEIAELRAELAERHHQEGGSPAPVGTQHPYRSPPRGHHTYGSPMSDNRRRCNRRAQLEQHDQQEENQRQPPPPPPMSVEQMFLMQTQAVQAIGQTLAAMQQAQQQPQPQLQVQMPQMPRDRRGEFMRGHPPTFAHSADPMDAEDWLRAVERELRTAQCDDREKVLYGPRQLRGAAQSWWESYLATHANPEAITWEEFSESFRRYHVPEGLMIVKKEEFLALKQGPLSVSEYRDKFLQLSRYAPEDVNTDAKRQYRFMRGLVDPLHYQLMNHTFPTFQHLIDRAVMTEKKRKDMEDRKRKMSGPQSGGISRPRFSGSSSQQGRPGHPQGYQNQNQRPHQQQFQRQYPQQQQYRQHSQQGGNQYQKQNNQAPRLPAPAANQSNQAAPAQGGGRGCFHCGEQGHWAMQCPKKMAQQQTNPNAPTRQGVLQPAAGNRNQAYNRGKVNHLEAEAIQDASDVAVGMFSIESHPAKVLFDTGATHSFVTATWVELHSISVEAMMPPMRINSVGGKVQTDKICSNIMVEIRGIGFPSDLIVIGTPGIDIILGMNWLMKYEANVSCDKRTITLKSPSGEEVVAELRMPKSEEGACHQISVDSKEPNPLEAIKVVSDFPDVFPEELTGMPPERKVEFAIELIPGTAPISKRAYRVSGPELVELKKQIDEMLEKGYIRPSTSPWAAPVLFVEKKDGTKRMCIDYRALNEVTVKNKYPLPRIEDLFDQLRGASEFSKIDLRSGYHQLRIRPSDIPKTAFITKYGLYEFTVMSFGLTNAPAFFMYLMNSVFMDYLDKFVVVFIDDILIYSQSEEDHVEHLKMVLQRLREHQLYAKLGKCEFWIHEVLFLGHIINQEGLAVDPKKVADILNWKAPKDVRGIKSFIGMAGYYRRFIEGFSKIARPMTALLAKKVEFKWTQKCQEAFEELKNRLTTAPVLVLPDVHKSFSVYCDASYTGLGCVLMQEGRVVAYSSRQLKIHEKNYPTHDLELAAVVHALKTWRHYLYGQKCDIYTDHKSLKYIFTQSELNMRQRRWLELIKDYELEIHYHPGKANVVADALSRKSQVNMLASHPMPYELAKEFDRLSLGFLNSTQGVTVELEPTLEREIKEGQKDDENINKIRQLILEGRGKDFREDEERVIWFKDRLCVPDLKPIRELILKEAHETAYSIHPGSEKMYQDLKRRFWWYGMKREIAEYVAICDSCQRTKAEHQRPAGLLQPLRIPQWKWDEIGMDFIVGLPRTRAGYDSIWVVVDRLTKVAHFIPVKTTYTGATLAELYMSRIVCLHGVPKKIVSDRGTQFTSHFWQQLQEALGTHLNFSSAYHPQTDGQTERTNQILEDMLRACALQDKSGWDKRLPYAEFSYNNSYQASLKMSPFQALYGRSCRTSLHWDQPGERQVFGPDILLEAEENIRMVRENLKTAQSRQRSYADRRRRELSFEVGDYVYLKVSPIRGVRRFGVKGKLAPRYVGPYQIQAKRGEVAYQLDLPESLSAVHNVFHVSQLKKCLRVPEEQLPVEGLEVQEDLTYIEKPTQILECADRVTRRNTIRMCKVRWGHHSEEEATWEREDDLKAKYPELFADQP

SEQ ID NO: 230484 - protein, 1437 aa, Zea mays
  Clone ID: MRT4577_141798C.1.pep
MPQMPRDKPGEFMRGHPPTFAHSADPMDAEDWLRAVERELRTAQCDDREKVLYGPRQLRGAAQSWWESYLATHADPEAITWEEFSESFRRYHVPEGLMIVKKEEFLALKQGPLSVSEYRDKFLQLSRYAPEDVNTDAKRQYRFMRGLVDPLHYQLMNHTFPTFQHLIDRAVMTEKKRKDMEDRKRKMSGPQTGGISRPRFIGSSSQQGRPGHPQGYQNQNQRPHQQQFQRQYPQQQQQYRQHSQQGSNQYQKQNNQAPRLPAPAANQSNQAAPAQGGGRGCFHCGEQGHWAMQCPKKMAQQQTNPNAPTRQGVLQPAAINRSQAYNRGKVNHLEAEAIQDAPDVAVGMFSIESHPAKVLFDTGATHSFVTATWVELHNISVEAMMPPMRINSVGGKVQTDKICSNIMGEIRGIGFPSDLIVIDTPGIDVILGMNWLMKYEANVSCDKRTVTLKSPSGEEVVAELRMPKSAEGVCHQISVDSKEPNPLEAIKVVSDFPDVFPEELTGMPPERKVEFAIELIPGTAPISKRAYRVSGPELVELKKQIDEMLEKGYIRPSTSPWAAPVLFVEKKDGTKRMCIDYRALNEVTVKSKYPLPRIEDLFDQLRGASVFSKIDLRSGYHQLRIRPSDIPKTAFITKYGLYEFTVMSFGLTNAPAFFMYLMNSVFMDYLDKFVVVFIDDILIYSQSEEDHVEHLKMVLQRLREHQLYAKLGKCEFWIHEVLFLGHIINQDGLAVDPKKSFIGMAGYYRRFIEGFSKIARPMTALLAKKVEFKWTQKCQEAFEELKNRLTTAHVLVLPDVHKSFSVYCDASYTGLGCVLMQEGRVVAYSSRQLKVHEKNYPTHDLELAAVVHALKTWRHYLYGQKCDIYTDHKSLKYIFTQSELNMRQRRWLELIKDYELEIHYHPGKANVVADALSRKSQVNMLASYPMPYELAKEFDRLSLGFLNSTQGVTVELEPTLEREIKEGQKDDESINKIRQLILEGRGKDFREDEEGVIWFKDRLCVPDLKPIRELILKEAHETAYSIHPGSEKMYQDLKRRFWWYGMKREIVEYVAICDSCQRTKAEHQRPAGLLQPLRIPQWKWDEIGMDFIVGLPRTRAGYDSIWVVVDRLTKVAHFIPVKTTYTGATLAELYMSRIVCLHGVPKKIVSDRGTQFTSHFWQQLQEALGTHLNFSSAYHPQTDGQTERTNQILEDMLRACALQDKLGWDKRLPYAEFSYNNSYQASLKMSSFQALYGRSCRTPLHWDQPGERQVFGPDILLEAEENIKMVRENLKIAQSRQRSYADRRRRELSFEVGDYVYLKVSPIRGVRRFGVKGKLAPRYVGPYQIQAKRGEVAYQLNLPESLSAVHNVFHVSQLKKCLRVPEEQLPVEGLEVQEDLTYIEKPTQILEFADRVTRRNTIRMCKVRWGHHSEEEATWEREDDLKAKYPELFADQP

SEQ ID NO: 230485 - protein, 1833 aa, Zea mays
  unsure (1)..(1833): unsure at all Xaa locations
  Clone ID: MRT4577_141799C.1.pep
MARLRHTARKSVIPFLPSRLAERPLHRTVSGQSSHLERLHHRLREEQEHRRQHREQQGSSSPPQREVESVRPRSSVAQLEAPPAPPRDAPAVGGATGGDPDDDDSDHSTESSEPQEAEGWVARPITRDAARGCHFHDALDTLLRQAFDRHTWSIEYRCVVYQHSRGRYPDRWEATFLVRRPEDDLRGAEVVSEHYSISERDTAEAAMQDAARRALSQYCSLFGGVADGLNLRYYPRRPTGSTESVVVSPVGEGNPRLSSTVNLVAVLNTELDHSLDELSRARTEIAELRAELAERHHQEGGSPAPVGTQHPYRSPPRGHHTYGSPVCADATGVLSKSSMTSRRNNRGSLPHHPPMSVEQMFLMQTQAVQAIGQTLAAMQQAQQQPQPQLQVQMPQMPRDKRGEFMRGHPPTFAHSADPMDAEDWLRAVERELRTAQCDDREKVLYGPRQLRGAAQSWWESYLATHADPEAITWEEFSESFRRYHVPEGLMIVKKEEFLALKQGPLSVSEYRDKFLQLSRYAPEDVNTDAKRQYRFMRGLVDPLHYQLMNHTFPTFQHLIDRAVMTEKKRKDMEDRKRKMSGPQSGGTSRPRFSGSSPQQGRPGHPQGYQNQNQRPHQQQFQRQYPQQQQQYRQHSQQGGNXSEAKQPGTSPSCPSSKSEQPSNPSXGGGRGCFHCGEQGHWAMQCPKKMAQQQTNPNAPTRQGVLQPAAGNRNQAYNRGKVNHLEAEAIQDAPDVAVGMFSVESHPAKVLFDTGATHSFVTATWVELHNISVEAMMPPMRINSVGGKVQTDKICSNIMVEIRGIGFPSDLIVIDTPGIDVILGMNWLMKYEANVSCDKRTVTLKSPSGEGVVAELRMPKSEEGVCHQISVDSKEPNPLKAIKVVSDFPDVFPEELTGMPPERKVEFAIELIPGTAPISKRAYRVSGPELVELKKQIDEMLEKGYIRPSTSPWAAPVLFVEKKDGTKRMCIDYRALNEVTVKNKYPLSRIEDLFDQLRGASVFSKIDLRSGYHQLRIRPSDIPKTAFITKYGLYEFTVLSFGLTNAPALFMYLMNSVFMDYLDKFVVVFIDDILIYSQSEEDHVEHLKMVLQRLREHQLYAKLGKCEFWIHEVLFLGHIINQDGLAVDPKKVADILNWKAPKDVRGIKSFIGMAGYYRRFIEGFSKIARPMTALLAKKVEFKWTQKCQEAFEELKNRLTTTPVLVLPDVHKSFSVYCDASYTGLGCVLMQEGRVVAYSSRQLKIHEKNYPTHDLELAAVVHALKTWRHYLYGQKCDIYIDHKSLKYIFTQSELNMRQRRWLELIKDYELEIHYHPGKANVVADALSRKSQLAKEFDRLSLGFLNSTQGVTVELEPTLEREIKEGQKDDENINKIRQLILEGRGKDFREDEEGVIWFKDRLCVPDIKPIRELILKEAHETAYSIHPGSEKMYQDLKRRFWWYGMKREIAEYVAICDSCQRTKAEHQRPAGLLQPLRIPQWKWDEIGMDFIVGLPRTRAGYDSIWVVVDRLTKVAHFIPVKTTYTGATLAELYMSRIVCFHGVPKKIVSDRGTQFTSHFWQQLQEALGTHLNFSSAYHPQTDGQTERTNQILEDMLRACALQDKSGWDKRLPYAEFSYNNSYQASLKMSPFQALYGRSCRTPLHWDQPGERQVFGPDILLEAEENIKMVRENLKTAQSRQRSYADRRRRELSFEVGDYVYLKVSPIRGVRRFGVKGKLAPRYVGPYQIQAKRGEVAYQLNLPESLSAVHNVFHVSQLKKCLRVPEEQLPVEGLEVQEDLTYKEKPTQILEFADRVTRRNTIRMCKVRWGHHSEEEATWEREDDLKAKYPGLFADQP

SEQ ID NO: 230486 - protein, 227 aa, Zea mays
  Clone ID: MRT4577_14179C.1.pep
SSEKLKVIMKNILLIGNTLNQGTPRGQAVGFRLDSLLKLIETRATSGRMTLMHFLCKSLAEKSPEVMDFHEDLVHLEASSKLQLKALAEEQLAVVKGLEKVEQELTASESDGPVSDVFRKTLKEFIDCSSADVRSLSAFYSEVGKSADGLAVYFGEDPAKFPFEQVATTLLTFVGLFRKAHDENLKQIEAEKKKAQKEAEKEANQDKTPVKSKNGNADKSPRSPSTF

SEQ ID NO: 230487 - protein, 42 aa, Zea mays
  unsure (1)..(42): unsure at all Xaa locations
  Clone ID: MRT4577_1417C.1.pep
CSLHNSTPMXNKFYXAPYLTSXXATLTVDRNTIYXCLXXSVK

SEQ ID NO: 230488 - protein, 1519 aa, Zea mays
  unsure (1)..(1519): unsure at all Xaa locations
  Clone ID: MRT4577_141800C.1.pep
MSDNRRAQQEQHDQQEEHQRQPPPPPPMSVEQMFLMQTQAVQAIGQTLAAMQQAQQQPQPQLQVQMPQMPRDKRGEFMRGHPPTFAHSADPMDAEDWLRAVERELCTAQCDDREKVLYGPRQLRGAAQSWWESYLATHADPEAITWEEFSENFRRYHVPEGLMIVKKEEFLDLKQGPLSVSEYRDKFLQLSRYAPEDVNTDAKRQYRFMRGLVDPLHYQLMNHTFPTFQHLIDRAVMTEKKRKDMEDRKRKMSGPQSGSISRPRFSGSSSQQGRPGHPQGYQNQNRRPHQQQFQRQYPQQQQQQYRQNSQQGGNXSEAEQPGTSPSCPRNKSEQPSSPSXGGGRGCFHCGDQGHWAMQCPKKMAQQQTNPNAPTRQGVLQPAAGNRGQAYNRGKVNHLEAEAIQDAPDVAVGMFSVESHPAKELFDTGATHSFVTAIWVEMHNISVEAMMPPMRINSVGGKVQADRICSNIRVEIRGIGFPSDLIVIDTLEVDVILGMNWLMKYEANVSCDKRTVTLKSPSGEEVVAELRMPKSAEGVCHQISVDSKEPNPLEAIKVVSDFPDVFPEELTGMPPERKVEFAIELIPGTVPISKRAYRVSGPELVELKKQIDELLEKGYIRPSTSPWAAPVLFVEKKDGTKRMCIDYRALNEVTVKNKYPLPRIEDLFDQLRGASVFSKIDLRSGYHQLRIRPSDIPKTAFITKYGLYEFRVMSFGLTNAPAFFMYLMNSVFMDYLDKFVVVFIDDILIYSQSEEDHVEHLKMVLQRLREKQLYAKLSKCEFWIHEVLFLGHIINQDGLAVDPKKVADILNWKAPKDVRGIKSFIGMAGYYRRFIEGFSKIARPMTALLAKKVEFKWTQKCQEAFEELKNRLTTAPVLVLPDVHKPFSVYCDASYTGLGCVLMQEGRVVAYSSRQLKIHEKNYPTHDLELAAVVHALKTWRHYLYGQKCDIYTDHKSLKYIFTQSELNMRQRRWLELIKDYELEIHYHPGKANVVADALSRKSQVNMLATYPMPYELAKEFDRLSLGFLNSIQGVTVELEPTLEREIKEGQKDDENINNIRQLILEGRGKDFREDEEGVIWFKDRLCVPDIKPIRKLILKEAHETAYSIHPGSEKMYQDLKRRFWWYGMKREIAEYVAICDSCQRTKAEHQRPAGLLQPLRIPQWKWDEIGMDFIVGLPRTRAGYDSIWVVVDRLTKVAHFIPVKTTYTGAMLAELYMSRIVCLHGVPKKIVSDRGTQFTSHFWQQLQEALGTHLNFSSAYHPQTDGQTERTNQILEDMLRAYALQDKSGWDKRLPYAEFSYNNSYQASLKMSPFQALYGRSCRTPLHWDQPGERQVFGPDILLEAEENIKMVRENLKIAQSRQRSYADRRRRELSFEVGDYVYLKVSPIRGVRRFGVKGKLAPRYVGPYQIQAKRGEVAYQLDLPESLSAVHNVFHVSQLKKCLRVPEEQLPVEGLEVQEDLTYIEKPTQILEFADRVTRRNTIRMCKVRWGHHSEEEATWEREDDLKAKYPELFADQP

SEQ ID NO: 230489 - protein, 1793 aa, Zea mays
  Clone ID: MRT4577_141801C.1.pep
MARLRHTARKSVIPFLPSRLAERPLHRTVSGQSSHLERLHHRLREEQERRRQHGEQQGSSSSPQQEVETVRPRSSVAQLEAPLVPPRDAPAVGGATGGDPDDDDSDHSTESSESQEAEGWVARPITRDAARGCHFHDALDTLLRQAFDRHTWSIEYRCVVYQHSRGRYPDRWEATCLVRRPEDDLRGAEAVSEHYSISERDTAEAAMQDAARRALSQYCSLFGGVADGLNLRYYPRRPTGSTESVVVSPVGEANPRLSSTVNLVAVLNTELDHSLDKLSRARTEIAELRAELAERHHQEGGSPAPVGTQHPYRSPPRGHHTYGSPVCADATGVLSWSSMTSRRKIRGSLPPPPPMSVEQMFLMQTQAVQAIGQTLAAMQQAQQQPQPQLQVQMPQMPRDKRGEFMRGHPPTFAHSADPMDAEDWLRAVERELRTAQCDDREKVLYGPRQLRGAAQSWWESYLATHANPEAITWEEFSESFHRYHVLEGLMIVKKEEFLALKQGPLSVSEYRDKFLQLSCYAPEDVNTDAKRQYRFMRGLVDPLHYQLMNHTFPTFQHLIDRAVMTEKKRKDMEDRKRKMSGPQSGGISRPRFSGSSSQQGRPAANQSNQAAPAQGGGRGCFHCGDQGHWAMQCPKKTAQQQTNPNAPARQGVLQPAAGNRNQAYNRGKVNHLEAEAIQDAPDVAVGMFSVESHPAKVLFDTGATHSFVTATWVELHSISVEAMMPPMRINSVGGKVQTDKICSNIMVEIRGIGFPSDLIVIDTPGIDVILGMNWLMKYEANVSCDKRTITLKSPSGEEVVAELRMPKSEEGVCHQISVDSKEPNPLEAIKVVSDFPDVFPEELTGMPPERKVEFAIELIPGTAPISKRAYRVSGPELVELKKQIDELLEKGYIRPSTSPWAAPVLFVEKKDGTKRMCIDYRALNEVTIKNKYPLPRIEDLFDQLRGASVFSKIDLRSGYHQLRIRPSDIPKTAFITKYGLYEFTVMSFGLTNAPAFFMYLMNSVFMDYLDKFVVVFIDDILIYSQSEEDHVEHLKMALQRLREHQLYAKLGKCEFWIHEVLFLGHIINQDGLAVDPKKVADILNWKAPKDARGIKSFIGMAGYYRRFIEGFSKIARPMTALLAKKVEFKWTQKCQEAFEELKNRLTTAPMLVLPDVHKSFSVYCDASYTGLGCVLMQEGRVVAYSSRQLKIHEKNYPTHDLELAAVVHALKTWRHYLYGQKCDIYTDHKSLKYIFTQSELNMRQRRWLELIKDYELEIHYHPGKANVVADALSRKSQVNMLASHPMPYELAKEFDRLSLGFLNSTQGVTVELEPTLEREIKEGQKDDENINKIRQLILEGRGKDFREDEEGVIWFKDRLCVPDLKPIRELVLKEAHETAYSIHPGSEKMYQDLKRRFWWYGMKREIAEYVAICDSCQRTKAEHQRPAGLLQPLRIPQWKWDEIGMDFIVGLPRTRAGYDSIWVVVDRLTKVAHFIPVKTTYTGATLAELYMSRIVCLHGVPKKIVSDRGTQFTSHFWQQLQEALGTHLNFSSAYHPQTDGQTERTNQILEDMLRACALQDKSGWDKRLPYAEFSYNNSYQASLKMSPFQALYGRSCRTPLHWDQPGERQVFGPDILLEAEENIKMVRENLKTAQSRQRSYADRRRRELSFEVGDYVYLKVSPIRGVRRFGVKGKLAPRYVGPYQIQAKRGEVAYQLDLPESLSAVHNVFHVSQLKKCLRVPEEQLPVEGLEVQEDLTYIEKPTQILEVADRVTRRNTIRMCKVRWGHHSEEEATWEREDDLKAKYPELFADQP

SEQ ID NO: 230490 - protein, 1453 aa, Zea mays
  unsure (1)..(1453): unsure at all Xaa locations
  Clone ID: MRT4577_141802C.1.pep
MPQMPRDKRGEFMRGHPPTFAHSADPMDAEDWLRAVERELRTAQCDDREKVLYGPRQLRGAAQSWWESYLATHADPEAITWEEFSESFRRYHVPEGLMIVKKEEFLALKQGPVSVSEYRDKFLQLSRYAPEDVNTDAKRQYRFMRGLVDPLHYQLMNHTFPTFQHLIDRAVMTEKKRKDMEDRKRKMSGPQSGGISRPRFSGSSSQQGRPGHPQGYQNQNQRPHQQQFQRQYPQQQQQYRQHSQQGGNXSEAEQPGTSPSXPAANQSNQAAPAQGGGRGCFHCGDQGHWAMQCPKKLAQQQTNPNAPTRQGVLQPAAGNRSQAYNRGKVNHLEAEAIQDAPDVAVGMFSVESHPAKVLFDTGATHSFVTATWVELHNISVEAMMPPMRINSVGGKVQTDKICSNVRVEIRGIGFPSDLIVIDTPGVDVILGMNWLMKYEANVSCDKRTVTLKSPSGEEVVAELWMPKSVEGACHQISVDSKEPNPLEAIKVVSDFPDVFPEELTGMPPERKVEFAIELVPGTAPISKRAYRVSGPELVELKKQIDEMLEKGYIRPSTSPWAAPVLFVEKKDGTKRMCIDYRALNEVTVKNKYPLPRIEDLFDQLRGASVFSKIDLRSGYHQLRIRPSDIPKTAFITKYGLYEFTVMSFGLTNAPAFFMYLMNSVFMDYLDKFVVVFIDDILIYSQSEEDHVEHLKMVLQRLREHQLYAKLGKCEFWIHEVLFLGHIINQDGLAVDPKKVADILNWKAPKDVRGIKSFIGMAGYYRRFIEGFSKIARPMTALLAKKVEFKWTQKCQEAFEELKNRLTTAPVLVLPDVHKPFSVYCDASYTGLGCVLMQEGRVVAYSSRQLKIHEKNYPTHDLELAAVVHALKTWRHYLYGQKCDIYTDHKSLKYIFTQSELNMRQRRWLELIKDYELEIHYHPGKANVVADALSRKSQVNMLASYPMPYELAKEFDRLSLGFLNSTQGVTVELEPTLEREIKEGQKDDESINKIRQLILEGRGKDFREDEEGVIWFKDRLCVPDLKPIRELILKEAHETAYSIHPGSEKMYQDLKRRFWWYGMKREIAEYVAICDSCQRTKAEHQRPAGLLQPLRIPQWKWDEIGMDFIVGLPRTRAGYDSIWVVVDRLTKVAHFIPVKTTYTGATLAELYMSRIVCLHGVPKKIVSDRGTQFTSHFWQQLQEALGTHLNFSSAYHPQTDGQTERTNQILEDMLRACALQDKSGWDKRLPYAEFSYNNSYQASLKMSPFQALYGRSCRTPLHWDQPGERQVFGPDILLEAEENIKMVRENLKIAQSRQRSYADRRRRELSFEVGDYVYLKVSPIRGVRRFGVRGKLAPRYVGPYQIQAKRGEVAYQLNLPESLSAVHNVFHVSQLKKCLRVPEEQLPVEGLEVQEDLTYIEKPTQILEFADRVTRRNTIRMCKVRWGHHSEEEATWEREDDLKAKYPELFADQP

SEQ ID NO: 230491 - protein, 42 aa, Zea mays
  Clone ID: MRT4577_141803C.1.pep
PRNLARGEKFPGLNMVSIPFLRKQAYIPCSFLYSKCFPLFLK

SEQ ID NO: 230492 - protein, 1853 aa, Zea mays
  unsure (1)..(1853): unsure at all Xaa locations
  Clone ID: MRT4577_141804C.1.pep
MVLMARLRHTACKSVIPFLPSRLAERPLHRTVSGQSSHLERLHHHLREEQERRRQHREQQGSSSPPQQEVESVRPRSSVAQLEAPPAPPRDAPAVGGATGGDLGGDPDDDDSDHSTESSEPQEAEGWVARPITRDAARGCHFHDALDTLLRQAFDWHTWSIEYRCVVYQHGRYPDRWEATCLVRRPEDDLRGAEAVSEHYSISERDTAEATMQDAARRALSQYCSLFGGVADGLNLRYYPRRPTGSTESVVVSPVGEGNPRLSSTVNLVVVLNTELDHSLDELSRARTEIAELRAELAERHHQEGGSPAPIGTQHPYRSPPRGHHTYGSPMSDNRRRCNRRAQQEQHDQQEEHQRQPPPPPPMSVEQMFLMQTQAVQAIGQTLAAMQQAQQQPQPQLQVQMPQMPRDKRGEFMRGHPPTFAHSADPMDAEDWLRAVERELRTAQCDDREKVLYGPRQLRGAAQSWWESYLATHADPEAITWEEFSESFRRYHVPEGLMIVKKEEFLALKQGPLSVSEYRDKFLQLSRYAPEDVNTDAKRQYRFMRGLVDPLHYQLMNHTFPTFQHLIDRAVMTEKKRKDMEDRKRKMSGPQSGSISRPRFSGSSSQQGRPGHPRGYQNQNQRPHQQQFQRQYPQQQQQYRQHSQQGGNXSEAEQPGTSPSCPRNKSEQPSSPSXGGGRGCFHCGDQGHWAMQCPKKLAQQQTNPNAPTRQGVLQPAAGNHSQAYNRGKVNHLEAEAIQDAPDVAVGMFSVESHPAKVLFDTGATHSFVTATWVELHNISVEAMMPPMRINSVGGKVQTDKICSNIMVEIRGIGFPSDLIVIDTPGIDVILGMNWLMKYEANVSCDKRTVTLKSPSGEEVVAELRMPKSEEGVCHQISVDSKEPNPLEAIKVVSDFPDVFPEELTGMPPERKVEFAIELIPGTAPLSKRAYRVSGPELVELKKQIDEMLEKGYIRPSTSPWAAPVLFVEKKDGTKRMCIDYRALNEVTVKNKYPLPRIEDLFDQLRGASVFSKIDLRSGYHQLRIRPSDIPKTAFITKYGLYEFTVMSFGLTNASAFFMYLMNSVFMDYLDKFVVVFIDDILIYSQSEEDHVEHLKMVLQRLREHQLYAKLGKCEFWIHEVLFLGHIINQDGLAVDPKKVADILNWKAPKDVRGIKSFIGMVGYYRRFIEGFSKIARPMTALLAKKVEFKWTQKCQEAFEELKNRLTTAPVLVLPDVHKSFSVYCDASYTGLGCVLMQEGRVVAYSSRQLKIHEKNYPTHDLELAAVVHALKTWRHYLYGQKCDIYTDHKSLKYIFTQSELNMRQRRWLELIKDYELEIHYHPGKANVVADALSRKSQVHMLVSYPMPYELAKEFDRLSLGFLNSTQGVTVELEPTLEREIKEGQKDDENINKIRQLILEGRGKDFREDEEGVIWFKDRLCVPDLKPIRELILKEAHETAYSIHPGSEKMYQDLKRRFWWYGMKREIAEYVAICDSCQRTKAEHQRPAELLQPLRIPQWKWDEIGMDFIVGLPRTRASYDSIWVVVDRLTKVAHFIPVKTTYTGATLAELYMSRIVCLHGVPKKIVSDRGTQFTSHFWQQLQEALGTHLNFSSAYHPQTDGQTERTNQILEDMLRACALQDKSGWDKRLPYAEFSYNNSYQASLKMSPFQALYGRSCRTPLHWDQPGERQVFGPDILLEAEENIKMVRENLKIAQSRQRSYADRRRRELSFEVGDYVYLKVSPIRGVRRFGVKGKLAPRYVGPYQIQAKRGEVAYQLNLPESLSAVHNVFHVSQLKKCLRVPEEQLPVEGLEVQEDLTYIEKPTQILEFADRVTRRNTIRMCKVRWGHHSEEEATWEREDDLKAKYPELFADQP

SEQ ID NO: 230493 - protein, 1828 aa, Zea mays
  unsure (1)..(1828): unsure at all Xaa locations
  Clone ID: MRT4577_141805C.1.pep
MLALPRLSAEVLSFCSLLVTLLRGGMARLRHTARKSVIPFLPSRLAERPLHRTVSGQSSHLERLHHRLREEQERRRQHGEQQGSSSSPQQEVETVRPRSSVAQLEAPLVPPRDVPAVGGATGGATGGDPDDDDSDHSTESSEPQEAEGWVARPITRDAARGCHFHDALDTLLRQAFDRHTWSIEYRCVVYQHSRGRYPDRWEATCLVRRPEDDLRGAEAVSEHYSISERDTAEAAMQDAARRALSQYYSLFGGVADGLNLRYYSRRPTGSTESVVVSPVGEGNPRLSSTVNLVAVLNTELDHSLDELSRARTEIAELRAELAERHHQEGGSPAPVGTQHPYRSPPRGHHTYGSPIVRSMLMCECLPQMSDNRRRCNRRAQLEQHDQQEENQRQPPPPPPMSVEQMFLMQTQAMQAIGQTLAAMQQAQQQPQPQLQVQMPQMPRDRRGEFMRGHPPTFAHSADPMDAEDWLRAVERELCTAQCDDREKVLYGPRQLRGAAQSWWESYLATHANPEAITWEEFSESFRRYHVPEGLMIVKKEEFLALKQGPLSVSEYRDKFLQLSRYAPEDVNTDAKRQYRFMRGLVDPLHYQLMNHTFPTFQHLIDRAVMTEKKRKDMEDRKRKMSGPQSGGTSRPRFSGSSSQQGRPGHPQGYQNQNQRPHQQQFQRQYPQQQQQYRQHSQQGGNXSEAEQPGTSPSXQQRIRATKQPQXGGGRGCFHCGDQGHWAMQCPKKTAQQQTNPNAPARQGVLQPAAGNRNQAYNRGKVNHLEAEAIQDAPDVAVGMFSVESHPAKVLFDTGATHSFVTATWVELHNISVEAMMPPMRINSVGGKVQTDKICSNIMVEIRGIGFPSDLIVIDTPGIDVILGMNWLMKYEANVSCDKRTITLKSPSGEEVVAELRMPKSEEGVCHQISVNSKEPNPLEAIKVVSDFPDVFPEELTSMPPERKVEFAIELIPGTAPISKRAYRVSGPELVELKKQIDEMLEKGYIRPSTSPWAAPVLFVEKKDGTKRMCIDYRALNEVTVKNKYPLPRIEDLFDQLRGASVFSKIDLRSGYHQLRIRPSDIPKTAFITKYGLYEFTVMSFGLTNAPAFFMYLMNSVFMDYLDKFVVVFIDDILIYSQSEEDHVEHLKMVLQRLREHQLYAKLGKCEFWIHEVLFLGHIINQDGLAVDPKKVADILNWKAPKDVRGIKSFIGMAGYYRRFIEVFSKIATPMTALLAKKVEFKWTQKCQEAFEELKNRLTTAPVLVLPDVHKSFSVYCDASYTGLGCVLMQEGRVVAYSSRQLKIHEKNSPTHDLELAAVVHALKTWRHYLYGQKCDIYTDHKSLKYIFTQLELNMRQRRWLELIKDYELEIHYHPGKANVVADALSRKSQVNLLASYPMPYELAKEFDRLSLGFLNSTQGVTVELEPTLDREIKEGQKDDENINKIRQLILEGRGKDFREDEEGVIWFKDRLCVPDLKPIRELILKEAHETAYSIHPGSEKMYQDLKRRFWWYGMKREIAEYVAICGSCQRTKAEHQRPAGLLQPLRIPQWKWDEIGMDFIVGLPRTRAGYDSIWVVVDRLTKVAHFIPVKTTYTGATLAELYMSRIVCLHGVPKKIVSDRGTQFASHFWQQLQEALGTHLNFSSAYHPQTDGQTERTNQILEDMLRACALQDKSGWDKRLPYAEFSYNNSYQASLKISPFQALYGRSCRTPLHWDQAGERQVFGPDILLEAEENIKMVRENLKTAQSRQRSYADRRRRELSFEVGDYVYLKVSPIRGVRRFGVKGKLAPRYVGPYQIQAKRGEVAYQLDLPESLSAVHNVFHVSQLKKCLRVPEEQLPVEGLEV

SEQ ID NO: 230494 - protein, 93 aa, Zea mays
  Clone ID: MRT4577_141806C.1.pep
NRTSLIWVGLCVHATTGDSCNATTTITCIRATLVILSRLHPFCRGHHRTCKKNSGLNCVHKILLVSMRGLQKMLSFPRHFLWVLPTKLTSFTG

SEQ ID NO: 230495 - protein, 1482 aa, Zea mays
  Clone ID: MRT4577_141807C.1.pep
MSDNRRRCNRRAQQEQHDQQEENQRQPPPPPPMSVEQMFLMQTQAVQAIGQTLAAMQQAQQQPQPQLQVQMPQMPRDKRGEFMRGHPPTFAHSADPMDAEDWLRAVERELRTAQCDDREKVLYGPRQLRGAAQSWWESYLATHADPEAITWEEFSESFRRYHVPEGLMIVKKEEFLALKHGPMSVSEYRDKFLQLSRYAPEDVNTDAKRQYRFMRGLVDPLHYQLMNHTFPTFQHLIDRAVMTEKKRKDMEDRKRKMSGPQSGGISRPRFSGSSSQQGRPGHPQGYQNQNQRPHQQQFQRQYPQQQQQYRQHSQQGGNQYQKQNNQAPRLPAPAANQSNQAAPAQGGGRGCFHCGDQGHWAMQCPKKMAQQQTNPNAPARQGVLQPAAGNRNQAYNRGKVNHLEAEAIQDAPDVAVGMFSVESHPAKVLFDTGATHSFVTATWVELHNISVEAMVPPMRINSVGGKVQTDKICSNIMVEIRGIGFPSDLIVIGTPGIDVILGMNWLMKYEANVSCDKRTITLKSPSGEEVVAELRMPKSEEGVCHQISVDSKEPNPLEAIKVVSDFPDVFPEELTGMPPERKVEFAIELIPGTAPISKRAYRVSGPELVELKKQIDEMLEKGYIRPSTSPWAAPVLFVEKKDGTKRMCIDYRALNEVTVKNKYPLPRIEDLFDQLRGASVFSKIDLRSGYHQLRIRPSDIPKTAFITKYGLYEFTVMSFGLTNAPAFFMYLMNSVFMDYLDKFVVVFIDDILIYSQSEEDHVEHLKMVLQRLREHQLYAKLGKCEFWIHEVLFLGHIINQDGLAVDPKKVADILNWKAPKDVRGIKSFIGMAGYYRRFIEGFSKIARPMTALLAKKVEFKWTQKCQEAFEELKNRLTTAPVLVLPDVHKSFSVYCDASYTGLGCVLMQEGRVVAYSSRQLKIHEKNYPTHDLELAAVVHALKTWRHYLYGQKCDIYTDHKSLKKSQVNMLASYPMPYELAKEFDRLSLGFLNSTQGVTVELEPTLEREIKEGQKDDENINKIRQLILEGRGKDFREDEEGVIWFKDRLCVPDLKPIRGLILKEAHETAYSIHPGSEKMYQDLKRRFWWYGMKREIAEYVAICVSCQRTKAEHQRPAGLLQPLRIPQWKWDEIGMDFIVGLPRTRAGYDSIWVVVDRLTKVAHFIPVKTTYTGATLAELYMSRIVCLHGVPKKIVSDRGTQFTSHFWQQLQEALGTHLNFSSAYHPQTDGQTERTNQILEDMLRACALQDKSGWDKRLPYAEFSYNNSYQASLKMSPFQALYGRSCRTPLHWDQPGERQVFGPDILLEAEENIKMVRENLKTAQSRQRSYADRRRRELSFEVGDYVYLKVSPIRGVRRFGVKGKLAPRYVGPYQIQAKRGEVAYQLDLPESLSAVHNVFHVSQLKKCLRVPEEQLPVEGLEVQEDLTYIEKPTQILEFADRVTRRNTIRMCKVRWGHHSEDEATWEREDDLKAKYPELFADQP

SEQ ID NO: 230496 - protein, 198 aa, Zea mays
  Clone ID: MRT4577_141808C.1.pep
GRGKFSIPPSRDLPSPCLLFPHGSTAAAASIVLPPPCFFPLPWMRAPSSCSSSPPSPSHHGRHHSSRVGRCPPLVYALDISFLPLHAGPAPLHRAEFDVPAMVGARRPSSIPPCQPTPLAGRALSRARAALPMFPSNPSFPGVLALHELPMGAGGAQHRAGVRQGLTDALPWSALSIGSSPSFCHGTRPLLLLSSPPK

SEQ ID NO: 230497 - protein, 71 aa, Zea mays
  Clone ID: MRT4577_141809C.1.pep
CVVLVGAGRSLARSIIAIECVVNIMKVPLKKRDTIKLEKEVGLEDVQQPTPPLYLFLLSMNLPHQKIPSKY

SEQ ID NO: 230498 - protein, 148 aa, Zea mays
  unsure (1)..(148): unsure at all Xaa locations
  Clone ID: MRT4577_14180C.1.pep
AFPSCAVFCRCLPSLRRCLLLVGVLCRGPVLXVAPGGCPPARRXGRARRWRCSRXRXSAXXPAGASXCXASSRGARWCGVSSCXRGARVGVAPVAVAAPPRGGAPAGVGVRARARRALAAASARPGRGLLRPAPGPGGRASAXAGAVV

SEQ ID NO: 230499 - protein, 63 aa, Zea mays
  unsure (1)..(63): unsure at all Xaa locations
  Clone ID: MRT4577_141810C.1.pep
YNNXTSLXAQXASVSHVIIIXSQKKKEFVSMNXTTLXXTPLYLIXKIWTQVSYPAPIAXPYTL

SEQ ID NO: 230500 - protein, 109 aa, Zea mays
  Clone ID: MRT4577_141811C.1.pep
NKSFFICIPRAPPIFSPDFFFYASGNSNYVEGLKVYFLSKFLSRLKNPFPNGKGGITVACLQGFPLIRFQLGKHVFLRAGGFFLGRRSQILGAASPFLLICPPFFPQRV

SEQ ID NO: 230501 - protein, 52 aa, Zea mays
  unsure (1)..(52): unsure at all Xaa locations
  Clone ID: MRT4577_141812C.1.pep
QHIYATLCSANITXARTLPAAEDIIEWLATNTVDFFNQVNMLHCTLTXYCTP

SEQ ID NO: 230502 - protein, 167 aa, Zea mays
  Clone ID: MRT4577_141813C.1.pep
MDRIMMSRPPLPAPTHAAAGADGDFLELDVLWPASPSAVGLGLLAALPEDEGKKKKRAAAGVGVGVGAPARSAARPVPETVAASAMARSAPVRIPSDPARRGRWAHAGAGAGGSAEDAGEALVPPHEIVARRAAAHSSVLEGAGRTLKGRDLRRVRNAVLRRTGFLD

SEQ ID NO: 230503 - protein, 106 aa, Zea mays
  Clone ID: MRT4577_141814C.1.pep
GQDQNPVPKLQGPVQKGVGGHPAGVAGPRPQQDEHGHCQGPSSLKRKTGTRSRDPHACPGTTKAVCFASTGGLGRNPWPVFCPPGARVFFPHVNSFNQGPVRTPAR

SEQ ID NO: 230504 - protein, 62 aa, Zea mays
  Clone ID: MRT4577_141815C.1.pep
FDVLFFNLIIAGLEMAHLICGAWRTLLMYTPSANTVRCSCCNTANLDRPVNYIAHENCGQCR

SEQ ID NO: 230505 - protein, 62 aa, Zea mays
  Clone ID: MRT4577_141816C.1.pep
PGGGARLGSIFLGQKRATLFRGVYYPRNLQTGRNLDVLLGGKTKAWPGKVVRAFLLSPWVRL

SEQ ID NO: 230506 - protein, 128 aa, Zea mays
  Clone ID: MRT4577_141817C.1.pep
WVVVAAGNHREGQCSGQQETPGEERNSSTSSSGREGGKRLVTGGEESPFHEPTTSDPTDRDEQRKPTVAASKGNKASSRPSRDRNRTEQGSKHARHEAAGRTSNHSHLKSLVPARRAAFGGWLAGWIA

SEQ ID NO: 230507 - protein, 57 aa, Zea mays
  unsure (1)..(57): unsure at all Xaa locations
  Clone ID: MRT4577_141818C.1.pep
YWWAAYSSXTLFFLGKLDHVVNPQDSNGSLRGKLKDPFFFFFFFFFFFFFFFLFFFF

SEQ ID NO: 230508 - protein, 28 aa, Zea mays
  Clone ID: MRT4577_141819C.1.pep
TNSVTYMRAIPTNRVMMNYIICLSPPNI

SEQ ID NO: 230509 - protein, 74 aa, Zea mays
  Clone ID: MRT4577_14181C.1.pep
RFWTPRASSPLLLGASSSSHVCAPGRHKLRGQRLPALRSCVTNRCLRFANRRIKACEHTFRWQRDGSRRGHHIL

SEQ ID NO: 230510 - protein, 104 aa, Zea mays
  Clone ID: MRT4577_141820C.1.pep
RLQFAAFRRRNEGGVGPRAFGLGLPARRGVGQAAAPLPGTAPAGRGRGREVPPVQGSEPRRVVLAWREKMLPPGGAVRPPPLPSVVKYFFSVGPGFFYLGPSLF

SEQ ID NO: 230511 - protein, 91 aa, Zea mays
  Clone ID: MRT4577_141821C.1.pep
TSHELIATSFMRLILWYLLLTLDSRFLGTNLVFKCLVTSLLPPPSDRAGRWLVDGACAARTNPSDQPFIVECSSARSAQNFPSWLCTAHCE

SEQ ID NO: 230512 - protein, 42 aa, Zea mays
  Clone ID: MRT4577_141822C.1.pep
SLVLCPCQCGVAKPKGLPARKAGTGSVVAGDHNAITLSRLVS

SEQ ID NO: 230513 - protein, 54 aa, Zea mays
  Clone ID: MRT4577_141823C.1.pep
WDWEQYKKKGCLCLYFDLNLCSITTMVVSIFRPFIHVKDQSITVPYDAGFECIL

SEQ ID NO: 230514 - protein, 145 aa, Zea mays
  Clone ID: MRT4577_141824C.1.pep
MRRVRVSSHQAPVHKLGDGQMKLTPRFRLAATPAPPGPDPDPQQASWEAAEALIPGLPDDAALNCLLRLPVESHGACRLVCRRWRHLLADKARFFAQRRALGLRAPWLFTLAFHRCTGEIQWKVLDLVQRSWHAIPVMACRDRAC

SEQ ID NO: 230515 - protein, 137 aa, Zea mays
  unsure (1)..(137): unsure at all Xaa locations
  Clone ID: MRT4577_141825C.1.pep
GGPQGPGPSHXPPPPEGPGVKPPRGPXTPQGGALANPPGGSRGGPHTRPRGVPXPPFGAPLLSQGPPRGPPPXGAQNPGPPGASSLPKVPENRGREKPPPLGEKWAFFPEKKRENLHLKNKKRKREKQEQEKPRTNI

SEQ ID NO: 230516 - protein, 63 aa, Zea mays
  Clone ID: MRT4577_141826C.1.pep
SNTKNYFATSNRQFLIVIILMIYINNIANKNIILDRTSYYHSQIQVQIVLHPVLKQKVVLDKI

SEQ ID NO: 230517 - protein, 111 aa, Zea mays
  unsure (1)..(111): unsure at all Xaa locations
  Clone ID: MRT4577_141827C.1.pep
MSSVELGCAYPXLIREDDGIPIXAEKIATIXRALHHRLXSYCSALFNKILEKSHADDLVLSVGSAATAAPNAAAASCXGAAVAGAPSAEERTEDAKDESXDDDIVLHSCCN

SEQ ID NO: 230518 - protein, 607 aa, Zea mays
  unsure (1)..(607): unsure at all Xaa locations
  Clone ID: MRT4577_141828C.1.pep
MASTKAPGPGEKHHSIDAQLRQLVPGKVSEDDKLIEYDALLVDRFLNILQDLHGPSLREFVQECYEVSADYEGKGDTTKLGELGAKLTGLAPADAILVASSILHMLNLANLAEEVQIAHRRRNSKLKKGGFADEGSATTESDIEETLKRLVSEVGKSPEEVFEALKNQTVDLVFTAHPTQSARRSLLQKNARIRNCLTQLNAKDITDDDKQELDEALQREIQAAFRTDEIRRAQPTPQDEMRYGMSYIHETVWKGVPKFLRRVDTALKNIGINERLPYNVSLIRFSSWMGGDRDGNPRVTPEVTRDVCLLARMMAANLYIDQIEELMFELSMWRCNDELRVRAEELHSSSGSKVTKYYIEFWKQIPPNEPYRVILGHVRDKLYNTRERARHLLASGVSEISAESSFTSIEEFLEPLELCYKSLCDCGDKAIADGSLLDLLRQVFTFGLSLVKLDIRQESERHTDVIDAITTHLGIGSYREWSEDKRQEWLLSELRGKRPLLPPDLPQTEEIADVIGAFHVLAELPPDSFGPYIISMATAPXSDVLAVELLQRECGVRQPLPVXVPLFERLADLQSAPXASVERLXFSVDWHMGPDQGQQQVMVGYSD

SEQ ID NO: 230519 - protein, 72 aa, Zea mays
  Clone ID: MRT4577_141829C.1.pep
CCTDSARYGAWGHYTHVGPWVEGSATTEREEAAIRAKRDYSLGEQKRQFGSLNQQRHGELYYKVDGQKLGSH

SEQ ID NO: 230520 - protein, 94 aa, Zea mays
  Clone ID: MRT4577_14182C.1.pep
RVFSFFLSAATVWAILTANSFSPGVHVALPSAKLLYPPFCETLGLLKAPQGYSLGNPTVANSDIFLKRLSLCHGKPQDVGNFNAFFPHLFLFPF

SEQ ID NO: 230521 - protein, 51 aa, Zea mays
  Clone ID: MRT4577_141830C.1.pep
RNPSYGGEQISAATSEDDDQLGVIFPILFHLIYKPLLLNFPKIPSMSNFCP

SEQ ID NO: 230522 - protein, 118 aa, Zea mays
  Clone ID: MRT4577_141831C.1.pep
AISLFKCICVLLNLTSTGPHLHQCPRIIFTSNSTTFPLHPTPSTAPVAANLPSNTNRSLHITVHNNTFLIHTNPQPLAPYLTHLINSLLTKIPLCTTRTFIYFFFSSFIHSFFFIKVY

SEQ ID NO: 230523 - protein, 49 aa, Zea mays
  Clone ID: MRT4577_141832C.1.pep
GGLTMALALCLRVAPWHFLFWRGGMPCGPWNAFKQCMLKNKFLEMYVLN

SEQ ID NO: 230524 - protein, 108 aa, Zea mays
  Clone ID: MRT4577_141833C.1.pep
AAPSYPPPLWRTHLSRRAKSFSRPNPTTFLRSSMSMAFSCASARLHGRTGVGGAKCRPGAALLGRRGTCFRPTAWRWSTAKGIRADLPPPPRASADGAATSGPDVIVP

SEQ ID NO: 230525 - protein, 74 aa, Zea mays
  unsure (1)..(74): unsure at all Xaa locations
  Clone ID: MRT4577_141834C.1.pep
FPGQTSSLVCWPPFFFFFFFFFXCGRSEQLSFQPLCRTSLVTQIAKRKHISKLCMPCRYFFPHVCSLKARNLKL

SEQ ID NO: 230526 - protein, 75 aa, Zea mays
  Clone ID: MRT4577_141835C.1.pep
MADWGPVLIGLVLFILLSPGLLFQIPGKGRIIEFGNFQTSGLALFDINLGGWIRYCVVRRHILLYTFTCSSPSAC

SEQ ID NO: 230527 - protein, 137 aa, Zea mays
  Clone ID: MRT4577_141836C.1.pep
MAVVPAAPVVLGVAMVLVVLAASAGAAGQLRMGFYAESCPGVERVVGDFVRQHVRRVPTVAAALLRLHFHDCFVRGCDASVLLNSTAGSVAEKDAPPNLTLRGFDLVDRVKALVEDACPGVVSCADVLALAARDAVV

SEQ ID NO: 230528 - protein, 36 aa, Zea mays
  Clone ID: MRT4577_141837C.1.pep
KPNVRDWLRVVSATKDRNVYKLPYFNIAENQGEEKN

SEQ ID NO: 230529 - protein, 90 aa, Zea mays
  Clone ID: MRT4577_141838C.1.pep
NAAPKERKNICLLSPSSSISSHLQRNQRASAHCHCSFRSKTSLNSYSDHIANHDKIWAFKTILHTHQPLNRLLIGTKCINIIADFKHISP

SEQ ID NO: 230530 - protein, 57 aa, Zea mays
  Clone ID: MRT4577_141839C.1.pep
YATKEPLYSSGNLIYLYPYVVLHPFQTRHFGFFRYIAILAFFSYIAAFIMYLYIIYI

SEQ ID NO: 230531 - protein, 68 aa, Zea mays
  Clone ID: MRT4577_14183C.1.pep
VCRSRCSLKGSGRARVHCPGPKLPPLLSRHPRATPSEETETGVKVDRWTVWGIIHPPRSGESLRGIIG

SEQ ID NO: 230532 - protein, 89 aa, Zea mays
  Clone ID: MRT4577_141840C.1.pep
AKGPASMFDSCTKVGKTNPGAPWDLKKGFVHFPNFETKYTFLFGFIDYHAIPRKKKLVFGIHVCKKPTKIYQVIAPGFLPFHFFKRKVM

SEQ ID NO: 230533 - protein, 116 aa, Zea mays
  unsure (1)..(116): unsure at all Xaa locations
  Clone ID: MRT4577_141841C.1.pep
MECTSVMIMPDCGHRGLIGQTINRGEQKGYYLKVLELVNVERXFAHKHYSGLASKTFYQGLVDYMMSGPLVAXMVWAGKIVAQLAHXISGATNPVGIEXGNIRGDSAGYIGLNDNH

SEQ ID NO: 230534 - protein, 223 aa, Zea mays
  unsure (1)..(223): unsure at all Xaa locations
  Clone ID: MRT4577_141842C.1.pep
EGFVLAYLRDKSFFHFLPPPLQLHPIPSTHEGVHTHPHRSRYPGRKPRWELYCLPAWHSPPRPHAPRPDSWGRRCTLSTPFSLTLPLPHPSPPAAFRRPPPNCPXEPEDPAPHPPSFPPPPLPPPPRPLPPPPPPPPPPPPPTPPPPPRPTPPPXPPLPQPPSPXPPPPPPPPPTHSPPPLPPSPSPRSPTRHPPPSPPPPTPPPPPTTPHHTPPPNPHTPTP

SEQ ID NO: 230535 - protein, 103 aa, Zea mays
  Clone ID: MRT4577_141843C.1.pep
RRELDDQYVNLYGTFYQIYRSNRSNTISQSGLFILIRALASYILEVSRGKVPEIVLARICTPFAKSLCTYTSRRRCFALLIQFCKDQREHISKVSPCRRFDRI

SEQ ID NO: 230536 - protein, 75 aa, Zea mays
  Clone ID: MRT4577_141844C.1.pep
YAMALIPSSASAGFLVCSRRWSNVSQWTLRGQYGLRHSVPCSAGRRRVSILAIEDTSLRCHDLPDGGGSSSREHE

SEQ ID NO: 230537 - protein, 98 aa, Zea mays
  Clone ID: MRT4577_141845C.1.pep
RAESARAHSEFSGEISAPAKSGSIAWATQDRVSPFPSAVTEAKAAAGSSAWWLWLASPPIFALTTELRLRLLPAPYVPASRLSLPLIYEPRTTIKAER

SEQ ID NO: 230538 - protein, 71 aa, Zea mays
  unsure (1)..(71): unsure at all Xaa locations
  Clone ID: MRT4577_141846C.1.pep
MAASLQAAATLMQPAKIGGRAPLXLPSRPSSQLACRAFGVHDGASRITCSVKDVSNKSSDSAKLAIYELET

SEQ ID NO: 230539 - protein, 85 aa, Zea mays
  unsure (1)..(85): unsure at all Xaa locations
  Clone ID: MRT4577_141847C.1.pep
NHQPAFTWALCNTSGQVDVYLLPQCEXPKEGLYFDNNSWVKQIRRERVVIHNRFITGFQSNIHGFPHDRLWLVDYPTYESWMVRI

SEQ ID NO: 230540 - protein, 114 aa, Zea mays
  Clone ID: MRT4577_141848C.1.pep
NPFFFPPPILFPPTTSVLRCQKGSPLFVITSNPAVHISYIGGFYHTRFFFCPLSPRRPRGFEFFRPLYCLFFNPPAAPSFSTVQRTGPPPLKVAGVFLPPPPPKKFNKNTPSCP

SEQ ID NO: 230541 - protein, 131 aa, Zea mays
  Clone ID: MRT4577_141849C.1.pep
MDHEQRRQRQQHSPRGNAPGSGRCGSSSRKHKGGGKKPIKVVYISNPVRVKTSAAGFRALVQELTGRDADPSKYSPEDLAGAAVAAGDPDCGAAQGLSPGDTTAASSDTIVAIPSPAAVDHLHEHDASPAA

SEQ ID NO: 230542 - protein, 223 aa, Zea mays
  unsure (1)..(223): unsure at all Xaa locations
  Clone ID: MRT4577_14184C.1.pep
MASGEDRISALPEDILHQVLRLLPAHEVVRTCLLARRWRGVWRSVPTLCFTGAKGWGSADRFAQFVDHLLHLRCGGDGAPLDSCDFDFDFDGFMLLPANERHASIWLWKALPRVRALRLXVSSRSRKPXPLSDMHLFSQHLTRLELVGVGVNNSVVDFAGCPTLVELSMDTCDVFVRQLLSPSLKHLRITRSYTSECDRILISLPNLVSLEVLAMPERKESIS

SEQ ID NO: 230543 - protein, 95 aa, Zea mays
  Clone ID: MRT4577_141850C.1.pep
LHLGSVLPQVDVGCMRAPSLPRVSRWQGGCRVPVSILHLRHSSRRCLFHLRSCIVVQCCFSSGTEPGRGQAARERPTKAQRSRCVRGASAYDIHM

SEQ ID NO: 230544 - protein, 896 aa, Zea mays
  Clone ID: MRT4577_141851C.1.pep
MLWVGPALIFSSATAISMLGWDNKVRSILSTSFPRSVLLGALNDRLLLVNPTDINPRQKKGVEIRACLVGLLEPLLIGFATMQQHFEQKLDLSEVLYQITSRFDSLRITPRSLDILTKGPPVCGDLAVSLSQAGPQFTQIMRCNYAIKALRFSTALSILKDEFLRSRDYPQCPPTSHLFQRFRELGYACIKYGQFDSAKETFEVITDHESMLDLFICHLNPSALRRLAQKLEESATDSELRRYLERILRVRSTGWTQGVFANFAAESMVPKGPEWAGGNWEIKTPTNIKNIPQWELAGEVMPYMKTTDAGIPSVVADHIGVYLGVMKGRGNVVEVSEKSLVKAIAAASSENTQPVSSASAEKSKAIPRGDSVGDTLARQLGVQIASSDEQAKAAEDFKKTLYGVVDDGSSDEDESTSKTKKIHIRIRDKPAAPTVDVNKLKEATKQLGLGPPLSRTRSLSGTPQDFNQAPTQPGGPAAAVSPAMPNSAIDLFGTNTLVQPQAPSSSTGPVIAGMGVTAGPIPEDFFQNTIPSHQLAAQLPPPGIVLSRMAQPAPGIEQGRPVPNQMMANVGLPDGGVPPQAPPQQSQFPPQQSQFPQQPGIPMDSIGLPDGGVPPQSQPLPSQGQFLPSQAQGFQLGIPAPSQPIDLSALEGPGAAKQAARPPAPTAVRPGQVPRGAPAAECYKMALAHLEQNQLTDALSCLDEAFLALAKDQSREADIKAQATICAQYKIAVALLQEIARLQRVQGAGALSAKEEMARLSRHLASLPIQAKHRINCIRTAIKRNMEVQNYAYAKQMLDLLYSKAPPTKQDELKSLIDMCVQRGLTNKSIDPFEDPSQFCSVTLSRLSTIGHDVCDLCGAKFSALSAPGCVICGMGSIKRSDALAGGPGPVPSPFG

SEQ ID NO: 230545 - protein, 98 aa, Zea mays
  Clone ID: MRT4577_141852C.1.pep
FIYTKKKKKKKKKKKKKKKKKKKKKKKKKKKFKKKKKKKKRSLGWYPWLRGNSNKMGAGFWGSRFGPQVGGMLGISVFRGRMVFGAIFPPNYCPEFIG

SEQ ID NO: 230546 - protein, 59 aa, Zea mays
  Clone ID: MRT4577_141853C.1.pep
TRTAKRILFISISIIRWWWYVDDDIALSTGSLGLFARMPSARVLLVYRLALIKMLVLPT

SEQ ID NO: 230547 - protein, 69 aa, Zea mays
  Clone ID: MRT4577_141854C.1.pep
DGAVSLSLLPEYLAQHSSAQYTLMNKLTDPAVPNDNESDASLRGNDSASKSLTEVIGSRVLCLSGCLYA

SEQ ID NO: 230548 - protein, 82 aa, Zea mays
  Clone ID: MRT4577_141855C.1.pep
IIIINLFIYLFFSYTKFWALHRLSPGVDRLNVRRGGAAPALGRGPFGPVVRTVRVTARWFILRCLVSISVPTIYKYLSKLSV

SEQ ID NO: 230549 - protein, 61 aa, Zea mays
  Clone ID: MRT4577_141856C.1.pep
MQRPETASSPELGSLCFRDMFANCESRSPLLLRLWVGVCCCGTCYWNNVLRRPISLSNISW

SEQ ID NO: 230550 - protein, 86 aa, Zea mays
  Clone ID: MRT4577_141857C.1.pep
RLEGNWSSCQSMEMINLGENLISGGIPKGLVECENLKFLNLSMNKFTGSVDSSLPVPCMDVFDVSGNQLSGSLPVFMSKKNCLSSQ

SEQ ID NO: 230551 - protein, 56 aa, Zea mays
  Clone ID: MRT4577_141858C.1.pep
SCREYLILTEPASTPNAVQASCYDGRFGSDAKCVRPSLLSGCIRVTTTGRVCGRVG

SEQ ID NO: 230552 - protein, 124 aa, Zea mays
  unsure (1)..(124): unsure at all Xaa locations
  Clone ID: MRT4577_141859C.1.pep
LRHLDXLPIVTSERSAGRRVLGXXSKIPRRXXSWRLPSPRPALPRAPRAGRHGLYLXGGXRRQHRGSRPQNRIFVPFLKEXXADRLGRTHXXRXXFXXSCPAPPHLLRQAPYPTYLXLHTLYXL

SEQ ID NO: 230553 - protein, 68 aa, Zea mays
  Clone ID: MRT4577_14185C.1.pep
SVILAKHFGIGLTQRVSSSGIDRLSTVLAEDPGLVVYYLHAHLLQSLPCPIVQQKLGNIFGDQNTSSQ

SEQ ID NO: 230554 - protein, 86 aa, Zea mays
  Clone ID: MRT4577_141860C.1.pep
KGGWDQHGKSINKFSDHWQLPTLYQLSTYWSSSALICSQGLLSSIHNQLSVNKFIMNFFEWPAEELSLCLFNLILRSHLQWLQRHI

SEQ ID NO: 230555 - protein, 78 aa, Zea mays
  unsure (1)..(78): unsure at all Xaa locations
  Clone ID: MRT4577_141861C.1.pep
FLLLNLLPPPPPXPPPPPLPLPPPPKPPPRPPPENLPPPPRPNLPPPELPLDCCCCFSCKGGNCCPRVIVTREAEACP

SEQ ID NO: 230556 - protein, 52 aa, Zea mays
  Clone ID: MRT4577_141862C.1.pep
YIVLFHLRAQVQKTTLCTNYSVICEVFELIYMLAEFRKKKEKKRPSTSICIS

SEQ ID NO: 230557 - protein, 151 aa, Zea mays
  Clone ID: MRT4577_141863C.1.pep
SHGGFLTTHLIGQAPDRFAVAAARNPVCNLSLMAGTTDIPDWCYVVACGTQAKRYASEAPSPHHLRLFYQRSPIAHVSKVKAPLLMLLGGADLRVPASNGLQYARSLIERGGDVKIMMFPEDIHEINLPRSDFESFLNIGVWFKKHLNAVA

SEQ ID NO: 230558 - protein, 39 aa, Zea mays
  Clone ID: MRT4577_141864C.1.pep
SAAIAFPSQQPPVIPPPLQGGLIKTSYLATSSCRFNQPP

SEQ ID NO: 230559 - protein, 121 aa, Zea mays
  Clone ID: MRT4577_141865C.1.pep
LPGALTRRTSSLRTVVMARYSTDYNASLFATATETARSLTIYRRDTRCASMEHQALSALEIPVRPTAARARVTSNESRSLAMGADSLAETTISPCRSGYLPRAPDGLEEIHCNWTDTEHER

SEQ ID NO: 230560 - protein, 77 aa, Zea mays
  unsure (1)..(77): unsure at all Xaa locations
  Clone ID: MRT4577_141866C.1.pep
LARSISPATMGKGEGHINIGGIGHGDSGKXTTTGHLSYKLGGINKRPIERIMKETTEMNKRDFKFARKLKKVKAELE

SEQ ID NO: 230561 - protein, 177 aa, Zea mays
  unsure (1)..(177): unsure at all Xaa locations
  Clone ID: MRT4577_141867C.1.pep
MGGGKDKHDESDKGLFSNMMHGVAGGHGYPHQGYPPQGYPPQPGAYPPPPGAYPPPPGXPGAYPPQYGYPQPGGYPPQGGYPPAGYPGSSHQGYGSSHAGGHMGTGAMLAGGAAAAAAAYGAHKLSHGHSGHGGHGPFGGHGXWSCGGYGRGRGHHGKFKHGKHGHGMFGGKFKKWK

SEQ ID NO: 230562 - protein, 199 aa, Zea mays
  Clone ID: MRT4577_141868C.1.pep
MGGGKDKHDESDKGLFSNMMHGVAGGHGYPHQGYPPQGYPPQPGAYPPPPGAYPPPPGAYPPPPGAYPPQYGYPQPGGYPPQGGYPPAGYPGSSHQGYGSSHGGGHGGHMGTGAMLAGGAAAAAAAYGAHKLSHGHSGHGGHGAFGGYGHGGYGHGYGGHGKFKHGHGHHGKFKHGHGKFKHGKHGHGMFGGGKFKKWK

SEQ ID NO: 230563 - protein, 86 aa, Zea mays
  Clone ID: MRT4577_141869C.1.pep
RFAPELFWRMALAAWAPLRTGHLSPHRCVTAIWLVVPLDQQWPPGSSYPNLARGREAGARPTASLPIGLPEWRSAFHVRRALPLPT

SEQ ID NO: 230564 - protein, 111 aa, Zea mays
  Clone ID: MRT4577_14186C.1.pep
LEAGRGRSSQGPGPSNLVLRPSPLQRRLGLRFHSVCLPARPCDREATRRREITRPPHRVRPAWDCEVKRDGSAAGEGSSRLRLPNQTAPHRRQRSVHWRTYQPLYLLSRST

SEQ ID NO: 230565 - protein, 190 aa, Zea mays
  unsure (1)..(190): unsure at all Xaa locations
  Clone ID: MRT4577_141870C.1.pep
MAFQSYLTKSGVMSSSPTSTLVSPPRSPPSESPPMSPDAAAXRGAWPGVGGSPVNEVLASLRQLRLSGGGGGGSPRSAPSGGSFLAGGYPFGSPKSPAGLYSLPSTPPTRPCPVMVTTASGATIMTVERLNLGLLVDEEPVMERVESGRALREKVFERLSKETAVPNDTAASVNVEGAAPDVGWVSDLIN

SEQ ID NO: 230566 - protein, 62 aa, Zea mays
  Clone ID: MRT4577_141871C.1.pep
KWKKNLGLRCFKRLVFGGPKGKKKRDGVKKKGDFQRVFLCGGMFVYPIGVMDTITPRGGGVF

SEQ ID NO: 230567 - protein, 122 aa, Zea mays
  Clone ID: MRT4577_141872C.1.pep
LSCASLALLITQRLSLPAAEEQQKNLTPLPTLAACSGRRLCRRAAAWKSLSTTRLSGGPGGSLSPTYLRLYLVTVSPTPRATITASAVKAICSHESDYSASTAARSWVSALVGSCMDMDLTI

SEQ ID NO: 230568 - protein, 90 aa, Zea mays
  Clone ID: MRT4577_141873C.1.pep
DPQNNSQFNFPGSRQKSHPGFYFKNMELFFYTKRPPVKGGLLTGPILGDRICNKKSFGFSTRVFHSLQKFATGAPETTWWNGSNRNNHYG

SEQ ID NO: 230569 - protein, 45 aa, Zea mays
  Clone ID: MRT4577_141874C.1.pep
KSSSRYPPPRRLHRLQSLAARPGHLRHPQVLLAVPGLQPSLADAF

SEQ ID NO: 230570 - protein, 64 aa, Zea mays
  Clone ID: MRT4577_141875C.1.pep
VALRLPVRWGSSCPAWRPPPGIAGLTCPNRTPRCCLRYEPVAKEGQQATGRVNACKSGEGRIRR

SEQ ID NO: 230571 - protein, 112 aa, Zea mays
  Clone ID: MRT4577_141876C.1.pep
MTYVRPPSSSWRGSLLCHSVGPVKKGGVGSTWGTASHLLPRIHPPSSSWRCALLCSGKAVSSAAHGAYRIYVISNLSFNLLPRMYTLINNPDLIELTTKDGLFISHSTFMLI

SEQ ID NO: 230572 - protein, 96 aa, Zea mays
  Clone ID: MRT4577_141877C.1.pep
MLGTSRCWTVAAFPGESREMELSPAGRWTDLPEDIALAVASRLQEADVCSLGGCSRTWRRACDADCIWERLFRCRWPAAVAEASASSSRMQVHKEG

SEQ ID NO: 230573 - protein, 127 aa, Zea mays
  Clone ID: MRT4577_141878C.1.pep
GWREEGGCRVLGLRTAGGAWVRGSHGLNAIIVVAVFSTPVKKGGVGSTWGTASHLLPPIQLAAIVVVAVCCALLCSGKAVSSAAHGGYRIYVTSNISFNLLPRMYTLINNPDLIELTTKKKKKNPRP

SEQ ID NO: 230574 - protein, 113 aa, Zea mays
  unsure (1)..(113): unsure at all Xaa locations
  Clone ID: MRT4577_141879C.1.pep
LVSSLLGGFVAGPLGGFCGWVLLGVPVSPLLGWFFFSFFPFFFFFPRPWFFCFXAVFCSPFCPPCWIFGLALGPFLLGXKKXKKKKKKKKKKKKKKKKKKKTKIFFFSPPPPR

SEQ ID NO: 230575 - protein, 123 aa, Zea mays
  Clone ID: MRT4577_14187C.1.pep
FLILAAAMVISTGHGGSDPSSSGMGGRGFLPGGAALAAASPGGHGLPRRRGSSRPGPCLAPRRPTACGPGGLGAAPAARGAAGTDPRRWARGHVPPRPSAATRPRPTAHGAALSPGHGARRGR

SEQ ID NO: 230576 - protein, 66 aa, Zea mays
  Clone ID: MRT4577_141880C.1.pep
HEPFDPSGESWKRMSSQVKRMRFAQCPYLLQGLRLRSRGSVVAKQFIFGDPFSFRAWSLLIIAPLI

SEQ ID NO: 230577 - protein, 145 aa, Zea mays
  Clone ID: MRT4577_141881C.1.pep
LLGLATDTCIELEPKLAAPESMIVLHRMAQTFLSMSGLRLMMSCAKILTFTARHLAAERPGIAAPSRGGLNQSHGHNARVAASPGKAGGGGSILMVLDGLVPSSGLQQGLVDDESAHHAEVRDPDGLGCAPSVHALGQAPRTGPV

SEQ ID NO: 230578 - protein, 80 aa, Zea mays
  unsure (1)..(80): unsure at all Xaa locations
  Clone ID: MRT4577_141882C.1.pep
KLTEAGAAEGAIDAXKPPEPTXGRGEKKGRGAKTPKKKRKQTEEEPAPERKQQPEKAPEXTGEETQQSRRGXRERKERQH

SEQ ID NO: 230579 - protein, 215 aa, Zea mays
  unsure (1)..(215): unsure at all Xaa locations
  Clone ID: MRT4577_141883C.1.pep
TFTCPDFAYAVXQVCLKLHDPGKPLAALKRILRYIRGTLHLGLFLRPTSQTELIVYCDVDRAGCPDTRRSTSGYAAFFGDNLVSWSSKRQNTVSRSSAKVEYRVVANAVAEATWLRQLLTELHAPLPKTTLVYCDNISSVYMSSNPVQHQRTKHVEIDIHFVREHVALGNVRVLHVPTTSQYADVFTKGLSSSVFTDXRSSLNVRSTDVSTARGC

SEQ ID NO: 230580 - protein, 63 aa, Zea mays
  Clone ID: MRT4577_141884C.1.pep
PLMKNGQPLPFSSLAANKFFKNAGNAPGPVNLFFSVGGGGGNGKAWGFFFSSKYVEINAEYPP

SEQ ID NO: 230581 - protein, 308 aa, Zea mays
  unsure (1)..(308): unsure at all Xaa locations
  Clone ID: MRT4577_141885C.1.pep
RLQVPFRISGGRHHARPRVRFGRHKLLEPAPRAPPVLSRGVLGSPLTPPSPPVRPLLTASCRTPKKIEAEGAAPMAAALCPRLRGFMASSRPLLALRPVALRLPMRRAVPAMPLAARARRGLGSSTATAQLDEDFATASDLRFESPLEVVKYPDPVLRARNKRINTFDDNLRALADXMFDVMYKTDGIGLSAPQVGVNVQLMVFNPAGGKGEGXRKIVLVNPVIYKSAKRLLVXFEEGCLSFPGIMGNVVRPESVKIEAQDVTGAKIKVKLSGIHARVFQXHGVDHFXGILFFDKRTIDVLGTVREEL

SEQ ID NO: 230582 - protein, 82 aa, Zea mays
  Clone ID: MRT4577_141886C.1.pep
VEPYNSVLSTHSLLEHTDVAILLDNEAIYNICRRSLDIERPTYTNLNRLVLHDISSLTAFLRLDGALNEYGNDFQTNLIPYP

SEQ ID NO: 230583 - protein, 162 aa, Zea mays
  unsure (1)..(162): unsure at all Xaa locations
  Clone ID: MRT4577_141887C.1.pep
RRRSLSSSPPSSSPSPPRAPACPXPSCPAPPRPPPPPLTPPPLAPAPRADXPQPAPAQHHRRPREHPRAPTPTPPDAPPTPCPPPLPALPRPTLPAPPPAAPPSLPHXPPPPPPSPPSPPPPMPPPPHPPPPPCPPPPPLTPPPPPPPPPXPPPTPPPPPQP

SEQ ID NO: 230584 - protein, 104 aa, Zea mays
  unsure (1)..(104): unsure at all Xaa locations
  Clone ID: MRT4577_141888C.1.pep
IDLTGPIVKVFLTLKVYNAXKLXASRVLLTFTPTKFQHLSIVKATRTKAKPKNKAFLPLXSKPFNSPXSPNSPRLYSCLLNTSLKPVXSTTLKVLFILTYFLKP

SEQ ID NO: 230585 - protein, 79 aa, Zea mays
  unsure (1)..(79): unsure at all Xaa locations
  Clone ID: MRT4577_141889C.1.pep
AAXLVXSSRAALVXALXXAXAVLGXLPXRVXSXVXCVXGGAGREXSXGVLFACLXWXXXPAPSRACLCKACFRGGGLSP

SEQ ID NO: 230586 - protein, 248 aa, Zea mays
  Clone ID: MRT4577_14188C.1.pep
MDDDWELLLASPKAAAAEPYAGGGEDDAGAIKHDYFDLGSDAKYPRRASLSTGDEEEGAEEGLLRASDNASWVEPDPDDLLFPGRDRAALWSDSSSDGERPEVEATDPVGRAREEGGVTAAADAGEGAVAKGGKKKKKKKPPHPVPWWPLPLDVLRVWALRAARSVWSVPLAVALLGFAVLGRRLYRMRRQSKAVARVRLVLDEKKVSQFKGQGSRLNESMTVARRTPIIKPMLPANGVTPWPVLGHL

SEQ ID NO: 230587 - protein, 88 aa, Zea mays
  unsure (1)..(88): unsure at all Xaa locations
  Clone ID: MRT4577_141890C.1.pep
LCDDQCGDHDPNRTEHATRGKGGQLPFSVLHRVIINENKKTPXKFVGRQAVLTPQCLNGWYAVNTSHNPESVKLQYRYLANDDRFNHP

SEQ ID NO: 230588 - protein, 50 aa, Zea mays
  Clone ID: MRT4577_141891C.1.pep
PLWCQWPWLRPQCSSVVSPPEMRRPSNTAICKASSSQLITNCPFVIPGNR

SEQ ID NO: 230589 - protein, 64 aa, Zea mays
  Clone ID: MRT4577_141892C.1.pep
FTAQQNHVHHAGCLAASDTGEGHPHDVEGHPTYLLKTKHGTEEGQDCLEARELSHRPATYGIGL

SEQ ID NO: 230590 - protein, 131 aa, Zea mays
  Clone ID: MRT4577_141893C.1.pep
SLVLFSKKKNRCFSNSGSHAYPTPTRLMTASSYSYKTRGGPPHVGGKEKHWGVSKTLALEEATFLGSKSCPMLGITPPLSEGGTAPTVKKSSWVHPHSMLDGARHNAGLIDDPRSVPGKVENQKREGPARA

SEQ ID NO: 230591 - protein, 61 aa, Zea mays
  unsure (1)..(61): unsure at all Xaa locations
  Clone ID: MRT4577_141894C.1.pep
TKQPYLSNRLIPSHSVIATKRNLRVQRRAQQAQPPVTRISFASTPKGVILTCASLNLEIXP

SEQ ID NO: 230592 - protein, 63 aa, Zea mays
  Clone ID: MRT4577_141895C.1.pep
SLTSNHSSTQRFTKFSLLLMVETLRCRCVWVGQGFEGFLDLREKVFFLLKCPGAGQVEFFYSW

SEQ ID NO: 230593 - protein, 145 aa, Zea mays
  unsure (1)..(145): unsure at all Xaa locations
  Clone ID: MRT4577_141896C.1.pep
MAAVYLYMAAGLMRCEIYVVVSVWEDRVPFSSMIQEMKGKIGAISSRGVLRFXAGGARRGRAXAPAAEPDEASREGCWAQLPFELLRMVLVRVEDQESRWPARSAIVACACVCRCWRATVKIVRVPEASGKLTFPIXLKQPWPRD

SEQ ID NO: 230594 - protein, 47 aa, Zea mays
  Clone ID: MRT4577_141897C.1.pep
GKVERLRKECPNAECGPGVFMAAHADRHACGRCGLTYVVVENHMFFL

SEQ ID NO: 230595 - protein, 149 aa, Zea mays
  unsure (1)..(149): unsure at all Xaa locations
  Clone ID: MRT4577_141898C.1.pep
LFLVNFLAYLRRPGDESDGESMDTSSESSIENDVERLRVSSXRRTHRLENGGIRSDDGKGDASSSFPIFEYMERDPPYGREPLTDKASTLAHRFPALKTFKRCDLLPSSWMSVAWYVSIVVIFCSLDFYLHFLNGKAVMKYDFVLLDSP

SEQ ID NO: 230596 - protein, 657 aa, Zea mays
  unsure (1)..(657): unsure at all Xaa locations
  Clone ID: MRT4577_141899C.1.pep
MSNLKLGVEVTSAHDLLPKEQDTANPFVEVDFDGQKFRTAVKDRDLNPVWNELFYFNISDPSRLPELHLEAYVYHTDRPSNSKSCLGKVRISGTSFVSQPDATALHYPLEKRTILSRARGELGLRVFLTDDPSVRVSAAPAHQEFDMLSTPTTAQEXGSSQLHLKSFXETRANPVRQFQHLGREQQRPAQPQPYYAEGSYGDQQQQQRSFSAVANKAAAPQPQVQVSRMYAPGPQQPVDFQLKETSPTLGGGRVIGGRVYPGQKAGAYDLVEKMQYLFVRVVKARDLPNMDITGSLDPYVEVHLGNYKMKTKHFEKNQRPEWDEVFAFPKEVMQSTMLQVVVKDKDVLRDDYVGRVSIDLNEVPLRVPPDSPLAPEWYRLMGKDGVRDRGELMLAVWYGTQADECFPSAIHAGSTPVDSHLHSYIRGKVYPAPRMWYVRVNVIEGQDIYPMENRIPDVLVKVRLGHQLLRTRQVRSPTRNFMWNEELMFVAAEPFEDDLLISVVDRVAQDKDEVIGEAIIPLARLPRRADHKPVLPAWFDLRRPGIIDVNQLKEDKFYAKVSLRVCLEGGYHVLDESTQYCSDLRPTMKQLWKPPIGMLEVGILSANGLNPTKTRNSRGSCDAYCVAKYGSKWVRTRTIVDSFEPSFNEQYTWEVFD

SEQ ID NO: 230597 - protein, 106 aa, Zea mays
  Clone ID: MRT4577_14189C.1.pep
HKDSGNKNISMGIHKGLPQGLPQACSSKLQAASSTSAAGHRIICPRLWQRERLCMGWGSCTTSSITSLVTHISQVSQHRPWSHSVGRKHRFYDRSSPRHRHGFIQT

SEQ ID NO: 230598 - protein, 54 aa, Zea mays
  unsure (1)..(54): unsure at all Xaa locations
  Clone ID: MRT4577_1418C.1.pep
YTLLSETNRQHRKRDPVATIEQHWRPRYSPSLCYXIYLDGXLTRHWGLNADKLL

SEQ ID NO: 230599 - protein, 89 aa, Zea mays
  Clone ID: MRT4577_141900C.1.pep
YQALLFLTLYTDHRSSRILSSPNCVSSALDNLGSTHHLWECANCVRRPAGFMLWLGMGRGWRTTRSRGTSSRLRGLRAAWRRGLLAARP

SEQ ID NO: 230600 - protein, 72 aa, Zea mays
  Clone ID: MRT4577_141901C.1.pep
IFLLFLSYYKAIRADGQTQLSHEIALELSQRSAAAGLRPIGAVVFMQRGVLKVCLRTTDSTVNTSEIAKAYG

SEQ ID NO: 230601 - protein, 207 aa, Zea mays
  unsure (1)..(207): unsure at all Xaa locations
  Clone ID: MRT4577_141902C.1.pep
HASAFVGCFSRVDAEVGGDAATEAKPVAPDTVGSTAVVALVCSSHVIVANCGXLSVDHKPNREDEYARIEAQGGKVINWNGYRVLGVLAMSRSIGDRYLKPYIIPVPEVTIVARAKDDECLIIASDGLWDVMSNEEVCDAARKRILLWHKKNSDASSSAQRSGDSPDEAAQAAAEYLSKLALHKGSKDNITVIVVDLKSHRKIKSRA

SEQ ID NO: 230602 - protein, 423 aa, Zea mays
  Clone ID: MRT4577_141903C.1.pep
MEDLAPGALALFAAVADFIDDSAPAAAGAGMPPPEPESAPGSPCSDCSSVATADFEGFADLASTLVLDDLVSPASASASASSLPASGPRAARSVFALDCVPRWGLHSVCGRRPEMEDAARVLPTFFHVPLWMLAGDAPVDGLDRASFRLPAHFFAVYDGHGGLQVANYCRDRMHEVLAEGLTRAEQAVSDADLSGLDPSTHEHWEKVFVGCFSRVDAEVGGDAATGAKPVAPDTVGSTAVVALVCSSHVIVANCGDSRAVLCRGKQPLPLSVDHKPNREDEYARIEAQGGKVINWNGYRVLGVLAMSRSIGDRYLKPYIIPVPEVTIVARAKDDECLIIASDGLWDVMSNEEVCDAARKRILLWHKKNSDASSSAQRSGDSPDEAAQAAAEYLSKLALHKGSKDNITVIVVDLKSHRKIKSRA

SEQ ID NO: 230603 - protein, 222 aa, Zea mays
  Clone ID: MRT4577_141904C.1.pep
METSFLPTTLPNTRPLPALRTYAPAASIRSQQRPRRSTIRAAITRGRKEETVTTVREQLEGCYLLAGIKYEGLTVKQLQGIRDALPDTCRLLVAKNTLVGKAIEGTPWEALKPCMKGMNAWLFVHTEEVPAALKPYRAFQKEERVEETNDFVGAVFEGKFYGPGDFKALETMPSRAEVYATLLGALQGPATSLVATLQAPARDVVAVLSAYVRKLEEEAGAA

SEQ ID NO: 230604 - protein, 97 aa, Zea mays
  unsure (1)..(97): unsure at all Xaa locations
  Clone ID: MRT4577_141905C.1.pep
MAGIGPIRRDWEPGGVRKKAPTAAAXKEEKAVNAARAAGAGIETMKKCNAGMNKAGCSGASLNTKRLDDDTENLAHERGPSDAXKNLMRARRGKKVT

SEQ ID NO: 230605 - protein, 222 aa, Zea mays
  Clone ID: MRT4577_141906C.1.pep
METSFLPTTLPTAKPLPAFRTHAVAASKLPQQRPRRCTIRAAITRGRKEETVTTVREQLEGCYLLAGIKYEGLTVKQLQGIRDALPETCRLLVAKNTLVGKAIEGTPWEALKPCMKGMNAWLFVHTEEVPAALKPYRAFQKEERVEETNDFVGAVFEGKFYGPGDFKALETMPSRAEVYATLLGALQGPATSLVATLQAPARDVVAVLSAYVRKLEEEAGAA

SEQ ID NO: 230606 - protein, 124 aa, Zea mays
  Clone ID: MRT4577_141907C.1.pep
PPETSNCITFESQRIGDASATKRSQTRCLVVITVRIPSGSKSNKMFGVDNSTERLMILFESQLSSSFVCRASRTDIFVHHVSSNNHDKISLISSMHNQTHLVLKICIINTDGRTRGRTRGRTTR

SEQ ID NO: 230607 - protein, 108 aa, Zea mays
  Clone ID: MRT4577_141908C.1.pep
SSPIYAAKQISGPTATGKVENSRNSYPISFSEKQQISKDEYKRTQQPTFTRGMGKSDIMHGICGAQDILQKQQYFMQGCFEKHFIFFAKRILSKRSRKFFSIEKSPLD

SEQ ID NO: 230608 - protein, 98 aa, Zea mays
  Clone ID: MRT4577_141909C.1.pep
ISKGEYKRTQQPTFTRGMGKSDIMHGICGAQDILQKQQYCMQGCFEKHFVFCKVHPLQKEQEVFQYYNKIPWTKPSRYLSSFPLVFLFKNRYWTSRPP

SEQ ID NO: 230609 - protein, 242 aa, Zea mays
  unsure (1)..(242): unsure at all Xaa locations
  Clone ID: MRT4577_14190C.1.pep
MDEDWELLLASPXAAPAEPYAGGGGDGEVDAGAIKHDYFDLGSDAKYPRRASPSKGSEEECAEEGPFAASDNAGWAEPDPDDLLFPGRDRAALWSHSSSDGERPEVEVEVEAADQVERAGVTAAADAGEGAVAKGGGPAQWWRLPLDVLRVWALRAARSVWSVPLAVALLGFAVLGRRLYRMRRQSKAVARVRLVLDEKKVSQFKGQGSRLNESMTVARRTPIIKPMLPANGVTPWPVLGHL

SEQ ID NO: 230610 - protein, 161 aa, Zea mays
  Clone ID: MRT4577_141910C.1.pep
MASLTTTTSSPAALPAATTATAASSISPHAGSKRPLLAGDDAPWRATAATSAGQGIRPVPRINHASVLRVSTQEDSAAYALAIMKHPDPIGEGLAMEAFAEAAGPECIVPGQQAPLRLMGLKVWPVDIDMKFLEPFGRELHSMKKFMDKSCSVMDSSMANK

SEQ ID NO: 230611 - protein, 98 aa, Zea mays
  Clone ID: MRT4577_141911C.1.pep
DPCLTMLCGRLSVMKMSKQRLVSKQMTMKGRTGHGSRGVAPASPRRRLGVQAARGARRRRRPGKTVYGVRLGEVGVRLGVVGVWATPYPPWASPYPLG

SEQ ID NO: 230612 - protein, 99 aa, Zea mays
  Clone ID: MRT4577_141912C.1.pep
RTRGRTRGRTRGRTRGCCSSDRYGRGSVVLSVTRGDLGACRLGDLYRYLEDSQFCFSDCRDLGSYCLGAAWRRPLAILRFRSSVTTGSWFAIDAMHRPR

SEQ ID NO: 230613 - protein, 108 aa, Zea mays
  unsure (1)..(108): unsure at all Xaa locations
  Clone ID: MRT4577_141913C.1.pep
WDPRGRPGIHXAPVLSVATQEDYAAYALDIMKHPNPIGEGLAMEAFAEAAGPECIVPGQQAPLRLMGLKVWPLDIDMKFLEPFGRELHSMKKFMDKSCSVMDSSMANK

SEQ ID NO: 230614 - protein, 125 aa, Zea mays
  Clone ID: MRT4577_141914C.1.pep
LAGDDAPWRATAATAAGQGIRPVPRIHHAPVLSVATQEDYAAYALDIMKHPNPIGEGLAMEAFAEAAGPECIVPGQQAPLRLMGLKVWPLDIDMKFLEPFGRELHSMKKFMDKSCSVMDSSMANK

SEQ ID NO: 230615 - protein, 57 aa, Zea mays
  unsure (1)..(57): unsure at all Xaa locations
  Clone ID: MRT4577_141915C.1.pep
CESGRLVFLPVAAAPAVXGLPFPASVIGLPFPSXGVGFCWLPXXLGLXXAVGSLLFS

SEQ ID NO: 230616 - protein, 74 aa, Zea mays
  Clone ID: MRT4577_141916C.1.pep
YSNKTTGQSMPLRWAKPDILVTEWPYQIKNSISPFPCFRKKIHSNYEKQKQLTSATLCILPSYPVWTVDAATFI

SEQ ID NO: 230617 - protein, 79 aa, Zea mays
  Clone ID: MRT4577_141917C.1.pep
DGAHLRSQLVGGGMLSRQIVTFVSRYVLIREVVALDLAHQVIVAGEPRTTSQGGHAEFLDAEEKDRRGRGRGASLGHFS

SEQ ID NO: 230618 - protein, 91 aa, Zea mays
  Clone ID: MRT4577_141918C.1.pep
SCGKYALVVLSSNSARGTGKRQGRDAKETNTDDPPVYQLCSARRTYAREQGKGWWRQMKGKDLICNLCCAIIVSWSCVSVSVACDCTFMTI

SEQ ID NO: 230619 - protein, 111 aa, Zea mays
  Clone ID: MRT4577_141919C.1.pep
AVLSAWARRYFGQRAAAAAWTGAGSPNSVLLSRSAPHADVLALSDLRCMRQRLLLGDSTPAGAGLTHAAPPAVLQDGAVTVLITDGAYCIARVFDELTERRLIEKVETSTH

SEQ ID NO: 230620 - protein, 111 aa, Zea mays
  Clone ID: MRT4577_14191C.1.pep
KYKHGYTQKGHKLDQVLNLQGLPQACSSKLQAASSTSAAGHRVICPRLWQRERLCMGRWGSCTTSSITSSHRCPRTGHGVTPLAGSIGFMIGVRRATVMDSFRRDPWPLNW

SEQ ID NO: 230621 - protein, 128 aa, Zea mays
  Clone ID: MRT4577_141920C.1.pep
QAKPAYRTCMPPVSICNHPLFYALKYQPNKQTKTIGLSSVDRLPKVTSVTRFMACTAQQGPASPRAQVATHELNQTAPGQDQDRTRLPAIEPDSECHALVDPPQGRRLPPDEWAAYYAWGPCRLSVPP

SEQ ID NO: 230622 - protein, 64 aa, Zea mays
  Clone ID: MRT4577_141921C.1.pep
ATRTILHRHPMSATGLSMSILRAPAPCLSDPTHAHGRECQAAGSAHAAPAAARAGQLQREADHA

SEQ ID NO: 230623 - protein, 87 aa, Zea mays
  unsure (1)..(87): unsure at all Xaa locations
  Clone ID: MRT4577_141922C.1.pep
RLQHALSAGYIPRSPCIQQSPALSLVQSLVQTIKAQHLQQLVLPVINRVALANLSRYYQQQQFLPFNQLSTLNPAAYLQXQLLPFSQ

SEQ ID NO: 230624 - protein, 70 aa, Zea mays
  Clone ID: MRT4577_141923C.1.pep
RGAGKNSDCTTYPLEMSSDPLSRENSVKNTSNQQHVLALVVSYKDQFWYRVMLLWTLLPKALHGSRYPQN

SEQ ID NO: 230625 - protein, 63 aa, Zea mays
  Clone ID: MRT4577_141924C.1.pep
GGVPFTIKVGHLFVRAIGWGLFFFNPPGEKGFFFKAFYFGNPRVFPVTPFLNPGPLFCFWWPY

SEQ ID NO: 230626 - protein, 165 aa, Zea mays
  unsure (1)..(165): unsure at all Xaa locations
  Clone ID: MRT4577_141925C.1.pep
XXYTHPFXKNQPDPLXRXXKKKXKKKXXKXKKXXXXXXXXXXXXXXXXXXXXXXXXXXXXXXXXXXXXXXXXXXXXXXXXXXXXXXXXXXXXXXXXXXXXXXXXXXXXXXXXKFTHPVXXXLXSXFTXXTLTTTTTLIQXLLXSXLFXSXNITXSXXILXLXLXX

SEQ ID NO: 230627 - protein, 137 aa, Zea mays
  Clone ID: MRT4577_141926C.1.pep
MINIKRTNYYFPGATKLTGRRHLDQVELLVMCLLFDHLLFTFNELLLSSLHQLNPWILCGLLVGGQATKKSDHEKVRPGGEAISPASNSVVVRPAPCVHSSRNDPWPPDTSPEELVRAQVQAILWSATSPVCAWRRW

SEQ ID NO: 230628 - protein, 138 aa, Zea mays
  Clone ID: MRT4577_141927C.1.pep
SSRPPPSPCPWVPPPRRCCRSGTPSCAAICRGRGCRVFSCPLQLVRSVISGRQLHPLSAVLVLLYSHPDLCLLLGHVGVPAVRSSLSQQPIFVRGANDDVEGKKNTKLIDPPFARCWSSSGKAHELAASVNDPAASRS

SEQ ID NO: 230629 - protein, 255 aa, Zea mays
  unsure (1)..(255): unsure at all Xaa locations
  Clone ID: MRT4577_141928C.1.pep
GYLEAGRSLSCGLSDSKSAAGRKSEAPAASGGRPLFPVKSERLASSTSSDSDALPLLVEEAATSGARKRIGVISSGSYSGELGIFSNQTSEMDSDLLSESQSGHKSLASRSQHGRGRHRSLTQKFAPKTFKDVVGQSLVVQALSNAILRRKIGLVYVFYGPHGTGKTSCARVFAKALNCLSSEHPRPCDSCTSCIAHNLGKSRSLMEIXPVGNIDMEGIVDVLDNVMLSPAPSHYRXVFIFDDCDTLPADTWSAI

SEQ ID NO: 230630 - protein, 78 aa, Zea mays
  unsure (1)..(78): unsure at all Xaa locations
  Clone ID: MRT4577_141929C.1.pep
PXQNKSIPGFATEREYLPKIIGPGKTFQSTKVGDIMTGEDKLITVNPDTKVLQAMQLMTENRVRHIPVIDGTGMLGMV

SEQ ID NO: 230631 - protein, 74 aa, Zea mays
  Clone ID: MRT4577_14192C.1.pep
KCSFFYKPGVFAMVWGVISIRYLPDRAAGIPDELNIDVFCGPFGFQSELLYLMLVLRQGSSVPNDCTNRVGRSG

SEQ ID NO: 230632 - protein, 89 aa, Zea mays
  unsure (1)..(89): unsure at all Xaa locations
  Clone ID: MRT4577_141930C.1.pep
MKFMKLGSKPDAFQSGGADVRSVVSDLATDVIVHIGEVKFYLHKFPLLSKSSKLQKLVLKATEKGTDDIHIDDLPXGAKGFEICAKFCY

SEQ ID NO: 230633 - protein, 125 aa, Zea mays
  unsure (1)..(125): unsure at all Xaa locations
  Clone ID: MRT4577_141931C.1.pep
GXPARTARSMALRFPALXGYGVKGNMRPKADYLLGAMARRADELYDFPEYFSYALATRIVPRYEACAARGVSRLPLPAMLRPGDAKFRATLASCVGSMLPRRRSALWHAKWVDDDAAAAAKETPV

SEQ ID NO: 230634 - protein, 52 aa, Zea mays
  Clone ID: MRT4577_141932C.1.pep
RFQLLYKELIGRWRIPLLILPRYWIFRVPSLFGSSWIFIPYGIFSIWWSSNA

SEQ ID NO: 230635 - protein, 71 aa, Zea mays
  Clone ID: MRT4577_141933C.1.pep
QTGLTQPKTKLGYQPQQGPKKLIGTRKFLPKLATLNRGFLPETVTFSIPVTQTLIRSGGGGDNGKLVRSWG

SEQ ID NO: 230636 - protein, 26 aa, Zea mays
  Clone ID: MRT4577_141934C.1.pep
VGKHMEMATYSQLTAKKTSEHYFYFL

SEQ ID NO: 230637 - protein, 77 aa, Zea mays
  Clone ID: MRT4577_141935C.1.pep
SGVVQVQARRVAERGHLQQVHHRVHRQARADGASSTPVSATAHGTRAPAPAHAPRAPPCCHRHPRCTCRRTGGGPSP

SEQ ID NO: 230638 - protein, 94 aa, Zea mays
  Clone ID: MRT4577_141936C.1.pep
NVHECEQMLGPFSSLLLRSRAQNYGTILYTCRIWHNYGSPLSLNSGQIASRGCWWSSLQFKHSCSGGCRRGGGAAPETRSALFPRSRRSQFRPR

SEQ ID NO: 230639 - protein, 172 aa, Zea mays
  Clone ID: MRT4577_141937C.1.pep
SLPQTYTALIANGKGKEPTLEQFPLPTPGKNQLLVEIAFAPINPADILNITEDYPLPVRPPNPVGLEGSGTVVAIGEDLKVPYQIGDRVHVRALGTYGQYVLANSESLKKIQDGLSFEEAASHFVNPATIVSMGDYAIKNGHKAVIHTAGSSTLGRLLIRYLKHKGIKTINI

SEQ ID NO: 230640 - protein, 168 aa, Zea mays
  Clone ID: MRT4577_141938C.1.pep
FKDEKNNHVLLGASSIVADRSSLQGNTEATSGSDSSTSIGRWCGPAPSNAPRCSLPPSTSCSSGAAICHCGIPPVKDRISRISCLSLPSLTAYCLRWFIRRLHFLFHRRRFPLRCQLNRVRGQNNAGNSSDAREPTDWGENGNAKNCGASGLRCGTNRFWGKIGELWY

SEQ ID NO: 230641 - protein, 63 aa, Zea mays
  Clone ID: MRT4577_141939C.1.pep
STHHSILIYIIISYKPSYMIGCSLFLICIMCVLLFDWCMFIYWCKFFFVCTICEPILEADCVV

SEQ ID NO: 230642 - protein, 102 aa, Zea mays
  unsure (1)..(102): unsure at all Xaa locations
  Clone ID: MRT4577_14193C.1.pep
EGRFXFLFLVFFFFFFFFFFFFFFFYFFFFLYLYINSFLYCTIHRLGPVICSRYLTLQPCWKAYDGSHIDLRGPFLVPQDTLAEGSEQGIESLHMNQPWGPN

SEQ ID NO: 230643 - protein, 103 aa, Zea mays
  Clone ID: MRT4577_141940C.1.pep
KGFPNYNFFFLKEDKTHKNILLLLAFHDTPTLETLPGPSHCLLDGGAGFTQKCRMGGPKLQKPGGGVFDLEKFLGGPPMLMASANLKRGPAAPLMALANPRAK

SEQ ID NO: 230644 - protein, 378 aa, Zea mays
  unsure (1)..(378): unsure at all Xaa locations
  Clone ID: MRT4577_141941C.1.pep
MSKKVGRAKKAAGGGELSRFLESHLQTISDTFQMMAESAPGALERTEWSEVVKLGDQVSRQATVAGMLWSGDLPDVETLKENIVAYFNILQGFLLVCHGSMVGAGPTLHKSIFGSAKDVVDSSFSLFKHAVSAYESRSSDRNTTIPQVTGTVWEACAALKKVPASNCIAIGRAMTRIGVCLKDVLREMNELPIGGSGDSTAEKSSNGVVDTTSCSDRDERSDLDLDDDDDDDDDEFTEEEVAVAKLVINVVSDSLVVVKEAIRFITGLLRSSGNKDKDGAXDRVEPMEKLLSHCKEIADQVNDLGASVYPPQDSSEMELAIKRLYNGINGMRKEIGNLGGAPESTFAALEGFEKCLGSLRARLADDVVNEMEGLNISH

SEQ ID NO: 230645 - protein, 96 aa, Zea mays
  Clone ID: MRT4577_141942C.1.pep
LVDQDDTWLAAAALHGAPALISLRACSKSPPVCGKSLDPVTRSSTARSLCPSTACLSDYGDKTIRSTERGVRPTTIMWRGYLFSLTLELGMNLTPS

SEQ ID NO: 230646 - protein, 43 aa, Zea mays
  Clone ID: MRT4577_141943C.1.pep
FALSVRCLFNNKQIGPKLGSESMDLVLIQLQACRIAYYNGSSY

SEQ ID NO: 230647 - protein, 431 aa, Zea mays
  unsure (1)..(431): unsure at all Xaa locations
  Clone ID: MRT4577_141945C.1.pep
MVIPPLEIHGQYQGHVQDEIFKTHLLGCPCVMLASPEAARFVLVTQAHLFKPTYPRSKERMIGPSALFFHQGDYHLRLRKLVQGALGPDALRALVPEVEAAVRSTLASWDAGHVRSTFHAMKTLSFDVGIVTIFGGRLDERRKAELRKNYSVVEKGYNSFPNSLPGTLHYKAMQARRRLHGVLCDIMRERRGQAQAAGTGLLGCLMRSRGDDGAPLLSDEQIADNVIGVLFAAQDTTASALTWIVKYLHDHPKLLEAVRAEQAAVXAWAHTKSMALTHRVILESLRMASIISFTFREAVADVEYKGFLIPKGWKVMPLFRNIHHSPDYFQDPHKFDPSRFQVAPRPSTFLPFGHGVHACPGNELAKLEMLVLIHHLVTGYRWQIVGSSDEVEYSPFPVPKHGLPVRLWRQNNPVDRKGRETDDDHVERIFI

SEQ ID NO: 230648 - protein, 53 aa, Zea mays
  Clone ID: MRT4577_141946C.1.pep
ICRWQIVGSSDEVEYSPFPVPKHGLPVRLWRQNNPVDRKGRETDDDHVERIFI

SEQ ID NO: 230649 - protein, 569 aa, Zea mays
  unsure (1)..(569): unsure at all Xaa locations
  Clone ID: MRT4577_141947C.1.pep
MAFFLALVCILILLAIASYVQYTRWQKGKGRFGGHGRSAPLKLPPGSMGWPYLGETLQLYSQDPSFFFASKQKRYGEIFKTHLLGCPCVMLASPEAARFVLVTQAHLFKPTYPRSKERMIGPSALFFHQGDYHLRLRKLVQGALGPDALRALVPEVEAAVRSTLASWDAGHVRSTFHAMKTLSFDVGIVTIFGGRLDEWRRXLRKNYSVVEKGYNSFPNSLPGTLHYKAMQXHAHATAFTQPIQRITRTVRLGQWHCPWHARMHVTKSLDTVPYVHXARRRLHGVLCDIMRERRGQAQAGTTGLLGCLMRSRGDDGAPLLSDEQIADNVIGVLFAAQDTTASALTWIVKYLHDHPKLLEAVRAEQAAVREATGGGRQPLAWAHTKSMALTHRVILESLRMASIISFTFRVAVXDPGYKGXLIPKGWKVMPGLXRNIHHSPDYFQDPHKFDPSRFQVAPRPSTFLPFGHGVHACPGNELAKLEMLVLIHHLVTGYRCVHLLSDPLHIFPACPIACGPGMTHGWLLPLSMGLRLSLSVHAPNLLLSVCMPVSIMYILLYHNLWGPRNVRLH

SEQ ID NO: 230650 - protein, 58 aa, Zea mays
  Clone ID: MRT4577_141948C.1.pep
VLMNTQRYTGGPPVCSVERHPTRPFYDVESPGTGSLDFGVRRRRQQYTYQAFVNRLGP

SEQ ID NO: 230651 - protein, 106 aa, Zea mays
  Clone ID: MRT4577_14194C.1.pep
QGAALPLFAPGFNTPPLREVWFPSGSRSGFPGSPPGSVFLCLCRLSLFSRGGGPSSSRLTCSALTLAKSPPKPLVLAPLVLGFFFPRWVPNVAPPLVPLVFLLLAG

SEQ ID NO: 230652 - protein, 50 aa, Zea mays
  unsure (1)..(50): unsure at all Xaa locations
  Clone ID: MRT4577_141950C.1.pep
LQSCGFIVDATGGRLEYGECSKKXLSNKLHNLTCSFLNNKKDIKKISLFY

SEQ ID NO: 230653 - protein, 108 aa, Zea mays
  Clone ID: MRT4577_141951C.1.pep
VAHVPKLSPVQSGLTLSSRPRIRPMELVVATYHNRVVCKDFKVHHLARMKIFLVIECFPWLALAFQAASVMGVLFRQPSLGLLLVMPSQQNPPSPSLCFSLRPSIFPT

SEQ ID NO: 230654 - protein, 135 aa, Zea mays
  Clone ID: MRT4577_141952C.1.pep
EAFRNLEHTFHAKKLDGAYKRDISVDTQYAHITLFEKKLALNATPIHHFCWACIPQVPSMLIASARDYSPLLTRGKHNVFYRYQNETLLQMIRKPTEPCAVRQGKELIPMQEVSSACKELYSCAYHQDYNPYVCL

SEQ ID NO: 230655 - protein, 37 aa, Zea mays
  Clone ID: MRT4577_141953C.1.pep
LFFRRENSECVKGWISDVECTRVSLQHELCGPNHNHI

SEQ ID NO: 230656 - protein, 64 aa, Zea mays
  Clone ID: MRT4577_141954C.1.pep
CISYTGAKGSHLANKKTMCWVQIKEKTSTEGSSGLVHPAVRCATGHVRCSKEEWPQELASLGFF

SEQ ID NO: 230657 - protein, 74 aa, Zea mays
  Clone ID: MRT4577_141955C.1.pep
ASSSCLLTLWIQALEALFLFLESSLLVLKKGPGKTLFLGHYRGFFLPGGFLGLNLDFSYHRGVWGQRFKNQPGL

SEQ ID NO: 230658 - protein, 125 aa, Zea mays
  Clone ID: MRT4577_141956C.1.pep
MAEDLALFLKDVGFLHLLDNLIQNDITSLAQLSTKTSADLQSSCGIASMAAKKILKGLSEHTSSVPIQQPLQSELPPLSAELPPSDPNVLSNEDYGFLLEIREKAPDIYKLWQIPRNASAEEISK

SEQ ID NO: 230659 - protein, 88 aa, Zea mays
  Clone ID: MRT4577_141957C.1.pep
GPRARRGQEGIPLFVAVLGPRGAKGLSHARGRKVARREEKVGPGGPGGPSGLVAAPGSFRWGAKGSKEVKYGNKAVAFWCYMSVLWGT

SEQ ID NO: 230660 - protein, 374 aa, Zea mays
  unsure (1)..(374): unsure at all Xaa locations
  Clone ID: MRT4577_141958C.1.pep
MRSRNPCRSRNCEPVVLPEIKECETVQAVQTKQLPSTLEIKKSEPVESVEIKKNEPVKPRSLIAQRIKLWEAQVSGNVKPIVGDKEENSEEFSLRNNSNKDAKKCVRFEAADPCVAQQQDQEVKDVKEPRFCETETEAEECSAEAEQEQLLEQGCNDVQPEPDLHELENEIAQPEQEPEGVQVYNDNDVAQSPAMWNDERESPLKSTSIASRVHSRTSSGNLASEGSSPSRKDKEWKRTLACKLYEERMQLRLCRDRAVVGGSDNMDMLWEAYEVXRRQQGQRREAQRQRXSSMVKGSTGKVEDAAEEGEEEGDEEDGDGDESSVRHLCCLQALKFSPRKMNFGGGKPSLSKISKVLKRMTALSRMGSRRKQSE

SEQ ID NO: 230661 - protein, 55 aa, Zea mays
  unsure (1)..(55): unsure at all Xaa locations
  Clone ID: MRT4577_141959C.1.pep
CCKTFWLCPPRFATGLLKTPLWMVVYTTLLLLDKKTKKKXKKKKKKKKNEGRTLY

SEQ ID NO: 230662 - protein, 89 aa, Zea mays
  Clone ID: MRT4577_14195C.1.pep
TYQAQGTVMYMKNERGFIVPLSFNVINHLHNMAQLADTSVTLEDLLIHNLAKPNYEIVSAILTVYCPSIWNGQTLFFLKWVINRAWIFI

SEQ ID NO: 230663 - protein, 142 aa, Zea mays
  Clone ID: MRT4577_141960C.1.pep
GSSAPMSTGKRHLDQIELLSVRRLLLNHLLFSWHLRFQVPTCLSDDTCPRACSKASCGSSSNVFELSTTQSASWDRACDEDGSTGFDRVEKSRDLASDGGCVAPAMNGKLRRLTANSGELRWRTVRERVRGMRENSGRSRPG

SEQ ID NO: 230664 - protein, 73 aa, Zea mays
  Clone ID: MRT4577_141961C.1.pep
AHWGRQGLSSMRLGRIVCSSVSAQRFCARATYSPGWAWMSCPTLYRNRPGFGVRGRGKKQGLRNWPRAEFRAS

SEQ ID NO: 230665 - protein, 53 aa, Zea mays
  Clone ID: MRT4577_141962C.1.pep
ILNHLFRPFGLLSQLGHVDILLRRHIDNIDERAGLLLARGCVSGAGELRLEPN

SEQ ID NO: 230666 - protein, 211 aa, Zea mays
  Clone ID: MRT4577_141963C.1.pep
MGISRDSRHKRSATGAQRAHYRKKRQFEAGRQPAMTKLGAKRIHTVRTRGGNTKHRALRLESGNFAWASEHSTRKTRVIGVVYNASNNELVRTNTLVKSCIVQIDAAPFRQWYEAHYGQPVVKKGRTKEALAAVAEDADKKSAHVKRTIAERQKESKLDPLLESQFSAGRLYAAISSRPGQSGRCDGYILEGKELEFYVRKLRAGKAKHAQ

SEQ ID NO: 230667 - protein, 82 aa, Zea mays
  Clone ID: MRT4577_141964C.1.pep
KFLFMYACFKYFDQWMLIKILWNFWRSYLSLICFLSTDYVLQYSVKNLLLLDSSIFLLCYLIHSCYARKANSVKEKKKKKSG

SEQ ID NO: 230668 - protein, 52 aa, Zea mays
  Clone ID: MRT4577_141965C.1.pep
WSDILPSFTMSYNQMDHFLCAGVYVTPSDSLEFSFLSFVSDYFEAPVHSYTH

SEQ ID NO: 230669 - protein, 84 aa, Zea mays
  unsure (1)..(84): unsure at all Xaa locations
  Clone ID: MRT4577_141966C.1.pep
WQWCYRIGKRKRRKSKQKKLTRTRNKLRLMAVVLQNWKKKKKKVEAEEADKNKKQTEADGSGATELEEEKNAVXQKKLKEQEQT

SEQ ID NO: 230670 - protein, 96 aa, Zea mays
  unsure (1)..(96): unsure at all Xaa locations
  Clone ID: MRT4577_141967C.1.pep
GIXAKXQXNAKGPXGLYGCETGPLPLIDSPSXLKYPNTXPKMGXFENVXXCLGIPWRAXAXMKXXWQRAGAPXLTPLSFLPGHSRYQXXELXQGWG

SEQ ID NO: 230671 - protein, 142 aa, Zea mays
  Clone ID: MRT4577_141968C.1.pep
MIRFILLQNRQGKTRLAKYYVALEDSEKHKVEYEVHRLVVNRDPKFTNFVEFRTHKVIYRRYAGLFFSICVDITDNELAYLECIHLFVEILDHFFSNVCELDLVFNFHKVYLILDEFILAGELQETSKRAIIERMGELEKLE

SEQ ID NO: 230672 - protein, 61 aa, Zea mays
  Clone ID: MRT4577_141969C.1.pep
VIPVSAVLADKDVMLCIRPWEHGSMTKSLYFSLLSFLLSNFSPLQGFPIKEKKCLRADVKT

SEQ ID NO: 230673 - protein, 50 aa, Zea mays
  Clone ID: MRT4577_14196C.1.pep
MILFNPIKTNIVEVHIQLHSLLKSECSSEEMQSVGMLPIPDLQFQLDSLL

SEQ ID NO: 230674 - protein, 162 aa, Zea mays
  unsure (1)..(162): unsure at all Xaa locations
  Clone ID: MRT4577_141970C.1.pep
TSKPKCRAASCSSPNITGERRSWNGPDRTIYLPAWGAAAPRRLPEYXTGEVPGHYGYEPSGLGETAEDFAKYRGYQLAHGRRGMLDAAGRVXIPDGRINVRANCGPVAVXWLRAKSMILEGNTFNYFGNSVAIXLEQRGIVEVILRRGAHDYRIMNGVDLED

SEQ ID NO: 230675 - protein, 59 aa, Zea mays
  Clone ID: MRT4577_141971C.1.pep
IFYFLMYSSLINDEVNELMQLFKKKKTDNLIKEKTKTKTKKNQTSILILNLLTGVNSVV

SEQ ID NO: 230676 - protein, 193 aa, Zea mays
  unsure (1)..(193): unsure at all Xaa locations
  Clone ID: MRT4577_141972C.1.pep
DLRRTRNLSFTTQICHTTLRNEGQRFIPSKIPLRHXIPSDFTXGASTSTYHDRSAXNEQETRKNSNHFCRNHPEKIVYDSKSDIXSNSHHMYKNARHIAXEMGMHAYRLSISCTLILPKGTIQRGTYPLXIKYYXKLINVLLECGIXTYARIFHSDVPRALQEKYXGLLDNQLYSISRRYTYFAYVCYDNCRN

SEQ ID NO: 230677 - protein, 510 aa, Zea mays
  Clone ID: MRT4577_141973C.1.pep
MEERDKEIIFAQRNMSLLYEACASSVAEIEGISDIYPGKHSYAVEHSADECIKSIVEQLVMAVKTSQNSNEGSTKELKAIVLELQQELQAKDVQISTISSDLSYQLRVAESSAKQFSVDLEDARMELQNLEKQVDVLQNQKKDLETQLNELKNMESMASEQHGRIEKLTDELSRKDQEIEGLVQALDEEEKELEILENKSLQLEQMLQEKEFALKTSEVSRTKALAKLATTVDKFDELHSLSENLLAEVENLQLQLQERDSEISFLRKEVTKSTNELLTTEESNKNYSSQLNGFMKWLERELLQFGFHSESANDYDYTQFPVYMDMLDKKIGSLIAESDDLRVTVQSKDSLLQVERAKIEELMRKSDGLEASLSQKDSQIGLLRRDRASNQQSRSINLPGTSEIEQMNDKVSPAAVVTQIRGARKVINDQVAIDVEMEKDKPFDDEDDDKAHGFKSLTMSRFVPKFTRPVSDRIDGMWVSGDRLLMRQPTLRLGVLIYWIALHALLASFI

SEQ ID NO: 230678 - protein, 153 aa, Zea mays
  unsure (1)..(153): unsure at all Xaa locations
  Clone ID: MRT4577_141974C.1.pep
XWSPGSFDRNPEVGAGYQVPISGGEGMGGSRKAPSRYRHSFGRAGVRGRGYRRRREIRPNRGVIDLWETCESLSQGRRAGSLYRALLRLKHKVYPPFSTQCVSRTLQGFYSIVWESGWRRSYMPRVVLTRKAIETDLLVHEIVTNCIFFTKDS

SEQ ID NO: 230679 - protein, 58 aa, Zea mays
  Clone ID: MRT4577_141975C.1.pep
PGKHESTRGALGFTNPHLNPLIKLGAIHGKLRPPLKSPPFFSNPKEPPPGGVPITGGG

SEQ ID NO: 230680 - protein, 74 aa, Zea mays
  Clone ID: MRT4577_141976C.1.pep
HAYWGPFPPQMTKRVHPASLGEVCGPHSPGDSPHMALLKSLSGPRSKARPQMFVCIGVAKSRLFDCMCLRVASR

SEQ ID NO: 230681 - protein, 75 aa, Zea mays
  Clone ID: MRT4577_141977C.1.pep
KEQETDPWASKMSSTVCADDMKGSWNTASKVIPSKEKADDPWNSKGGNDDSMKTDTWGACSTGWDQQLSWSILNF

SEQ ID NO: 230682 - protein, 88 aa, Zea mays
  unsure (1)..(88): unsure at all Xaa locations
  Clone ID: MRT4577_141978C.1.pep
RLRTRPKTRPKRGRARGTRGPSRQGPATPAGPPAEGEKXPPRHHPSRGRGPQEPEGIFFPPPKSIIPGGETAGPLRPNFPAAPRGWGP

SEQ ID NO: 230683 - protein, 216 aa, Zea mays
  Clone ID: MRT4577_141979C.1.pep
METMDTLQKIIQPQYLDHFADWEKFANDREKKGLKLISAIYKHKGLKKFRADPPSKQLEEFQKSNTIDYKKAEELYRKNQVTSYYSSEFGAQKESKPQTNIFKYQKCSETEFKDVLNKLAVQFLDNWIELQDEAEFQDLVLICLRSLLARYKSILVAKTEAKSQYNWNVDWKLCKPIRIDKVGADYRSIKTDYNTIFKDTLKKEEEAQNLEKNKKK

SEQ ID NO: 230684 - protein, 96 aa, Zea mays
  Clone ID: MRT4577_14197C.1.pep
KPASLGAGFPPLKKGKPKPFNPPRGHLQRPGFRPQLKKGPPPLNSTKRPPGGRSTPLKRAPTGGGRNLPGPPKTPGGRGGETKTPRSSGGGYLETP

SEQ ID NO: 230685 - protein, 93 aa, Zea mays
  Clone ID: MRT4577_141980C.1.pep
SARGSNLFLHNVGLQDNSKKSSTTIVSAKVQELHNQLESERLEKDGLQEEVETLKAQAQASKETMDNMKRSREENNSLLCQPLSFNRSQAPPS

SEQ ID NO: 230686 - protein, 153 aa, Zea mays
  Clone ID: MRT4577_141981C.1.pep
TKKYKDAEPSAINLFKDMHCSKKKGFSENVKKAIVDMEARVTTPVEDGQQQKSPIEVVSEVLWGSSLFLQNVGLQDNSKKSSTTTVFAKVQELHNQLESERLEKDGLQEEVETLKAQAQASKETMDNMKRSMEENNSLLRQLLSFNRSQTSPS

SEQ ID NO: 230687 - protein, 369 aa, Zea mays
  Clone ID: MRT4577_141982C.1.pep
MEPKMQGGIVMAGGGKPSWSASPIVATVASGYHILRIDGYSHTMGTPTGEYIASLPFTVGGHRWHIRYYPNGRSSETKEYVSLSLYLHDWVAETVKARFKFRFVGDVAEQPLILGGLHSFDNIDNNWGRPEFIKRKDLEESKHLLDDSFSIRCDVVVPTNEVRVVATAAAAMVSVPPSDLHQHLGILLLTEKGADVVFDVAGETFAAHRCVLAARSPVFSADLFGAMEEGGHTGGVVRIEDMEPLVFKALLYFLYTDLLETETMKQGEDGDDEDVLCQHLLVAADKYNLERLKLLCEKKLCECIHVGTIATILALAEQHRCHALKKVCFHFLSSPANLRAVAATDGFEHLSRSCPSVMEELVVMLSNLV

SEQ ID NO: 230688 - protein, 76 aa, Zea mays
  Clone ID: MRT4577_141983C.1.pep
KKNALQVMNFQMQCGSDCSFPCVKLPKHQSSRVAVVVVKSTIPPPPKNVVSPRHQMRKMRRNNIIILFELSSVSFF

SEQ ID NO: 230689 - protein, 81 aa, Zea mays
  Clone ID: MRT4577_141984C.1.pep
FFGLIQFNKQADGVNPYLYTQNFNLSRGLGKPIKGPQKGPGGGERGGGTQKRKETKRNQKKKRGKIPLGEKLYTGALKASF

SEQ ID NO: 230690 - protein, 43 aa, Zea mays
  Clone ID: MRT4577_141985C.1.pep
SQGLRLVWGGGAGAHHMVMVAKGSGNRDPYSTGGSLQKKTERP

SEQ ID NO: 230691 - protein, 43 aa, Zea mays
  Clone ID: MRT4577_141986C.1.pep
VADKLLSNFINYTTPVKIWTTILYLCCYIRHLMFIQRAEKLQR

SEQ ID NO: 230692 - protein, 90 aa, Zea mays
  Clone ID: MRT4577_141987C.1.pep
FFFFFFFFFFFWFFFFFFFFFREPRKERIFFRLHKWGLTPLERTTGAFQKETSLAKPIWLGQGTNFWVHTMLGFYKNAQKQYGNPILCPP

SEQ ID NO: 230693 - protein, 116 aa, Zea mays
  unsure (1)..(116): unsure at all Xaa locations
  Clone ID: MRT4577_141988C.1.pep
ILSIQKHTKRNALTTNLPPWVAKNLPFLALLALLGTAPNASIIQQCXLAPRAIIPKFLQPVTSMGLEHLAGQANMQQQALAGGXLQQPIAQWQQQSLPHLTIQAITTQQQQQFLPA

SEQ ID NO: 230694 - protein, 136 aa, Zea mays
  unsure (1)..(136): unsure at all Xaa locations
  Clone ID: MRT4577_141989C.1.pep
RKCLSQGTGCAYLAATSSCKPGEDQSVDIHGLAKAAEIGVPFRVYEELPYDNKQCAPYMPXYLQNVTAVQEPQTAEEYKKGGERAANVLLSKLKDLQCFVGXTMNDDASVVFXYYKDGATNPTCLYFSHGLKEIKC

SEQ ID NO: 230695 - protein, 105 aa, Zea mays
  Clone ID: MRT4577_14198C.1.pep
SPPWLPLSSAPFFIARSHNFGRRERETEGEIGGRPLPKARETAPRGEGGRLYAYGRSDMRETLGIRISHIAEQVIAARTRDVLPRSRPLARWPPDQRIGPEGGAP

SEQ ID NO: 230696 - protein, 54 aa, Zea mays
  unsure (1)..(54): unsure at all Xaa locations
  Clone ID: MRT4577_141990C.1.pep
PVRKXTPGRRAHYLFGRPPKTTTGGHREGQGRPPAKTARGEQRTHGNDQPRGQA

SEQ ID NO: 230697 - protein, 41 aa, Zea mays
  unsure (1)..(41): unsure at all Xaa locations
  Clone ID: MRT4577_141991C.1.pep
EFKFRCWQGSLKPPQLPQGRGPPGLTRSSRPSVRNSGAXSA

SEQ ID NO: 230698 - protein, 43 aa, Zea mays
  Clone ID: MRT4577_141992C.1.pep
VVQGEEGCLRSCQKSSFHASFFVVLVWCMRQNAHSVGNGCSGC

SEQ ID NO: 230699 - protein, 35 aa, Zea mays
  Clone ID: MRT4577_141993C.1.pep
RRAACPASRSCRRRRRRRSPPCSRTPGSRTPPTAR

SEQ ID NO: 230700 - protein, 77 aa, Zea mays
  Clone ID: MRT4577_141994C.1.pep
LNPDRSKNLKRLPSICSKIHEMAVLWAAFRARDLHPRFGLFPTQGDNNLKKKSSTQLTIGCLYPIFVQTIFLILNTF

SEQ ID NO: 230701 - protein, 527 aa, Zea mays
  Clone ID: MRT4577_141995C.1.pep
MDGQVETFVGDEEGGSPQVPYDGEQPTLYDSVAKQYSEELGDQYNEQPRAQYDEGSGNPYNDYEEQANLYSEETGNRYNEDPADSYQEEQENAFSGGINQQDNLQVNNVDDNKWPGWPGESVFRILVPAQKVGAIIGRKGEFIKKMCEETKARIKILDGPPGVPERAVMISAKDEPDAPLSPAMDGLLRVHKRITDSSDGESSQPQRSAGNIGPTRLLVPSSQAGSLIGKQGATIKSIQDSSKSIVRIVENVPPVALNDDRVVEIQGEPLGVQEAVELISSHLRKFLVDRSVLPLFEAHMKMHGMPREQPVPPPQHWGPPQTWIRPPNIPPGGPGFGGNPQFMHPRPQDSYYPSPDVPHMEKQPHYGISAYGREAPPSGASATGNQPPSHAGSQVAHDMHIPLAYADAVIGAAGASISYIRRHSGATVTIQESRGAPGEMTVEITGTAAQVQTAQQLIQNFMAEAAPPPPGPAPASNPPAPPVDPSYGSYPPPYGAAPSYGSSAAAGPPQYNGGNYGGPTYPPSYGY

SEQ ID NO: 230702 - protein, 96 aa, Zea mays
  Clone ID: MRT4577_141996C.1.pep
HEERHLNILAFWIIESRNPQTFSMGRKQKPKNRFYKASVSHFSPQPYSMKARGRAETHPFGFPPINPFGEGGGAKSQRDVEGTMRPRHLSRTKKPG

SEQ ID NO: 230703 - protein, 132 aa, Zea mays
  Clone ID: MRT4577_141997C.1.pep
EKNRAPPRPRKGAKNTANTKLGENTNKQRKKGHKKTKKAGKTKANTQQNAQKRSAPPAAERPGHPKNQPAAKKGRTKNANRKPPRTGPEKKQTAMEKTGAPPQGKETPPGEKKDGNPNLRAGEGDRPENLGP

SEQ ID NO: 230704 - protein, 86 aa, Zea mays
  Clone ID: MRT4577_141998C.1.pep
HCCNKTSAGTRKPPPRTGWLWFIPPAATSTPRSVPSTKGVTAKLLLLSSWSHWPTSPKNAGPLYQDQVGSSAASPPFLEAVRYSYI

SEQ ID NO: 230705 - protein, 83 aa, Zea mays
  Clone ID: MRT4577_141999C.1.pep
AFSNAWLIDRFQMSVRAQTGFMESWRFFLFPKYFHAMGGRREGTVSSFIVVLDRSCVFHKPVVLTCMWWTRLTLPCLWVFIMR

SEQ ID NO: 230706 - protein, 110 aa, Zea mays
  unsure (1)..(110): unsure at all Xaa locations
  Clone ID: MRT4577_14199C.1.pep
MTYTSLHDQDSTAPYGDMIWDIIXSRFDKKGLYLNAMKFMNADTPLXHEHYAXDLFHYPFFPGLVEHVISPPAMAMVRHRKDLVVADRRIVVCTYPCEPLPVTIHGDYAP

SEQ ID NO: 230707 - protein, 182 aa, Zea mays
  Clone ID: MRT4577_1419C.1.pep
RRCRTSKQTTTLTRSAGARRTPARLPPRCRRSTGAGAGTTAKTPTREPNPLQGSAYSWSRACASSVAAAPRSTAKRAASPSLERGRRAPPSQHGRASVRARARRRRLATEGECGHRAGRRCPAGEHPGRTADATASRHKRAGKDRRRYDRRAAAAVSQQAMRASRLRSRPNTSGYSSAPIRN

SEQ ID NO: 230708 - protein, 61 aa, Zea mays
  Clone ID: MRT4577_141C.1.pep
MGRAPSGAWNMALLGLAVAVVLAVAAEARSLEKQNLCGGCGLGGGGGYGSGGGFGHGVGFG

SEQ ID NO: 230709 - protein, 64 aa, Zea mays
  Clone ID: MRT4577_142000C.1.pep
AVLFYGFRFGAEVVNCNVFEVGLFWPCFAVKCCQCRNCGLVLINKSIGPIGQLLRKKKKKKRPL

SEQ ID NO: 230710 - protein, 80 aa, Zea mays
  unsure (1)..(80): unsure at all Xaa locations
  Clone ID: MRT4577_142001C.1.pep
ILSLIADLTEDGQGXATVXAVEGRAAFANWLKRPDCSAHMLSDIDWCCQDKPWRWCYMMXRRFCELCEAIGTEPTRGDLM

SEQ ID NO: 230711 - protein, 63 aa, Zea mays
  Clone ID: MRT4577_142002C.1.pep
SGGRGVYISSRKKNRVQAGIKPDMPLVSTHHRLRRDMCGPSGQNLVPRVCRAGQAPKQVVSGV

SEQ ID NO: 230712 - protein, 197 aa, Zea mays
  unsure (1)..(197): unsure at all Xaa locations
  Clone ID: MRT4577_142003C.1.pep
MGRLRLGGISGRNPQRATPPPVTPPGTPHRSRSSPRGSAARXSPRGSPQAPASGPSEAVPAPLARPTPSRAPPPXPLPPPPLPLRXPFAKPGCPPXPALSPVSFLDVIPFVWPPRFAPPASRVMLGGRCRRAPFSPSDLPRPSPPPPPPPPSQGTPGRPTGPASGNPARPPGPNQKTKKKKKKKKKKKKKKKQQKKK

SEQ ID NO: 230713 - protein, 92 aa, Zea mays
  Clone ID: MRT4577_142004C.1.pep
MAYIMPRILCWRRVCRPILSIMVDLGQCTHGSGRLSTRASPQFSSRAACRPASFRIGRTMVQGIVYAFSSSVAARVPLSLLVVRGDLAPSEP

SEQ ID NO: 230714 - protein, 89 aa, Zea mays
  Clone ID: MRT4577_142005C.1.pep
CSIHNLCILCIGHFLGALWHEYPLNLVRGIHLLLPLCSCLFSSWRSLTVQKGRRICPRHRYTPVHGTPGPVSPLVHEMEAERWSAPAAV

SEQ ID NO: 230715 - protein, 75 aa, Zea mays
  unsure (1)..(75): unsure at all Xaa locations
  Clone ID: MRT4577_142006C.1.pep
NIVQKGDTXGDGTCGNGCDTLALLKMVADETGRGRVYGMDIQDSAIENTSSFLKMAVDDERQVCVCTMRFLPNFP

SEQ ID NO: 230716 - protein, 153 aa, Zea mays
  unsure (1)..(153): unsure at all Xaa locations
  Clone ID: MRT4577_142007C.1.pep
ANDQRIARGGETWNLGLRAFDQPEYTDVFRXIVTCVFERETGIXLTYLHTFNTHHKLPDLIRLRDPNDQVTLEPXTKLLIDXKDICLYVCTQVPNYRNNXLYGTSSIERXMIEQSIXADAYNLTPSNFELVLQIEYAPHLTYLGLHNDHDTYG

SEQ ID NO: 230717 - protein, 111 aa, Zea mays
  Clone ID: MRT4577_142008C.1.pep
SQLVPSWSPPSILKGYTFAWEPPPPLYRWRVLFKRCWSCPPNWDSGNFSLSGVRFTPVGNRPKKRGKTMVYVFPGNNYSEPSLLKPRQRFIRGYVLLCKQSSPRLEISNCV

SEQ ID NO: 230718 - protein, 83 aa, Zea mays
  Clone ID: MRT4577_142009C.1.pep
VNPFRDRRHRGISHPVQILLGDHHGRPVALHIQDAPARDVAAPIDLHDGYPRGSGRLTTSCSLPSFIRTAASSGKYSAELALV

SEQ ID NO: 230719 - protein, 64 aa, Zea mays
  Clone ID: MRT4577_14200C.1.pep
MAVMEKLKIFVVKEPVVAASCLIAGFGLFLPAVVRPILDSWETAEKVPPPPLNDVVAGVTGKKK

SEQ ID NO: 230720 - protein, 70 aa, Zea mays
  Clone ID: MRT4577_142010C.1.pep
SPRGCQDLIWATRAFSASCTLLCSVRTTQASQTAVSSPWSLSYFRQVTNVPSVTTYSILDVFAMGVYKVK

SEQ ID NO: 230721 - protein, 74 aa, Zea mays
  unsure (1)..(74): unsure at all Xaa locations
  Clone ID: MRT4577_142011C.1.pep
MAGGNELIEVMFRLFDCTDIIPTNYDPGSTVSSLKDFILTRXPQNNXITPKTVNDSNLINALMILXNNLTLSKS

SEQ ID NO: 230722 - protein, 70 aa, Zea mays
  Clone ID: MRT4577_142012C.1.pep
PHVILCLCTYPGIDRPRTIVVCDISRPFFITTQCVRGNSIYSVLVLCTVISIVGDFVNITGVSLESPNWY

SEQ ID NO: 230723 - protein, 82 aa, Zea mays
  Clone ID: MRT4577_142013C.1.pep
YQMEPPSIIASISSSVRGLRLGRSEAGPPEHEGRVLVCGLRRRWRGWRWGFEIPLGEPDQRDPRHLLVRIGATEFTLLTSSS

SEQ ID NO: 230724 - protein, 118 aa, Zea mays
  unsure (1)..(118): unsure at all Xaa locations
  Clone ID: MRT4577_142014C.1.pep
IXGVGGVPGISHYQNWNTRKAKKGRRKQNIFFNPFLYTDDDPGVFHVWAISFGGFSLFFSPWTHRQATEVTGTSPTHLTWFIIILNDEHKKERNSVIMGTGPSGCPGQAQATRSIRSA

SEQ ID NO: 230725 - protein, 124 aa, Zea mays
  Clone ID: MRT4577_142015C.1.pep
FTRGRPGQPSSGEHEDPVSSARRGAAAPGFFTLSFRSATHTFGEGEEEVSKVNSVAPIRTRKYAADPSDQVPQAESQSPISIRASGVATCRPARDPHVPVSWGAPSDITSYELEILGTSIRLYA

SEQ ID NO: 230726 - protein, 48 aa, Zea mays
  Clone ID: MRT4577_142016C.1.pep
RGSFSSIETIAYLGLIAHLILLVSTTGRDRLLRMWWRHRLLRRHSSTI

SEQ ID NO: 230727 - protein, 105 aa, Zea mays
  Clone ID: MRT4577_142017C.1.pep
ILLLQFGRGDAADPSDQVPQAESQSPISIRARCSLLVTPQYPPLLYGPLVQFVRGFLSVFLVFLDLIFVHPVVTAASQPADQHATLMFRLAGGLHLISPHMNWKF

SEQ ID NO: 230728 - protein, 131 aa, Zea mays
  Clone ID: MRT4577_142018C.1.pep
SGSPSGISKPHLHPRQVLPFGYPQYSPLLYGSLVQFVRGFLSVFLVFLDLIFVHPVVTAASQPADQHATLMSRLGAKAEAPSSGEIKNYRFRSDVPCPPSHTAVGGPASLLPKRKPLTEEEIEAIMLGGSI

SEQ ID NO: 230729 - protein, 140 aa, Zea mays
  Clone ID: MRT4577_142019C.1.pep
AIKATPGAPPLVMPKNTRDRGQPTVWAAGAQGETRGQQHARIGTAFNQPIILHKHQRKLSAPGRGGGPQANKTGISGVGETHPNRQKKKKKNGQKEATSEKKRGSKDFLLLNEKRTGVIGGSWPPTLQNFGGNPQKSDRG

SEQ ID NO: 230730 - protein, 80 aa, Zea mays
  Clone ID: MRT4577_14201C.1.pep
ILRVCKIRSFFTGPLPPPPNSRIRLPKPNSICVAVQSAHQKYPRVQPLEPLCANSRTLSWVGSQQGTTTLTMGERHTHYG

SEQ ID NO: 230731 - protein, 95 aa, Zea mays
  Clone ID: MRT4577_142020C.1.pep
MPRIPLIRFPKRNLKAPSPSAPAASQPADQHATLMFRLGAKAEAPSSGEIKNYRFRSDVPCPPSHTAVGGPASLLPKRKPLTEEEIEAIMLGGSI

SEQ ID NO: 230732 - protein, 197 aa, Zea mays
  unsure (1)..(197): unsure at all Xaa locations
  Clone ID: MRT4577_142021C.1.pep
YPKAYRPSHADATYDFKYGVRAVQGGGRSSARETIGRVAAGALAKKILKLKSGVEILAFVSKVHQVVLPEDAVDYDTVTMEQIESNIVRCPDPEYAQKMIDAIDKVRVRGDSIXGVVTCMXRNVPRGXIXSPVFXQLEAEXAKLCFPPPAARXEIGSGXAGTXTTGSEPNGEFPYGXGXNVRXRXNRPGGXPXRIQK

SEQ ID NO: 230733 - protein, 84 aa, Zea mays
  Clone ID: MRT4577_142022C.1.pep
GPRFLLKFVIRARFLLWIIRVRCLELRGNIDPKCWSRCERGVNHAWLEGCMRKALQYHLTHSKDISRGQFHWQGEPFNSSKAGK

SEQ ID NO: 230734 - protein, 95 aa, Zea mays
  unsure (1)..(95): unsure at all Xaa locations
  Clone ID: MRT4577_142023C.1.pep
LACAFYKALGYSVGKSLVQEDKLRSRMLTLFARANAXGVLLLLATDIXLSGQVATYADSMIVPATAMPDDYTSLDVKPDASNTFTFTLDYPMTDT

SEQ ID NO: 230735 - protein, 91 aa, Zea mays
  unsure (1)..(91): unsure at all Xaa locations
  Clone ID: MRT4577_142024C.1.pep
MTYNLPAMGANTLCVLALIALLARATKAFIIEQCSLATRSTITQVPPLVTSTGXEQPPVHDYRLQHAIRASVLQXLISQLHQQLLVELKLQ

SEQ ID NO: 230736 - protein, 580 aa, Zea mays
  unsure (1)..(580): unsure at all Xaa locations
  Clone ID: MRT4577_142025C.1.pep
LAGRLLDDTKILNLEKLTWDSAPPKVCPSPNGCSMKLPACXVPWGNSVILVGGKTEPASDHLSVWSANTETELWSLIEAKGDIPAARSGHTVIRAGATLILFGGEDTKGKKRHDLHMFDLKSSTWLPLNYKGTGPSPRSNHIATLYDDRVLLIFGGHSKSKTLNDLYSLDFDTMVWSRVKTHGPHPSPRAGCSGTLCGTKWYIAGGASKKKRHAETWVFDVLQCKWSVCVVPPSSSITTKKGFSMVPFYHKDKIALIAFGGNKKEPCNKVEVLVVLQNEHSFSWRSAPEVDTMVYEYSPSNKELADHLHKCAPLYSNSSIARHSLTSVIEHPPRREPLSESLLKQSSLGTSLHTQLDHAEECSLGQKLQKPIDDDRYDDVDDSSSXAKIALQKXALQQKDRAWFSEWRGKHGDWRIKSEKDSXRCSSDVGQSHLYNTKIADLIRRNTTLEDQLATALASKDQLDKSLASVIHSRGQLEKMLANKDKEAEMLKEKIACLELAQEESNSLSNTVHADNVRLEREVAFLKAVTGETQKELHSTRRVLAGEQSRAFQLQVEVFHLKQRLQILEGRSGTPNKQPL

SEQ ID NO: 230737 - protein, 66 aa, Zea mays
  Clone ID: MRT4577_142026C.1.pep
KVLQPGTRVFQLGSLCESNAFSSCCPGNIKSGIVKSKGTLQGDSVGVRPSCYRNFSSPPAWAKSYM

SEQ ID NO: 230738 - protein, 51 aa, Zea mays
  Clone ID: MRT4577_142027C.1.pep
TLVHLDPLLGHRAWPIHVGDAVAAWVLVWLNVVVVHVHHARRWTSARPWAV

SEQ ID NO: 230739 - protein, 173 aa, Zea mays
  Clone ID: MRT4577_142028C.1.pep
GGGGPVFLYLKPTGGQNQTKIGGLKKNGEPPWGPKTGKSPGWRGQKRLPKRSRFVWRVPGGGLLAFWVPGARGFLGFGRGVPPQPPGFWGGIGTIWGGTAPFFGGETPPPPVHGRVDGIRAQQKDGVGREFPGRFDLWAPRPLWVWKEMFSFLCPKIGRGKNWSGKGWFLLWG

SEQ ID NO: 230740 - protein, 71 aa, Zea mays
  Clone ID: MRT4577_142029C.1.pep
MTQKCVVFIGLLRCFLNKRIYSSVGVFANTEPLVRWFSKRFVHGLIHLEMSLEKLLLSNSMCNITPPCGGE

SEQ ID NO: 230741 - protein, 42 aa, Zea mays
  unsure (1)..(42): unsure at all Xaa locations
  Clone ID: MRT4577_14202C.1.pep
KYTFIPNILKFSLTXXXSXXXIXXXLXXHLISCVEFREDLIS

SEQ ID NO: 230742 - protein, 105 aa, Zea mays
  Clone ID: MRT4577_142030C.1.pep
LVLVLLVPASSGLLPAPLARALSSGSSSCSAAPPALFLGLCAASVLGFWRSRGFVARLVGAWCLSVWLGAPGCFGSCAAAPPAPARVCAPGRGRAWVSGRGLRGV

SEQ ID NO: 230743 - protein, 267 aa, Zea mays
  unsure (1)..(267): unsure at all Xaa locations
  Clone ID: MRT4577_142031C.1.pep
MPATASPPPLLLAAALLLSAALLCSACPVPLPKQTADNSPRLQRAYVALQALKRAITDDPKNLTGNWCGPDVCAYFGVFCAPSLDDPCARAVAGVDLNHGDLAGTLPFELGHLTDLAVLHLNSNRFAGGLPDSLPKLSLLHELDVSNNLLSGGFPQHILCLPNVKYVDIRFNNLCGPVPPAIFDKKIDALFINDNHFDFELPENFGNSPASVIVLANLRLRGCIPASVGRMGGTLNELVMLNSGIRSCIPPXEIGWLRELPVLDVSF

SEQ ID NO: 230744 - protein, 103 aa, Zea mays
  unsure (1)..(103): unsure at all Xaa locations
  Clone ID: MRT4577_142032C.1.pep
CRWGLXARVALCSRPFLLWGGAPFVFFVALRPCPRLXLAWGWLPPPPPLGWPRCRRGCLPXGFRFGPSCGGLFGCFLFWWFFWGWPPPWRXFSCPPPPPPGRP

SEQ ID NO: 230745 - protein, 51 aa, Zea mays
  Clone ID: MRT4577_142033C.1.pep
GQAVKGKQLLPVSLGKKKTPLGPKKQTPFPPGWADLLKQMAPQVFPLENGQ

SEQ ID NO: 230746 - protein, 68 aa, Zea mays
  Clone ID: MRT4577_142034C.1.pep
IVQSAPRSLGADIDLSFETIIMDWIIASFRDISCVLLLLSQIIKNRVQVTKTAEKDSCSRVCLVFFCA

SEQ ID NO: 230747 - protein, 165 aa, Zea mays
  Clone ID: MRT4577_142035C.1.pep
MNKTSAFKMPSRTELWFRLRGYEQPPTSGGPRSNEAPTGRTPLQPCLRPRRRSRGEDKYKEPEARSADGGGDPIGDGDFSSRLHLGTNDRGRQPIGRSPLGSSWTSGAPTSARRRCTGAKAGQPQNTNAALAARGVLSGPPVRTARQSPSRREGAPRPEPTSPTR

SEQ ID NO: 230748 - protein, 701 aa, Zea mays
  Clone ID: MRT4577_142036C.1.pep
KTIVDLREEDVKDDLYLSAVQEAVSSGKIEVVNMLVEIGTAPSAEQVKQFAALVSDGAKKPIYLHSKEGVSRTSAMVSRWKQYVTRSERLAVQNHYINGNGKVLTSDKTKQHTGSPSSSMNRTEIGMVTESDRTMNNGESCEIDIEMALHNLEVTNALKYDQRTQQAEMLGTEAERLSNCKLERNPLKAQFTSGDICSRKEMTKFFRSKTVYPKSVLNSRRRSSSLVIRRKQNLCTERSGTNDYEAAEFAVLRSSNGKSFDSDYILSVASGITDGKPSNNEASLIEEKEREVSVATIDTRASANSSNRKVQVGSQESAEKNSTPYLERNKSDNVDRNMCASATGVVRLQSRRKAEMFLVRTDGFSCTREKVTESSLAFTHPSTQQQMLMWKSPPKTVLLLKKLGDELMEEAKEVASFLHHQEKMNVLVEPDVHDTFARIPGYGFVQTFYTQDTSDLHERIDFVTCLGGDGLILHASNLFRTSVPPVVSFNLGSLGFLTSHNFEGFRQDLRDLIHGNNTLGIYITLRMRLRCEIFRKGKSMPGKVFDVLNEVVVDRGSNPYLSKIECYEHNHLITKVQADGVIVATPTGSTAYSTAAGGSMVHPNVPCMLFTPICPHSLSFRPVILPDSARLELKIPDEARSNAWVSFDGKRRQQLSRGDSVRISMSQHPLPTVNKSDQTGDWFRSLIRCLNWNERLDQKAL

SEQ ID NO: 230749 - protein, 283 aa, Zea mays
  Clone ID: MRT4577_142037C.1.pep
MWHLKLTALIYGSLFFMHIPYARGSDLNTDKQALLAFAASLPHGRKVNWTSTTQVCTSWVGITCTPDMKRVREVRLPAIGLFGPIPSGTLSKLDALEVLSLRSNRLTINLPPDVPSIPSLRSLYLQHNNLSGIIPSSLSSSLTFLDLSYNSFNGEIPSKVQDITELTALLLQNNSLSGPIPDLRLPKLRHLDLSNNNLSGPIPPSLQKFPATSFLGNAFLCGFPLEPCPGTPPASPSSPSSQNAKRSFWKKLSLGIIIAIVAGGGVVFILILILLVCIFNPPP

SEQ ID NO: 230750 - protein, 83 aa, Zea mays
  Clone ID: MRT4577_142038C.1.pep
MTSHARVRKLGIRLEKIPDEARRNAWLSFDGKRRQQLPRGDSVRIFMSQHPLPTVNKSDQTGDWFRSLIRCLNWNERLDQKAL

SEQ ID NO: 230751 - protein, 252 aa, Zea mays
  Clone ID: MRT4577_142039C.1.pep
CLCFSDLHERVDFVTCLGGDGLILHASNLFRTSVPPVVSFNLGSLGFLTSHNFKDFRQDLRDLIHGNNTLGVYITLRMRLRCEIFRSGKAMPDKVFDVLNEVVVDRGSNPYLSKIECYEHNHLITKVQGDGVIVATPTGSTAYSTAAGGSMVHPNVPCMLFTPICPHSLSFRPVILPDSARLELKIPDEARSNAWVSFDGKRRQQLSRGDSVRISMSQHPLPTVNKSDQTGDWFRSLIRCLNWNERLDQKAL

SEQ ID NO: 230752 - protein, 441 aa, Zea mays
  Clone ID: MRT4577_14203C.1.pep
HTSNSLFICCCFPGTSAELYCHYLAHSYYFIMGLKDEFQKARDWVAESLDFDKDYDASVFETTIRVVGGLLSSYDLSGDKVFLDKAKDITDRLLPAWDTTSGIPYNRINLAHGRAHNPGWTNGDSILADSGTEQLEFIALSQRTGDPKYQQKAENVIKQLQKIYPSDGLLPIYINPHSGTASYSTITFGAMGDSFYEYLLKVWIQGNKTEHVKHYRQMWETSMEGLLSLTKKTTPSNYYYICEKNGGSLSDKMDELACFAPGMLALGASGYGPEKSEQIMNLAKELARTCYNFYQTTPTKLAGENYFFHTGQDMGVGTSWNILRPETVESLMYLWRLTGNKTYQDWGWDIFQAFEKNSRIESGYVGLRDVNTGEKDNMMQSFFLAETLKYLYLLFSPPSVISFDEWVFNTEAHPLRIVPVNDNKGIGTPVRQFGRKQGKPE

SEQ ID NO: 230753 - protein, 136 aa, Zea mays
  Clone ID: MRT4577_142040C.1.pep
PAGFAILPVHFNYWAYIFPAMICATLGIDITYNVSNIFITTSLPKARQGLAGSFMNSLLFLGIAVFLSFADLAVSETEERGQRGSYKVAFWLATALAGAGVIIMFLGVKIGKAKSDLTIEEREELENELVRRNTNE

SEQ ID NO: 230754 - protein, 106 aa, Zea mays
  Clone ID: MRT4577_142041C.1.pep
VASAVQPFVGCDEGYVSVLVRLSRDTFWVVPVWKRSLCLLTWMLQVMISGECGARSISTDNGVEELLASFRVGERACEVIRPLPHCGQNPSQHNSDIWITLFSRRI

SEQ ID NO: 230755 - protein, 84 aa, Zea mays
  Clone ID: MRT4577_142042C.1.pep
AFGDLCSVKSFMRIPGGDYNPGHALGAWGPDDNATKGKPPLNALLRRKVRNGWVGTCCGLGGQRRCVAEVGSVMAVQARWIGTF

SEQ ID NO: 230756 - protein, 57 aa, Zea mays
  unsure (1)..(57): unsure at all Xaa locations
  Clone ID: MRT4577_142043C.1.pep
FCWPPFPRMKIQSPPPENLGGRVPTGPFSFLYNQKIXGRSFYIKRDLVGPLSLNEQE

SEQ ID NO: 230757 - protein, 44 aa, Zea mays
  Clone ID: MRT4577_142044C.1.pep
TLKKTKLLTTWLNIKDHRAPTVLQYPSLTQVSGCNEVRLSLEHV

SEQ ID NO: 230758 - protein, 32 aa, Zea mays
  Clone ID: MRT4577_142045C.1.pep
QAPISASRARAGVTYALQLAQLTTIHLKEAVQ

SEQ ID NO: 230759 - protein, 106 aa, Zea mays
  Clone ID: MRT4577_142046C.1.pep
MVVVVVVGVGVVMIMRRHGWDWELGGGIFFFFGLPITCADIFELSLLMVVLRMFGRLTQLGSFLVTPFIFLLVSPLPFFLSGRLRLAHGHWSLTSTQSTGRGSTST

SEQ ID NO: 230760 - protein, 100 aa, Zea mays
  Clone ID: MRT4577_142047C.1.pep
KAALAFRMFSSTSSVWTLSIPSLSTLPISYSCWPAFLPLRQRTWPITTLIISVFALTMAQEHCSNAISVSVECCSICWPLLSTSGNLAVTNNSVLLVLET

SEQ ID NO: 230761 - protein, 162 aa, Zea mays
  unsure (1)..(162): unsure at all Xaa locations
  Clone ID: MRT4577_142048C.1.pep
MDEIKIVSNMWLSQLLLLYXPCANFISXDVEAXSSHHRSQPYRTXPGYHFSTLSKMWMNXPNGPMIYKGIYHLFYQYNPYGAVWDVRIVWGHSTSVDLVNWISQPPAVNPSQPSDINGCWSGSVTILPNGKPVILYTGIDQNKGQVQNVAAPVNISDPYLRE

SEQ ID NO: 230762 - protein, 81 aa, Zea mays
  unsure (1)..(81): unsure at all Xaa locations
  Clone ID: MRT4577_142049C.1.pep
MASFSPGRAPARPPAPPPPLPAPPRPLRPPPAGRRRPPXAGPRGSRXPXPXPXPCPPXPXARPPRPXPRPXPXPRPRRPRP

SEQ ID NO: 230763 - protein, 107 aa, Zea mays
  Clone ID: MRT4577_14204C.1.pep
DRPIPGRPTVRPGEPRPRATKTILNGPQRVGSCRTPLAFLPHPCGPPSRSRGLTLQPLRADLARWTCWHRGVGAVGPTYLIACGTEHRIRARVPGAPLVPRQARAHP

SEQ ID NO: 230764 - protein, 95 aa, Zea mays
  unsure (1)..(95): unsure at all Xaa locations
  Clone ID: MRT4577_142050C.1.pep
ECLGLPTEHQDAYQFGSILVHAKNLVXERMLLXIHRIIDEDEHFRHRARLINALMAEAKPYDILLFPNERHMPLRLGDRDLHVGEVLWXFCERSL

SEQ ID NO: 230765 - protein, 915 aa, Zea mays
  Clone ID: MRT4577_142051C.1.pep
MAAWPSDSAPSSVSVWHLRSFRPNLCCLLPRPGLRAMAAEQTAEQFRGQARLPHFASPRRYDLRLTPDLPACVFTGSVAVSIGVAAPTRFLVLNAAELDVATGGVSFAPQGSDQVLQPLEVTNVPEDEILIIRFNEVLSIGEGTLTIAFKGTLNDKMHGFYRSVYELNGEKKNMAVTQFEPADARRCFPCWDEPAFKAVFKITLEVPSETIALSNMPVIEEKVNGPTKIVYFQESPIMSTYLVAVIVGNFDYVEDFTTDGTRVRVYTQVGKSAQGRFALEVALKTLVLFKEYFAVPYPLPKMDMVAIPDFAAGAMENYGLVTYRETALLFDEMHSAAANKQRVAVVVAHELAHQWFGNLVTMEWWTHLWLNEGFATWVSYLAADQFFPEWNVWTQFLEESTIGFKLDALAGSHPIEVDINHVDEIDEIFDAISYRKGASVIRMLQNYLGAEVFQNSLAAYIKRFAYSNAKTEDLWAALEEGSGEPVRTLMHSWTKQQGYPVITVKLKDGKFQLEQTQFLSSGSTGVGQWVVPITLCCCSYSRQAKFLFHGKQEDFDLSASGFTDCQKKDGFWIKLNVNQTSFYRVSYDEELAARLRYAIETNKLGAADRYGVLDDAYALCMAGKQKLVSLLHLISVYKDETEYTVLAHIITTSLHIAEMMVIAAPEELVHLKKFLIDFLEPFALKLGWDAKSDEGHLNALLRGTLLTALAELGHEATINEAVRRFNVFLEDRETPLLPPDVRKAAYIALMQTVSKSNKTGYESLLRVYRETDLSQEKVRVLGSLASSPDHDVVREVLNFILSPEVRNQDAIFLLRGVSSGAHEVAWQWLKENWDYILGAYSGTLLTYFVNITVSPLATDEHGDEAEEFFKSRTKANIARTVRQSIERVRINAQWVKNIKAEADLGNVLKKLAYKH

SEQ ID NO: 230766 - protein, 83 aa, Zea mays
  Clone ID: MRT4577_142052C.1.pep
YAPANVRCHTRALPRFSCAGFCCIHYCINSSCRLSHASLPRVRPHSPLRSLHHRTLSRQLRSHPQHPCNCTHYRNNCTPICHL

SEQ ID NO: 230767 - protein, 100 aa, Zea mays
  unsure (1)..(100): unsure at all Xaa locations
  Clone ID: MRT4577_142053C.1.pep
GAVPVAWARLXPPGRSRSCGGRLPCGSRRRVSRSLLPLFVAPRVSSLVVSGSPFALPPPCLPPACLLGGLLGVVSCLPPVAPFSVPCPASRCSSRAFRSL

SEQ ID NO: 230768 - protein, 62 aa, Zea mays
  Clone ID: MRT4577_142054C.1.pep
PELKSFLGGRKKKIQLRSLKKKTFPKQKKRKILLFVHWAPIPPNLKSFLLYWQGGPNLGWGR

SEQ ID NO: 230769 - protein, 159 aa, Zea mays
  Clone ID: MRT4577_142055C.1.pep
VFNQVWYTVLIKAGETSKPIEILGNQIRHPEGAPFLWRLLDKSYSLAGKSPYAPVASKKANASQSSYFHELISCSIMNSLVSASSSNISFTDGSCQYAPYQVYSQCTTPTTAACRAWCAPPGSWISPPATSPSRPPSPPTSRAPAPLLTTDTETLTAEG

SEQ ID NO: 230770 - protein, 99 aa, Zea mays
  Clone ID: MRT4577_142056C.1.pep
SETVSTRLLDRRMSRGSCGSLEQVDPPSRAGMPSACKLAEATRCCCRTFASLAEVFVQRRSRETLVIFFTQAGKVAQCVVGGGEGGSVVGGRGDFSSSA

SEQ ID NO: 230771 - protein, 753 aa, Zea mays
  Clone ID: MRT4577_142057C.1.pep
QLALVLLVSACPCALGLSTPVGRLGALLTAARTGLLIKGGDVLETLARIKIAAFDKTGTITRGEFSVEEFQAVGERVTTPQLLYRHEGIESRSSHPMASVLVDYAQSKSVGPKSDNVAEFQIFPGEGIYGEIDGEGVYIGNKRILSRASCETVPDMKDMKGVTVGYVACKGQLIGVFTLSDSCRTGSDEAIRELRSLGIKSVMLTGDSSAAASYAQNQLGNILDEVHSELLPEDKVRIVDELKAKHGPTLMIGNGVNDAPALAKADVGVSMGVSGSAVAMETSHITLMSNDIRRIPMAVQLARRTHRTIVVNIVFSVITKLAIVGLALAGHPLIWAAVLADVGTCMLVIMYSMLLLRSESNGGRKVKKCCASSQHGSHSHARKKHCVSHHCSDGPCNKSTAGCSKESPSAGKHACSDHGHAHTHCKEPSNHRPERHACHDHGHSHNHCKEPSSHVVTEKHVCHDHGNTHSHCEEAGNQLLLVESHGCNDHGHGHSHDRCKELSSPRFTSKHECHDHEHSHCKEPKTPCADSEAACHGHGHGHEHRHCEGDSHSHATGEHGCHEHDAHSHCEEHGHSDTAVEHACEHECHGEHQTVHAVETHHCHDHDHEHGQHELGEIEEPEKDCHDHSHHCCHEPHGKDKVAAEPVEEVTISIAALPKDEGHHHSEEQHNGEHCRKAKDCGGGGGAAPTDCAASKNCCGVKGGDACSSVQAARARETGPCCRSYVKCPRTAAASRSSCCGHSMLKLPEIVVE

SEQ ID NO: 230772 - protein, 152 aa, Zea mays
  Clone ID: MRT4577_142058C.1.pep
MYTVHPHAAATSVTLNCTEAPLECLPLCPGGGKACSEYALPPPPPIPVIPRAPVADRHAPVRLLLIISLLSAFLFLSLALSTLLLYRRRRLILRRRRRLAAAAAEGADDGGFGDEEEGGGGGGVVHHVWYIRTVGLDEATIASIAAVEYRRG

SEQ ID NO: 230773 - protein, 82 aa, Zea mays
  Clone ID: MRT4577_142059C.1.pep
RTLFFNLDPVATVASTSSILCDIRAIALYLYNGLYKGGGVLLPWNRSCHGPFLTMTLPNSLSDSWLVPPNIWITKKLNWNLY

SEQ ID NO: 230774 - protein, 86 aa, Zea mays
  Clone ID: MRT4577_14205C.1.pep
MVGLPPWALIPGYNWGGFSPEAPVGWGPLSGPLCFPRIQKFSNVNKNLESGLLFPPIKMFGGRILVLGGPKERGFGPPAPSKGFLG

SEQ ID NO: 230775 - protein, 69 aa, Zea mays
  Clone ID: MRT4577_142060C.1.pep
NGQKIKPFFPNRQHRTPLGKIGPHPFLSVWKTVSCSVAPKRNNFFLSWKKLGEKGCFGSGLNSHKKGEG

SEQ ID NO: 230776 - protein, 64 aa, Zea mays
  Clone ID: MRT4577_142061C.1.pep
PIHMPGKRETLLNRSVIRSITKQLFSHGTCRLQLQDNKVPDPITGLIIVDRLSYLNGTYFSFKN

SEQ ID NO: 230777 - protein, 116 aa, Zea mays
  Clone ID: MRT4577_142062C.1.pep
RPKTGVGFGNHPLRCPALQSGAGAPCLCVCPGGASSCSRLRAPIAPRRTHLVEHRWGGYTPRLWIHLARCYCCDCCTTNAMRLQRQENRPGGAAMVAACVSRNTVIDRGRPPTNEL

SEQ ID NO: 230778 - protein, 64 aa, Zea mays
  Clone ID: MRT4577_142063C.1.pep
WQFQHWVSFPSFLTVRNPKRGRAKAVPFCIIYGARGARGGLMTPVAVRSASYGVPPAKLKGGAL

SEQ ID NO: 230779 - protein, 122 aa, Zea mays
  unsure (1)..(122): unsure at all Xaa locations
  Clone ID: MRT4577_142064C.1.pep
TDKSGDKTGNKSGTQFAVAGAVLVVALLLTTSETTINCGLTCSHINSCLSYCLCYKRGTCSCCCRCCWNLKSNLKSAASRGADXTASXNCLKNVSRVNSGHNASNASKIRVKIRYNIRYSID

SEQ ID NO: 230780 - protein, 61 aa, Zea mays
  Clone ID: MRT4577_142065C.1.pep
LKHGYHARALPGGRPSIRSLPGGPSIAALLGTPYQIYIESPGLSIIEEAQASQYGHILWTD

SEQ ID NO: 230781 - protein, 120 aa, Zea mays
  Clone ID: MRT4577_142066C.1.pep
MVVWPCPACVGRPIGPAYVKDIFRQRPRGDVGARAAVHPDHYQTEEALDSVCRMLGWGSLAFAGRIRADTTPLGDLAAGEFVLFVSYLSCGLALPISLFFLLLEEEFGLQLQHLTPHSIL

SEQ ID NO: 230782 - protein, 60 aa, Zea mays
  Clone ID: MRT4577_142067C.1.pep
CLISARRLHRGPSLMGPGRTAAPDLPEKLARGDHDGHGALSQNGTGGLRQRHRREHKDEP

SEQ ID NO: 230783 - protein, 198 aa, Zea mays
  Clone ID: MRT4577_142068C.1.pep
RPGDVLASLTNGPASTLHPKQLPHVQSSSLLQPGCRLSMPPSPSTPTPLPSPARSRPVAVRRSPCQHGCFVDASPHTPLLCGGALQPRRSSCPCLAIVKLADAFALLPPSRSRLVSGLRGIDGQASATKWSSSLGSTKLKTLSICLVKVVHIATTAQEKTKSWKETSRSSRTTTSSRCGLAATPSQLPVKALSLLRFA

SEQ ID NO: 230784 - protein, 72 aa, Zea mays
  Clone ID: MRT4577_142069C.1.pep
AMCLLIYSHFARKIWYVQFLQRCEGIYLHYLYSNMNTRLVCHQHVVSLLHSMPLLHLDTLPVPAPVSLRLQP

SEQ ID NO: 230785 - protein, 97 aa, Zea mays
  Clone ID: MRT4577_14206C.1.pep
HLIIGMVNENNIMDIAGILISHVPKSDPEFASDLLGAVLAACGHNVYEMVVDFDWYVSLLVDMARTLHCAQGDEIGRQFVDLGLRVQDARPELVRLA

SEQ ID NO: 230786 - protein, 78 aa, Zea mays
  Clone ID: MRT4577_142070C.1.pep
FNLASSVPRRAQQPHQARPAAQPSALGACAWSSACAVLAPPSTITVSRSRFVSELRGIDDQAWRPSDRTLRVLRDRRP

SEQ ID NO: 230787 - protein, 110 aa, Zea mays
  Clone ID: MRT4577_142071C.1.pep
GLHRQLTGGCRQPTPRIRRSLGTPGSLLPRLRLLLSSGYNADNLHQTDAQGLQPCRTRRDRSLGRQRFVFDPSKLGNRSQFGEKACRRKTLAVSSAQRGMVSNEEEEGEW

SEQ ID NO: 230788 - protein, 110 aa, Zea mays
  Clone ID: MRT4577_142072C.1.pep
DTNWSGQQKFWTDMSNFRIHDGPPRNKDALDHLLRSGILIFCCSVMDKGFCVFLGFFPFLFGYTQLFLNIHSVGGNASYFPKNIAPKSSKLNSHNLLLGKEVNFYIFYIR

SEQ ID NO: 230789 - protein, 77 aa, Zea mays
  Clone ID: MRT4577_142073C.1.pep
SSSLSSRRLKTLSICLVKVVRIVTTAQEKAEPWKETSRSSKITTNSRCGLAATPSQLPVEALSLLRFASTLIYLLRR

SEQ ID NO: 230790 - protein, 86 aa, Zea mays
  unsure (1)..(86): unsure at all Xaa locations
  Clone ID: MRT4577_142074C.1.pep
IRLARGCAPFLINEVYADGSGTIDLPELLNLMARKMKDTDSYEELKEAFXLLVKDQNRFISSAEPPHVTTNLGXKLTDXEVDEMIL

SEQ ID NO: 230791 - protein, 61 aa, Zea mays
  Clone ID: MRT4577_142075C.1.pep
MDSRSAKLRWGRCLASGFLQLLTGAGPRHAELRAGEPREELRRQKRLVVPEDPGPAGLEVP

SEQ ID NO: 230792 - protein, 175 aa, Zea mays
  Clone ID: MRT4577_142076C.1.pep
GPSRPAGPGFLVSFSTNTESPPHHNSPSRCSPRYTASRRTTQEPSRTCGATPGASRCPRFILADVTPKLHQIARRSCPCGVRLAKSPSSIAMEFFVAVHILSSPSELRVENAIHFQVSRDRRSSVDDHVIKLSEFYEAEDPEHLFGEGCPHCNHCSGGDEVVEGDFQEFQDYDEF

SEQ ID NO: 230793 - protein, 83 aa, Zea mays
  unsure (1)..(83): unsure at all Xaa locations
  Clone ID: MRT4577_142077C.1.pep
ILLHVLERHGEKLXYSWPSVLHMLRMVTDASEKDLISLGFQSIRVIMNEGLATIPIQCLDECILVTGAYGTGGGRINIXLTSP

SEQ ID NO: 230794 - protein, 72 aa, Zea mays
  Clone ID: MRT4577_142078C.1.pep
LSSLSSMRLKILSICLVKVVCTVTTAQEKVKPWKETSRSSKTTTNSRCGLAATPSQLPVKALSLLRFASTLI

SEQ ID NO: 230795 - protein, 118 aa, Zea mays
  Clone ID: MRT4577_142079C.1.pep
PAGIFSPPRILLPGSIHQNRSSLSLSRRAVHLPELTATVRADSRPTVRRREGEIAVRFRASRNRRSSFGDQMIQFFEFYEIEDPEHLFGEGCPHCNHCSGEDEVVEGDFQEFQDYDEF

SEQ ID NO: 230796 - protein, 52 aa, Zea mays
  Clone ID: MRT4577_14207C.1.pep
INKRAQGIILMSLALISRHFAHQVGFRARVSKVDHTHYLLEFRLLPLGSARL

SEQ ID NO: 230797 - protein, 64 aa, Zea mays
  Clone ID: MRT4577_142080C.1.pep
GAHAHPYLKYNVPWGTGTKIPPLLTPLSRGYSFLKVFQTNFLFTPGGIFVNPNLLCAGGFHWPR

SEQ ID NO: 230798 - protein, 88 aa, Zea mays
  Clone ID: MRT4577_142081C.1.pep
ASRNRRSRFGESLVLRSNSSSSTRSKTLSICLVKVVHIATTAQEKTKSWKETSRSSKTTTSFRCGLAATPSQLPVKALSLLRFASTLI

SEQ ID NO: 230799 - protein, 138 aa, Zea mays
  Clone ID: MRT4577_142082C.1.pep
QKKGRLAMASSSKDASQDICKGNRFSFSSFFFCIMDMEDSGQFMQWAMATLQHDEDQAVDYPIDDGRGGATFPSLRALREASSQAAEMIQEPLAAANSRCAGDGGTAAAGNNISGTAPRRSSSGSAVIQPLRWNFGAG

SEQ ID NO: 230800 - protein, 124 aa, Zea mays
  Clone ID: MRT4577_142083C.1.pep
GVIVSSTGATIYQLYWDFVMDWGFLDLRSKNRWLRDQLILKNKPIYYASMMLNLVLRLAWAESVMKLRLGMVESRLLDFSLASLEIIRRGHWNFYRLENEHLNNAGKFRAVKTVPLPFRELETD

SEQ ID NO: 230801 - protein, 112 aa, Zea mays
  unsure (1)..(112): unsure at all Xaa locations
  Clone ID: MRT4577_142084C.1.pep
NQVMLLLCFCDVLRQKAFTYLLXXXXXXXXXXXXXXXXXXXXXXXXXXXXXXXXXXXXXXXXXQTSLMWERLTLSLFLIFYNFQEIYSRQTRIKIMLHIMLRTFVLFWACYA

SEQ ID NO: 230802 - protein, 58 aa, Zea mays
  Clone ID: MRT4577_142085C.1.pep
VIHTSVLQIFYFVGFGLFCLESLLSIWVIQQVYMYFRGSGKAAEMKRDATRGAMRAAF

SEQ ID NO: 230803 - protein, 89 aa, Zea mays
  Clone ID: MRT4577_142086C.1.pep
GRCPLETEVERGRSSFVCLFMYGAPTVCQAMLEIQWEQNQMCFLPSDSSGCRISPGTRIGWSHTNQGRGLFEGGTQSHVAEAKENEDIF

SEQ ID NO: 230804 - protein, 45 aa, Zea mays
  Clone ID: MRT4577_142087C.1.pep
RVIVNQLGGYNVLRYITNIIYDVDSVCDLSEQLGKLSLAFASTGA

SEQ ID NO: 230805 - protein, 64 aa, Zea mays
  Clone ID: MRT4577_142088C.1.pep
FLAIQARCALRQIKGSVRPGGAIKERRGLGGGGQGRWHALPSEACRRGGCHGGMKLKGVNRTGN

SEQ ID NO: 230806 - protein, 464 aa, Zea mays
  Clone ID: MRT4577_142089C.1.pep
PRTSRSEFGLKNKERAVSVLDSSTRRSAILDAHAEKIKLQIDEFSAELEVIQSSIETLRQKKLKMQRLESKHIDLDKGCTYSHATLSNCASNAFGDDLYGFREFTVLDMQSATCKFSESFRMWSQGRGCVYKGEIMNRTVMIYKLHCHSIESVRQFQQEVYILSNVRHPHLVTLVGACPEALCLVYEYLPNGSLHDRLFSRRSSRHLPWRIRARIVAEISDALLFLHSCKPQTIVHGNLKLENILLDTECHCKIADFGISRLFTGDVKDYPSGGSEPPKGSFPYADPEYKRSKVLTPKSDVYCFGTVILQLLTGRQEPARRLAGEVRCAMACGKLSSILDPAAGHWPMEVAGRLAELGLRCSEDRSRDRPDLTAETVRELEQLHLTREEEQAPSSFLCPIMQEIMHDPHVCAADGVTYEGRAIRERMELETGQGTAPLKLEHLSLTPNHALRFAIQDWLRRSCR

SEQ ID NO: 230807 - protein, 111 aa, Zea mays
  Clone ID: MRT4577_14208C.1.pep
FCSSINEVFFFSFWVFKGIVFVPPLPPTKKKKIFPRPLENLSKKWAPCKRSVEFFTRPNHHQQLGCSASPWITCVCEKKPSFWGVFPFSPLFFLIFVCCNTPLWLKLNPPV

SEQ ID NO: 230808 - protein, 109 aa, Zea mays
  unsure (1)..(109): unsure at all Xaa locations
  Clone ID: MRT4577_142090C.1.pep
CELPQPRRVASYDPKLSLLAAMAKNYPTVSAEYSEAVEKARRSSEPSSPRRAAPAHAPPPWHXRGRSTCLEDRVIRQMSIAELSRRTRAESRSLLEPSRDSNLSYADST

SEQ ID NO: 230809 - protein, 207 aa, Zea mays
  unsure (1)..(207): unsure at all Xaa locations
  Clone ID: MRT4577_142091C.1.pep
LGTSRPAGYCFGTVILQLLTGRQEPARLLAGEVRCAMACGKLSSILDPAAGHWPMEVAGRLAELGLRCSEDRSRDRPDLTAETVRELEQLHLTXGGTSTLLFPVPDYAGKYHRLAPLLTKYXVGCDDNKKLGAFLXLSLFCFGLQEIMHDPQVCAADGVTYEGRAVRERMELETGQGTAPLKLEHLSLTPNHALRFAIQDWLRRSRR

SEQ ID NO: 230810 - protein, 42 aa, Zea mays
  Clone ID: MRT4577_142092C.1.pep
KGVIRYSKPLSFFASRVFSIWQGGLLSLSSNIVSHSRSGSLR

SEQ ID NO: 230811 - protein, 56 aa, Zea mays
  Clone ID: MRT4577_142093C.1.pep
RHCVVFFLNNVTSVYTACPVRSNYTTIGEDAMCSWNFKFTALLPAILILIPEEPVR

SEQ ID NO: 230812 - protein, 63 aa, Zea mays
  Clone ID: MRT4577_142094C.1.pep
SSSPSPSPSTALSPSTTSATSTSSAAFLSSRCLLRCHLLRRSLVSFRHYSRFHLSECGPRNNG

SEQ ID NO: 230813 - protein, 44 aa, Zea mays
  Clone ID: MRT4577_142095C.1.pep
KSVYFSTYRRIRRNLSHLLTENYGSNEIRHHLVLSKKKKKRGGR

SEQ ID NO: 230814 - protein, 97 aa, Zea mays
  Clone ID: MRT4577_142096C.1.pep
LSPSHFSIPSVGSPIPMHCKASTCISAGDPLTIYEIVFDPTKAYYIHIRFVCTSLCHSDITFWKAIMAPVFPRILWHEAFRILDIVLEHLEGFAARY

SEQ ID NO: 230815 - protein, 411 aa, Zea mays
  Clone ID: MRT4577_142097C.1.pep
MEVSSRLQSLLRPFLLCRSRAAGMTLQTLALCSPPPPPRIPSSFLLRTRRLPPPFPHGGPSRLLFHSTFASVSPAPAPAPGRDHLNSKEQGPPPAPLPPPPPEELASEDESYYHEHLLEVAQENQSRVVPVKAFFLCTSIDLRSLQSQNSFNVIPPTSRATNYVVLRYYDVKGDPEGFKSGVIDESHCHYMVVFQYGSIVLFNVSDHEADGYLKIVEKHASGLLPEMRKDDYAVVEKPTLETWMQGGLDYIVLRDLSIDGIRTIGSVLGQSIALDYYIRQVDGMVAEFTDINRGMEKTGTFTMERKKLFQLVGKANSNLADVILKLGLFERSDIAWKNANYAQIWEYLRDEYELTQRFGNLDFKLKFVEHNIRFLQEILQNRKSDFLEWLIIILISVEILISVYNIIQEQM

SEQ ID NO: 230816 - protein, 101 aa, Zea mays
  Clone ID: MRT4577_142098C.1.pep
ERERERCSHARVHMHAVTHARTEDISVRGRSTGAPCATVVPTLSFINTRLVVFFSGMALAIAASMPCSGYGTSTTDPLTAVRGVSETLDFISVYVEVANKK

SEQ ID NO: 230817 - protein, 195 aa, Zea mays
  unsure (1)..(195): unsure at all Xaa locations
  Clone ID: MRT4577_142099C.1.pep
PRVRPRRPRRARRPRRNQRKHPTXAAKXXXXXXXXXXXAXAGAATXXPQGXQAXXXXXXPPDPXPAXXXGGEPRGQPXRXQQAXTTGTXPXXPGGXQQPXAQKQEXXXGQXEAQNXRAQQRQQXXXANRAAHXQQQQXXPNNQRAAXNXAXEGQQQXPXSQRAAAHPQQXXPSNQPAAGNPXAQXQQQQRRPXSQ

SEQ ID NO: 230818 - protein, 144 aa, Zea mays
  Clone ID: MRT4577_14209C.1.pep
MKRHIEVSSSRRKQRKAHFTAPSHLKRKIMSSHLSKDLKKKYNVRAVPVRKDDEVLVVRGPLKGNKGKVIQVYRARWCIYIEKLTKQKLNGQPINIPIDPSKVVITKLKIDKDRNDLLARKERTLSLKMKGGKYTGKDVGMGVD

SEQ ID NO: 230819 - protein, 185 aa, Zea mays
  unsure (1)..(185): unsure at all Xaa locations
  Clone ID: MRT4577_1420C.1.pep
SRQSLNPSSGGGGGGXDGGGGVGGGMGPVGGGVGGMVGPVGVGGGGGGSDVELVSKTLQFEHKLFYFDLKENPRGRYLKISEKTSTTRSTIIVPIAGVAWFLDLFDYYIRTDERDVFSKELRLDTKVFYFDIGENKRGRYLKVSEASVNRNRSTIIVPAGSSGEEGXEAFRNVLLEINDEASRLY

SEQ ID NO: 230820 - protein, 123 aa, Zea mays
  Clone ID: MRT4577_142100C.1.pep
MAASKPVEAAMVSAAGPGSGSGMGGGSATSGPGTGSLPRWQLALAVGAPLLLGAGALYLWSRQRRRRETGARGDSGGLKRNSERKTPEGRASPAPGSGHPDGPGTHLEMNSLDRAQAAKNKGN

SEQ ID NO: 230821 - protein, 45 aa, Zea mays
  Clone ID: MRT4577_142101C.1.pep
NVWESPFCNWGDRSLAWCGNKIVSAVHKSKVWYKLPALFGSFSYA

SEQ ID NO: 230822 - protein, 76 aa, Zea mays
  unsure (1)..(76): unsure at all Xaa locations
  Clone ID: MRT4577_142102C.1.pep
AHXRRPPLAFLGGPFTHEEGVTIPSACTTRGAAASPSNCSSSSSPQVPDGFSNLAHPAQDTHFTRHSLHMLDLTRD

SEQ ID NO: 230823 - protein, 95 aa, Zea mays
  Clone ID: MRT4577_142103C.1.pep
VPRVLETGFLPFRNLGGDSSCSRFRRFEPSSKQSCERPVVYYPSGVGPLLPFEGFFIYQQTSFKGSRCFWAPNLGFRAAMWWWHFAQDCLAMCTL

SEQ ID NO: 230824 - protein, 69 aa, Zea mays
  Clone ID: MRT4577_142104C.1.pep
ETSSRGACGAAGARAALRHQPASPAPAAREGVNALSRRQPAICPAPDWSGDPEASDNRRVATRGDAWTP

SEQ ID NO: 230825 - protein, 50 aa, Zea mays
  Clone ID: MRT4577_142105C.1.pep
VGRYFVSVGDAFACPCFDWVGVGVVIVGFCGYCFCLGYCISKNPLPDCFC

SEQ ID NO: 230826 - protein, 184 aa, Zea mays
  unsure (1)..(184): unsure at all Xaa locations
  Clone ID: MRT4577_142106C.1.pep
RVRLHHRLPTYVPNQAHRQSINAGKGAIEENDPLNWGSWVEQLPGSHRDDAKACRLXALQPEVKIEGXSTLRIGHGSAGRSAKDAPGVAAXIDDEARPRXKGHHXWILHCIAHPGYIYFATTXGFSGTSHRRTKDAPALHVKLXITHLNXGILLTDSXGYTLSSKVTRSAMLSRINTLLLGYSG

SEQ ID NO: 230827 - protein, 96 aa, Zea mays
  unsure (1)..(96): unsure at all Xaa locations
  Clone ID: MRT4577_142107C.1.pep
GKVQQIMTHPIILVFGLVXTKVRIQIWLFQENNVGIQGGFIELDQYMELVLEEVWRYQVKECHSKXVGGIYLQGGNILLFDEAVSSKSFYGMKIVW

SEQ ID NO: 230828 - protein, 46 aa, Zea mays
  Clone ID: MRT4577_142108C.1.pep
RIRCLNSTDLELYKQVKGWIPRSVSHGQNCPTPCIDQICKILYQVP

SEQ ID NO: 230829 - protein, 127 aa, Zea mays
  unsure (1)..(127): unsure at all Xaa locations
  Clone ID: MRT4577_142109C.1.pep
PTRFPTRPPTPRAAGTSTTXXTTSSRRSRRSSRTSARARTLSRTSSATAPTTRASPRARPPSRCPCRWSTTSSTTTRTPTTSXPAHAXCPSSSTSATTITTTSRCWSLCSASATACASACAPTSRPT

SEQ ID NO: 230830 - protein, 68 aa, Zea mays
  Clone ID: MRT4577_14210C.1.pep
TNFNNQCLGSGWITHMGSVRPGQLTMLHCINRGSALRTMARRWTGWLHAKASGTRSLRGLVVAGANCL

SEQ ID NO: 230831 - protein, 141 aa, Zea mays
  unsure (1)..(141): unsure at all Xaa locations
  Clone ID: MRT4577_142110C.1.pep
DDPQRKAEGEGTTLYTSRERTQRPADAKAPARPRRQTNGRQAXRGPAAAASCRWISPTDGATSTEADAAVAAADPELPPPREPAGGAREELPHNLEDALEECVEGHAARNPNGLTVLQTCEGADTDIPRFCYHSRLYRGGN

SEQ ID NO: 230832 - protein, 65 aa, Zea mays
  Clone ID: MRT4577_142111C.1.pep
CGRAFALVKPAAGCRMCLSSVHVWVRRVFAVPSLCGLVQCIPRRVPFVCCGLGLVKPSRSVIKNQ

SEQ ID NO: 230833 - protein, 97 aa, Zea mays
  unsure (1)..(97): unsure at all Xaa locations
  Clone ID: MRT4577_142112C.1.pep
NAEAPFLTQCFNLFSMFPTRFPDIKDFYKKAVDTFWTVEEVNLSADARYXNEALSTDXRYFIYHVLTFFAATDSILLENLAXRFMTDVHVDEAAAFY

SEQ ID NO: 230834 - protein, 83 aa, Zea mays
  Clone ID: MRT4577_142113C.1.pep
CQFYVYHCLLTYNVCLCFFVRVFGNRCVVCLSQHGHFPFLRFFSLCYYGIYVVCLNFFSGIFCSAFYQRFGNLSFFFICIFYF

SEQ ID NO: 230835 - protein, 78 aa, Zea mays
  Clone ID: MRT4577_142114C.1.pep
PRIRTRFSYLVVIPLILTASFNPSNQITESIHVISQIPSFRGTPSTQHISGGAIFVMNSYIMDLQYDFSIHPLYGSTS

SEQ ID NO: 230836 - protein, 93 aa, Zea mays
  Clone ID: MRT4577_142115C.1.pep
ARVTCLLVSSHSGRPSLFFICPPIERRRALCSCFVTYYSTRKQGARMYHDYDQFELITNRSGSSQEQSAGSCTDSRGNCTAPASPVVHPSCYV

SEQ ID NO: 230837 - protein, 55 aa, Zea mays
  Clone ID: MRT4577_142116C.1.pep
AHVFKAKIPGLEKDLVLVEVKGMPQPKLKGELTGNLSRFRSPCSSRRYPVVDFLA

SEQ ID NO: 230838 - protein, 79 aa, Zea mays
  Clone ID: MRT4577_142117C.1.pep
FVFANQHACGQGVQIEGAYPDHAPFSSDGHLKFFCYYYIWNLVNLFFLYPVRQKNDENKPLQALRPYNKVNPGSNGDIP

SEQ ID NO: 230839 - protein, 44 aa, Zea mays
  Clone ID: MRT4577_142118C.1.pep
MRTTNDLTPMATKILWVLALVALYVSATKARIIVHCSMATSAIK

SEQ ID NO: 230840 - protein, 70 aa, Zea mays
  Clone ID: MRT4577_142119C.1.pep
GGFSGSPGSPWWLSAVRCAVVPRVVVAPGCFGVFGRAPAPCCLRPCMAPGFARLPGYRCPRPVCPRLGPR

SEQ ID NO: 230841 - protein, 142 aa, Zea mays
  unsure (1)..(142): unsure at all Xaa locations
  Clone ID: MRT4577_14211C.1.pep
RVAQRPPSVRPASAAAWVXSTFTFSTTLKRSYKDISVDSSRSLLEALPTAFKGMKAILIDGRPVRSAVTRYHLKRLGIIVQVVNNMSAVVKAFPGQNGATVSREKATILFIESDFWRPETDVQLLNHLREHKNRQLSDGHKV

SEQ ID NO: 230842 - protein, 164 aa, Zea mays
  unsure (1)..(164): unsure at all Xaa locations
  Clone ID: MRT4577_142120C.1.pep
MNDINIGINDYXRIATMASRMSLHTDDVKIVAXVHYSFFNADYMTYMIEYXTAHGQWKHHEIPAKDSKNLLFGEKEAAVCDCTNPEEIPXSYCGCIIGLEETGDFTEQENAXAHLNAGGRNDADSAXNDDVPEATQCADHHEHDFDINMVSNDKYIASCLWSSC

SEQ ID NO: 230843 - protein, 58 aa, Zea mays
  Clone ID: MRT4577_142121C.1.pep
DHSMLIHTPPKLLLSFQIITDLDMICRNSRKSPPWEKASYSVMIAPKYIQCPGGPILT

SEQ ID NO: 230844 - protein, 65 aa, Zea mays
  Clone ID: MRT4577_142122C.1.pep
SPLSSGNNAEYFFFFFFFFFGQPQLHYYPHLNCKICQLLQPHLRLPSQANKLHILPAVLCVVTTA

SEQ ID NO: 230845 - protein, 78 aa, Zea mays
  Clone ID: MRT4577_142123C.1.pep
GRVRVVGVVNACFKVTPSARLNPRSRSSLKNGAFSSEQEVWMGFSRVCQGILPSRGSLALLYASSLCLWLGADWWVSV

SEQ ID NO: 230846 - protein, 105 aa, Zea mays
  Clone ID: MRT4577_142124C.1.pep
RRVRSDTTTSQEFLHSRATPECHKQRYRTHATVLLHGKKASKQWTCSLDLERPAIHVATFSTTFVICGVGVINKGLGASIITSDPFHRPVTAKYPGHPALVLWRH

SEQ ID NO: 230847 - protein, 99 aa, Zea mays
  Clone ID: MRT4577_142125C.1.pep
FDTWGYSGHPEIGCMNEWDYIDREIAVLEAQTEDTGLSILDTDIEKFVRCNALADMWEGSAKDMEALLDDYPECDLQVNLPEEENKVCQEALPHEARAM

SEQ ID NO: 230848 - protein, 53 aa, Zea mays
  Clone ID: MRT4577_142126C.1.pep
HAFGHARHASGSPSFAKGKSKMLYASLNQKFKNGLKCIQGELQATNSNEINLY

SEQ ID NO: 230849 - protein, 123 aa, Zea mays
  unsure (1)..(123): unsure at all Xaa locations
  Clone ID: MRT4577_142127C.1.pep
SSPNKMMGFMEGGPEKQKTFGKRSPVPEGPDEEKLLGGAHALETPMGFETKAGPFFPPPDQKPELRFPGAPTGPAPVPPNPPPGDXLGFPPGPQAPLCAKTNKIPFFSVPPPQKVVFFFSPWG

SEQ ID NO: 230850 - protein, 152 aa, Zea mays
  Clone ID: MRT4577_142128C.1.pep
MMLLSLGILCYTGPKPRRNPNEPQMDYSAGSNSLLQYIRYENPMKWARDNRIDGHRFWNLFHVDFYNSVIMTKKHQPIIKQRSINWAECEQMRDKEMTRALRACEAKGMKNIMLFSYDWNDEVIAQFYSTLWVKLSSDDLGAYAYPYMNFTL

SEQ ID NO: 230851 - protein, 317 aa, Zea mays
  Clone ID: MRT4577_142129C.1.pep
MRECISIHIGQAGIQVGNACWELYCLEHGIQPDGQTNGDKTIGGGDDAFNTFFSETGAGKYVPRAVFVDLEPTVIDEVRTSAYRQLFHPEQLISGKEDAANNFARGHYTIGKEIVDLCLDRIRKLADNCTGLQGFLVFNAVGGGTGSGLGSLLLERLSVDYGKKSKLGFTVYPSPQVSTSVVEPYNSVLSTHSLLEHTDVSILLDNEAIYDICRRSLDIERPTYTNLNRLVSQVISSLTTSLRFDGALNVDVTEFQTNLVPYPRIHFMLSSYAPVISAEKAYHEQLSVSEITNSAFEPSSMMAKCDPRHGKYMACCL

SEQ ID NO: 230852 - protein, 969 aa, Zea mays
  unsure (1)..(969): unsure at all Xaa locations
  Clone ID: MRT4577_14212C.1.pep
MGGKYRAARTKRWWRGLAAAGWVLTAVVCSAVMHWTLRRDTMDHAXDAQMQVMDGFEAAAGTRQMELKANEERKNKLAPIEGPTTAEYHLPVLAMTADVIQATYEECIKSGMDGYVSKPFDEEQLYQAXQIGXWERQIRLFDVQNTMDRTSHSSIEVKHHHLASVQLTLSLDNGPDMASHKXMKKKEDESAVSXATXTHDMKLLRQPXRSVGXDHPVTLLFFDVYRLLCLLXFIGNTTTSCARNKDIEVTGYDVTNASDAMVLYGPSSLDEQVPFLHVSMLDFGDPFRKHEMRCRYRQKLPMPWSAITNPLGTFVIWMLLGYSIAAAYSRYDKVTEDCRKMEELKTQAEAADVAKSQFLATVSHEIRTPMNGVLGMLDMLLGTDLTMTQKDYAQTAQMCGRALITLINDVLDRAKIEAGKLELEAVPFDLRSLMDDVVSLFSSKSREKCIELAVFVCDNVPKVVIGDPWRFRQILTNLVGNAVKFTERGHVFVRVCLAENSNMEANQVLHGAMNGKGGRVESTANGAFNTLSGFEAADRRNSWQYFKLLLSDKESLLDDLEGENSNQSDSDRVTLAISIEDTGVGIPLQAQDRVFTPFMQADSSTSRNYGGTGIGLSISKCLAELMGGQISFTSHPSVGSTFTFSATLKHSYKDISGDSSRSLTEALPTAFKGMKAILVDGRPVRSAVTRYHLKRLGILLQVVNNMNAVVKAFPGQNGAAGSREKASILFIESDFWRPETDVQLLNHLREQKNGQLSDGHKVVLLVTSEADKDKYGSIFDIVMCKPIRASTIASSIQQLLKVEIAERKDNQNRPSFLRSLLVGKNILVVDDNKVNLRVAAAALKKYGANVSCVESGKDAISLLQPPHRFDACFMDVQMPEMDGFEATGQIRQMELKANEERKNKLAPIEGATTAEYHLPVLAMTADVIQATYEECIKSGMDGYVSKPFDEEQLYQAVSRLVVGTTDSAV

SEQ ID NO: 230853 - protein, 65 aa, Zea mays
  Clone ID: MRT4577_142130C.1.pep
PRTGTKLLRIASDVAMAQSCESLETRTGDCAATQLEVYRLCTSCGVSLPASLHFLVPDQLIRHEW

SEQ ID NO: 230854 - protein, 92 aa, Zea mays
  Clone ID: MRT4577_142131C.1.pep
LYFTGATNILYTFGGHAVTVEMMHAMWKPAKCKYIYLLATLYVFTLTLPSMAAMFCVFGDELLTYLYAFSQFLIFLLLVSVVLILRFFFFFF

SEQ ID NO: 230855 - protein, 89 aa, Zea mays
  Clone ID: MRT4577_142132C.1.pep
ALCSAPRCPSPWASSYGAILHSIGQGPRVGRCDKGEDVCQADSSLPERELPEGPMPGPMGCRAEGGPFKPLGGARISGALHMSIHSAVL

SEQ ID NO: 230856 - protein, 59 aa, Zea mays
  unsure (1)..(59): unsure at all Xaa locations
  Clone ID: MRT4577_142133C.1.pep
HFTPYLTDALLQDCHTGYLXLHVKDYSHVRCKISSWISGHYHLFFTCPAYLTTPGGNMR

SEQ ID NO: 230857 - protein, 51 aa, Zea mays
  Clone ID: MRT4577_142134C.1.pep
SRPFRSGIAPSRAGGWAPAVPKNQVLKVGMDNIRTRLAQLEKECSSIRQEI

SEQ ID NO: 230858 - protein, 72 aa, Zea mays
  Clone ID: MRT4577_142135C.1.pep
IKREAWKEGGVKRGGEQKGGGTEKLKGTEKALYNLSEKALKLAKKFLCPLKGLKKILILGLVLIGFQKLKAF

SEQ ID NO: 230859 - protein, 63 aa, Zea mays
  Clone ID: MRT4577_142136C.1.pep
KRKNGAFLGKCPPKGKFPCKKWLWGQKKLAWVKNCFKGGKRVVLLKKSPIYFPKKGGVKTVKA

SEQ ID NO: 230860 - protein, 95 aa, Zea mays
  unsure (1)..(95): unsure at all Xaa locations
  Clone ID: MRT4577_142137C.1.pep
CDPSNLRLTMFRVHSCGMSPLHLCTRTRSGRWAGEHNQSPRQQLWRQRQILDQQTVFLAFASIARVRALKSLSVAIARCCCRAPPELVRVPFXRP

SEQ ID NO: 230861 - protein, 70 aa, Zea mays
  Clone ID: MRT4577_142138C.1.pep
NREGACFSQNSGKIPVPPKNTIPHRPKIRGMLKSALLEKRGIPQFLEQSPPKRHHTETCPLTRPRLQRGA

SEQ ID NO: 230862 - protein, 70 aa, Zea mays
  Clone ID: MRT4577_142139C.1.pep
ATPCLPVRCHAPVAAVSGCCPLTIPLLYPLPQHTPSSLPKGNQSCAGGRLPPHSHGLGQFPVPAGLGTSE

SEQ ID NO: 230863 - protein, 84 aa, Zea mays
  Clone ID: MRT4577_14213C.1.pep
KIRSSRPRHEQHLVRWASWQLHDIESLSKMVDPPIRGQCSEKALSHFADIISRCIQRQPEFRPPMSDIVQDLTRLVNATGEESE

SEQ ID NO: 230864 - protein, 41 aa, Zea mays
  Clone ID: MRT4577_142140C.1.pep
GKFLERGTVGAFLVLPQLGKRGFSSRGLNLVNPGFFPLRRF

SEQ ID NO: 230865 - protein, 58 aa, Zea mays
  unsure (1)..(58): unsure at all Xaa locations
  Clone ID: MRT4577_142141C.1.pep
LWVNRSQVTQKSSCDPXRVLTSVLASETDLSCEGVNSPVQAEDNESIQSGVCGGDLVS

SEQ ID NO: 230866 - protein, 112 aa, Zea mays
  Clone ID: MRT4577_142142C.1.pep
RQHFFCGHSPMSLHTNVATHQVHSVPSTESFHGPRWLHYHSSARSKRFSQLDLHSRTVHTRLHPFFLFPPFWPLKNIAGGAGIGQNWQGFFVERFMVSLRHFFGMWMPLDFE

SEQ ID NO: 230867 - protein, 97 aa, Zea mays
  Clone ID: MRT4577_142143C.1.pep
KSGIVQTGTAYPPRRQEQPADSGSVRGEGKGESSTRRPGSLPPSPVRPRLPRPAPSTHAYRRRTMSTSPDADDVSPLPPTAAADEAARATETGVVDE

SEQ ID NO: 230868 - protein, 59 aa, Zea mays
  Clone ID: MRT4577_142144C.1.pep
NTEEANTIVILRSSQYTSSALFLVPYLEYLKCRQGRGVHSLWRRSDAGARVSIGRCWTP

SEQ ID NO: 230869 - protein, 77 aa, Zea mays
  Clone ID: MRT4577_142145C.1.pep
QASSCVCDTGANLPNNSKRRQCIVNTEFYFTRWTPFMTGTKRLLYALVAEEIVAFGNHKLCNDASKFLTFGFLLELL

SEQ ID NO: 230870 - protein, 201 aa, Zea mays
  unsure (1)..(201): unsure at all Xaa locations
  Clone ID: MRT4577_142146C.1.pep
RYVTVQTISGTGALRIGASFLQRFFKFSQDVFLPKPSWXXNHTPIFRDAGMQLHGYRYYDPKTCGFDFTGAIEDISKMPQQSVLLLHACAHNPTGVDPRPEQWKEIATVVKKNNLFAFFDMAYQGFASGDGNKDAWAVRHFIEQGINVCLCQSYAKNMGLYGERVGAFTVVCKDADEAKRVESQLKILIRXMYSNPPINGA

SEQ ID NO: 230871 - protein, 135 aa, Zea mays
  Clone ID: MRT4577_142147C.1.pep
LEPAGIYESSPSTLVSYRALPDIFTVPPFAGHSLPPSRFYHDARIGSQLEELPSAAQLPLSTPKNLSLQSATRPSLLALPSHRTFLSARSSAPASSQFSMALGRAKSSSAMRPPSSMALLPCISIMISIGRSDYV

SEQ ID NO: 230872 - protein, 65 aa, Zea mays
  Clone ID: MRT4577_142148C.1.pep
ASTRTSFTLFRAIFCFYHKTGKGSSLSFTGPIVALFEEFTISGIPLKSVVHCVKPCELPHTKLAL

SEQ ID NO: 230873 - protein, 78 aa, Zea mays
  Clone ID: MRT4577_142149C.1.pep
AREHVALLDSAVLHHTSISKGGNPWSPLNTITHLRFRSTSSSPASGGSRTYAVSVRYHLHTSTHSTTTKNVMDDRYHP

SEQ ID NO: 230874 - protein, 82 aa, Zea mays
  Clone ID: MRT4577_14214C.1.pep
ARRSDRGPVGRWPQAPARRAGARTKAPPPERRTARSAPPAAVRVHRHPRGASGALGLGLVGSDGASWGLAVWVFFLAFTHAS

SEQ ID NO: 230875 - protein, 57 aa, Zea mays
  unsure (1)..(57): unsure at all Xaa locations
  Clone ID: MRT4577_142150C.1.pep
YSRYVVTCVLSAGEPAAPAGLGDVYNLFGRGDNQYLLDVPIHLCTTTSAKRGRRXNT

SEQ ID NO: 230876 - protein, 69 aa, Zea mays
  unsure (1)..(69): unsure at all Xaa locations
  Clone ID: MRT4577_142151C.1.pep
EICTPIADPMAYARLALTIWDLVQQAADYXHLKKGAYEATKTLNRGISEVVXMTADTXPLEILLILLSL

SEQ ID NO: 230877 - protein, 93 aa, Zea mays
  Clone ID: MRT4577_142152C.1.pep
KLVERLQKKKPVYDVQIKPKLAMVHRTPEETREQTEARQGKHIFLAEEMAAKNRAKVEGLSNLFGLFLAWPLLWIMLCFVCVLVSYSHLVLFL

SEQ ID NO: 230878 - protein, 85 aa, Zea mays
  Clone ID: MRT4577_142153C.1.pep
INPDHLIIKGLNAARKSEPASTPAHRPAQLVCEGPLISTGYTHVSPTDLGGKIAHMLSMAPVGTFGRSSSQEGLVVNKLPYTPLC

SEQ ID NO: 230879 - protein, 60 aa, Zea mays
  Clone ID: MRT4577_142154C.1.pep
DARVRIIACEYNYNLLITKIQQVPNTSLQRAQIKQHRHPPNNTILSTLNLIYQCQDSTNQ

SEQ ID NO: 230880 - protein, 84 aa, Zea mays
  Clone ID: MRT4577_142155C.1.pep
LETLGNLLYTYYFVWFLVSSLILLVAMIGAIVLTMHRTTKVKRQDVFRRNALDFRRTTIHIQNRRFFSHKGDDAPVPPADPESI

SEQ ID NO: 230881 - protein, 118 aa, Zea mays
  unsure (1)..(118): unsure at all Xaa locations
  Clone ID: MRT4577_142156C.1.pep
PTRATIATQQHQQFLPALNQLTAVDGVDYLLQQLLAFNPLALANIVAYQQQQQLHQFLPALTQLAMVNHDVYLHQLQLISSSPLAVVNAPTYLXQQLLQQIVPSLTQLAVANSAAYLQ

SEQ ID NO: 230882 - protein, 61 aa, Zea mays
  Clone ID: MRT4577_142157C.1.pep
KQTVKKAPLKGQPNPVPPPLPLSPPILMLSTRGNPPHAGYKRIWYFCSIVKFSYPCSFQAP

SEQ ID NO: 230883 - protein, 89 aa, Zea mays
  unsure (1)..(89): unsure at all Xaa locations
  Clone ID: MRT4577_142158C.1.pep
IVHLRSSTDDAENDGDDVVEGHERQRDQQHELNLQAALELYAARHRPEAENMTRHDGAPALVEGVAWWRSDRPPDLIAPPRRRXGGAKT

SEQ ID NO: 230884 - protein, 65 aa, Zea mays
  Clone ID: MRT4577_142159C.1.pep
LVAGRLRHASFVPRVTDRVRRRCDGGLLRSAIWGEAPVGCIYLHGARERGAVGGRGRVGHPGAWW

SEQ ID NO: 230885 - protein, 88 aa, Zea mays
  Clone ID: MRT4577_14215C.1.pep
KKKKKKKKKKKKKKRGGGKKKKKKKKKKKKKKKKKKKKGRAVLRRTKFYFPGLATKNFFFGAPKIKLMGRVLKTSELEKPWVTQIKSL

SEQ ID NO: 230886 - protein, 226 aa, Zea mays
  unsure (1)..(226): unsure at all Xaa locations
  Clone ID: MRT4577_142160C.1.pep
MSAPAAVRVIGAFDSPFSHRAEVALRLKGVPYELILEELHNKSELLLTSNPVHKKVPVLLHGDRAVCESLIIVEYVDETFDGPRLLPSDPYDRAMARFWARFIDDKCSKPFWLAMWTDGEAQKGFMKEIKENFALLEAQLEGKRFFGGDTIGLVDIAACGFAHWLTVCEEVSGVTLVTAKEFPRLCRWAKEYASDEKVRACLPDRAQMLAHFTANKGXFMAMAKSC

SEQ ID NO: 230887 - protein, 453 aa, Zea mays
  Clone ID: MRT4577_142161C.1.pep
MLPGYVLAASPTTTRARVPPPAALGMAGPKAAEDGSAAPLLPAQAGERSSGGVGGGATSAQTLGNVVVSIVGTGVLGLPYAFRAAGWVAGSIGVAAAGSATLYCMLLLVDCRDKLKEEETEECCHGHYTYGDLGDRCFGTIGRCLTETLVLVSQAGGSVAYLIFIGQNLHSTFSQLMSPAGFIFAILLPLQIALSFIRSLSSLSPFSIFADVCNVLAMAIVIKEDLQLFDHPFSNRSAFNGLWAVPFTFGVAVFCFEGFSMTLALEASMADRRKFRSVLSQAVAAIIAVYVCFGVCGYLAYGEATKDIITLNLPNNWSSAAVKVGLCIALAFTFPVMMHPIHEIVETRFRSNRCFRKLSHNDGGAEWIGLHASRVLVVAVLTVVASFIPFFGSFISFVGSTMCALLSFVLPALFHLSIVGSSIPLWRRVLDYGILLFGLAFAGYGLVTALSSH

SEQ ID NO: 230888 - protein, 66 aa, Zea mays
  Clone ID: MRT4577_142162C.1.pep
AKQQQREATTYMATTAFLPPAKLRLHGRRFTSPKTAGRITVTVPPARAQQEQHVKDDEAEAASVHP

SEQ ID NO: 230889 - protein, 47 aa, Zea mays
  Clone ID: MRT4577_142163C.1.pep
AAPSCVGILTYVVAPPIELPGCRLSAVGLQLPCCDPPYFFCSNCFFL

SEQ ID NO: 230890 - protein, 41 aa, Zea mays
  Clone ID: MRT4577_142164C.1.pep
MLSMVAIAAVCVCVVLLSKSCPEVLYVFQPFRWELLEYGTS

SEQ ID NO: 230891 - protein, 45 aa, Zea mays
  Clone ID: MRT4577_142165C.1.pep
SVRIPVAHASTFNVWFVALTSTCCCMSIMYESHSHGTFGPWSLPI

SEQ ID NO: 230892 - protein, 177 aa, Zea mays
  Clone ID: MRT4577_142166C.1.pep
MPPKGKKAAPAPFPQGKAGGSKKAPKNPLIEKRPKNFGIGQDIQPQRNVSRMVRWPAYVRLQRQKKILNMRLKVPPSISQFQHVLDRNTATSAFKLLNKYRPETKAEKKERLTKEATAISEGKKKEDVSKKPYTAKFGLNHVVGLIENKKASLVLIANDADPIELVVFLPALCRKMG

SEQ ID NO: 230893 - protein, 104 aa, Zea mays
  Clone ID: MRT4577_142167C.1.pep
REGARKETLTASFLRFLLLLLLPLTAFYFFYTLQLLLISASSAASNCVPDAVSVSRVSANLTAAEKQLPPPAAAVSTSTATTLQHVVFGIAASSRFWDKRKEYI

SEQ ID NO: 230894 - protein, 50 aa, Zea mays
  Clone ID: MRT4577_142168C.1.pep
TAPIGECSHVSKNGTRSIIVKPPTRHTSSTLFVCLWASLSHLSTGLGGRG

SEQ ID NO: 230895 - protein, 100 aa, Zea mays
  unsure (1)..(100): unsure at all Xaa locations
  Clone ID: MRT4577_142169C.1.pep
GGGGKKKWLGGMVGACKMLGAAGLVWGFVAVSFYLDVQYPQVGSSLLIRYCGLQNHFCQPISDHDDGGAPLRSRSRLRAARATTRQYCPIFETXLLAAXS

SEQ ID NO: 230896 - protein, 73 aa, Zea mays
  unsure (1)..(73): unsure at all Xaa locations
  Clone ID: MRT4577_14216C.1.pep
HNLELEHELCLGQDREMSLVFDRWSSELVNRYIGVVTMHGYPVTVPATVKASRVIVPVAFSWLEELVDAQEVX

SEQ ID NO: 230897 - protein, 50 aa, Zea mays
  Clone ID: MRT4577_142170C.1.pep
YPNTKCRMVPLNTSNFLNFTEHQQIKKSNLEQFEQLIHRKLVAITKCIIM

SEQ ID NO: 230898 - protein, 53 aa, Zea mays
  Clone ID: MRT4577_142171C.1.pep
LFRGTHWLRLWAQLQRSDDSANLLRRACRHLETMAMHFFAYRGWRFSNRITLY

SEQ ID NO: 230899 - protein, 43 aa, Zea mays
  Clone ID: MRT4577_142172C.1.pep
PRVREHIDAFKYQSAPSCKVCARCTGAQIAPSMHLLPSHKMAY

SEQ ID NO: 230900 - protein, 44 aa, Zea mays
  unsure (1)..(44): unsure at all Xaa locations
  Clone ID: MRT4577_142173C.1.pep
MSAYCXKYADELIKNAAYIGTPGKGILAADESTGTIGKLLFTIN

SEQ ID NO: 230901 - protein, 34 aa, Zea mays
  unsure (1)..(34): unsure at all Xaa locations
  Clone ID: MRT4577_142174C.1.pep
STPNHSKXRRLVIEFSTNEGSILSSTLFPRVVFK

SEQ ID NO: 230902 - protein, 380 aa, Zea mays
  Clone ID: MRT4577_142175C.1.pep
ALRHRKIAGLINPIYRRLAAFACRRISAPAVEKPVLPLVYHRNLQQRHNSSLVDASGGFSEMLASTRRCYVFGGKGGVGKTSMAASLAVKFANHGEPTAIVSTEPSPSLGDLFEQDMGVGGKTVRITGFDSLFAVEAGQFKIKGEPEDLGSFINNLLGKMGLGTHSDIMSMIREMLDGMPPGLEEALVLSKVIKSIDVQEADILRRLVLDAPSTGHTLKLLSASDWIEMFLTLSIKGIKVASSMPSFNMYLEDVQFISARLEELRQQVRRVREILFDPQSTEFIVVTIPTMMAVTESSRFHESLKKDGAHTRRLVINQVLPPSASDCRFCAAKRREEARAFRAILEDRELGGLKLIQAPLLDMEVKGVPALRFLSDSVWK

SEQ ID NO: 230903 - protein, 51 aa, Zea mays
  Clone ID: MRT4577_142176C.1.pep
IFFLRILKCGHRSMYVGCKGNKEGWRLGSKCLEFGGSICLSLVKRYKSCIL

SEQ ID NO: 230904 - protein, 81 aa, Zea mays
  Clone ID: MRT4577_142177C.1.pep
REKTEKKGKKEGKKAKGAVRRTFAKAPLNLRVKGASKALNRLQQGWSHSSNRARYWSQRPSERGCKVNRLLGEGAGVFPAY

SEQ ID NO: 230905 - protein, 125 aa, Zea mays
  unsure (1)..(125): unsure at all Xaa locations
  Clone ID: MRT4577_142178C.1.pep
MLVDDDLLSGYELLSDSFTYKELENVVLREVEGTCLTRGAXDGDIXVNPYSEGGDGRNASDRHPTVRRRFDIXDRFRLRRKLPFHETSFVSYLLKYIKNLTGAEDPYKVHEPIKDLNAANKFLLR

SEQ ID NO: 230906 - protein, 136 aa, Zea mays
  unsure (1)..(136): unsure at all Xaa locations
  Clone ID: MRT4577_142179C.1.pep
STCGVQXGLIGEIISLLRKGFYLKXLELVPWRVFCREHYSGXLLGPFFXGLXDYIISGPVVAMVWEGKSVVTTGRKIIGATNPLASEPGTIRGDFAVDIGGGVFHGSDCFLSANKGIVLWFFRGPCCLSGGRHLFF

SEQ ID NO: 230907 - protein, 46 aa, Zea mays
  Clone ID: MRT4577_14217C.1.pep
GRLHVHDARSLARSLVGARAGEDTKGEEDLTVELWFSRGTTDGTAD

SEQ ID NO: 230908 - protein, 118 aa, Zea mays
  Clone ID: MRT4577_142180C.1.pep
LLFLSRACNGFFFSTGFLLNPYCFFAGPGMFFPLHVGDCFSQNFKKGFFFWVILAQPVSEITLFFLVFAPEGFTRVVVSGCHRLPPAPKIKFVPCAGQLLCQIGGPGVLNPPSWFLLF

SEQ ID NO: 230909 - protein, 80 aa, Zea mays
  unsure (1)..(80): unsure at all Xaa locations
  Clone ID: MRT4577_142181C.1.pep
ITFRLIRQLYPPPPPXQIQQKNAAWIPLSTLAHKLVLVSTAMRRSRRRRRGTVRGVLPPGRGGRHEAAGRRARSRRGGAG

SEQ ID NO: 230910 - protein, 149 aa, Zea mays
  unsure (1)..(149): unsure at all Xaa locations
  Clone ID: MRT4577_142182C.1.pep
MAHNIDTIYAIHGTLACQQWQTNNSACLYYLRSSLQDTSYRIPILHALARQHPIDSLFPPYLXQRESSACENPILQPYRIQQANTIGIXPLSPXYLQQSSAHITXVPLVHLLAKNIRHKHLQQXLVLANLASYSXHSIFLPFNHLPPTL

SEQ ID NO: 230911 - protein, 95 aa, Zea mays
  Clone ID: MRT4577_142183C.1.pep
LGSVRFVVVFSLYFVVLLLALVFVRVLFVGSSRGLVCVIVWFFCWLWPSSLSRFGSYSLRVFALFRCGPCVFCSLPSPVSFFVCSFTKTEVAGIF

SEQ ID NO: 230912 - protein, 35 aa, Zea mays
  Clone ID: MRT4577_142184C.1.pep
LVGGPPCLTDNKIFTFFFQTIINMFSILLDKKLFP

SEQ ID NO: 230913 - protein, 143 aa, Zea mays
  unsure (1)..(143): unsure at all Xaa locations
  Clone ID: MRT4577_142185C.1.pep
MRVLLDALALLACXASATYTHTSGGCGCQPPPDXHLPSTEHLPPPGHLPPAVHVPPTVHLHAPVHLPPPVHVPPPVHLHPPPCHYPTQPALAEPDAQPHACPCQQPHASPCQLHGTCGVGITPILGQCVESLMHHCRPTATPY

SEQ ID NO: 230914 - protein, 61 aa, Zea mays
  Clone ID: MRT4577_142186C.1.pep
TKLNALLRILGKARRVMVATSSSCQLSMDLDCTDTFGDVTFACRYCAQSREPHNDETNCIH

SEQ ID NO: 230915 - protein, 202 aa, Zea mays
  Clone ID: MRT4577_142187C.1.pep
MVTRGGGSQSYGFPIYCAAWLPLAHIIKPDPPAAEADADGSSPSTPSLPMVVLGGGGGEGRSGVPNKLVVAALATGEEAAPALSPDTVVEVNSEEEVPYRMAVHPRGDGVFCAFPNGCRLYRWESQEGEGPQRLALEPDQDALAELKDVGLQLAVSFSGEGSILAIGGEDGHLRVFNWPTMGSVLTEIDTKTSIKDLTIRSD

SEQ ID NO: 230916 - protein, 43 aa, Zea mays
  Clone ID: MRT4577_142188C.1.pep
LRGYLTRGINNFVSCCEFGFVRTSHYWPKRKAPLVDAVWKRWR

SEQ ID NO: 230917 - protein, 144 aa, Zea mays
  unsure (1)..(144): unsure at all Xaa locations
  Clone ID: MRT4577_142189C.1.pep
SAFTNKRPVHGGVISRQLFHDYIMVWIEDTQLQLLDNCKAEKLLLXVEREIMKALEKQCMDILMPLRDGIPEKIEKQVQRLTRRQSIAPYVVPNQLGAFMNTVKRMLDVLDCQVEDILKSWATYLTISSGNTVFGEXMNXITVM

SEQ ID NO: 230918 - protein, 1634 aa, Zea mays
  unsure (1)..(1634): unsure at all Xaa locations
  Clone ID: MRT4577_14218C.1.pep
MEYNESNRQVLEELRLMEARLSEKFAGRCDSIERRVEERCDELNSHFTTRCDKIQDQVDVAALRGEERLIALEEMRTDIEQWRPDLIKRIEDVALEVVRVNKFFERERRAEPVDKPGIFGSYTAPPLRPPAGAPPAAGPYGHLFETFHRERESGYEFTPTHGPVKGTRPPHPSRLSGFMPEQYYPYESARDTGRLGSGRFPPMSFPRFDGSRPQLWRTQSENYFEMYDTEYHMWVKIASMHFEGKAHRXLQSVERKLRYMSWEEFCGLIHDRFGKEQHESLIRQLFHIRQSGSVADYVEQFASLVDELAAYESRTDPLYYTMRFIDGLKHEIKTVIMVQRPPNLDAACALALVQEEALESTRRWRVEPISNRMAWPHAATSTEAGRXWXSMGPEKPNTDNRRGSSSAERIASLKSYRRARGLCDRCAEKWFPGHKCPTTVQLQVIEEVWDLLNEDEVSATVETTSEQLLMAISNAAWSGIGSITTLRLQGSIQQHELMILIDSGSSHTFINDKWLSELKGVRPLHNQLNVRVANGQILTCSHHLPQAVWHMSGHQFVNDLIFLPLPSVDLVVGMDWLQLHSPMRVDWSNKWMIIPYRGTLVCLQGVCPSFPSGAMVELRLLPEPHESGNSDSNEDTVIDPRVKKVLAQFSEVFAEPAGLPPSRQCDHAIPLVSGAHPFNVRPYRYPPALKDEIETQVQQMLEQGVIQKSYSPFASPVLLVKKKDQTWRFCVDYRYLNAITIKSKYPVPVFDXLMDELAHAQWFSKLDLRARYHQIRLLPGEEHKTTFQTHIGHFEFRVMAFGLTGAPNTFLEAMNDTLAPVLRKCALVFFDDILIYSSSFEAHLTHLTTVLELLHKDNWKVKLSKCAFAQSSIAYLGHIISASGVSTDPAKIMVVQXWPTPSSAKELHNFLGLAGFYRKFVRHFGMISRPLMDLLKKNTLFVWTTEHQQAFELLKTALSSAPVLALPDFSLPFCIYTDACKTGVGAVLMQRGHPLAFLSKALGPKNQGLSTYEKEYLAILIAVNQWRSYLQLAEFHIYTDHQSLVPLNEQRLNTVWQQKLYTKLAGLQYRIIYKKGCDNVAADALSRYPTSEQXCCXISQCTPTWIDEVVQGYQHDSQAQELLTHLTISSNNDNSPFTLVQGVIRHKGRVWLGNNTALQLKIIAALHDSALGGHSGFLVTYRRIKQLFYWKGMKKDIHAYVQTCNICQQAKPDRTSYPGLLAPLPVPPHAWHSISMDFIEGLPKSGTMDCILVVVDRFSKYGHFLALAHPFSAAKVAKLFLDNIYKLHGMPDNIVSDRDRVFTSLFWQQLFTLSGTQLCMSSAYHPQSDGQTERVNXCIETYLRCFVHACPSKWYQWLAVAEFWYNTNFHSALNCSPFEVLYGQPPRHFGLQPGSAVTVSDLSTWLHDREVVSKLVQQHLLRAQDRMKRQADKRRSERIFSVGDQVYLKLQPYVQSSVTTRANQKLAFRFFGPYKILQRIGPVAYKLQLPASSQIHPIFHVSQLKSAVNRPQHIIPLLPETNDSLQVPIQVLQRRLIRRGGSMVTQVKVAWSGMDTAMATWEDVDALKARFPYAPAWGQAAFQDRGNVSSAVPEDTRTMAKKDLTAKTEGGDVSARPRRIKRGSVRVTGPEWAN

SEQ ID NO: 230919 - protein, 72 aa, Zea mays
  Clone ID: MRT4577_142190C.1.pep
TPSWGPPNSSSESRDELSAPPQIRLEFHKNRNHLWFDPFVHPLMTHPLDFPFPLIYKSTFFHTKKIPTGPPP

SEQ ID NO: 230920 - protein, 48 aa, Zea mays
  Clone ID: MRT4577_142191C.1.pep
PFEIKLARPHARIRTGEPVRLVSRCFLWLVSKMKFCMVLFDGLWYCHL

SEQ ID NO: 230921 - protein, 91 aa, Zea mays
  unsure (1)..(91): unsure at all Xaa locations
  Clone ID: MRT4577_142192C.1.pep
MGWHAAITTCMVSPYTYSYIICTAVWSVRAPRSSVRSAEVASASKVGCGVGXWGAVRWCRVGGFGVCSEPGGRWVCCFAVVFLCVGGPVCA

SEQ ID NO: 230922 - protein, 58 aa, Zea mays
  unsure (1)..(58): unsure at all Xaa locations
  Clone ID: MRT4577_142193C.1.pep
LCILKESLVXTFCSYHNPLVGVGLICNFLPLHWSQILNGINAFEFQRDPPAVSTPFPS

SEQ ID NO: 230923 - protein, 80 aa, Zea mays
  Clone ID: MRT4577_142194C.1.pep
HASVFPQVCSQIAAQRAADPDLDKLYITKVSSSIGPAYEIFMDIFYYTRNGCFHLAFLSKFMKKLFLMPSKRFKCKEMVS

SEQ ID NO: 230924 - protein, 138 aa, Zea mays
  Clone ID: MRT4577_142195C.1.pep
TRPPQDILIFSKSAKKRQTTGDHIDDSEKLRPEELNQQTIEALVAESNLKMEILPVDDLDIALHDFVNKDDKMAFYSCLQRNLEETRNKLSSEADKSKFEEEDIIVKVGECMQERVKERSLHSKDGTRLTTGSHNLDT

SEQ ID NO: 230925 - protein, 726 aa, Zea mays
  unsure (1)..(726): unsure at all Xaa locations
  Clone ID: MRT4577_142196C.1.pep
MSEPAQPSGGEGDVNTLRILVATDCHLGYMEKDEIRRFDSFQAFEEICALADKNKVDFILLGGDLFHENKPSRSTLVKTIEILRRYCLNDQPVKFQVVSDQTVNFPNRFGKVNYEDPNFNVGLPVFTIHGNHDDPAGVDNLSAIDILSACNLVNYFGKMDLGGSGVGQIAVYPVLVKKGMTSVALYGLGNIRDERLNRMFQTPHSVQWMRPGTQDGESASDWFNILVLHQNRIKTNPKSAINEHFLPRFLDFIVWGHEHECLIDPQEVPGMGFHITQPGSSVATSLIDGEAKPKHVLLLEIKGNQYRPTKIPLRSVRPFEYAEVVLKDEADVNSNDQDSVLEHLDKIVRNLIEKSSQPTASRSEPKLPLVRIKVDYSGFSTINPQRFGQKYVGKVANPQDILIFSKSAKKRQTTGDHIDDSEKLRPEELNQQTIEALVAESNLXFTAHYLDMRMMFCEDHFIFXKMEILPVDDLDIALHDFVNKDDKMAFYSCLQRNLEETRNKLSSEADKSKFEEEDIIVKVGECMQERVKERSLHSKDGTRLTTGSHNLDTGGKSFTAQSNQNSFSDDEDTREMLLGARSTDVGRKSSGFTRPSKDTADVAKRGTSKRGRGRGTSSMKQTTLSFSQSRSATVIRSEDVASSEEEADANEVVENSEEESAQQVGRKRAAPRGRGRGRGGGSXKRGRKTDIASMQNMMSKDDDDSEDEPPKKTPRVTRNYGAVRRR

SEQ ID NO: 230926 - protein, 165 aa, Zea mays
  Clone ID: MRT4577_142198C.1.pep
RLSPLLGEGKMTECSLKILRNLSDVKETAGFIIRTGNCVSSISDHLDTGSQSEREHAVVILLGVCSHSPEVCSLSMKEGVIPALVDLSVSGTKVARDCSVKLLQLLRNFRRCDQFSSSCSRELAVDHVSENTRNGSICMQPISKSARYISRKLNLFSKPRSLTLA

SEQ ID NO: 230927 - protein, 71 aa, Zea mays
  unsure (1)..(71): unsure at all Xaa locations
  Clone ID: MRT4577_142199C.1.pep
RQSGQTADLLFREACYSRWKIPVERTMSEMTYTEAGLVRTYTKANTRXCFLLLGVQEHHKKRPAYVYPRRV

SEQ ID NO: 230928 - protein, 103 aa, Zea mays
  Clone ID: MRT4577_14219C.1.pep
MMQLQCAATPSDPVHLWSRPETQAQVAVLHALLVVNSGIRVVSAPAANGTNCLCRLSCVSLSHAFVFGIATSAYHVYGTASISGRSPSIWDSFAHVLGNIAGN

SEQ ID NO: 230929 - protein, 81 aa, Zea mays
  unsure (1)..(81): unsure at all Xaa locations
  Clone ID: MRT4577_1421C.1.pep
ILLLRSNFFPQPPCLPPHPAQCSLGNALAERGMEALRTPAXTVLVVLGLXAXRERGERTLPITXYKIREPVPLHANKGGPF

SEQ ID NO: 230930 - protein, 71 aa, Zea mays
  Clone ID: MRT4577_142200C.1.pep
PFKVKPLSPKKHFFLAPKRGAEPWGVQLKLRKKKIEGFKFLKEVPFWGPKNRPPQKYLSNGSKKINSRPIF

SEQ ID NO: 230931 - protein, 76 aa, Zea mays
  unsure (1)..(76): unsure at all Xaa locations
  Clone ID: MRT4577_142202C.1.pep
RTRGLANQKLLGIPSEKTNVHGGAVSLGHPLGCSGARILVTLLGVLRVKGGKIGVAGVCNGGGGASALVXSSHKRY

SEQ ID NO: 230932 - protein, 86 aa, Zea mays
  Clone ID: MRT4577_142203C.1.pep
EAVGCSGISLYIFLIIWRAPPQRSGSLVLSGRARSRNSRRKQRACTTSEGSNHSHCQRPSPTVNVEVVNDGCHKKRLTAEVIELPS

SEQ ID NO: 230933 - protein, 173 aa, Zea mays
  unsure (1)..(173): unsure at all Xaa locations
  Clone ID: MRT4577_142204C.1.pep
PPTGGCSFKKRNWALPPGKKRKPFSFSDPNLEPGFNSPTTGGVWAQNFRPKSTPFSPIIFYPGPQRNPRGDRGPSFQNLGARGPPXPLGPKQNPPPNWGPHFSVKKGEFWGLHKGPGGGPPWGGPPKPPMGPPNGWGNRGGPGPKGSPGNPAPGKFTFWPRLRTLFCPPNLGG

SEQ ID NO: 230934 - protein, 107 aa, Zea mays
  Clone ID: MRT4577_142205C.1.pep
VMSKSLAEKGYYKQKGVVRKVMDKYVGEIEMLESKHVLRVDQDELETVIPQIGGLLRILNGAYRGSNARLLSVDTEKFCAKVQVEKGLYDGKVLRAVEYEDICKISS

SEQ ID NO: 230935 - protein, 53 aa, Zea mays
  Clone ID: MRT4577_142206C.1.pep
ILQIRRCCDCVQKKKKKKKKKKKKKKKKKKKKKKKKKKKKKKKKKKKKGGGRF

SEQ ID NO: 230936 - protein, 106 aa, Zea mays
  Clone ID: MRT4577_142207C.1.pep
MGIGYVVGVLGGAILAHAAYATIQYRAVLKITEEEFSRPPMDVMMELLLGLVLCMWAGLAVPTKFLSVLPHSDENRIVSLPANLDFMIFNHRGRALPSDSDLKLHT

SEQ ID NO: 230937 - protein, 63 aa, Zea mays
  Clone ID: MRT4577_142208C.1.pep
MASLKAAKPSGVAAQGKEPAPKLSETATKPSAAKSGGVKKAEQKPRETKRKVKSSKQAAAAKK

SEQ ID NO: 230938 - protein, 59 aa, Zea mays
  unsure (1)..(59): unsure at all Xaa locations
  Clone ID: MRT4577_142209C.1.pep
MGGKGDGSXIGIDLGTNXSCVGVWXSDSVEIIANDQGNRSTPSYVAFTDSERLIGDAAK

SEQ ID NO: 230939 - protein, 31 aa, Zea mays
  Clone ID: MRT4577_14220C.1.pep
ERLSSNTVSHSDELGVKWFKTRLFFFKYQEQ

SEQ ID NO: 230940 - protein, 93 aa, Zea mays
  Clone ID: MRT4577_142210C.1.pep
TAATIKRARGPPNRDRPCTSWSSSSRHCFGPHAPCTLPSALTSKLLGAWTGRSTSSASDWGSQGPRISCVTSPTGRRASCCLTPTSLPAPVLT

SEQ ID NO: 230941 - protein, 113 aa, Zea mays
  unsure (1)..(113): unsure at all Xaa locations
  Clone ID: MRT4577_142211C.1.pep
PCCPXXLGRWPAXXCFVSPXXXCCXXWGXLXXXSXGXXVGPPPPPXXASXVAXXXXXXXXXXXAXXSXRPXXLLXXVWPXFWXPRXLVVPRGLPSPRSPPLSSSSPAXVLFFR

SEQ ID NO: 230942 - protein, 169 aa, Zea mays
  Clone ID: MRT4577_142212C.1.pep
MDLLNPEQISEFREAFAFFDKDGDGCITVEELATVMGSLQGQRPSAEELREMIRDADADGNGAIDFAEFLGLMARKTAGGGAGGGADPDEELREAFKVFDKDQNGYISATELRHVMINLGEKLTDEEVEQMIREADLDGDGQVNYDEFVRMMMLSDGAGAGAAATGHHQ

SEQ ID NO: 230943 - protein, 54 aa, Zea mays
  unsure (1)..(54): unsure at all Xaa locations
  Clone ID: MRT4577_142213C.1.pep
DKLKAKNANPFRVYNKVVSVTTQWETFXNGMGSFSAPPPRVFLTQANPVWEQFD

SEQ ID NO: 230944 - protein, 58 aa, Zea mays
  Clone ID: MRT4577_142214C.1.pep
MASGQESRKELDRKAREGETGVPGGTGGKSVKAQEHLSEWRIRGGHTRMEQLGQQWYS

SEQ ID NO: 230945 - protein, 160 aa, Zea mays
  unsure (1)..(160): unsure at all Xaa locations
  Clone ID: MRT4577_142215C.1.pep
GSSLVEHDKLELATSVLIKGQENGVCLMLPFDLDDADKLGPDASSEXFPGRTXLKLSDACMGLDLRPYPMSGLSCGLQSTQTRIXWNGPMAALEFDRLADATSAMAKKLSQLSGTAFTTIVGGGDSIGAADIVGVCHSMTHISTGGCASLELLDGNELPR

SEQ ID NO: 230946 - protein, 99 aa, Zea mays
  Clone ID: MRT4577_142216C.1.pep
HHFGENRWPIMAIAILATVVGIQAVITGTFSMIKQCASLGSFPRVKIIHTSAKVHGQIYIPEINWIMMILCLAVTIGFRNTKHLRNASGMSMLTYWMSI

SEQ ID NO: 230947 - protein, 93 aa, Zea mays
  unsure (1)..(93): unsure at all Xaa locations
  Clone ID: MRT4577_142217C.1.pep
GSGGFGFLGERIEMTWSYVXLLXLLGGLSWATDEHLLHNTFSTYGEVLXFKIILDRETHRSRGFSFITFSTEEAMQNAIEGMNGKELHCLNNY

SEQ ID NO: 230948 - protein, 70 aa, Zea mays
  Clone ID: MRT4577_142218C.1.pep
FFFLNRCAACRIHAMERSSSISVGLAKLAIATCQYTWGRVWSFWYSWCKISARAVTFGLTRLLVQRRIPA

SEQ ID NO: 230949 - protein, 221 aa, Zea mays
  unsure (1)..(221): unsure at all Xaa locations
  Clone ID: MRT4577_142219C.1.pep
LGPLDADNKEDQERIIADRKTPLVVTSAPAVRYPNPPNPDKVLYINKKEAPLLKVERGVPVXKFSVQAGHDMALYITSDPIGGNATLRNKTEVIYAGGPDAHGVLATPKELVWLPDRNTPDLVYYQSLYEQKMGWKVQVVDGGLSDMYNNSVVLDDQQVTLFWTLSLDYKSISIAARGEKKSGYLAIGFGSGMVNSFTYVAWVGNDGVGRVKTYWIDGKSA

SEQ ID NO: 230950 - protein, 108 aa, Zea mays
  unsure (1)..(108): unsure at all Xaa locations
  Clone ID: MRT4577_14221C.1.pep
DDMVSIANRFLSAAMKLDRKPSKGGGLEDDPLGVTGAHNCTMMAVAWIGAHPAVELVHADLGIANNSELLLINLRRLSANMGTSLMDLQKHIIQKXPPKRRLSVDTSF

SEQ ID NO: 230951 - protein, 200 aa, Zea mays
  Clone ID: MRT4577_142220C.1.pep
RPFRLALNKFADMTTDEFRRTYAGSRTRHHRAQLGEARSFAHAQHGRGGSGTTNLPPAVDWRLRGAVTGVKDQGQCGSCWAFSAIAAVEGVNKIMTGKLVSLSEQELVDCDDVDNQGCDGGLMDYAFQYIQRNGGVTTESNYPYLAEQRSCNKAKERSHDVTIDGYEDVPANNEDALQKAVASQPVAVAIEASGQDFQFY

SEQ ID NO: 230952 - protein, 83 aa, Zea mays
  Clone ID: MRT4577_142221C.1.pep
TSSPEEVFVERLGAINTLLPLVRSLLMHPSILQRMVRCLLANRMHAFIPLVAEAIEVSHAGHLMPTACECERFHHKQTSYKEL

SEQ ID NO: 230953 - protein, 105 aa, Zea mays
  Clone ID: MRT4577_142222C.1.pep
STLGLIDDHKYITTLDVISNTITQSKITKPQGNLVQEKSEGLIIIWLLGCSRNPGSRSELLGSVMRDLILAQHGRKSALILQTAMQLYTGDAELKTSAHQCRLHC

SEQ ID NO: 230954 - protein, 52 aa, Zea mays
  Clone ID: MRT4577_142223C.1.pep
IPTQINYYIYPPLFHQSLFQILKSNVPYNNIQFPLLFTNSYFFHPHFFNNLF

SEQ ID NO: 230955 - protein, 90 aa, Zea mays
  Clone ID: MRT4577_142224C.1.pep
WSPQTHRPYTVSISSPPCDDLRGTTTIANLTEPTTTSKVASATSSDPMHCTGAAIIQHHLPTRTVAAHLSSSTSRRTVHPAAVPGCVTSI

SEQ ID NO: 230956 - protein, 56 aa, Zea mays
  Clone ID: MRT4577_142225C.1.pep
WLTLRQHAFLFPRTQQLHWQLKMLSILWVRQCVTLNIIQTDSKPSTALAPYNAYQC

SEQ ID NO: 230957 - protein, 156 aa, Zea mays
  Clone ID: MRT4577_142226C.1.pep
MGSYLSTAVSKARSMDSDEVHGSVSNKRAKITPYDCGSYSRIIPTLPDELSFQILARLPRIHYLKMKLVSQTWKAAITGAELAQLRKELGLTEEWLYILTRVEANKLECYALDPLFQKWQRLPSMPSFANEADSTGRTQYSVFRMWNVVGSSIRIA

SEQ ID NO: 230958 - protein, 257 aa, Zea mays
  unsure (1)..(257): unsure at all Xaa locations
  Clone ID: MRT4577_142227C.1.pep
GCWQRCPSSFLSPTLDGQLHGIYSAGHHLDLWRVFLWPPAHSFVVCLPSNLSKHVLPLCSLGPKLPSHRTSVTLVLHSSLFLWARPRSRHAAAGACSCRSSSTSSPGRELSLLARFRPNRHRVCLGLWPRVFLSRARLVQCLSSPLATPCCSVPYSTCSAHQCTYLFAGRTRLVQCLCCPLVHVVAAQTRRYSSVVRQANSMSCAPRPAVRSVSVSSFARLLLVDGLDITSAISAKPSTPGPFVELRXYRLGAQQPS

SEQ ID NO: 230959 - protein, 87 aa, Zea mays
  Clone ID: MRT4577_142228C.1.pep
RNSVHGGPRHILPPFSAQALTFPPWPDAAAERIPRFHQARASRARGTSYPCCMLRTATTAGFTVDGGPVFFLSVYGDEARRFVEATL

SEQ ID NO: 230960 - protein, 67 aa, Zea mays
  Clone ID: MRT4577_142229C.1.pep
GTESTSGSLAQNIHSRTNGGEHGSQQLQTLYRVDSLDGYQMHDSEHSLEKLPKYRQRYSMPLQSYVI

SEQ ID NO: 230961 - protein, 646 aa, Zea mays
  Clone ID: MRT4577_14222C.1.pep
MSQDKKVAAEMKLSEEKLLEEKTAGFVESIAKTNTEKITKEILEGLSDDPDDSDSYDMESGGEDSEDRPWRPSHAVFGKSTIKQSHLDNMRGRYFRDMSIVRADVDRAAPAPEENEVVIFRSFFKAGLWFPLSRFVVEVLKTYQIFLHQITPEAVIRMGIFVWAVRSQGLDSSARCFCSMHELSYETKPWGKEQYHNNFGFYSFVARSGASYPVPTFRKRWPGASMEEWFYVKNDLKKRKGATSGKVDASAAPSEPAPKSKKLKVLTHRPCYIEPTMVPEFGGETSSAATPKEPIPSTQKAEEPATLPKAPSAKLAEPKTDKAEELRIEGTKTLEVLSPSAEVTMPKAQKGKIAKASKVPIETKTKLTEAKATMSQASAEAGPSEPAKEKPSEIGEKAAEEEAIEQILPEKAAAPTPEAPSEDLGYIIRHASGKRLSEEENFEAKHYARELKYSKGALVFNGTDEDDFLYCLPDNKELSVCREMARSMGFPKLEAGLCAMTKDNLANSLAYNSLKGLILSNALRAQNNAEDESCTIALNNLRTEVIRLRNEATEKDKILLTLVDKIKTSFANVGAYSSEDNFIRGDPEGVNEWISAELSPPPEPFNPLANPETRKTTEIINMAEAIVDEVVTKLLTKAAEKVLKDE

SEQ ID NO: 230962 - protein, 103 aa, Zea mays
  Clone ID: MRT4577_142230C.1.pep
RKKVGCCRLVFSVLPPRFPFFIFFDEVGRWHVWSLPWEADRRFVGFARWAEVGPFRFRAQAQKEQDAGSCSMQCWASLGGSWAISFQSFQSGKKQEARLLPFV

SEQ ID NO: 230963 - protein, 122 aa, Zea mays
  Clone ID: MRT4577_142231C.1.pep
MELSRLPPVLLLCLLASSSTTALPALPGMDQVRQQVDRANRRGPSIGLVMSYVAEDTALQASGYFRPWRVQPFVDLYGRRFHIGSIRGVNVIYALTGQRRLNAAVTVQTLLDVFTVSGIVHY

SEQ ID NO: 230964 - protein, 101 aa, Zea mays
  Clone ID: MRT4577_142232C.1.pep
LNGFTKGFDLWGPLFGKFFFPFWVFVPLYPFFKGLVGGQNRTPPFFFVWSILGAWFFWFLWGGVDPFFPKRKGPFLEEFGLACNLSGGPLSLKFFFRGNYP

SEQ ID NO: 230965 - protein, 321 aa, Zea mays
  Clone ID: MRT4577_142233C.1.pep
FRYNLQNYCTGCSCIVWRNLIESEDASFRSSYRRMGSHEPFEGSVRFSRTLSVGRLRDRVLRRPPFSDGLFTPSLLYDRAVWPSGNASARQDSAVMQRTNSDRSSEPRSDPSTSDMYNSSSERQASNGDLLERRSAFLERRRIRSQVRALQRLGSRFENLSGHERSCILSGQHRTGNCNCRTGSRQGNPDEETSTRASISRIVMLAEALFEVLDEIHHQSAALSSSRPSFSSIGSVPAPREIVERLPSKVYRKPLKYQSEEAAQCYICLVEYEEGDCLRILPCHHEFHLTCVDKWLKEIHRVCPLCRGDVCRSDAPIGKTS

SEQ ID NO: 230966 - protein, 171 aa, Zea mays
  unsure (1)..(171): unsure at all Xaa locations
  Clone ID: MRT4577_142234C.1.pep
TGTSCSQLRYGALKAKVAAAFNAAITSIYFYMPLCYYSFLEXPLNLQVLEILIGHLDNYTSEYPLQPVVRYXSLKYKLRTXIIPRNIFMPLLVLALXYATLLHAYLEVFALTAVPYCYYILSKMIMIAMLFTLSADKLTFFNRQDAKRIENLLNYMLFVTVTATLHNNFIK

SEQ ID NO: 230967 - protein, 169 aa, Zea mays
  Clone ID: MRT4577_142235C.1.pep
FPRGFENLSGHERSCILSGQHRTGTCNCRTGSRQGNPDEETSTRASISRIGMLAEALFEVLDEIHHQSAALSSSRPAFSSIGSGPAPREIGERLPAKVYRRPLKYHSEEAAQCYICLVEYEEGDCLRILPCHHEFHLTCVDKWLKEIHRVCPLCRGDVCRSDALIGKVS

SEQ ID NO: 230968 - protein, 120 aa, Zea mays
  unsure (1)..(120): unsure at all Xaa locations
  Clone ID: MRT4577_142236C.1.pep
KGETQGLPNTTGEKTGPRKGKPPPKKGKGPPKKKAQPPPRGRKTAKKRPKAGPGKRTNQLYKKKKKKKKXKPQKNKKKXKKKNKKKIKKKKKSLCTSFSRPRLTGKAARHQSAAIASTRR

SEQ ID NO: 230969 - protein, 56 aa, Zea mays
  Clone ID: MRT4577_142237C.1.pep
SDPLLLHETSVGLVTDSEDSLSVIVLIDWPGAKSSSSSSSSSIYPLYIESRVSESD

SEQ ID NO: 230970 - protein, 56 aa, Zea mays
  Clone ID: MRT4577_142238C.1.pep
KILFHLSRSQHFSYFEFCCCKSMMSTSCFVLPFFLLLSIPLVCFVVNQFSMEKVVL

SEQ ID NO: 230971 - protein, 264 aa, Zea mays
  Clone ID: MRT4577_142239C.1.pep
MGTRSQTGVPLDGVGCAALVDHLRTASWSPAKFRPHLPEKYDRTSNPSEFLQVYVTAITAAGPARTWLMNLTLGSVYSWEELCVRFVANFASAYQQHGVEAHLHAVRQEPGEILRKFISRFTKVRAAQSGGSGVVHRDRKKKKKKDHDYQKSWSTALVATTTTRGQGDRNKRPRPRKGSSGPCHVHPHGRHNTVECREIIDLAKHVSERREQSSKDGSPPRRRPGKEKVDDGEVAAAEQGLGYQSPEGDLKDIFTGGSYSGEEN

SEQ ID NO: 230972 - protein, 100 aa, Zea mays
  Clone ID: MRT4577_14223C.1.pep
PTPRPKTSRLVGRSHSRETSLGQWGIHACFVPVGPLGCSAPVPGCSGSLSEDKPAGGMWDPDCRTGPSFAAEADKTLMMSKRRSSFVLLFLQKKKNMFGP

SEQ ID NO: 230973 - protein, 466 aa, Zea mays
  Clone ID: MRT4577_142240C.1.pep
TVVSSVHQPSSEVFALFDDLCLLSSGECVYFGDAKLATQFFAETGFPCPSRRNPSDHFLRCVNSDFDDVAATMKGSMKLRAEAELDPLLKYSTSEIRERLVDKYRISDYAMMVRSTIHEITKIEGVMEDVIRGSQASWLKQLRTLTSRSFTNMSRDLNYYWLRIIIYIVMAICLGTIYYDVGTSYTAIQARASCGGFVSGFMTFMSIGGFPSFIEEMKVFTLERQNGHYGVAAYIISNFLSSMPFLLAASWASTSITYWMVKFRPGFSYFAFFALNLYGGVSVIESLMMIISALVPNFLMGLILGAGVIGIMMLTSGFFRLLPELPKIFWRYPVSYIVYGSWGLKGGYKNDLIGLEFEPMMPGQPKLTGEYIITEMMGLSLNHSKWLDLAMIFVLLFAYRLTFFVVLKVKEAAAPYIRVAYTRFTVKRLERRASFRKTLAMASMSKRHNPPHPMAIQEGLSSPMPY

SEQ ID NO: 230974 - protein, 74 aa, Zea mays
  Clone ID: MRT4577_142241C.1.pep
KKLQIIVRSLLSCAKILLLKPSRLTPPKQSNQKCFNRECRAYDKEGERSGNCSHLCKQVGRGPTRPPTRPPTRP

SEQ ID NO: 230975 - protein, 133 aa, Zea mays
  unsure (1)..(133): unsure at all Xaa locations
  Clone ID: MRT4577_142242C.1.pep
GGGDCLMQXALAGWRAGPALTLQHLGALPLRSGXXVMPRVTTPNRGVPLGGAGGVXXMALPLLVSHGVVPQCRCDAVSRIVPHPXRPSMCNAGAVATPPVLPAAAAGGGLRGGWGCGGGACPGGRSAGRTGGA

SEQ ID NO: 230976 - protein, 88 aa, Zea mays
  Clone ID: MRT4577_142243C.1.pep
TNQSHLGRDLLGPPGFNQRINNQLMNLGAGGGARFPGLPGPPGGPLDERGGHPHKPLKVLFFGQQRVFHRPGWGVLSKNLTRPRVLLP

SEQ ID NO: 230977 - protein, 118 aa, Zea mays
  unsure (1)..(118): unsure at all Xaa locations
  Clone ID: MRT4577_142244C.1.pep
KDTLLSQPQDPNIRYGKGRNEAQGTKAASRATLRVLHLRVGHIALYLKASQXPHPLHQEAPDYLSHVLHHLPVHQPQLPGKPERDHKKNLIQPRHIQVPGNHNYLLPKMLRATACLSP

SEQ ID NO: 230978 - protein, 225 aa, Zea mays
  unsure (1)..(225): unsure at all Xaa locations
  Clone ID: MRT4577_142245C.1.pep
SSRRDDFPRLVQTWRPQRGSPLAANPTQLYLGRDSLGKPVKGLGLDMGRERXPREAYARQAGSNISAERDPDMENGKLMNLLLLGAISVDAVGMAVTYGAFYXRAVLGNAGGGTYAKDKMDNDIAMEEXLNTDGPNDRTLDASLKEXTAHLKVEHRIKTLXTYGIXAVCTHXLQCIMPCNGAENKFICPCHGLQYNNHGKVFRGPAPLSLILXHADVYNCKVLFT

SEQ ID NO: 230979 - protein, 129 aa, Zea mays
  unsure (1)..(129): unsure at all Xaa locations
  Clone ID: MRT4577_142246C.1.pep
PRFRPRVRPRIRFRRPHLLQRHRDVDGKRKEWYSKAIAYWQGVEAPSPPLSPXLAERFRAEKRHLVELDCSSGIGRRTENSMRTHWNEVDLAVPDSHLLEAQRKHFTGCMDHGEDFHKVSNLDCVPTHD

SEQ ID NO: 230980 - protein, 65 aa, Zea mays
  Clone ID: MRT4577_142247C.1.pep
DPPKKEETVKKKKAAHKESKEKKNKKKKKKKKKKKKTKKKKKKKKKKKKKKKKKKKKKTEGRARS

SEQ ID NO: 230981 - protein, 110 aa, Zea mays
  unsure (1)..(110): unsure at all Xaa locations
  Clone ID: MRT4577_142248C.1.pep
IRFVLVQFDSVHPLPSYKTDPIYKIDPISKTDPIHKTDPISKTDPIHKTDPISKTDHIHKIDPVSKTDPIHKTDPVXTNHIHKTNPISKTDPVLHSRGFGSCRFVSLKTI

SEQ ID NO: 230982 - protein, 37 aa, Zea mays
  Clone ID: MRT4577_142249C.1.pep
GRNRGLCSVKIIDSLFQLHTASEYRKTNIGSLVQASI

SEQ ID NO: 230983 - protein, 607 aa, Zea mays
  unsure (1)..(607): unsure at all Xaa locations
  Clone ID: MRT4577_14224C.1.pep
MSQDKKAVAETKLTEEEKLLEEKTARFVESIAKTNTEKITKEILEGLSEDIDDSDSYDVETFRIWPLIDSWEMPKETITNPSEGDLVRLKYTFRFGDQFVEPDDDWLKCVENTSDELLGAYSKSEDNALSAAFGSRKKKRLNRKRKSATSGKVAASAAPSEPAPKRKKLKVLSHRPCYIEPAIVPXLAGKPLRLLKQKKLPLPRRRLKSQLXPKAPLTKLIETRVDEGKDERSKTEEAAKMPEILCPSAEATVLKAKKSPAITPRRKRMAGTEAEPTVPVETKLATSEQGAEEVPPNTDIAFERNMGKEAESPAPEAPSEYPDYIIRHASGKRLSKEEIFEAKHYARELKYPKGVPVFNGTDEDDFLYCLPDNKELSVCREMARSMGFPKLEVGLCAMTKDDLADSLAYNSMKGLILSNALRAQKNDEDESCTIALNNLRTEVIKLRNEALEKDKILLTLVDKVKGDEANFKAQSEIQRNEIENLQKQLAEAKLKCAVAEAERDASXTGKIIVKKQLQNFXSKERCFGKSVECVKKIKTSFANVGAYSSEDNFIRGDPEGIIEWISGEAEAFEEILSDCGDVCAFSGARGVAAILEKAGCEYVKTLA

SEQ ID NO: 230984 - protein, 81 aa, Zea mays
  Clone ID: MRT4577_142250C.1.pep
TNYPLFRYVYYIRSITPLLYTLIHYINIFYHNHNIFYPLSYLSIYYPSTYSHNPLTSLHPSINQLSSTQSTNTHHRSLHNH

SEQ ID NO: 230985 - protein, 203 aa, Zea mays
  unsure (1)..(203): unsure at all Xaa locations
  Clone ID: MRT4577_142251C.1.pep
HSQGGGPRKFSGPTFGQKGPLGKTKFLAPQPTKGAAQTPPPPGQKKGKGPGPEKPXGLPKGKPFLYKKGGGPRGNPRGGAPPNQKNPNPXKAKPPGGGPEKTPPGLGGPNRATPLKPSPXDPAAPKVGKEKNPPXPWGGGHPRSPPGLNPIQKSKPPRCLMALKKPFXLKPKKSPPAGMGPTPRPPGXPSSQPPPPKPPGGLP

SEQ ID NO: 230986 - protein, 120 aa, Zea mays
  Clone ID: MRT4577_142252C.1.pep
QTQKQEIAKEFNYSETIFVHPVDPQTPTQQRIDIFTTDRELPFAGHPTIGAASWALYLSPDKGDVTTLLTKAGPIPISLRPSGDEAAALIPHDVRIHQKRFPVQELLRLHPTVKPFVGST

SEQ ID NO: 230987 - protein, 77 aa, Zea mays
  unsure (1)..(77): unsure at all Xaa locations
  Clone ID: MRT4577_142253C.1.pep
IERPSDERRLTVHDTGTRNIHTLIRKRIEHTPSTMLLHAWKHLFSGGANTHHPQNSSXPKRLVTYIPQTLVAHDPAP

SEQ ID NO: 230988 - protein, 61 aa, Zea mays
  unsure (1)..(61): unsure at all Xaa locations
  Clone ID: MRT4577_142254C.1.pep
MSGIIHKIEEKLHMPGDHKKEDEHHKNADDHHTKEEGEHHTKDXXHKECIIDKIKDKITGE

SEQ ID NO: 230989 - protein, 50 aa, Zea mays
  unsure (1)..(50): unsure at all Xaa locations
  Clone ID: MRT4577_142255C.1.pep
LLPSLXICVAAVAGPFLAFTSLFYWSSPPPLGRLVSLHISSNRPPPVTTN

SEQ ID NO: 230990 - protein, 61 aa, Zea mays
  Clone ID: MRT4577_142256C.1.pep
RAVKTDSSFWTIEDAEMHITLQKREKGKTWSSPIQGQGILGPYAADQEQKRLMLQRFQEEV

SEQ ID NO: 230991 - protein, 180 aa, Zea mays
  unsure (1)..(180): unsure at all Xaa locations
  Clone ID: MRT4577_142257C.1.pep
FGTRGKFPIAQSKRARKSSAQIVIKEERVLAHLDDRKERDAETWVLDTGATNHMSGARAAFIQLEEMELGSMRFGDDSMARIEGRGTVAFLCKTGEIRSLSGVYFIPRLTTNIVSIGQLDEAGYKXXVSAGVMKIQEXXGQLLAKVRRETNRLYLLQVKLAPATCLAVHGRNDKRGQALA

SEQ ID NO: 230992 - protein, 88 aa, Zea mays
  Clone ID: MRT4577_142258C.1.pep
AHTLSGINFFTSRQTSRVTWQDFNMGRQAKLDCYGKSTCTWMHSLGDIQDLVLYWVALAEIGTMGRLTGVRRCTYYWRKMSLIAIHEL

SEQ ID NO: 230993 - protein, 139 aa, Zea mays
  Clone ID: MRT4577_142259C.1.pep
RSRNTRPRRRVVHGGSGTPSSNSLSTGAPILVLVSRTRSSRRRGAPRPTQFERHTDPGEVPLTATMAGGNSGGDSGSAKKSTRQWLAEGELEGVDKAVDASTNRHQRVEAQEGERSGQNLGSGWGDDEGGDGGREGVSG

SEQ ID NO: 230994 - protein, 196 aa, Zea mays
  unsure (1)..(196): unsure at all Xaa locations
  Clone ID: MRT4577_14225C.1.pep
EKKDGKCFRHFGNNTPNAPSPIKKFAEIAEAQAEADTRQIKGKIAAIEAGTESXPPVPAETKXHSRARGQKKIPPNTDIAFERNMGKEAKTHAPEAPSGDPDYIIRHASGKRLSEEEIFEAKHYAQKLKYPKGALVFNGTDKDDFLYCLPDNKELSVCREMARSMGFPKLEVGLCAMTKDDLADSLAYNSLKVRKL

SEQ ID NO: 230995 - protein, 59 aa, Zea mays
  Clone ID: MRT4577_142260C.1.pep
FMVSGNYTDLIHLTKWILYSKRCLVLYFMHGMVQLHSESLTYSRPIGDTCCKINGDLRS

SEQ ID NO: 230996 - protein, 180 aa, Zea mays
  Clone ID: MRT4577_142261C.1.pep
MYFGLYYYVDKFAGFASVALSALQLDPLSSTPPAIVPCRMKLVGGALLHHVRSGMHDIFCWILSALFWMYFGLYYFFDKFAGDTCVALDEYQLNPQNCPSGAATIGDIPQILKRLTCSDFGGGANCRPADLSSAIDYDKVQSYTSSIQNVLDIFPGTERLVSCELVKAGFADIVDNQCAR

SEQ ID NO: 230997 - protein, 45 aa, Zea mays
  Clone ID: MRT4577_142262C.1.pep
AGKARRLEGSSVSCQSPVRSISKVGLWGYILKELNHQSKLPVANL

SEQ ID NO: 230998 - protein, 169 aa, Zea mays
  unsure (1)..(169): unsure at all Xaa locations
  Clone ID: MRT4577_142263C.1.pep
RGACIAVRCSFCYLTQAQLWEGAGNRKSDAIVSCRATTTXXSAAVRRAARAPTAGAGGRGGRGCCSPCRPRAGTEIHPARRRRRRSXSWAWVLXVVTXILTRLPKEVTHLEERRGWVLDPVGGGLCHWDRGTVWPAGSLSAGGGPVLSGGLGRVHMPGAGGLVLTRRIG

SEQ ID NO: 230999 - protein, 47 aa, Zea mays
  unsure (1)..(47): unsure at all Xaa locations
  Clone ID: MRT4577_142264C.1.pep
QPAARIGGAGRRLAYCLLNSLHERALXSTRPGRMVGRSTVVARERGE

SEQ ID NO: 231000 - protein, 215 aa, Zea mays
  Clone ID: MRT4577_142265C.1.pep
MVGREQICATTQAPNKVAMSRQVFHVLLLAAVVLLASLLSAKEKLLGLSPAAVAVACWAGAVAAWAYAVSRPRPVYLVELSGYVGGPSHEASRAKTIAHFGRCGRFSDESMAFQKRMLERSGLGEQTHFPASLISVPVDMCLRTAREESHAVIFGVNSSLLSPTPSFTSLIANRYGMRRDVVSHNLSGMGCSAGIIAIDLAKRLLQVHGLYVNLS

SEQ ID NO: 231001 - protein, 71 aa, Zea mays
  Clone ID: MRT4577_142266C.1.pep
PYQECVGDDPAKNILVLFLSIFSPSHSVSFLRAISKPSTISISSNFASPSSNEPYLHMYTSVNYLFADCIW

SEQ ID NO: 231002 - protein, 371 aa, Zea mays
  Clone ID: MRT4577_142267C.1.pep
MAVMSRRRVIQLVLVGVVVFLVAPRLSWNLPGGLEKLGLQQSPAAVAVACWAAAVAAWAYAVSRPRPVYLVDLSGYVAGASHEASRAKTIAHFGRCGRFSDESMAFQKRMLERSGLGEQTHFPASLISVPVDMCLRTAREESHAVIFGVVDDLLRRARVAGGDVGVLIFNSSLLSPTPSFTSLIANRYGMRRDVVSHNLSGMGCSAGIIAIDLAKRLLQVHSDTYALVVSTENITLNAYMGNNRPMLVTNTLFRVGGAAILLSNRRADRRRAKYQLIHTVRTHRGAHDQSFGCVTQEEDDAGCVGVSLAKELMVVAGEALRTNITTLGPLVLPMSEQLRFLATVVLNRVFRARVRAYLPDFKLAFDHFCIH

SEQ ID NO: 231003 - protein, 104 aa, Zea mays
  Clone ID: MRT4577_142268C.1.pep
PLEKRLDFLSKGPSPLGFFSFFKIPPFERVFLKFNPSVFFPQFKIFWGLSFKSLSNCSFPICPLFFLFSGAPFLKKFVFLSRFFKDFAPSPAFSLFLSPFLFSF

SEQ ID NO: 231004 - protein, 198 aa, Zea mays
  unsure (1)..(198): unsure at all Xaa locations
  Clone ID: MRT4577_142269C.1.pep
MHPHTPYHLLCATRSTRSVDSFVYMAGPSLYAEIGENTXDLLYKDYHSDHKFXLSTYRSDGVAVTATSTKXSWTLIFQMILHSQXIQSDNMIVDVAQQTLELCIITXTVSEMCTHXLKTILRFAAPDLRSGXDELHDSSDYAGVNASGSLTVDPVCNXLSGDSGTIALAGDAEISFDCASAIFTTYNGGLLFAHEDRI

SEQ ID NO: 231005 - protein, 841 aa, Zea mays
  Clone ID: MRT4577_14226C.1.pep
MSQDKKPVAETKLTEEEKLLEEKTARFVESIAKTNTEKITKEILEGLSEDTDDSDSYDMESGGEDSEDRPWRPSHAVFGKSTIKQSHLDNMRGRKRSCDLPKLLQSWASVPVEKAREDIKEIIMRPIWSCFGLRKLKVEIDEAAEACRRAFSIVCSFIGTRDLVQEHVAYRIWPLIDSWEMPKETITNPSEGDLVRLKYTFRFGDQFVEPDDDWLKCVENTSDELLGVYSKSKDNALSAAFGSRNKKRLNRVFDAIGFVYPDYRYPPRGQKRKGATSGKVAASAAPSEPVSKSKKLKVLTHRPRYIEPATVPEFSGETSSAIEAKRPAPPTQKIEESAAMPKAPSAKLAEPKTDKIEEPRIEKTLEVAVPKAQKGLTTTPKRKRMASVLDVLESVKASSSIPSGKIAEVETKLAEVEAAVGQTSAKAGPSEPVDKQPSEIKKKAAEEKATEKSLPEKTVTPTPEVLKKNIEYIIRHASRKKLSKEEEREAQHYAQKLKYPKRALVFNGSGEEDFLYCLPDSKEISVCREMSRSFGFPTLEDGLSVLLKDELADKVIELRNEGLEKDKILISLVSKIKEDEASSKAQAEAQKSEIEDLRKQLAEDKLKCAVAEADRDASEYWKNYFEKTVAELRASKEKCFEKSVECVKKIKTSFANVGAYSSEYNFIRGDPEGVIEWISGEAEAFEEILSDRGDVCAFSGARGVAAILEKAGCEHVKTLAQAEATFSIDDTKDPSVEASSIGGNFFTDIWENGGRRMAHEIMKKSEKDIHDTREAAKASEKVVELERRIVELSPPPEPFDPMADPETKKTIEIINMTEAIVDEVVTKLLTKATDKVLKKEE

SEQ ID NO: 231006 - protein, 160 aa, Zea mays
  unsure (1)..(160): unsure at all Xaa locations
  Clone ID: MRT4577_142270C.1.pep
GHQARPQETNSENRATQGEPRPQRPPEPARTAPHAXAQKETXGSNGEHXATRPPPTPAPXRGTKPXQGGGRXQDTGGAGXNGXHREDRHXENEKHEXXAXXNQXTGTKENXKKGSGHPRXEXSRXEDTEPXQEEADQXHHRXXPXXPNXXKHKXXKTXKT

SEQ ID NO: 231007 - protein, 47 aa, Zea mays
  Clone ID: MRT4577_142271C.1.pep
FLNSSRGKQTVEFIFAPSWNHKMRADWDLSSPVLKSTKTPGFSQKGG

SEQ ID NO: 231008 - protein, 60 aa, Zea mays
  Clone ID: MRT4577_142272C.1.pep
LQMKLRGMGKPQQVLSTNIQIIALTLVQVDTSPFSGTIKKYKQQAIITKINKDHSVINIS

SEQ ID NO: 231009 - protein, 118 aa, Zea mays
  Clone ID: MRT4577_142273C.1.pep
EKKSLYGENYNGSKQGCPALDGDPRKFDDSCILSERCSFLQMRETGLQKGSNIRRCLLLLSRRQLLFDDPGLCTILQVQQAFTCPPFQIASRLLSHVTPCDALVIKSILNVRDSESIL

SEQ ID NO: 231010 - protein, 472 aa, Zea mays
  Clone ID: MRT4577_142274C.1.pep
MKMAHLITNCSFQTFSSSPNYCRNIGQLQNSKSSNLSLKSCSRRQKKSYVTCASAAVQGQTQTPLTGSQQAYEHSSSKPKKVMVIGGDGYCGWATALHLSNKGYEVAIVDNLVRRAFDNQLGLDSLTPITSIQNRVRRWKSLTAKTIQLFIGDICDFEFLSETFKSFEPDAAVHFGEQRSAPYSMIDRSRAVYTQHNNVIGTLNVLFAIKEYSEECHLVKLGTMGEYGTPNIDIEEGFITITHNGRTDTLPYPKQASSFYHLSKVHDSHNIAFTCKAWGIRATDLNQGVVYGVRTDETAMHEELSNRFDYDGVFGTALNRFCVQAAVGHPLTVYGKGGQTRGYLDIRDTVQCVELAIANPAKPGEFRVFNQFTEQFSVNELAKLVTAAGAKLGLEVETKSIPNPRVEAEEHYYNAKHTKLIELGLVPHLLSDSLLDSLLNFAIQYKDRVDTAQIMPSVSWKKMGAKPRTVSV

SEQ ID NO: 231011 - protein, 74 aa, Zea mays
  Clone ID: MRT4577_142275C.1.pep
LTKDPFREERQQSLLTARTIINHTWGPPQKMEAYTPYSHHIYMGPMVVPKMDQRRCNDHVSGTHTLGTTTHASA

SEQ ID NO: 231012 - protein, 48 aa, Zea mays
  Clone ID: MRT4577_142276C.1.pep
EDYVLLSADSIVFVSQQGADRQLWFASKQSLSYLDGTYVPALVARPAR

SEQ ID NO: 231013 - protein, 67 aa, Zea mays
  Clone ID: MRT4577_142277C.1.pep
AVPYRQLALNSSQKNPMCTEQQQSVDRPNEQQASSIESAPVETQTRVPEWSGIRKSSSIHTHIVQSS

SEQ ID NO: 231014 - protein, 143 aa, Zea mays
  unsure (1)..(143): unsure at all Xaa locations
  Clone ID: MRT4577_142278C.1.pep
AGPLGXXQASXPWPXXXSXXXGARAGVLCXXXGXLVQXPRKNTGTKRKATXRRPPGKRDXXPXPPMKAPRPRCAAGXPKHRAEXITSTXGWXHRESAXXRCRXQDXSPXTAPXHRPXXKXXRPXAALSXRXXWPDAWADXRGG

SEQ ID NO: 231015 - protein, 71 aa, Zea mays
  unsure (1)..(71): unsure at all Xaa locations
  Clone ID: MRT4577_142279C.1.pep
NKDKRKKEKGTNMNIINRAGNTETDRCENVTRLVRXWTNTICIGRHGICDQYRDTYAELKGRGKHKQAYEG

SEQ ID NO: 231016 - protein, 109 aa, Zea mays
  unsure (1)..(109): unsure at all Xaa locations
  Clone ID: MRT4577_14227C.1.pep
ARALCGFVSWPLSRLCFCGSLIRSLPWSPGWLFLLVVPPVWGVVVRGVPVARGAGRSRSCVPGPVPFVYLWPCVVWGVCGCRSFFCELVVPPRPFIVPALASXGRGCMT

SEQ ID NO: 231017 - protein, 219 aa, Zea mays
  unsure (1)..(219): unsure at all Xaa locations
  Clone ID: MRT4577_142280C.1.pep
FNIPRRSPSAAIYRPSVQSTINSSILLSLHHDELIYNAAYIGTPSKEIXLAAEEPTAPIGNRLSTLXVHRRPQTRLPLRDLQFCSXGALQDINGVLLHXETLNQKTPDGKXSVEVLTDLHILPVVPDNMGTIDGVDNDKNTTNQGHDDLRIRHYMYXSSIAHFAKRRGVLKIGATESSQLDIYLRAXALARYAIISHENGLSPIXDPDIPVDGPADIDH

SEQ ID NO: 231018 - protein, 186 aa, Zea mays
  Clone ID: MRT4577_142281C.1.pep
VPDRRDTYHVVSLAFGALSDDTAFPACEAASATLSPAVLALPHLRSLFFYRCFTGNPQPVAALLGRLGPAFRSLVLRQNGHVGPIPAELGNLKELRVLDLHGNQLTSAVPATLQSLSHLQLLDLSYNRLAGPVPRFEFPRLSILDLSHNALQGGVPWSLGQCRSLLKIDLSQNRLTGTIPDALGDL

SEQ ID NO: 231019 - protein, 137 aa, Zea mays
  unsure (1)..(137): unsure at all Xaa locations
  Clone ID: MRT4577_142282C.1.pep
AASSVTARVPTVARRCPQLLVGASAKEIAFYQGSRAALXAGVEKLAPPVGVPLGPKGRNVXLDEFGTPQVVNDGVSLARAIXLADPLEKAGASFICEVASQTNYSAGDGTPTAFVLGRGIIQLGMLSISSGANPVSV

SEQ ID NO: 231020 - protein, 429 aa, Zea mays
  unsure (1)..(429): unsure at all Xaa locations
  Clone ID: MRT4577_142283C.1.pep
MSRDAHLGVGVGVEGDAAKEKNGAADEEVGSRSGGGGGGHKLSLVPLIFLIFFEVAGGPYGAEPAVQAAGPLYALLGFLIFPFIWAIPEALVTAELSTPMPGNGGFVLWADRAFGPFSGSLMGTWKYVSSAINGAAFPALCADYLARVAPAVSGGGARVATIVAFNVALTFVNYTGLTVVGWSAVGLGVASLSPFLVMSGAALPKIRPRRWRVVAAERDWKLFFNTLFWNLNYWDSVSTMAGEVERPGKTLPKALVSAVSMTSLGYLLPLMAATGAIDVAPDSWGNGFFADAAGMIGGRWLKYWIEVGAVLSSIGLYSATLSSAAFQLLGMADLGLLPRAFAARAPVFRTPWVSIVATSAIILGMSFLSFNSIVAAANFLYRLGMLLEFAAFVWLRVKRXAMPRPYRVPARLPAXVALCLVPSAFLVFV

SEQ ID NO: 231021 - protein, 110 aa, Zea mays
  unsure (1)..(110): unsure at all Xaa locations
  Clone ID: MRT4577_142284C.1.pep
KTXEEYGHSEVVEYYCNPRFLMKGPNTIQCVDGEWTTLPVCIVEESTCGDIPELEHGWAQLSSPPYYYGDSVEFNCSESFTMIGHRSITCIHGVWTQLPQCVAIDKLKKC

SEQ ID NO: 231022 - protein, 107 aa, Zea mays
  Clone ID: MRT4577_142285C.1.pep
KPPTKRGGKINLWEDGLITNREKLKTHPTTTMGGAKTPKGGGKKKKEKGLIFLLARPIQYNPQGILQAPQQSLFNRGPFPKPNNPGGHRAKKKTKTPRPLGPPGNSG

SEQ ID NO: 231023 - protein, 236 aa, Zea mays
  unsure (1)..(236): unsure at all Xaa locations
  Clone ID: MRT4577_142286C.1.pep
MQAIKKTIVLYPGLFVSHFVPMMQLADVLLEEGYAVAVALIDLTMDQDVTLAAAVDRVASAKPSVTIHRLPRIQNPPAITDCGGDGLLWYFKTVKRYNDPLREFLCSLQQQQPARSVVHAVILDGPSADALDVTKELGIPAYTFYATNASXXAVFLQLPWTHAEGQPSFKELGDTPLSISGVPPMXPASYLMPPMLDDPASETYKTMMRVSRRNPEPEGILVXTFASLEGPVLKAL

SEQ ID NO: 231024 - protein, 40 aa, Zea mays
  unsure (1)..(40): unsure at all Xaa locations
  Clone ID: MRT4577_142287C.1.pep
MMPSGPPNPMGHGQPVGGAAPSLLRTSSSLLSGXGQPGMG

SEQ ID NO: 231025 - protein, 185 aa, Zea mays
  unsure (1)..(185): unsure at all Xaa locations
  Clone ID: MRT4577_142288C.1.pep
RAGIRWRPSSRPSPLSPATSSSPPTPGSTTTASXPLLALSLSPPSPAPPQPEVRKEKKDAKEAPLTKEEVGRATWMLLHTIAAQFPDEPTRQQRRDAKELMHIISRLYPCKECADHFKEVLKANPVQAGSQADFSQWLCYVHNVVNRSLGKPIFPCQRVTARWGKLDCPERSCDLEGSIDIMPNR

SEQ ID NO: 231026 - protein, 45 aa, Zea mays
  unsure (1)..(45): unsure at all Xaa locations
  Clone ID: MRT4577_142289C.1.pep
SYWFLDQLGMSTXMTRQSYCRQSXIGGNYGLINTTTFQPNPDYYS

SEQ ID NO: 231027 - protein, 851 aa, Zea mays
  unsure (1)..(851): unsure at all Xaa locations
  Clone ID: MRT4577_14228C.1.pep
MAGTARLLPAAAAALLLLLCIAGGARAANVTYDHRALVIDGVRRVLVSGSIHYPRSTPDMWPGLIQGVXVLLLPLFCDTHPDXRGSPTWQYDFEGRKDLAAFVKTVADAGLYVHLRIGPAVCAEWNCRGFPLWLHFIPGIKFRTDNEPFKAEMQRFTAKVVDTMKGAGLYASQGGPIILSQIENEYGNIDSAYGAPGKAYMRWAAGMAVSLDTGVPWVMCQQADAPDPLINTCNGFYCDQFTPNSAAKPKMWTENWSGWFLSFGGAVPYRPVEDLAFAVARFYQRGGTFPRVCMYHGGTNLDRSSGGPFIATSYDYDAPIDEYGLVRQPKWGHLRDVHKAIKLCEPALIATDPSYTSLGPNVEAAVYKAGSVCAAFLANIDGQSDKTVTFNGKMYRLPAWSVSILPDCKNVVLNTAQINSQTTGSEMRYLESSNVASDGSFVTPELAVSDWSYAIEPVGITKDNALTKAGLMEQINTTADASDFLWYSTSITVKGDEPYLNGSQSNLAVNSLGHVLQVYINGKIAGSAQGSASSSLISWQKPIELVPGKNKIDLLSATVGLSNYGAFFDLVGAGITGPVKLSGLNGALDLSSAEWTYQIGLRGEDLHLYDPSEASPEWVSANAYPINHPLIWYKTKFTPPAGDDPVAIDFTGMGKGEAWVNGQSIGRYWPTNLAPQSGCVNSCNYRGAYSSSKCLKKCGQPSQTLYHVPRSFLQPGSNDLVLFEHFGGDPSKISFVMRQTGSVCAQVSEAHPAQIDSWSSQQPMQRYGPALRLECPKEGQVISSIKFASFGTPSGTCGSYSHGECSSTQALSVVQEACIGVSSCSVPVSSNYFGNPCTGVTKSLAVEAACS

SEQ ID NO: 231028 - protein, 76 aa, Zea mays
  unsure (1)..(76): unsure at all Xaa locations
  Clone ID: MRT4577_142290C.1.pep
WSTFVLVRRCGILTVCYGGGQCESRVVCVVVEVHGAGRLVRPRRVEVHRKQRLQCTHYSLISVCMVCALLWKLXIS

SEQ ID NO: 231029 - protein, 119 aa, Zea mays
  Clone ID: MRT4577_142291C.1.pep
YALGPPRGELFFTGRSGGGCSPACRGFFGGPQCSCFFSNILPPWFLAFGFALGGVVEFSSVNPCSPASFLGLSSTPPIWLLQSHRGPGRRSRAGGPAPAQGSGLVLGVLCDQWSPPVNI

SEQ ID NO: 231030 - protein, 95 aa, Zea mays
  Clone ID: MRT4577_142292C.1.pep
FLPFPFTTHSNNPFVGGPFSFSSNTNVPPFAFPYSLWTGISSTRDSVGAQSCLIHFLPSVRGIPQKQFLALNTFFARLGGPTTGRNGHRKADPFF

SEQ ID NO: 231031 - protein, 221 aa, Zea mays
  Clone ID: MRT4577_142293C.1.pep
MSAPPPPASSDDDGKPADEEGVEIREVWANNLEAEFAVIRDIVDDYPYIAMDTEFPGIVCRPLGSFRSNDEYNYATLKANVDMLSLIQLGLTLSDENGALPARGTGGRPCTWQFNFRGFDPRSDPANADSIDLLRNSGIDFDRFTTEGADTGHFAELLMSSGVLLNAELQWVTFHSGYDFGYLLKLLTGRNLPDTMPGFFDLIRIYFPVLYDIKHLMKYCG

SEQ ID NO: 231032 - protein, 77 aa, Zea mays
  Clone ID: MRT4577_142294C.1.pep
PLTIPSEGLVLFWPYIQTTRSSQLPPGVYTTQLDRDPKTPISLGHAGGMTRRFFIQQGGEGYHWQQGRNQTVALYRL

SEQ ID NO: 231033 - protein, 129 aa, Zea mays
  Clone ID: MRT4577_142295C.1.pep
KDHYPLPFVDKMLERLAKHSYFCFLDGYSGFLQIPIRPEDQEKTTFTCPYGTFACRRNTFGLCNAPATFQRCMTAIFSDFIEGIIEVFMDDFSVCGPSFDGCLDNLAKVLQRCEDTNLVLNWEKCHFMV

SEQ ID NO: 231034 - protein, 119 aa, Zea mays
  unsure (1)..(119): unsure at all Xaa locations
  Clone ID: MRT4577_142296C.1.pep
LFGSLPLRFXRLVXXXXALGRGXVLLFPFXFLGRXSGXXVALRFXXLSLLXLSAVXCCLXXXXXGLXAXXXXGXWVAXRFLFGGCLVXXXXPPFVRAXXAXXENLKXSSCAPXAXFXAS

SEQ ID NO: 231035 - protein, 71 aa, Zea mays
  Clone ID: MRT4577_142297C.1.pep
QDLKHPLAHEDCTTGESVVVVGMTSRWLLLGGSGDYRRRRACLSREHVATGASSPEKNMRSKRSRLTRSST

SEQ ID NO: 231036 - protein, 106 aa, Zea mays
  unsure (1)..(106): unsure at all Xaa locations
  Clone ID: MRT4577_142298C.1.pep
HRGLSTHYLLAHTYFVFLLNNYSTLHICFLFLFILILIYTYLIMFXFKSFYFILYPLFIFNSFLTIFLNFNFYIYLFFLFVYFIYXFLYFFSFFFFLIIIFNLNFF

SEQ ID NO: 231037 - protein, 63 aa, Zea mays
  Clone ID: MRT4577_142299C.1.pep
NSPPLWDVPGALKMEMMVIPYGFPEGVVGHKVRVAGYPPPPKKSESRPRDTLTEQGRPPTREL

SEQ ID NO: 231038 - protein, 186 aa, Zea mays
  unsure (1)..(186): unsure at all Xaa locations
  Clone ID: MRT4577_14229C.1.pep
LLINWICTLLNRYHVPRSFLQPGSNDLVLFEHFGGDPSKISFVMRQTGSVCAQVSEAHPAQIDSWSSQQPMQRYGPALRLECPKEGQVISSIKFASFGTPSGTCGSYSHGECSSTQALSVVQEXLQATHSHVSMYQLNSCGSLTVLLRTLQACIGVSSCSVPVSSNYFGNPCTGVTKSLAVEAACS

SEQ ID NO: 231039 - protein, 97 aa, Zea mays
  Clone ID: MRT4577_1422C.1.pep
IKGRDFIEEVAFLSERALVIVASSVVGDSSCSRRSPYPICSIPQSQALLISPIHSPKRPSRINVPLTELNVSKCFGDRNISYIFGFLTKPAIPNMYP

SEQ ID NO: 231040 - protein, 31 aa, Zea mays
  Clone ID: MRT4577_142300C.1.pep
RVKRLLLHWYTHPTWHSTISLHQEYVSVVAL

SEQ ID NO: 231041 - protein, 1204 aa, Zea mays
  unsure (1)..(1204): unsure at all Xaa locations
  Clone ID: MRT4577_142301C.1.pep
MAGSPTQSSSCGMAAAEPCCISHAFERATRQEPGRLAVIHAAASGADSEERRFTCGDLLAAVGSLSCRIASALGSTATDTRRDREQGSGFRAAGAVVPRVVGVYASPSLEYVAAVLAVLRCGAAFLPLDPLWPEERVSWAISASNAALVVSSVGSRGATLFESSACPVLRFYGGIRRRFRDGNGGDDGEELVWPCEHEWHRKFCYVMFTSGSTGKPKGVCGTEKGLLNRFLWMQRRNPLCSDDVLLFKTSVSFVDHLQEFLSAVLTCSTLVIPPSEWRANPASLANLIKVYRISRMTLVPSLMEIILPTLAEKLSDGCNPLKILIFSGEVLSVSLWKRVYEFLPEATIINLYGTTEVSGDCAFFDCKKLPTILEQEELNSVPIGFPISNCEVSLVTNDGLSDEGEISVSGACLFTGYLADPMTSNCPEGSEVLAYYRTGDFARRLKTGELIFLGRKDRIVKIYGHRFSLEEVESTLRDHPDVSDAAVTFQSNGSLDFKAYLVLRSNNKFLKCTQGYSGLHSSRDIIAPLRNWLIMKFSXLLAASVFSXVEPLPLSLQDWSVMPLXSLQWKLTDRKTSDLXETVKIVPHRSILXLKGVYDRDNILQXGSSRSSFLHQKCXSLGVEVFSLHXFICIFSLLLHASRNLAGNXTHFSSPLVISRDANVELYAGFWLSFGPVSEYLDSNFHDQGQISKEGAYDHFAGNHWQTMDTKFSXQKVWSIGRCNRFMHGSEGMVHLEDICSYVPYNKKGYLVKIWSILLDSCVDASPLLVINNGMMSIFIGSHSYLFLCIDGXGECCLLHGILCFFFSDVPHALFFYHLRLLYQXLFKLYLMRKLVPSGVWILTFLRTCFLLVXSGSVRWSVKLEGRIECSAAITGDFSEVVVGCYKGKIYFLDMSTGKLSWTFQTDGEVKMQPVVDKMRNLIWCGSYDHYLYALNYKDRCCTYKVFCGGSIYGSPAIDMAQNVIYVASTSGLVTAVSFKEPSFRVLWQYEAGAPIFGSLAIDHQSGTVICCLVNGLVMTLNSQGSVVWKATVGGPIFAGACLSPTLPHQVLIPSRDGNLYSFDTVSGALLWVYKAGDPITASTFVDELLTSVSFGPSERFACICTSSGKVHVIRIRVDIRTRVDAKYNQEQGGDGVKSEELVQGLDAKYNQEQAGEGAKSEELVQGLASIDLPGDIFSSPLMVGGRIFVGCRDDRLHCLTVTT

SEQ ID NO: 231042 - protein, 460 aa, Zea mays
  unsure (1)..(460): unsure at all Xaa locations
  Clone ID: MRT4577_142302C.1.pep
IRHEGGAAFLPLDPSWPEERVSWAISASNAALVVSSVGSRGATLFESSACPFLRFYGGIRRRFRDGNGGDDGEELVWPCEHEWHRKFCYVMFTSGSTGKPKGVCGTEKGXYRISRMTLVPSLMEIILPTLAEKLSDGCNPLKILIFSGEVLSVSLWKRVYEFLPEATIINLYGTTEVSGDCAFFDCKKLPTILEQEELNSVPIGFPISNCEVSLVTNDGLSDEGEISVSGACLFTGYLADPMTSNCPEGSEVLAYYRTGDFARRLKTGELIFLGRKDRIVKIYGHRFSLEEVESTLRDHPDVSDAAVTFQSNGSLDFKAYLVLRSNNKFLKCTQGYSGLHSSRDIIAPLRNWLIMKFPLAMVPRLFIPMKSLPLTLSGKIDYVKLSSLVCAFEPCEIHPESSPADPHMQVIKKAFSDALLVHEVSEYDDFFSLGGNSITAAHVAHKLEIDMRLLYIYTFP

SEQ ID NO: 231043 - protein, 417 aa, Zea mays
  Clone ID: MRT4577_142303C.1.pep
MHGSEGMVHLEDICSYVPYNKKGYLVKIWSILLDSCVDASPLLVINNGMMSIFIGSHSYLFLCIDGYSGSVRWSVKLEGRIECSAAITGDFSEVVVGCYKGKIYFLDMSTGKLSWTFQTDGEVKMQPVVDKMRNLIWCGSYDHYLYALNYKDRCCTYKVFCGGSIYGSPAIDMAQNVIYVASTSGLVTAVSFKEPSFRVLWQYEAGAPIFGSLAIDHQSGTVICCLVNGLVMTLNSQGSVVWKATVGGPIFAGACLSPTLPHQVLIPSRDGNLYSFDTVSGALLWVYKAGDPITASTFVDELLTSVSFGPSERFACICTSSGKVHVIRIRVDIRTRVDAKYNQEQGGDGVKSEELVQGLDAKYNQEQAGEGAKSEELVQGLASIDLPGDIFSSPLMVGGRIFVGCRDDRLHCLTVTT

SEQ ID NO: 231044 - protein, 49 aa, Zea mays
  Clone ID: MRT4577_142304C.1.pep
VHTSHSQLRTTPLYRPCQPATYRLPSSIPVKHREDMDIALAAKSYIPAR

SEQ ID NO: 231045 - protein, 109 aa, Zea mays
  Clone ID: MRT4577_142305C.1.pep
MQATVGGPIFAGACLSPTLPHQVLIPSRDGNLYSFDTVSGALLWVYKAGDPITASTFVDELLTSVSFGPSERFACICTSSGKVHVIRIRVDIRTRVDAKYNQEQGGDRR

SEQ ID NO: 231046 - protein, 567 aa, Zea mays
  Clone ID: MRT4577_142306C.1.pep
MAAERDIDDLPRNDANYTALTPLWFLERAALTHPARASVVHGPVRYTWADTYSRCRRLASALARRSVGHGSTVAVIAPNIPAIYEAHFGVPMAGAVVNCVNIRLNAATVAFLLEHSSAEVVMVDQEFFTLAEDSLRIIADKKKGTFKQPLLIVIGDATCDPTALQDALRKGAIDYEAFLESGDPEFAWRPPQDEWKSIALGYTSGTTSNPKGVVLHHRGAYLMSLSGALIWGMNEGAVYLWTLPMFHCNGWCYTWTLAALCGTSICLRQVSAKAIFSAIANEGVTHFCGAPVVLNTIINAPPADTILPLPRVVNVMTAGAAPPPSVLAAMSKLGFRITHTYGLSETYGPSTVCAWKPEWDRLPADERARLHARQGVRYVGLEGLDVVDPKTMVPVPADGTTMGEIVMRGNGVMKGYLKNPEANAEAFENGWFHSGDLSVRHGDGYVEVRDRAKDIIISGGENISSLEVEKAVYLHPAVLEASVVARADERWGESPCAFVTLKDAVDRSDEAALARDIMRFCREKLPGYWVPKSVVFGPLPKTATGKIKKHELRAKAKELGPVGKSRM

SEQ ID NO: 231047 - protein, 117 aa, Zea mays
  Clone ID: MRT4577_142307C.1.pep
GVRVPAGVNIYPPVPTMHLDPELWGADAREFDPGRFADDPQRQRQPHGYLPFGAGGRTCLGQAFAMAELKVLLALVLSRFRLALSPAYVHSPALRLIVEPEHGVRLLLTNVEPRGAS

SEQ ID NO: 231048 - protein, 46 aa, Zea mays
  Clone ID: MRT4577_142308C.1.pep
NSEGGSFAYFSKGNLVSFMLNFLSPSGSWFGCSLPLSVNVTLVPFF

SEQ ID NO: 231049 - protein, 214 aa, Zea mays
  unsure (1)..(214): unsure at all Xaa locations
  Clone ID: MRT4577_142309C.1.pep
MAPARVGRFQMSNLPEPSKEDGSIEKTGAWNNTWSTLLRHASVYGVAAGYCLSASLLSIINKWAIMKFPYPGALTALQYLTSVAGVLLCGQLKLIEPDRLNLRXMWKFLPAAVMFYISIFTNSELLMHANVDTFIVFRSAVPIFVAIGETLYLHQPCPSFKTWLSLSTXXLGGSVIYVFTDNQFTLTAYSXAIAYLASMSIDFVYIKHVVMTIG

SEQ ID NO: 231050 - protein, 90 aa, Zea mays
  Clone ID: MRT4577_14230C.1.pep
TITYFWRGSTETINIFANKTNGHLGALCSNRPKISINWGSWTAKSLDGKDIKNAKLYADNIYQMCVSKPLLGLNSRMVVRVTFRDKTYLM

SEQ ID NO: 231051 - protein, 121 aa, Zea mays
  Clone ID: MRT4577_142310C.1.pep
TDAWADAWANASKRGSSSSRPRAASTLSRSPSTPARSTAASVGSASACASLGCSFHHWRSIATVHGCVVDKSCVWNAARTYWTTRTVLAFACWPASPLAMAQPAAGATRCGAWTAPAGASP

SEQ ID NO: 231052 - protein, 75 aa, Zea mays
  unsure (1)..(75): unsure at all Xaa locations
  Clone ID: MRT4577_142311C.1.pep
MSSTECGGGGGGAQTSWSXAVGLHRGRYSQKVILKDKPDAVVWVLPVRSVVTADYRPXNRVRILNFICSPTPHIG

SEQ ID NO: 231053 - protein, 50 aa, Zea mays
  unsure (1)..(50): unsure at all Xaa locations
  Clone ID: MRT4577_142312C.1.pep
INSTNVLQLDNYIVELTRSKDWYVKKDPLIFFRPFFFFFFFFFFFFFFGX

SEQ ID NO: 231054 - protein, 140 aa, Zea mays
  Clone ID: MRT4577_142313C.1.pep
ASEKSMHVPSVSSSENMHRASPIVPKTHSQIWFFRQDGRELSNNSSQLPMSQNHSFATEGSKKVHQRRLRSRAARPRPRPEAGTDPAATVPNPNPYRRRTVARHRVRNPARRNGAGTRVAPGRRGSGNERRSETGPAPSC

SEQ ID NO: 231055 - protein, 99 aa, Zea mays
  Clone ID: MRT4577_142314C.1.pep
MAAVIASTQNCRVRVPPLIVFTAVLLVTAAATVEPASATGWSSVTDSRSGGYSAFSLQGARKLLLQDLCIPQGYPCALAYFGLGCCSGETCYDAQQICL

SEQ ID NO: 231056 - protein, 130 aa, Zea mays
  Clone ID: MRT4577_142315C.1.pep
IKRDQVVVVRPCCVKEQGRGRAVRPCCAKKKMAAVIASTQNCRVRVPALIVFTAVLLVTAAATVEPASATGWSSVTDSRSGGYSAFSLQGARKLLLQDLCIPQGYPCALAYFGLGCCSGETCYDAQQICL

SEQ ID NO: 231057 - protein, 79 aa, Zea mays
  Clone ID: MRT4577_142316C.1.pep
NTDRLIISSLPICLSLPKRATVRKLAVSTKTLIGCVITSSTEPLDCIREPLTQARKKIAFSNSNPKSASVRSYGHNQVG

SEQ ID NO: 231058 - protein, 75 aa, Zea mays
  Clone ID: MRT4577_142317C.1.pep
TRLYIGFPPSLPPPSIEGLCYLGTTNPPPLHKCIDPKVGSGPHNKVIVRTVIFRALSSRVGFFFPPFQTFFCLPP

SEQ ID NO: 231059 - protein, 88 aa, Zea mays
  unsure (1)..(88): unsure at all Xaa locations
  Clone ID: MRT4577_142318C.1.pep
FLIHQDXENNRNFFFASGFRVSPGADKEGKRVPTCNLQGHALHETAEPMGGKEARCWTKSPYRVENNENEKIVLPQESNMMANRAWWL

SEQ ID NO: 231060 - protein, 31 aa, Zea mays
  Clone ID: MRT4577_142319C.1.pep
FHQVASPNRSKRCGESRLPSCIVGSKSGCPC

SEQ ID NO: 231061 - protein, 103 aa, Zea mays
  unsure (1)..(103): unsure at all Xaa locations
  Clone ID: MRT4577_14231C.1.pep
EEDTREAKNEEGRGTERPQTTEKEETEENQEPKQADTGKRQTGEQDKPTQGRGQQGEEQERKKXKGEEGGEGREEEQEEEEEGEEGGXEEENETEDFLRPCLS

SEQ ID NO: 231062 - protein, 685 aa, Zea mays
  unsure (1)..(685): unsure at all Xaa locations
  Clone ID: MRT4577_142320C.1.pep
MKLVTGVDLETEVELSPIAKAEEAAVFSPYSSPSTALLLQRRVVSWSTETGSPATVRVRLGDRSFDLHKDPLVSKCKYFSEASLQSGGDVVELPASSPGVREAFESVALFCYGDAVALDPFNVAAVRCAAELLGVGGLGARCDLYISQVVLQSWDDALIVLQRCLPLLPAAEELLVVSRCVEALAFMACMEILDPEQRRDQLPGAGGAASRALVGRRWDAELVKELAARDLWVKDLLALPFQFFERIVRALRRQGMKEKYVGPVVLFYANKWVLSKKTHRFWATTDDDAVDGETDANRRAAAILEGVVGLLPAESPAVAANGAIPVAFYFALLSRSLTLELSDESRTKLRGHVASNLRFARVDDLPLPEEEADGRSIADSREVRAMESIVSNHASVQRKGVEAVSELWDRYLLQFAGDPKLRPERLAELIGAIPASDRKTHDHLYEAINTYLVEHRGLSGEEKATLCGHLDCRKLSHEACVQAVQNERMPLRLIVQALFVQQMHTHRAFTECSDSFRCTRSGELVPGAGGYTPSPGCPAIPTSQPLSGSSPYDSHHHAPRDAKLRARDDASSDYETASFRIQALEQEIISLKRTLQRHNTLRXRPRLAGKARSRASGSPQTRARXTIKRRATVSGSCIGSMRWGSQRRCASRILRVFARLAVFGRGRSRGKQSKCSASTERQNCM

SEQ ID NO: 231063 - protein, 90 aa, Zea mays
  unsure (1)..(90): unsure at all Xaa locations
  Clone ID: MRT4577_142321C.1.pep
MITLTLTITIAENYCLIDSGYPNWKGYLAPYKGXKYHVSEWQHGQQPVGVKEVFDYAHSSLRNVIERFGGIPDRNDVHRITMPKTGSLCN

SEQ ID NO: 231064 - protein, 46 aa, Zea mays
  Clone ID: MRT4577_142322C.1.pep
VVQSDLRTNDCNHLYVDRFDPSFFPLHRIHSMRHDCKSIGYGRIPM

SEQ ID NO: 231065 - protein, 119 aa, Zea mays
  unsure (1)..(119): unsure at all Xaa locations
  Clone ID: MRT4577_142323C.1.pep
SARVHNVPXFSPGFGKLHARTLETLPYNCTMTSDEYKSAVLQASAHNMAGDIFHIVQSQRSXRLTYANPXEXYRALQIGNPNPYNLYAQARGCVXNAFSTAILTLDSEEQIINPPLSGT

SEQ ID NO: 231066 - protein, 161 aa, Zea mays
  Clone ID: MRT4577_142324C.1.pep
EQLTRKAALTRTLATASEVVRPSDAELLKAQADIWRIILCYLTPLELKCAVELGIPTVIYFLGGAVSTAELATVLTFHFTKLTLLRRLLRILVEWGVFTVDKQSTEEEPDRISPVTYLLVDGLPYEDHMNHTVLVLTCTLTRYIQAEIGLAEWFKRDADTS

SEQ ID NO: 231067 - protein, 108 aa, Zea mays
  Clone ID: MRT4577_142325C.1.pep
RGLWAPQEGGTKPKGNGRQIKNQFRKENKSLKTLKETYWSRGAKGLNRKTKIYGREKTREKLGETKTPKPLKGFEKKKREYFREPKLGKLGQTQKKELIFPPKPPGAI

SEQ ID NO: 231068 - protein, 39 aa, Zea mays
  Clone ID: MRT4577_142326C.1.pep
KFIDKNWLYLTMNLDQVVYYRLISEQHFCNRLEGFNWLP

SEQ ID NO: 231069 - protein, 209 aa, Zea mays
  Clone ID: MRT4577_142327C.1.pep
HTDTNSTDTQQNILERDSGVPVLETESGKRSAVAVGTRERFRAELQQVRSGRGRWRRRAAAKGSKKKQQAAEGRKSSSREAQGRAAAEMRGKSSSVVRSSEVKEKKEEEVAAAGSGKKKGSGDAGRRLGEEERLSSSRDMDGRRREVMRRRCGWWWMEAQGDGGGVGGALGCGGAGDGWRGGAPPRRPGHGGGRREEGGVRERDVMPGT

SEQ ID NO: 231070 - protein, 85 aa, Zea mays
  unsure (1)..(85): unsure at all Xaa locations
  Clone ID: MRT4577_142328C.1.pep
VVYCDNVSVVCMTTNPVHHRRMKHIEIDMHFVREKVXLGQVRVLHVLSSHLFADIMTKGLFVQLFTAFQSSLCVCDSTVVTVGEC

SEQ ID NO: 231071 - protein, 276 aa, Zea mays
  unsure (1)..(276): unsure at all Xaa locations
  Clone ID: MRT4577_142329C.1.pep
VLLLLSLPVLAGGITILLTDRNLNTTFXYDPAGGGDPILYQHLFXFFGHPEVYILILPGFGIISHIVTYYSGKKEPFGYIGMVXAMISIGFLGFIVXAHHIFTVGIDVDTRAYFTSATIIIAIPTGVKVFSXLATLHGSNMKXSAAVLXALGFIFLFTVGGLTGIVLANSSLDIVLHDTYYVVAHFHYVLSIGAVFAIIGGFIHXFPLFSGYTLDQTYAKIHFTIIFIGVNLTFFPQHFLGLSGMPRRYSDYPDAYTTXNILSSVGSFISLTAXIL

SEQ ID NO: 231072 - protein, 85 aa, Zea mays
  Clone ID: MRT4577_14232C.1.pep
FKASALVLNVLLRRARGGKKDISGLVWQPKIQRVSWPFLLGESPPENCPRIIHVCHLAAQSRADIRSIFPSETTLALGGQAILRR

SEQ ID NO: 231073 - protein, 94 aa, Zea mays
  Clone ID: MRT4577_142330C.1.pep
PPLMPQSLSSALLLATCSPSNSFTHTQSRPPPSQPALELSLVWICFVASSPHLSGTFSKNLRTKVFRLQLGMVIWLCRHPNLISTCESPMLGVG

SEQ ID NO: 231074 - protein, 176 aa, Zea mays
  unsure (1)..(176): unsure at all Xaa locations
  Clone ID: MRT4577_142331C.1.pep
EQQQQPQHQRQRGQQQHQQQXQGEGQQQXHQQXQGXXQQHEQSXEQHQGQSXEQQXQQQGEGQDKQQQPQQPKQXQQGQEKXQQQQXXXQEQQQTTRXSXNXXSXSXKXKXXXEXXRQQXSXXXXXXXQXRXXQPXSXQXXQQQXXXEXRQXEPQXXHQAXXNKXQXXNQEEQQQQ

SEQ ID NO: 231075 - protein, 104 aa, Zea mays
  Clone ID: MRT4577_142332C.1.pep
PVGWCEAFSTYPRTYDLIHGNGIFSLYQNKCDAEDILLEMDRILRPEGAVILRDNADVLNKVRSMVAGMRWKSKLLDHEDGPHVPEKILISVKEYWVGSEEQNS

SEQ ID NO: 231076 - protein, 228 aa, Zea mays
  unsure (1)..(228): unsure at all Xaa locations
  Clone ID: MRT4577_142333C.1.pep
MPFRDAAVLALMLNIRGIVEVAAINSWGDSMKATAEHYSTLTLAMVLITAVSTPLIKLLYDPSGQFARAKRRSLEHARMSADLRVLTCLYSEDHAAPLIDLLEASGSSRDSPVSLIVLHLTELVGRAASVLKPHRKSTSSGGNPTSSDRIVNAFRYLEQQAAPGAVTVSPYVAQAPFSSMHHDVCSLAHSRKANLILLPFTSPRTARGARAQXAIRSINRSVLQYAPC

SEQ ID NO: 231077 - protein, 89 aa, Zea mays
  Clone ID: MRT4577_142334C.1.pep
LGFYVFGRATVCMLPPHVLILSPHMVYALTASFVPPDDFVSVPSFLSRVSFMQPFVSQVHFFLELFLKVRPLVHRSKKKKKKKKKNTRP

SEQ ID NO: 231078 - protein, 100 aa, Zea mays
  unsure (1)..(100): unsure at all Xaa locations
  Clone ID: MRT4577_142335C.1.pep
PLGVLVFAHGEARVVVPEGLNDTRGGXPPPLACPAWRCRPRFPPAAQREPGCAGGLPMVSRPGTSRCGTTGRWWVAXCPRHCSVGAPPPGEGGSSCSGGD

SEQ ID NO: 231079 - protein, 464 aa, Zea mays
  Clone ID: MRT4577_142336C.1.pep
MAEVLHRLGPRGVMAAAGVSRGWRDCAGRVWRAAEELRLRVLASSGAGLLAALLPRCPALSRLHLRMESDVDGTTLACIAFSCPSLRTLEITMAADAVNRMTGEDLSRFVSEKSSLSALKIGGCSNLDILNLCSSSLSILWLSDLCSLSKSVMNCPNMSELSLCFTEHSSDCTNLITLMDGLGRTCPNLEKMHISSKQLSNEAVCALENANLRGLFMLSLILGSKITDAAVASIVRSCASLELLDLSGSSISDNGVGMICKAYPRTLSRLLLALCPNVTTRGIQLATAQLPCLQLMDCGMSLCANVKNEKEGPYFGEINGGIRIIRKLSILKRQPIHQKLIIKHGNLKKLSLWGCSALDALYLNCPELNDLNLNSCTNLHPERLLLQCPNLKNVYASGCQDMLIGAIRNQVLNEFAAVEPSLPCKRLADGSKRVQLPQFLKQQPSKDNKLIELSQTQCTVHLGS

SEQ ID NO: 231080 - protein, 122 aa, Zea mays
  Clone ID: MRT4577_142337C.1.pep
FFLGWPHSFFWFPVSITPTPNPNGWRVKVKFSTSGAPLPHVFKGKGFNSPTPKHHSPKSISIKSNPGPPPPNFKFPFPRPSPTATNPIYPPFVRSFPPQHQLKTPPPPKKKKNPTQKNKPNN

SEQ ID NO: 231081 - protein, 85 aa, Zea mays
  Clone ID: MRT4577_142338C.1.pep
GSFLLLRQLKKGGFSKRLICGVTGFFYKSVCLKTAGGLFNFGAIKKKLRRRKEAVIMFDLKGRPPFLFIFFFFFFFFFFFFFFFL

SEQ ID NO: 231082 - protein, 388 aa, Zea mays
  unsure (1)..(388): unsure at all Xaa locations
  Clone ID: MRT4577_142339C.1.pep
QRKLQFTKEIDXEHKRTILLVNKADLLPLNIRKRWADYFKAHDILYVFWSAKAATATLEGKKLSGYSEGESASLDLDTKIYERDELLMKLQAEAESIVAQRRISPTVDDHEASSSDSVSSVTKHVVVGFVGYPNVGKSSTINALVGEKRTGVTHTPGKTKHFQTLIISEELTLCDCPGLVFPSFSSSRHEMVACGVLPIEXFPVPKHRGAIQVVANRVPRNILEQVYKITLPKPKAYEEASRPPTAAELLMAYCTSRGHVSHAGLPDETRAARQILKDYIDGKIPHFELPPGEIDDETDAEDNSDLEGSSTAAADQSDDGASDEDDEEINRAEPNISHALNDLASFDMNGQMTKGSTKKKKKEASHKHHRKPQRKKDRSWRVGNDGAD

SEQ ID NO: 231083 - protein, 105 aa, Zea mays
  Clone ID: MRT4577_14233C.1.pep
LVGLWPMVSGHIVKPGVGANLNKEIFYVPQRPYTAVGTLRDQLIYPLTADQETEPLNYGGMVDLLKNVDLEYLLERYPLDKEVNWGDELSLGEQQRLRMARLFYH

SEQ ID NO: 231084 - protein, 102 aa, Zea mays
  Clone ID: MRT4577_142340C.1.pep
AKSREEKPKSSGRPYEVHIYPGGAHANMNTTPEARKRKKRMGLTDENQEADDQARSRTTTRKGRTHGTAGKCAARKGEEPGPMNKREKNKRRRNRNHAKGRG

SEQ ID NO: 231085 - protein, 74 aa, Zea mays
  unsure (1)..(74): unsure at all Xaa locations
  Clone ID: MRT4577_142341C.1.pep
ITLQVQSSDTIDYVYANIHXRTASIQTSXQLILPFKQLNDSLTLAHYIIHNQSTLHLVLRLILGMQIFVKTLTC

SEQ ID NO: 231086 - protein, 211 aa, Zea mays
  Clone ID: MRT4577_142342C.1.pep
MDSFFQRAFGDPMCSEDSNVVQQGIDKCPFLRNINEPTSFSLTSINFPAPATGAKGPIFEDGPNFDTAFRVFHGRDGVVPLSEGAFAHIEKPLPKPTPEFNPLAAKAATISLSGFGGFFSFGDFSNKRNKQNSNKKNPNNLPQNKGQSNNNHEAMSNDWLENGQCPLAKSYRAIGGVVPLVAKLLTPPAGMKLTCPPAIVAAPCRISRTAV

SEQ ID NO: 231087 - protein, 174 aa, Zea mays
  unsure (1)..(174): unsure at all Xaa locations
  Clone ID: MRT4577_142343C.1.pep
MACFASAVLLAAVLLMAGRLTHAGPSTAEVFWRRAVLPGSAVPNAVLRLLRPYNHFVSEANAEDTGRSNAPFNYQNYKRSXTATSPPGDRSEAGLAGGRGARDDTPFSYSYRAPSQQGVPASGGARDDTPFSYSYRAPSQQEVPASGGARDDTPFSYSYRAPSQQEVPVQRSAR

SEQ ID NO: 231088 - protein, 49 aa, Zea mays
  Clone ID: MRT4577_142344C.1.pep
GGPYRQSVPHEGQAPNGSKPRPDCKVQTSIRAGTSGKQGQVVGAELWPL

SEQ ID NO: 231089 - protein, 241 aa, Zea mays
  Clone ID: MRT4577_142345C.1.pep
MATTAGAGGAGQLKLLGAWPSPFVNRVRMALHLKGLEYENVEEDLTNKSDQLLASNPVHKKVPVLLHGDTPVSESLVIVEYLDDAFPGAGQALLPADPYERAVARFWAAYVDGKLHGMMVKAILGATEEERAAATADALAAMETLEGAFAECSGGKEFFAGDEPGYLDVVLGGFIGWLRAWDKVGGVKLLDGGRRTPRLAAWAERFAALDVARDVIPDPDHIAEFAKVLQARSAAAAAAGN

SEQ ID NO: 231090 - protein, 49 aa, Zea mays
  Clone ID: MRT4577_142346C.1.pep
ELGHVTKQGLVFFLFINLLFLITYFPNFEFYVGACLICFWNFTWGFASE

SEQ ID NO: 231091 - protein, 237 aa, Zea mays
  Clone ID: MRT4577_142347C.1.pep
MATAGGGAGHLKLLGAWPSPFVNRVRMALHLKGLEYENVEEDLTNKSDLLLASNPVHKLVPVLLHGDKPISESLVIVEYLDDAFPGAGQAVLPADPYERAVARFWAKYVDGKLHGMMVKALMGATEEERATATVDALAAMDTLEGAFAECSGGKKFFAGDAPGYLDVALGGFIGWLRAWDKVGGVKLLDAGRVPRLATWAERFAALDVAKEVIPDPDHIAEFAKVLQARSAAAATSN

SEQ ID NO: 231092 - protein, 204 aa, Zea mays
  unsure (1)..(204): unsure at all Xaa locations
  Clone ID: MRT4577_142348C.1.pep
MAAMADAEAPFLQPAEGDEAAALAGVCDFRGRPVRRAGSGGWRSALFVCVVEMASSFGYFGVSANLITYLTGPLGHSNAAAAAAVNAWSGTACLMPLLGAFVADSWLGRYRSIIVACTLYVLGYGMMTLVTTLQAQRSSPAGDIHSYSRPSSLQVDLFYASLYLIPLAQGADKPCGLAFAADQFDADXPKERASPSSPFNWWYF

SEQ ID NO: 231093 - protein, 45 aa, Zea mays
  Clone ID: MRT4577_142349C.1.pep
MMQQKLAMLVTRCAHLDLCLIMRCFLLSIGILFFFHMARIVSEQV

SEQ ID NO: 231094 - protein, 95 aa, Zea mays
  unsure (1)..(95): unsure at all Xaa locations
  Clone ID: MRT4577_14234C.1.pep
KGGGGPXEKDIGXQKSCNPGLGSGLVKRFNIRRNTSRRDYGGVIMDDGCGREFDGDADDTSRLVWNFWEDRSNLGGNKRLWTGKSGDEGEESGGA

SEQ ID NO: 231095 - protein, 72 aa, Zea mays
  Clone ID: MRT4577_142350C.1.pep
LLSNLFANKGIWGNVLRISNFMSYQGMTKVIGRSVIKVDGEIPQFGNEVGSYFCKDEMFFILWNLSNMGAFI

SEQ ID NO: 231096 - protein, 82 aa, Zea mays
  Clone ID: MRT4577_142351C.1.pep
AASVPAFAQSAPQTILIGLAAPLTGPSARIGKDLQNGAQLAIDDANAKHPTIGGKPVVYKLAAADDQSDPRTAVAVAQQLVD

SEQ ID NO: 231097 - protein, 51 aa, Zea mays
  Clone ID: MRT4577_142352C.1.pep
VVALALRRLLLVASTAVVTAGLVCVAFGESHEDGDNSQSSGVYQIRHHLCL

SEQ ID NO: 231098 - protein, 281 aa, Zea mays
  unsure (1)..(281): unsure at all Xaa locations
  Clone ID: MRT4577_142353C.1.pep
DESRDGVKKRRRSPGRGSGSSGTSTENGVSQPKLIMFNSRITYADTVEATRQFDEENVLSRGRHGLVFKACYSDGTVLAILRLPSTSADGAVVIDEGSFRKEAESLGKVKHRNLTVLRGYYAGPPPDVRLLVYDYMPNGNLATLLQEASHQDGHILNWPMRHLIALGVSRGLAFLHQSGVVHGDVKPQNILFDADFEPHLSDFXGLEPMVVTVXXXXXXXXXXXTSAATPVGSLGYXXXXXXXXXXXXXEGDVYSFGIVLLELLMSRRPTAGTAACQIHSV

SEQ ID NO: 231099 - protein, 48 aa, Zea mays
  Clone ID: MRT4577_142354C.1.pep
IRTLCCSFFDIFEIQSDSVFLMLIKVIITIIMDNKFIMPQMFENLIES

SEQ ID NO: 231100 - protein, 64 aa, Zea mays
  Clone ID: MRT4577_142355C.1.pep
GSAAVTQILIKWEGIPVEMASWEDYTVLQSRFPNSSIWGPAGASGGGTVTSVLHQDQANTVADD

SEQ ID NO: 231101 - protein, 121 aa, Zea mays
  unsure (1)..(121): unsure at all Xaa locations
  Clone ID: MRT4577_142356C.1.pep
KKLFSLNPAVGGEXQLLPYIPLASACGQRQQLLTLHQXCALNPAAYLQHYILLPFSLLAXANRAYFLTHPQXLPFYQHSAANPKTLLQLXQLMPLVQLALTDPSDSYQQHIIGGALFHIAY

SEQ ID NO: 231102 - protein, 73 aa, Zea mays
  Clone ID: MRT4577_142357C.1.pep
FLPGRRPIIVFFAMVLLISSSSGCVCLLFCSPHSCDELNKCLCAPVVVVDNRVLSLYLCLANSFGWLLTLLLW

SEQ ID NO: 231103 - protein, 70 aa, Zea mays
  Clone ID: MRT4577_142358C.1.pep
PCSQLANVTPVAFLSHRLGYPFNWHDAPSAGTMLQRLQLLPFTLRVLTCPPTFYQQPIMGGALLYIAYQL

SEQ ID NO: 231104 - protein, 41 aa, Zea mays
  Clone ID: MRT4577_142359C.1.pep
NSRDSSRSCLSQHRLHWGSRFLPGTNGSIPLTDPNFRSIPW

SEQ ID NO: 231105 - protein, 126 aa, Zea mays
  unsure (1)..(126): unsure at all Xaa locations
  Clone ID: MRT4577_14235C.1.pep
MSGSTGERSFADIITSIRYWVIHSITIPSLFIAGWLFVSTGLAYDVFGSPRPNEYFTESRQGIPLITDRFDSLEQLDEFSRSFXRPPMTIDRTYPIFTVRWLAVHGLAVPTVFFLGSISAMQFIQR

SEQ ID NO: 231106 - protein, 64 aa, Zea mays
  Clone ID: MRT4577_142360C.1.pep
PKPTDRSLYRMQPRSSKTRRSSPRSAVAEAEAMNGAQLFSVDKGLAARPWHSPQRHVYSALAVG

SEQ ID NO: 231107 - protein, 144 aa, Zea mays
  Clone ID: MRT4577_142361C.1.pep
LELKNPFVRNWIDHLWFELRVVKSDGALSAEMVYMFAEWYKPGCLLEYPLGGTGAIIDALVSGIEKFGGRLALRSHVEKILIENGRAVGVKLQSGQVIRAKNAVVKHASMWDTQNKKEPMLYENHMEINSKHLHNVNRGGISSS

SEQ ID NO: 231108 - protein, 54 aa, Zea mays
  Clone ID: MRT4577_142362C.1.pep
EASISFHGGFLSRRAIHRGLLPRPALLALPLSPRPREGFLHIIFKMPGKVFGQS

SEQ ID NO: 231109 - protein, 42 aa, Zea mays
  Clone ID: MRT4577_142363C.1.pep
GNKTFFFSFQLSIQGIAHTDPAPQGEGGHIITQTSPLKDPTS

SEQ ID NO: 231110 - protein, 271 aa, Zea mays
  unsure (1)..(271): unsure at all Xaa locations
  Clone ID: MRT4577_142364C.1.pep
MIWFQGHKQWLAEVQFLGVLEHPNLVKLIGYCAVDSEASKHRLLVYEFMPNKSLDDHLFNRAHPPLSWRLRLQIMLGAARGLDYLHEGVPEVQVIYRDFKASNVLLDAEFKPKLSDFGLAREGPTEGKTHVSTAVVGTHGYAAPDYIETGHLTVKSDVWSFGVVLYEILTGRRSLERSRPXEEQKLLGWVRQHPXDGAGFRAIMDPRLGGRYPLAAAREVARLADRCLGKNPKERPAMRDVVEVLERVVQMEPTTTTADKRGGDGRLPAKR

SEQ ID NO: 231111 - protein, 76 aa, Zea mays
  unsure (1)..(76): unsure at all Xaa locations
  Clone ID: MRT4577_142365C.1.pep
TLELYHPYSKHRHVGVGEVSKGVPRLPPVPVKRHVMFLXTKSAYKDSKLGHRWYKWQTVKCCSQRVGEIIYLSXGI

SEQ ID NO: 231112 - protein, 36 aa, Zea mays
  Clone ID: MRT4577_142366C.1.pep
LYVLATTCCLISDTLMIHFLIYSTFYNLSVSPLTLC

SEQ ID NO: 231113 - protein, 118 aa, Zea mays
  Clone ID: MRT4577_142368C.1.pep
NKTLKKNFFSLPGGPFKGAFFAFFLPPGGGLAFLFGAPFPLLGGFFPFPGPVFYPGLLGKPLGFPNFIGLRKFPFSPVVFLVKGPPRSAFSIIWPPSCGIGPPFCWCFLRGGGGVSPR

SEQ ID NO: 231114 - protein, 129 aa, Zea mays
  Clone ID: MRT4577_142369C.1.pep
NHRRVYLSGRHCTTLPCHHIREPGRPKPRERLGCSKPPNPAPARPLAGNGVASPAPVPPAISCSNVFKTLIPCLAVVQIGRAIPPQPCSGEIRSLLQQANNTPDRRTICGCLKNVANGANGSGTYISRA

SEQ ID NO: 231115 - protein, 83 aa, Zea mays
  Clone ID: MRT4577_14236C.1.pep
SGPCCILGWSGTQIWDRIYIACKPNRTGGEPCWYVWVHFQGRARPYDQKKNDDRAPYVRGRFHCTHTLVCEATTTRHMLQWVN

SEQ ID NO: 231116 - protein, 40 aa, Zea mays
  Clone ID: MRT4577_142370C.1.pep
FGGCIKAMPITFYYAMSPFSILSFMLVLLYTQTYIRLDEF

SEQ ID NO: 231117 - protein, 225 aa, Zea mays
  Clone ID: MRT4577_142371C.1.pep
MAMSDTGSSFAQWAALYHHHHHDDAGPVLLPPDDDAGITAAAAAVASPTSGGSSGGSPTKAAAHLLHGVEGPRIGKPAARRRSRASRRAPVTLLNTDTANFRAMVQQFTGIPAPPAGAFGAPVINFAAEYGFPPSSAAVMSFDHQLHRSQHPAPLQEQLRRQQQQQQYAGAASPFGYSNGGGGGLLQERRRRLRPRRLPRVRRVGGGEDVPAEHPGGPDAAHARR

SEQ ID NO: 231118 - protein, 99 aa, Zea mays
  Clone ID: MRT4577_142372C.1.pep
SASARAIGSLGGRLGGSWGARVDGLGAGQHCGGRGGDDDEDGEEDPLHLHLAHAVVVVRRRRIALGTGSVGLFARMTTARVILVSLAGSYWRLLVLLSV

SEQ ID NO: 231119 - protein, 225 aa, Zea mays
  Clone ID: MRT4577_142373C.1.pep
MAMSDTGSSFAQWAALYHHHHHDAGPVLLPPDDDAGTTAAAAAVASPTSGGSSGGSPTKAGAHLLHGVEGPRIGKPAARRRSRASRRAPVTLLNTDTANFRAMVQQFTGIPAPPAGAFGAPVINFAADYGFPPSSAAVMSFDHQLHRSQHPAPLQEQLRRQQQQQQYAGAASPFGYSNGGGDVFAPAASHGFAASAEERMFLQSIQAAQMPHMPAANTSTNGFFA

SEQ ID NO: 231120 - protein, 97 aa, Zea mays
  Clone ID: MRT4577_142374C.1.pep
DAAQRKQKLRFSDYFSRLKPTASTNSSCTVMNTCTFKIRSKLRTIASSSNSTTKPTTTASTTYYTNTTLEQSTTKQSTGRLPTVGITQTFNITRKKK

SEQ ID NO: 231121 - protein, 34 aa, Zea mays
  unsure (1)..(34): unsure at all Xaa locations
  Clone ID: MRT4577_142375C.1.pep
SRARYTLVLQHTCPMQPSNYHMRGTXSLHVLQRS

SEQ ID NO: 231122 - protein, 103 aa, Zea mays
  Clone ID: MRT4577_142376C.1.pep
IPLPVRASPPLPSILRATYRRSARSCLPQPANRRRGTIRARARVTLALPPPAVTPCIPRRRHLPDSYPITLPDGPGSHRRLHLLDEMLCRGNPADPVGVHHRA

SEQ ID NO: 231123 - protein, 159 aa, Zea mays
  unsure (1)..(159): unsure at all Xaa locations
  Clone ID: MRT4577_142377C.1.pep
MQGGGCAQDDFFDQMLSTLPAAWSDLGSGKSPWELPAAAGAVTEDTAALDEPALLASRLRHHQIGGGEKPLMLHLSDLHGLGAGAGDDAGFMPLPLFTQHLARDDVDAAFKSPNAAGGDRELYNGFGAAGNMHTVAVHQXASFGQGGSMPAAPQSFGGG

SEQ ID NO: 231124 - protein, 119 aa, Zea mays
  Clone ID: MRT4577_142378C.1.pep
NPVLKNKSKFWVVFTLPVRPADEARRGRQRTARAPAQLGHCVGVARLAGARTGHGSGDRTPNAKGPPASSAGELSAKGRKKPEGARLPPPRSRAQPNFIGSPRGEERPPPGEKPPDAPL

SEQ ID NO: 231125 - protein, 47 aa, Zea mays
  unsure (1)..(47): unsure at all Xaa locations
  Clone ID: MRT4577_142379C.1.pep
SHRRQLPLIYTFMHTSRRRVGSSLGGSAAYMTLSXPYTTLKRYTYFL

SEQ ID NO: 231126 - protein, 63 aa, Zea mays
  Clone ID: MRT4577_14237C.1.pep
FSRINNKFAFIYPKRAFVHWYVGKGIKKGNFSKARKNLPPLKKNFKKFPPKGAIYSVYKKKKY

SEQ ID NO: 231127 - protein, 116 aa, Zea mays
  Clone ID: MRT4577_142380C.1.pep
SSSKAHNYITNVSYHSSYCSKAHNYITLAAPELISHKSTKATLMLQAVQKPSDNHSSFLYPPVLRYKLSLSRTPLPVVWCISHRLEVEHFVGEKISHRLQINNRLFVLRLSISDAW

SEQ ID NO: 231128 - protein, 60 aa, Zea mays
  Clone ID: MRT4577_142381C.1.pep
ALHVVPMVHHELLLARLVLYIAFRVLLRIDVVAEAVEALLHPYDEDRHVSEYVSAHMDGT

SEQ ID NO: 231129 - protein, 124 aa, Zea mays
  Clone ID: MRT4577_142382C.1.pep
NSSKAHNYITNVSYYSSYCSKAHNYITLAAPELISHKSTKATLMLQAVKPSDNHSSFLYPPILRYKLSLSRTPSTRRCCSLMHQLQLVQSRLIIIKLMAHINLEVLSKGLRLSCPLEVPFGSIT

SEQ ID NO: 231130 - protein, 119 aa, Zea mays
  Clone ID: MRT4577_142383C.1.pep
CNIWCGGCNSMIANGIRFNAKKKQVGNYYSTKVYTRAKSEQQSKIAARKVQQGWSQDFYPCEKEPDYVHVYVWIELTADIILNLSTVTHKKCVICFFPDIRNVLCGLCWLLERHSKCRL

SEQ ID NO: 231131 - protein, 74 aa, Zea mays
  Clone ID: MRT4577_142384C.1.pep
SSSKAHNYITNVSYHSRYCSKAHNYITLAAPELISHKSTKATLMLQAVQKPSDNHSSFLYPPVLRYKLSLSRTP

SEQ ID NO: 231132 - protein, 815 aa, Zea mays
  Clone ID: MRT4577_142385C.1.pep
MEVATHMARSSTVYWSLLAVFSWLAAAGAGLGDGGRSPPQVYVVYMGAVPPRTSPSLLLESHLRLVSTVLKRGRRADSLVVHQYKHGFSGFAARLSKDEAAALRRKPGVVSVFADPVYQLHTTRSWDFLQQTTTAVKIDDAAGAGPARRSGNKKGKAAAPANDPSSSSPAADTIIGLLDSGIWPESPSFNDAGFGRPPSRWKGVCMAGDDFNSSNCNNKLIGARYYDLSSVRGPAPSGGGSPRDDVGHGTHTSSTAAGSAVTGASYYGLAPGTAKGGSAASRVAMYRVCSQAGCAGSAILAGFDDAIADGVDVISVSLGASPYFRPDFSADPIAIGSFHAVAKGVTVVCSAGNSGPGAATVVNAAPWILTVAATTIDRDFESDVLLGGNNSAVKGVAINFSNLDRSPKYPLITGAAAKSSSVSDTDSASHCEPGTLDSSKIRGKIVLCHHSQSDTSKLVKADELQSAGAAGCILVMNDNESSVATAYLDFPVTEVTSAAAAAIHKYIAAASEPVATITAAATVTECKPAPVVAYFSSRGPSGQTGNVLKPDIAAPGVNILASWIPASSLPPGQKQPSQFNLVSGTSMACPHVAGAAATVKAWNPTWSPAAVRSAIMTTATTLNNEREPMTTDSGSPATPYDYGAGQVHPAGALDPGLVYDAGEDDYLRFLCNYGYNASTVRLVASTLPSGFSCAANVSKDLISDLNYPSIAVTGLLGNKSAAAGRSRTVTRTVTNVGAQEAASYTVAVSAPPGLDVKVTPSKLEFTRGVKKLAFQVSFSRSGNDDDAAAAKGALSGSITWSDGKHMVRSPFVVTS

SEQ ID NO: 231133 - protein, 73 aa, Zea mays
  Clone ID: MRT4577_142386C.1.pep
PFKFPSLNGTYLKNSHRSCECHLKFCCFHLLKNDLLNSYMFLLSWANSSAPWCHLVMEKFRTKGQVKRKAGIN

SEQ ID NO: 231134 - protein, 110 aa, Zea mays
  Clone ID: MRT4577_142387C.1.pep
MPPLCLLILSAEQASSGYIVKGGKADLGRSWLTSREVLEGLVYLHEQGVIHRDIKGANILSTKEVNRMYHESHEFGGHMFNTLLEGVLDKESLYLKTGGYKKLEWLSEGF

SEQ ID NO: 231135 - protein, 189 aa, Zea mays
  Clone ID: MRT4577_142388C.1.pep
WDLEPAGKPDPTVAATAADVVARPLPDPHLAQCPPLDPQCTARSRPQPLTAATSNAPRTIATSTSSFWSRDPWSTPLEEPGSGLPGMVSSFRHLSRQRCTPSSPNGAADQARTLSMLVPRRCLYSLLHPFCSCACASSSTDPSTVAPARCEPRHASAYASKTCLCICVRALATQHRLRSGVYLLAILYI

SEQ ID NO: 231136 - protein, 108 aa, Zea mays
  Clone ID: MRT4577_142389C.1.pep
MPPLRLLILSAEQASSGYIAKGGKADLGRSWLTSREVLEGLVYLHEQGVIHRDIKGANILSTKEGMYHESHEFGGHMFNTLLEGVLDKESLYLKTGGYKKLKWLSEGF

SEQ ID NO: 231137 - protein, 140 aa, Zea mays
  Clone ID: MRT4577_14238C.1.pep
RISCLPQPCTVAQTQGQTSLFIGVWGDKENIKNHISSIVAHKSSLNKAPPIGCSSLPSSRSSSLVVAICQCGIPPPKDNTSRISWLSQRTCGCAFIADDRGGCISRLQPSNHHLCFLSRCRRFPLLRLSARVKNKAGNDW

SEQ ID NO: 231138 - protein, 115 aa, Zea mays
  unsure (1)..(115): unsure at all Xaa locations
  Clone ID: MRT4577_142390C.1.pep
MATKIFSLLMLLALSTWGANATIFPQWSQAPIASLFSPYLPSIIASIWGRAGLQPYRLXQAIAARNIPLLPLLVXQLAALFLVQRLVQTIRGQQVXQLVVFVMNQGGLGKFFVYF

SEQ ID NO: 231139 - protein, 54 aa, Zea mays
  Clone ID: MRT4577_142391C.1.pep
VTLYTTLVAACFRTSSSTVYIRAVCFVLSNVRAFCLLTQARASAQGSLLLSYNR

SEQ ID NO: 231140 - protein, 102 aa, Zea mays
  Clone ID: MRT4577_142392C.1.pep
GSSRKRKQRKEKGREEMARKGSSTWKVKGPAASDPQQGGAQCTFTRGVPLERQTVRALPIKNQAGQRGSTATRESWVGPKVYSVPGLLKFTPECNEVKLTAQ

SEQ ID NO: 231141 - protein, 37 aa, Zea mays
  Clone ID: MRT4577_142393C.1.pep
GNWVYWVGPLIGGGLAGLVYGDVFIASYQPVGQQEYP

SEQ ID NO: 231142 - protein, 76 aa, Zea mays
  unsure (1)..(76): unsure at all Xaa locations
  Clone ID: MRT4577_142394C.1.pep
MADPRVLFDMNVGGAPAGRIVMELYANEVPKTAENFRALCTGEKGVGKSGXAVHYKGSTFHRVIPEFSVQGGDFTR

SEQ ID NO: 231143 - protein, 78 aa, Zea mays
  Clone ID: MRT4577_142395C.1.pep
VVLALADRTKALDSRMIIIARAKHYTEEYYAQQKEVVQLKRDARLKGALDVSLQVKLLYVDQIHGSNGMHLKSLKILQ

SEQ ID NO: 231144 - protein, 71 aa, Zea mays
  Clone ID: MRT4577_142396C.1.pep
YLSNINILEGGDFTLGALVSTQHNQVRSKDIQANADTRWAKNYLPAFSKYKRSARALRKHPTVCAQIHGHP

SEQ ID NO: 231145 - protein, 124 aa, Zea mays
  unsure (1)..(124): unsure at all Xaa locations
  Clone ID: MRT4577_142397C.1.pep
APPIPSAPXPISPFWPXQSPPWPPAATPTRPAPPVXPRPPHTQQQPPPGGSPAAPXPPPPXPPSPAPPSRASSTRRPPTIPPSRSTWAPXSPQNPLXPPPQARPSXPPQKPPIRPPAPGSTSSA

SEQ ID NO: 231146 - protein, 68 aa, Zea mays
  Clone ID: MRT4577_142398C.1.pep
IKNKYLGGVCVLKNYGSPSQHWLKRLALGKFPLVFIRCSCSSHFVLFVKPPNTPLRSGFRDLIKILCP

SEQ ID NO: 231147 - protein, 88 aa, Zea mays
  Clone ID: MRT4577_142399C.1.pep
ARILYSGRDPRVRLKGGTRDGRQRLQYGYGQQEYTTATSMQCYVQEREHVSHRYVASERCIDCEVVSEQHLLDAHDATIIHCRLAYHR

SEQ ID NO: 231148 - protein, 55 aa, Zea mays
  Clone ID: MRT4577_14239C.1.pep
PHSYAYFSLHMLPQNLLNELRLFINLIMPNTNMLLHHLYSHCFLFPTNILPILYQ

SEQ ID NO: 231149 - protein, 683 aa, Zea mays
  unsure (1)..(683): unsure at all Xaa locations
  Clone ID: MRT4577_1423C.1.pep
ARAVVGQDAIKTALLLGAIDREIGGIAISGKRGTAKTVMARGLHAMLPPIEVVVGSIANADPNSPDEWEDGLADQIQYDSDGNVKSEIVKTPFVQIPLGVTEDRLIGSVDVEASVRSGTTVFQPGLLAEAHRGVLYVDEINLLDDGISNLLLNVLTEGVNIVEREGISFRHPCKPLLIATYNPEEGSVREHLLDRIAINLSADLPMSFDDRVEAVDIATRFQESSKEVFKLVEEKTETAKTQIIFAREYLKDVTISTEQLKYLVMEAIRGGCQGHRAELYAARVAKCLAAMEGREKVFVDDLKKAVELVILPRSILSDNPQDQQQEQPPPPPPPPPPENQDSSEDQDEEDEDQEDDEEENEQQDQQIPEEFIFDAEGGLVDDKLLFFAQQAQRRRGKAGRAKNVIFSEDRGRYIKPMLPKGPVRRLAVDATLRAAAPYQKLRREKERDKTRKVFVEKTDMRAKRMARKAGALVIFVVDASGSMALNRMQNAKGAALKLLAESYTSRDQLCXWHLSQVSIIPFRGDYAEVLLPPSRSIAMARKRLEKLPCGGGSPLAHGLSTAVRVGLNAEKSGDVGRIMIVAITDGRANVSLKRSTDPEAAAASDAPRPSSQELKDEILEVAGKIYKAGMSLLVIDTENKFVSTGFAKEIARVAQGKYYYLPNASDAVISAATKTALTDLKSS

SEQ ID NO: 231150 - protein, 127 aa, Zea mays
  unsure (1)..(127): unsure at all Xaa locations
  Clone ID: MRT4577_142400C.1.pep
TILTMGTQLQQALGDVATLYSIAYLEQLLVAFNRLALANVAAYQQQQXLQQLVSGLNQLVMVNXIDYLQQRQLASFSPITIGNACTYMQXQALQQLKLXQIVPALTELADSNPAAYLPHLLAFNQLT

SEQ ID NO: 231151 - protein, 226 aa, Zea mays
  unsure (1)..(226): unsure at all Xaa locations
  Clone ID: MRT4577_142401C.1.pep
MPKRSMLSLKDSREFQLHLLFLLLRICDPLGIISIFTRTTTTSTILQTSIALLFERMKHLLYCIAHAPHSIQPAVIPIHGVSMEVNYGTNKKKVFIYTHPGIDHHMTILWLLRTXQLELLGLSTXLAADLLSVLATDNAXLQLLQDVGRTDIXPCAELSHGRITRXTTVMTASSVHALEDMTNHNLPPPTTYPIDDSSAVFPAEKSYAEPGXVTMVSLGPITNLDL

SEQ ID NO: 231152 - protein, 91 aa, Zea mays
  unsure (1)..(91): unsure at all Xaa locations
  Clone ID: MRT4577_142402C.1.pep
HPPTGEAGPPPGPGRGNPGRPTGRGAPGRPTSRGGRGPPSPPGSRTSPPPPPSSGPGXGRRPPXTPPVRARDSSPGNSPLPPGHPETVEAS

SEQ ID NO: 231153 - protein, 100 aa, Zea mays
  Clone ID: MRT4577_142403C.1.pep
MYLDLCLHEKLLIYYCCLSVADRMCRSGAIDLICIDSVSALTPRAEIEGEIGMQQMGLQARLMSQALRKMSGNASKAGCTLMFLNQIRYKIGVFYGNPEV

SEQ ID NO: 231154 - protein, 169 aa, Zea mays
  unsure (1)..(169): unsure at all Xaa locations
  Clone ID: MRT4577_142404C.1.pep
MGSLTVDVESGTAATSDDSILSSSGIHPYLRRLMVVGLAGRFELGLGSQHGARPNLNRALKRRDDDGAWWMWPAVPVKDLTIAPPAPPAPPAPNAAVPQAAAAAAAAPXKKKSKKKKVVKAMAKGNEELLPNAKCKEEEADASVDDAVANGDGDANSAPTNAPKARLGL

SEQ ID NO: 231155 - protein, 59 aa, Zea mays
  Clone ID: MRT4577_142405C.1.pep
VSHLCRVLVLRPWIRCRVEQMSNSRVSVRMPYLPHRHFGGNLPPHSSRHLVHSQDSAQV

SEQ ID NO: 231156 - protein, 73 aa, Zea mays
  Clone ID: MRT4577_142406C.1.pep
GSHTSAAPPPHQTWRWPLAWTRAPASYIRLKPLWGKEVSLKLPPYPKMQIQLTVLLSAGMICRRAYSLRSIKI

SEQ ID NO: 231157 - protein, 120 aa, Zea mays
  unsure (1)..(120): unsure at all Xaa locations
  Clone ID: MRT4577_142407C.1.pep
DRIHPPLILLISAGASIMGCGTALFLPSSVVQRLAYWLIRLALCIATNGGAWMATAVLTTNMRNLPLILCAGAGILKGYWGLSASGXTEVYTGELRLXHMNHRLSLGLLIPAECLLEMYF

SEQ ID NO: 231158 - protein, 91 aa, Zea mays
  Clone ID: MRT4577_142408C.1.pep
MAEEKHHHHHLFHHKKDEEQEEQLAAGGYGESAEYTEATVTEVVSTGENEYDEYKKEEKQHKHKQHLGEAGAIAAGAFALVRSPSDPILLE

SEQ ID NO: 231159 - protein, 66 aa, Zea mays
  Clone ID: MRT4577_142409C.1.pep
RGHAQYEKHEAKKDPEHAHRHKIEEEVAAAAAVGSGGFAFHEHHEKKKDHKEAEEAGGEKKHHFFG

SEQ ID NO: 231160 - protein, 69 aa, Zea mays
  Clone ID: MRT4577_14240C.1.pep
GFPKFFLQKKTRGWGPKNLYQKVKILGLRNRDFGSFNVWNTIGSHPMGGLWGNKRVLNFFSKENSRPWG

SEQ ID NO: 231161 - protein, 63 aa, Zea mays
  Clone ID: MRT4577_142411C.1.pep
KKKKKKLKKKKKKKGKKEKKKKKKKKKKKKKKKKKKKKASRFKGSKFTYPSFQLLNFSIGYPK

SEQ ID NO: 231162 - protein, 57 aa, Zea mays
  Clone ID: MRT4577_142412C.1.pep
LSQDDDMGQRLIELLTAVLCEEDTLASVYNTADASFFDPALCYYTDEARTSCLTMIH

SEQ ID NO: 231163 - protein, 365 aa, Zea mays
  unsure (1)..(365): unsure at all Xaa locations
  Clone ID: MRT4577_142414C.1.pep
MAPSAATQKSSLEVLLETLKKRDEQPKDAPPTLPARPTCHGQLPTTRRSSLPAGFMLENDMATVAATEAVVVDKKADAKIEIAGLEKCHRYGVMHRDLKPENFLYASKDSSPLKAIDFXGMFVFFRPGERFTEIVGSPYYMXAPEVLKRNYVPEVDVWXSVGVILYILXLCGVPPFXAETEQGVAQAIIRSVVDFKREPXPELKKKALRVIAEHLSAEEVADIKQIFDKMDVNKNSKLTFEEFKVGLRKLGNQMHDSDLQILMDAADVDRNGTLDYEEFVTVSVHVRKIGNNEHIQKAFAYFDRNKSGYIEIEELREALADELDGSDEDIIGGIIRDVDTDKVNKIYLPRPKKGLVCTTLVLVKR

SEQ ID NO: 231164 - protein, 40 aa, Zea mays
  Clone ID: MRT4577_142416C.1.pep
MGNCCVTPSTEGSGKDRPKKQKENPYTAVMRTIVEVVQPS

SEQ ID NO: 231165 - protein, 92 aa, Zea mays
  unsure (1)..(92): unsure at all Xaa locations
  Clone ID: MRT4577_142417C.1.pep
TRPDHATFNVKFFFTNRPPTAARIFTLRMLLTLSAXNDNATMITQCXQAPIASILPPYLPSMIATVCENPALQPYRLQHAIAASNIPLSPFV

SEQ ID NO: 231166 - protein, 531 aa, Zea mays
  Clone ID: MRT4577_142419C.1.pep
MGNCCAAPSTEGSGKTRPKKQKENPYNVAYNRGAAAPPARPGLVVLRDPTGRDLGAEYELGGELGRGEFGVTYLCTEPATGARYACKSISKRKLRTPVDVEDVRREVDIMRHMPPHPNIVSLRAAYEDRDAVHLVMELCEGGELFDRIVARGHYTERAAAAVMRTIVEVVQKCHRHGVMHRDLKPENFLYASKDSSPLKAIDFGLSVFFRPGERFTEIVGSPYYMAPEVLKRNYGPEVDVWSAGVILYILLCGVPPFWAETEQGVAQAIIRSVVDFKREPWPRVSEPAKDLVRRMLDPNPLTRFTAAQVLEHPWLHDSKNTPDVSLGDTVRARLQQFAAMNKLKKKALRVIAEHLSAEEVADIKQMFDKMDVNKNGKLTFEEFKAGLRKLGNQMHDSDLQILMDAADVDRNGTLDYEEFVTVSVHVRKIGNDEHIQKAFAYFDRNKSGYIEIEELREALADELDGSDEDIIGGIIRDVDTDKDGKIGYDEFAAMMKAGTDWRKASRQYSRQRFSNLSLKLQKDGSLGADTR

SEQ ID NO: 231167 - protein, 135 aa, Zea mays
  unsure (1)..(135): unsure at all Xaa locations
  Clone ID: MRT4577_14241C.1.pep
PRPPPGSPPPPPATAGPPTGDPPPPPRGGPPQPXGRPAGGRPPRKAAAPGPXPGENKPPAAPKSKQGRXXGRKXPPPPPPHXGRQRDRRPGQGHSERKAIIHKAHRWVGQRLQNKKTKQRKKTRLGLVLHLSMGV

SEQ ID NO: 231168 - protein, 93 aa, Zea mays
  unsure (1)..(93): unsure at all Xaa locations
  Clone ID: MRT4577_142420C.1.pep
PFSARSHSCPGPIHSPVRPLSDSHGHTSPLFVLDSGITMRRGRGQLSSPLQTFGQEQVLQDEARGGCXGEFVRGLGRRLPVNFGLLDRCLLMM

SEQ ID NO: 231169 - protein, 88 aa, Zea mays
  Clone ID: MRT4577_142421C.1.pep
ELQMSRRVDKNPYALPQAIVILSHSWSSGTNLFPRCVSGSLGGTYSTGEDVFTCVIRECASSIYCRCLGCTASKGEARALVDLWGSGR

SEQ ID NO: 231170 - protein, 97 aa, Zea mays
  unsure (1)..(97): unsure at all Xaa locations
  Clone ID: MRT4577_142422C.1.pep
RRRRRICEQQDVGAGVPPAGRGACGPQCFSFTHXELENGVLWEAEXGGTLXGSVDVAPXXWGGGVLXXDECDDDTVVTVXDFVDTFRLHEQTPFDKT

SEQ ID NO: 231171 - protein, 108 aa, Zea mays
  unsure (1)..(108): unsure at all Xaa locations
  Clone ID: MRT4577_142423C.1.pep
MAGVNSSVVGLKPAVAVPXSXAASLTAKRVQLAAPEGRRATLLGLAAGFASTVTTGSAKGTILDEYXLEKSKGNKXELNDKKRLGTNGANFARAYTVEFGAASPLNFT

SEQ ID NO: 231172 - protein, 133 aa, Zea mays
  Clone ID: MRT4577_142424C.1.pep
MGSWEGQARQLLLDEEEDDEEFFFLLLPAILSFLSEEQSETGAAIESFVEFKRSTAAKTLEALEEKKKHDEDFSIKKCLEELDTIDGLTDEDRSYAMEVFESGFNREVFMSSKNHNVRLFWLKRKIKALAAIM

SEQ ID NO: 231173 - protein, 54 aa, Zea mays
  Clone ID: MRT4577_142425C.1.pep
FISSDNMVQIVVNLYQNIFFDRYYRHTLNFCVHNAQLVTINGASNDPAPSRTHN

SEQ ID NO: 231174 - protein, 227 aa, Zea mays
  Clone ID: MRT4577_142426C.1.pep
GTLGAGPQVVRFRPSRTGSSPRLLLGFARVVPPVAPPRSAGTDLPLAARGSLAQDRLRRPTVLSPPASAQVIHIKDLIHIITKFSSFASDDMGSWEGQARQLLLDEEEDDEEFFFLLLPAILSFLSEEQSETGAAIESFVEFKRSTAAKTLEALEEKKKHDEDFSIKKCLEELDTIDGLTDEDRSYAMEVFESGFNREVFMSSKTHMLGWFGSREKLKRLLLSCDVK

SEQ ID NO: 231175 - protein, 125 aa, Zea mays
  Clone ID: MRT4577_142427C.1.pep
LLNKVIHIKDLIHIITKFSSFASDDMGSWEGQARQLLLDEEEDDEEFFFLLLPAILSFLSEEQSETGAAIESFVEFKRSTAAKTLEALEEKKKHDEDFSIKKCLEELDTIDGLTDEDRSYAMGSL

SEQ ID NO: 231176 - protein, 118 aa, Zea mays
  Clone ID: MRT4577_142428C.1.pep
GSEDLVDGGRASDWEQEERDRRPSLIQSPNPIATSSQPPRTPQASWAGSRQPLQPDRYAAIRVEKDHGSKPPAPPSPITHSPARDEGVLLAVWESGSHEGERERGGRVLGRCSVVAAA

SEQ ID NO: 231177 - protein, 51 aa, Zea mays
  Clone ID: MRT4577_142429C.1.pep
PPPRAPPPPPPPPPPPPPPPPPPPPPPPPPPLLGFLGPFLLFIPLLKKRGT

SEQ ID NO: 231178 - protein, 79 aa, Zea mays
  Clone ID: MRT4577_14242C.1.pep
SEKLGILSESYSMPQKVSMCSAREMKSSGQGSRGDSGHSAANSSSNSTTYLDLRPKTGSATHQELIRRRRNRAPHRRNR

SEQ ID NO: 231179 - protein, 159 aa, Zea mays
  Clone ID: MRT4577_142430C.1.pep
RPGSDILEFDLDGQSLAIVRKPEDARVTNNSGIQALAVEGNKLGLATLSKMSIQLWRRETNSDAAGRWMPWKTVELDKLLPVSRSTRIWPTTILGFDEDSNAFFICTSVGIYMIQLESTQFTKLLEGDSFTAYYPYTSLYTAGLGIDDGDDRAEILNDT

SEQ ID NO: 231180 - protein, 85 aa, Zea mays
  unsure (1)..(85): unsure at all Xaa locations
  Clone ID: MRT4577_142431C.1.pep
SLHTGRAKLXGGVDWRMPPFAHRREGDQPVPDAATTRILARGPKATDGTDPKAAAKWTGMRPPARGQAMTTPGGNWTWGTLAGWG

SEQ ID NO: 231181 - protein, 105 aa, Zea mays
  Clone ID: MRT4577_142432C.1.pep
ALLRRCSLKERMHYAPACISVLRGAGDSPRLARLVARGTDPGTLGEDATPLGQAQERVLLGPDLRRGPGCRRWIPCAGRSSLAHPATGARARLATGSWARLAPAR

SEQ ID NO: 231182 - protein, 237 aa, Zea mays
  unsure (1)..(237): unsure at all Xaa locations
  Clone ID: MRT4577_142433C.1.pep
MPATMTSGALLLVGVVLTAHKFLCTAYDGGDGFSVEFIHRDSVKSPYRDPSLTAPPRVLQAARRSTSRAVALSRSYARANVASTVGAVSELTSRPSEYMMAVNVGTPPTRMLAIADTGSDLIWLNCSNGAGAPGLAAARHAHAHAPAPSPAPPPGVQFNSANSTTFGLVSCGSGACRALPEASCADSKCGYLYSYGDGSQSTSGLLSTETFTFADDQGTRGDRAMRVXNVNFGCSTT

SEQ ID NO: 231183 - protein, 67 aa, Zea mays
  Clone ID: MRT4577_142434C.1.pep
KVEFGDGSERPPRKPYERPGGTGRGFKIKYNGAGRGNWGTAVDEVIAPDAKDSTKMEVAAPVCEKQG

SEQ ID NO: 231184 - protein, 140 aa, Zea mays
  unsure (1)..(140): unsure at all Xaa locations
  Clone ID: MRT4577_142435C.1.pep
MVKGRTGQRVRLYVRGTVLGYKRXLIILLPPPRPPRSDSACWWCAWLTGXXSKSNQYETTSLVQIEGVNTKEDVAWYCGKRMAYIYKAKTKSSGTHYRCIWGKVARPHGNSGVVRAKFRSNLPPESMGRKVRVFMYPSSI

SEQ ID NO: 231185 - protein, 127 aa, Zea mays
  Clone ID: MRT4577_142436C.1.pep
MGKGSRDDMLSALPDDILVNILDRLNVPEAARTSILARRWGQLCGKLSRLIISVQDFLPEGVLHSNVSVDELVRTNAAVVQATESILARRNPGEHTIRLLSTTFYLRDDAPLSIGHAVGHAMATHLV

SEQ ID NO: 231186 - protein, 82 aa, Zea mays
  Clone ID: MRT4577_142437C.1.pep
PRVRPRVRFTVDSAALKRRGVLPVVVEAKLGAAGDRNRPTQGGLLTVAGLRRTARFMNVATPQPKPRAHCSNVALPPESQAG

SEQ ID NO: 231187 - protein, 97 aa, Zea mays
  Clone ID: MRT4577_142438C.1.pep
VPVPPDPVADFRRRVRGLALPSGVHPLPLVFADLPLCHRRGAGLFVALRALSEYCFVLVGVRGGSVYAPRPCCLPVRGVLPSALVLGPTPPAPPIIT

SEQ ID NO: 231188 - protein, 252 aa, Zea mays
  unsure (1)..(252): unsure at all Xaa locations
  Clone ID: MRT4577_142439C.1.pep
MSAENIYEGAIGIDLGTTYSCVGVWDQERVEIIANEQGNRTTPSYVAFSDNERLVGDAAKNQAAMNPKNTVFDAKRLIGRRFDDAEVKADMKNWPFSVVEKDSNPFIQVEFEGETKTFSPQEISSMVLIKMKEIAEAKLGKTVQKAVITVPAYFNDSQRQATKDAGTISGMEVLRIINEPTAAAIAYGLDANDKKEKNVLIFDLGGGTFDVSLLTISGGVFPVKXTAGDXHLVGEDIDNTLVXHFVXEFSAS

SEQ ID NO: 231189 - protein, 99 aa, Zea mays
  Clone ID: MRT4577_14243C.1.pep
PTLPPTLPEGLENLNELARAGGPVYPLGGPDEGLKKELMVFENPGLKMEGLGPLGGTSLKFKVHSFKIRRGILGLILGFATLLCPPHLTVFRGVPNPPL

SEQ ID NO: 231190 - protein, 62 aa, Zea mays
  Clone ID: MRT4577_142440C.1.pep
NPLHKSSMHEEFTCNGKMHVAVCVQCIEALIHFLAYTKSTPFVPRDRVANSDSPRLIASRRP

SEQ ID NO: 231191 - protein, 102 aa, Zea mays
  Clone ID: MRT4577_142441C.1.pep
DTSLVILGLPLRSFTAAAFNIDILLGPPPLDALHSLSNARSKVPSLSDTNPTYTNSPSSSDGHHFRPPFDAREDSSPFSVDTETLLIDSFPSLGSSFALTLG

SEQ ID NO: 231192 - protein, 84 aa, Zea mays
  Clone ID: MRT4577_142442C.1.pep
SISARANRVALQPPPPVGRLCGGIPGRLRSSAASRLAHRQEASPRRCQMIARGVRSSHLQASVGQVSLDGDTSPPTPEGWWVLW

SEQ ID NO: 231193 - protein, 57 aa, Zea mays
  Clone ID: MRT4577_142443C.1.pep
WEMDDSNMAGNGDASFKKKIMGILQQGDFAEKKGSKVSQVDLLYVLSLFKKVGKHFS

SEQ ID NO: 231194 - protein, 114 aa, Zea mays
  Clone ID: MRT4577_142444C.1.pep
RGLFFFFFCGKCMHVNHCGLASPCVMSRLQNRRGHNQALLILPLRLTPPTLPGKAFNSTVSVGSILPAPPDINIDVLLDPGLLDSSSSASSSSPSSLSLPSTLLYPSASRDPAG

SEQ ID NO: 231195 - protein, 56 aa, Zea mays
  Clone ID: MRT4577_142445C.1.pep
PVPVTQRSKQHTSARMMSLKIMTRALVALLRLLCYYYHLELSSMRTGGTRTFTDVV

SEQ ID NO: 231196 - protein, 32 aa, Zea mays
  Clone ID: MRT4577_142446C.1.pep
QVNTSGFSNDSSILFLYCKIHVILATVIKQAL

SEQ ID NO: 231197 - protein, 140 aa, Zea mays
  unsure (1)..(140): unsure at all Xaa locations
  Clone ID: MRT4577_142447C.1.pep
RVAPASAHAPRPRGRGERQXXSAYALVLDAXTSTRTRGPSSRTRCPTACTAAGCLGVPQAQTRSASRSFDSAARISHTVRADSTDRLGIVVQTEGVSAALFPGLRLKGKSIHVVVMYWQTSYTSSHSSGCSNYTRLIVQS

SEQ ID NO: 231198 - protein, 176 aa, Zea mays
  unsure (1)..(176): unsure at all Xaa locations
  Clone ID: MRT4577_142448C.1.pep
SWXKDYDALRRQLDAARAENDALLSHNKKLQAEIMALKGGGGGGGRQVAASELINLNVRETEASCSENNSSEINGLDVSRPDPAAGESPAMNSYRGGLPFYASAAARADIHHQLLHSGGQPSPAAAAPPKMELAPGSPPATAGGGGGTFGSLLCGAAVDEQPPFWSWADGHHTCFQ

SEQ ID NO: 231199 - protein, 243 aa, Zea mays
  Clone ID: MRT4577_142449C.1.pep
MPLATTAPPPCPPPSPAAAPVRTQLLSSVAKLALTAALVCGSGGPAAVVVVVPAAAQAVPFVRPPPPPLQGRPLASSTPYAQSQKLQLGLDKLGKIRPCPSTNPGCVSSNPLGSSGSFASPLLIPESSAGEKAVASLRQAIEKTQRNVEFKVDEDTPYGHYIEAEMDGGVGRDVMEFLVKKDAGVVAYRCMATKVTFVYPFTTAVGDSKGQKQRIAAISQELGWYAPDIQSSMDSVDDVNYVP

SEQ ID NO: 231200 - protein, 159 aa, Zea mays
  unsure (1)..(159): unsure at all Xaa locations
  Clone ID: MRT4577_14244C.1.pep
MSDAAEEQPMETTGATENGHEAAPEGEAPVEPSAAAAAPAASAGSGGGTTTAPSGNQNGAEGDQINASKNEEDAGKMFVGGLSWDTSKKDLKDYFTKFGEXVVDCTIKMDPNTGRSRGLGFILFKDSSSVEKVLDQKEHRLXDGRVIDPKXAMAMKKDP

SEQ ID NO: 231201 - protein, 322 aa, Zea mays
  unsure (1)..(322): unsure at all Xaa locations
  Clone ID: MRT4577_142450C.1.pep
MDCCICSPTASVYRLPRNSICAPCHEGAKAVIAFLNKDGERQEEDAGGHHHHGSALKSXGPRRSLIAQPXMRDAWEQVKEMRGREEEAHRRAAFLAMAPWKERLHTDIVVKPGTGSPILAHKAILXARGPDALSPACISRRPDARTHXAARSEVFRNMLAAAAGDAISLPELAHDELSLLLAFLYTGNLLEDXRPCRRSRRPEERQLHALLVAADKKYDVPFLRRACEAQLDAALDASNALRTLEVADLSSSAALRERAMGAVVEHAQQAVFSPEYYDLATRNAGLCVEITRALLAKMSMTTNKASCIDVARASMQSCMLRR

SEQ ID NO: 231202 - protein, 88 aa, Zea mays
  unsure (1)..(88): unsure at all Xaa locations
  Clone ID: MRT4577_142451C.1.pep
SLVVGASTXLGTRLADPVPHNGSIVDQDGFXLGGMSNPDTKKAATTWTSFDRPMWIPGAEAPDYLDGSLVRDYRFDPLGLXMPAEYLQ

SEQ ID NO: 231203 - protein, 90 aa, Zea mays
  unsure (1)..(90): unsure at all Xaa locations
  Clone ID: MRT4577_142452C.1.pep
QGPSRHVSDSWLKHVAALGFADXVXYTIFIIQHKNIEHSFIQTGHETYIIEHENRLVHRTLDKTQKGTEYSCYKAQRDISLCFLGHFPPL

SEQ ID NO: 231204 - protein, 85 aa, Zea mays
  Clone ID: MRT4577_142453C.1.pep
SGDSLVRKWFIRIIRADCAGLNRGAPRTRPLVAHSNPPSVVLTQAFRRRSNLSRNRRCSVLKVATRGHINNNRARSRRRRNRRHR

SEQ ID NO: 231205 - protein, 76 aa, Zea mays
  Clone ID: MRT4577_142454C.1.pep
LNIDHENTTCEPSVRHKHEHTSVIHRGTTTNHGTGMRAAHLKVCSEHSLDKSTLTIVHFTNDHKVISRGLRGLHLL

SEQ ID NO: 231206 - protein, 510 aa, Zea mays
  Clone ID: MRT4577_142455C.1.pep
MATAMGAMAATCMASIPAAATFPGDLGVGRRRAVVPGWRAGGRRLRATPPARRPFLFSPKGVSDSRSSQTCLDPDASTSVLGIILGGGAGTRLYPLTKKRAKPAVPLGANYRLIDIPVSNCLNSNVSKIYVLTQFNSASLNRHLSRAYGNNIAGYKNEGFVEVLAAQQSPENPNWFQGTADAVRQYMWLFEEHNIMEFLILAGDHLYRMDYQKFIQAHRETDADITVAALPMDEQRATAFGLMKIDDEGRIIEFAEKPKGEQLKAMMVDTTILGLDAERAKEMPYIASMGIYVFSKDVMLRLLRENFPAANDFGSEVIPGATDIGLRVQAYLYDGYWEDIGTIAAFYNANLGITKKPVPDFSFYDRFAPIYTQPRYLPPSKVLDADVTDSVIGEGCVIKNCKINHSVVGLRSCISEGAIIEDTLLMGADYYETEADKNVLSETGGIPIGIGKNSCIRKAIIDKNARIGENVKIINFDNVQEAVRETEGYFIKSGIVTVIKDALIPSGTII

SEQ ID NO: 231207 - protein, 510 aa, Zea mays
  Clone ID: MRT4577_142456C.1.pep
MATAMGAMAATCMASIPAAATFPGDLGVGRRRAVVPGWRAGGRRLRATPPARRPFLFSPKGVSDSRSSQTCLDPDASTSVLGIILGGGAGTRLYPLTKKRAKPAVPLGANYRLIDIPVSNCLNSNVSKIYVLTQFNSASLNRHLSRAYGNNIAGYKNEGFVEVLAAQQSPENPNWFQGTADAVRQYMWLFEEHNIMEFLILAGDHLYRMDYQKFIQAHRETDADITVAALPMDEQRATAFGLMKIDDEGRIVEFAEKPKGEKLRSMMVDTTILGLDPERAKELPYIASMGIYVFSKDVMLRLLRENFPAANDFGSEVIPGATEIGLRVQAYLYDGYWEDIGTIEAFYNANLGITKKPVPDFSFYDRSAPIYTQPRYLPPSKVLDADVTDSVIGEGCVIKHCTINHSVVGLRSCISEGAVIEDSLLMGADYYETENDKNVLSETGGIPIGIGKNSHIRKAIIDKNARIGENVKIINFDNVQEAVRETEGYFIKSGIVTVIKDALIPSGTII

SEQ ID NO: 231208 - protein, 189 aa, Zea mays
  Clone ID: MRT4577_142457C.1.pep
PPLGPRAPLGSGFLWAFLFLPGLWGAHQLPGLFLFPAFCGGSPLFWVLFFFPGVFFGASGLFFCFAGFLGVDLPSGQNGAAFFGPGFGWWGPFPGAGFFFAFLSFFFFFFLWSRFFPWVLVFFVFFPPPAPPLLLVAPPFLGFSRNIKKLQEIKTRSEWYKKKKKKKKKKKKKKKKKKKKKTKKKKKKR

SEQ ID NO: 231209 - protein, 63 aa, Zea mays
  Clone ID: MRT4577_142458C.1.pep
GFSQEKKLGALGVLKTERVFLSGGPLEKECWVFMGGGEPGLLMQWVFTWAKFNLNKNRGDIAS

SEQ ID NO: 231210 - protein, 162 aa, Zea mays
  unsure (1)..(162): unsure at all Xaa locations
  Clone ID: MRT4577_142459C.1.pep
QQFPLVHLLAQNIKAQQXQQLVLGNLAAYSQQQQFLPIXQLXAALNSAAYFRRHLPFSHIAAAYLXQFLPFSSSNIKFAAYLPQQQLPPFSQISDVNLDPFLSLPQLFPFCLRLALSAGSFVVMLQLIPFXTSFLASSITFCQQPIKGGPSSGWLCCSHSSI

SEQ ID NO: 231211 - protein, 152 aa, Zea mays
  unsure (1)..(152): unsure at all Xaa locations
  Clone ID: MRT4577_14245C.1.pep
DARYCVAEFLATALSVGFXHPHVQADSCSLALWTSALXQQYADWRLQSVALLIISCIACRHHQRFLPAFIHLAVVKPVAYWQQQLLASXDLFLTNCRLQYLANXSMLQXQFMPAFSQLPMVSRAVYXQLLPCRALGVGNSXTYLEQXVVQQI

SEQ ID NO: 231212 - protein, 72 aa, Zea mays
  Clone ID: MRT4577_142460C.1.pep
PGCVLLCPFRWLRAFYGVFVFGVGWHQFICSPCWGSFWESLRAVFVLMFIHVFLFWISEFLKFNDMRKRTNR

SEQ ID NO: 231213 - protein, 126 aa, Zea mays
  unsure (1)..(126): unsure at all Xaa locations
  Clone ID: MRT4577_142461C.1.pep
CHLYHTFLRXVTLMGFXEHLGEQGYRLQQALAXSVLQQPINQLQQQSLAHLTIQTIVTQQQQQFLPALSQLDVVNPFAYLQHAVLAFNPLALANVAVYQQQQQLQHFLPALIQLTMVNPXSFLQQQ

SEQ ID NO: 231214 - protein, 106 aa, Zea mays
  Clone ID: MRT4577_142462C.1.pep
HSSGLRCARARRGRHWSCARSRVLCPSSATCVCAAGSSVKGKCSEQKGIRAAPIKVLQEECLKAYVVNAVEVIKIISVTWCKEKKPRLNENCRRSYTPPPSCTLAP

SEQ ID NO: 231215 - protein, 82 aa, Zea mays
  Clone ID: MRT4577_142463C.1.pep
AAAAPAPNSLSRSRTMTNFIAQVERLICDRRSAEMEADVNANQSTKKPPSMRMLRQAANAYTPSAFKMFERELEIFHCICIL

SEQ ID NO: 231216 - protein, 180 aa, Zea mays
  Clone ID: MRT4577_142464C.1.pep
KSARISMANSRQNIRKLVKDGFIIKKPQKIHSRSRARRAHEAKQKGRHSGYGKRRGTREARLPTKILWMRRMRVLRRLLRKYREAKKIDKHMYHDMYMKVKGNMFKNKRVLMESIHKSKAEKLREKTLSDQFEAKRAKSKASRERKIARREERLAQGPREPTAPVSATAPTAGAPKKAKK

SEQ ID NO: 231217 - protein, 207 aa, Zea mays
  Clone ID: MRT4577_142465C.1.pep
MVSLKLQKRLAASVLKCGKGKVWLDPNEVSEISMANSRQNIRKLVKDGFIIRKPQKVHSRSRARRAHEAKQKGRHSGYGKRRGTREARLPTKILWMRRMRVLRRLLRKYREAKKIDKHMYHDMYMKVKGNMFKNKRVLMESIHKSKAEKAREKTLSDQFEAKRAKSKASRERKIARREERLAQGPREPTAPVAAPAPSTGVPKKAKK

SEQ ID NO: 231218 - protein, 207 aa, Zea mays; identical to SEQ ID NO: 231217
  Clone ID: MRT4577_142466C.1.pep

SEQ ID NO: 231219 - protein, 143 aa, Zea mays
  unsure (1)..(143): unsure at all Xaa locations
  Clone ID: MRT4577_142467C.1.pep
GDPRVRSLTLRQAHTSESLTRPQVTFVQGLTRGEXKWLRQTGLDVCLAHRYYGQRPXHSTARLKRIFHISDDNPYPILQIDPTLPKQIHHCKSHALNVTTPANYPHVLHRQIHRDFTKPLIVICSKNLLXHKYCQWNLSEFYH

SEQ ID NO: 231220 - protein, 64 aa, Zea mays
  Clone ID: MRT4577_142468C.1.pep
DHLFYKQPLKVRPLSPNQTEPGTLTNLIHLPEFGTRTGSPLKGHSYSFQKEIRFRGPWLGKFLR

SEQ ID NO: 231221 - protein, 199 aa, Zea mays
  Clone ID: MRT4577_142469C.1.pep
STHPSAHATGTSLSQRLLPLLLPHGAPAPSPAFLQLAHGGARCSPAFFPAIFSLPARALLLPGRRAMPAGARSAAVSFSLKVPRARRAPVGGGFAARPSNPARVVLSTILSADGPALRPDGPRSGRSALVGRTVRACAEQIRGSEFCATVVSQNQAGLTRKLVGKRIQTSPFIYMKGYGRLKPPTIEQIKSITHFYLMH

SEQ ID NO: 231222 - protein, 60 aa, Zea mays
  Clone ID: MRT4577_14246C.1.pep
IGSDLTRTRELPELQQNVSMQSGQEDFAVDKDSSRTLTSVREVYTQYDLPVVKKCYSLGS

SEQ ID NO: 231223 - protein, 64 aa, Zea mays
  unsure (1)..(64): unsure at all Xaa locations
  Clone ID: MRT4577_142470C.1.pep
KALKHNPAHGIFPPLVFKPNPKTNWGKKRFLSNKGKILSGGGHKGGKNNLFKNGXNPTNVPYWG

SEQ ID NO: 231224 - protein, 50 aa, Zea mays
  Clone ID: MRT4577_142471C.1.pep
SEIYEESMRMNNGECLYKRMGWCQYYLPYHGACLKIQWFGFPIIFCSFFF

SEQ ID NO: 231225 - protein, 36 aa, Zea mays
  Clone ID: MRT4577_142472C.1.pep
SFWFRGLGSLLPTSFAPDHRRNLFIYNIKDPDFPPL

SEQ ID NO: 231226 - protein, 80 aa, Zea mays
  Clone ID: MRT4577_142473C.1.pep
MGVTMFPERANGIIRRASRSSTVYAHRLHCLNDHIVRKLLHIQDITERTAGMVTDYGPYFIPAGYSNVGEIDSHSKGIVC

SEQ ID NO: 231227 - protein, 108 aa, Zea mays
  unsure (1)..(108): unsure at all Xaa locations
  Clone ID: MRT4577_142474C.1.pep
GLRAWLXXXWXXAPVCRFXLXRLXVXFXACXRRLCSPPAPXXVWAFAPXGPVPLAXPARXXGXXGXXXXSLNPRRXVVSFXXXFXRXGALXVXXWPCCXVXLXSXPAS

SEQ ID NO: 231228 - protein, 50 aa, Zea mays
  Clone ID: MRT4577_142475C.1.pep
DKIRIYQVRLRRWLPSLVFMRYEDSPTSDNFRFVAHNGLDNQNERVQNGL

SEQ ID NO: 231229 - protein, 91 aa, Zea mays
  unsure (1)..(91): unsure at all Xaa locations
  Clone ID: MRT4577_142476C.1.pep
FPGVAPNDFYMKDPLPVRVSKLISLIIHLPXSYYSLSFCKRRNIFDSAHHLGEFLPXHRIHNSPYTFVMMEPHICPVVCSISVGEILQIFS

SEQ ID NO: 231230 - protein, 1080 aa, Zea mays
  unsure (1)..(1080): unsure at all Xaa locations
  Clone ID: MRT4577_142477C.1.pep
PKIRILPLPDPHPLLSPPPLDADILKSKPPQPARPALLSAVACAMSSRHDKEKSVNVQVLLRCRPFSDDELRNNAPQVITCNDYQREVAVTQNIAGKQFDRVYAFDKVFGPTAKQKELYDQAIIPIVNEVLEGFNCTIFAYGQTGTGKTYTMEGECRRAKSGPKGQLPADAGVIPRAVKQIFDTLERQNTEYSVKITFLELYNEEITDLLAPEEISKAAFEDKQKKALPLNLMEDGKGGVLVRGLEEEIVTNASEIFSLLERGSAKRRLQRHYLNKQSRSISASLLLNYTLQQTYVLITTFNILAGPTLYFNHYYIKEATPEGEELIKCGKLNLVDLAGSENISRSGAKEGRAREAGEINKSLLTLGRVITALVEHLGHVPYRDSKLTRLLRDSLGGRTKTCIIATVSPSVHCLEETLSTLDYAHRAKSIKNRPEVNQKMMKSTLIKDLYGEIXDLRQRYTLLEKKLECTFPKTGISKRKMSERQWSDQIEQMNASLEVNHKLISDLQENYDSELQHSADLSKKLEVTEKCLDHTSNLLSTTKEDLKQAQYNLNEKDYIISEQKKAENALTHQTYVLRSDLEQYTRDNTSLYSKIARGDKLSATNRSVVNTFQTDLASKLDILSNTLNASIDQQNMHLKSVEDLCQSYVDSHDKATSELKKKILASKSLYMSHMEAFLNVVLVHKASANGTLEDISSLSAASCCSLDQLLVCVEGEAQNIFNDIHNLLTIHRSEMTHFTQELRESFQISLDRTKEMSTYIIGLFDKYVEETSKLHSHSNNTHEAQMKSIEDFQMVYEEQSKSVEQKLLAEISSLVSKHITRQRELVGVRLSSLGDAARGNKAFLDEHTSAMEFVTKDAKRKWETFAEQAENDCKAGSSFSAAKHSRMETMLQECACTVDSAVQQWKKSHAAVNDLSRKQVAEVEALVRTAIENNEQHELEVASSRAVAEEDASNNSKDIAQGVENLLEEARRASSRVVSTVEAHFGELQMLQESHSSQAAGINMHADKALQTSYKDYEPSGETPVRSEPNVPSKGSIESLRAMPVETMMNEFRENHPYEHESSKESKLSQIPRLPLATIN

SEQ ID NO: 231231 - protein, 1001 aa, Zea mays
  unsure (1)..(1001): unsure at all Xaa locations
  Clone ID: MRT4577_142478C.1.pep
FGTRPKFRILPLPHPHRTXAPPPLDADISNSPXPSPPPPAALXAVACAMSSRLDKEKAVNVQVLLRCRPFSDDEVRSNAPQVITCNDYQREVAVTQSIAGKQFDRVFTFDKVFGPTAKQKDLYDQAIIPIVNEVLEGFNCTIFAYGQTGTGKTYTMEGECRRAKSGPKGQLPADAGVIPRAVKQIFDTLERQNTEYSVKVTFLELYNEEITDLLAPEEISKATFEDRQKKTLPLNLMEDGKGGVLVRGLEEEIVTNASEIFSLLERGSAKRRTAETLLNKQSSRSHSLFSITIHIKEATPEGEELIKCGKLNLVDLAGSENISRSGAKEGRAREAGEINKSLLTLGRVITALVEHLGHVPYRDSKLTRLLRDSLGGRTKTCIIATVSPSVHCLEETLSTLDYAHRAKSIKNRPEVNQKMMKSTLIKDLYGEIDRLKAEVYAAREKVGVYIPKDRYQQEENERKAMADQIEQMNASLEANQKLISDLQEKYDSELRHSADLSKKLEVTEKCMDHTSNLLSATKEDLKQAQYNLKEKDYIISEQKKAENALTHQACVLRSDLXKNILAIILXLYSKIARGDKLSATNRSVVNTFQTDLASKLDTLSNTLNASIDQQNMHLKAVEDLCQSCVDSHDRATSELKKKILASKSLYMSHMEAFQNVVLLHKASANATLEDISSLSATSCCSLDQLLVCVEGEAQNIFNDIHKLLTTHRSEMTHFTQQLRESFQISLDRTKEMSTYIIGLFDKYVEETSKLQSHSNNTHEAQMKSIEDFQMVYEEQSKSEEQKLLADISSLVSKHITRQRELVGVRLSSLGDAARGNKAFLDEHTSAMEFVTKDAKRKWETFAEQAENDCKAGSSSSAVKHCRMETMLQECACTVDSAVQQWKKSHAAVNDLSRKQVAEVEALVRTAIENNEQHEVEVASSRAVAEEDTTNSSKDIAQGVENLLEKAQKSSSRVVSMVEAHFAELQKLQESHSXPGYRYQHARRQVFPNQLQGLRADG

SEQ ID NO: 231232 - protein, 33 aa, Zea mays
  Clone ID: MRT4577_142479C.1.pep
QKPAIQPDLAEGSQAASVKSPDSFSEAVVAAPG

SEQ ID NO: 231233 - protein, 92 aa, Zea mays
  Clone ID: MRT4577_14247C.1.pep
GESFGSRWDTDAAWGMDRVEEKEPEVTISSILPISERATNRREVESRSSGLESSEARQKFAGAKAISSDMFFGREVDAEYEARSRLQQLSGS

SEQ ID NO: 231234 - protein, 185 aa, Zea mays
  Clone ID: MRT4577_142480C.1.pep
MVSMSTTPKPLDSAVVSAAVDGGDEGGGGGGGGKKQAHGAVMAPPPMVVPAAAPAGEEEVRKVRKPYTITKSRESWTEPEHDEFLEVLQLFDRDWKKIEAYVGSKTVIQIRSHAQKYFLKVHNNGTGEHLPPPRTKRKAAHPYPQKASNNVSQAILSQHQPTQREQGSVMPMDTATERNKMRMSW

SEQ ID NO: 231235 - protein, 153 aa, Zea mays
  Clone ID: MRT4577_142481C.1.pep
KKSKRRKKKEKTKKQKKKATKQTKREKRKRKKKKRKRGKKKKKKRKRKQKKKRKNKKEEKKKREKKKSGDKKETKKKKKKERKKQSQPRNRKHKGRPKEQERNAQQADAEPHQTVPDGRLRRAELPARNSHLEPYVRRVHGFGAASLSQSPLP

SEQ ID NO: 231236 - protein, 86 aa, Zea mays
  unsure (1)..(86): unsure at all Xaa locations
  Clone ID: MRT4577_142482C.1.pep
MRVFFFALALLAXVXSATSTHTTSCCGCQPPTSVHLPAPVHLPPPVNLPPTAHIPPAGQLAPLDHLTPPDHVAARANLSSSPVHYS

SEQ ID NO: 231237 - protein, 59 aa, Zea mays
  Clone ID: MRT4577_142483C.1.pep
PPFVQQEKAGPVNSEKPPPPSKFPNKGGSAGCYLLFSASPGLLKGKWPPNYPRVYVLIK

SEQ ID NO: 231238 - protein, 116 aa, Zea mays
  Clone ID: MRT4577_142484C.1.pep
NRGFSLNLGSPLSVFLGTLGLVPFFFGNQGPFFRFFGSLTMVFGDGPVFGEGIGVGFFSWGHLPPAFLKGGFQRGPHNFFLVVKGFFLPFLGAKSRDPPPFFALPFFQRSFLFFFG

SEQ ID NO: 231239 - protein, 97 aa, Zea mays
  unsure (1)..(97): unsure at all Xaa locations
  Clone ID: MRT4577_142485C.1.pep
NGSTLPGPCDXPALVRFFLSNDVTVRGLRIENSPQFHLKFDDCERVRVDGLFVSSPAFSPNTDGVHVENTTSVQILNSRIYNGDDCVSIGAGCSDVR

SEQ ID NO: 231240 - protein, 223 aa, Zea mays
  unsure (1)..(223): unsure at all Xaa locations
  Clone ID: MRT4577_142486C.1.pep
MASLVALLAVALVAQLASWQQAAVAYDPSPLQDFCVADKNSPVRVNGFPCKDPMAVTPDDFFNPAMIIGKRRDTNNKVGSNVTNVNVESFPGLNTLGISLARIDYAPLGVNPPHIHPRATELLTVLEGTLYLGFVTSNPNRLFSKVVKKGDVFVFPKAMIHFQMNLDHEKPAAALSSLSSQNPGVITIASAVFXGSKPPISDDVLAKAFQVEKKLIDWLQSQF

SEQ ID NO: 231241 - protein, 52 aa, Zea mays
  Clone ID: MRT4577_142487C.1.pep
SLLGLIRSQVFQGVYDYGCYYDFIGVLRNPSLFFGVHLIYKHFCVEEFRVFF

SEQ ID NO: 231242 - protein, 69 aa, Zea mays
  Clone ID: MRT4577_142488C.1.pep
SRSSYGYFIERNVEHNRVYMGIALPVRQDMKKYTHYTIYIPCPFPKIKCSYFIFSYLTNIYVIRRVDPY

SEQ ID NO: 231243 - protein, 84 aa, Zea mays
  Clone ID: MRT4577_142489C.1.pep
ELVALRSIVQSELFSVRLALLQCGRRSCSAGRQVSTNATVFFFCVGWNTADTVIITEYTSLENLSDTKYHNFFATVYKIFCHSD

SEQ ID NO: 231244 - protein, 63 aa, Zea mays
  Clone ID: MRT4577_14248C.1.pep
SSKIRLHKDSGHTVAEKFWVQHRGHNRSINPSKAQPLFMTLKPQMFIRRRHPYRGPPKGTRRP

SEQ ID NO: 231245 - protein, 195 aa, Zea mays
  Clone ID: MRT4577_142490C.1.pep
TPTITMGFFQGKTSKQTTRVKKLLGLALSRLAIARRPRLARRSICRNDVGQLLSLGYLHRALLRAEQVIEEDNMLQAFDIIELCCKRLVEHATHLDKPRECGEEIREAAAGIMFAARWCGDLPELQVARTILEDKFGSDMAMIAKEGTDIVDPMLVWKLSGDKTNMELKKKVTKEIAVENSFMVDFSELQLQEAV

SEQ ID NO: 231246 - protein, 56 aa, Zea mays; identical to SEQ ID NO: 192902
  Clone ID: MRT4577_142491C.1.pep

SEQ ID NO: 231247 - protein, 546 aa, Zea mays
  unsure (1)..(546): unsure at all Xaa locations
  Clone ID: MRT4577_142492C.1.pep
MSSEPPPASSAAAGEELAADLSAATLSKKQQKKDARKAEKAEQRQRQQQQQQQPADAEDPFAANYGEVPVEEIQSKAISGRSWSHVGDLDDSAAGRSVLIRGAAQAIRPVSKKMAFVVLRQSMSTVQCVLVASADAGVSTQMVRFATALSKESIVDVEGVVSLPKEPLKATTQQVEIQVRKIYCINRAIPTLPINLEDAARSEADFEKAELAGEKLVRVGQDTRLNYRAIDLRTPSNQAIFRIQXSVENKFRDFLLSKNFVGIHTPKLISGSSEGGAAVFKLLYNGQPACLAQSPQLYKQMAISGGFERVFEVGPVFRAENSNTHRHLCEFVGLDAEMEIKEHYFEVCDIIDGLFVSIFKHLSENCKKELESINRQYPFEPLKYLDKTLKLTYEEGIQMLKEAGTEIEPMGDLNTEAEKKLGRLVREKYDTDFFILYRYPLAVRPFYTMPCYDNPAYTNSFDVFIRGEEIISGAQRIHTPELLAKRATECGIDVSTISAYIESFSYGVPPHGGFGVGLERVVMLFCALNNIRKTSLFPRDPQRLVP

SEQ ID NO: 231248 - protein, 56 aa, Zea mays
  Clone ID: MRT4577_142493C.1.pep
KARSIARGGFIYNLFGSDPSTEAYYCAMAGGIMYANASMLPNIVATALPKRFIAGA

SEQ ID NO: 231249 - protein, 188 aa, Zea mays
  Clone ID: MRT4577_142495C.1.pep
MSFQRVGLVAMRTTSSRPSVNFTRNTAIIAFTRLLSQKSQAPTITNLEPEEGHQILVNQRLNRPVTPNLGIYKIGQVWFSASAWTRITGLIVGGTAYLTLGAHAVAPHLGLGFDSVALVSAFGALPFVAKAAIKFSLLGFPFSYHFINGIRHLVFDLGIGYKKAQFKKSEVATWTLSVIGGLVLAFWL

SEQ ID NO: 231250 - protein, 101 aa, Zea mays
  Clone ID: MRT4577_142496C.1.pep
VRRRRTTEQDHRTMESLTLRAGTGVSPLQRLRLLRGPQLATYFRATASGAEPDTIRAHERAAHALPVRDQVIDDGHHLHRDEVAPLRGLLPRDRQDSVIAC

SEQ ID NO: 231251 - protein, 138 aa, Zea mays
  unsure (1)..(138): unsure at all Xaa locations
  Clone ID: MRT4577_142497C.1.pep
DSAAPSSHPRPRTQEEGPTRXQPNPXPVPVVGLXKAPHDHGGPPPGHDPVHDPPXPXPPSSRSPEAAPPAPSRSPPPTPRTPPLPPRRCGGPSLPARVTAPXPPSPLQGLLPPSPRPRGAPPPALATPXPPRRRGRRR

SEQ ID NO: 231252 - protein, 64 aa, Zea mays
  Clone ID: MRT4577_142498C.1.pep
RRTRSTRPMVTSNLHFKCFPPTSLAQGRGLAISASTSTLSILPDWPKPPMSIHAHVHLSLAISS

SEQ ID NO: 231253 - protein, 138 aa, Zea mays
  unsure (1)..(138): unsure at all Xaa locations
  Clone ID: MRT4577_142499C.1.pep
DDIFVITLTDKTITLKVKSAETIDNVNANIQDXDDCPLYQQRISFAGXHIEDGSTLADYNMHNESSLDLALRVSVGLHIFVKTLTSNTINVEVESSAHIDDDVGKILGKEAIPPEQNRXIMSGGKQLDVGCTLVDYII

SEQ ID NO: 231254 - protein, 45 aa, Zea mays
  Clone ID: MRT4577_14249C.1.pep
PIDMIPIVHRSKWLSKLPCVWLIAMICNLACQVLRNRRMIHWVWP

SEQ ID NO: 231255 - protein, 547 aa, Zea mays
  Clone ID: MRT4577_1424C.1.pep
MAMASAACSCTDGTWWVYALPALLGSDTLCAHPALLAGLIFLATVSVALLAWATSPGGPAWTNGRGASASLLSWDPVVCPCSAASSRCPGAAAPRPRRDGPRRRPRAKELMAFSVGDTPAVVSSCPATAREVLAHPSFADRPVKRSARELMFARAIGFAPNGEYWRRLRRVASTHLFSPRRVASHEPGRQGDAEAMLRSIAAEQSASGAVALRPHLQAAALNNIMGSVFGTRYDVTSGAGAAEAEHLKSMVREGFELLGAFNWSDHLPWLAHLYDPSNVTRRCAALVPRVQTFVRGVIDEHRRRRQNSAALNDNADFVDVLLSLEGDEKLGDDDMVAILWEMVFRGTDTTALLTEWCMAELVRHPAVQARVRAEVDAAVGAGGCPTDADVARMPYLQAVVKETLRAHPPGPLLSWARLATADVPLCNGMVVPAGTTAMVNMWAITHDAAVWADPDAFAPERFLPSEGGADVDVRGVDLRLAPFGAGRRVCPGKNLGLTTVGLWVARLVHAFQWALPDGAAAVCLDEVLKLSLEMKTPLVAAAIPRTA

SEQ ID NO: 231256 - protein, 135 aa, Zea mays
  unsure (1)..(135): unsure at all Xaa locations
  Clone ID: MRT4577_142500C.1.pep
LLTTAQLMMRRPTSMGLKSELDRYLDEEMVNMQTKNFNVLDWXKVAGTRFPILRRIARDIYVIPVTTVASEAAFSTSGRVLSEHRSRLTSKMLEALMCSQDWLRNKYKVDEKTKQPATFWSCLQDMQEGLQELAL

SEQ ID NO: 231257 - protein, 92 aa, Zea mays
  Clone ID: MRT4577_142501C.1.pep
KVAGAGFPILRRIARDIYVIPVTTVASEAAFSTSGRVLSEHRSRLTSKMLEALMCSQDWLRNKYKVDEKTKQPATFWSCLQDMQEGLQELAL

SEQ ID NO: 231258 - protein, 625 aa, Zea mays
  unsure (1)..(625): unsure at all Xaa locations
  Clone ID: MRT4577_142502C.1.pep
SHGTVRAKCNYCFKQLSASSNNGTKHLHVHLKSCVQRKIKLNGKTLAQASLRFGRTDGGTVSIENYTFDQEIARNELAAMIVLHEYPLSMVDHVGFRRFVGALQPLFKIGTRNMIRSDIMKHYEVEKKKAIEYMAGIQSRVAVTTDLWTSDNQKRGYMAITAHFIDESWTLRNIIMRFIYVPAPHTADVIGEELYESLVEWNLDEKISSVTLDNCTTNDAVISSLVRNIGKHKLMNDGKLLHMRCSAHILNLIVKGGLEVLKDAIENIRDSVAYWTATPKRIEKFEEIAKFVKVDIKTKIGFDCRTRWNSTFTMLATAVPYKAIFIRASRVDRQYTCLPTEDEWKFAKDVVERLRLFNDITTLFFGTDYVTANVYFTRIAKIRNQIRLWSSCGNPLVEEMLVNMVAKFDKYWTDIQGLMGIATILDPRFKTAVLLICYEDLLVVSGSECEDRVANVKNLLADLMNEYHITENIENNESSTPSVGNSDDFLSDISARIASRRPTSMGLKSELDRYLDEEMVNMQTKNFNVLDWXKVAGTRFPILRRIARDIYVIPVTTVASEAAFSTSGRVLSEHRSRLTSKMLEALMCSQDWLRNKYKVDEKTKQPATFWSCLQDMQEGLQVISC

SEQ ID NO: 231259 - protein, 97 aa, Zea mays
  unsure (1)..(97): unsure at all Xaa locations
  Clone ID: MRT4577_142503C.1.pep
LVRELRPAAAAPYYFGELEEVLIQGNRRSGDHNMIGSDIXTERKTAGDLAATRPRLVIFPSXPMSHQLQRHSGNSLSVGSTTESCSGENSMPQTELV

SEQ ID NO: 231260 - protein, 98 aa, Zea mays
  Clone ID: MRT4577_142504C.1.pep
KTGGESDFFFAGLAKVPKLGLFFQLQLIDIGRETCTLYSRLLLVLEELLLTSLPGANITPVMYPLPIPVSVTPLVAIPGHQLHVGGSYSNTTLGIKHV

SEQ ID NO: 231261 - protein, 76 aa, Zea mays
  Clone ID: MRT4577_142505C.1.pep
APSRGSARISQHRRRVQGCSYRPCRRVDIGGASFTRRVAAQSPFPKDQQDRLSVQKMSWRAYVYIGCLVQEDLCLC

SEQ ID NO: 231262 - protein, 117 aa, Zea mays
  unsure (1)..(117): unsure at all Xaa locations
  Clone ID: MRT4577_142506C.1.pep
MDPGAVWKSLETRRAAGKITPCTPARIHLYDPFVLSGVSIETYEHCRLLXSFDVTPGLASTVRYLRIGVTATLDDQLGSXVFLXSGLHTRGLSLEMSDYFVDAAAVGEEIEVEGKLC

SEQ ID NO: 231263 - protein, 93 aa, Zea mays
  unsure (1)..(93): unsure at all Xaa locations
  Clone ID: MRT4577_142507C.1.pep
NGTGGTGEXHSGTAPFEQFKTCFANRGWVVKTNFFSLIDNMDRLIEVLKQAAKEGALVFYTLADPSMAEATKKACDFWGVPGTDVLRPTVEAI

SEQ ID NO: 231264 - protein, 224 aa, Zea mays
  Clone ID: MRT4577_142508C.1.pep
MSYHSEIHFTLDTICPWTYLAKRRLHRAIATLPSDCPVTFTVVYKPYQLFPEASQEGEGKYEWYKRAKYDESEDKMQMYMALMTAYGRGEGIEYKFGGTVANTLHAHRVIQHFQALKGPEVADQLIDSLYRQYFEEEQHPSSTETLVAAAMEAGIDEKEARAFVEDEDEGLADVKMAVREQTGNGIDSVPYIVLEGKRRDITLIGCKESDEYRRALAPIAKESQ

SEQ ID NO: 231265 - protein, 68 aa, Zea mays
  unsure (1)..(68): unsure at all Xaa locations
  Clone ID: MRT4577_142509C.1.pep
RTEQQPCVRDTFNHMTNXAIVGAHNISVEACHAQLTPLHLPALLAADKGCIPPHAVTAASGGDRSARD

SEQ ID NO: 231266 - protein, 187 aa, Zea mays
  Clone ID: MRT4577_14250C.1.pep
MYPSAPPDAYNKFSAGAPPTAPPPPAAYQQQQHGANMDTSRPGGGLRKWSTGLFHCMDDPGNCLITCLCPCVTFGQVADIVDKGTCPCIASGLVYGLICASTGMGCLYSCLYRSKLRAEYDVDEGECPDILVHCCCEHLALCQEYRELKNRGFDLGIGWEANMDRQRRGVTGGTVMGAPAIPLGMIR

SEQ ID NO: 231267 - protein, 371 aa, Zea mays
  Clone ID: MRT4577_142510C.1.pep
MELEDLAEDEDNLGQKGTKVHFGGNMCAEKLDGLMVVVCEHLKSRVEEPERLIKEFVTLKAIFKSHVLRVHKSKFAQFIMFYACSLHPEIGDGFANFLTDIFIDKDKNEDAITRVSAVSYVGSYLSRARFISVNIVVSVLKRLVDWCDYYCGHQLDNGVTANPIKHQLFYASCQAVMYVLCFRLRSIMDYPNLKQQLFRMRIRDILVHPLQPLKVCLPSIVNEFLRQATAASLFHAPAISMHEDAVESDLSKAFGGLNRLDMFFPFDPYLLKESDRYIRPNFEFWSLVKTTYSNDNSDEDDEELGDIDAPGMNVGSLDDHFEIDFNSDDDIEYKMNKMSITPQRTFYHPLATNSESNRMPARIRPSVSPPS

SEQ ID NO: 231268 - protein, 75 aa, Zea mays
  Clone ID: MRT4577_142511C.1.pep
LTRPPGSVLLRGVHGEGNRPDGGDARDTERLTPRRPLEPSGVQPRRKKHSGDTPPPRWVGRPHVASTLHTIRADL

SEQ ID NO: 231269 - protein, 59 aa, Zea mays
  Clone ID: MRT4577_142512C.1.pep
AALFPSVTRCKKPALNFGSMYVRQGGQNCYFKDSEPMFMFIAKKSLLMVIKFFLDGPTP

SEQ ID NO: 231270 - protein, 89 aa, Zea mays
  Clone ID: MRT4577_142513C.1.pep
PSVSGHQNFRFDCRRFCQGQGSGPCSRVLPSARQRPPPAPQRPTHPPTFSLPVKAGVPQVKAFKKAFAEFGEVLLAQVVTDRVSGFSKG

SEQ ID NO: 231271 - protein, 87 aa, Zea mays
  unsure (1)..(87): unsure at all Xaa locations
  Clone ID: MRT4577_142514C.1.pep
RLYFDIYYSLKPTLLVGTPXDYYIXSSFLLSSITISAGLVFYPINTARLRMMITSGEALKYNNYFYAFKHILSNEGTKSLFKGAGSN

SEQ ID NO: 231272 - protein, 56 aa, Zea mays
  Clone ID: MRT4577_142515C.1.pep
KMWRLCRQSNQLCCKTIMFSHKIGPYLLYKKSYFEFNCISCIHAVKKKKKQRKKKL

SEQ ID NO: 231273 - protein, 77 aa, Zea mays
  Clone ID: MRT4577_142516C.1.pep
GQKGQHLVSIGENKLMPELPDQKFLVLNSREFLAFHLTTMNPGRGTTAKMNPGHRTLWPQNNGTIFTHSSGFNPGGP

SEQ ID NO: 231274 - protein, 52 aa, Zea mays
  Clone ID: MRT4577_142517C.1.pep
TRTQSKPQGFYPRLCKGNSIRTRNFRTQTLEKNIFGTPRVFTAKPANPGFHK

SEQ ID NO: 231275 - protein, 58 aa, Zea mays
  Clone ID: MRT4577_142518C.1.pep
HLVCWSRVLTWAISLARSIDVATFVRGSQGKPARPGFHPHGRRCRECGYKRSSNKVVC

SEQ ID NO: 231276 - protein, 63 aa, Zea mays
  Clone ID: MRT4577_142519C.1.pep
GLWCLSFHFISCPSCAPCQRFLNETVVASKERPPHEVCVRLLTVSGCVHPVVILPIRPWARCG

SEQ ID NO: 231277 - protein, 79 aa, Zea mays
  Clone ID: MRT4577_14251C.1.pep
WTLIALKARPLLPLKYLRSPQFLHFQITFPGFCRYPHKKMNKSSRWRGIIYLHPCFKALPFSLRFLCAVYEGVFFLFFL

SEQ ID NO: 231278 - protein, 66 aa, Zea mays
  Clone ID: MRT4577_142520C.1.pep
MELKAEKKPMAMKPVEEEHATDKVEKAPAPKKHKAKTLLREGKSNDDGEGKKVNGKANKFVETEKN

SEQ ID NO: 231279 - protein, 80 aa, Zea mays
  Clone ID: MRT4577_142521C.1.pep
MASSSIHIHHPRLAGYEIHRTLEASYSPSASYCSDDAFVPVFRPDPSAPSVSASASCDRVRSLFRSVDVVLFRDTLFAPG

SEQ ID NO: 231280 - protein, 100 aa, Zea mays
  unsure (1)..(100): unsure at all Xaa locations
  Clone ID: MRT4577_142522C.1.pep
XXXXXFFFFFFFFRPPQVCFLSTGPLLPKTTHPEILLCFLSTPACDGRVRAPTKTLKHARGKSKSHVVRQNIRKGDAYLQILLPGTSTTKGYLTWFFFRR

SEQ ID NO: 231281 - protein, 88 aa, Zea mays
  unsure (1)..(88): unsure at all Xaa locations
  Clone ID: MRT4577_142523C.1.pep
NTPSTDQILYRSVTXIQQLTVTNPLLVSRSAIRIVTPNLXLXSRRNSKPSTPKVPTDIGPKHGRALAIRKLLKSYQNRPGRNMAFKLT

SEQ ID NO: 231282 - protein, 108 aa, Zea mays
  Clone ID: MRT4577_142524C.1.pep
YLKNTGGGTFLPQSSIGPSSTKKIRGPISKRGWHKRVICKRGKIILQLFGGVLPPSFFLRWGEKYHSHYGHPNNPPTGGQVNWLFPFKPIFGGSQTLKTGGGPRGGPF

SEQ ID NO: 231283 - protein, 79 aa, Zea mays
  Clone ID: MRT4577_142525C.1.pep
HLYFSIEELVICSLRLSALASISNVSRTSLRSLGTLPRWEVPIQVHSPLPILVLCFTKELEIVRNLDPGGNHLLLRLQG

SEQ ID NO: 231284 - protein, 76 aa, Zea mays
  Clone ID: MRT4577_142526C.1.pep
NSVTFTLAGFYTQYDPNSPSPALLVTTMYYPHIYAHTYIYPHILHIQWSPIYDVATLLTSIHTLLSDPNPNSTSNS

SEQ ID NO: 231285 - protein, 82 aa, Zea mays
  Clone ID: MRT4577_142528C.1.pep
KMSIQCVNMYKLIWLGWILCNWSLSTAMSYQSYYQPRYQPSSAFIYHIPPMPSLYHHPTVALAPYPLFFYRLLFKIKHNVLY

SEQ ID NO: 231286 - protein, 108 aa, Zea mays
  unsure (1)..(108): unsure at all Xaa locations
  Clone ID: MRT4577_142529C.1.pep
PGSPGLDAIPLRGTKKAQIGLLHAYVSAADRNQQPVAGGSLRLPLHPPLRWSARISCAHGLXTWGAPSSRQRWFGVTPPWLVSASCVPGRPLEFRRSPSVPLSCHLGD

SEQ ID NO: 231287 - protein, 56 aa, Zea mays
  Clone ID: MRT4577_14252C.1.pep
ASSTDTRKKVDFTQQHASQAQTSEGRTGPRLLPLNQRRWGSDECMHKRHHRSQRSR

SEQ ID NO: 231288 - protein, 49 aa, Zea mays
  Clone ID: MRT4577_142530C.1.pep
CQRKAQRSATPPSLVVLPRMHQGSHHLRASLQVPIGVVYNQHSSVLPVG

SEQ ID NO: 231289 - protein, 279 aa, Zea mays
  unsure (1)..(279): unsure at all Xaa locations
  Clone ID: MRT4577_142531C.1.pep
PAGINHRLGGGDTHTYKPRAHTVPRPPAAATRAPWPCWLAPPRTSSSSFSSSPPRPPCGPSPTKPAAPETTSTRRAARRCSPRCACTRSRTTPSARRGRSRRAGWPSCSCTCRPXGMTVAAXSRTTSSTPSRTTSCTSASTPAPRTSRRPWRTSAPSPATSPTPSSSRSSPGSPPRSAAPPPATTHAKTRPSATSRTPASPRASSLRSCCASRSTSSPXSGSMSAEVALPPSAASGASGPAPAPFGGYGSSAGAPAYGAPSPAGDPAYGASGSPAPTPL

SEQ ID NO: 231290 - protein, 142 aa, Zea mays
  unsure (1)..(142): unsure at all Xaa locations
  Clone ID: MRT4577_142532C.1.pep
PGLPRVFPRPPSRPVLVGSSLWSLAAGAGWVCARGPXVPWVRXLVLGFAGAGLAAGVVALLGVLRGVVVGVLVXLAGVSCPCARCFLGVAGGLLRSLFRVVVXGVPRVPRAVLPALVGWLRGCLVLVGSGGACVVPCGPLFS

SEQ ID NO: 231291 - protein, 81 aa, Zea mays
  Clone ID: MRT4577_142533C.1.pep
PDPAPQSPKVPTAAASAAAAKERKEVQRRKQRDEEGLHLLTLLLQCAEAWNADNLDDAHQKLLEIWELDKPISHLIPFVWA

SEQ ID NO: 231292 - protein, 359 aa, Zea mays
  unsure (1)..(359): unsure at all Xaa locations
  Clone ID: MRT4577_142534C.1.pep
MILLVKHQDTDQSSVEITVATDHTTNYQNKKVLHAPTGAPSATCSPGSSPEESAMDRYQRVEKPPPEPAAIGENEIRITTQGLVRNYVTYATSLVQEKQVKEIVLKAMGQAISKAVAIAEIIKKRIPGLHQDTIISSVSITDVWEPIEEGLVPLEMTRHVSMISISLSPKEHNKNSPGYQAPLHSDLKPQRYQQPQQYQQYQPRQHQVQTDSYGRGRGRSRGRGRGWGTRGGYGGGYGGYEYDXPQVGYGVYEHHGGYGHQGGYGNQGGYGHNQGGYGHDQGGYGGYGYNQGGYGGYENGGWNYNRNRGGGGRGRGNWGYGGPGYDRGGRGAGGPGGRGYVRGRGRMGGGRGRGNQNYY

SEQ ID NO: 231293 - protein, 44 aa, Zea mays
  Clone ID: MRT4577_142535C.1.pep
LLLHTAGWCMLLSSLWVIWQMMYSFYTILKLSSGSMSHPCAHFF

SEQ ID NO: 231294 - protein, 73 aa, Zea mays
  Clone ID: MRT4577_142536C.1.pep
PTRPPTRPVWEAAKWVAKVRDVACPSCSQSVILKTNMQSGHFGEGGRFTHCDETAFEYAFLMKALGLDDVAMM

SEQ ID NO: 231295 - protein, 36 aa, Zea mays
  Clone ID: MRT4577_142537C.1.pep
MAYEGEDSKEKASKDQAKWCSVRFDSYAKISKVFGS

SEQ ID NO: 231296 - protein, 74 aa, Zea mays
  Clone ID: MRT4577_142538C.1.pep
FFIRPKLDARVILYPHLLYFAYCTADMILLGTVLFGKQKSVTHNILTIMMGKRKSMRGGFLGSRHVRPCLASGR

SEQ ID NO: 231297 - protein, 69 aa, Zea mays
  Clone ID: MRT4577_142539C.1.pep
LPFLSLPRPKASSKGDFPNTSELGSKLRAIIQIGGYCGKWLSLYKYTHHTTPEPKILNPGVPNEGANSH

SEQ ID NO: 231298 - protein, 109 aa, Zea mays
  Clone ID: MRT4577_14253C.1.pep
MNTILATETMVIPEGVTVTVAAKLLTVEGPRGKLTLIFKHLNLDFHLHDCGRKLKVDAWFGTRRTMAVIRTAIYHVQNLIVCVTKGFRFKMRLVYAHFPINAYITNSNF

SEQ ID NO: 231299 - protein, 378 aa, Zea mays
  Clone ID: MRT4577_142540C.1.pep
VKYMRSQVGPASRLYTSFKELSSKLASIKDVVVVGVFGSESDSLAKEFHKTADRLRENVNFAHIYTKDASDSVEELAKQVGKSFSGESSVVLVRPPQLSNKFEDNVVSYDSESDNLSGFVDENYHGLVGHRTQSNMADFKTPLVVAYYDVDYVKNVKGTNYWRNRVLKVAKEFPEVNFAVSNVHLFAGELEEFGASASKDNSPVVAGRDQQGKKYVLQGKFSVEALHKFVEDFAAGKLEAYLKSEEVPVDNNGPVKVAVGKNFEDLVTNSQKDVFIKFYAPWCGHCKKMAPAYEELGTLLQNEPNVEIVKLDATANDVPEPFVVHGFPTLFFLPADSKTPQKYEGGRDAKDMLSFIAKHSTQELKGFNRDGSARKEEL

SEQ ID NO: 231300 - protein, 167 aa, Zea mays
  unsure (1)..(167): unsure at all Xaa locations
  Clone ID: MRT4577_142541C.1.pep
GVLGFLXAAQHFFGPLVRWPARTFGRCYASVLVQRAKFCLGPLARRRPICCLGGGGXTLPVILFLGGRGTTSRRLDLSHRCMLSRVGTLYCAPERPLLPVVSSSRRPHMRSGLYGPWALGRAVELRVSQPAFFLSPAICLAVRILATLFVDSLSDVPGRFWFLFPTL

SEQ ID NO: 231301 - protein, 121 aa, Zea mays
  Clone ID: MRT4577_142542C.1.pep
FLFFFFFFFFCFFFCKIHKRLCRTWAGGQQRKVGPVPVAFQKLNTHSLLNFKAIHISLRRENYSGLQAHATRDYSAKAFVCSMPASESRPCRLLWGRREQLHIPWADRYFNLAHRRFGNLG

SEQ ID NO: 231302 - protein, 73 aa, Zea mays
  Clone ID: MRT4577_142543C.1.pep
IGVPLSLGAGSVYLLHLVEYLKKTCHLERLCEIESRNKKSIGARLLTTSDNLTARRSPLYARIIGIVGNPINQ

SEQ ID NO: 231303 - protein, 39 aa, Zea mays
  Clone ID: MRT4577_142544C.1.pep
VSFSKSTGVDSLFYFCKKVNLMPILWACLRKRTPAFMHG

SEQ ID NO: 231304 - protein, 89 aa, Zea mays
  Clone ID: MRT4577_142545C.1.pep
LQAADEPNEHMRRQLQTQLHEDDTELLDERELRALAAAAYKKLEGDLKDLELQADSAIKGREEAIKQLRKLQAQMKDFQRELEDPRASR

SEQ ID NO: 231305 - protein, 54 aa, Zea mays
  Clone ID: MRT4577_142546C.1.pep
LGISYFYIFFWVWGFFVLGGSQFILFRKIKPKKQFCKATVTKYQSNIGHFKKQR

SEQ ID NO: 231306 - protein, 83 aa, Zea mays
  unsure (1)..(83): unsure at all Xaa locations
  Clone ID: MRT4577_142547C.1.pep
PPXPDNSGSDNHIIQEEQPKQTARCTKIISPNTDDAKYVINVKQIAKFAVGLPDKVSPTDIQERMRTGVHHNKHHTQXPSPPK

SEQ ID NO: 231307 - protein, 35 aa, Zea mays
  Clone ID: MRT4577_142548C.1.pep
ASRSETSQFVCSTMVLCPPMKIAEVYSSIALLLSP

SEQ ID NO: 231308 - protein, 49 aa, Zea mays
  Clone ID: MRT4577_142549C.1.pep
KRRPRGQTKKAGQGSGRTKKGGTREPSERESSTTEGQRSQRKKGSRRPA

SEQ ID NO: 231309 - protein, 35 aa, Zea mays
  Clone ID: MRT4577_14254C.1.pep
IFYQYKTFTSLLETVHFLKSKITLNKSWQNTHYRR

SEQ ID NO: 231310 - protein, 72 aa, Zea mays
  unsure (1)..(72): unsure at all Xaa locations
  Clone ID: MRT4577_142550C.1.pep
DHVPQEEYSLNSWSIESKLVFIINGPYFIYVSYECGKQNQLVHAFFEHNKISCVKGMFGLCRIPSAVTLXEL

SEQ ID NO: 231311 - protein, 57 aa, Zea mays
  Clone ID: MRT4577_142551C.1.pep
FTYRLQREAALPIAVVRTFSESYERHVVDVCLTDGVYVIQLGSLLALEQCYRGRQPC

SEQ ID NO: 231312 - protein, 76 aa, Zea mays
  unsure (1)..(76): unsure at all Xaa locations
  Clone ID: MRT4577_142552C.1.pep
GRPFFFWGDLYKAITVFSHXKGKGXXRCPRGSTLLSEEKTDVRVRGYTTHYGVHCDRQSKCVCVKATTGPAQTGCP

SEQ ID NO: 231313 - protein, 238 aa, Zea mays
  unsure (1)..(238): unsure at all Xaa locations
  Clone ID: MRT4577_142553C.1.pep
MSAMDTAVSQNATVAAAATAAGVGSAGLAGLLPEVQTVELLVAVSIFVAIHSLRQRRTQGLPTWPLVGMLPSLLLGLRSDMYEWITGVLKARGGTFTFRGPWLTNLHCVVTADPRNLEHLLKTRFGSFPKGPYFRENMRDLLGDGIFGADDEVWRRQRKAASLEFHSAEFRALTASSLVELVHRRLLPVLPXAEAAAXAVDLQDVLLRLTFDNVCMIAFGVDPGCXRPXLPEIPFARA

SEQ ID NO: 231314 - protein, 84 aa, Zea mays
  Clone ID: MRT4577_142554C.1.pep
MGPKAPGPRPLASCPRPGEETYGSPVFGPTCDSQDKVVPGDQPPEMRVGDWVVFDDKGAYSPRAGSRFNGFDSSENKIYVAYSS

SEQ ID NO: 231315 - protein, 100 aa, Zea mays
  Clone ID: MRT4577_142555C.1.pep
MPLSRHTVGNEYALGGRDLYRAADQHDPEDVLDGVAMAGLVGVLRQLGDLAEFAAQVFHGLYDEVMSTSARGHGLMLRVQQLEAELTLLERDCWQRDYLD

SEQ ID NO: 231316 - protein, 61 aa, Zea mays
  Clone ID: MRT4577_142556C.1.pep
TGKENSICIGVHLPENLHYNLFKIHCFFCQKLAVGGSLQNVVGIYFEDTTNTRFFRNPFIG

SEQ ID NO: 231317 - protein, 122 aa, Zea mays
  unsure (1)..(122): unsure at all Xaa locations
  Clone ID: MRT4577_142557C.1.pep
WERLLHRKEEWCEEICSSNKKDNSLRRTRLNNSDAVYVQDLVTEVQRALCRTFLNFTGNIEEESELETLIDMQLVELRKVFRIPHKPFDETQGPTSKKLLTLFXSGKLGPFILDDLSDGSEK

SEQ ID NO: 231318 - protein, 54 aa, Zea mays
  Clone ID: MRT4577_142558C.1.pep
AVIVPTSLYLLSYLFLHLISLIITFKDLNLCNAINYVCHPKHPFIISYVLYYDH

SEQ ID NO: 231319 - protein, 38 aa, Zea mays
  Clone ID: MRT4577_142559C.1.pep
GKLGTEQLQNKNIPLICNTPLVPKKYHFFSAREKKQSR

SEQ ID NO: 231320 - protein, 87 aa, Zea mays
  Clone ID: MRT4577_14255C.1.pep
TRLRHQPFAPPSRMGGAALKRHRESSEASASEQQEQEQTQSWLFEQLLKQQQARNNGAVGVRDSRATTSEQQQADRGTSPPADRGSA

SEQ ID NO: 231321 - protein, 113 aa, Zea mays
  Clone ID: MRT4577_142560C.1.pep
SADLSQPKTGEGHDSWQHLSTLTGYHGRTIFSAHWSSEDIIASGAGDDAICFFTEEKGSMVEKPSYRLILKKEKAHVMDINCVRWCPQDPRLLASASDDGTVKLWELRGNVLD

SEQ ID NO: 231322 - protein, 158 aa, Zea mays
  Clone ID: MRT4577_142561C.1.pep
AAFTVHTSAATSPYSPAGTAILLRSRSRAYPTATIRVSCSKTVVIGVAADSGCGKTTFTRRLASVLGGGAEPPRAGRNPGSNTLVSDTTTVICLDDYHSLDRAARKAKGVTALDPKVIDFDLMYEQVRAIKEGRAVEKPVYNHVTGLLDPPEFITPPN

SEQ ID NO: 231323 - protein, 90 aa, Zea mays
  unsure (1)..(90): unsure at all Xaa locations
  Clone ID: MRT4577_142562C.1.pep
ALXXTLDEVFLGYNLLFLADVMRTNPGPLVLPYGLSSSVYCSYFSLLRVSXLVDVPLLMHLSALMMHXLCRSLDHVSGCXISNVWILTAA

SEQ ID NO: 231324 - protein, 662 aa, Zea mays
  unsure (1)..(662): unsure at all Xaa locations
  Clone ID: MRT4577_142563C.1.pep
ISSPERERKLLYSQVAKALNSSASVDEASASNVVMLSGFSIPKLVLQIVTIETVLXIYKPNKELAVLKDIAFTVYNKARRIPRAVSTSDMFQSPTYLGRSQSTMMHVTSPAPTLWKECLVPRMSGPTLSRETDFDASMRSATWDNSWQPARSGGLLDPSKLPDLCAQDDRKYAFEPLFILADPGSADLNALMEPSKSGADASGSRVYGSISGSNSDSGVSPLLDVSESDSAASLHCCYGWTEDWRWLVCIWTDARGELLDSLIFPFGGISSRQDTKVLQSLFIQILQQGCQIMSSSPEASNMRPRDVIITRIGGFLELEIQEWQKAIYSYGGNEVKKWPVQLRRSIPEGIPPSSNGPTLQQQQQQDMALIQDRNMPSSPNPLYSPHPKSSFMKGALGQSGNKKQILVEQSGMDTSRGSLHLVRSISLVAVSQDHSLHLTCQADLLSRPASAGEGSQGSSGPWSYLEGFTPVKSIGSMSASHSYLLVPSPSMRYLSPATLQLPTCLTSESPPLAHLLHSKGTAIPLAMGYVVSKAVPPVRRDSAQLTKDEQPSVLSVSIIDHYGGSIGTVQEKMSRGGGGGGGSKQARNLSQETTGRECEMEMHSVLEAVAAELHSLSWLTVSPVYTERRTALPFHCDMVLRMRRLLHYADKYLSEPKGETTH

SEQ ID NO: 231325 - protein, 223 aa, Zea mays
  unsure (1)..(223): unsure at all Xaa locations
  Clone ID: MRT4577_142564C.1.pep
MDRVQKITPNPKNYVVLHRLIVSSLVLLLSCTAASCEQTPPLISRLAKDLNTSLYTITIKADKSPLLLDIAGSLVWSTCPPPSAQSTVACGSGKCGGVASQQCPRNCLHVDGGQLGESGSGCACASNPVSRQCSTAGLTSFAMSANATDGAMELPPEESFAVLGACAPDSLPRSLPAGVTXGVAGXSRRPLSLPSQLAAQRGFGGKFALCLPVFAIFGDSPVN

SEQ ID NO: 231326 - protein, 135 aa, Zea mays
  Clone ID: MRT4577_142565C.1.pep
RPGKSRRRREGGRVTSPYTGPLLLILARFITMVMKKLLSSLPAMVAIMLAIIAMLFCSVVVVHSSEVKQANDATRAHLEGSHQGVPPPAPQGGRVHAYGDVPPPPQLSSLSNSTRTGRTDRLGGDINSYVTDRHV

SEQ ID NO: 231327 - protein, 133 aa, Zea mays
  unsure (1)..(133): unsure at all Xaa locations
  Clone ID: MRT4577_142566C.1.pep
SKYVDELINECCSYVSSPRQRNSSAADEPPGPIXSGLSKMSVRXMKDNRRALREYQFCCPDALXYVSRVTHFQEIFHQKTSDAPPIMHDVKEGXALPVIYAEKGTIGVVGMDQETRTQGGDDLRNRGPMYDQG

SEQ ID NO: 231328 - protein, 191 aa, Zea mays
  Clone ID: MRT4577_142567C.1.pep
MECRSISETFLRANAALCVLAPAICGLCGAHRRSIHFKPGPASPEEDDVRDRAPLPRRWYRAAYARLLRHSGSLAGVAGGFPWHGARGSLVACPHAATRAAHFDALAGEFVAAVATVSRGHPPLKMEVTSLRSLTQVCDVLGVSAQRRKSVRLNVCPQVTQHHVWRGALEGVLGDLQADMASLDSPSPGIK

SEQ ID NO: 231329 - protein, 149 aa, Zea mays
  Clone ID: MRT4577_142568C.1.pep
AGQMLKRYEAHQSADSCIRYPNNHLMVDSDVGDVAVNLVSIAPTGHPDRISREANPIGAKCGGWGTLCAALFLFIYIPSIISACALYPGWLSFRGQVKPWTECVRRVRERDSWVDPIRQQESRREAPEQWRNGIKFPVVRGNVLSGRPR

SEQ ID NO: 231330 - protein, 39 aa, Zea mays
  Clone ID: MRT4577_14256C.1.pep
IQTLKLKFNLKLKKREVLHYLINGNIHLRVWKSSLKTVR

SEQ ID NO: 231331 - protein, 82 aa, Zea mays
  Clone ID: MRT4577_142570C.1.pep
MSHTILLVQPTKRPEGRTYADYESVNECMEGVCKMYEEHLKRMNPNSPSITYDISQLFDFIDDLADLSCLVYRADTQTYQPY

SEQ ID NO: 231332 - protein, 43 aa, Zea mays
  Clone ID: MRT4577_142571C.1.pep
AFHLKLDLEYNFPGPMYKHLKSGNHEDIRRDGGATTLESSQVF

SEQ ID NO: 231333 - protein, 93 aa, Zea mays
  Clone ID: MRT4577_142572C.1.pep
PTTANRTCCNRSTALTPPPTDLLQTRNPGEPTRTDHGSPSNDPSARTHVAGRRGRNRRLASHTLRRRTRKPWLRLDRRFPGEIGWGTGLDRKC

SEQ ID NO: 231334 - protein, 49 aa, Zea mays
  Clone ID: MRT4577_142573C.1.pep
ILEGKGLKLTWGNLPSYIKPCLVKFPQPIILAFSLQPCSLVEPSFAKIN

SEQ ID NO: 231335 - protein, 66 aa, Zea mays
  Clone ID: MRT4577_142574C.1.pep
EVAPSFVTMDVRPTAEAKSEYATSADAFSSDVNALADEPNGPASAHGPQGVKQRLGDALMSHHSNN

SEQ ID NO: 231336 - protein, 578 aa, Zea mays
  Clone ID: MRT4577_142575C.1.pep
MATVLLPLLLLLGSAVTLLTCAGAGASFPVNVWPKPTSMSWAEPHAAVPVSPSFHIVASSGNPYLASAAERYAKLLFRETYRPIVRPAVNVTAGNALEKLTVAVSDLAAPLQHGVDESYTLEILPTGAATVTAATAWGAMRGLETFSQLSWRAGRGDLLLVAAGVRVEDRPLYPHRGLMLDTGRTYFPVADILRTIDAMAANKMNVFHWHITDSQSFPIVLPSEPSLAEKGAYGENMRYTVEDVERIVEFAMSRGVRVVPEIDSPGHTASWAGAYPEAVTCAGKFWLPDGDWNHRLAAEPGAGQLNPLAAKTYEVITNVVNDLTSLFPDGFYHAGADEVTPGCWEADPTIQADLERGATLSQLLERYVSAVHPLVVSRNRTAVYWEDVLLDAAVNVSASAIPPATTVLQSWNNGPNNTKLIVQAGYRAIVSSASFYYLDCGHGDFVGNNSIYDDPNSDFDANGGSWCGPYKTWQRVYDYDIAYGLTPEEAQLVLGGEVAMWTEQVDTTVLDGRVWPRASAMAEALWSGNRDASGRKRYAEATDRLIDWRQRMVGRGVRAEPIQPLWCRTRPGMCNAVQ

SEQ ID NO: 231337 - protein, 122 aa, Zea mays
  Clone ID: MRT4577_142576C.1.pep
AKEGVPPGQQGFIFSGNQMEDGRPFPGSNIQKESPLPLVFPPRGGMPIFLKTPPGKTLTLEVESSAPLPNVKGKIPAKEGFPPGQQGFIFSGQQLGDGRPLAGFTIPKESPPPPGVRFRGGQ

SEQ ID NO: 231338 - protein, 57 aa, Zea mays
  Clone ID: MRT4577_142577C.1.pep
VTVFFFPYSSVCMRSFSVSVSIACACTVRDRVENLASSIAQVQPVVSQPCLFGRGSE

SEQ ID NO: 231339 - protein, 112 aa, Zea mays
  unsure (1)..(112): unsure at all Xaa locations
  Clone ID: MRT4577_142578C.1.pep
RTQAINFASPIVAHKGRPKAGANVNVLGPGARSDHQGRGHLLGNKTKLGTKHFVRQPELDCDGXKKTNPGSTHTIDKGVFAAGDIQDKKYRQAITAGGSCCMTTLDAQHYLH

SEQ ID NO: 231340 - protein, 170 aa, Zea mays
  unsure (1)..(170): unsure at all Xaa locations
  Clone ID: MRT4577_142579C.1.pep
SRDESRGPVVPLLSSCPSSPVATPPPFLWLTWVSRTATSTSGTPTSSPVRTLPSESRTLRELSSTLPRSPSLLDPTPAVSVRPSLVLRPVPPSLPLAPVPPPSXRSXPPPRTLSLPPPLRRPRLPLPVLVVLLEVPPLPSRPPSLPLSAPPLRSDPRTLPSSAAPLVPLS

SEQ ID NO: 231341 - protein, 111 aa, Zea mays
  Clone ID: MRT4577_14257C.1.pep
KTTIGFSPKILPIRQTPPAFFFFFGLFYPFTGPKRAMGIYRLQTQQTKNGHPRLGTQHFYFWGTLFDGAILITRGCCKSGGEATTGRWDVPTSRFSFWGNGFSKDDFAIFG

SEQ ID NO: 231342 - protein, 108 aa, Zea mays
  Clone ID: MRT4577_142580C.1.pep
WEAPSLPSQRCPPKSESGEGSPKKRPPRSRCFLFNKRGPPSPQKNPPFPRSCPNRVNWPGNPRSLTKGGGGSLKPQIGAKQALEMAARPPKGWSVSPSLLEGKPLGNC

SEQ ID NO: 231343 - protein, 88 aa, Zea mays
  Clone ID: MRT4577_142581C.1.pep
QPAAPRPTGDSSVRVRRQSCWLLSNSLDILPLLAVWRQNSKGLSFMLKLRGVADKTSVKRIQMRQAIFHRISPKNLCSFHLQGNCDST

SEQ ID NO: 231344 - protein, 698 aa, Zea mays
  unsure (1)..(698): unsure at all Xaa locations
  Clone ID: MRT4577_142582C.1.pep
HVGRSLRNCSLQGAVPDLSVVPKFGYLDLSWNQLKGSIPTNRLSSNITTIDLSHNFLQGTVPSNFSGLPNIQYLSVNGNLLNGSVPPTIWSNITFTGNRALVLDFQNNSLDTIPPVFEPPQNVTVLLYGNPVCTASNAARAANLCQPTSVTDAPSGEGKQVSTTCFPCPTNFEYNPSSPIPCFCAAPLGVGFRLKSPGISDFRPYKEAFENDLTSLLELRVYQLYIERYIWEAGPRLNTHLKLFPNNTNLFDMAEVVRLREVLAGWQITLLDVFGPYELLNFTLGFYADEFRTAASPGLKGGALAGILVGTIVAAIAVSVFSTVFISKMITCXRTISYLALLSRFSVKVDGVKCFTFDEMAVATRDFDISAQVGQGGYGKVYRGNLADGTTVAIKRAHEDSLQGSKEFCTEIELLSRLHHRNLVSLVGYCDEEDEQMLVYEFMPNGTLRDHLSAKTERPLSFGQRVHIALGAAKGLLYLHTEANPPIFHRDVKASNILLDSKFVAKVADFGLSRLAPVPDIEGTLPALSSTVVKGTPGYLDPEYFLTHKLTERSDVYSLGVVFLELLTGMKPIQHGKNIVREVNIAYQSGDVSGIIDSRMSSYPPECVKRFLSLAIRCCRDDTEERPYMADIVRELETIRSMLPEGEDVLSSTSGSGLLAKSMSSSSTTTTGALYVSSHISGSGQADSGIPSGMVAPR

SEQ ID NO: 231345 - protein, 107 aa, Zea mays
  Clone ID: MRT4577_142583C.1.pep
PGGPNFGDHVRVSLAHVRHFSLRGGATVSRKIPDPLAPVLEQHRGGQFLLRGGEPPCGPCHGSVGRPRQGDALRGETPLFPHTLANWTFLGSKSFPCVFYFKRPLFC

SEQ ID NO: 231346 - protein, 8 aa, Zea mays
  Clone ID: MRT4577_142584C.1.pep
LCRVIALG

SEQ ID NO: 231347 - protein, 33 aa, Zea mays
  unsure (1)..(33): unsure at all Xaa locations
  Clone ID: MRT4577_142586C.1.pep
RLLQLNCNDLHAIEGSTKICIEYXVILNFYIXN

SEQ ID NO: 231348 - protein, 139 aa, Zea mays
  Clone ID: MRT4577_142587C.1.pep
KLGQRRFDGGYVHNGLLKGAEWVFDAECDVLKDLLERNPGYTLTFAGHSLGSGVVSMLALLAVHNRELLGGIDRKRIRCFAMAPARCMSLNLAVRYADVINAVILQDDFLPRTDIPLEDIFKSLFCLPCLLCGRCLIDT

SEQ ID NO: 231349 - protein, 95 aa, Zea mays
  Clone ID: MRT4577_142588C.1.pep
GGGSPDPAVYLGAFFKPPPPQGGRRPGWLINGDPPPLARGFPRPPPKGPCFFWGFFPFLFPPFPFFFSPSPSNLEIPKKSPKKPKSPPRCGECVP

SEQ ID NO: 231350 - protein, 228 aa, Zea mays
  unsure (1)..(228): unsure at all Xaa locations
  Clone ID: MRT4577_142589C.1.pep
SLDFGERNGYLKGVVTEIIHDPGRGAPLAXVAFRHPFRFKKQKELFVAAEGMYTGQFLYCGKKATLVVGNVLPLRSIPEGAVVCNVEHHVGDRGVFARASGDYAIVIAHNPDNDTSRIKLPSGSKKIVPSGCRAMIGQVAGGGRTEKPMLKAGNAYHKYRVKRNCWPKVRGVAMNPVEHPHGGGNHQHIGHASTVRRDAPPGQKVGLIAARRTGRLRGQAAALASKQD

SEQ ID NO: 231351 - protein, 71 aa, Zea mays
  Clone ID: MRT4577_14258C.1.pep
ASPSPSAVGALARIRIRQEPDAGSQGADLGAHRSLPVARARSARGWTRNARGGWLASPRLPGVARPRGGGR

SEQ ID NO: 231352 - protein, 120 aa, Zea mays
  Clone ID: MRT4577_142590C.1.pep
MSSRMAAVAMAAFLFCALFAWTSSEAARMGRTGDEVVVVAAARAVNRGGRGSGGNVVYWERQRQQRGLIVGGRRPRLASFTPRDDGAGEVGGYKREVPSGPDPKHHGDPPPTSAAPTTSP

SEQ ID NO: 231353 - protein, 74 aa, Zea mays
  unsure (1)..(74): unsure at all Xaa locations
  Clone ID: MRT4577_142591C.1.pep
VPAFGRVVARLRVVGLSFGVSGVLGTANGALCLGASARWPSQLSPFFLASVLVRLPGPVAAIGAPASVAVCXPV

SEQ ID NO: 231354 - protein, 70 aa, Zea mays
  Clone ID: MRT4577_142592C.1.pep
RTLAYLSVSLCGPKDHHRYGSWATATGPTYGLGRIMVNGACAKGPQTRPARPRRQQPQGDLRGHQAQSPR

SEQ ID NO: 231355 - protein, 55 aa, Zea mays
  Clone ID: MRT4577_142593C.1.pep
QCKVGAFPHTVSSSIADALVSKKTQPYVAIIATSSCFRERWLNGVGRKLSTDLCV

SEQ ID NO: 231356 - protein, 91 aa, Zea mays
  Clone ID: MRT4577_142594C.1.pep
AYSASASARGSRNEEMAEELLDGLVQQHFCKPGVVRATGQLVVMRNTAVQSLEHNQPLCCRLMEKGRQRVLGERHPAHVHMTGRPDSMLVR

SEQ ID NO: 231357 - protein, 170 aa, Zea mays
  unsure (1)..(170): unsure at all Xaa locations
  Clone ID: MRT4577_142595C.1.pep
FPGGRHWHLCIRKDLLRAYADGLQKGSYGTDYRAVLPDXSTEAVNEAKGMSGHGSKEFEQPMELIWRVRKHXQDIAPILAYYYSTDEKLAAHEYMGRGILSTLLPGFKGVXDSTPLTXNTWLTILLTTAXRALAHPXQQGGSRLAHSNIKSTNVLLDRDHNPYVIHYGLS

SEQ ID NO: 231358 - protein, 123 aa, Zea mays
  unsure (1)..(123): unsure at all Xaa locations
  Clone ID: MRT4577_142596C.1.pep
MASTVGYLARRAAQKERVLLFYRSVFKDTFNWAVHRHFFYIDASYFCFMFLVFLHXXNXDXXXRXNDXAEXQXRNXQHPXPNXXPXAPGGXKXTRNPXPXQGNENNNXXGKEDQTRQAGAEQQ

SEQ ID NO: 231359 - protein, 87 aa, Zea mays
  Clone ID: MRT4577_142597C.1.pep
KVLQLEPYEFLVSVSGTMGAYAGLPTKVISSLTFVTNVKTYRTRGVTEGDPFELEAPAGSCIVGFRARAGDFLDALAVHQRPISHHL

SEQ ID NO: 231360 - protein, 62 aa, Zea mays
  Clone ID: MRT4577_142598C.1.pep
GEFVGAFFLYYQIGKGVFFSRRVRWGTAGFSPLQPFKNEAKKFKLGFPKKKIKNSRSRGRKI

SEQ ID NO: 231361 - protein, 43 aa, Zea mays
  Clone ID: MRT4577_142599C.1.pep
RFNYNEGSGTIPRVNTYMNNISFTSRVCMDLILKLKVTKLTFG

SEQ ID NO: 231362 - protein, 57 aa, Zea mays
  Clone ID: MRT4577_14259C.1.pep
LKDEDQTDSSRLFVASTTLLKVSHSKVEIISALKKSGGKEDASASQPPTNYWLGGGG

SEQ ID NO: 231363 - protein, 131 aa, Zea mays
  Clone ID: MRT4577_1425C.1.pep
MAASNSSALLPVLALAGVVFFLVAPAVVAEATAPQGLEFHVGGPRGWRVPDANTSYGWWAMNNRFRVGDHLYFKYANDSVLLVDRTAFDACNTTEPLATFADGATKFVLDRPGFFCFISGKPGHCEEGQRL

SEQ ID NO: 231364 - protein, 128 aa, Zea mays
  Clone ID: MRT4577_142600C.1.pep
ARYTRNETYAQWAEKTFQWLWDVQYIDHEDWRVYDGAHIQSNCTDIHKAQFSYNAGLLLHGAAFMYNYTESDVWKSRIDNLIIGMKRDFFELNIAYKLPCEGRHGACSADMLSFKGYVHRWLSVVTQL

SEQ ID NO: 231365 - protein, 115 aa, Zea mays
  unsure (1)..(115): unsure at all Xaa locations
  Clone ID: MRT4577_142601C.1.pep
YSSKQVGVSLNRIFPVPHKGEVVQEHAKTSISWYVTLCEVVVLVLRLVERSHSSDFLCLDTFSKXTNWREPHPPFENQDILSASELYCPKQLRATGPEVWLSPIKGLGHPGVHSS

SEQ ID NO: 231366 - protein, 46 aa, Zea mays
  Clone ID: MRT4577_142602C.1.pep
QAPYAEDGRIDYGEFVAMMTKGNMGVGRRTMRNSLNISMRDAPGAF

SEQ ID NO: 231367 - protein, 79 aa, Zea mays
  Clone ID: MRT4577_142603C.1.pep
KLVRAEELSFLILQSSKTIWQSCARRQHQAIIGQRADEAWRRPWPAASSSSMRRSVARGWAAAAAASAGRLSALLQAAG

SEQ ID NO: 231368 - protein, 57 aa, Zea mays
  Clone ID: MRT4577_142604C.1.pep
GSVTVVFNVSKVSHVGKLGSQMSRDIGVKTREGDHRKGGTGSTAFFLPFSVFLFFFC

SEQ ID NO: 231369 - protein, 49 aa, Zea mays
  Clone ID: MRT4577_142605C.1.pep
SNLAPYFCQDGRIDYGEFVAMMTKGNMGVGRRTMRNSLNISMRDAPGAF

SEQ ID NO: 231370 - protein, 142 aa, Zea mays
  unsure (1)..(142): unsure at all Xaa locations
  Clone ID: MRT4577_142606C.1.pep
FQPRPKQKSILFQAQQQGQKQKFVNQVGGALPTKVVCLPQVVPKNYLKNFXEYFALVGDMREEGPKYGNLVKVAIPRPDPNGVPVSGVGKVFLEKANVEGSTKTKTGMHGGKFGGNQVGGVFSPEDKFSIYQFALKVLKPLF

SEQ ID NO: 231371 - protein, 68 aa, Zea mays
  Clone ID: MRT4577_142607C.1.pep
VKQNLFFLSNQPNELFLVGGKKGKKKKIFEFIGGGFSLVYSNGWGGGGSFPLSPLGRNETQGAPRGGS

SEQ ID NO: 231372 - protein, 382 aa, Zea mays
  unsure (1)..(382): unsure at all Xaa locations
  Clone ID: MRT4577_142608C.1.pep
RALHRPSLLATAAALLLLILPPSAAAAVPAPALFIFGDSLVDAGNNDYLVTLSKANGPPYGIDFESSGGNGKPTGRFTNGMTIADIMGESLGQKSLAPPFLAPNSSAAITSSGINYGSGSSGIFDDTGSFYIGRIPLGQQVSYFANTRSQMLETMDEVSRXADFFSKALFVIVAGSNDILEFLSPSVPFLGREKPDDPSHFQDALVSNLTFYLKELSELGARKFVVSDVGXLGCIPYVRALEFMPAGQCSASANRVTEGYNRKLRRMVEKMNREMGPESKFVYTDTYRIVMAIIQNHRQYGFDDALDPCCGGSFPLPPFLCIGAVANRSSSTLCSDRSKYVFWDAFHPTEAANLIVAGKLLDGDAAAAWPINVRELSQYEHK

SEQ ID NO: 231373 - protein, 67 aa, Zea mays
  Clone ID: MRT4577_142609C.1.pep
KYTIKPEMQSFISVCALALQYCPCICHSSSTQKQLPLSCNLDPIPFLCYCHCLIDLLHLIIHKFKLS

SEQ ID NO: 231374 - protein, 54 aa, Zea mays
  Clone ID: MRT4577_14260C.1.pep
RIARQKRVLHYFCLDILLVPIAVKRAPRWLVRGSHYRVGDGGLVLRRPDCPWSW

SEQ ID NO: 231375 - protein, 153 aa, Zea mays
  Clone ID: MRT4577_142610C.1.pep
LSCRSGESLGQKSLAPPFLAPNSSAAITSSGINYGSGSSGIFDDTGSFYIGRIPLGQQVSYFANTRSQMLETMDEEAVADFFSKALFVIVAGSNDILEFLSPSVPFLGREKPDDPSHFQDALVSNLTFYLKVLRTSYHYQLSQPQSQLNASIC

SEQ ID NO: 231376 - protein, 107 aa, Zea mays
  Clone ID: MRT4577_142611C.1.pep
ICSHTCKRARGGSYYTGYGELNKQRIPLSNNQSIEEGLGKHNIICIEDLDHEIMTAGPHLGGGNNCLWPFTLKAPLGCLIKRRIPYAEGGDAGIRENYINALVVRMN

SEQ ID NO: 231377 - protein, 191 aa, Zea mays
  unsure (1)..(191): unsure at all Xaa locations
  Clone ID: MRT4577_142612C.1.pep
GPSARVFRPRRRTAQGASRGLPVAIVWHQQQLRGQRHIPGPLQLQELKNELALVAKLKHKNLVRLIGGCLGXQERLLVYEFLPNRSLDLILFDTESEERGRRRLDWAQRYKIINGVARGLQYLHEDSQLKGVHRDLKASNVLLDENMNPKISDFGLARIFGRGQTQAVTRRVVGTYGYMAXGYMMRGNYSV

SEQ ID NO: 231378 - protein, 611 aa, Zea mays
  unsure (1)..(611): unsure at all Xaa locations
  Clone ID: MRT4577_142613C.1.pep
MAHNLLPVTVVLAVALLMAPAAGYPWLSCGTSSSFAANGTYQDHFNFAAATLPKNASTSPDLFASIVVGTVPEQLSAMALCRGDVNSTTCFSCLTEAFGDLPSACSNDKAATIYYDPCMVHYSDVHTLPDDDDTGPSIDTYPIGDNQYVTADPGQFIRLLAALVNATADYAAYNSTRRFATGQADXASTRSXELYALAQCTPDQTPAQCHKCLAGLISQSLGGFQNRDGARMLAVSCTYRYETKPFYNGPAMVRLASPSSGAPAPAPAVNSRVRAAXEGGESTMXWVAIAIVLPALAAMNLVACLCLRTRRRLLIAQAKHQNPMYSTEAEDTEMVDSMMMDVSALRAATGDFDESNKLGEGGFGAVYKGVLPDGEEIAVKRLSSSSSQGVQELKNELALVAKLKHKNLVRLIGVCLGQQERLLVYEFLPNRSLDLILFDTESEERGRRRLDWAQRYKIINGVARGLQYLHEDSQLKXGYMAPEYMMRGNYSVRSDAFSFGVMVLEIVTGRKNSDDGCNLLATVWTHWEAGTVAQLVEPSSMGGSFPEGDVLRCVHIGLLCVQADPAARPVMSSVVMMLGSDTVTLQAPSKPGFFVRNNSANAAASTVSLDR

SEQ ID NO: 231379 - protein, 223 aa, Zea mays
  unsure (1)..(223): unsure at all Xaa locations
  Clone ID: MRT4577_142614C.1.pep
MHSWADICISTSAAPTXLPGHYFETEDGDGRTRAFNLVDGGLAANNPTLCAMGQVSKDIILGDDDFFPVKPADYGKFMVISVGCGSNRDRRYSAKAAAKWGIFNWLIKDGTAPIIDMFNSASADMVDIHLCVLFRALHSSENYLRIQYDQLTGSAGSIDDCSKENMDKLVQIGKDLLSQNVSRVDLETGKNKDVPSAGTNAEQLAKFAKQLSDERRRRQKLSK

SEQ ID NO: 231380 - protein, 164 aa, Zea mays
  Clone ID: MRT4577_142615C.1.pep
LGEGGFGAVYKGVLPDGEEIAVKRLSSSSSQGVQELKNELALVAKLKHRNLVRLIGVCLGQQERLLVYEFLPNRSLDLILFDTENEERGRRRLDWAQRYKIINGVARGLQYLHEDSQLKVVHRDLKASNVLLDENMNPKISDFGLARIFGRGQTQAVTRRVVGT

SEQ ID NO: 231381 - protein, 66 aa, Zea mays
  Clone ID: MRT4577_142616C.1.pep
IYFTARPARKLAWQWFLFVVMPSQKSNPWVYIKSQEPLRSIYLDSLKKKKKKKKKKKKNPRKGAGT

SEQ ID NO: 231382 - protein, 133 aa, Zea mays
  Clone ID: MRT4577_142617C.1.pep
LYMGCFACVPVSCILHRVRTYSLAYLPRCRHSLASVLVVRVHVHPLCIGMAMQKTWPHRVPSESCTRCLSGVACNRSGVLHAASAPPSLWSSHTWIHDAQWSAILPRTSGCQYSRSQCDAGVAASLLALTNRL

SEQ ID NO: 231383 - protein, 114 aa, Zea mays
  Clone ID: MRT4577_142618C.1.pep
AELPDLGSPGLLVANARRRRLHTMLASSGALLLPLVPWHEQVCPPWSPYLEHSFPCEKASTFFSLILGGKSSCLVCSEPSKSIVPATARPQFLLESHQTGSLKWKNLTARYKMC

SEQ ID NO: 231384 - protein, 43 aa, Zea mays
  Clone ID: MRT4577_142619C.1.pep
MLSASFFTGSSFMKLVSWYDNEWGYSNRVLDLIAHMALVSAKH

SEQ ID NO: 231385 - protein, 54 aa, Zea mays
  Clone ID: MRT4577_14261C.1.pep
APIKCKGIEYFPIIYRENIQLRSVYKWLVHPPGRALPSSSLYLFVKKTCQILLR

SEQ ID NO: 231386 - protein, 102 aa, Zea mays
  Clone ID: MRT4577_142620C.1.pep
MPINRLVYTVYATAVDPKKGSLGTIAPIAIGFIVGANILVGGAFDGASMNPAVSFGPALVSWEWGYQWVYWVGPLIGGGLAGVIYELLFISHTHEQLPSTDY

SEQ ID NO: 231387 - protein, 108 aa, Zea mays
  unsure (1)..(108): unsure at all Xaa locations
  Clone ID: MRT4577_142621C.1.pep
VGKLTGGGPTTPAGLIAAAVAHAFALFVAVSVGANISGGHVNPGVTFGAFVGGNITLVRGLLYWVAQLLGSTVACFLVRFSTXGQATGTFGLTGVSVWEGLVLEIVMT

SEQ ID NO: 231388 - protein, 96 aa, Zea mays
  Clone ID: MRT4577_142622C.1.pep
GTGGRVLAPQRGRIWVRSAGTAAAAATSVRGCGAAGGGGKAWTGGQAARTTWLDRGSWSLGDACWGREGSQQVSSSPCSVFRDWNLGSRPASRYPM

SEQ ID NO: 231389 - protein, 107 aa, Zea mays
  Clone ID: MRT4577_142623C.1.pep
PVSCWCPPRAGKLTGGGPTTPAGLIAAAVAHAFALFVAVSVGANISGGHVNPAVTFGAFVGGNITLFRGLLYWVAQLLGSTVACFLLRFSTGGQATGTFGLTGVSVW

SEQ ID NO: 231390 - protein, 211 aa, Zea mays
  Clone ID: MRT4577_142624C.1.pep
CPPRAGKLTGGGPTTPAGLIAAAVAHAFALFVAVSVGANISGGHVNPAVTFGAFVGGNITLFRGLLYWVAQLLGSTVACFLLRFSTGGQATGTFGLTGVSVWEALVLEIVMTFGLVYTVYATAVDPKKGSLGTIAPIAIGFIVGANILVGGAFDGASMNPAVSFGPALVSWEWGYQWVYWVGPLIGGGLAGVIYELLFISHTHEQLPSTDY

SEQ ID NO: 231391 - protein, 92 aa, Zea mays
  Clone ID: MRT4577_142625C.1.pep
RVIWGFLEAPQTYKTFLVSCNKAPCREMVLFAIEITSSPSPRRSSSIHDDTAYDTSGCSYTTYSFTARVHPGYLPDVRDSYCHVAVQLVSKD

SEQ ID NO: 231392 - protein, 33 aa, Zea mays
  Clone ID: MRT4577_142626C.1.pep
FWVGPLIGGGLAGVIYELVFIFHTHEQVPFTDY

SEQ ID NO: 231393 - protein, 250 aa, Zea mays
  Clone ID: MRT4577_142627C.1.pep
MPISRIAVGTHHEVYHPGALKAALAEFISTLIFVFAGQGSGMAFSKLTSGGATTPSGLIAAAVAHAFALFVAVSVGANISGGHVNPAVTFGAFVGGNITLFRGLLYWVAQLLGSTVACFLLRFSTGGLATGTFGLTGVSVWEAVVMEIVMTFGLVYTVYATAVDPKKGSLGTIAPIAIGFIVGANILVGGAFTGASMNPAVSFGPALVSWEWGYQWVYWVGPLIGGGLAGVIYELLFISQTHEQLPTTDY

SEQ ID NO: 231394 - protein, 62 aa, Zea mays
  Clone ID: MRT4577_142628C.1.pep
PRARRVSPASRIRRRARRTSSTWYSARPQRSRVRSQGQSNQTTWTRFSMNGVSGLRVRHVPQ

SEQ ID NO: 231395 - protein, 130 aa, Zea mays
  unsure (1)..(130): unsure at all Xaa locations
  Clone ID: MRT4577_142629C.1.pep
LRFSTGGQATGTFGLTGVSVWEALVLEIXMTFGLVYTVYATAVDPKKGSLGTIAPIAIGFIVGANILVGGAFDGASMNPAVSFGPALVSWEWGYQWVYWVGPLIGGGLAGVIYELLFISHTHEQLPSTDY

SEQ ID NO: 231396 - protein, 213 aa, Zea mays
  unsure (1)..(213): unsure at all Xaa locations
  Clone ID: MRT4577_14262C.1.pep
KLLWKQFKSEAEFTITQAVSTQQAHRRGNSKLPPPWAIXAIAILGFNEIMVLIRNPIYLFLLFVGYLMVKALAMQLDVSREFQNGVVPGIISVSVKLLPAIQNLVNKVAAEQQAEHQQQHPHPHPHTQAPGPPQPQMQPPPLLLSPRSPMSELRRLHMPRSPRSPRKVASPAPSSSSSSSAVSSPRHVGEDQKPRPGAVGAPENEATVADSIV

SEQ ID NO: 231397 - protein, 224 aa, Zea mays
  unsure (1)..(224): unsure at all Xaa locations
  Clone ID: MRT4577_142630C.1.pep
LSVFDCFTPTCWCPPRAGKLTGGGPTTPAGLIAAAVAHAFALFVAVSVGANISGGHVNPAVTFGAFVGGNITLFRGLLYWVAQLLGSTVACFLLRFSTGGQATGTFGLTGVSVWEALVLEIVMTFGLVYTVYATAVDPKKGSLGTIAPIAIGFIVGANIXLVGGAFDGASMNPAVSFGPALVSWEWGYQWVYWVGPLIGGGLAGVIYELLFISHTHEQLPSTDY

SEQ ID NO: 231398 - protein, 250 aa, Zea mays
  Clone ID: MRT4577_142631C.1.pep
MPINRIALGSHQEVYHPGALKAAFAEFISTLIFVFAGQGSGMAFSKLTGGGPTTPAGLIAAAVAHAFALFVAVSVGANISGGHVNPAVTFGAFVGGNITLFRGLLYWVAQLLGSTVACFLLRFSTGGQATGTFGLTGVSVWEALVLEIVMTFGLVYTVYATAVDPKKGSLGTIAPIAIGFIVGANILVGGAFDGASMNPAVSFGPALVSWEWGYQWVYWVGPLIGGGLAGVIYELLFISHTHEQLPSTDY

SEQ ID NO: 231399 - protein, 74 aa, Zea mays
  Clone ID: MRT4577_142632C.1.pep
FYPGTRLPGLVYPYLGEFRVRLGGSPQPSASEACLRPGTHVVPPLIKYAFLDILTKKNKKKKKKGCRLRFWTKP

SEQ ID NO: 231400 - protein, 61 aa, Zea mays
  unsure (1)..(61): unsure at all Xaa locations
  Clone ID: MRT4577_142633C.1.pep
AEQPGGAQGERRGXXQLSLEKMIIRALEXKNEILWRKPPPPHAIKMVFSGGGLGAPSAGSV

SEQ ID NO: 231401 - protein, 206 aa, Zea mays
  unsure (1)..(206): unsure at all Xaa locations
  Clone ID: MRT4577_142634C.1.pep
DNCWFPVRGGGXGAHKGEIGMGFEHPGQPGNQPGGWMARQKHLETSESAQSTLKKSTSTRGGSTSTAQYTMCEVRRHTSPDSAWIIVHGHIYDCAGFLKDHPGGADSILINAGTDCAEEFDAIHSDKGRGLLEMYRVGELVVTGSDYSPQNSHADLKGIVEAPAAAAPLPVTSTVALSNPREKVXCRLXXKKSLCYNVRLFRVALP

SEQ ID NO: 231402 - protein, 103 aa, Zea mays
  Clone ID: MRT4577_142635C.1.pep
AEKFSIFQAGKEQIQNVCTQSQTTTGLRTYRGTGEKYIVYENDDYPFFNLQFRKRAGIGLESLGLAPNWIWVVVPEQCGGGGDDSQVVQRVGAGRGKPLGVPE

SEQ ID NO: 231403 - protein, 123 aa, Zea mays
  Clone ID: MRT4577_142636C.1.pep
VVHMTDPQHLQWSLVFLPVLEFRNDRQSGVHLFLHQCSLHVGQFLHHYPHQSPLEGVWSAAHPSAVLRRNKRQTPLQALDSEASPRTHPSGKQQYKGKSGGLRSLSVGRSVEDAPIFLRRVTR

SEQ ID NO: 231404 - protein, 86 aa, Zea mays
  Clone ID: MRT4577_142637C.1.pep
TSPRNGLVHISCQTLSVRCLFTNVVLPVPPSPYDDELEAGVINGPLIRQRHLGHTRGGPRLMLRPSELGVGEQQNPRIRNGVTGPA

SEQ ID NO: 231405 - protein, 147 aa, Zea mays
  Clone ID: MRT4577_142638C.1.pep
PPYDTRFCHEPCSPAQPAPRFGPAAAGQHGSAPQAPRAGVHNALLDQPASTNRTRRTPCRRQCRRGSRPASRTRPASPSRCCAGARRRRREGRRTALSKVSTGPQPPAGRARGPEATHRYRAPAPTSPKPEQTAGELSLPSLWARPA

SEQ ID NO: 231406 - protein, 45 aa, Zea mays
  Clone ID: MRT4577_142639C.1.pep
GLRKFVPSQEDLVQPDLALVHVIHGESNTRPSHVYVHGSITVILC

SEQ ID NO: 231407 - protein, 116 aa, Zea mays
  Clone ID: MRT4577_14263C.1.pep
IPLCCFLDVYWPSDARRGKSYSDLRPPLEIHNLPKLSYVVWTSSRLRDLHRKRSWCHIVHSQPNRVFSVMNVHCWYSLLNFKPFNQNNACPMSEAEEAPDRVHCTTLYPYSNGRIL

SEQ ID NO: 231408 - protein, 94 aa, Zea mays
  Clone ID: MRT4577_142640C.1.pep
STRVRGYATKFYEPFYSGYSNYPFRPSYVVPCRSPLSKSQNRMVEHRVRAIRSEVFICVSIMNNNNVGVPQLLMLELCSLICFSIFSNKRAKHI

SEQ ID NO: 231409 - protein, 385 aa, Zea mays
  Clone ID: MRT4577_142641C.1.pep
MANKLYTYPENFRAYKALLAAQYSGVQLDVDRTFKYGVTNKTEEFQSKFPLGKLPLLETADGQRLFESNAIAFYLANEQLRGSTPAEQAQVIQWTAFADNELLPPVATLVFTASKVITRPAEETAASEKQLATLLAFVNTSLNGRSYLVGEQVTLADLAVVGILIALYQQVQTPEQRATYANLNKWFNNLVAQPQFTAALGDLKLKQAAAAAAVPAGGDEFPTEPKKKDPFAAFPAGTFVMDAFKREYSNKSEDESIAWFWQNFDKENYSIWFCEYLYPEELKMVFMSCNLIGVMMQRLDTMRKHAFGSMCLFGEDNASTISGVWIWRGHELAFTLSPDWQVDYESYKWTKLDPDNAEHRKTVDEYLRWDGEFGGKKFNQGKIFK

SEQ ID NO: 231410 - protein, 74 aa, Zea mays
  Clone ID: MRT4577_142642C.1.pep
MRFFLSDRPCPSTRCSCRASPTYGLFYCRGIGYATCCAMVLWVFGYRFLIWNPGFGFYDKILGFIKGYKRTFNL

SEQ ID NO: 231411 - protein, 179 aa, Zea mays
  unsure (1)..(179): unsure at all Xaa locations
  Clone ID: MRT4577_142643C.1.pep
MMEEYAKVIATGEAFTRLRIFLFSQHLDDDAASVDVHXNVDERETERRYVDALNSLGDVKSPSSPVSVEQLFGIGGNDSGIPDFAGLRHLNVPRPTHSQRYGEMDSPWSPAYVSPGQYGVHDPRXIFPISPSSARFQVGAEDFDEXGLLRLCKAVPKYRHYEAHSPSHMDNLVWLPPGA

SEQ ID NO: 231412 - protein, 67 aa, Zea mays
  unsure (1)..(67): unsure at all Xaa locations
  Clone ID: MRT4577_142644C.1.pep
IIYFISSAPGAYVLWYRPLYNAIRTENXLKFXWFFLFYIIHIIFSVXAALAPPFPFKRKSFTXILPT

SEQ ID NO: 231413 - protein, 60 aa, Zea mays
  Clone ID: MRT4577_142645C.1.pep
MASSTMALSSTAFAGKGVNVPSSLFGEVRVTMRKTAAKAKPAVSSGSPWQGPDRVVYLGP

SEQ ID NO: 231414 - protein, 157 aa, Zea mays
  Clone ID: MRT4577_142646C.1.pep
GDGVSTARFGAYAQGNSTYLHNALPNSSHYSWRSQRGSGSGLPLDPSSSRGSFPPTNYYGFPLHSDASADTLPSTSSVSDPADWDLNSSDKSLLQEDRTLSAGLSDLRLIDASGQTNRSSRLAPFQSHDILSSNPSTMNQRREGWPFVCSERTATYT

SEQ ID NO: 231415 - protein, 59 aa, Zea mays
  Clone ID: MRT4577_142647C.1.pep
NHLRAQAAHEGNDTTSLPIWASVAGVPLPFFIFKYELLRSIQNNEFVMYNFATGHRFHA

SEQ ID NO: 231416 - protein, 690 aa, Zea mays
  unsure (1)..(690): unsure at all Xaa locations
  Clone ID: MRT4577_142648C.1.pep
NILIAPNCKNAVGGEVIDFGSVCMEGKTIYSYIQSRYYRSPEVLLGYPYTTAIDMWSFGCIVAELYIGLPLFPGASEYDVLCRMIEIIGGQPPDDLLREAKNTGKFFKHVGSIYPSSEARNGASSAYRILSEDEIEARDSKKPKVGRWYFPRGRLDRLIYTYPWKNLSEGNLPETEXLIAWPGISLFLWDLLNLYLEXHYMFFTNVKTYFXASYHPFITGEAFTGPYEPVQETPRIPVGRAAVVDHNPGGGHLLGAGLSPQVGSINRCLRFNNALQPNMPFSYGSSCGSFGSHGSFNDNAGFSYGSYDFNSVDIYNSPMDPSGFNLRSQLGGSFLGSSPHIRRRPHXHMVGGIRLSPGGPGHMSLGASPSQFTPPNSQMQIPTGPNGRYGASPSRGGHGSSLGKVAVVGQYNRRRNQGYPPMPMPPHEHTSQLIQGHQGDGVSTARFGAYAQGNSTYLHNALPNSSHYSWRSQRGSGSGLPLDPSSSRGSFPPTNYYGFPLHSDASADTLPSTSSVSDPADWDLNSSDKSLLQEDRTLSAGLSDLRLIDASGQTNRSSRLAPFQSHDILSSNPSTMNQRNGHLFHASSLGESTHTPGHVTLDGYEHTTYSQRSFPIYRGQPFQQYNNMTSSYIRPMRAHHNGQPVWSNYRLTEPPPTTMGDGMLWGGRGGHSFAASGLPPTLRKDFGRIF

SEQ ID NO: 231417 - protein, 259 aa, Zea mays
  Clone ID: MRT4577_142649C.1.pep
MPREISRSPPPFRRRGSPPLRYASRRNRRDRSRSPYASRRKTRSPSPLWDRSNSPSPRRHRSPLSPRRHRRQRSRSTTSSLENNPSSPSHASEKINSSVKQRLEEEKKRRQKEAEFKLLEEELARRVEEAIRKNVEERLKSEEVKRDIEHRIEEGIRKLFDEVDAQLQKEKEVALYEARQKAEQERREREELDRMLEENRRKVEEAQRKEALEQQQKELERYLELERIQRQREEALRRKKMEEEEERANKLRLLGKNRG

SEQ ID NO: 231418 - protein, 103 aa, Zea mays
  Clone ID: MRT4577_14264C.1.pep
RGYTHIRLTTERGILRVARDVEKPQVQPLPEPETWHKPAEPPQLNAATPGFGKATTSLELAHAFLTSMYDTAPQNQLTSAPNPRVSSSPEATNDQSCFSGLTV

SEQ ID NO: 231419 - protein, 71 aa, Zea mays
  unsure (1)..(71): unsure at all Xaa locations
  Clone ID: MRT4577_142650C.1.pep
GDPSHQCGSSGLSTTFVLLGRNMVTALTISSVHYLGSHLCAGIVLNLSQVMSPGTPVLXHCDKTCNACKPP

SEQ ID NO: 231420 - protein, 246 aa, Zea mays
  Clone ID: MRT4577_142651C.1.pep
MEVAVAVAAAAEAEEDEAAAAAATSTLQQSGRKQPRAIGSGRYRSVSRDLEEAAPKKPLPPSSQGLDLGGLPVLDVFQVYSCLRSFSKQFFLSTFSLETFVAALWSTYVNPLIDWVHFTLLRALKSHLEDSANEGDPSAVHCIRNLNWELLDLATWPIYLTEYLLTRGSELRLSESDGNDEGFKSTGVRRKKRGRGSSAKVAVGSSQFPEGSTEVDDGNSDECYLCGMDGNLLCCDGCPAAFHSKC

SEQ ID NO: 231421 - protein, 61 aa, Zea mays
  Clone ID: MRT4577_142652C.1.pep
NMPLDPLVRPRVRFFNLAFHMHDSILGLVTFIRWTCHVQDTTYVLLFISCKTNPLLLILIT

SEQ ID NO: 231422 - protein, 562 aa, Zea mays
  Clone ID: MRT4577_142653C.1.pep
MHLTVMSLSAAVANGAAAYRYDTIQPVARLRFCGLRRKAHRLHSPRYSRHLVAARRSVVVAATAGNGAAASGTFDYDLVIIGAGVGGHGAALHAVEKGLKTAIIEGDVVGGTCVNRGCVPSKALLAVSGRMRELQDEHHMKSLGLQVSSPGYDRQVVADHANNLASKIRSNLTNSMKALGVDILTGIGTIVGKQKVRYGKVGFPDNEITARNIIIATGSVPFVPKGIEIDGKTVFTSDHALKLESVPEWIAIVGSGYIGLEFSDVYTALGSEVTFVEALDQLMPGFDPEIAKLAQRILISPRKIDYHTGVFASKITPAKDGKPVLIELIDAKTKEHKETLEVDAALIATGRAPFTKGLGLENINVVTQQGFVPVDERMQVMDATGNVVPNLYCIGDANGKLMLAHAASAQGISVVEQISGRDNILNHLSIPAACFTHPEISMVGLTEPQAREKADKEGFEISVVKTSFKANTKALAENEGDGLAKMIYRPDTGEILGVHILGLHAADLIHEASNAIALGTHVQDIKFAVHAHPTLSEVLDELFKAAKVNTAGSHSMNEPVAV

SEQ ID NO: 231423 - protein, 52 aa, Zea mays
  Clone ID: MRT4577_142654C.1.pep
IIFFLKASLATRKAESGQEMPQLSSVTKYNTAGCPECTCYMDHGMLIQHEQS

SEQ ID NO: 231424 - protein, 277 aa, Zea mays
  unsure (1)..(277): unsure at all Xaa locations
  Clone ID: MRT4577_142655C.1.pep
LIATGRAPFTKGLGLENVXHGNGCYQNSQVLNMVASKTCPFIQINVVTQQGFVPVDERMQVMDATGNXYAKPVVCYCYSFVPLQQWXHFIQVCYININRYAXVPNLYCIGDANGKLMLAHAASAQGISVVEQISGRDNILNHLSIPAACFTHPEISMVGLTEPQAREKADKEGFEISVVKTSFKANTKALAENEGDGLAKMIYRPDTGENLGVHILGLHAADLIHEASNAIALGTHVQDIKFAVHAHPTLSEVLDELFKAAKVNTAGSHSMNEPVSV

SEQ ID NO: 231425 - protein, 239 aa, Zea mays
  Clone ID: MRT4577_142656C.1.pep
GRDRVQSTTSLASPQAAAPPLSRAAAAAPPLANPPWPSASQHPPPPSAPRPPPPHSPSSLPQKARAVRCAAVAMASDAAQVKAAREDIRELLRTTHSHPILVRLGWHDAGTYDKNIEEWPQRGGANGSLRFDVELKHGANAGLINALKLIQPIKDKYPSITYADLFQLASATAIEEAGGPKIPMKYGRVDVTGPEQCPPEGKLPDAGPSSPADHLREVFYRMGLNDKEIVALSGAHTLG

SEQ ID NO: 231426 - protein, 167 aa, Zea mays
  Clone ID: MRT4577_142657C.1.pep
APARLIFHLTVLVSSTATILRCCGFMDGAEQEAKLLAAAAGLQLLAARPAVQMYLNEAVFCWYQRLHASRAPDTEYGRAKVFLHNHHLCAVATQLVAPPLLVLSLLALWRVQGKDFFEGLEGMYWLVGWSVAMKEAALLAARWIVAVWSAATVITLMCYKRGWLFVS

SEQ ID NO: 231427 - protein, 339 aa, Zea mays
  Clone ID: MRT4577_142658C.1.pep
MAERLAASAATLRASAAATPFARRAAPANRAFFSPSLARARVGLRAAPSSLPQKARAVRCAAVAMASDAAQVKAAREDIRELLRTTHSHPILVRLGWHDAGTYDKNIEEWPQRGGANGSLRFDVELKHGANAGLINALKLIQPIKDKYPSITYADLFQLASATAIEEAGGPKIPMKYGRVDVTGPEQCPPEGKLPDAGPSSPADHLREVFYRMGLNDKEIVALSGAHTLGRSRPERSGWGKPETKYTKNGPGAPGGQSWTVEWLRFDNSYFKDIKEKRDQDLLVLPTDAALFEDPKFKVYAEKYAEDQDAFFRDYAEAHAKLSELGAKFQPPQGFSLDD

SEQ ID NO: 231428 - protein, 479 aa, Zea mays
  Clone ID: MRT4577_142659C.1.pep
MKNVAKCDTWCELQNPANHRVFERKLRPKPSGGGHVCLGVTPKDTKRKKFHPPPLSPHRVTKPNPNSRPPEMGQGSPGGMGKQPGLPGDRKQGDGKKEKKYEPPAAPSRVGRKQKRQKGSEAAARLPAVAPLSKCRLRLLKLERVKDYLLMEEEFVASQERLRPQEDKAEEDRSKVDDLRGTPMSVGSLEEIIDESHAIVSSSVGPEYYVSILSFVDKDQLEPGCSILMHNKIQEIKEAVKLPLTHPELYEDIGIRPPKGVILYGEPGTGKTLLAKAVANSTSATFLRVVGSELIQKYLGDGPKLVRELFRVADELSPSIVFIDEIDAVGTKRYDAHSGGEREIQRTMLELLNQLDGFDSRGDVKVILATNRIESLDPALLRPGRIDRKIEFPLPDIKTRRRIFQIHTSKMTLADDVNLEEFVMTKDEFSGADIKAICTEAGLLALRERRMKVTHADFKKAKEKVMYKKKEGVPDGLYM

SEQ ID NO: 231429 - protein, 56 aa, Zea mays
  Clone ID: MRT4577_14265C.1.pep
FLLRLILTRGRVLSIPLFRGSRYYPLLRHAPLPGFDHPPPLVTVNNPPLHLGGRIR

SEQ ID NO: 231430 - protein, 290 aa, Zea mays
  unsure (1)..(290): unsure at all Xaa locations
  Clone ID: MRT4577_142660C.1.pep
MGQGTPGGMGKLERVKDYLLMEEEFVAAQERLRPQEDKAEEDRSKVDDLRGTPMSVGSLEEIIDESHAIVSSSVGPDYYVSILSFVDKDQLEPGCSMXIYVRLISSAISLSERTGVCNLLKWSENVCLQHLFWLXHTTQTNSYPIMSTWIYEMAATSQDDVEKKKKKKKKKKKMMHNKVLSVVGILQDEVDPMVSVMKVEKAPLESYADIGGLDAQIQEIKEAVELPLTHPELYEDIGIRPPKGVILYGEPETGKTLLAKAVANSXTSATFLRVVGSELIQKXLGDGPKL

SEQ ID NO: 231431 - protein, 446 aa, Zea mays
  Clone ID: MRT4577_142661C.1.pep
MGQGSPGGMGKQPGLPGDRKQGDGKKEKKYEPPAAPSRVGRKQKRQKGSEAAARLPAVAPLSKCRLRLLKLERVKDYLLMEEEFVASQERLRPSEDKTEEDRSKVDDLRGTPMNVGSLEEIIDESHAIVSSSVGPEYYVGILSFVDKDQLEPGCAILMHNKVLSVVGILQDEVDPMVSVMKVEKAPLESYADIGGLDAQIQEIKEAVELPLTHPELYEDIGIRPPKGVILYGEPGTGKTLLAKAVANSTSATFLRVVGSELIQKYLGDGPKLVRELFRVADELSPSIVFIDEIDAVGTKRYDAHSGGEREIQRTMLELLNQLDGFDSRGDVKVILATNRIESLDPALLRPGRIDRKIEFPLPDIKTRRRIFQIHTSKMTLADDVNLEEFIMSKDEFSGADIKAICTEAGLLALRERRMKVTHADFKKAKEKVMFKKKEGVPEGLYM

SEQ ID NO: 231432 - protein, 64 aa, Zea mays
  Clone ID: MRT4577_142662C.1.pep
TFRLDTDAARPYPSNKVNPAWPPTIHMSLRAPTNNVTTIQAAQPKTNGHKDHSRSHTMVNTMEA

SEQ ID NO: 231433 - protein, 106 aa, Zea mays
  Clone ID: MRT4577_142663C.1.pep
TKFKLVIFHVYLTRARKMAGGEDGAPKHACLGFLFQMKMHEGPPPFLGWWWGRPFFFFFAPWQSASGLSSVPLEQPGLHWLPPALAVGGSIGFIISVPGGGGAVPL

SEQ ID NO: 231434 - protein, 248 aa, Zea mays
  unsure (1)..(248): unsure at all Xaa locations
  Clone ID: MRT4577_142664C.1.pep
MGQGSPGGMGKQPGLPGDRKQGDGKKEKKYEPPAAPSRVGRKQKRQKGSEAAARLPAVAPLSKCRLRLLKLERVKDYLLMEEEFVASQERLRPSEDKTEEDRSKVDDLRGTPMNVGSLEEIIDETHAIVSSSVGPEYYVGILSFVDKDQLEPGCAILMHNKVLSVVGILQDEVDPMVSVMKVEKAPLESYADIGGLDAQIQEIKEAVELPLTHPELYEDIGIRAPKGVILYGXPGTGKTLLAKAGAIL

SEQ ID NO: 231435 - protein, 91 aa, Zea mays
  Clone ID: MRT4577_142665C.1.pep
KIEFPLPDIKTRRRIFQIHTSKMTLADDVNLEEFVMTKDEFSGADIKAICTEAGLLALRERRMKVTHADFKKAKEKVMYKKKEGVPDGLYM

SEQ ID NO: 231436 - protein, 47 aa, Zea mays
  Clone ID: MRT4577_142666C.1.pep
TVCMLCPGSRTVLVPSGTSCGVRSPVSVLLLKNVLVCISGGQRRVKF

SEQ ID NO: 231437 - protein, 102 aa, Zea mays
  Clone ID: MRT4577_142667C.1.pep
CWPLPLSIEVNPLFMPSELFLGFLFISFLLFLMIMRCARQFTCSDVPRVSARRLLQEILYYGVGQIDIRIWLASSFLCLQKGLCCLLCLLISISPLRPDQKP

SEQ ID NO: 231438 - protein, 161 aa, Zea mays
  Clone ID: MRT4577_142668C.1.pep
SHASAQFVPSLSDLHLIHLQSSLLYPGLRRPDHVGPTIPIPSGISTDLTIGGAPARDGVPCTLSVGASKQNPVAVKPAGLMLFGRTILTEHQMSLSSSGGATSPAATGNSSLCWTAEKGPNVSEGSGSGSGVIQNSPTKNPSSERLTRFGDGSSQQVFEPG

SEQ ID NO: 231439 - protein, 104 aa, Zea mays
  unsure (1)..(104): unsure at all Xaa locations
  Clone ID: MRT4577_142669C.1.pep
XTKNTFCSLSCTNELSTLQRRINRKRKKKTKKKKKKTKKKKKKEKKTFSISGPRFLLIGINRKILVPPRGAGQATLPYPKGGKPPHCKQDQSRRRGKLKDTPPR

SEQ ID NO: 231440 - protein, 61 aa, Zea mays
  Clone ID: MRT4577_14266C.1.pep
SRTRTRRLTVLTDRSDPAHTFIPPVSRRFVSLRGSSELSPTLSSRVGYINQFSREQVLHTP

SEQ ID NO: 231441 - protein, 403 aa, Zea mays
  unsure (1)..(403): unsure at all Xaa locations
  Clone ID: MRT4577_142670C.1.pep
HGKXGRRGDQIYEAAETLGKEGKLHWLQLLHFHIGSMIPTTGKVYDAVSEAAGIYCNLVNEHGAKWLATLDCGGGLGVDYDGTRSGDSDMSVAYGIQEYASAVVQAVRLKCDYNGVAHPVVCTESGRAMASHHSMIILETLSAIPEPQDEDTSEQLLNRIQDLSYKQPRAPVGGATAAVYSHAADLKKHGIEMYKLGKKLGKRVVADANTVYNYHMNLSVFSLLPDFWGIGQLFPMMPVSRLNEEPTLKGTLVDITCDSDGKIENFISRENTLPLHLFEPSLGGYYVAVLVSGAYQEAIAGKHNLFSGPTLVRVNSSTTKDGGFEIERVDLGPAADEIIGSMRYSVEEDIITVIEKKAKGTEEEERVWAWEMVEPLMTKALTTMPYLNEYKVPEPEPEPEPIP

SEQ ID NO: 231442 - protein, 79 aa, Zea mays
  Clone ID: MRT4577_142671C.1.pep
LFPSKKRVHLQNSANNMFDVSSFLCQNSKCLVLSRVILCEIFSSYQGAPSPFSSVAVPPRSFHSLPTLINSPLPFNLKI

SEQ ID NO: 231443 - protein, 80 aa, Zea mays
  Clone ID: MRT4577_142672C.1.pep
PLPTVYINLTSASMARLSSTSTGSEDMYELYSEVYSISLDPEEAKVSLIILWGVRTLSVTGRSSQMARLILTLSLPKIWL

SEQ ID NO: 231444 - protein, 52 aa, Zea mays
  Clone ID: MRT4577_142673C.1.pep
RGLRCMSHWQRMSYSSLGSDDEHLTLGLTRSAAVAPVGVGAERWMSSAAASI

SEQ ID NO: 231445 - protein, 96 aa, Zea mays
  Clone ID: MRT4577_142674C.1.pep
SYKNIIITNSLNCIKPMRQPARGLNVRCDKQKLDHISPSYLIHLLHFLQYLPSYLIKPKYFFTYTYLHYLSKHINATSTTNTITVKPTLFPTTIAL

SEQ ID NO: 231446 - protein, 116 aa, Zea mays
  Clone ID: MRT4577_142675C.1.pep
LEEKNNVLLLAHVKKLQREGHFDAIVDRNLNSCYNGQEVEIMIQIALLCTQGSPKDRPSMSKVVRMLEGKGLPKRWEEWHQVEVTRRQDYEGMQQRFDWGEDSIYNQDAIELSPGR

SEQ ID NO: 231447 - protein, 181 aa, Zea mays
  Clone ID: MRT4577_142676C.1.pep
MADQKASKYYAAEEEAQMKKARKTAHPTKYRESLTPGTVLILLSGRFRGKRVVLLRQLEQGVLLITGPFKSNGVPLRRVNHRYVIATSTVVDIAGLDEEVVARVSKDEYWAREKKDGKGEDDFFKDGETPTKKETDPQRIEDQKKVDKALMANIKRTPDLESYLGASFSLRSNEKPHEMVF

SEQ ID NO: 231448 - protein, 103 aa, Zea mays
  unsure (1)..(103): unsure at all Xaa locations
  Clone ID: MRT4577_142677C.1.pep
RASHSCPCSWRPRWCTPWPLPARRSALSCLPRRFCQHWGFVWVXLYQSPLDLSTRKQTDLALAVWVVLLFCFEHFCHLRLILHKLLHVSSARSLPRSVWTFYL

SEQ ID NO: 231449 - protein, 49 aa, Zea mays
  Clone ID: MRT4577_142678C.1.pep
GRGRGIGVGESRRLVDAAGAAPRRGLLGAGLLLAHELHSAARTSRVPSF

SEQ ID NO: 231450 - protein, 68 aa, Zea mays
  Clone ID: MRT4577_142679C.1.pep
GMKRGTSGLNMCPCLVQISSQYANRKDLVIKDVHHTSGGSSSGYRNQRYIFRCHFIRNCSRNRSNEKQ

SEQ ID NO: 231451 - protein, 125 aa, Zea mays
  Clone ID: MRT4577_14267C.1.pep
LQLHNDSHSHKLRGDMEPPELTHFLPVAFVACSAGLSSPVTLLSCCRRWLGYCSGHGGARGFVFFSMCYEGWAVGDCKRVRQKGEIHNGHAWAWTLHVLLLREHKWATSPWTRTRDSVLRYVYLL

SEQ ID NO: 231452 - protein, 135 aa, Zea mays
  Clone ID: MRT4577_142680C.1.pep
SRADPRVRPRVRNRPPNFTYKMKLVRFLMKLNNESVTIELKNGTTVSGTITGVDPSMNTHLKTVKMTVRNREPTTLETLAIRGNNVRYFILPDSLPLDTLLIDDAPKPKKKKADGAARGGAAGRGARGMDRGGRR

SEQ ID NO: 231453 - protein, 188 aa, Zea mays
  unsure (1)..(188): unsure at all Xaa locations
  Clone ID: MRT4577_142681C.1.pep
EISEVPELGNGNEELWTFVIYAGEDHTNTQTLVAFLGLLSTLASTEVGAAKVYELLXGXTYRSVGWSTLFDCLSIYEEKFKKSIQSSANILPDFPEGDAQALVAYLAVLQKVVENGNLTERRKWFPDIEPLFKLLSYENVPPYLKGALRNSITAFIKVSPILKDAIWNYLEQYDLPVVTAPLGHHTAT

SEQ ID NO: 231454 - protein, 33 aa, Zea mays
  Clone ID: MRT4577_142682C.1.pep
KVNVVVGDGLDVYVVVLVIVIMISIYVAIEYVL

SEQ ID NO: 231455 - protein, 44 aa, Zea mays
  Clone ID: MRT4577_142683C.1.pep
SSRGMFMVGSTLIMAGIRTHNHNIVNANPSHDQTRANQKHPKIM

SEQ ID NO: 231456 - protein, 149 aa, Zea mays
  unsure (1)..(149): unsure at all Xaa locations
  Clone ID: MRT4577_142685C.1.pep
AQRPFRVRGHLHRPGFTFVRSPSPPKASPPQKVPPAESCLCLAHSRAGDEAEISGNPGDPAIVXLSLDRXXNPPXGSGYXEXKKRXXXEKALLHMXXGXLXGNIVKLLFILHPRQXAASPVXAXPPPPILYSLFFKGVILAFFFFLAAS

SEQ ID NO: 231457 - protein, 257 aa, Zea mays
  Clone ID: MRT4577_142687C.1.pep
MWPPSHQRHDASCEEDDLYGYGGIVNEWGTIGLLLLEAAAERIVGDGALETWGVADKATRVKLCMLGVPVGVQREGDHTRCTTRNVFEERQLHSHLHRVAVAALSIQVLPPFIVICCRISEEKNVWVMNVVPFTESGKLKIIYDRGLMGTTHDWCESFSTYPRTYDLLHAWLLFSEIEKQGCSLEDLLIKMDRILRPYGYAIIRDKVDVGTYIKKLLPALRRFGILEVLEALEVRDTKGFLSAKSGKDCSILLNFWK

SEQ ID NO: 231458 - protein, 97 aa, Zea mays
  unsure (1)..(97): unsure at all Xaa locations
  Clone ID: MRT4577_142688C.1.pep
FSRLWIATPHHFIPLNHLTTLICRTYXSSASLCHSSXLVGVSATTILVILKLLSIQKQAASSSVTLFQLHQCRPCTEHALMNSSAFXDXPIIGGALF

SEQ ID NO: 231459 - protein, 127 aa, Zea mays
  Clone ID: MRT4577_142689C.1.pep
PAQRSSLGGTGSSPRVRAFPSWFRTSASAFLGPKTLPPPPPEPSKVRMKARPCHGNFWCPRFYPLGCSPLTPKSYGPRSLLGMCYWNTWAPAVTPFFFSPGIFFFSVLSALSYTKKKFSCPVGDNPG

SEQ ID NO: 231460 - protein, 129 aa, Zea mays
  unsure (1)..(129): unsure at all Xaa locations
  Clone ID: MRT4577_14268C.1.pep
MAASMIASTALAAAPQGLSPLGRRASSFAGICSKKKIKTDEPYXIGGGLTVDVDTNATKGEGNRAVYXLVDDDGANVDGCGPVYRXDDWXPTDDVYDDGNTELLIWLVNLGEILAGGVLLVYITSALSG

SEQ ID NO: 231461 - protein, 229 aa, Zea mays
  unsure (1)..(229): unsure at all Xaa locations
  Clone ID: MRT4577_142690C.1.pep
MAAAVAKISMEWLQDPLSWVFLGTVCLVVLQQLRRRRGKAPLPPGPQPLPIVGNMGMMDQLTHRGLAALAETYGGLLHLRLGRLHAFAVSTPEYAREVLQAQDGAFSNRPATAAIAYLTYDRADMAFAHYGPFWRQMRKLCVMKLFSRRRAETWAAVRDECAALVRAVAVGGGGGGEAVNLGELIFSLTKNVTFRAAFGTRDGEGQEEFIAILQXFSKLFGAFNVGDFL

SEQ ID NO: 231462 - protein, 39 aa, Zea mays
  Clone ID: MRT4577_142691C.1.pep
MLCIMSATPGHVSLHAHGANLFLFIYNLVECSFSVNPEP

SEQ ID NO: 231463 - protein, 89 aa, Zea mays
  Clone ID: MRT4577_142692C.1.pep
AGVFFFFFFFWGVFFFFFFFLRNRPPRYIANMLPGVFSTSLVKGQLGPPKGGGGGQNNPQIAQRTGENHGDKGTTTWAGPREENPTPLF

SEQ ID NO: 231464 - protein, 507 aa, Zea mays
  Clone ID: MRT4577_142693C.1.pep
MGSQADSTGRISPAKDMFGCLLLSIVPSDIFVIGTPPAPTLTTARRATVFSRTRCLSSTPASPTYEQGQHEEEPSLVVVGGGAAGVYASIRAKTLAPHLNVAVVEKGRFLSKVKISGGGRCNVTNGHHLEPMGLARNYPRGNKELRGSFFTAHGPQDTMRWFTDHGVKLKTEDDGRVFPVTDNSASVVDCLLNEARRLGVSLQAGKTVSSASVAQDGKFVLKVEKRTADLVDYINANYILVATGSSQHGYSIAAQLGHSIIAPVPSLFTFKIADKRLADLAGVTFPIVKAKLKLDGVQKSVPELTQTGPMLVTHWGLSGPVVLRLSAWGARELHQCNYQGNLMVDFVPDIHIEDVKRVLFHYKDQHAKHKVSNTFPTEFGLVKRFWRFLLEQESLNGDTHWASMPNNHLNAVAFRLKQWTFEVVGKGQFKDEFVTAGGVPITEISLGTMESKKQPNLFFAGEVLNVDGVTGGFNFQNAWTGGYIAGTSIGTLASTSNLPEQQSCFQL

SEQ ID NO: 231465 - protein, 1622 aa, Zea mays
  unsure (1)..(1622): unsure at all Xaa locations
  Clone ID: MRT4577_142694C.1.pep
MTVCTAPDATSPPSNDQEVPSVFHPIRFRFSFDPPSDPAMVSAFVKAYLNLPGYHMWSTWDRLTAVSTFGLADSEEEXTPTPVGXSALNDPGAMRGFMSACDHCLSGCSNDGHDLDDEGYGPSHECFHIDLGDHNEGNHLGMPEVDDPPGPSSRVDIPRELAVVPVPVGGRLVQLRQNIEQEWVGRSLAREACHRAQDIRHRIVDNARAALPPTFSESGQDLAAAAMLLRAMPKPSTTEGRRIQGELKNLLEGAAVRRAKSSASRRRADPSENHAVSSWRIREASVHPKRTWDEVPTARERLDNEHHHLDHRACLDEKYSGETRPELCLADYRLACQLGGADDDNFIIRNLPLFLSDAARAWLEHLPPAQISDWDGLVKAFAGNFQGTYVRPGNSWDLRSCRQQPGESLREYLRRFSKQRSELPNVTDSDVIGAFLAGTTCRDLVRKLGRKTPTHASKLMDVATKFASGQEAVEAIFWKDKQPQGEPKTDAPEASAQRGTKKKAKNKSRAKHDTADVNLVAAAEHRNPRKPPGGAGAFDKMLKEPCPYHQGPVKHTLEECVMLRCHFHKTGPLAEDGKGHDNDKKEGGKEEGFPKVHNCFMIYGGQAANASTRHRKQKRREVCLVKVEAPVYLDGSDKPITFDQGDHPDFVPSPGRYPLVVNPIIGNVRLSKVLMDGGSSLNIIYAETLELLGVDRSEVRASAAPFHGIAPGKRILPLGRIDLPEALTFEVIGFRGTYHAVLGRPCYAKFMAVPNYTYLKLKMSGPNGIITVRSTYRHAYECDIECVEYAEALAESEALIADLERLSKEAPXAKLHAGNFEPVEAXPSDMPGIPRDVAEHSLDIRARARPVKQTLCRFDEEKRRAIGEEIHKLLAAGFIKEVFHLEWLANPVLIRKKDGKWRMCVDYTGLNKACPKIPYPLPRIDQIVDSPAGCETLSFLDAYSGYHQIKMKESDQLATSFITPFGMYCYTTMPFGLRNASATYQRCMNHVFGEHIGRTCLRAKGVKLNLEKCVFEVPRGMLLGFIVSERGIKANPEKIAAITNMGPIKDLKGVQRVMGCLAALSRFISRLGEKGLPMYRLLRKAERFTWTPEAEEALGNLKALLMNTPILVPPAAEEALLIYVAATTQVVRAAIVVERREEGHALPVQRPVYFMSEVLSETKALYPQIQKLLYAVILTRRKLRHYFESHPVTVVSSFPLGEIIQCREASGAGAGLIFVSPLGKHLRYVIRLHFPASNNVAEYEALVNGLRIAVELGVRCLNARGDSQLVIDQVMKNSHCRGRRMEAYCDKVRSLENKFYGLELNHIARRYNETADELAKIASGQTTVPPDVFSRDLRQPSVKIDDAPEPEEASVQPEAPSAEPEVPSAAPEAPSAIEEEALPVEEEQNGDCALLPGVSILRKADASARSGLADDTHHLXPFAVWGLDLVGPLQKAPGGFTHLLVAIDKFSKWXNSIRSEQAVAFFTNIIHRFGVPNSVITDNGTQFTRKKFLDFCDDHHIRVDWAAVAHPMTNGQVERANGSGIGSGSGSTLGIDSTLGGTRPSLGRRPEQKDLHLREDANTAPADVLAKLQRLLPHLPRPRKSPSPGPMKSLSEPTPRLSALTPLPPAPAHRRAAEGSKN

SEQ ID NO: 231466 - protein, 151 aa, Zea mays
  Clone ID: MRT4577_142695C.1.pep
FFFFFFFFFFFGVFFFFLVFFNNFFVPFGRSCESETPPKKGLGPGRGPPLDRERGPERGGTKKEKPLGGKKRTGGKKLLKAGGKPASQRKKVWKNPGGVCMGGIQRNGVKKKFLGIIYPGKEPPGKRGRNPWGTPKGGALRGTKKNRVLGR

SEQ ID NO: 231467 - protein, 119 aa, Zea mays
  unsure (1)..(119): unsure at all Xaa locations
  Clone ID: MRT4577_142696C.1.pep
EIHPVVCYNHFISGAGHAKRADMAKAIYDRMEASGIEPSITSNVLLLISYLLQAFLRSRDKSKPLELKGEDIQGRKAGRLLIGDLVASFASGIRXMSDLXHXGEEMEKYFPVDIYTYNM

SEQ ID NO: 231468 - protein, 626 aa, Zea mays
  Clone ID: MRT4577_142697C.1.pep
MPGIPRDVAKHSLDIRAGARPVKQTLRRFDEEKRRAIGEEIHKLLATWFIKEVFHPEWLANPVLVRKKDEKWRMCVDYTGLNKACPKVPYPLPRIDQIVDSTVGCETLSFLDSYSGYHQIKMKESDQLATSFITPFGMYCYTTMPFGLRNAGATYQRCMNHVFGEHIGGTRGIEANPEKIAAITNMGPIKDLKGVRRVMGCLAALSRFISRLGEKGLPLYRLLRKAERFTWTPETEEALRNLKALLTNTPILVPPPPAVGEALLIYVVATTQVVSATIVVERREEGHALLVERPVYFISEVLSETKVRYPQIQKLLYAVILTRQKLRHYFESHPVTVVSSLSLGEIIQCCEASGRITKWAVELMGEMLSFASQKAIKSQVLADFLAEWTDTQLPTTAIQPELWTMYFDGSLMKTGAGAGLLFVSPLGKHIRYVIRLHFPASNNVAEYEALVNGLRIAIELGLVIDQVMKNSHCRDRRMEAYCDEVRRLEDKFYGLELNHVVRRYNETTDELAKIASGRTMVPPDVFSRDLHQPSIKINDAPEPEEASAQPEKAPGGFSHLLVAIDKFSKWIEVRPLTSIMSEQAVVFFTNIIHRFGVPNSIITDNGTQFTEKKFLDFCDDHHICVD

SEQ ID NO: 231469 - protein, 410 aa, Zea mays
  Clone ID: MRT4577_142698C.1.pep
FSVLAKYLAALCKSGNMEAACELPHVASSKSHVGLYRYESTYKNLIRALVLTKRVDALPRLILQMQEMGHIPSRSLYVSVVCSLCEMNRYAEVLDLLDNQLMRNEIHPVVCYNHFISGAGHAKRADMAKAIYDRMEASGIEPSITSNVLLLISYVRSKNLGGALNFFNLVRRKKTPCARLYNVFISGLCEVRKPEQAMMFFREARDNGIIPSMYCYENLLLLLCSVSDYTNAVKVVDDFRETGRPVSAFLTNVLLLHTLMGHKLLQAFLRSRDKSKPLELKGEDIQGRKAGRLLIGDLVASFASGIRNMSDLEHLGEEMEKYFPVDIYTYNMLLRGFSMAGRMDSACRLYERICRQGYQPNRWTFDTIVHGFCKNGDIIEAQRWMDALYRSGFYPTWYTMRVYNNLLLRL

SEQ ID NO: 231470 - protein, 294 aa, Zea mays
  unsure (1)..(294): unsure at all Xaa locations
  Clone ID: MRT4577_142699C.1.pep
MYFDGSLMKTGAGVGLLFVSPLGKHLRYVIRLHFPTSNNVAEYEALVNGLRIAVELGVRRLDARDDSQLVIDQVMKNSHCRDWRMEAYCDKVWRLEDKFYGLELNHIARRYNEIADELAKIASGWTTVPPDVFSRDLHQPSVKIDDTPEPEEASAQPEVPSAEPEEAXRARECTRGLLAPASRHRQILQVDRGPTLDQHQVRAGSGVLHQHHPSIRGXPNSIITDNGTQFTGKKFLDFCDDHHIRVDWAAIAHPMTNGHVERANGMILQGLKPRIYNDLNKFGKRWIKELPSVV

SEQ ID NO: 231471 - protein, 42 aa, Zea mays
  Clone ID: MRT4577_14269C.1.pep
LKNGLPGPIFFFYFKKTGTGLGFKLPLDWGGFFKNSRGVFPK

SEQ ID NO: 231472 - protein, 66 aa, Zea mays
  Clone ID: MRT4577_1426C.1.pep
NASGTATKLFRILLRSPRCFLGPSFFLAISFLQLLIFDLRRDIRSFNLKSSRRFLGSTSFHLGMLF

SEQ ID NO: 231473 - protein, 265 aa, Zea mays
  unsure (1)..(265): unsure at all Xaa locations
  Clone ID: MRT4577_142700C.1.pep
MEEQGGQAALGWAARDDSGVLSPYSFSRRVPKDDDEHYVVRVPDGLALDRTAPLLCAGVTVYSPMMRHGLNEPGKHLGVVGLGGLGHVAVKFGKAFGMKVTVISTSASKRQEAIENLGADEFLISRDEDQMKAATGTMDGIIDTVSAWHPITPLLALLKPLGQMVVVGAPSKPLELPAYAIVPGGKGVAGNNVGSVRDCQAMLEFAGKHGIGAEVEVIKMDYXQHGHGAAREERRPLPLRHRRRRQPRLCRLGMAAKVSIRAQPQ

SEQ ID NO: 231474 - protein, 40 aa, Zea mays
  Clone ID: MRT4577_142701C.1.pep
AVDIKPSVVEERAVSGKTRVSANAQGWCRHSKKYSMSYVS

SEQ ID NO: 231475 - protein, 87 aa, Zea mays
  Clone ID: MRT4577_142702C.1.pep
PPLPPLKCDPVEPSHLFCPLPRIPFPKIRLRQGEEKAGLKRGPGLRWGFTPAGVYCRGPYLYWSPLGTPWPRLYLRKVEAHGAVRSQ

SEQ ID NO: 231476 - protein, 286 aa, Zea mays
  unsure (1)..(286): unsure at all Xaa locations
  Clone ID: MRT4577_142703C.1.pep
AGSGAGLPGPKDDDVTIKVLYCGICHTDLHVIKNDWRNAMYPVVPGXRSNFASLDAPDAVAKLTASVCLTPSAGVAWRXHEIVGVVTGVGGGVTRFKAGDTVGVGYFVGSCRSCDSCGKGDDNYCAGIVLTSNGVDHAHGGAPTRGGFSDVLVASEHYVVRVPDGLALDRTAPLLCAGVTVYSPMMRHGLNEPGKHLGXYAIVPGGKGVAGNNVGSVRDCQAMLEFAGKHGIGAEVEVIKMDYXQHGHGAAREERRPLPLRHRRRRQPRLCRLGMAAKVSIRAQPQ

SEQ ID NO: 231477 - protein, 44 aa, Zea mays
  Clone ID: MRT4577_142704C.1.pep
WVPRGRPEWSNVNIVRPGPQAEKFRTYINQIMEESKSGNNSCKQ

SEQ ID NO: 231478 - protein, 43 aa, Zea mays
  Clone ID: MRT4577_142705C.1.pep
MEELPAYAIVPGGKGVAGNNVGSVRDCQAMLEFAGKHGIGAEV

SEQ ID NO: 231479 - protein, 428 aa, Zea mays
  unsure (1)..(428): unsure at all Xaa locations
  Clone ID: MRT4577_142706C.1.pep
MSYHCRVLVPVPFHYPPGAGARVGAGAGSPFPSASRALRLPRPRASVEKREQVAAMEEQGGQAALGWAARDDSGVLSPYSFSRRVPKDDDVTIKVLYCGICHTDLHVIKNDWRNAMYPVVPGHEIVGVVTGVGGGVTRFKAGDTVGVGYFVGSCRSCDSCGKGDDNYCAGIVLTSNGVDHAHGGAPTRGGFSDVLVASEHYVVRVPDGLALDRTAPLLCAGVTVYSPMMRHGLNEPGKHLGVVGLGGLGHVAVKFGKAFGMKVTVISTSASKRQEAIENLGADEFLISRDEDQMKAATGTMDGIIDTVSAWHPITPLLALLKPLGQMVIVGAPSKPLELPAYAIVPGGKGVAGNNVGSVRDCQAMLEFAGKHGIGAEVEVIKMDYXQHGHGAAREERRPLPLRHRRRRQPRLCRLGMAAKVSIRAQPQ

SEQ ID NO: 231480 - protein, 40 aa, Zea mays
  Clone ID: MRT4577_142707C.1.pep
VTFNTMDALSLVWVLDHPYRSDSTILINFESPRFEYKNES

SEQ ID NO: 231481 - protein, 87 aa, Zea mays
  unsure (1)..(87): unsure at all Xaa locations
  Clone ID: MRT4577_142708C.1.pep
SRISGREPNYGYDMFRMRCIVFRXLHDSLVNDYDLIASRGVSTKEVLAMFLWACGEPQSFRQLRNKFGYSLETISHKFSEVLEALFR

SEQ ID NO: 231482 - protein, 169 aa, Zea mays
  unsure (1)..(169): unsure at all Xaa locations
  Clone ID: MRT4577_142709C.1.pep
PSQFRQNFTRFRKKLPRREPTLPGPLGPPGGGGGGPPWGPGFPKKKKKKKGGAXEKGGPRGXKILPPCPPKEEPGGLNGKPGGPKGGANPHELGGGKKPVXPGKKNCPTHKKKSPPPGGGGGPXRYKGGGLFPRGTGNNSLGASPLGPHNTPGGGGAGXFPPGGNIFFL

SEQ ID NO: 231483 - protein, 62 aa, Zea mays
  Clone ID: MRT4577_14270C.1.pep
MTTTMKKKHQQQLLLLLSLMFLVAVTATAVAVEPHSQLHVQVHHHHLAQIMINRSTRFLLFL

SEQ ID NO: 231484 - protein, 109 aa, Zea mays
  Clone ID: MRT4577_142710C.1.pep
GRLGSSRPAGTPHFRQKTTRLRCNTYAANSGLSALCPARHGDDALALTSPVLCAPPPIYCNNCQGRKPDHLIPTHHIVANISDGETTHQGADDFYYTLQGGPDWQLGTR

SEQ ID NO: 231485 - protein, 40 aa, Zea mays
  Clone ID: MRT4577_142711C.1.pep
ASCAFPANAATLIVCAEIQLLQPNRDGENQSDDATIHRPT

SEQ ID NO: 231486 - protein, 110 aa, Zea mays
  Clone ID: MRT4577_142712C.1.pep
NAQGFSGNECWKSSSPGRGWYQDSSSSVICAFHESILLPFGTNSAMSFEERVPFSHQPCPRLILAGPYSSWPVLVEVEFGDGVYNSRKLNGVSSMLAPPPRLVTAKLVKE

SEQ ID NO: 231487 - protein, 95 aa, Zea mays
  Clone ID: MRT4577_142713C.1.pep
GRFFRRLIDEERRRLDDGVESENKSMMAVLLTLQKSEPENYSDDMIMSLCFSMFSAGTETTATTAEWAMSLLLNNPDVLKKAQGEIDAHVGNSRL

SEQ ID NO: 231488 - protein, 53 aa, Zea mays
  Clone ID: MRT4577_142714C.1.pep
SCLRLHATPFSTEGVGVGASSSHLSDTSLDTDPRCGIVFTVVERPVCLPDLRH

SEQ ID NO: 231489 - protein, 54 aa, Zea mays
  Clone ID: MRT4577_142715C.1.pep
LFSNAIQSWLPFSCCCGTPSSCVFPGLVFFKPQHYEQKSRVLQQPARIEVTHIR

SEQ ID NO: 231490 - protein, 104 aa, Zea mays
  Clone ID: MRT4577_142716C.1.pep
FSFPKLGKKKFKPPFKRGKFPFLLQQKKFYPGKNGDLLNSVWGFAKMMVSKNRGTLKFLESNGKKPIWGQSLLHCCLKKNVGTFFFLCNACSFLNNQLGMAFFF

SEQ ID NO: 231491 - protein, 30 aa, Zea mays
  Clone ID: MRT4577_142717C.1.pep
RTLRSSSFMLSSPGAIWSLELDRSPRCALV

SEQ ID NO: 231492 - protein, 63 aa, Zea mays
  Clone ID: MRT4577_142718C.1.pep
RAGRAGHRAHNTVVVGSERLCSPTHRAKEERENAAPLLGVTDAMDITTRTLFVWLHIYLTKGL

SEQ ID NO: 231493 - protein, 868 aa, Zea mays
  Clone ID: MRT4577_142719C.1.pep
MSGVVLAPETKTGVTSPQRANPKRTDDASTLANDLLGVSLVPEITVQSVPDATSPPSIDQEVPSVFHPVPFRFSFDPPSDPASLGGTDDDNLIIRNLPLFLSDAARAWLEHLPPAQIFDWDDLVKAFAGNFQGESLREYIWRFSKQRTELPNITDSNVIGAFFADTTCRDLRGSKKKAKKKAQAKRDAIDADLVAAAEHRNPRKPPGGVNTFDKMLKESCPYHRGPVKHDMLRRYFVKAGPSAEGGKDQGNNKKGGDKDEEFPEVRDCFMIYSGQVANASARHRKQERREVCLVKPITFDQGDHPDYVPSPGRYPLIVDPIIDNARLTKVLMDGGSSLNIIYAETLGLLGIDLSMIRAGAAPFHGIVPGATYQRCMNHVFGEHIGITVEAYVDDIVVKTRKASDLLSDLEVTFGCLRAKGVKLNLKKCVFGVPRGMLLGFIVSERGIEANPKKITAITNMGPIKDLKGVQRVMGCLAALSRFISHLGEKGLPLYRLLRKAERFTWTPEAEEALGNLKALLTNAPILVPPAAGEALFIYVAATTQVVSVAIVVERREEGHALLVQRSVYFISEVLSETKIRYPQIQKLLYTVILTRRKLRHYFESHPVIVVSSFPLGEIIQCREASGRIAKWAVELMGETISFAPRKAIKSQVLADFVAEWVDPQLPTAPIQAELWTMYFDGSLIKTGAGAGFLFISPLGKHVRYVLRLHFLASNNVAGYEALVNGLRITVELWVRRLDARGDSQLVIDQVMKNSHCRDQKMEAYCDKVRRLEDKFHGLELNHVARRYNETADELAKIASGRTTVPPDVFSRDIYQPSMKLDDVHEPDESSAQLEVPSVAEGEALRIEGERNGVEPNQNWQTPYLQYLL

SEQ ID NO: 231494 - protein, 158 aa, Zea mays
  Clone ID: MRT4577_14271C.1.pep
MGAGDAHRPYAERLLLVRRSARGVDRCQPHLLSFCSERTHSPVPDLRSPRRSKMQIFVKTLTGKTITLEVESSDTIDNVKAKIQDKEGIPPDQQRLIFAGKQLEDGRTLADYNIQKESTLHLVLRLRGGMQIFVKTLTGKTITLEVESSDTIDNAQAN

SEQ ID NO: 231495 - protein, 57 aa, Zea mays
  Clone ID: MRT4577_142720C.1.pep
YPCMPTIRLLLLNNFSLLAGTLKYHTNLIQFTSSKQPSKQRSQEANLCMLDPSTKSL

SEQ ID NO: 231496 - protein, 323 aa, Zea mays
  unsure (1)..(323): unsure at all Xaa locations
  Clone ID: MRT4577_142721C.1.pep
GGRQPARRRRNRRHLPRMVGEQHSSSPRPLPRQQRRRRGNQGQAGGHASSAVERIDVPSAPTEGTPGVDLAFETKASAVPPRHANPEQVDDASALAESLQDVALVPETTVQPVPDATMSLLVDQXSAMRDFMTACDYCLSDCSDGSRSLDDEDCGPSRECFHVELGDPSEGNHLGMPEDGDPPRPVPRADIPRELAVVPVPAGGHDPQLEQVRGAQARLDEGAGALETIRRDVGQAWAGQPPAGEMRHLPQGFQHRVANDVRVRPLPASSGVGQNLAAAAMLLRAMPEPSTTEGRRIQGELKNLLEGAAARRAESSASRRQGY

SEQ ID NO: 231497 - protein, 291 aa, Zea mays
  unsure (1)..(291): unsure at all Xaa locations
  Clone ID: MRT4577_142722C.1.pep
AAPRALMGNAFRQGFYWPTAVADATRIVRSCRGCQFYARQTHLPAQHHVRAGGGVLHKYHPSLWSPKFHHPRQWHAVXTRKKFLDFCEDHHIRVDWAAVAHPMTNGQVERANGMILQGLKPRIYNDLNKFGKRWMKELPLVVWSLRTTLSRATGFTPFFLVYGAEAILPTDLEYGSPRTKAYNDRGNQTSQEDSLDLLEEARDMALLHSARYQQSVRRYHTRRVRPRDFQVGDLVLRLRQDARGRHKLTPPWEGPFIIAKVLKPGTYKLANNQGEVYNNAWNIEQLRRFYP

SEQ ID NO: 231498 - protein, 1176 aa, Zea mays
  Clone ID: MRT4577_142723C.1.pep
MGSLQQPFQPGTVLRFGSLEFMSLDGSYDMILLPPPCDSDNGGRQLARRRQNRRRLPRVVEEQHSSSPRPLPRRRRRRRGNQGQAGGGTSSAVERVDGAGAPTGGTSGIDLASETKTSVVSPQHANPKQTDDASTLAKDLLGITLVPETTVQSAPDVTSSPPVDQERTELPNITDSDVIGAFLAGTTCRDLVSKLGRKTPTRASELMDIATKFASGQEASTQRGAKKKGKKKSQAKHDAADADLVAVAEYKNPRKPPGGANLFDKMLKEPCPYHQGPVKHTLEECAMLRRHFHKAGPPTEGGRARDDDKKEDHQAGEFPEVRDCFMIYGGQVANALARRRKQERREVCSVKVAAPVYLDWFDKPITFDQDDHPDRVPSLGKYPLVVDPVIGDVRLTKVFMDGGSSLNIIYAETLGLLRIDLTSVRAGAAPFHGIIPGKHVQPLERLDLPVCFGTPSNFRRETLTFDVVGFRGTYHAVLGRPCYAKFMAVPNYTYLKLKMPGPNRVITVGPTYRHAYECDVECVEYAKALAESEALITDLESLSKEAPDVKRHAGNFEPAETEAVLVDFLRANADVFVWSSSDMPGIPRDVAEHSLDMRAGARPVKQPLRRFDEEKRRAIGEEIHKLMAAGFIKEVFHPKWLANPVLVRKKGGKWRMCVDYTGLNKACPKVPYPLPRIDQIVDSTARCETLSFLDAYSGYHQIRMKESDQLATSFITPFGMYCYVTMSFGLRKCGCNAYVDDIVVKTREASNLLSDLEVTFRCLKAKGVKLNPKKCVFGVPRGMLLGFIVSERGIEANPEMIAAITSTGPIKDLKGVQRVTGCLAALSRFVSRLGERGLPLYRLLRKAECFTWTPEAEEALGNLKALLTNAPILVPPAAGEALLIYVAVTTQVVSAAIVVERQEEGHALPVQRPVYFISEVLSETKIRYPQIQKLLYAVILTRRKLRHYFESHPITVVSSFPLGKIIQCREASGRIAKWAVEIMGETISFAPRKAIKSQVLADFVAEWVDTQLPTAPIQPELWTMFFDGSLMKTGAGAGLLFISPLGKHLRYVLRLHFPASNNVAKYEALVNGLRIAIELGVRCLERGGRAQAVRGPRRVAVAERWRRRRRLGGGAGELRRLGREGGGGAGGGRKADGWGPAAAAGLGEAPGGCSCCWTRPKPKPNLIPCWNTNPYP

SEQ ID NO: 231499 - protein, 439 aa, Zea mays
  unsure (1)..(439): unsure at all Xaa locations
  Clone ID: MRT4577_142724C.1.pep
MLLGFIVSERGIEANPEKITAITNMGPIKDLKGVQRVMGCLAALSRFISRLGERGLPLYRLLRKTERFTWTLEAEEALENLKALLTSAPILVPPAAGEALLINVAATTQVLRHYFESHPVTVVSSFPLGEIIQCREASGRIAKWAVEIMGETISFAPRKAIKSQILADFVAEWVDTQLPAAPIQPELWTMFFDGSLMKTGAGAGLLFVSPLGKHLRYVLRLHFSVSNNVAEYEALVNGLRIAIELGVRRLDARGDSQLVIEQVMKNSHCRDPKMEAYCDXGELPLDRAEARRLARRAKSFVLLGDGKELYHRSPSGILQRCISIAEGXFYWPTAVADATRIVRTCQGCQFYAKQTHLPAQALQTIPITWPFAMWGLDLVGPLQKAPRGYTHLLVTIDKFSKWIEVRPLNSIRSEQAVAFFTNIIHRFGVPNSIITDNGT

SEQ ID NO: 231500 - protein, 102 aa, Zea mays
  unsure (1)..(102): unsure at all Xaa locations
  Clone ID: MRT4577_142725C.1.pep
MATKILCLXMLPALPACAANATILPQCSQAPIAFLLPPYLPSMIAQVCENPALPPYRLHQAIAERYIPASPXXIQQSTAISLVQPLLQTIMSQHMKKLVLSV

SEQ ID NO: 231501 - protein, 107 aa, Zea mays
  unsure (1)..(107): unsure at all Xaa locations
  Clone ID: MRT4577_142726C.1.pep
MKLLLLALYHLSLTSTNASITPQCSLSHTPIIPQLLPPYTXSTTFYHLAQQPYKXNKRLLNNFIQQPTHQFQHQSLAHLTIPTLSPHQQQLMLPSTDQLNVYNPVHY

SEQ ID NO: 231502 - protein, 845 aa, Zea mays
  Clone ID: MRT4577_142727C.1.pep
MSGVVLAPETATDVVSPQRANPKRTDDASTLAKDLLGVSLVPEITVQSVPDATSPPTSTKRFSFDPPSDPASVSAFVKAYPNLLGYHMWSSWDRLTIVSTYGPPGSEEEDDPDSGWDFSRLRDPSVMRDFMTACDYCLSGCSDDGHSLDDEGCGPCRECFHVNLGDHDEGNHLGMPKDNDSPGPASRVDIPRELAMVPVPAGDGTPAAPDRLGNEQHHRDRRARLDERVHRGYHPRRGGRYDSEEDQSPSPEPPDNHKKEGDKEEEFPEVHGCFMIYGGQVANASARHRKQERREVYSVKVAAPVYLDWSDKPITFDQGDHPDCVPSPGRYPLVVDLVIGNARLTKVLMDGGSSLNIIYAETLGLLEIELSMIWAGAAPFHRIVPGKRVLSLGQLDLPVCFGTPSSFRRETLTFEVVGFRGTYHVVLGRSCYAKFMVVPNYTYLKLKMPGPNGVITVGSTYRHAYECDMECVEYAEALAKSEALITDLECLSKEVPDVKHHAGNFEPAEAVKSVPLDPSNDADKKQHLRCFDEEKRRAIGKEIHKLMAAGFIKEVFHPEWLANPVLVKKKGGKWRMCVDYTGLNKACPKVPYPLPRIDQIVDSTAGCETLSFLDAYSGYHQIKMKESDQLATSFITPFGMYCYTTMPFGFRNAGATYQRCMNHVFGEHIGRTVEAYVDDIVVKTRKASDLLSDLETTFKCLRAKGVKLNPEKCVFGVPRGMLLGFIVSERGIEANPEKITAITIMGPIKDLKGVQRVMGCLAVLSRFISRLGEKGLPFYHLLRKVERFTWTPEAEEALGNLKALLTNAPILVPPAAGEALLIYVAATTQVVSAAIVGSRTPARGG

SEQ ID NO: 231503 - protein, 129 aa, Zea mays
  unsure (1)..(129): unsure at all Xaa locations
  Clone ID: MRT4577_142728C.1.pep
MAKSSKIMVAAALLALALAXSTAKAKNIKTTXTEXKDNAVVQPXTFPPXFDRLXXGASXAFGGLPGXSIPXSSIPRFSMPGSXSSLPGFSLPXSGSMPLFGGGSPGFSGFGGMPGSPTAGSVPEHANKP

SEQ ID NO: 231504 - protein, 1066 aa, Zea mays
  Clone ID: MRT4577_142729C.1.pep
MGPIKDLKGVQRVMGCLAALSRFISRLGERGLPLYRLLRKAECFTWTSEAEEAHGNLKTLLTKAPILVPPAAGEALLVYVAATTQVVSAAIVVERQEEGHALPVQRPVYFVSEVLSETKIRYPQVQKLLYAMILTWWKLRHYFESHPVTVVSSFPLGEIIQCREASGRIAKWAVEIMGETISFAPRKAIKSQVLADFVDEWVETQLPTAPIQPELWTMFFDGSLMKTGAGAGLLFISPLGKHIRYVLRLHFPASNNVAEYEALVNGLRIAIELGVRRLDARGDSQLVIDQVMKNSHCRDPKMEAYYDEVRRLEDMFYGLELNHISRRYNETADELAKIASGRTTVPPDVFSRDLHPPSVKIDDTPEPEAPSVQPEVPSAQSEAPSARPEAPSARLEAPSVQPEVPSAPEGETLHVEGKQSGVAPDQNWQAPYLQYLHRGELPSDRAKARRVARRAKSFVLLGDKKELYHRSPSGILQRCISITEGQELLREIHSEACGHHAAPRALVRNAFRQGFYWPTAVADATRIVRTCEGCQFYARQTHLPAQALQTIPITWPFAVWGLDLVGPLQKAPGGYTHLLVAIDKFYKWIEVRPLNSIRSEQAVAFFTNIIHRFGVPNSIITDNGTQFTSRKFLDFCEDHHIRVDWAAVAHPMSNGQVERANGMILQGLKPRIYNDLNKFGKRWIKELPSVARILTLGGSSSTLGVDNTFGEVRPSLGRRRGPKISTLKDDVIATPGPSPPGSSPRVRLGQAARLVTPRPWPAVPRGHQLDPRPRQASTTTMNKNTGIQSAITNGTPVPPPQERPTHGPTREVELRLNPASTPARMMNILEAEGGTKIAARLASSHPGAGGHRLPQSCVPPMTRRKDGGYPPSGGLEGGKARCIREREDMVAFQGGHPPFKGDSPYLRPQPSRAESSPTRSKVLPCGAGAGSHTSCKPAQSRRSQTAVRGGASGRRSGRRFTFAIMTASEKGSGKGDTPERILPREGTRLRASLLIRGSKAGPSEGFNSRLRSRGLHTHYWSEVRRLAPRKGSTAASGYSGSAPTTDQGFEGWPPKGSQPPQTQSEG

SEQ ID NO: 231505 - protein, 145 aa, Zea mays
  Clone ID: MRT4577_14272C.1.pep
ARSTTGRGSYCGPRAGSFSPGDKVFIRFVAVTAPGLAVLLSPVVARPKAFPTLCSSRLVTLGMRRITSVCSSCELILVVVLRATATVAAESGRGHGTSASFEPVVPFPVSNHMRSCLPGVSSISPTLVVVVDRGICVDGYPARPA

SEQ ID NO: 231506 - protein, 106 aa, Zea mays
  unsure (1)..(106): unsure at all Xaa locations
  Clone ID: MRT4577_142730C.1.pep
VKLKKSEAFTRECEIGIRXGGLKVVESVNELAQIMKDLSVLVIDQGTIIDRIDYNIQNVAASVEEGYKQLQKAERTQKKGGMVMCATVLVILIFIMIVLLILKTIF

SEQ ID NO: 231507 - protein, 88 aa, Zea mays
  Clone ID: MRT4577_142731C.1.pep
SLLNAVHGSKVYDQIFVYQRTLKSPNCPPAEVSSECLPSTSDPCCGFAPVWSKLIFFNMHQHRCRPITTEAKKYCKAKHSGQLLCLGN

SEQ ID NO: 231508 - protein, 529 aa, Zea mays
  Clone ID: MRT4577_142732C.1.pep
MGSLQQPFQPRTVLRFRSLEFMSLDGRYDMILLPPPCDNDNGGRQPARRRRNRRRLPRVVEEQHSSSPRPLPRRRRRRRGNQGQVGGGTSSAVERVDGAGAPTGGTSSIDLASEMKTSAVSPQRANAKQTDDASTLAKGLLGVTLVPETKVQSVPDVTSSPPVDQEGGPSEGNHLGMPENGDLPRPVPRVDILRELAVVPVPAGGHDPQLEQIRGVQTRLDEGAGTLEPIRRDVGQEWAGQPPAGEVRHLPQGIQHRIADDVRVRPPPTSSGVGQNLAVAAMLLRVMSEPSTTEGRRIQGELKNLLEGAAVRRAESSASRRQGYPSEHRAATSRFMREASVHTGRTRNTAPTAPGRLGNEHHHRNRRAHLDERVRRGYHPRRGGRYDSGEDQSPSPEPPGPQAFSRAIRRAPFPTRFRTPTTITKYSGETRPELWLADYRLACQLGGTDDDNLIIRNLPLFLSDTARAWLEYLPPGQISNWDDLVQAFADVIGAFLAGTTCRDLVSKLGRKTPTRASELMDIATKFASG

SEQ ID NO: 231509 - protein, 60 aa, Zea mays
  Clone ID: MRT4577_142733C.1.pep
IAAIRLTDLKMVLLPRFIMARPATVLSLGHNFCIVADVEMPYSYTTLNFREREKNLKRIV

SEQ ID NO: 231510 - protein, 98 aa, Zea mays
  unsure (1)..(98): unsure at all Xaa locations
  Clone ID: MRT4577_142734C.1.pep
MDESGMKKEIGLLGLVIVSHLSPRGLGRFIRSRDLQVGDLVLRLRQDARGRHKLTPPXWEGPFVIAKVLKPGTYKLANSQGEVYSNAWNIQQLRRFYP

SEQ ID NO: 231511 - protein, 112 aa, Zea mays
  Clone ID: MRT4577_142735C.1.pep
IICTGHQATSKLMAQMEACTCPVHQMVPFRALELGRLRPRRWAGSSRLERRRWAAIDQHRHLILTSGWKGGPTALRSGSSPCSVSRISTREDKELKKWRRKNCLPAGLEVPN

SEQ ID NO: 231512 - protein, 134 aa, Zea mays
  Clone ID: MRT4577_142736C.1.pep
CPVHTGQSGAPFRPLAQPRVSRRSCGRPLAWPTVGSPDSPLEEARDRALLHSARYQQSLRRYHARGVRPRDFQVGDLVLRLRQDARGRHKLTPPWEGPFVIAKVLKPGTYKLANNQGEIYGNAWNIKQLRRFYP

SEQ ID NO: 231513 - protein, 137 aa, Zea mays
  Clone ID: MRT4577_142737C.1.pep
PVFIEQGESQSWCLDLGNRSVLNKEGRPTQNLASHHRSRRHPRHLNRPHRILPRPSSPGQYPSRGTQMRRTRRLRLRTQQRWFARTLQRSPRGREVRSRKPSRHGLGNAVGYRTVEEERAVAVCSSSPMVRRTLVPN

SEQ ID NO: 231514 - protein, 96 aa, Zea mays
  unsure (1)..(96): unsure at all Xaa locations
  Clone ID: MRT4577_142738C.1.pep
SIQIISNFTLTHLTNKKLNQPRKQKKYPFFFFIKNATQAYLTTPPPPFIXFAKIIVSIYXRTSMSEILRYNAHLGPMSVAXLSKSHRWYYLFSKKQ

SEQ ID NO: 231515 - protein, 95 aa, Zea mays
  unsure (1)..(95): unsure at all Xaa locations
  Clone ID: MRT4577_142739C.1.pep
MGDHHRRATGGGGGXYSDLHRGGGLHREAQQQQKQGAMMTALKAATVGTFGGTMLELTVLILDGTVIALTVATLVQXCFSPVLXPGGILLSLMGS

SEQ ID NO: 231516 - protein, 70 aa, Zea mays
  Clone ID: MRT4577_14273C.1.pep
YGFLIMLANEFCMFMRFFLDFIFLYFFFFFFFFCFFFFFFFLGKILLPFENSLTWKYASDRHYAAESNSY

SEQ ID NO: 231517 - protein, 148 aa, Zea mays
  Clone ID: MRT4577_142740C.1.pep
RGPSRGVRSRCRWRTPSPFMRGPSDSTKRRTRSCQVADRLVSDRSPSAPPQRAPSSVHLAVIAPRSTPTHFLTTPLGKRREDLSNRPSMVGSIDHSDVSPSNIIKPTLEVLSAEDQQDFKEHKEQLIKEAHAKFLANFKVDRNQKVTP

SEQ ID NO: 231518 - protein, 185 aa, Zea mays
  Clone ID: MRT4577_142741C.1.pep
MVLWEITAITAYFLGLRRTYRLALRGQRRLIGPNHPRLRDFVYRRTRSIFDVAVSVHKNIQERDLEVGRNVGNAVLRWLDRMKPSAQIRPHPPGPPGSPPEQLRHLSTMNKAVGAQKPASKTSTHDSSGKMLFSPLNIRPKSFPILPTMMQSTRISASNQCRRLSSSPFPSVTARRKDMMEGVFR

SEQ ID NO: 231519 - protein, 75 aa, Zea mays
  Clone ID: MRT4577_142742C.1.pep
CYDVKVVCLLHHQGAIIISYVLYRGFQQNESLVHPGHCPGSFPPCVLSNLLLLFTGLVRRAHHQLVPLPNLTIVR

SEQ ID NO: 231520 - protein, 77 aa, Zea mays
  Clone ID: MRT4577_142743C.1.pep
ITLHMQLLDHLGDDVVIVPAHITNNDIPDIASDSFDLFMAVPCVEYSMVWKSQISTQRFRPIGWSNHSVMRSSTSPV

SEQ ID NO: 231521 - protein, 73 aa, Zea mays
  Clone ID: MRT4577_142745C.1.pep
GVPGNRRHVRVHGRGSVIVDDVAYTTRGPSAGRASTSPRCSPRLYRTCSSLRSSWRCSSDIHHLSGSDRNRES

SEQ ID NO: 231522 - protein, 224 aa, Zea mays
  Clone ID: MRT4577_142746C.1.pep
MAMEGYDREFWQFGDQLRLQTATFSGLSLGDSIWSPADAAPRARNADPGLFSPSQAAHNNAGTGFAAAKMNGSLNGPGLIGSGKLAFGATTTSKADRYNNVSLPAAADAKPYANANGLYGAKPNNTNNNGFGLNKMAAGGGGYSNFNGGNEGVKSYFNKSIGRPASNNNSSSNNFSGYGGKKGAADGKKKHAKNERGDNNHGAASGEAVKTLPAAEALPRNEPI

SEQ ID NO: 231523 - protein, 241 aa, Zea mays
  unsure (1)..(241): unsure at all Xaa locations
  Clone ID: MRT4577_142747C.1.pep
MAMEGYDREFWQFGDQLRLQTASFSGLSLGDSIWSPADAAPRARNADLFSPSPAPDNNNAAKMNGNGLNGPGLIGSGKLAFGATTTSKADRYNNVSLPAAADANAKPYGNANGLYGAKPNNATNNGFGLNKMAAGGGGYGNFNGGNDGVKSYFNKSIGRPASNNSSNNNFSGYGGKKGAADGKKKHAKNERGDNNHGAASEKRFKTLPASEALPRNEPIGGYIFVCNXDTMEEKLKRQLFG

SEQ ID NO: 231524 - protein, 140 aa, Zea mays
  unsure (1)..(140): unsure at all Xaa locations
  Clone ID: MRT4577_142748C.1.pep
CNHNGVRGNHPHPGRGEQWGASRGVVISCHXKGXFYAHMTKGQEGGKVVVIYFTGGWXXPXLXIXPLFXXHSXXFTQVXFLKGDVDXVKEGTXAYEGXAMPTFHFVKNGERGSTIGGGMKDXLLAXIEKHGAPAPASASG

SEQ ID NO: 231525 - protein, 282 aa, Zea mays
  Clone ID: MRT4577_142749C.1.pep
MLPQMRPLPSRPAIHAVHRRTSPAPPSIGGLGQHGRVALVRTTTPVVCRSVASPAANQGAPAVERPWKLSDARLVLEDGSVWNAKSFGASGTQVGEVVFNTSLTGYQEILTDPSYAGQFVLMTNPHIGNTGVNSGDEESIKCFLGGLIIRNLSICTSNWRCTETLDEYLRKRNIMGIYDVDTRAITRRLREDGSLIGVLSTDQSLKDEELLEMAKNWKIVGVDLISDVTCDAPYEWVDKTGSGWEFNDNQSSETFHVVVYDFGVKHNILRRLESYGCKITVV

SEQ ID NO: 231526 - protein, 40 aa, Zea mays
  unsure (1)..(40): unsure at all Xaa locations
  Clone ID: MRT4577_14274C.1.pep
FKVQTYFFGILTKKIPFFWGGGXHXXSKXXPHYTPGEKPP

SEQ ID NO: 231527 - protein, 123 aa, Zea mays
  Clone ID: MRT4577_142750C.1.pep
GGGIRGGGGGPWNEGRKKKPPGERGGEKKKKFGGGGKGIPFKKNLAPGSQKKGKKGPGPKFKGGPTLAPPQKKREKKGGPSPSQKSRLYRGDPRGTLKSKGPCPPGGPKTRGSPSQRKKLGGV

SEQ ID NO: 231528 - protein, 45 aa, Zea mays
  Clone ID: MRT4577_142751C.1.pep
VMQCYCFSSNLTTNGELLLFHSHRRLQNSHRVCLPVWLRAAWFPG

SEQ ID NO: 231529 - protein, 44 aa, Zea mays
  Clone ID: MRT4577_142752C.1.pep
LFFYINENILVRGFYICWSFIKSKIKLLIMKYYMPLTGLIKNNY

SEQ ID NO: 231530 - protein, 106 aa, Zea mays
  unsure (1)..(106): unsure at all Xaa locations
  Clone ID: MRT4577_142753C.1.pep
MAKRESPAIGIDLGTRYSCICVWPHDRXVNDLPQXVDLNTLDDVRXDRLVAPDRLIXDNHVVIDGINTRFDAKRFIGRWNSEPAVRTVMDVYPKKVITGPRDAAKI

SEQ ID NO: 231531 - protein, 766 aa, Zea mays
  unsure (1)..(766): unsure at all Xaa locations
  Clone ID: MRT4577_142754C.1.pep
GGRQPARRRWNRRRLPRVVEEQLSSSPRPLPRRRRRRRGDXGQAGGSTSSTVERVDGAGAPTGGXQVPTDSHLTPFGFSLDPPSGFALASALVEASPNPLRYRMRSPWDRLTDVSTYGPSEFEEDDEPDFCWDFSGLGNPSAMRDFMTACDYCLSDCSDGSRSLRDEDCGLSRECFHVDLGGPSEGNHLGMPENGDLPRPVPRVDILQELAVVPVPAGGHDPQLEQIRGVQARLDEGARALEPIRRDVGQEWVGQPPTGEMRHLPQGTQHRIADDVRVRPSPTSSGVGQNLAAAAILLRVMPEPSTTEGRRIQGELKNLLEDAARTELPNITDSDVIGAFLVGTTCRDLVSKLGRKTPTRASEPMDIATKFASGQEAVEAIFRKDKQPQGCPPEDAPEASTQRGAKKKGKKKSQAKRDAADADLVAAAEYKNPRKPSRGANLFDKMLKEPCPYHQGPVKHTLEECAMLRRHFHRAGPPAEGGRARDDDKKEDHQAGEFPEVRDCFMIYGGQAANASARHRKQERREVCSVKVAAPVYLDWSDKPITFDQADHPDHVPSPGKYPLVVDPVIGDVRLTKVLMDGGSSLNIIYVETLGLLRVDLSSVRAGAAPFHGIIPGKRVQPLGQLDLPVCFGTPSNFRRETLTFEVVGFRGTYHAVLGRPCYAKFMVVPNYTYHKLKMSGPNEVITVGPTYRHAFECDVECVEYDEALAESEDLIADLESLSKEVPDVKHHTDNFEPAETVKSVPLDPSSDASKQIRIGSELDSK

SEQ ID NO: 231532 - protein, 64 aa, Zea mays
  Clone ID: MRT4577_142755C.1.pep
SIGSSFLLPHHNHIQHPFLNLLFFLICATEVDGVNFPTWKKLLYQLISGYCIDLVCPICRLNLN

SEQ ID NO: 231533 - protein, 77 aa, Zea mays
  Clone ID: MRT4577_142756C.1.pep
QDTNQISHQAVSILFCFNTCRHDYTTTDSHIIFSSVHMICTILETMFLYYKKLAVPLRNEFINKTPIKYFFKDITHF

SEQ ID NO: 231534 - protein, 108 aa, Zea mays
  Clone ID: MRT4577_142757C.1.pep
RGHECASDNNNPLPPPPPQTQLAVKEVKNAAACRPMLVCRVIPGWVPPDGEGDTSPPAGEDQEGPFDSLAGEDPPTNSVYGNPEELFVANPRAILPWFVVIYRGLDFL

SEQ ID NO: 231535 - protein, 552 aa, Zea mays
  unsure (1)..(552): unsure at all Xaa locations
  Clone ID: MRT4577_142758C.1.pep
GGRQPARRRRNRRHLLRVVEERHSSSPRPLPRQRRRRRGNQGQAGGRASSGIDLAFETKASVVPPXHANPEQVDDASTLAESLQDIXPSAMRDFMAACDYCLSDCSDGSRSLDDKDCGPSRECFHVELGDPSEGNRLGMPEDGDLPRPVPRADIPRELAVVPVPAGGHDPQLEQVRGAQARLDEGAGALEPIRREVGQVWAGQPPAGKIRHLPQGLQHRVADVVRVRPPPASSGVGQNLAAAAMLLRTMPEPSTTEGRRIQGELKNLLEDAAVRRAESTASRRQAYPSEPHAATSRFTREASVYTGRTRNTAPAAPGHLGNEHHRRDRRAHLDERVRRGYHPRRGGRYDSGEDRSPSPEPPGPQVFSRAIRRAPFPTRFRPPTTITKYSGETRPELWLADYRLACQLGGTDDDNLIIRNLPLFLSDTARAWLEHLPPGQISNWDDLVQAFAGNYQGTYVRPGNSWDLRSCRQQPGESLQDYIRRFSKQRTELPNITDSDVISAFLAGTTCRDLVSKLGRKTPTRASELMDIATKFASGQEAVEAIFRKDKQP

SEQ ID NO: 231536 - protein, 672 aa, Zea mays
  Clone ID: MRT4577_142759C.1.pep
MRKASDLLSDLETTFRCLKAKGVKLNPEKCVFGVPRGMLLGFIVSERGIEATPEKIAAITSMGPIKDLESVQRVMGCLAALSRFISRLGERGLPLYRLLRKTERFTWTPEAEEALRNLKALLTNAPILVPPAAGEALLIYVAATTQVVSAAIMVERREEGHALPVQRPVYFISEVLPETKIRYPQIQKLVYTVILTRRKLRHYFESHPVTVVSSFPLGEILQCREASGAGAGLLFILPLGKHLRYVLRLQFPASNNVAEYEALVNGLRIAIELGVRRLDARGDSQLVIDQVMKNSHYRDPEMEAYCDEVRRLEDKFYGLETNDTPEPEAPSAQPEVPSAQPEAPSAPEGEALRIEEERNGVTLNRNWQTPYLQYLHRGELPLDRAEARRLARRAKSFVLLGDGKELYHRNPSGILQRCISIAEGQELLQEIHSGACDHHAAPRALVGNAFRQGFYWPTAVADATRIVRTCRGCQFYARQTHLPAQALQTIPITWPFTVWGLDLVGPLEKAPGGYTHLLVAIDKFSKWIEVRPLNSIRSEQAVAFFTNIIHRFGVPNSIITDNDTQFTGRKFLDFCEDHHIRVDWAAVAHPMTNGQSLRRYHTQGVRSRDLQVGDLVLRLRQHARGRHKLTPPWEGSFVIAKVLKPGTYKLANSQGEVYGNAWNIRQLRRFYP

SEQ ID NO: 231537 - protein, 48 aa, Zea mays
  Clone ID: MRT4577_14275C.1.pep
SVCLQELRVGDRAGELPGFRHLFHVACIDCWLLRHGFWPMSRGDISNC

SEQ ID NO: 231538 - protein, 403 aa, Zea mays
  Clone ID: MRT4577_142760C.1.pep
MPEPSTTEGRRIQGELKNLLEFASGQEAVEAIFWKEKQPQGRQPKDVPEASAQRGTKKNAKKKAQAKRDAADEDLVAAAEHRHPRKPPGGANLFDKMLKESCPYHQGPVKHTLEECVMLRRYFHKAGPPAKGGKDQDNNKKEGDKEEEFPEVHSCFMIYGGQVANASARHRKQERRESDKPITFDQGDHPDCVPSPGRYPFVVDPVIGNARLTKVLMDGGSSLNIIYAETLGLLEIDLSTIWAGAAPFHGIVPGKRVLPLGQLDLPICFGTPSNFCRETLMFEVVGFRGTYHAVLGRPCYAKFMAVPNYTYLKLKMSGPNGVITIGSTYRHAYESHVECVEYAKALTESEAHIADLECLSKEVPDAKRHTGNFEPAEAVKSIPLDPSNDADKRVRIGFELDPK

SEQ ID NO: 231539 - protein, 1398 aa, Zea mays
  unsure (1)..(1398): unsure at all Xaa locations
  Clone ID: MRT4577_142761C.1.pep
MSGVVLAPETTTDVASPQRANPKRTNDASTLAKDLLGVSLVPEITVHSVPDATSPPSIDQKVPSVFHPIPFRFSFDPPSDPASVDAFVRAYPDLPGYHMWSTWDQLTAVSTYGPAGSEEEDDPNFGWDFSRLWDPSAMRDFMSACDYCLSGCSDDGHSLSDEGYDPSRECFHIDPGEGRRIQGELKDLLEGAAVRRAENSASQRQGCPSEHRATPSQRIREASVRTERTRDGTPAAPGRLGDEQHRRDYRACLKERVRRGYHPRRGGRYDSEEDRSPSPEPPGPRVFSRAIRRAPFPARFQAPTTITKYSGETRPELWLSNYRPACQLGGTDDDNLIIRNLPLFLSDVARAWLEHLPPAQISDWDDLPGESLREYIRRFSKQRTELPNITDSDVIDAFLAGTTCRDLVSKLGRKTPTKASDLMDITTKFASGRXPSAEGGKDQGYNKKXGNKEEEFSEVRDCFMIYGGQVANALARHRKQERREVCSVKVAAPVYLEWSDKPITFDQGDHPDCVPSPGRYPLVVDPVIGNARLTKVLMDGGSSLNIIYAETLGLFGIELSMIRAGAAPFHGIVPRTYHAVLGRPCYAKFMAAPNYTYLKLKMPGPKGIITVRSMYRHAYECDVECVEYVEAITESEALIADLDCLSKEASGAKRHAGNFEPTEAWSPSDMPGIPRDVAEHSLDIRAGARPVKQHLRCFDEEKRRAIGEEVHKLMAAGFIKEVPYPLARIDQIVDSTVGCETLSFLDAYSGYHQIKMKESDQFATSFITPFGMYCYTTMPFGLRNAGATYQRCMNHVFEEHIGRTVEAYVDDIVVKTRKAFDLLSDLEVTFGCLRAKGVKLNPEKCVFGVPRGMLLGFIVSETGIEANPEKIAAITNMGPIKDLKGVQRVMGCLVALSRFISRLGEKGLPLYRLLRKAERFTWTPEAEEALRNLKALLTNASILVPPAAGEALLIYVAATTEVRSVYFISEVLSETKIRYPQIQKLLYAVILTRRKLRHYFESHPVTVVSSFPPGEIIQCREASGRIAKWAVELMGETISIAPRKAIKSQVLADFLAEWADTQLPTAPIQAELWTMYFNGSLMKTGAVMKNSHCRDRKMEAYCDEVRRLEDKFHGLELNHVARRYNEAVDELAKIASGRTTVPPDVFFRDIYQPSVKLDDAPEPEETSAQPEVPSAAEGEALRIEGERNGAAPNQDWQTPYLXISSEESCPSTRPKLGDWLGAPSRSFYWAMKKSYTTAAPRASSNDAYPSPKDKSCYKKYTRGLAVTMQHLGPSWETLSDKXYWPTVVADATRIVRSCQGCQFNARQMHLPAQALQIIPITWSFAVRGLDLVGPLQKAPRGFKHLLVAIDKFSKWIEVQPLTSIGSEQAFFTNIIHRFGVLLGPCFVAEGPAERNSFG

SEQ ID NO: 231540 - protein, 119 aa, Zea mays
  unsure (1)..(119): unsure at all Xaa locations
  Clone ID: MRT4577_142762C.1.pep
MYCADHIDLLAVLLLMLLLMSPTTRSDPFXPPLDLGCIHXLSHALXCGKDDDCILNSMNENHXDIFTVLVXGMYVTVXLLDPXCYYTIGVQILHTXLDFHTYTILLMEKIFDLQHSNFN

SEQ ID NO: 231541 - protein, 697 aa, Zea mays
  Clone ID: MRT4577_142763C.1.pep
MGSLQQPFQPGTVLRFGSLEFMSLDGGYDMILLPPPCDSNNGGRQPARRRRNRRRLPRVVEERHLSSPRPLPRRRRRRRGNQGQAGGDTSSAVEQVDGAGAPAGGASGIDLAFETKTSVISPQHANSEQTDDVSTLAKGLLGVTLVPETTVQSVPDVTSSPPIDQEVPTGSHLTPFGFSLDPPSDFALADALVEASPNPLGFRMRSPWDRLADVSTYGPSGSEEHDEPDFCWDFSRLGNPSAMRDFMTACDYCLSDCSDGSRSLDDEDCGPSRECFHVDLGGPSEGNHLDYRLACQLGGTDDDNLIIRNLPLFLSDTARAWLEHLPPGQISNWDDLVQAFAGNFQGTYVRPGNSWDLRSCRQQPGESLRDYIRRFSKQRTELPNITDSDVIGAFLTGTTCRDLYKNPRKPPGGANLFDKMLKEPCPYHQGPVKHTLEECAMLRRHFHRAGPPAEGGRARDDDKKEDHQAGEFPKVRDCFMIYGGQAANASAWHRKQERREVCSVKVAAPVYLDWSDKPITFDQADHPDHVPSPGKYPLVVDPVIGDVRLTKVLMDRGSSLNIIYAETLGLLRVDLSSVVGFRGTYHAVLGRPCYAKFMVVPNYTYLKLKMPGPNGVITVGPTYNHAFECDVECMEYAEALAESEALIADLESLSKEVPDVKRHAGNFEPAETVKSVPLDPSSDASKQIQIGSELDPK

SEQ ID NO: 231542 - protein, 959 aa, Zea mays
  Clone ID: MRT4577_142764C.1.pep
MAADSPPAGGGIDDVFPAWQHADSKQTDDASTLAKGLLGVTLVPETTVQSVPDVTSSPPVDQEVPTDSHLTPLGFNLDPPSGFALVDALVEASPNPLGYRMRSPWDRLTDVSTYGPSGSEEDDEPDFCWDFSGLGNPSAMRDFMTACDYCLSDCSDGSRSLGDEGCGPSRECFHVDLGGPSEGNHLGMPENGDLPRPVPRVDILRELAVVPVQAGGHDPQLEQIRGVQARLDEGAGALEPVRRDIGQEWAGQPPAGEVRHLPQGIQHRIADDVRVRPPPASSGVGQNLAAAAMLLRAMPEPSTTEGRRIQGELKNLLEGATVRRAESSASRRQGYPTEHRAATSRFMREASVHTERTRNTAPAAPGRLGNEHHHRDRRAHLDERVRRGYHPRRGGRYDNGEDRSPSPEPPGPQAFRRAIRRAPFPTRFRPPTTITKYSGETRPKLWLADYRLACQLGGTDDDNLIIRNLPLFLSDTARAWLEHLPPGQISNWDDLVQAFVGNFQGTYVRPGNSWDLRSCRQQPGESLRDYIRRFSKQRTELPNITDSDVIGAFLAGTTCRDLVGKLGHKTPTRASELMDIATKFASGQEAVEAIFQKDKQPQGYPPEDAPEASTQRGAKNKGKKKSQAKRDAADADLVAAAEYKNPRKPPGGANLFDKMLKEPCPYIRGPVGPPAEGGRARNDDKKEDHQAGEFSEVRDCFMIYGGQAANTSARHRKQERREVCLVKVAAPVYLDWSDKPITFDQADHVPSPEKYPLVVDPVIGDVRLTKVLMDGGSSLNIIYAETLGLLRVDLSSVQAGAAPFHGIIPGKRVQPLGQLDLPVCFGAPSNFRRETLTFEVVGFRGTYHAVLGRPCYAKFMVVPNYTYLKLKMSGPNGVITVGPTYRHAFECDVECVEYAEALAESEALIADLKSLSKEVPDVKRHAGNFEPTETVKSVPLDPSSDASKQIRIGSELDPK

SEQ ID NO: 231543 - protein, 701 aa, Zea mays
  Clone ID: MRT4577_142765C.1.pep
MAADNPPAGGGIDDIFPAWWKNNIRARSVLSPANGGEGGATKAKREAALRRPSSESTPPTPRRKARRASTSPSVYTGRTRNTAPAAPGHLGNEHHRRDRRAHLDERVRRGYHPRRGGRYDSGEDRSPSPEPPGPQAFSRAIRRAPFPTRFRPPTTITKYSGETRLELWLADYRLACQLGGTDDDNLIIRNLPLFLSDTARAWLEHLPPGQISSWDDLVQAFAGNFQGTYVRLGNSWDLRSCRQQPGESLRDYIRRFSKQRTELPNITDSDVIGAFLAGTTCRDLVSKLGRKTPTRASELMDIATKFASGQEAVEAIFRKDKQPQGRPSEEAPEASTPHGAKKKGKKKSQSKRDAADADLVATAEYKNPRKPPGGANLFDKMLKEPCPYHQGPVKHTLEECAMLRRHFHRVGPPAEGGRAHDDDKKEDHQAGEYPEVRDCFMIYGGHAANASARHRKQERRKVCSVKVAAPVYLDWSDKPITFDQADHPDHVPSLGKYPLIVDPVIGDVRLTKVLMDGGSCLNIIYAETLKLLRVGLSSVRAGAAPFHGIIPGKRVQPLGRLDLPVCFGTPSNFRRETLTFEVVGFRGTYHAVLGRPCYAKFMAVPNYTYLKLKMPGPNGVITVGPTYKHAFECDVECVEYAEALAESEALIADLENLSKEVPDVKRQAGNFEPAETVKAIPLDPSGDASKQIRIGSGLDPK

SEQ ID NO: 231544 - protein, 815 aa, Zea mays
  Clone ID: MRT4577_142766C.1.pep
MWLADYRLACQLGGTDNDNLIIHNLPLFLSDAARTWLEHLPPAQISSWDDLVKAFGGNFQGTYVSPGNSWDLRSCRQQPGESLRDYIRRFSKQRTELPNITDSDVIGAFLAGTTCRDLVSKLGRKTPTRASELMDIATKFASGQEAVEAIFRKDKQPQGHQQEDVPEASAQRGTKKKAKKKSQAKRDAADVDLVAATEHRNPRRPPGGANLFDKMLKESCPYHQGPVKHTLEECVMLRRYFHKAGPPAEGGRGHDNDKKEGNKAEEFPEVHDYFMIYGGHVVNASARHRKQERREVCSVKVAAPVYLDWSDKPITFDQGDHPDRVPSPEKYPLVVDPVIGNVRLTKVLMDGGSSLNIIYTETLGLLQIDLSTIRAGAAPFHGIIPGKRVQPLGQLDLPVCFGTPSNFRKETLTFVVVGFRGTYHAVLGRPCYAKFMVVPNYTYLKLKMSGPNGVITVGSTYRHAYECDVECVEYAEALAESEALIADLECLSKEVPDAKRHAGNFELAEAVKSVPLDPSNDASKQVRIGSELGPQIGSSARRLSPRERRGAGAGLLFISPLGKHLRYVLRLHFPASNNMVEYEALVNGLRIAIELGVRRLDAHGDSQLVIDQVMKNSHCRDPKMEAYCDKVRRLEDKFYRLELNHIARRYNETADELAKIASGRTTVPPDVFSRDLHQPSIKIDDTPEPKEASAQPEAPSAAEEGTRGLHHLLVAIDKFSKWIEVRPLNSIRSEQAVAFFTNIIHRFGVPNSIITDNGTQFTGRKFLDFCEDHHIRVDWAAVAHPMTNGQVERANDMLLQGLKPRIYNDLNKFGK

SEQ ID NO: 231545 - protein, 77 aa, Zea mays
  unsure (1)..(77): unsure at all Xaa locations
  Clone ID: MRT4577_142767C.1.pep
KILSISDAGGADGACSTRMRAFINREGIDFNDAQNTHPAQEWELAENLQGVLEYQTRXSRPQGGANLTLHFPANSGG

SEQ ID NO: 231546 - protein, 603 aa, Zea mays
  Clone ID: MRT4577_142768C.1.pep
MPFGLRNAGATYQRCMNHVFGEHIGRTVEAYVDDIVVKTRKASDLLSDLEATFRCLKAKGVKLNPEKCVFGVPRGMLLGFIISERGIEANLEKIAAITSMGPMKDLKGVQRIMGCLAALSRFISRLGERGLPLYRLLRKAECFAWTPKAEEALGNLKALLTNAPILVPPAAGEALLIYIAATTQVVSAAIMVERREEGHALPVQRPVYFISEVLSETKIRYPQIQKLLYAVILTRRKLRHYFESHPVTVVPSFPLGEIIQSREASGRIAKWAVEIMGETISFAPRKAIKSQVLADFVAEWADTQLPTAPIQPELWTMFFDGSLMKTGAGAGLLFVSPLRKHLRYVLRLHFPASNNVAEYEALKAPGGYTHLLVAIDKFSKWIEVRPLNSIRSEQAVAFFTNIIHRFGVPNSIITDNGTQFTGRKFLDFCEDHHIRVDWAAVAHPMMNGQVERANGMILQGLKPRIYNDLNKFGKRWMKEVPSVVWSLRTTPSRATGFTPFFLVYVAEAILPTDLEYGSPRARAYTDQSNRANREESLDQLEEARDMALLHSRGTSSLCDATTPEGFGPETSRWATWCFGCDKTPEGGTNSRLPGKGRSSSPRF

SEQ ID NO: 231547 - protein, 97 aa, Zea mays
  Clone ID: MRT4577_142769C.1.pep
RCKQPLDTRSGLRFPCKSNKLGTIQTQHTTHSAVIAEKLCLAMAGERTFFYGWEEMMIQADQDQLDMPLPLCYITPPGTMYGCTPSPGLETGEDTLS

SEQ ID NO: 231548 - protein, 219 aa, Zea mays
  unsure (1)..(219): unsure at all Xaa locations
  Clone ID: MRT4577_14276C.1.pep
MSVSAALKSRVRRPSYLKKLAKAEDLLHHFPNGAYIGWSGFTGVGYPKKIPTALADHVEKNNLQGQMKYNLFVGASSGAETENRWARLNMIERRSPHQVGKEIAKGINNGNIKFFDKHLSMFPVDLMYGFYTLNKPQNKLDVTIVEASAITEDGGIIPGASVGASPELVQMADKXIIEVNTAXPSFEGLHDITMTDLPPRRKPYLIMSPERRIGTPHIP

SEQ ID NO: 231549 - protein, 80 aa, Zea mays
  Clone ID: MRT4577_142770C.1.pep
PQKKHKKRGKGRQKRFNWAWLFSNLNKGIGGEDALSQPHKRGSGAKTHLLEPVPSPEKKLARGLEARKRANRRRCLNMTA

SEQ ID NO: 231550 - protein, 144 aa, Zea mays
  unsure (1)..(144): unsure at all Xaa locations
  Clone ID: MRT4577_142771C.1.pep
ESWRARRHRSCIAGATHAYVPNSLXSCYEPYSIIDSAIGTELLALGILVLDNEGSMVPTRAXLLGSRVTATAAAIFPMSHKKLCLILPCVSTASTSITLLRSVRHLIVCEQARRAQFFGYNLTVWSHLRFCLPSTIIVTAIGLL

SEQ ID NO: 231551 - protein, 272 aa, Zea mays
  Clone ID: MRT4577_142772C.1.pep
RPGWDILTMSKRTTFTSITPLPKTTTRSAAVSWLHNHVQMIRLNPLVIRLQETTPPPNAAADEYNCAWYEITDEISYLPGGLYKGEVTYKACFNDLPNGIQTHTFAPAGLDLRGKWTVGGNEPGEPRETLELGMDAPREGLYVREDVDMRCNIFLTGFVKKNLTKAHKSVVDKLADLGGGNDSGNDVHTSQGFDGTSGNAVPRPWQNNEQALTPTDSNTMFSPDSYLKDSAHQPSQSTLPEHEDPSSDNLYSNSHEISHRKPCKISTKVILP

SEQ ID NO: 231552 - protein, 81 aa, Zea mays
  Clone ID: MRT4577_142773C.1.pep
GLQRLGPVFFRSGGHQAVESLPGFGVHCGLVIFCGGPMFRQCPRIGFLRERYCCGCSPDDGDHCLVGGGGTPWPPLLRTRG

SEQ ID NO: 231553 - protein, 47 aa, Zea mays
  Clone ID: MRT4577_142774C.1.pep
FDRLFVHKPRLGQFRKSRSRESPRQCRRGPRHKHRIFDSTSCIDSQT

SEQ ID NO: 231554 - protein, 91 aa, Zea mays
  Clone ID: MRT4577_142775C.1.pep
GFQRISCSGSIKEGRFGPAIPRWASLVNPSPPMVALAPQTWFQKLYSFQSPLQARGAPSRCPRFVCHPSAFSLGPNMMPGFRVAPPVSSLV

SEQ ID NO: 231555 - protein, 207 aa, Zea mays
  Clone ID: MRT4577_142776C.1.pep
MDREQVTEFLGQVPLLQCLPGSSIRRIAEAVQVKHYEPGDYVAREGEPVDGLCIILDGQAEVSAPANTEEANRPDYVLNKYDYFGYGTNSSVHQVNAIAVTKLSCFVLPSQYGHLLQTKTIWNAEETPESHSLMEQILHLEKLEVDIFRGFTLPEASTFNQVFGGQLIGQALAAASKTVDCLKLVHSLHAIFLIAGDNNMPIIYQVH

SEQ ID NO: 231556 - protein, 256 aa, Zea mays
  Clone ID: MRT4577_142777C.1.pep
MGERDGGLISQTDAAGVKRRCAWVTANTDPCYSAFHDEEWGVPVHDDRKLFELLVLSGALAELTWPAILNKRDIFREVFMDFDPVSVSKLSEKKIIAPGSPSSSLLSEQKLRGVIENARQILKIIEEFGSFDKYCWSFVNHKPILSRFRYSRQVPVKTSKADAISKDLVRRGFRSVGPTVVYTPTRPPRSPNDHLISCYRFAECAASSAGAAKLSDGSLANSSDSSHGTAEQKMNGTNGLDSGLELSRTIDELSIS

SEQ ID NO: 231557 - protein, 95 aa, Zea mays
  unsure (1)..(95): unsure at all Xaa locations
  Clone ID: MRT4577_142778C.1.pep
PLPSGWRATSSSPSNLSSLSPPVPLLLXRFXXCSPLKTLXLPQPPLHXXXFPGGEAPPSXHXXXXYNPXXXPSLSXXXXPXXPXXYPXXPXLXXX

SEQ ID NO: 231558 - protein, 261 aa, Zea mays
  unsure (1)..(261): unsure at all Xaa locations
  Clone ID: MRT4577_142779C.1.pep
MSGASARGRLSPASSGGGDSEPRSTGGRTRSVSAARGRKPSPRPGEGXAAAAGATEEKKPAAVLTLQPSLSAPAGMRRQELLLXRSGLSLDASCSSDASTDSFCSRASTGRIGRPAFGARKKKALSQTDYKALSMLERDGGLISQTDAAGVKRRCAWVTANTDPCYAAFHDEEWGVPVHDDKKLFELLVLSGALAELTWPAILNKRDIFREVFMDFDPVLVSKLSEKKIIAPGSPSCSLLSEQKLRGVIENARQILKVCLN

SEQ ID NO: 231559 - protein, 138 aa, Zea mays
  Clone ID: MRT4577_14277C.1.pep
PPSSSFFFFFFFFFFFFFFFFFFFLGKNLLQVATLIQNWGNTSHNSQYGKAFFIGVSDPVRAGGTGKQTPLHNSNGAPKKNFGTHREGRVKPSPIAGGRRSFPNSWPAPRMESAVQHTKGAKRHTRFPLVRSLPNQTG

SEQ ID NO: 231560 - protein, 74 aa, Zea mays
  Clone ID: MRT4577_142780C.1.pep
HIEQRNNNNCPRRWTYAWTTKGACITGGSQNDTDTRPGSLTSGFQYYAYIQHRQEECITTRPKNTSIQRKAPTD

SEQ ID NO: 231561 - protein, 60 aa, Zea mays
  Clone ID: MRT4577_142781C.1.pep
KKKATHAHDGRPNPESDGARDARFSPRPGLVRVRLRLPVIPATHAYPITRIGNRWSTPER

SEQ ID NO: 231562 - protein, 63 aa, Zea mays
  Clone ID: MRT4577_142782C.1.pep
DPADYLLISMSSFVYLLLFNIAANYQPQNLPWNHMLSTVKTPSGFKTQHTHSHTHSPTFPPFH

SEQ ID NO: 231563 - protein, 95 aa, Zea mays
  unsure (1)..(95): unsure at all Xaa locations
  Clone ID: MRT4577_142783C.1.pep
PQCDGICRFAWSRGNNAEYFFFFFFFFFISFCAAEDAVATSPKSVFHCFDGENVESAPPPMXKDYKLSRGGCXXVYAYAMEEKAGXXEEGDGLGS

SEQ ID NO: 231564 - protein, 137 aa, Zea mays
  unsure (1)..(137): unsure at all Xaa locations
  Clone ID: MRT4577_142784C.1.pep
SPEPLKRPTXXPPPPXLFPHPPTPXGPQGEKSNGDTPKPPKKKNKPCRGPITTTPEQKYRXHPNKNNIKXQPHKPPPPGKTPQGPEPCPQTKKHFRPTNINPXKKPPQPHHPTGGAEAITPTKPPCAPKKTQNHGRP

SEQ ID NO: 231565 - protein, 108 aa, Zea mays
  Clone ID: MRT4577_142785C.1.pep
QRKNVLNFLVPAGIFKKGPPKILGFLATPGSKTNQPCMRGPLFKKKIWGGANLSGCVLQTGLVPPLGVPPIKQKGPPPGGCLLPPGRPLYYRAPPNNEGLFFFQNMFF

SEQ ID NO: 231566 - protein, 90 aa, Zea mays
  Clone ID: MRT4577_142786C.1.pep
MPEMPDQHDTTTTFHFHGNLSGLPTHPLLPQLRGRVDDRLFISLGKGTICQGDRPSCMRGGSDEAIEVAYMNNVSFRLPERIVMLEARQY

SEQ ID NO: 231567 - protein, 415 aa, Zea mays
  Clone ID: MRT4577_142787C.1.pep
MARQEVAPRRLSDQSEPTTPTPLRGTCRVLSSHLGQQWASLPSNVPTPGISLAPEIMTHSISDATSPPSTNQELGGTDDDNLIIRNLPLFLSDAARAWLEHLPPAQIFGWDDLVKAFAGNFQGTYVCPRNSWDLRSCRQQPGESLREYIQRFSKQCTELPNITDLDVIGAFLTGTTCRDLVATPVYLDWSDKPITFDQGDHPDSVPSPGRYPLVVDPVIGNTRLSKVLLDGGSSLNIIYAETLELLGVDRYMIRAGATPFHGIVPGKRVLPIGQLDLPVCFGTLSNFRKETLTFEVVGFRGTYHAVLERPCYAKFMAVPNYTCLKLKMLGPKGTITVGSTYRHAYECDVECMEYAEALAESEALIADLDCLSKEAPDAKRHASNFKPGEAVKSVSLDPSNDADKKVRIGSELDPK

SEQ ID NO: 231568 - protein, 171 aa, Zea mays
  Clone ID: MRT4577_142788C.1.pep
MEEYAREPCPWRIVDDCGGAFTMGTIGGGIFQAFKGFRNSPVGINHRLRGSLTAIKTRAPQLGGSFAVWGGLFSTIDCSMVQIRGKEDPWNSITSGALTGAILAARNGPVAMVGSAAMGGILLALIEGAGILLTRFASAQFPNGPQFTEDHSQLPSSQLPSSPFGDYRQYQ

SEQ ID NO: 231569 - protein, 432 aa, Zea mays
  unsure (1)..(432): unsure at all Xaa locations
  Clone ID: MRT4577_142789C.1.pep
MYFDGSLMKTGAGAGLLFVSPLGRHLRYVIRLHFPASNNVAKYKALVNGLRIAIELGVRCLDARGDSQLVIDQVMKNSHCHDQRMEAYCDEVRRLEDKFYGLELNHIARRXSGRTTVPXDVFSRDMHQPSVKIDDTPEPEEASAQPEVSSTVEGKALRVEGERNGVKPNPNWQALYLEYLLQGELPLDKAKARRLARRAKSFVLLGDEKELYHRSPSGILQRCISVAEGQELLQEIHSGACGHHVAPRALVGNTFRQGFYWPTTVANANRIKAPGGFSHLLVAIDKFSKWIEVRPLTSIRSEQAVAFFTNIIHRFGLPNSIITDNGTQFTGKKFLDFCEDHHIHVDWAAIAHPMTNGQVERANDMILQGLKPRIYNDLNKFGKRSLCDATKPEWFGPEASRWETWYFGCGKTPEDATSSLLPRKGRSSSPRF

SEQ ID NO: 231570 - protein, 136 aa, Zea mays
  Clone ID: MRT4577_14278C.1.pep
MAQGLAPRRGDQDVARALAEPPASRRTEGTRGGDRGHRETGEKGEGLREHDEKRRRKTKNNGGCSPEKETSPELRRKPSIDVKSEIGSTNRNHQDEALNETNAVVLLDFANDARIESNCSLELSSELELLRTSVRR

SEQ ID NO: 231571 - protein, 50 aa, Zea mays
  Clone ID: MRT4577_142790C.1.pep
DKQFADEVIATCFHLLSIPAIGILHDVHWLQCSFRALSSSIVCSPVCAYF

SEQ ID NO: 231572 - protein, 588 aa, Zea mays
  Clone ID: MRT4577_142791C.1.pep
MAAVSPPAGGRINDVFPTWQKNNIRVCPITSPADGGGGGATVAKQEAAPRRLSSESTAPAPRRGTRRASTSRLRRRRAPFPRNTGSDEGNHLGIPENCDPPRPAHRVDILRELAVVPVPAGGQDTQLEQIREMHARLDEGAGTLEPLRQNIGQEWADRAPAGETRHLQQGIQPRIADDVRARLPPASSGVGENLAATAILLRAMPEPSTTEGRRIQGELKNLLEDAAVRRAESSASRRLGYPSEHRAATSRFMREAPVHTGRTRNTAPAAQGCIGNKHHHRNHRAHLDERGRQPEEVPEASTQRGTKKKGKKKSQAKRGTADADLVAAAEYKNPRKPPGGANLFDKMLKEPCPYHQGPVKHTLEECAMLRRHFHKAGPPAEGGRARNDDKEEDHKAEEFPEVHDCFMIYGGLVANALGRHRKQERREGDHPDRVPSPGKYPLVVDPIIGNVRLTKVLMDGGSSLNIIYAETLGLLQIDLSSVWAVLGRPCYAKFMAVPNYTYLKLKMPGPNGVITVGPTYRHAYECNVECVEYAEALIADLESLSKEAPDVKRHAGNFEPAETVKSVPLDPSNDASKQIRIGSELDPK

SEQ ID NO: 231573 - protein, 890 aa, Zea mays
  unsure (1)..(890): unsure at all Xaa locations
  Clone ID: MRT4577_142792C.1.pep
MLVTPTTSTPVQDNISLIPPLVFHLASTHLGRGTQQQIHWSVDEPRGSETSTVGVPGRGSLRVNEYFPVEFQMGSLQQPLQPGTVLRFGSLEFMSHDGSYDMVLLPSQRDSNDGRRLARRRRTRRRLPTVTEEEHPGLPRHPPRRRRRRGNRGHAGGDTLSVVRPERVDDASTSVGAMSGVVLALETTTGVTSPQRANPERTDDASTLAKDLLGVSLVPEITVQSVPDATSPPSIDQEVPSVFHXCPFRFSFDPPSDPAXAMRDFMSACDYCLSGCSDDDHGFDDEGYDPSRECFHVDQGDHGEGNHLGMPEDDNAPVPASRVDIPRELAVVPVPAGGQDTQLEQFREMQAKLDEEAGRLVQLRQNIEQEWAGRALAGEAHHRARDVQRRIVGDARAGLPPAFSGVGQNLAAAVMLLRTMSEPSTTEGRCIQGELKDLLEDAAVRRAESFASRRQGCPSKHRATPSRRIREASVRTERTRDGTPAAPDRLGDEQHRRDHRARLEERVRRGYHPRRGGRYDSEEDRSPSPEPPGPRAFSRAIRWAPFPARFRAPTTITKYSGETRPELWLADYRLACQLGGTDDDNLIIHNLPLFLSDAARAWLEHLPPTQISNWDDLVKAFAGNFQGTYVRPGNSWDLRSCRQQPGESLREYIRWFSKQRTELPNITDSDVIGAFLAGTTCRDLVSKLGRKTPTKASELMDIATKFASGGTLGRRWQGPRQQQEGGDKEEEFPEVRDCFMIYGGQVANTSARHRKQERREVCSVKVAAPVYLDWSDKPITFDQGDHPDCIPSLGRYPLVVDPIIDNARLTKVLMDGGSSLNIIYAETLGLLWIDLSMIRAGAAPFHGIVPGKRVLPLGQLDLPVCFGTPSNFHRETLTFEVVGESRLDGG

SEQ ID NO: 231574 - protein, 1017 aa, Zea mays
  unsure (1)..(1017): unsure at all Xaa locations
  Clone ID: MRT4577_142793C.1.pep
GNRQPARRRRNRRRLPRVVEEQPSSSSRLLPCRRRGRQGNQDQAGGSASSAVEQVDSAGTPTGGXPGIDFALETKTSAVSPRHANPEQADDASALAKSLLDVTLVPETTVQSVHDVTLSPLVDQEVPTDSHPTSFGFSLNPPSDLALAGALVEASPNPPGFRMRSPWDRLTDVLTYGPSGSEEDDGPSICWDFSGVGNPSAMRDFMTACDYCLSDCSDGSRSLDDEDCGPIRECFHVDLGGPSEGNHLGMPEDGDLPRSVPRVDIPWELVVVPVQAGGHDPWLEQIRGVQARLDDGAGALEPIRRDVGQAWAGQPPAGEIRHLPQGFQHRAADDVRVRPPPASSGVGQNLAAAAMLLRAMPEPSTTKGRRIQGELKNLLEGTAVRRAESSASRRQGYPSEPHVATSRFMREASVYIGHTRNTAPAAPGRLGNEHHHRDRRAHLDERVRRGYHPRRGGRYDSGDDRSPSSEPPGPQAFSRAIRWAPFPTRFRPPTTITKYSGETRPELWLADYRLACELGGTDDDNLIIRNLPLFLSDTARAWLEHLPPGQISNWDDLVQAFAGNFQGTYVRPGNSWDLQSCRQQPGESLRDYIRRFSKQRTELPNITDSDVIGAFLAGTTCRNLVSKLGRKTPPGRRGAKKKGKKKSQAKRDAADADLVAAAEYKNPRKPPGGANLFDKMLKESCPYHQGPVKHTLEECVMLRCHFHRAGPPTEGGRARDDDKKEDHQAGEFPEVRDCFMIYGAAPFHGIIPGKRVQPLGQLDLPVCFGTPSNFRRETLTFEVVGRDGNGAPFPDPRRGIHPLGDGDGEKILPAGNETGKNQSPSGMAGSGTDNGHPYPLPVGDPSQQGSLPSVNDSEAVGGNAEVEEIEVSDDEDQEGGVGSKRKLTSAVWKEFKRVRVGDKIKAKCNWCAKKLGGETKNGTKHLHDHLKTCPYRKSKMTGQSKTFSQSSLRFGCRDTGKVSVENYTFDQEIARKELASMMVLHEYPLCMVDHTGFRRFVSALQPLFKMVTRNTIR

SEQ ID NO: 231575 - protein, 74 aa, Zea mays
  Clone ID: MRT4577_142794C.1.pep
MSGRGKGGKGLGKGGAKRHRKVLRDNIQGITKPAIRMLARRGCVKRISGLIYEETRRVLKILLENVIRDVVTYT

SEQ ID NO: 231576 - protein, 870 aa, Zea mays
  Clone ID: MRT4577_142795C.1.pep
MAVDDPPAGREIDDAFPTWWKDDIRACPVPSPADGGGGATKAKQKEAPRWLSSESTAPVPTDSHLASFGFGLDPPSDSASVDTLLEASPNPPGYRVRSPWGRLTAVSSYGPSGSEEDGEPDLCWDFFGLGNPSAMRDFMTACDYCLSDCSDGGPGEGNHLGMPENGDLPRPVPRVDILRELAVVPVPAGGPDPQLEQIRERQARLDEGAGTLVPIRRDIGQEWAGQPPAGEARHPPQGIQHRIADDVRVRPPPDSSGVGQNLAAAAILLRAMPEPSTTEGWRIQGELKNLLEDAAVRRVESSASRRQGYPSEHRAATSRFMREASVHTGRTRNTAPAAPGRLGNEHHHHSRRAHLDERAFSRAIRRAPFPTGFRTPTTITKYSGETRPELWLADYRLACQLGGTDDDNLIIRNLPMFLSDTARAWLEHLPPGQISNWDDLVQAFAGNFQGTYVRPKNSWDLRSCRQQPRESLRDYIRRFSKQRTELPNITDLDVIGVFLAGTTCRDLVSKLGRKTPTRASELMDIATKFASGQEAVEAIFRKDKQPQGRPPEDAPEASTQRGTKKKGKKKSQVKRDATDADLVTAAEYKNPRKPPGGANLFDKMLKESCPYHQGPVKHTLEECAMLRRHFHKVGPPTEGGKALDDAKKEDHKAGEFPEVRDCFMIYGGQVANASARHRKQERREVCSVKVAAPVYLDWSDKPITFDQADHPDHVPSPGRYPLVVDPIIGNVRLTKVLMDGGSSLNIIYAETLGLLRIDLSSVRTGAAPFHGIIPGKRVQPIGQLDLPVCFGTPSNFRRETLTFEVCVEYAEALAESEALIADLESLSREAPDVKRHAGNFEPAETVKSVPLDPCNVASKQIRIGSELNPK

SEQ ID NO: 231577 - protein, 525 aa, Zea mays
  unsure (1)..(525): unsure at all Xaa locations
  Clone ID: MRT4577_142796C.1.pep
MLLGFIVSKRGIEANLEKIAAITNMGPIKDLKGLHRVMGCLAALSRSISCLGERGLPLYRLLRKTERFTWTPEAEEALGNLKALLTSAPILVPXAAGEALLIYVAATTQEWXAGLIFISPLGKHLRYMLRLHFPVLNNVAEYEALVNGLRIAIELGVRRLDARGDSQLVIDQTDDTPEPEEASAQPEAPSAQPEAPSTAEGEALRIEEEQNGDSYPSTEPKLGDWRGAPSRSSCWVTKRSSTATAPQASSSDAYPSPKVRSYCKKYTRGLAVITQHLEPSLETPSDKKAPRGFTHLLVNIDKFSKWIEVRPLNSIRKFLDFCEDHHIRVDWAAVAHPMTNGQVERADDMILQGLKPRIYNDLNKFDRRWMKELPSVVWSLRTTPSRATGFTLFFLVYGAEAIFPTDLEYGSPRTRAYNEQSNQTSREDSLDQLEEARDMALLHSARYQQSLRRYHARGVRSRDLQVGDLVLRLRQAARGCHKLTPPWEGPFIIAKILKPGTYKLANSQGEVYNXLGTSDSYAFTL

SEQ ID NO: 231578 - protein, 49 aa, Zea mays
  Clone ID: MRT4577_142797C.1.pep
TQAMATTGLFRTISVTTFMISLSLTALISLSTSYPMQCFHTGQSYHPVL

SEQ ID NO: 231579 - protein, 874 aa, Zea mays
  Clone ID: MRT4577_142798C.1.pep
ADHPDHVPSSGKYPLVVDPIIGNVRLTKVLMDGGSSLNIIYAETLGLLRVDLSSVRAGAAPFHGIIPGKRVQPLGQLDLPVCFGAPSNFRRETLTFEVVGFRGTYHAVLGRPCYAKFMAVPNYTYLKLKMPGPNGVITVGPTYQHAFECDVECVEYAEALTESEALIADLESLSKEVLDVKRHAGNFEPAETEAVLVDFLRANADVFAWSPSDMPDIPRDVAEHSLDIQAGARPVKQPLRRFDEEKRRAIGEEIHKLMAAGFIKEVFHPEWLANPVLVRKKGGKWRMCVDYTGLNKACPKVPYPLPRIDQIVDSTAGCETLSFLDAYSGYHQIRMKESDQLATSFITPFGMYCYVTMPFGIVDKFYGLELNHIARRYNETADELAKIASGRTTVPPDVFSRDLHQPSIKIDDTPEPEAPSAQPEVPLAQSEASSARLEAPSAWPEAPSAPEGEALRVEEERSRVTPNQNWQTPYLQYLHRGELPLDRAEARRPSGILQRCISIAEGQELLQEIHSGACGHHAAPRALVGNAFRQGFYWPTAVADATRIVCTCEGRQFYARQTHLPAQALQTIPITWPFAVWGLDLVDPLQKAPGGYTHLLVAIDKFSKWIEVRPLNSIRSEQAVAFFTNIIHRFGVPNSIITDNGTQFTDRKFLDFSEDHHIRVDWAAVAHPMTNGQVERANGMILQGLKPRIYNNLNKFGKRWMKELPSVVWSLRTTPSRATGFTPFFLVYGAEAILPTDLEYGSPRTKAYADQSNQASREDSLDQLEEARDKALLHSAQYQQSLRRYHARGVRSRDLQARILTVEGSSSTLGVGYTFGEVRPSLGRRRGLRIYTLKDDIIISPGPSLPGSSPRIRPEQAARLVTPRPRPAIL

SEQ ID NO: 231580 - protein, 261 aa, Zea mays
  Clone ID: MRT4577_142799C.1.pep
MDMSNRDHLRRREEDDDDLFLFILPSLHLLGYLGRSKKKLRHTSALTGEEKVRELLEGHIKNYRVSFRMEPYIFKSLANYLRMEGLVKDTRIKVEEKLGFFLYMISHNATFEDLQVFFGHSNDTFHRVIKHFFDIVIPGLSMRFLKPPSNQVHPKIHGDNRFYPYFKNCIGSIDGTHVPVSMSPDQAAPFRNRLGVVVLGSLQLTGNIGHMETVLHSVLSADMSYIYVAFLHVWAQHVIELKEGCCETCMTCLNFWIKSSI

SEQ ID NO: 231581 - protein, 211 aa, Zea mays
  unsure (1)..(211): unsure at all Xaa locations
  Clone ID: MRT4577_14279C.1.pep
RQAPCWSDCDCKVCHAWSGSPASSSHLYVHVQAPTPLTPAAMAAVETEDVVFIHGFISSSVFWTETVFPAFSPSARSRYRMFAVDLLGFGRSPKPAESLYTLREHVEMIERSVLRRYRIGSFHVVAHSLGSVLALALAVKYPAAVRSLTLLAPPYFPVPESESESAAQYVMRRVAPRRVWPPIAFGASMACWYEHVSXTICLTICRHHRVW

SEQ ID NO: 231582 - protein, 84 aa, Zea mays
  unsure (1)..(84): unsure at all Xaa locations
  Clone ID: MRT4577_1427C.1.pep
GLRLDFDEXGSEHVSCTFPGSASASCVLSKELAAHRDQHRNEMDRLIHEHADRLRRALADTRRRHYRSLVGAADAAAAQRVKEK

SEQ ID NO: 231583 - protein, 696 aa, Zea mays
  unsure (1)..(696): unsure at all Xaa locations
  Clone ID: MRT4577_142800C.1.pep
MGSLQQPLRPGTVLRFGSLEFMSLDDSYDMILLPPPCDSDTGGRQPARRRRNRRRLPRVVEEQHSSSPRPLPRRRRRRRGNQGQAGGSASSAVERVDGASAPTGGTSGIDLALETKTSAVSPQHADFEQTDDASTLAKGLLDVTLVPETTVQSSLDPPSGFALADALVEASPNPLGFRVRSPWDRLTDVSTYGPSGPEEDDEPDFCWDFSGLGDPSAIRDFMTACDYCLSNCSDRSRSLGDEDCGPSRECFHVDLGGPSEGNHLGMPEDGXTYVRPGNSWDLRSYRQQPGEFLRDYIRRFSKQRXELPNITDSDVIGAFLAGTTCRDLVSKLGRKTPTRASELMDIATKFASGQEAVEAIFRKDKQPQGRPPEDAPGASTQRGAKKKSKKKSQAKRDTADADLVAAAEYKNPQKPPGGANLFDKMLKEPCPYHQGPVKHTLEECVMLRRHFHRVGPPAEGGRAHDEDNKEDHQAGEFPEVRDCFMIYGGQAANASAQLRKQERREVCSVKVAAPVYLDWSDKPITFDQADHPDHVPSPGKYPLVVDPVIGDVRLTKVLMDRGSSLNIIYAETLRLLRVDLSSVVGFRGTYHMVLGRPCYAKFMAVPNYTYLKLKMPGPNGVITVGPTYKHAFECDVECVEYAEALIADLESLSKEVPDVKRHAGNFEPAETVKSVPLDPNGDTSKQVRIGSELDPK

SEQ ID NO: 231584 - protein, 467 aa, Zea mays
  Clone ID: MRT4577_142801C.1.pep
MGPIKDLKGVQRVMGCLAALSRFISRLGERGLPQYRLLRKAECFTWTPEAEEALGNLKALLTNAPILVPPAAGEALLIYVTATTQVVSAAIVVERREEGHALPVQRPVYFISEVLSETKIRYPQIQKLLYAVILTRRKLRQYFESHPVTVVSSFPLGEIIQCRENSGRIAKWAVEIMGKTISFAPRKAIKSQVLADFVAEWVDTQLPATPIQLELWTMFFDGSRMKTGAGAGLLFISPLGKHLRYVLRLHFPASNNVAEYEALVNGLRIAIELGVRCLDARGDSQLVIDQVMKNSHCRDPKMEAYCDEKAPGGYTHLLVAIDKFSKWIEVRPLNSIRSEQAMAFFTNIIHRFGVSNSIITDNGTQFTGRKFLDFCKDHHIRVDWAAVAHPMTNGQVERGNGMILQGLKPRIYNDLNKFGKRWIIRGEPPLRQNFPRKRSFCQNVFRAFRLLRKWDPENDGVHVSIQG

SEQ ID NO: 231585 - protein, 197 aa, Zea mays
  Clone ID: MRT4577_142802C.1.pep
MKAAVAAVVVGGGGGDEWRCRKHPAARSGGGVCPHCLRDRLLRLCPNCAHVRPCACAAACASPSSSSSASGDAVGRVHSLIEREHRIARSRSVATGSSAALAAPSAATASGGGRRKARVWGWPPFWKPAAREGGAEPGEEEDDDEGMGLPRSSSVSATAVEAKSAAAAARARWGWHFPSPLKAFRHRRSSASVAGRA

SEQ ID NO: 231586 - protein, 149 aa, Zea mays
  unsure (1)..(149): unsure at all Xaa locations
  Clone ID: MRT4577_142803C.1.pep
MPPWQNIDMKRGDWICTRCSFMNFARNVRCLECDEQMPNKMLTGGELXCPQSDFYNYGRNMSCLKCDCRRPATLPPNATYVDADIRGAVQLLLMDTTSGGESEXRXLAETDEKADRSLSTVSQLHDSADLSSLAEDEDYTEIMPMHRGV

SEQ ID NO: 231587 - protein, 82 aa, Zea mays
  Clone ID: MRT4577_142804C.1.pep
IIAYSSNPRIVTHNTLHVLLHDHQIVVKPSMVLSPKRLLNSQKRYISKAQVHVFRVSQKRYISKAQVHVFRLSLYPRVTKYG

SEQ ID NO: 231588 - protein, 61 aa, Zea mays
  unsure (1)..(61): unsure at all Xaa locations
  Clone ID: MRT4577_142805C.1.pep
VFIVDLKPHNNKIEPAVKKXMYDIQSNKVYSLIRLDGNKKAYEXLTPLYDALNVDNKKGVI

SEQ ID NO: 231589 - protein, 284 aa, Zea mays
  Clone ID: MRT4577_142806C.1.pep
MPPPGPRLPPLLLLLLLLLGAACSCGLTVTGAGEGGSCEFSVARGSELYSFDLAAPTPAHRHGVLSEDGFYKVAVNDSILWFQLCDEMLFNFDPPMCLNCEDCGGPLRCGTQCSALVSNNIGGYDVCTTIGGLSKSHISLVDESNPRKGIIVKMFSSKCSISVSVLCDSTAIQVPDKFVLSGLCDYATTLEHPSGCPRSVSASGSGWGWLSTLFITILCLLGGYILIGAVYRYYFLGIHSVEAIPNLDFWIGLPQRIKAVFVPATRSHVSYSRDGLGTDAPVYH

SEQ ID NO: 231590 - protein, 174 aa, Zea mays
  Clone ID: MRT4577_142807C.1.pep
VVAAAGRHRPARQGACRRGGGPAAAAVRGAGPRPGAVVGYRARVAAARAGGAGRDGVHQGAARRRAAIRGPPGAVPLPPHGPGRGAGRAAAQGSARAPRAGRRDPRCRAGHAAGAAAPSLRPRGAGGPPGGGGAREGLPQRDASLPRRLRRRAWRLGCRRRGQDHGAEAGARGV

SEQ ID NO: 231591 - protein, 88 aa, Zea mays
  Clone ID: MRT4577_142808C.1.pep
IQKTSACSGRVQKISSSRYFSPNHPKKRQAGAPPPIIQMLAVCGRVFLLTTPENSAALMRCWKSVPQAETKGEHNCVLSPHKFSSSPQ

SEQ ID NO: 231592 - protein, 97 aa, Zea mays
  unsure (1)..(97): unsure at all Xaa locations
  Clone ID: MRT4577_142809C.1.pep
IRRWVQEXGLGAGDPWSQGPPTXMTRWVLLPLAPXXGQRTGRGRGEEARHRGTVAAGVSVRGKPSIRPAAAVSGFXPSSKRRRAVLASLSXLFATFS

SEQ ID NO: 231593 - protein, 76 aa, Zea mays
  Clone ID: MRT4577_14280C.1.pep
SISSLSAARHHRPRRTRRRRARSRARPHPPRRPPPRPPPALAPSAMEAPAVPTPSPFRHGRPCPPPVSYVMDAPSL

SEQ ID NO: 231594 - protein, 54 aa, Zea mays
  Clone ID: MRT4577_142810C.1.pep
ALIQRTLIQSGSPTGNVEYIFYDRTTRFYNGRDRDTRSAGAPSYSKLLASYQPG

SEQ ID NO: 231595 - protein, 100 aa, Zea mays
  Clone ID: MRT4577_142811C.1.pep
PLGGWLFFFFFCFFFLKNTGTLISKPFLVSLQASFCTHGNCTFGLEDTMLTPQRSQRRLRLIPLSEGPDHFLKAHGFFAGARFLMEALFFGAIMRGEPLG

SEQ ID NO: 231596 - protein, 73 aa, Zea mays
  Clone ID: MRT4577_142812C.1.pep
HHQRNTQSQINCNKLVLRASRVHQLYCTYAQAPCIYNYENLHIICMPHSTPTAHNPGSPACGFPLPLVHSLEL

SEQ ID NO: 231597 - protein, 78 aa, Zea mays
  unsure (1)..(78): unsure at all Xaa locations
  Clone ID: MRT4577_142813C.1.pep
RAAELKQGLSQIEAXXSXXXXNXXIXIPDXHQXXNLNYHXFXIFFLXXXXLXLXXTNPASSXXXLLHXLXPSNXALLL

SEQ ID NO: 231598 - protein, 49 aa, Zea mays
  Clone ID: MRT4577_142814C.1.pep
FGFFLFFFDFHINCSLCKPASPLYQQWPIKSSSHIGDPTTHHRESHPRA

SEQ ID NO: 231599 - protein, 130 aa, Zea mays
  Clone ID: MRT4577_142815C.1.pep
MPPRTLRRRLFEIRFIGSAHRPQLAHSLGDGESTYDVNGVCKYRLLEKRYRWWCMACARPPARTGTGDRRPGDGGGDRWSDMDAWTERELQSFTAGYLTSCWPLLCALHVRCLCCVLSVHGRTPAASRYG

SEQ ID NO: 231600 - protein, 80 aa, Zea mays
  Clone ID: MRT4577_142816C.1.pep
SGPSCRIVLNMGEGQAIEHTNHAPKHLTHNDHCLAKGVNWLWVFNHRNILNHLALLFDKRHGLPLETLLEPFAADLYITA

SEQ ID NO: 231601 - protein, 205 aa, Zea mays
  unsure (1)..(205): unsure at all Xaa locations
  Clone ID: MRT4577_142817C.1.pep
KSDVLVELYMYWIVCLHGVPKKIVSDRGTXFTSYFWQQLHEALGTHLKFSSAYYPQTDGQTERTNQILEDMLRACAFQDKLGWDKRLRYAEFSYNNSYQASMKMSPFQALYGRNCRTPLHWDQPSERQVFSPDILLEAEENIRMVRENLKTAQSRQXCYADTRIRELSFEVGDYVYLKVSPIRGIKRFGVKRQLVPRYIGPYQIQ

SEQ ID NO: 231602 - protein, 496 aa, Zea mays
  Clone ID: MRT4577_142818C.1.pep
MAAVSPPAGGRIDDVFPTWRKSNIRVCPVTFPADGGGGGATMAKFSFDPPSDPASVDAFIKAYPNLPGYHIWSTWDRLTAVSTYGPPGSEEDDEPGSGWDFFGLGDPSAMQDFMTACDYCLSDCSDDGHNLDDEDCGPSRECFHVDLGGLDEGNHFGMPEDGDPPRPAPHVDILQELAVVPVPAGGQDAQLEQIREMQARLDEEAGQLVQLRQNIGQEWAGRAPAGEARHLAQDVQHRIANDARARLPPASSGVSQNLAAAGILLRAMPEPSTTEGRRIQGELKNLLEGAAVRRAESSASRRQGYPPEHRAVTSRFMREASVHTGRTRNTAPAAPGRLGNEHHRRDRRAHLDEKLGGTDDDNLIIRNLPLFLTDAARARLEHLPPAQISNWDNLVKAFAGNFQGTYVRPGNSWDLQSFRQLPGESLRDYIRRFSKQRTELPNITDSDVIDAFLAGTTCRDLVSVAELPELFQLKCLSPALEARPHLNGNNPSIPRI

SEQ ID NO: 231603 - protein, 66 aa, Zea mays
  Clone ID: MRT4577_142819C.1.pep
KKCWVGPKSHPHLKKGGTGTPRGNTRCRPLERNVKTHPKEKENVTVCVPLKEHLSTALLTPKICPI

SEQ ID NO: 231604 - protein, 304 aa, Zea mays
  unsure (1)..(304): unsure at all Xaa locations
  Clone ID: MRT4577_14281C.1.pep
SARSRYRXFAVDLLGFGRSPKPAESLYTLREHVEMIERSVLRRYRIGSFHVVAHSLGSVLALALAVKYPAAVRSLTLLAPXVRVHLSDVMTXTTCHVNCKRARARADDWLFVGVTXGATSCCVGLCCVCXPYFPVPESESESAAQYVMRRVAPRRVWPPIAFGASMACWYEHVSRTICLTICRHHRVWDRLFRIFTRNRVRTFLIEAFMCHTHNAAWHTLHNIICGSAGRMGAYLDAVDRGLSCKVAFFHGRDDELLPVECTLAAGARVPRARVTVYDRKDHITIVVGQERLFAAELEAIWRAD

SEQ ID NO: 231605 - protein, 1885 aa, Zea mays
  unsure (1)..(1885): unsure at all Xaa locations
  Clone ID: MRT4577_142820C.1.pep
MPEPSTTEGRRIQGELKNLLEDAAVRRAESSASRRQGYPSEHRAATSRFMREASVHTGCMRNTAPAAPGRLGNEHHHRNRRAYLDERVRRGYHPRREGRYDSGEDRSPSPEPPGPQAFSRAIRRAPFPTRFRTPTTITKYSGETSCRQQPRESLRDYIRRFSKQRTELPNVTDSDVIGAFLADTTCRDLVSKLGRKTPTRASELMDIATKFASGQEAVEAIFRKDKKKGKKKSQAKHDAADANLVAAAEYKNPRKPPGGVNLFDKMLKESCPYHQGPVKHTPEECVMLRCHFHKAGPPAEGGRAHNNDKKEDHKAEEFPEVHDCFMIYGGPVANASARHRKQERREVCSVKVAALVYLDWSDKPITSDQGDHPDRVPSPGKYPLVVNPVIGNVRLTKVLMDGGSNLNIIYAETLGLLWIDLSLIRAGAAPFHGIIPGKRVQPLGQLDLPVCFGTPSNFRRETLTFEVVGFRGTYHAVLGRPCYAKFMAVPNYTYLKLKMPGPNGVITVGPTYRHAYECDVECVEYAEALAESEALIADLKSLSKEAPDVKRHADNFEPAEMEAVLVDFLRANAEVFAWSPSDMPGIPMDVAEHSLDIRAGARPVKQPLSRFDEEKRRAIGEEIHKLMAVGFIKEVFHPEWLANPVLVRKKGGKWRMCVDYTGLNKACSKVPYPLPRIDQIMDSTAGCETLSFLDAYSGYHQIRMKESDQLATSFITPFGMYCYVTMPFGLRNAGATYQRCMNHVFGEHIGRTVKAYVDDIVVKTRKASDLLSNLETTFRCLKAKGVKLNPEKCVFGVPRGMLFGFIVSERGIEANSEKIAAITNMGPIKDLKGVQRVMGCLTALSRFISRLGERGLPLYRLLRKTERFTWTPEAGEALGNLKALLTNAPILVPPAAGEALLIYVAATTQVVSAAIVVERREEGHALPVQRPVYFISEVLSETKIRYPQIQKLLYAVILTRRKLRHYFESHPVTVVSSFPLGEIIQYREASGRIAKWAVEVMGETISFAPRKAIKSQVLADFVAEWVNTQLPTAPTQPELLTLFFDGSLMKTGAGAGLLFISPLGKHFRYVLRLHFPASNNVAEYEALINGLRIAIELGVRRLDARCDSQXCHLPSHEELPLPRPEDGSLLRXEVRCLEDKFYGLEAVAFFTNIIHRFGVPNSIITDNGTQFTGRKFLDFCEDHHIRVDWAAVAHPMTNGQVERANDMILQGLKPRIYNDLHKFGRRWMKELPSVVWSLRTTPSRATGFAPFFLVYGAEAILLTDLEYGSPRTRAYDDQSNRTNREDSLDQLEEARDMALLHSARYQQSLRRYHARGVRSQDLQVGDLVLRLRQDARGRHKLTPPWEGPFVIAKVLKPETYKLANSQGEKRSFCQNVFRAFRLLRKWDPENDGVHANRSCRLRRRWRGSSSTLGVDSTFGEVRPSLGQQHGRRISAPKDDISTTPGPSPPGSLPGTQPEQTARPAASKHQPAVPRGHQPGSWPRQLDSGAGPASGRPGQAPADEVRTTPHIGGPAGRRNPRRLTTARSGSSDNDFRSGRPNNSNDDLRADAAVTRPSPTSPPEGRGHAEGRRVGGHSVGGADYLVGGETSSGCLGRKEPKPPRAGRTTAQRLQAFLHYRPDQRVKGRTAMQAACNRTKGAHPFDFDASSMEAQAHTSCNRRAGYYVQETAPPLAPVPRLLDCGTGATTRGDPAHDPTVPTEHIGHGSVSRGRRRDGRYGQKWADSNGGGRRAEAADRWHLWQAKQATLHLRHNDRVKKGTGKGDTPKGILLREGSGPRAPLLIRGSKAGPSEGFNSRLRALGLRAHYWSEVRRLAPQKGSTAASGHSGSAPTTDQGFVGWPPKGSDSRLRARRARDDPGYVRYITKARATFPRYPRTFPRPTGTIL

SEQ ID NO: 231606 - protein, 57 aa, Zea mays
  Clone ID: MRT4577_142821C.1.pep
CRTRWWMLCFNNMSYLLVDVMFQYYVVLVGGYFNYKCMCLCLNACVCGCCISKCMCL

SEQ ID NO: 231607 - protein, 649 aa, Zea mays
  unsure (1)..(649): unsure at all Xaa locations
  Clone ID: MRT4577_142822C.1.pep
MPFGLRNAGATYQRCMNHVFGEHIGRTVEAYVDDIVVKTRKASDLLSDLETTFRCLKAKGVKLNPEKCVFGVPRGMLLGFIVSERGIEANPEKIAAITDMGPIKDLKGVQRVTGCLAALSRFISRLGERGLPLYRLLRKAECFTWTPEAEEALGNLKALLTNAPVLLPTAPIQPELWTMFFNGSLMKTGAGAGLLFISPLVKHLRYVLRLHFPASNNVAEYEALVNGLCIAIELGVRRLDARGDSQLVIDQVMKNSHCRDPKMEAYCNEVRRLEDKFYGLELNHIARRYNETADELVKIASGRTTVPPNVFSQDLHQPSIKIDDAPEPEKASAQPEAPSAQPEVPSAQPEAPSARPEAPSAPEGEALRIEEERSGVTPNRNWQTPYLQISTEESYPSTEPKLGGWCGAPSRSSCWGTGRSSTTAAPQASSSDAYPSPKARSSYKRYTRGLAVITQRLEPLLETPSDKKAPRGYTHLLVAIDKFSKWIEVRPLNNIRSEQAVAFFTNIIHRFGVPNSIITDNGTQFTGRKFLDFCEDHHIRVDWAAVAHPMTNGQVERANGMILQGLKPRIYNDLNKFDMRWMKELPSVVGDLVLRLRQDARGRHKLTPPWEGPFVIAKVLKPGTYKLANSQGEVYSXLGTSDSYVASTL

SEQ ID NO: 231608 - protein, 92 aa, Zea mays
  Clone ID: MRT4577_142823C.1.pep
LVLLCAGAQYVGPQQLRNRQSPYHRSYQATNKNYSRNHNTKKTIVGACLIGPKSIVRSTSCYRLRNTIVTHRLSVDNPSIGNQTQVISMSST

SEQ ID NO: 231609 - protein, 1434 aa, Zea mays
  unsure (1)..(1434): unsure at all Xaa locations
  Clone ID: MRT4577_142824C.1.pep
MSGIILAPETTTGVASQQRANPRRTNDASTLARDLLGISLAPKITVHSIPNATSPPSINQEVTSISHHVPFRFSFDPPSDPTSANAFARAYPDLPGYHMWSTWDLLAAASTSGPVGSEEEDDPDFSWDFFGLSDPSAMRDFMSACDHCLSGYSDDGHNLDDEGYGPSHECFHIDQGDHDEDNHLGMPENDDAPVPASGVEIPRELAVVRVPAGGQGTQLEQLREMQAKLDEETGRLVQLRQNIEQDWAGRALAGGARHRARDVQRRIIDDARAGLLPAFSGAGHNLATEAMLLRTMPEPSTTEGQRIQGELKDLLENVVVRRVESSAPRRHGSPSEHHAASSRRMCEASVHTEHTGDMTSSARDRLGDEQHRRDRRASLEEKVHRGYHPMRGGRYDSEEDQSPSPKPPGPRVFSRAIRRAPFPARFRAPTTITKYSGETRQELWLTDYQLVCQLGGTDDDNLIICNLPLFLSDAAQAWLEHLLPAQIFGWDDLVKAFAGNFQGTYVRPRNSWDLRSCRQQPGESLREYIRRFSKQCTELPNITDSDVIGAFLAGTTYRDLVSKLGRKTPTKASELMDIATKFASGQEAVEAIFRKDKQPQGRQKEDVPEASVQRGTKKKTRKKAQAKCNAIDADFVADAEHRNPRKLPGGXANMFDKMLKESCPYHRGPVKHTLEECDMLRRYFNKVGPPAEGGKDQGNNKKXGNKEEEFLEVHNCFMIYDGQVANASARHHKQERREVCSVXGRYPLVVDPVIDNARLSKVLMDGGSNLNIIYAETLGLLGVDLSTIRAGAAPFHGIVPGKHETLTFKVVGFRGTYHTVLGRPCYAKFMVVPNYTYLKLKMPGPKGTITVGSTYRHAYEYDVECVEYTEALTEFEALAEFEALIADLDCLSKEAPDAKRHASNFEPAEAVKSVSLDPSNDASKKEAVXRLSPRKRRNFCVESLGHARHTEGCXTEHSLDIRAGARPMKQHLHRFDEEKRRAIGEEVHKLMAAGFIKEVFHPEWLANPVLVRKKVGNGGCATYQRCMNHVFGEHIGRTVEAYVDDIVVKTRKASDLLSDLEVTFRCLKAKSVKLNPEKCVFGVPRGMLLGFIVSERGIEANPEKIAAITNMGPIKDLKGKGLPLYRLLRKAERFTWTPEAEEALRNLKALLTNAPILVPPASETQVVSAAVVVERQEEGHALLIQRPVYFISEVLSETKIRYPQIQKLLYAVILTRRKLRHYFESHPVTVVSSFPLGEIIQCREASGRIAKWAVELMGETLSFAPRKAIKSQVLADFLAEWVDTQLPTAPIQAELWTMYFDGSLMKTGASAGLLFISSLGKHVRYVLRLHFPASNNVAEYEALVNGLRIAVELGVRRLDACGDSQLVIDQVMKNSHCRDKKMEAYCDEVRCLEDKFYGLELNHVARRYNETADELAKIASGRTTVPPNVFLKVA

SEQ ID NO: 231610 - protein, 41 aa, Zea mays
  unsure (1)..(41): unsure at all Xaa locations
  Clone ID: MRT4577_142825C.1.pep
VGIGSASVGXGXEVVVVIVKHSRSWLGMALHVTVKQYVIMS

SEQ ID NO: 231611 - protein, 656 aa, Zea mays
  Clone ID: MRT4577_142826C.1.pep
MAADNPPTGGGINDVFPHVAEEQHSGGPGEGNHLGIPENGDPPRPAPRVDILWELAVVPVPAGGQDSQLEQIHEMQARLDEGAGTLEPFRRDIGQEWAGQPPAREARHLPQGIQPRIADDVRARPPPASSGVGQNLAAAAILLRAMPEPSTTEGRRIQGELKNLLEDAAVRRAESSASRRAWLEHLPPGQISNWDDLVQAFAGNFQGTYVRPGNSWDLRSCRQQPGESLRDYIRRFSKQRTELPNVTDSDVIGAFLAGTTCRDLVSKLGRKTPTRASELMDIATKFASGQEARGTKKKGKKKSQVKRDATDADLVAAAEYKNPRKPPGGANLFDKMLKESCPYHQGPVKHTLEECSMLRRHFHKAEPPAKGGRAHNNDKREDCKAEEFLEVHDCFMIYGGQVANASARYRKQECREVCSVKVAVPVYLDWSDKPITFDQGDHPDRVPSPGKYPLVVDPVIGNVRLTKVLMDGGSSLNIIYAETLGLLRIDLSSVRAGEAPFHGIIPGKRVQPLGQLDLPVCFGTPSNFRRETLTFEVVGFRGTYHAVLGRPCYAKFMVVPNYTYLKLKMSGPNGVITVGPTYRHAYECDVECVEYAEALAEPEALIANLESLSKEAPDVKRHAGNFEPAETVKSVPLDPSNDASKQIRIGSKLDPK

SEQ ID NO: 231612 - protein, 153 aa, Zea mays
  unsure (1)..(153): unsure at all Xaa locations
  Clone ID: MRT4577_142827C.1.pep
RGGGFFFFFWGFFFFFFVCFFFFFFFFFFFFPPQKAGTKNTGQTKTGTGGGGNPKLGNPGQKPKKGGWAGQNPRPGVPNSHKGGPPKKAGKGHPREPPIIKRAKSGGSRPPKGGGRXGRGPPFRGPGGGPPRPLPSQGAGPPKFNGFPFQGNP

SEQ ID NO: 231613 - protein, 1313 aa, Zea mays
  unsure (1)..(1313): unsure at all Xaa locations
  Clone ID: MRT4577_142828C.1.pep
MRYFMTACDYCLSDCSDDGHNLDNEGCGPSRECFHVDLGGLDEGNHLGMPEDDDPPRPAPHVDILRELAVVPDPAGGQDTQLEQIREMQAKLDEEAGQLVQLRQNIGQEWAGRALAGEARHRAQDVQHRIADDARARLPPASTSVHTGRTRDATPATSGRLGNKHHRRDHRAHLDEKVHRGYQPRRGGHYNSGEDRSPSPEPPGPQAFSRAIRRAPFPTRFRAPTTITKYSRETRPELWLADYRLACQLGGTDDDNLIIRNLPMFLFDAARDWLEHLPPAQISSWDDLVKAFARNFQGTYRTELPNITDSDVIDAFLAGTTCRDLVSKLGRKTPTRASELMDIATKFASDLVAAIEQRNPRKPPGGANLFDKMLKESCPYHQGPVKHTLEECVMLRRYFHKAGPQAEGGRGHDNDKKEGNKAEEFPEVHDCFMIYGGQVIDLSMIRAGAAPFHGIIPGKRVQPLGQLDLPVCFGTPSNFRNETLTFEVVGFRGTYHAVLGRPCYAKFMAVPNYTYLKLKMSGPNGVITVGSTYRHAYECDVECMEYAEALAESEALIADLECLSKEXVKSVPLDPSNDASKXSGSAPSSTPXEAVLVDFLRANAEVFAWSPSDMPGIPRDVAXEHWLDIRAGARPVKQPLRRFDEEKRRAIGEEIHKLMAAGFIKEVFHPEWLAKPVLVKKKGRKWRMCVDYTGLNKACPKVPYPLPRIDQIVDSTAGCETLSFLDAYSGYHQIRMQESDQLATSFITPFGMYCYITMPFGLRNAGATYQRCINHVFGEHIGRTIEAYVDDIVVKTFKCLRAKGVKLNPEKCVFGVPRGMLLGFIVSERGIEANPEKIAIITNMGPIKDLKGVQRLRHYFESHLVTVVSSFPLGEIIQCREASGRIAKWAVEIMGETISFAPRMAINSQVLADFVAEWVDTQLPAAPIQPELWTMYFDGSLKKPGAGAGRLFISPLGKHLRYVLRLHFPASNNVAEYEALVNGLRVAIELGIRRLDTRGDSQLVIDQVMKNSHCCDPKMEAYCDEVRRLEDKFYGLELNHVARRYNETVDGLAKIASGRTTELLQEIHSGXVVITQHLEPSLETPSDKVSTGQPRWPTPLGLYAPAKGVNSTQGRHTCPLRPCKQYPSPGRLLYGIWTXRGPLQKAPGGFTHLLVAIDKFSKWVEVRPLNSIRKFLDFCEDHHIRVDWAAVAHPMTNGQVERANGMILQGLKPRIYNDLNKFGKRWMKELPSVVWSLRTTPSRATGFTTFFLVYGAEAILPTDLEYGSPRTRAYDDRSNQTSREDSLDQLVEARDMALLHSARYQQSLRRYHA

SEQ ID NO: 231614 - protein, 60 aa, Zea mays
  Clone ID: MRT4577_142829C.1.pep
TNRWYSLTPFDACFYLVTTKTITALIGVSIQSNLPPFKRTKPPSKLIQKNLQGGCLTGLT

SEQ ID NO: 231615 - protein, 127 aa, Zea mays
  Clone ID: MRT4577_14282C.1.pep
MPINPPPPPPPGWGSSAPGGPSNFPPPFHLQKHHPHPKMPPPMGGSSYQQYQKQLHQGHQLFQGDAQTITPKALQSAKVALPTRNVLNPAAAENARPPNPSTRKKPIPRRVAGQSGEDPTLTDWPEN

SEQ ID NO: 231616 - protein, 1170 aa, Zea mays
  unsure (1)..(1170): unsure at all Xaa locations
  Clone ID: MRT4577_142830C.1.pep
MGSLQQPLRPGTVLRFGSLEFMSFDGSYDMILLPPPCDNDNGGRQPARRRRNRRHLPRVVEEQHSSSLRPLPCQRRRRRGNQGQAGGRASSAVERIDAPDAQTEGTLGVDLAFETKASVVPPRHADPEQEDDASALAKSLQDVALVPEMTAQPVPDVTTSLRVDQKVLTNSHLTSFRLGLNPPSNLALAGALIEASATPLGFRMRSPWDRLTDVSTYGPSGSEEDDDPSICWDFSGLGNPSATRDFMTACNYCLSNCSDGSRSLNDESCGPSRECFHIEIGDPSEGNHLGMPEDGDLPRPAPRADIPRELAVVPVPAGGYDPQLEQVREAQARLDEGTGALEPIRRDVGRVWAGQPPAGEIRHLPQGXRPPPASSGVGQNLAAAAMLLLAMPEPSTTEGQRIQGELKDLLEGAAARRAESTASXRQGYPSEPHAATSXFMREASVYTGRTRNTAPAAPGHLGNEHHRRDRRAHLDERXAEATTPGVGGATTTGRIGVPRPNHPGTYVRPGNSWDLRSCRQQPGESLRDYIRRFSKQRTELPNITDSDVISAFLAGTTCRDLVXEAVEAIFRKDKQPXGRPSEEAPKASTPRGAKKKGKKKSQSKRDAADADLVAAAEYKNPRKPPXGGANLFXDKMLKEPCPYHQGPVKHTLEECVMLRRHFHRAGPPAEGGRAHDDDKKEDHQAGEYLEVRDCFMIYGGHAANASARHRKQEHREVCSVKVAAPVYLDWSDKPITFDQADHPDHVPSPGKYPLVVDPVIGNVRLTKVLMDGGSCLNIIYAETLKLLRVDLSSVRAGAAPFHGIIPGKRVQPLGQLDLPVCFGTPSNFRRETLTFEVVGFRGTYHAVLGRPCYAKFMAVPNYTYLKLKMSGPNGVITVGPTYKHAFECDVECVEYAEALAESEALIADLENLSKEVPDVKRHAGNFEPAETAVAFFTNIIHRFRVPNSIITDNGIQFTGKKFLDFCEDHHIRVDWAAVAHPMSNGQVERANGMILQGLKPRIYNGLNKFGKRWMKELPSAVWSLRTTPSRATGFTPFYLVYGAEAILPTDLEYSSPRARAYTEQSNQASREDSLDQLEEARDKALLHSARYQQSLRCYHARGVRSRDLQVGDLVLRLRQDARGRHKLTPPWEGPFVIAKVLKPGTYKLTNNQGEIYGNAWNIKQLRRFYP

SEQ ID NO: 231617 - protein, 87 aa, Zea mays
  Clone ID: MRT4577_142831C.1.pep
ACTSAPAAHGPGPCEGGRPFWCPRRRTSRSVVRPTGSVIHRSCCRGRELAALQAGRQPSYSAPPPRFARRRSHLPPVLVTPSSHRST

SEQ ID NO: 231618 - protein, 2174 aa, Zea mays
  unsure (1)..(2174): unsure at all Xaa locations
  Clone ID: MRT4577_142832C.1.pep
MGSLQQPLQPETLLRFGSLEFMSLDGSYDMVLLPPQRDSGNDGHQPARRRRTRRRLPPVAEEQHPGLSCHLPCRRRRRRGNRGQAGGGTSSAVERVDDVGTPAVDMSGVDLAPETTASVVSPQHANPKRTNDASTLMEDLLGVSLVPEITVQSVPDATSSPSIDREVPSVFHPVPFRFSFDPPSDPASEEDEPDSGWDFSGLGNPSAMRDFMIACDYCLSDCSDDGHSLDDEGCGPSHECFHVNLGGHDEGNHLGMPEDDDPPGHAPRVDILRELAVVPVPVGGQDTQLEQIREMQVKLDEEAGQLVQLRQNIEQEWAGRALAGEARHQARDDQRRIADDARARLPPASSGISNWDELVKAFAGNFQGTYVRPRNSWDLQSYRQQPGESLRDYIRQFSKQHTELPNITDSDVIGAFLAGTTCRDLVSKLGRKTPTKANELMDIATXDKQPQGRQQEXVPEASAQRDTKKKAKKKSQAKHDAADTDLVAAAEHRNPRKPPGGANLFDKMLKESCPYHQGPVKHTLKECVMLRRYFHKAGPPTEGGKGQDNDKKEGGKAEEFPEWRTPRLRKQERREVYSVKVAAPVYLDWSNKSITFDQGDHPDCVPGPGKYPLVVDPVIGHTRLTKVLMDGGNNLNIIYAETLRLLEIDLSTIRAGAVPFHGIIPGKRVLPLGQLDLPVCFGTPSNFRKETLTFEVVGFRGTYHAVLGRPCYAKFMAVPNYTYLKLKMSGPNGVITGGSTYRHAYECDVECVEYAEALAESEALIADLECLSKEVPDAKRHADNFEPAEAPLRRFDEEKRRAIGXDPQADGCRXIKEVFHPEWLANPVLVKKKGGNWRMCVDYTGLNKACSKVPYPLPRIDQIMDSTAGCETLSFLDAYSGYHQIKMKESDQLATSFITPFGMYCYTTMPFGLRNASATYQRCMNHVFGEHIGRTVEAYIDDIVVKTRKAFDLLSGLETTFKCLRAKGVKLNPEKCVFGVPRGMLLGFIVSERGIEANPEKIAAITNMGPIKDLKGVQRVMGYLAALSRFISRLGEKGLPLYRLLRKTERFTWTPEAEEALGNLKALLSNAPILVPPAAGEALLIYVVATTQVVSVAIVVERREEGHALLVQRPVYFISEVLSETKIRYPQIQKLLYASHLVTMVSSFPLGEIIQCREASGRIAKWAVEIMGETILFAPRKAIKSQVLADFVAEWVDTQLPTASIQPELWTMYFYGSLMKTGADAGLLFISPLGKHLCYVLRLHFPASNNVAEYEALVNGLRIAIELVVRRLDARGDSQLVIDQVMKNSHCRDPKMEAYCDEVRCLEDKFYGLELNHVARRYNETADELAKIASGRTTVPPNVFSRDIHQPFVKTDDTPEPEEALAQPEGASAQPEVSSAAEGKTLRVEGERNGVTPNRNWQTTYLQYLHRGELPLDKAEARRLARCTKSFVLLGDEKELYHRSPSGILQRCISVAEGQELLQEIHSGACGHHTAPRALVGNAFRQGFYWPTAVADATRIVRSCQGCQFYARQTHLPAQALQTIPITWSFVVWGLDLVGLLQKAPGGFSHLLVAIDKFFKWIEDLQRSQQVRQAMDEGATLGGLESEDDAKPSHGFLAVLSSLWGRGYLAHRLRIRFPEDEGVRRPKQPDQPRRLTGPAGRGSGHGLTTLGAVSAVSTTLPRPRGSAPRLPGGRLGTSAAAGRPRAPQTYSSLGRAVHHRQDFEAWIKARSTTTLGTSDSYVAFTLKMFSSRSYTSFSIHTQIKSNRQGRVQTSTEGAAAPSASFPPLAGSGPASDGDTGRRISTSKEDASTALGPSQSGCSGLDSHNEQTPTLNVPLQTELRFHSRGYEQPPHRRACGTTNSGWLAGDHCSSSDNDLRLRRLNRSSDDLRANAAVGRPSPTSPHEGRGQAVKAKEPEGKRHLWQAKQASFHLRHDDRVKKGVQRLAPRKGSTAAPEHSGFRLITDQRFEGWPLERVRQPPQSTRAPRPLLIRVSKAGPSKGFDSRPRARRARDDSGYVRYMAEAWATLPRYPRTFPRPAGAILYWNPIRGRHRALGSYRTGPGPANHLQVLLERASGPLADPYRTGHGRLLGSPVSNSLETPCSAPSEGNMALSSLPPCEKVTKGRMIKVETVLDRPLALCRGSGAALANPATAKPLIASTNQPENSEPDHAPGLQSDRMRKQPDRPRHHERH

SEQ ID NO: 231619 - protein, 62 aa, Zea mays
  Clone ID: MRT4577_142833C.1.pep
GRNSSGGPHKCAPCPVMTNIRLCSANMLKKGAGHKVPVPDLQIPGFTSFLIPTSWEPPLNFV

SEQ ID NO: 231620 - protein, 593 aa, Zea mays
  Clone ID: MRT4577_142834C.1.pep
SARHRKQERREVCSVKVAAPVYLDWSDKPITFDQGDHPDRVPSPGKYPLVVDPVIGNIRLTKVLMDGGSSLNIIYVETLGLLQIDLSTIRAGTYHAVLGRPCYAKFMAIPNYTYLKLKMSGPNGCVEYAEALAESEALITDMECLSKEVPDAKRHADNFEPAEAVKSVPLDPNNDASKQAKGVKLNPEKCVFGVPRGMLLGFIVSERGIEANPEKIAVVTNMGPIKDLKGVQRVMGCLAALSRFISRLGERGLPLYRLLRKTEHFSWNPEAKEALGNLKALLTSAPILVPPAAGEALLIYVAATTQVVSAAIVVERREEGHALLVQRPVYFISEVLSETKIRYPQIQKLLYAVILTRRKLRHYFESHPVTVVSSFPPGLIIQCREASGRIAKWAVEIMGETISFTPQKAIKSQVLADFVAEWVDTQLPTAPIQPELWTMYFDGSLMKTGAGAGLLFISPLGKHLRYVLRLHFPASNNMAEYEALVNGLHIAIELGLVIDQVMKNSHCRDRKMEAYCDEKAPRGFSHLLVAIDIFSKWIEVRPLTSIRSEQAVAFFTNIIHRFGVPNSIITDNGTQFTGKKFLEFCEDHHIRVD

SEQ ID NO: 231621 - protein, 241 aa, Zea mays
  unsure (1)..(241): unsure at all Xaa locations
  Clone ID: MRT4577_142835C.1.pep
MGETISFAPRKAIKSQVLVDFVAEWVDTQLPTAPIQPELWTMYFDGSLMKTGAGAGLLFISPLGKHLRYVLRLHFPVSNNVAEYEALVNGLRIAIELGVRRLDARGDSQLVIDQVMKNYHYRNPKMEAYCDEVRHLEDKFYGLELNHVARRXPYLQYLHXGELPLDKAEARRLARRAKLFVLLGDEKELYHRGLSGILQRCISIAEEGTRGLHAPAGRHRQILQVDRDFSPRTRAYDDQSN

SEQ ID NO: 231622 - protein, 58 aa, Zea mays
  Clone ID: MRT4577_142836C.1.pep
SRSRAAPFFVFLKRNFSLLTRIRVRSLLKCPIFIKRPRAVTREFSSGFQSFFNLPFQQ

SEQ ID NO: 231623 - protein, 91 aa, Zea mays
  Clone ID: MRT4577_142837C.1.pep
DAFSQDPRPCLVHPRHALDDVGVSVSCVTALYVLGPLRIQRPYRSIRVGRPHRVIGLSALSGRRHSCVHTFVNVDDNELPERHLVEPAPAE

SEQ ID NO: 231624 - protein, 518 aa, Zea mays
  Clone ID: MRT4577_142838C.1.pep
MVYSEHILYKNRIEKQMNSHAKEDINQDLILHEQNDEKTNSHEAETPVAESGDCDSPSKAIASSENINFQGKVIEVSASSHLETVCSKYDSPSGPNMHKEGSSSGPARISPELEERHHVEVQVKVDTEHHFSVSNANLEISFDGPNPTECDKEISAIGHGSQDYIQSSQSHQLSACAKPWSLDSAKTKSDTVSIQAQLRNQLENAQTYQSNNLSQNMQQQELTMPHNVQTSAQIQDQLLAQPNHRNQQYLQMMQGYATQMGEYYQQQLYYLQAQHNQQMQSLQQQQLPTEHLQQTFMQQVQQLNQQLVLWQQQVQQQPQVVLQQALPVQQLPDEKQGQCPSGDSKHGQNKQQQQAPQMDQQSQQLQQQQLLYLQQQQQMYLIQQQQMYQQQQAQQQQLLQQQLMQQQQYVLQMPQHQQDSVRQQQQQLFEQQQQQMMLLQRQQQHIMQQQIQPYVQQQQNQQGPKDQTYKSNHQDGRNRQMEHGQLSEASQSDGSKLRSGEQSELSYPSTPQSERSNH

SEQ ID NO: 231625 - protein, 233 aa, Zea mays
  Clone ID: MRT4577_142839C.1.pep
MEGLFLIDVSTEDDLLFNLVSPAPRRPDPLHAESLVGAEATSSGVSPSAAVRATDPDCVMEEREDPERTESPEQRKAKKGVNLRKSLAWDSEFFTSEGVLDTEELAIVNSTYRKAQGSRLPGIIEETRRSGESTTSTLESETWAMESLETELFDNVRASIQRSLGKPDKLSGRPVAASNPPKATANAPRVAARKGVDRMPQSKMRAPVSTAKELLADKGPKSPSTSLWLQEII

SEQ ID NO: 231626 - protein, 58 aa, Zea mays
  Clone ID: MRT4577_14283C.1.pep
TRGRWALWASEPSYIIMSSVSLTGWASSASRDTQLGNDGSTPCPRVLVHECSYILYPW

SEQ ID NO: 231627 - protein, 134 aa, Zea mays
  Clone ID: MRT4577_142840C.1.pep
MDAAALLDAFSAAPRHQLRPAAWCRSTRFASQACRATAPFARADWQAACAILASNSTGGAGHDASSNNNAQPAPRVNGQKPPPALEATPTPDELDLVPVSNLPRPLSISDLSPAPMHGSQLRVAYQGVPGAYSE

SEQ ID NO: 231628 - protein, 235 aa, Zea mays
  unsure (1)..(235): unsure at all Xaa locations
  Clone ID: MRT4577_142841C.1.pep
MSTAFSDFGPLTERRRIERQRQQRRRVMLAAGAASVILILIVMGGAAVAYNASIEDDSSSSSSSPSGGGSGSGSNLISASKSVKMMCAQTDYRDACEKSLSKAAANASASSPEDIVRAAVAVIGDALGNAFNRSEVIKSDDPRVKGAVADCREIYHNAKDDLARTLHGIDAGGMAGVTKRGYQLRILLSAGITHMETCIDGFPDGHLKKQMTGTMESXKELTSXNALAIIEKASS

SEQ ID NO: 231629 - protein, 152 aa, Zea mays
  Clone ID: MRT4577_142842C.1.pep
RGGPMPFSPVWPKVPQPGGPLNPVWVSALVALCMGLPFLGSLGGFPALVSLPPVGVVFLVALPFLFRGTLGPKFFVPGPFHLGPFGVLVGWVPLLWGAPLPGVFFLPGRDPGPKGPLNYPPVAGGGPLFLVPGSWVLSPRPWFKGPLPHLGG

SEQ ID NO: 231630 - protein, 59 aa, Zea mays
  unsure (1)..(59): unsure at all Xaa locations
  Clone ID: MRT4577_142843C.1.pep
QKTRYVTNKSINCDLNLIVVSXQCTCFNSCNVNINLHYRYVCFHPDASDSVMHKPSKLV

SEQ ID NO: 231631 - protein, 215 aa, Zea mays
  Clone ID: MRT4577_142844C.1.pep
MATAPVTSSMATNSTCVRLPSMPLRRAPAIVSFASRPWSTAMTSCTGLSRHSDVVAAAGHQKLMGSLNNNEGLMFGVVVARFNEVVTNLLLQGALETFERYSVKAENITVVSVPGSFEVPITAQKLGKSGKFDAILCIGAVIRGDTTHYDAVANSAASGVLNAGLSAGVPCVFGVLTCEDMDQALNRAGGKAGNKGAEAALTAIEMASLFRHHLG

SEQ ID NO: 231632 - protein, 103 aa, Zea mays
  unsure (1)..(103): unsure at all Xaa locations
  Clone ID: MRT4577_142845C.1.pep
FLRPPLPHHPQVPQQPPVPPSSWVPARSVGPAPSPPPHPPPSYSSVPRPXSLPPXRPPRGSGHPXPAPLRPPLPHPASVPSSPIPAVAPCSRSRRSCPPRGGT

SEQ ID NO: 231633 - protein, 174 aa, Zea mays
  Clone ID: MRT4577_142846C.1.pep
MTSCTGLSRHSDVVAAAGHQKLMGSLNNNEGLMFGVVVARFNEVVTNLLLQGALETFERYSVKAENITVVSVPGSFEVPITAQKLGKSGKFDAILCIGAVIRGDTTHYDAVANSAASGVLNAGLSAGVPCVFGVLTCEDMDQALNRAGGKAGNKGAEAALTAIEMASLFRHHLG

SEQ ID NO: 231634 - protein, 70 aa, Zea mays
  Clone ID: MRT4577_142847C.1.pep
FLETQRPREKNPKFGPIFPPQVKKNVGKKAPYLPLIKRAVFCKIMAKTIIITLKKTLGLGFKRSTGGITL

SEQ ID NO: 231635 - protein, 63 aa, Zea mays
  Clone ID: MRT4577_142848C.1.pep
TGKSRHSDVVAAAAHQKLMGSLNNNEGPLFGVAVARFNEAATNLLLQGALETFERYSVKAENI

SEQ ID NO: 231636 - protein, 149 aa, Zea mays
  unsure (1)..(149): unsure at all Xaa locations
  Clone ID: MRT4577_142849C.1.pep
TVNVQVVHLTVRMENWSSYQAIXTAIESASXGPLKGIMGHAXQDMVLTAFLGDSRSSIFKVKAGIALIDRFVKLVQWYHRXSGDSTRVVDMIHHMFKTHVEPFFPHSSHGWWLLVYPENKCGWRVPLGRQAHDEFGHVLPFSFPSCYHL

SEQ ID NO: 231637 - protein, 187 aa, Zea mays
  Clone ID: MRT4577_14284C.1.pep
MYLAYGWPQSIPLDPDNSDRVVLLRLLGRFLLAVCPASLHLWSAAQHRVRLARSDRSPESLSAHGYNAHAVWSPDAKTVAVLTSSFYLYVYKVQHLGKQLIVGGKQVPGLCLASISLIITEKVPLANDVAITSNFVCDNKSMLLGLSNGHVQVMSWNAEVHGNAHFCLFFQTASSLVGSVCSSENLL

SEQ ID NO: 231638 - protein, 53 aa, Zea mays
  Clone ID: MRT4577_142850C.1.pep
LRQGGGVNPVTYLQQQLLACNPLAPPIVPVYQQQQQLQHFMPVLILLAMVNPA

SEQ ID NO: 231639 - protein, 101 aa, Zea mays
  unsure (1)..(101): unsure at all Xaa locations
  Clone ID: MRT4577_142851C.1.pep
MCIRRYLTERASLRKATVTAAAAMTATDLLVGCDMANXDAGLQAHYGVVFEPSQFTAXGGDTITFKNNASSPHNIVFDENXVTSADNATKISQDEYLNETG

SEQ ID NO: 231640 - protein, 77 aa, Zea mays
  Clone ID: MRT4577_142852C.1.pep
QSGATQAKTPNFWGGFPTASNFISSLKFRARVYSTGGSPTSGVEKAFSSRAGYALGPSIGSFGKWGRGAPVFGPSKT

SEQ ID NO: 231641 - protein, 791 aa, Zea mays
  Clone ID: MRT4577_142853C.1.pep
MAAVSPPAGGEINDVFPTWQKNDIRVCPVTSPTDGGGGGATMAKLGNPSAIQHFMTACDYCLSDCSDGSRSFGNEDCGPSRECFHVDLGGPGEGNHLGMPENDDPPRPAPRVDILRELAVVPVPAGGQDAQLEQIREMQARLDEGAGTIEQFQRNIGQEWVDQAPVGEARHLPQGMQHRVANDVRARPPPASSGAGQNLAAAAILLRAMPEPSTIEGRRIQGELKNLLEDAAVRRAESSASRRQGYASEHHAATSRFVREASVHTGRTRNTTPAALGRLGNEHHHRNRRAHLDERVRRGYHLRRGGRYDSREDRSPSPEPPGPQAFSRAIRRAPFPNRFRTPTTITNCRQQPGESLRDYIRRFSKQRTELPNVTASDVIGAFLAGTTCRDLVSKLGRKTPTRASELMDIATKFASGQEAVEAIFRKDKQPQGRQPEDVPEASTQCGTKKKNKKKSQVKRDATDADLVTAAEYKNPRKPPGGANLFDKMLKEPCPYHQGPVKHTLEECVMLRRHFHKAGPPAEGGRAHNNNKKEDYKAEEFPEVHDCFMIYGGPVANASARHRKQERREVCSLKVAAPVYLDWSDKPITFDQGDHPDRVPSPGKYPLVVDPVIGNVRLTKVLMDGGSSLNIIYAETLGLLQIDLSSIRAGAAPFHGIIPGKRVQPLEQLDLPVCFGTPSNFRRETLTFEVVGFRGTYHAVLGRPRYAKFMVVPNYTYLKLKMPGPNECVEYVEALAESEALIADLESFSKEAPDVKRHAGNFEPAETVKSVPLDPSNDASKQILIGSELDPK

SEQ ID NO: 231642 - protein, 641 aa, Zea mays
  Clone ID: MRT4577_142854C.1.pep
MPFGLRNAGATYQRCMNHVFGEHIGRTVEAYVDDIVVKTRKASDLLSDLEATFRCLKAKGVKLNPEKCVFGVPRGMLLGFIVSERSIEANPEKITAITSMGPIKDLKGVQRVTGCLAALSRFISRLGERGLPLYRPLRKAECFTWTPEAEEALGNLKALLTNVPILVPPAAGEALLIYVAATTQVVSAAIVVERREEGHALPVQRPVYFISEVLSETKIRYPQIQKLLYAVILTRRKLRHYFESHPVTVVSSFPLGEIIQCREASGRIAKWAVEIMGETISFAPRKAIKSQVLADFVAEWVDTQLPIALIQPELWTMFFDGSLMKTGAGAGLLFISPVGKHLRYILRLHFPASNNVAEYEALVNGLRIAIELGVRRLDARGDSQLVIDQVMKNSHCRDPKMEAYCDEVRCLEDKFYGLKLNHVARRYNETADELAKIASGRTTKAPGGYTHLLVAIDKFSKSIEVRPLNNIMSEQAVAFFTNIIHRFGVPNSIITDNGTQFTGRKFLDFSEDHHIRVDWAAVAHPMTNGQVERANSMILQGLKPRIYIDLNKFGKRWMKELPSVSLRRYHTRGVRSRDLQVGDLVLRLRQDARGRHKLTPPWEGPFVVAKVLKPGTYKLANSQGEVYSNAWNIRQLRRFYP

SEQ ID NO: 231643 - protein, 133 aa, Zea mays
  unsure (1)..(133): unsure at all Xaa locations
  Clone ID: MRT4577_142855C.1.pep
KNVYIFNNLQEKCCFVSLLIIVWQQLPKYIWASSVPPGRVPGCRILGSAIACSSRVVVHLANHNEHTALGAKTTTWKQSQGLATQIGLLNHHERTLLPARAASMGEMRSFPAISALAVVVVPPIGSSWLVXXP

SEQ ID NO: 231644 - protein, 246 aa, Zea mays
  Clone ID: MRT4577_142856C.1.pep
MPFGLRNAGVTYQRGMNHVFGEHIGRTVEAYVDDIVVRMRKASDLLSDLEVSFRCLKAKGVKLNPEKCVFEVPRDMLLGFIVFERGIEANPEKIAAITSMGPIKDLKGVQRVMGCLVALSRFISRLGERAPRALIGNAFRQGFYWPTVVADATRIVRTCEGCQFYARQTHLPAQALQTIPITWPFAVWGLDLVGPLQKAPGGYTHPWEGLFVIAKVLKPGTNKLADSQGEVYTNTWNIQQLRRFYP

SEQ ID NO: 231645 - protein, 113 aa, Zea mays
  unsure (1)..(113): unsure at all Xaa locations
  Clone ID: MRT4577_142857C.1.pep
VVIPAEQDMVTEDSLPGRNNLIVVFIDTLSMDVPLPXLLLGQYYLNVCDVPDXIIPDDSRILLKAWSLRHQSCYWKLKNEFVPERFLXGDIAGGIELKTKQFQFRSFISSLMI

SEQ ID NO: 231646 - protein, 925 aa, Zea mays
  Clone ID: MRT4577_142858C.1.pep
MGSLQQPLQPGTVLRFGSLEFLSLDDSYDMILLLPPRDSDNGGRQPTRRRRNRRRLPHMVEGRHSGLSRPLPHRWRRKQGNQGQAGDDTSLAVERVDGAGAPTGRASGIDLASETKTSTVSPQHINLKQTDDASMLAKDLLGVTLVPETTVQSVIDVTSSPPVDQKVPTDSHLTSFGFGLDPPSNSASVDTLIEASPNPLGYRVRSPWDRLTANSTYGPSGSEEDGEPDLCWDFSELGNPSAMQDFMTACDYCLSDCSDGSHSLDDEDCGPSRECFHVDLGGPGEGNHLGMPENSDPPRPVPRVDILRELAVVPVPAGGPDPQLEQIREMQARLDEGAGTLVPIYRDIGQEWAGQPPAGEARHLPLGIQHRIADNVRVRPPPISSGVGQNLAAAAVLLRAMPEPSTTEGRRIQGELKNLLEDAAIRRAESSASRRQGYPSEHRAATSRFMRETSVHSGRTRNTAPAAPGRLGNEHHHCSRRAHLDERVRRGYHPRRGGRYDSREDRSPSPEPPGPQAFSRAIRRAPFPTRFRTPTTITKYSGETRPELWLVDYRLACQLGGTDDDNLIIRNLPLFLSDTARTWLEHLPPGQISNWDDLVQAFAGNFQGTYVRPENSWDLRSCRQQPGESLRDYIRRFSKQRTELPYVTDSDVIGAFLAGTTCRDLVSKLGRKTPTRASELMDIATKFAFGQEAVEAIFRKDKQPQGRPPEDVPEASTQRGTKKKGKKKSQAKRDAADADLVAAAEYKNPRKPPGGANLFDKMLKESCPYHQGPVKHTLEECAMLRRHFHNTGPPTEGGKALDDAKKEDHKAGEFPASGPFRGTYHAVLGRPCYAKFMAVPNYTYLKLKMSGPNRVITVGPTYRHAYECDVECVEYAEALAESEALITDLKSLSREAPDMKRHAGNFEAAETVKSVPLDPGNDASK

SEQ ID NO: 231647 - protein, 109 aa, Zea mays
  unsure (1)..(109): unsure at all Xaa locations
  Clone ID: MRT4577_142859C.1.pep
MVSENGHTGRDNVIVVSIDTLSMDVPLLLVLGQYYLNVCDVADXIIPDDSRILLKAWSLRHQSCYWELQNEFVPERFLSGNIAGGIELKTKQFQFLSFRSSLMIFLGVK

SEQ ID NO: 231648 - protein, 230 aa, Zea mays
  Clone ID: MRT4577_14285C.1.pep
MYLAYGWPQSIPLGPDDSDRVVLLRVLGRLLLAVCPASLHLWSAAQHRVRLARSDRSPESLSAHGYNAHAVWSPDAKTVAVLTSSFYLYVYKVQHLGKQLIVGGKQVPGLCLASISLIITEKVPLANGVAITSNFVCDNKSMLLGLSNGHVQVMSWNAEFSDSFKLGCSVCSSEKPTAVIDALVFDPPSLRDNSNARPAPCCTGNSSIVHVELSVKLRLLVALYSCRIAL

SEQ ID NO: 231649 - protein, 385 aa, Zea mays
  Clone ID: MRT4577_142860C.1.pep
MAHRTVRCTPDMSGAPATSSVPLEIDRWSSDFWARLDVRWRTGHALFTVRCAGMGDSDFCARCARIKCRRRIIRTCEGCQFYAKQTHLPAQALQTIPITWPFAVWGLDLVGPLQKALGGYTHLLVAIDKFSKWVEVRPLNSIRSEQAVAFFTNIIHRFGVPNSIITDNGTQFTGRKFLDFCEDHHIRVDWAAVAHPMSNGQVERANGMILQGLKPRIYNDLNKFGKRWMKELPSVVWSLRTTPSRATGFTSFFLVYGAEAVLPTDLEYGSPRTRAYDDQSNQASREDSLDQLEEARDKALLHSARYQQSLRRYHARGVRPRDLQVGDLVLRLRQDARGRHKLTPPWEGPFVIAKVLKPGTYKLANSQGEVYGNAWNIQQLRRFYP

SEQ ID NO: 231650 - protein, 495 aa, Zea mays
  Clone ID: MRT4577_142861C.1.pep
MSQEAPSLPYPKLTQATGNKTGVPSGSLRELLGNSWDLRSCRQQPGESLWDYIRRFSKQRTELPNITDSDVIGVFLAGTTCCDLVSKLGHKTPTRASELMDIATKFASGQEAVEAIFRKDKQPQGRPPVDVPEASTQRGAKKKGKKKSQAKRDAADADLVAAAEYKNPRKPPGGANLFDKMLKEPCPYHQGPVKHTLEECAMLRRHFHRAGPPAEGGRARDDDKKKDHKAGEFPEVRDCFMIYGGQVANASARHRKQERREVCSVKVAAPIYLDWSDKPITFDQDDHPDRVLSPGKYPLVVDPVIGNVRLTKVLMDGGSSLNIIYAETLGLLRIDLSSIRAGAAPFHGIIPGKRVQPLGRLDLPVCFGTPSNFRRETLTFEVVGFRGTYHAVLGRPCYAKFMAVPNYTYLKLKMLGPNGVITVGPTYRHAYECDVECVEYAEALIADLESLSKEAPDVKRHAGNFEPAETVKSVPLDPSNDASKQIRIGSELDPK

SEQ ID NO: 231651 - protein, 105 aa, Zea mays
  unsure (1)..(105): unsure at all Xaa locations
  Clone ID: MRT4577_142862C.1.pep
MAVITPSWSSRSGTLVASDSVLRFAFENLYLQCGLSGTVRIRGAKSISXXSFMWGGVSSGGTSVTAFVRGEDVVYTGKLMQVMGAGIRKEDRTWFIHGVVDARHN

SEQ ID NO: 231652 - protein, 217 aa, Zea mays
  unsure (1)..(217): unsure at all Xaa locations
  Clone ID: MRT4577_142863C.1.pep
LGTSRPAGKKIQKKKKKKKKKKKKKKKKKKKKKKKKKKKKKKKIPRPFSKAPETKARFRGGGFGNPRRGKKLFTGFKGPTPGRAKGFAPKKRVGAAPNTNRGGGLIRGKGAPMGFFGRERPPLRALKPIWWGGGSGLRDFNWGTRAQGGGKTSKINPFPKAVPRGFAPNNKKNFNRAPKKGVRXIFPREKRTLFGGKPKGLKPKKFRGSGPPPKFQK

SEQ ID NO: 231653 - protein, 993 aa, Zea mays
  Clone ID: MRT4577_142864C.1.pep
MVLRFGGLEFMSLDGSYDMVLLPPQRDSNNGRRLAQQRRTRRRLPPVVEEEHSGLPHHPPRRRRRRRGNRGHAGGGTSSAVGPERVDDTGTPAGAMSGVVLAPETTTGVASPQHANPKRTDDASTLAKDLLGVSLVPEITVQSVPDVTSPPSIDQEVPSIFHPVPFRFSFDPPSDPASEDDDSDFGWDFSGLRDLSAMRDFMSACDYCLSGCSDDDHSLDDEGYDPSRECFHVDQGDHGGDNHLGMPEDDNAPMPASRVDIPRELDVVPVPAGEWAGRALAGGARHRARDIQRRIIDGARAGLLPASSGVGENLAAAAMLLRTMPEPSTTEGWRIQGELKDLLEDAAVRLAKSFASQRQRCPSEHRTTPSRRVREASVRTGRTRDGTPAAPDRLGDEHHRLGEKLGGTDDDNLIIRNLPLFLSDAARAWLEHLPATQISEWDDLVKAFAGNFQAVEHRNPRKPPGGVNTFDKMLKELCPYHRGPVKHTLKECDMLRRYFIKAGPSAEGGKDQGNNKKGGDKDEEFPEVRDCFMIYGGQVANVSARHRKQERREVCSVKVAALVYLDWSYKPITFDQGDHPDYVPSPGRYPLVIDPIIGNARLTKVLMDGGSSLNIIYAETLGLLGIDLSMIRAGAAPFHGIIPGKCVLPLGQLDLPVCFGTPSNFRRETLTFEVVGFRGTYHAVLGRPCYAKFMVVPNYTYLKLKMPGPKGIITVGSTYSHAYECDVECVEYAEAIAKSEVLIADLDCLSKEAPDAKRHAGNFEPVEAVKTVALGPSNDACKHVRQHLRRFDEEKRRAIGEEVHKLMAAGFIKEVFHPEWLANHVLVKKKGGKWRMCVDYTGLNKACPKVPYPLPRIDQIVDSTAGCKTLSFLNAYSGYHQIKMKESDQLATSFITPFCMYCYTTMPSGLRNAGATYQRCMNHVFGEHIGRTVEAYVDDTRHGISSLCDATTPERFGPEASKWETWYFDCDKTPEGTTSLLLPGKGLSSSPRF

SEQ ID NO: 231654 - protein, 68 aa, Zea mays
  Clone ID: MRT4577_142865C.1.pep
TLAPHLLPFCPAHGRATRVGATESRACKSPSFRSARVQAWCERAFSAASLRRLPTRQCRVSSHNNHTY

SEQ ID NO: 231655 - protein, 70 aa, Zea mays
  Clone ID: MRT4577_142866C.1.pep
LASASRGRGAGGGHRDGQAQAGALQRQPWLPSRRRGRLVVFFLRGSRPLAASRGAEVHSEEHGGRRAVGG

SEQ ID NO: 231656 - protein, 1337 aa, Zea mays
  Clone ID: MRT4577_142867C.1.pep
MAEEQHPALSRCLPRRRRRRRGNRGQAGGGTSSAVERVDDAGAPAGDMSGVDLAPETTTSVVSLQHANPKRTDSASIHQAIPLRLGNPSVMRDFMTACDYCLSDCSDDGHSLDNEGCGPSRECFHIDLGVTTKATTWLRQNIGQEWAGRALAGEARHQAQDIQRRITDDARARLPPASSGVGQNLAAAAILLRAMPEPSTTEGRRIQGELKNLLEDAAVQRAESSASRRQGYPPEHHAATSRFIREASVHTGSTRDAMPAALGRLGNEHRRYDRRARLDEKVHRGYHPRRGGRYDNEEDWSPSPEPPGQEAFSRAIRRAPFPTHFRAPTTITKYSGETRPELWLADYRLACQLGGTYDDNLIIRNLPLFLSDAARAWLEHLPPARCWGDHATPSSWPSQLHLPQAQDAGPQRGHHRRIHCVEYAEALAESEALIADLLCLSKEVPDAKCHAGNFEPAEAVKSVPLDPSNDASKKPLRRFDEEKHRAIGEEIHKLMAAGFIKEVFHPKWLANPMLVKKKGGKWRMCVDYTGLNKACPKVPYPLPRIDQIVDSTAGCGTLSFLDAYSGYHQIKMKESDQLATSFITPFGMYCYITMPFGLRNAGATYQRCMNHVFGEHIGRMVEAYVDDIVVKTRKASDLLSDLETTFKCLRAKGVKLNPEKCVFGVPRGMLLGFIVSERGIEANPEKIETVTNMGPIKDLKGVHRVMGCLAALSRFISRLGERGLPLYRLLRKTERFSWTPEAEEALGKLKALLTSAPILVPPVAGEALLIYVAATTHVVSAAIVVERREEGHALLVQRPVYFISEVLSETKIHYPQIQKLLYAVILTWRKLRHYFESHPIIQCREASGRIAKWAVEIMGKTISFAPQKAIKSQVLADFVAEWVDTQLPTAPIQPELWTMYFDGSLMKTGACAGLLFISPLGKHLRYVLRLHFPASNNVTEYEALVNGLRIAIELGVRRLDARGDSQLVIDQVMKNSHCRDRKMEAYCDEIRRLEDKFYGLELNHVARQYNETVDELAKIASGRTTVPPDVFSRDLHQPSIKTDDTPEPDEASAAEGEALHVEEERNGVMPNRNWQTLYLQYLHRGELPLDKAEARRLAWRTKSFVLLGDEKELYHRSPSGILQRCISIAEGQELLQEIHSGACGHHAAPRALVGNAFRKGFYWPTVVADATRIVRTCQGCQFYARQTHLPAQALQTIPITWSFAVWGLDLVGPLQKAPGGFTHLLVAIDKFSKWIEVRPLNSIRSKQTVAFFTNIIHRFGVPNSIITDNGTQFTGKKFLGFCENHHIRVDWAAVAHPMTNGQVERANGMILQGLKPRIYNDLNKFDRRWMKELPSVV

SEQ ID NO: 231657 - protein, 1440 aa, Zea mays
  Clone ID: MRT4577_142868C.1.pep
MSGVVLAPETKTGVTSPQRANPKRTDDASTLANDLLGVSLVPEITVQSVPDATSPPSIDQEVPSVFHPVPFRFSFDPPSDPASVSASARAYPDLPGYHMWSSWDRLTAVSTSGLAGSEEDDDSDFGWDFSGLSDPSAMRDFMSACDYCLSSCSNDGHSLGDEGDHGEDNHLSMPQDDNAPVPASRVDIPQELAVVPVPAGGQDTQLEQFREMQAKLDEEAGQLVQLRQNIEQEWAGRALAGGAPHQAQDVQRRIIDDARARLPPAFSGVGQNLAVVAMLIRAMPEPSTTEGRRIQGELKGLLEDAAVRRAESSASRRQACPSEHRATSSDLCGRPRSAPGARGTGRLLPRIASATSTTAATVELASRRRCAEATTPGAEDAMTIFDWDDLVKAFAGNFQGTYVRPGNSWDLRSCHQQTGESLREYIWRFSKQRTELPNITDSNVIGAFFADTTCRDLRGSKKKAKKKAQAKRDAIDADLVAAAEHRNPRKPPGGVNTFDKMLKESCPYHRGPVKHDMLRRYFVKAGPSAEGGKDQGNNKKGGDKDEEFPEVRDCFMIYSGQVANASARHRKQERRESDKPITFDQGDHPDYVPSPGRYPLIVDPIIDNARLTKVLMDGGSSLNIIYAETLGLLGIDLSMIRAGAAPFHGIVPGIPRDVAEHSLDIRAGARPVKQHLRRFDEEKRRAIGEEVHKLMAAGFIKEVFHPEWLANPVLVKKKGGKWRMCIDYTGLNKACSKVPYPLPHIDQIVDSTAGCETLSFLDAYSGYHQIKMKESDQLVTSFITPFGMYCYTTMPFGLRNAGATYQRCMNHVFGEHIGITVEAYVDDIVVKTRKASDLLSDLEVTFGCLRAKGVKLNLKKCVFGVPRGMLLGFIVSERGIEANPKKITAITNMGPIKDLKGVQRVMGCLAALSRFISHLGEKGLPLYRLLRKAERFTWTPEAEEALGNLKALLTNAPILVPPAAGEALFIYVAATTQVVSVAIVVERREEGHALLVQRSVYFISEVLSETKIRYPQIQKLLYTVILTRRKLRHYFESHPVIVVSSFPLGEIIQCREASGRIAKWAVELMGETISFAPRKAIKSQVLADFVAEWVDPQLPTAPIQAELWTMYFDGSLIKTGAGAGFLFISPLGKHVRYVLRLHFLASNNVAGYEALVNGLRITVELWVRRLDARGDSQLVIDQVMKNSHCRDQKMEAYCDKVRRLEDKFHGLELNHVARRYNETADELAKIASGRTTVPPDVFSRDIYQPSMKLDDVHEPDESSAQLEKAPGGLKHLLGAIDKFSKWIEFTGKKFLDFCEDHHIHVDWAAVAHPMTNGQVERANSMILQGLKPRIYNDLNRFGKRWIKELPSVVWSLRTTPSRATGFSPFFLVYGAEAILSTDLEYSSLRTKACDDQSNQTNREYSLDQLEEARDVALLHSAQYQQSLRRYHARRVRPRGF

SEQ ID NO: 231658 - protein, 821 aa, Zea mays
  unsure (1)..(821): unsure at all Xaa locations
  Clone ID: MRT4577_142869C.1.pep
MPFGLRNAGATYQRCMNHVFGEHIGRTVEAYVDDIVVKTRKASDLLSDLEVTFRCLKAKGVKLNPEKCVFGVPRGMLLGFIVSERGIEANPEKIAAITSMGPIKDLKGVQRVTGCLAALSHFISHLGERGLPLYRLLRKAECFTWTPEAEEALGNLKALLTNVPILVPPAAGEALLIYVAATTQVVSVAIVVERREEGHALPVQRPVYFISEVLSETKIHYPQVQKLLYAVILTRQKLRHYFESHPVTLVSSFPLGEIIQCREASGRIAKWAVEIMGETISFAPRKAIKSQVLANFVGEWVDTQLPTVPIQLELWTMFFDGSLMKTGAGVGLLFISPLRKHLRYVLRLHFSTSNNVAEYEALVNGLRIAIELGVRRLDAHGDSQLVIDQVMKNSHCRDPKMESYCDEVRRLEDKFYGLELNHIARHYNETADELAKIASGRTTVPPDVFSQDLHQPSVKTDDTPEPEKASVEPEAPSAQSEVPSALPEAPLAQPEAPSAQFEVPSARSKAPSVRPKVPSAPEXKAPGGYTHLLVAIDKFSKWIEVRPLNSIRSEXAVAFFTNIIHRFGVPNSIITDNGTQFTGRKFLDFCEGHHIRVDWAAVAHPMTNGQVERANGMILPGPKPRIYNDLNKYDKRWMKELPSVVWSLRTTPSRATGFTPFFLVYGAEAILPTDLEYGSPRTRAYADRSNQASREDSLDQLEEARDMALQHSARYQQSLRRYHARGVRSRDLQVGDLVLRLRQDARGRHKLTPPWEGPFVIAKVLKPGTYKLANSQGKVYSXLGTSNSYVAFTLKAAKADRAEGLLRLRDTDTSLITFCDK

SEQ ID NO: 231659 - protein, 99 aa, Zea mays
  Clone ID: MRT4577_14286C.1.pep
FPVSARFGYFRTGGPHRAALYQKVFTLNGHLAPPCWGPLTPGGRFVTPSGTLSFVWALPPAPFHFFPFFVATFGGFPPQALNRGPPLGVPFNALGALSP

SEQ ID NO: 231660 - protein, 337 aa, Zea mays
  Clone ID: MRT4577_142870C.1.pep
MRPDTAASASPTPKKKPDSKAALDLASWSFNVTTSVGLIMVNKALMATYGFTFATTLTGLHFATTTVMTLVFRWVGLSQPSQLPLPDLAKFVVFSNLSIVGMNVSLMWNSVGFYQVAKLCMIPASCLLEVVLDRVHYSRDTRLSIAVVLAGVAVCTVTDVSVNARGLVAAVVAVWSTALQQYYVHFLQRKHSLNSFSLLGHTAPAQAGSLLLAGPFVDYLLTGQRVDHFSFSSLALLFLALSCFIAIGVNLSQFICIGRFSAVSFQVLGHMKTVLVLSLGFLFFGKEGLSLQVVVGMALAVLGMVWYGNASAKPGGKERRGKDLPVSLKQDKDDTDK

SEQ ID NO: 231661 - protein, 165 aa, Zea mays
  Clone ID: MRT4577_142871C.1.pep
DVVKALLELGAADVNCRAGPTGKTALHLAVEMVSPDMVSVLLDHHADPSARTLDGVTPLDVLRGLTSEFLFRGAVPGLTHIEPNKLRLCLELVQSAVMVTTRDDDAGAGGGGSDAADDSLVSLTMNSTLMYQGQEIAGAMAGEARKGSGGGRGSPSNLYFPTAFP

SEQ ID NO: 231662 - protein, 67 aa, Zea mays
  Clone ID: MRT4577_142872C.1.pep
KQLIHTYFVPKILLHTYRRVLSLAMAPSTDPHSLDNYNLLTHLFYHSTYFYPSKILTPNINYLSTHL

SEQ ID NO: 231663 - protein, 126 aa, Zea mays
  unsure (1)..(126): unsure at all Xaa locations
  Clone ID: MRT4577_142873C.1.pep
MEPVKLVEGYNFDDHTTSDVRVCFKLIDEQPEWFSCHSSVLSQNSKYFSDRLGQNDIRSNSCVEIECPRAQYDHYVKMLKLMYLPGESIVDSFDSVKSALGVLRASNSLXCELVTKGCIAYIEAVP

SEQ ID NO: 231664 - protein, 88 aa, Zea mays
  Clone ID: MRT4577_142874C.1.pep
NRRAHGQSESPEFLTERNHRHRIRHAPRLCNYTPPFLTSKGPWSLEPSKLKIPSKSPLKVKRRYHREEKLLRRELGADSESAAGVGEK

SEQ ID NO: 231665 - protein, 99 aa, Zea mays
  unsure (1)..(99): unsure at all Xaa locations
  Clone ID: MRT4577_142875C.1.pep
KIKNPLHRRRPASRTRRRRRWTTGGSRCCRSPSGRHRKARTHQPLASPPLPLLPRFLVVQLPKNNQQPPQGAKKAGSSTPGLADQGGTSGRRRKRRXGL

SEQ ID NO: 231666 - protein, 475 aa, Zea mays
  unsure (1)..(475): unsure at all Xaa locations
  Clone ID: MRT4577_142876C.1.pep
MADVGEPPPSLCPLCGHPAAFSVSPSTSAAASVSPARPLLKRRTPPEAPPAVVRVEIGDEAAALREALARQQAALADVQAELDAERGAAAGAASEAMTMILRLQREKAEAMMEARQFRRYAEEKMAHDAAELAALEEALSKREAGMRALQGQTPRHACAVPSGGSTPRRPSVATPRHPPSSLSPAASSGGGYYPPLRCSIDHPPTASEADALETPRDQLNHLAHRVHLLERGATPXGRHQHHAHHXRVAPGSAXRTMHGPTRTXSLDLYDGGDCFPDDDCGASDRVYTVDAIHGAPLAVPEGSYAGSTPMGSDCYGGAPWAEDEEVRRLSVRMQALEADRESMRQAIMSMGAEKAQVMLLKEIAQKLCKDATPPVPAAAVAQHSFYKGGNTQPAMTITVRPPRHPALLMQRKLVKKKPSLLAAVVKWVTSIMWWRRKSSRVKFPIGQCGNNVGLLLLLDKAPRAGHGHQRPPKRI

SEQ ID NO: 231667 - protein, 99 aa, Zea mays
  Clone ID: MRT4577_142877C.1.pep
APRAALPSSLLTGPSCENPVPLVVEPSCLAFSALLFELCTPWAVAFPWVQATYETPLCSWSSPPWNKQLWTSWSSSLAWYLIMDPGLNPPKKKKKKKKK

SEQ ID NO: 231668 - protein, 90 aa, Zea mays
  Clone ID: MRT4577_142878C.1.pep
RSRAGLPLPGSSPSSSSPRARDRRPVWALDPDGLAPTTLLKVIILGDSGVGKTSLMNQYGNKKFSNQYKATIGADLLTKEVQFEGRLLTL

SEQ ID NO: 231669 - protein, 123 aa, Zea mays
  Clone ID: MRT4577_142879C.1.pep
EKGNKPGGSFRGGGIKNNFPGDKIPFHGKSNPGSREIELVGEKGSNSKKKGGGPGKLSTFLELGGKISTRLACSAPFGTKTPPRGGMIFPEVGATAKTNGFPLQERGGPPGFRAQITPTGGSQ

SEQ ID NO: 231670 - protein, 50 aa, Zea mays
  Clone ID: MRT4577_14287C.1.pep
RSSTSSGSRGATCARLRVSYLHEHGIDDELVLWGDALRDPVLGLEVHGPP

SEQ ID NO: 231671 - protein, 81 aa, Zea mays
  Clone ID: MRT4577_142880C.1.pep
KGHQLKVRPCSNPLFSERIFIIIGLLDQQNLSQKFCQNSLRASRLAFLCKYLLCILRLIACIQRTSFSSSSHATGASFFDG

SEQ ID NO: 231672 - protein, 67 aa, Zea mays
  Clone ID: MRT4577_142881C.1.pep
NVNDELRMAGTIYGGIFAYVTSGGAPRQVTKLALCRPGVVSVGRGGVTGRCASDWCDTVSPSESARW

SEQ ID NO: 231673 - protein, 146 aa, Zea mays
  unsure (1)..(146): unsure at all Xaa locations
  Clone ID: MRT4577_142882C.1.pep
MEAADEERPLLNRHRRPAQTQDESSSYTSDGTVDIYRQPALKQSTGNWRACFFILGAEFSECMCFFAVAKNLVTYLTTVLHESNVDAARNVSTWIGSCFLTPVIGAFLADSYWGRYTTIAVFLSVYIVGMLIVTSSXXLPFLLPRS

SEQ ID NO: 231674 - protein, 233 aa, Zea mays
  Clone ID: MRT4577_142883C.1.pep
MAGYRSASSSSAAGAGGAAVFAMRVLLLLTLLPLALAAFAFALQWRGGMRDPTGTVWPADTQRFPGMENSPLGSSSSSTGGRGSYFAVSSASASSAAADCAEILGRSASSHGISLYRGWSFDSDTAITPKICITGSTSASLHQILPWLYYHKVIGVSHSILFVEGEAAKPAVTSVLESIRGVKIIYRTKELKEQQDRSRIWNETWLSGFFYKPCNYELFVKQSLNMEMAIVMA

SEQ ID NO: 231675 - protein, 63 aa, Zea mays
  Clone ID: MRT4577_142884C.1.pep
PPVLVWSLRSGQGAFLVYKGVHSGLSSRQTWVLSYVNLHKKVVWWPLLVEVMSADKTWLVSEL

SEQ ID NO: 231676 - protein, 73 aa, Zea mays
  Clone ID: MRT4577_142885C.1.pep
PQIHIQPFPKNFSSFFAPNLFFFEKGATHISFLKPYSKNLNYLTYLLLHPYKIQTYPPLLFNYYNNIGPPKIK

SEQ ID NO: 231677 - protein, 741 aa, Zea mays
  Clone ID: MRT4577_142886C.1.pep
MIYGGQVANASARHRKQERREVCSVKVAAPVYLDWSDKPITFDQGDHPDHVPSLGKYPLIVDPVISNVRLTKVLMDGGSSLNIIYAETLGLLRIDLSSVRAGATPFHGIIPGKRVQPLGQFDLPVCFGTPSNFRRETLTFEVVGFRGTYHAVLGRPCYAKFMVVPNYTYLKLKMSGPNGVITVGPTYRHAYECDVECVEYAEALAKFEALIADLESLFKMKESDQLVTSFITPFGIYCYVTMPFGLRNAGATYQRCMNHVFGQHIGRTIEAYVDDIVVKTKKASDLLSDLETTFRCLKAKGVKLNPEKCVFGVPQGMLLGFIVSEQGIEANPEKIAAITNMGPIKDMKGVQRVMGCLAALSRFISRLGERGLPLYRLLRKAECFTWTLEAEEALRNLKALLTNAPILVPPAAGEALLVYVAATTQRSVYFISEVLSETKIRYPQIQKLLYAVILTRQKLRHYFKSHPVTVVSSFPLGEIIQCREASGRIAKWAVEIMGKTISFAPRKAIKSQVLADFVAEWVDTQLPAAPIQPELWTMFFDGSLMKTGAGVGLLFISPLGKHLRYVLRLHFPASNNVAEYEALVNGLCIAIELGVRRLDARGDSQLVIDQVMKNSHCRDLKMEAYCDEKAPGGYTHLLVAIDKFSKWIEARPLNSIRSEQAVAFFTNIIHRFGVPNSIITDNGTQFAGRKFLDFCEDHHIRVDWAAVAHPMTNGQVERANDMILQGLKPRIYNDLNKFGKR

SEQ ID NO: 231678 - protein, 1176 aa, Zea mays
  unsure (1)..(1176): unsure at all Xaa locations
  Clone ID: MRT4577_142887C.1.pep
MPEPSTTEGRRIQGELKNLLEDAAVRRAESSASRRQRCPPEHRAMTSRLMREASVHTGRTQDVTPAAPDRLGHEHHRRDRRAHLDEKGTYVRLGNSWDLRSCCQQPGESLREYIRRFSKQHTELPNTTDSDVIGAFLAGTTCRDLVSKLDRKTPTKASELMDIATKFASGQEAVEAIFRKDKQPQGRQQEDVPEASAQRGTKKKAKKKAQAKRDTADADLVAAVEHRNPRKPPGGANLFDKMLKESCPYHQGPVKHTLEECVKLRCYFHKAGPPAEDGKGQDNNKKEGDKEEEFPEVHDYFMIYGGQVANASAWRHKQECRELTKVHMDGGSSLNIIYAETLGLLEIDLSTIRAGAVPFHGIIPGKRVLPLGQLDLPVCFRTPSNFRKETLTFEVVGFRGTYHAVLGRPCYAKFMAVPNYTYLKLKMPGPNGVITVGSTYRHVYECDVECMEYAEALAESEALIADLGNAGATYQRCMNHVFGEHIGRTVEAYIDDIVVKTRKASDLLSDLETTFKCLRAKGVKLNPEKCVFGVPRGMLLGLIVSERGIEANLEKVAAITNMGPIKDLKGVQRVMGCLAALSRFISRLGEKGLPLYRLLRKAECFTWTPEAEEALGNLKALLTNAPILVPPAAGEALLIYVATTTQVKLLYAVILTGRKLRHYFESHPVTVVSSFPLGEIIQCREASGRIAKWAVELKGETLSFIPRKAIKSQVLADFLAEWVDTQLPTAPIQPELWTMYFDGSLMKTGAGAGLLFISPLGKHLHYVLRLHFPASNNVAEYEALVNGLRIAIELGVRRLDAHGDSQLVIDQVMKNSHYHDRKMEAYYDEVRRLEDXFYGLELNHIARRXPRALMGNAFRQGFYWPTAVADATRIVRSCQGCQFYARQTHLPAQALQTIPITWPFAVWGLDLVGPLPKAPGGFSHLLVAIDKFSKWIEAVAFFTNIIHRFGVPNSIITDNGTQFTGKKFLDFCEDHHIRVDWAAVAHPMTNGQVERAKGMILQGLKPRIYNDHNKFGKRWMKELPSVVWSLRTTPSRATGFSPFFLVYGAEAILPTDLEYGSPRTKAYDDRSNQTSREDSLDQLEEARDMALLHSAQYQQSLRCYHAQRVRSRGFQVGDLVLRLRQDARGRHKLTPPWEGPFIIAKILKPRTYKLANDQGEVYSNAWNIQQLRRFYP

SEQ ID NO: 231679 - protein, 1094 aa, Zea mays
  unsure (1)..(1094): unsure at all Xaa locations
  Clone ID: MRT4577_142888C.1.pep
MAEEQHPGLSRRLPRRRRRRRGNRGQAGGGTSSAVERVDDASTPAGDMSGVDLAPETTTSVVSPQHANPKRTDDASTLAEDLLGVSLMPEITVQSVPDATSSPSIDREVPSIFHPVPFRFSFDPPSDPASVSAFIKAYPNLPGYHMWLTWDRLTAVSTYGPPGSEEDDEPDSGWDFSGLGNPSAMRDFMTACDYCLSDCSDDGHSLDDEGCGPSRECFHVDLGGHDEGNLLGMPEDDDPPGPAPRVDILRELAVVPVPAGGQDTQLEQIREMQAKLDEEAGQLVQLRQNIEQDCRQQPGESLREYIRRFSKQRTELPNITDSDVIGAFLVGTTCRDLVSKLGRKTPTKASELMDIATKFASGQEAVEAIFRKDKQPQGCQQEDIPEASAQRGTKKKAKKKSQAKRDAADADLVAAAEHRNPRKPPRGANLFDKMLKESCPYHQGPAGPPAEGGKGHDNDKKEGDKAEEFPEVHGCFMIYGGRVANASARHRKQERRQVCSVKVAAPVYLDWSDKPITFDQGDHPDCVPSPGKYPLIVDPIIGNARLTKVLMDGGSSLNIIYTETLGLLEIDCPRSGPETLTFEVVGFRGTYHAVLGRPCYTKFMVVPNYTYLKLKMSGPNGVITVGSTYRHAYECDVECVEYAEAIAESEALIADLECLSKEVPDVKRHIGNFEPAKAIKFVPLDPNNDACKQVVSVTIVVEIREEGHALLVQRLVYFISEVLSETKIHYPQIQKLLYAVILTRRKLRHYFESHPVTVVSSFPLGEIIQCREASGAGAGLLFISPLGKHLRYVLRLHFPASNNVAEYEALVNGLCIAIELEVRCLDARGDSQLFIDQVMKKSHCRNRKMEAYCDEVRCLEDKFYGLELNHVARRYNKTADELAKIASGRTTVPPDVFSRDIHQPSIKTDGTPEPEEASAQPEAPSAAEGEALRVEGERNGVTPNQNWQTPYLQYLHRGELPLDKTEARRLARRAKSFVLLGDEKELYHRSPSGILQRCISIAEGHELLQEIHXGACGHHAAPRALVGNAFRQGFYWPTAVADATRISLRRYHARGVRPRYFQVGDLVLRLRQDARGRHKLTPPWEGPFIIAKIL

SEQ ID NO: 231680 - protein, 394 aa, Zea mays
  Clone ID: MRT4577_142889C.1.pep
MASIRAPIAYGGFALGFWGDPHLDVHDKLGHDIQVSKLGRKTPTRASELMDITTKFATGQEAVKAIFQKDKQPQGRQPEDVPEGPVKHTLEECVMLRRYFHKAGPPAEGGRAHNNDKKEDHKAEEFHEVHDCFMIYGGQVANASARHRKQERREVCSVKVAAPVYLDWSDKPITFDQGDHPDRVPSPGKYPLVVDPVIGNVRLTKVLMDGGSSLNTIYAETLGLLQIDLSSIRAGAAPFHGIIPGKRVQPLGQLDLPVCFGTPSNFRKETLTFKVVGFRGTYHAVLGRPCYAKFMAVPNYTYLKLKMSSPNGVITVGSTYRHAYECDVECMEYAEALAESEALIADLESLSKEVPDAKRHAGNFEPAEAVKSVPLDPSNDTSKQIRIGSELDPK

SEQ ID NO: 231681 - protein, 41 aa, Zea mays
  Clone ID: MRT4577_14288C.1.pep
KTTTIVLNHREAYRGGTCGTGEWYRLGSLRVGRADIEDFRV

SEQ ID NO: 231682 - protein, 47 aa, Zea mays
  Clone ID: MRT4577_142890C.1.pep
SKTMLSNSFHLTQVSIQIELILRSLHTSLVYTHLHAYTIDISYHFII

SEQ ID NO: 231683 - protein, 1030 aa, Zea mays
  Clone ID: MRT4577_142891C.1.pep
MSGAEDSDEGVLQFSKQRTELPNVTDSDVIGAFLASTICRDLVSKLGRKTPTKTSELMDIATKFASGQEAVEAIFRKDKQPQGRQPEDVPEASTQRGTKKKNKKKSQAKRDAIDADLMLKEQCPYHQGPVKHTLEECVMLRRHFHKAGPPAEGGRAHNNDKKEDDKAEEFPEVHDCFMIYGGPTANASARHRKQERRGDWSDKPITFDQGDHPDRVPSPGKYPLIVDPVIGNVRLTKVLMDGGSSLNIIYAETLGLLQINLSSIRTGATPFHGIIPKRVQPLEQLDLPVCFGTPSNFRRETLTFEVVGFRGTYHAVLGRLCYTKFMVVPNYTYLKLKMSGPNGVITVGPTYRHAYECDVECVEYAEALAESEALIADLESLSKEAPDAKRHAGNFEPAETVKSVPLDPNNDASKQTTLVYFISEVLTETKIRYPQIQKLLYAVILTRRKLRHYFKSHLVTVVSSYPLGEIIQCREASGRIAKWAVEIMGETISFAPRKAIKSQVLADFVAEWVDTQLPAAPIQPELWTMFFDGSLMKTVAGAGLLFISPLGKHLRYVLRLHFPASNNVAEYEALVNGLRIAIELGLVIDQVMKNSHCRDPKMEAYYDEVRRLEDKFYGLEVNHVARRYNETVDELAKIASGRTTVPPDVFSRDLHQPSVKTDDTPEPKKVSALPEVPSAQPEAPSAPEGEALRIEEERNGVTPNRNWQTPYLQYLHRGELPLDRAEARRLAWRAKSFVLLGDGKELYHRSPSGILQRCISIAEGQELLQEIHSGACGHHAAPRTLVGNAFRQGFYWPTAKAPGGYTHLLVAIDKFSKWIEVRPLNSIRSEQAVAFFTNIIHLFGVPNSIITDIGTQFTGRKFLDFREDHHIRVDWAAMAHPMTNGQVECANGMILQGLKPWIYNDLNKFGKRWMKELPLVVWSLRTMPSRATGFTPFFLVYGAEAILPTDLEYGSLRTRAYDDRRNQTNREDSLDQLEEARDMALLHSARYLQSLRRYHARGVRSRDLQVGDLVLRLRQDARGRHKLTPP

SEQ ID NO: 231684 - protein, 58 aa, Zea mays
  unsure (1)..(58): unsure at all Xaa locations
  Clone ID: MRT4577_142892C.1.pep
WNVTHRTKTIMVTPPKVILINDMTPPITITCTCNNNIIINVFQXITKPVLLTWYGYPP

SEQ ID NO: 231685 - protein, 617 aa, Zea mays
  Clone ID: MRT4577_142893C.1.pep
MSFGLRNAGATYQRCMNHVFGEHIGRTVEAYVDDIVVKTRKPSDLLSNLEVTFRCLKAKGVKLNPEKCVFGVPRGMLLGFIVSERGIEANPEKIAAITSMGPIKDLKGIQRTGAGAGLLFISPLGKHLRYVLRLHFPASNNVAEYEALLVIDQVMKNSHCRDPKMEAYCDEVQRLEDKFYGLELNHIARRYNETADELAKIASGQTTVPPDVFSRDLHQPSVKTDDTPEPEKASAQPEAPSAQSKVPSARSEVPSARPEVPSAPEGEALRIEEERSGVTPNQNWQTPYLQYLHRGELPLDQAKARRFARRAKSFVLLGDGKELYHRGPSGILQRCISITEGQELLQEIHSGACGHHAAPRALVGNAFRQGFYWPTVVADATRIVRTCEGCQFYARQTHLPAQALQTIPITWPFAVWHLDLVGPLQKAPGGYTHLLVAIDKFSKWIEVRPLNSIRSEQAVAFFTNIIHRFGVPNSIITDNGTQFTGRKFLDFCEDHHIRVDWAAVAHPMTNGQVERANGMILQGLKPRIYNDLNKFGKRWMKELPSVVWSLRTTPSRATGFTPFFLVYGAEAILSTDLEYGSPRTRAYADQSNQANQEDSLDQLEEARDMALLPSARY

SEQ ID NO: 231686 - protein, 924 aa, Zea mays
  Clone ID: MRT4577_142894C.1.pep
MRPELWLADYRLACQLGGTDDDNLIICNLPLFLSDTARAWLEHLPPGQISNWDDLVQAFAGNFQGTYPGESLRDYIQRFSKQRTELPNVTDSDVIGAFLTGTTCRDLVSELGRKTPTRASELMDIATKFASGQEARGTKKKNKKKSQAKRDATDADLVAAAEYKNPRKPPGGANLFDKMLKESCPYHQGPVKHTLEECVMLWRHFHKAGPPVEGGRAHNNDKKEDHKVEEFTEVHDCFMIYGGQVANASARHRKQEHREVCSVKVAAPVYLDWFDKPITFDQGDHPDRVPSPGKYPLVVDPVIGNVRLTKVLMDGGSSLNIIYAETLGLLQIDLSSIRTGTAPFHGIILGKRVQPLGQLDLPVCFGTPSNFRRMKESDQLATSFITPFGMYCYVTMPLGLRNAGATYQRCMNHVFGEHIGRTVEAYVDDILVKTRKASNLLSDLETTFQCLKAKGVKLNPEKCVFGVPRGMLLGFIVSKRGIEANPEKIAAITNMGPIKDLKGVQRVMGCLAALSRFISCLGERGLPLYRLLRKTERFTWTPEAEEALGNLKALLTNAPILVPPAAGEALLIYVAATTQVVSAAIVVERREEGHALPVQRPVYFISEVLSETKIRYPQIQKLLSLMKTGAGAGLLFISPLGKHLRYVLRLHFPASNNVAKYEALVNGLRIAIELGVRRLDARGDSQLVIDQVMKNSHCRDPKMEAYYDEVRHLEDKFYGLEVNHVARRYNETTDELAKIASARATVPPKVFSRDLHQPSVKTNDTPEPEKASARPEAPSAPEGEALRIEEERNGKAPGGYMHLLVAIDKFSKWIEVRLLNSIRSEQAVAFFTNIIHRFGVPNSIITDNGTQFTGRKFLDFCEDHHIRVDWAAVAHPMTNGQAERANDMILQGLKPRIYNDLHRFGRRWMKELSLVVWSLRTTPS

SEQ ID NO: 231687 - protein, 819 aa, Zea mays
  Clone ID: MRT4577_142895C.1.pep
MDNLQQPLQPGTVLRFGSLEFMSLDGSYDMVLLPPQHDNDDGRRLARRGRTRRRHLPGAEEEHPSQPRHPPRRRRRRWGNHGQAGGSTSSAVGPERVDDADTPAGDMSGVILAPGTTTGVASPQRANPRRTDDVDTLARDLSGISLAPEITTHSISDATSPPSTNQEVPSVFHPVPFRFSFDPPRDPTSASVHTELTGDETPAARDCLGNEQHRRDCWASLEEKVHRGYHPRRGGRYDSEEDRSPSPEPLGPRVFSRAIRRAPFLPRFRASTTTTKYSGETRPELWLVDYRLACQLGGTDDDNLIIRNLPLFLSDAARAWLEHLPPAQIFDWDNLVKAFTGNFQGTYVRPGNSWDLLSYRQQLGESLREYIRQFSKQCTELPNITDSDVIGAFLAGTTCQDLVSKLGRKTPTKASELMDIATKFVSGQEAVKAIFRKDKQPQGRQKEDDPEASVQRGMKKKTRKKAQAKRNAVDADLVAAAEHRNPRKPPEGTNVFDKMLKESCPFHRGPVKHTLEECDMLRRYFNKAGPSAEGGKDQGNNKKGGDREEEFLEVHNCFRIYGGQVANALAQHRKQERREVCSVKVATLVYLDWSDKPITFDQDDNPDYVPSPGRYPLVVNPVIGNARLSKVLMDGGNSLNIIYAETLELLGVDRSMIRASAAPFHGIVPSKRVLPLGQLDLPVCFGTPSNFRKETLTFEVVRFRGTYHAVLGRPCYAKFMAVPNYTYLKLKMPGPKGTITVGSTYRHTYECDVECVEYAEAIAESEALIADLDCLSKEAPDAKRHAGNFELAEAVKSVSLDSSNNTGKKVRIGSELDPK

SEQ ID NO: 231688 - protein, 341 aa, Zea mays
  Clone ID: MRT4577_142896C.1.pep
MAEEQHPGLSRRLPRRRRRRRGNRGQAGGGTSPAVDRVDDAGTPAGDTSGVDLVPETTASVVSPQRANPKRTDDASTLVEDLQGVSLVPEITVQSVPDATSSPSIDREVPSVFHPMPFRFSFDPPSDHASVSAFIKAYPNLPGYHMWSTWDRLTAVSTYGPPGSEEDDEPDSGWDFSRLGNPSAMRDFMTACDYCLSDCSDDGHSLDNEGCGPSHECFHVDLRGHDEGNHLGMPEDDDPPGPTPRVDILRELAVVPVPAGDLEYGSPRTRAYDDQSNQTSREDSLDQLEEARDVALLHSARYQQSLRCYHARGVRPRDLQVGDLVLRLRQDARGLHKLTPP

SEQ ID NO: 231689 - protein, 361 aa, Zea mays
  Clone ID: MRT4577_142897C.1.pep
MAVPRAPSPTTAASPPRAEPTSCLRHRRSRARRALLVLFDRVSQLNAPRSLLPAINAPRSPSIDGIGVDGGSARTGSRVKDNSEQGQGNGLVREEHWLSSLRLRLPLRQGLLFGVSACFQRCSHCRLGNVVSGIAIVRLTHCELKCEEPRAAEGDSHAGAPYRATIFEWGEDKDWHQRSPPFPQTLPPSSLQIRRSLGSPCLAGVPPRWSRSMVGAGRRERAAEEVKLDIRNVLMTLESLKKESLKKKKGDAAQQQEPPQKEVFWAPASLTTKSCADVEYDDDDSMRPAAEPAKEEEDIEGAVCSAPCRRAVRNTTPSPSRDMVDARASTGGENPTAVDVVVTQLMPEEEALQLCTGCVHL

SEQ ID NO: 231690 - protein, 973 aa, Zea mays
  unsure (1)..(973): unsure at all Xaa locations
  Clone ID: MRT4577_142898C.1.pep
MAATTCDPASVSAFARAYPDLPGYHMWSTWDQLTVVSTFGPAGSEEEDDPDFSWDFSGLRDPSVMQDFMSACDYCLSGYSDDGHSLNNEGYDPSRECFHIDQGDHDEDNHLGMLGNDDAPVLASRVEIPQELAXWAGLPPAFSGADQNLAAAAMLLRTMPEXSTTEGQRIQGELKDLLENVVVRRAESSASQGRGGPSEHHAASSRCMCEASVHTEHTGDRTPAARDRLGDEQHRRGHRARLEEKVRRGYHPRRGGHYNSEEDRSPSPEPLGPRVFSRAIRRVLFPTRFRAPTTITKYSRETRPELWLADYRLACQLGGTYDDNLIICNLPLFLSDAARAWLEHLPPAQIFGWDDLVKAFAGNFQEYIRWFSKQCTELPNITDSDVIGAFLAGTTCRDLVSKLGHKTRTKASEFMDIATKFASGQEAVEAIFRKDKQPQGRQKEDAPAASVQRGTKKKNRKKAQAKRDAVDADLVAAAEHRNPRKPSGGANMFDKMLKESCPYHRGPVKHTLEECDMLGRYFNKAGPSAEGGKDQGNNKKGGDKEEEFLKVHKCFMIYSGQVANASAXHKQERREVCSVKVATPVYLDWSDKPITFDQGDHPDCVPXPRKETLTFEVVGFRGTYHAVLGRLCYAKFMVVPNYTYLKLKMPGPEGTITIGSTYRHAYKCDMECVEYAEAIAESEALIADLDCLSKEAPDAKRHAGNFESAEAVKSVPLDPSNDANKKEAVLVDFRRTNAKVFAWSPSDMPGISRDVVEHSLDIRAGARPVKQPLRRFDEEKRRAIGEEVHKLMTAGFIKEVFHPEWLANHVLVRKKGATYQRCMNHMFGEHIGRTVKAYVDDIVVKTRKASDLLSDLEITFRCLRAKGVKLNLEKCVFGVPRGMLLGFIVSERGIEANPEKIAAITNMGPIKDLKGVQRVMGCLAALSRFISRLGEKGLPLYRLLRKVERFTWTPEAEEALGNLKALLTVGDHN

SEQ ID NO: 231691 - protein, 85 aa, Zea mays
  Clone ID: MRT4577_142899C.1.pep
TDNLYVLLLELIIYLDQNRLRQHSKLVFLTATRYVPCPALYIGLMTSQDSKIRQLYLSRSVETLHVTIALPRQITIHEQTDILPY

SEQ ID NO: 231692 - protein, 138 aa, Zea mays
  Clone ID: MRT4577_14289C.1.pep
PSTESPTGEPLRILGLASAGGRRGRGAPTSHQLRDTPPPPLTSTEAHTRRRRREGENHGAICCVHLAHLLRPIPRLRAPRGSRAPHLTHTVPQIHDIELAMKEHDADPTRMIYRANMAFAPASSRRNTRMSTCLGQNG

SEQ ID NO: 231693 - protein, 127 aa, Zea mays
  Clone ID: MRT4577_1428C.1.pep
MQHDARWEGSLQAAVMALVEEARRTYPFLSSLARPTPMPISLQLHSPRRRRRPHLRLPAAAMRVRLSFLLLSAAFLTILSAAAPSAVPDPEPEVKPSDTDALTIFRHGADAHGILAANWSNGRRVRG

SEQ ID NO: 231694 - protein, 60 aa, Zea mays
  Clone ID: MRT4577_142900C.1.pep
VKLFDLPNRNAAWTGLYGHACVQSIMHIDTPTAPPHTTLIVETISYTIINYSTCTINFIL

SEQ ID NO: 231695 - protein, 88 aa, Zea mays
  Clone ID: MRT4577_142901C.1.pep
ESISQHCGSTHSPTVMSSRLGRLWWSGLRSALSVDQQIERRAREEPSGDGGILITNHRTHPRGSCSVGIQSRGSSALRAQGGCRSSFA

SEQ ID NO: 231696 - protein, 75 aa, Zea mays
  Clone ID: MRT4577_142902C.1.pep
TTTCAAEGTAPATYTSQVACTITTWAAHNHPEQPRLLRIEHVTLNNDPMKQRPNPPEPQQSADNIKGPLHLHRIL

SEQ ID NO: 231697 - protein, 70 aa, Zea mays
  Clone ID: MRT4577_142903C.1.pep
MWVWFNQVPQVWFARIPDRFSTQQVDQVSIPFFSIHRYARRVCTITLAVIVLSYPLCSVIWCIITMVTLC

SEQ ID NO: 231698 - protein, 144 aa, Zea mays
  Clone ID: MRT4577_142904C.1.pep
LEPIRLEPRSDPSSAELPSAVRSLLPRENGNSVGSSRSAATTTTEEDGCGVPTSSDVNSLRSTRLANNSGGSERSSGSSDINRSAAGRGARGILMPKKMLSKLWSGKTNAGENSSSDTSQSPGSVNNPEEVKSTQSRITRRSVS

SEQ ID NO: 231699 - protein, 77 aa, Zea mays
  unsure (1)..(77): unsure at all Xaa locations
  Clone ID: MRT4577_142905C.1.pep
APRPSRRPPAGRKEGGVNGIGAGDXGADDQHGGGKLSMKSLLWHGGSVWNAWXFSCASNQVAQVLLTLPYSFSQLXM

SEQ ID NO: 231700 - protein, 81 aa, Zea mays
  unsure (1)..(81): unsure at all Xaa locations
  Clone ID: MRT4577_142906C.1.pep
APGKRGGLFPKNFPGPKTPRXGALGKXPSRPGFLGFWGPNGFPGPGRKGASPPFSLKGPRFSEKGVGRGLSQIYKKFKSFF

SEQ ID NO: 231701 - protein, 151 aa, Zea mays
  Clone ID: MRT4577_142907C.1.pep
MAREQLEESIVADGNGKEEEVGVMGIGAADGADDQHGGGKLSMKSLLWHGGSVWDAWFSCASNQVAQVLLTLPYSFSQLGMLSGVLLQIFYGFLGSWTAYLISVLYVEYRSRKEKEGVSFKNHVIQWFEVLDGLLGPYWKAGGLALHCTFL

SEQ ID NO: 231702 - protein, 458 aa, Zea mays
  unsure (1)..(458): unsure at all Xaa locations
  Clone ID: MRT4577_142908C.1.pep
MAREQLEESIVADGNGKEEEVGVMGIGAADGADDQHGGGKLSMKSLLWHGGSVWDAWFSCASNQVAQVLLTLPYSFSQLGMLSGVLLQIFYGFLGSWTAYLISVLYVEYRSRKEXKEGVSFKNHVIQWFEVLDGLLGPYWKAAGLAFNCTFLLFGSVIQLIACASNIYYINDRLDKRTWTYIFGACCATTVFIPSFHNYRIWSFLGLGMTTYTAWYLAIAALLNGQAEGVAHSGPTKLVLYFTGATNILYTFGGHAVTVEIMHAMWKPAKFKYIYLLATLYVFTLTLPSSAAMYWAFGDELLTHSNAFSLLPKTRWRDAAVILMLIHQFITFGFACTPLYFVWEKVIGMHDAKSIFKRALARLPIVVPIWFLAIIFPFFGPINSAVGALLVSFTVYIIPALAHVLTYRTASARMVRIHMHACICIALHPRRLANNNNGVLWPGRPSRCLMPTGSGTSK

SEQ ID NO: 231703 - protein, 111 aa, Zea mays
  unsure (1)..(111): unsure at all Xaa locations
  Clone ID: MRT4577_142909C.1.pep
LVVLLFIERGNRIDXTCSLXIVNHXSWXCSGIILFTEVVLTSTHLAIXMVFASCCELFYLICYAGRFLSDXRATFFIHLVCCVSFCHVLNICHRDLNLGNTLLDCFPGPRL

SEQ ID NO: 231704 - protein, 141 aa, Zea mays
  Clone ID: MRT4577_14290C.1.pep
FFPEAFPLLGSFSLPLKKRGLWAPPPHFWKRVVLNPPEVPPPVFYPPPCNFGFFTTFPPLFSCWVILFLSAKGHSFWARRGRAPRPFLFFWWGAPPRGRPGGDPFFPRALVDSLRQLALQESPPVNRASPLKSFFCQTPFS

SEQ ID NO: 231705 - protein, 42 aa, Zea mays
  Clone ID: MRT4577_142910C.1.pep
VVDVVDAELLLAALMTTLHASITSGHVSFGMPPWLYYDRWTT

SEQ ID NO: 231706 - protein, 78 aa, Zea mays
  Clone ID: MRT4577_142911C.1.pep
PFKLSECRLYMLESYVAIGRASACWATRASSPLPGRGRSCCRKVQQAFYENLEGVIPYEGMSLAGGQRQREIHYVPAG

SEQ ID NO: 231707 - protein, 78 aa, Zea mays
  Clone ID: MRT4577_142912C.1.pep
FVWRLLHTFFYMFFLNSKGAPGISLVFTRGPGENYHLRIKRAGGKKEKGEKKKVRLKQKGRMKPWSTYQMGRTGENKQ

SEQ ID NO: 231708 - protein, 54 aa, Zea mays
  Clone ID: MRT4577_142913C.1.pep
PTSSHLLGQIKHLMPDRRFPIHNGSIGLGKIQGLQLGIQPNSRLPNPHGLRAYP

SEQ ID NO: 231709 - protein, 174 aa, Zea mays
  unsure (1)..(174): unsure at all Xaa locations
  Clone ID: MRT4577_142914C.1.pep
YACNRIALGSHQDVYHPGALKAEIADAISTLIXMILXQCCCMGLNRLTGGRPXTTPVVLIAGVEEHTYDLIVAVSVGTNIYGGHMNPVQTFGALQGRNINLFQLLLNXVAHMLGCTASVLLLLFSTVDQATGTLRLTDVPENEALVLXIGMTLLLEYTAYTTDVDPXEGSHGTI

SEQ ID NO: 231710 - protein, 436 aa, Zea mays
  Clone ID: MRT4577_142915C.1.pep
MPCLEQIPMATGETAVDRREDHRDMDLSGEEHVRPKARKPYTITKRRERWTEDEHGQFLEALQLHGRAWRRIQVHIGTKTAVQIRSHAQKFFTKVVRESSPGSNASAGAAPAIQIPPPRPKRKPAHPYPRKADGAAKKPAPELKRLEKTSLRDRVRDEGSPTSVLASARTASRAEVSGSLVANSSSASRSPALSDAGSDERGDGGGSLASSVDREDGCASPRTRAPCTKVLCHAHEVSRLGSGAPVVKLFGNKVVVVKVKDLETDTPPASVAEAARNGSPPNGAAGASSWKPWPELTCLVPRRDGFAAQPVVSPPCAVFYYPQASAASAQEHQQASEPLDHRRAQREGSSPTGSSVASSAAAESRHGPVQENASDGYAALRAAIPRPTKRVSSASFGGRGFVPYKRCAAESEAARPVALALAPGEEADGDLTRLCL

SEQ ID NO: 231711 - protein, 1116 aa, Zea mays
  Clone ID: MRT4577_142916C.1.pep
MRSPWDRLTAVSKQRTELPNITDSDVIGAFLAGTTCRDLVSKLGRKTPTRASELMDIATKFASGQEASTQRGAKKKGKKKSQAKHDAADADLVAVAEYKNPRKPPGGANLFDKMLKEPCPYHQGPVKHTLEECAMLRRHFHKAGPPAEGGRARDDDNKEDHQAGEFPEEAVLVDFLRANADVFVWSSSDMPGIPRDVAEHSLDIRAGARPVKQPLRRFDEEKRRAIGEEIHKLMAAGFIKECMNHVFGEHIGRTVEAYVDDIVVKTREASNLLSDLEVTFRCLKAKGVKLNPKKCVFGVPRGMLLGFIVSERGIEANPEMIATITSTGPIKDLKGIQRVTGCLAALSRFVSRLGKRGLPLYRLLRKAECFTWTPEAEEALGNLKALLTNAPILVPPAAGEALLIYVAVTTQVVSAVIVVERREEGHALPVQRLVYFISEVLSETKIRYPQIQKLLYAVILTRWKLRHYFESHPITVVSSFLKGKCALGPFLSILVIECQLKCLKCEFMQWMNKVQIKSKVKFLQDHLFTPPSRCSQLVSKPFSSQRDLPPEEMDPKGKGIVINDKEKESFVNEPKDDKPTDSGSGHRRKEGKKKKTRCIKEIIYYDDSDESTSSQKDDDNDYKKTVNSNFSFDYSRIQHSSNSHLLSIPLGKPPHFDGEDYGFWSHKMRSHLFSLHPSIWEIVENGMKFDSSDSPLLINEQIHRNAQATTVLLASLCREEYNKVSGLDNAKQIWDTLKISHEGNDITMLTKMELVEGELGRFAMIRGEEPTQTYNRLNTLINKIRSYGSTRWTDHDVVRLMLRSFTVLDPHLVNNIRENPRYTMMTPKEVLGKFVSGRMMIKEARYVDDALNGPLHEPQPIALKATRSKEALPSKVAQIEAAGLNDEEMALIIKRFKTALKGRKGQPSKAKTKGKRSCFKCGKLGHFIANCPENDSDQEQGKNGKRENKKVYKKAKGEAHLGKEWDSDCSSSDSDDEGLAATAFNKSALFPNEHHTCLMAREKKVITRNANTYDSSSDDESSEDEIDYSSLFKGLDRTKIAKINELIDALNEKDRILEKQEDLLYEEHDKFVSTQNSLALEVKRNGILSCELSTCNETISSLKGVRILMLMLVVNT

SEQ ID NO: 231712 - protein, 124 aa, Zea mays
  Clone ID: MRT4577_142917C.1.pep
IEEQLAQHFMLRVTHPGQHAFRPGVGGVSRELMRINTSKLGTIDGVYSGNVPEHILQACTVSLSIVRGRVRCFPVQHEIVEPVAHADMASLRCLPQRIYIIRHLHVGEVDRGLVCSGMHRHRRS

SEQ ID NO: 231713 - protein, 493 aa, Zea mays
  unsure (1)..(493): unsure at all Xaa locations
  Clone ID: MRT4577_142918C.1.pep
WIDTQLPTSPIXAELWTMYFDGXLMKTGAGAGLLFISPLRKHXSNNVAEYETLVNGLRIAVELGVRRLDARGDSQLVIDQVMKNSHCRDKKMEAYCDEVLRLEDKFHELELNHVARRYNETADELAKIASGRTTVPPNVFSRDIYQPFVNFDEAPEPDETSAQPEVPSAAEGEALRVEGERNGVAPNQDWQTPYLQYLLRGELPLDKAEARRLARRATSFVLLGDEKELYHRSPSGILQRCISDAQGQELLQEIHSGACGHHATPRTLMGNAFXDNGTQFTGKKFLDFCENHHIHVDXATVAHPMTNGQVERANGMILQGLKPRIYNDLNKFGKRWIKELPSMVWSLRTTSSQATGFSPFFLVYGAEAILPTDLEYSSPRKKAYDDQSNQTSREDSLDQLEEAQDIALLHSARYQQSLRRYHARRVRPRGFQVGDLVLRLRQDARGRHKLTPPWEGPFIIAKILKLGHTSWPTIKARSTTTLGTSNSYVAFTL

SEQ ID NO: 231714 - protein, 845 aa, Zea mays
  Clone ID: MRT4577_142919C.1.pep
MSFGLRNAGATYQRCMNHVFGEHIGRTVEAYVDDIVVKTRKASNLLSDLEVTFRCLKAKGVKLNPEKCVFGVPRGMLLGFIVSERGIEANPEKIAAITNMGPIKDLKGVQRVMGCLAALSRFISRLGERGLPLYRLLRKAECFTWTPEAEEALGDLKALLTKAPILVPPADGEALLVYVAATTQVVSAAIVVERQEEGHALPVQRPVYFVSEVLSETKIRYPQVQKLLYAVILTRRKLRHYFESHPAIKSQVLADFVAEGVDTQLPTAPIQPELWTMFFDGTLMKTGAGAGLLFISPLGKHLRYLLRLHFPASNNVAEYEALINGLRIAIEIGVRRLDAHGDSQLVIDQVMKNSHCRDPKMEAYCDEVRCLEDKFYGLELNHIARRYNETADELAKIASGRTTVPSDVFSRDLHQPSVKINDTPEPEAPSVQPEASSVQPEASSVQPEVPSAPEGEALHIKEERSGATPDRDWQTPYLQYLRQGELPLDRAEARRIARRAKSFVLLGDGKELYHRSPSGILQRCISIAEGQELLQEIHSGACGHHAAPRALVGNAFRQGFYWPTAVADATRIVRTCEGCQFYAKQTHLPAQALQTIPITWPFVVWGLDLVGPLQKAPGGYTHLLVAIDKFSKWIEVRPLNSIRSEQAVAFFTNIIHRFRVPNSIITHNGTQFTGRKFLDFCEDHHIRVDWAAVAHPMSNGQVECANGMILQGLKPRIYNDLNKFGKRWMKELPSVVWSLRTTPSRATGFTPFFLVYGAEAVLPTDLEYGSPRTRAYDDQSNQASREDSLDQLEEARDRALLHSARYQQSLRRYHARGVRPRDLQVGDLVLRLRQDTRGRHKLTPP

SEQ ID NO: 231715 - protein, 139 aa, Zea mays
  unsure (1)..(139): unsure at all Xaa locations
  Clone ID: MRT4577_14291C.1.pep
PVAQRLLLQGRVGAVGPPRXKSGLFVGVNXGPVVXKRELPPRPXPRXGITERCLGRGLIRGGGGFAPXEKRLTELLKVGKDKRALGLAXRKLGSHMRASKKXEEMAGVLRRMRSAGXHTGFNLRAFHVHGAGCRLCSSV

SEQ ID NO: 231716 - protein, 110 aa, Zea mays
  unsure (1)..(110): unsure at all Xaa locations
  Clone ID: MRT4577_142920C.1.pep
MLGTLAGGWKKHLTRLSAPKHGLLXKLGEPYGPKHLLAPYKSSGGLPLXILMMRNRLKCALNYREVISILMHPHVLEDGNVMIDKTYPAAFMDVISIPKTXENYRLIYDT

SEQ ID NO: 231717 - protein, 840 aa, Zea mays
  Clone ID: MRT4577_142921C.1.pep
MGPIKDLKGVQRVMGCLAALSRFISRLGERGLPLYRLLRKAECFTWTPEAEEALGNLKALLTKAPILVPPAAGEALLVYVAATTQVVSAAIVVERQEEGHALPVQRPVYFVSEVLSETKIRYPQVQKLLYAVILTRWKLRHYFESHPVTVVSSFPLGEIIQCREASGRIAKWAVEIMGETISFAPRKAIKSQVLADFVAEWVDTQLPTAPIQPELWTMFFDGSLMKTGAGAGLLFISPLGKHLRYVLRLHFPASNNVAEYEALVNGLRIAIELGVRRLDARGDSQLVIDQVMKNSHCRDPKMEAYCDEVRRLEDMFYGLELNHIARRYNETADELAKIASGRTTVPPDVFSRDLHPPSVKIDDTPEPEAPSAQPEVPSARSEAPSARPEAPSARPEAPSVRPEVPSAPEGETLRVEGEQSGVAPDQNWQAPYLQYLHRGELPSDRAEARRVARRAKSFVLLGDEKELYHRSPSGILQRCISIAEGQELLREIHSGACGHHAAPRALVGNAFRQGFYWPTAVADATRIVRTCEGCQFYARQTHLPAQALQTIPITWPFAVWGLDLVGPLQKAPGGYTHLLVAIDKFSKWIEVRPLNSIRSEQALAFFTNIIHRFGVPNSIITDNGTQFTGRKFLDFCEDHHIRVDWAAVAHPMSNGQVERANGMILQGLKPRIYNDLNKFGKRWMKELPSVVWSLRTTPSRATGFTPFFLVYGAEAILPTDLEYGSPRTRAYTDQSNQASREDSLDQLEEARDKALLHSTRYQQSLRRYHARGVRSRDLQVGDLVLRLRQDARGRHKLTPPWEGPFVIAKVLKPRTYKLANSQGEVYSNAWNIQQLRRFYP

SEQ ID NO: 231718 - protein, 67 aa, Zea mays
  Clone ID: MRT4577_142922C.1.pep
WCCWQVSPFSAQAQGVFSRTVQCQRAAMASFPRMQYFLMPFITRPNQALSASASELPLHFGFLLLGQ

SEQ ID NO: 231719 - protein, 725 aa, Zea mays
  Clone ID: MRT4577_142923C.1.pep
MPFGLRNVGATYQRCMNHVFGEHIGRMVEAYVDDIVVKTRKASDLLSDLEVTFRCLKAKGVKLNPEKCVFGVPRGMLLGFIVSERGIEANPEKIAAITSVGPIKDLKGVQRVMGCLAALSRFISRLGERGLPLYRLLRKAECFTWTPEAEEALGNLKALLTKVPILVPPAVGEALLVYVAATTQVVSAAIVVERQEEGHALPVQRPVYFVSEVLSETKIHYPQVQKLLYALVIDQVMKNSHCRDPKMEAYCDEVWRLEDKFYGLELNHIARRYNETVDDLAKIASGRTTVPPDVFSRDLHQPFVKIDDTPEPEAPSAQSEVPSVQPEVPSAQPEAPSASEGELPLDRAEARRVARRAKSFVLLGDEEELYHRSPSGVLQRCISVAEAPRALVGNAFRQGFYWPTAVADATRIVRTCEGCQFYAKQTHLPAQALQTIRITWPFAVWGLDLVGPLQKAPGGYTHLLVAIDKFSKWIEVRPLNSIRSEQAVAFFTNIIHRFGVPNSIITDNGTQFTGRKFLDFCEDHHIRVDWAAVAHPMSNGQVERANGMILQGLKPRIYNDLNKFGKRWMKELPSVVWSLRTTPSRATGFTPFFLVYGAKAVLPTDLEYGSPRTRAYSDQSNQASREDSLDQLEEARDKALLHSARYQQSLRRYHARGVRPRDLQVGDLVLRLRQDPRGRHKLTPPWEGPFVIAKVLKPGTYKLANSQGEVYGNAWNIQQLRRFYP

SEQ ID NO: 231720 - protein, 999 aa, Zea mays
  Clone ID: MRT4577_142924C.1.pep
MNHVFGEHIGRTVEAYVDDIVVKTRKASDLLSDLEVTFRCLKAKGVQLNPKKCVFGVPRGMLLGFIVSERGIEANPEKIAAITSMGPIKDLKGVQRVMGCLAALSRFISRLGERGLPLYRLLRKAECFTWTPEAEEALGNLKVLLTKAPILVPPAAGEALLVYVAATTQVVSAAIVVERQEEGHALPVQSPVYFVSEVLSETKIRYPQVQKLLYAVILTRRKLRHYFESHPVTVVSSFSLGEIIQCREASDRIAKWAVEIMGETISFAPRKAIKSQVSADFVAEWVDTQLPTAPIQPELWTMFFDGSLMKTGAGAGLLFISPLGKHLRYVLRLHFPASNNVAEYEALVNGLRIAIELGVRRLDARGDSQLVIDQVMKNSHCRDPKMEAYCDEVRRLEDKFYGLELNHIARRYNETADELAKIASGRTTVPPDVFSRDLHQPSVKIDNPLEPEAPSTQSEVPSVQPEVPSAQPEAPSARPEAPSVQPEVPSASEGEALHIEEEQSGATPDRNWQTPYLQYLQQGELPLDRAEARRVARRAKSFVLLGDEKELYHRSPSGILQRCISVAEGQELLWEIHSGACGHHAAPRALVGNAFRQGFYWPTAVADATRIVRTCEGCQFYAKQTHLPAQALQTIPITWPFAVWGLDLVGPLQKAPGGYTHLLVAIDKFSKWIEVRPLNNIRSEQAVAFFTNIIHRFGVPNSIITDNGTQFTGRKFLDFCEDHHIRVDWAAVAHPMSNGQVERANGMILQGLKPRIYNDLNKFGKRWMKELPSVVWSLRTTLSRATGFTPFFLVYGAEAVLPTDLEYGSPRTMAYNDQSNQASREDSLDQLEEARDKALLHSARYQQSLRRYHARGVRSRDLQVGDLVLRLRQDPRGKHKLTPPWEGPFVIAKVLKPRTYKLANSQGKVYGNAWNIQQLRRFYPQNIFKSFIYLAPTQSLVIKEGSASPRQSPTLPRGLKGGQPPLRRNFPRKNISSVRISFVLFDYFEKWILKTTEYT

SEQ ID NO: 231721 - protein, 70 aa, Zea mays
  Clone ID: MRT4577_142925C.1.pep
RFGPASKGSSSRIRAMPNTGHVVLSFAHAMNQVAVYRTSRYKRSSSSECDPSTGMILFVGPILGDRSVVA

SEQ ID NO: 231722 - protein, 925 aa, Zea mays
  Clone ID: MRT4577_142926C.1.pep
MPFGLRNAGATYQRCMNHVFGEHIGRTVEAYVDDIVVKTRKASDLLSDLEVTFRCLKAKGVKLNPEKCVFGVPRGMLLGFIVSERGIEANPEKIAAITSMGPIKDLKGVQRVMGCLAALSRFISRLGERGLPLYRLLRKAECFAWTPEAEEALGNLKALLTKAPILVPPADGEALLVYVAATTQVVSAAIVVERQEEGHALPVQRPVYFVSEVLSETKIRYPQVQKLLYAVILTRRKLRHYFESHPVTVVSSFPLGEIIQCREASGRIAKWAVEIMGETISFAPRKAIKSQVLADFVAEWVDTQLPTAPIQPELWTMFFDGSLMKTGAGAGLLFISPLGKHLRYVLRLHFPASNNVAEYEALVNGLRIAIELGVRRLDARGDSQLVIDQVMKNSHCRDPKMEAYCDEVRRLEDKFYGLELNHIARRYNETADELAKIASGRTTVPPDVFSRDLHQPSVKIDDAPEPEAPSAQPEVPSAQPEAPSAQPEVPSAPEGGALNVEEGQSGATPDRDWQAPYLQYLRRGELPLDQAEARRVARRAKSFVLLGDEEELYHRSPSGILQRCISIAEGRELLQEVHSGACGHHAAPRALVGNAFRQGFYWPTAVADATRIVRTCEGCQFYAKRTHLPAQALQTIPITWPFAVWGLDLVGPLQKAPGGYTHLLVAIDKFSKWIEVRPLNSIRSEQAVAFFTNIIHRFGVPNSIITDNGTQFTGRKFLDFCEDHHIRVDWAAVAHPMSNGQVERANGMILQGLKPRIYNDLNKFGKRWMKELPSVVWSLRTTPSRATGFTPFFLVYGAEAILPTDLEYGSPRARAYTDQSNQASREESLDQLEEARDRALLHSARYQQSLRRYHARGVRSRELQVGDLVLRLRQDARGRHKLTPPWEGPFVIAKVLKPGTYKLANNQGEIYGNAWNIKQLRRFYP

SEQ ID NO: 231723 - protein, 812 aa, Zea mays
  Clone ID: MRT4577_142927C.1.pep
MGPIKDLKGVQRVMGCLAALSRFISRLGERGLPLYRLLRKAECFAWTPEAEEALGNLKALLTNAPILVPPAAGEALLVYVAATTQVVSAAIVVERREEGHALPVQRPVYFVSEVLSETKIRYPQVQKLLYAVILTRRKLRHYFESHPVTVVSSFPLGEIIQCREASGRIAKWAVEIMGETISFAPRKAIKSQVLADFVAEWVDTQLPTAPIQPELWTMFFDGSLMKTGAGAGLLFVSPLGKHLRYVLRLHFPASNNVAEYEALVNGLRIAIELGVRRLDARGDSQLVIDQVMKNSHCRDPKMEAYCDEVRRLEDKFYGLELNHIARRYNETADELAKIASGRTAVPPDVFSRDLHQPSVKTDDTPEPEAPSAQPEAPSAPEGEALRVEEERSGATPDRDWQTPYLQYLRRGELPLDRVEARRLARRAKSFVLLGDGKELYHRSPSGILQRCISIAEGQELLQEIHSGACGHHAAPRALVGNAFRQGFYWPTAVADATRIVRTCEGCQFYAKQTHLPAQALQTIPITWPFAVWGLDLVGPLQKAPGGYTHLLVTIDKFSKWIEVRPLNSIRSEQAVTFFTNIIHRFGVPNSIITDNGTQFTGKKFLDFCEDHHIRVDWAVVAHPMSNGQVERANGMILQGLKPRIYNDLNKFGKRWMKELPSVVWSLRTTPSRATGFTPFFLVYGAEAVLPTDLEYGSPRTRVYDNQSNQASREDSLDQLEEARDRALLHLARYQQSLRRYHARGVRPRDLQVGDLVLRLRQDTRGRHKLTPPWEGPFVIAKVLKPETYKLANSQGEVYGNTWNIQQLRRFYP

SEQ ID NO: 231724 - protein, 61 aa, Zea mays
  Clone ID: MRT4577_142928C.1.pep
KLIVLYSSHTAPTSSTAAPRSVLQVTTGENVLEYDLRQGVSKSSHQCVPALGGIYVLETIK

SEQ ID NO: 231725 - protein, 668 aa, Zea mays
  Clone ID: MRT4577_142929C.1.pep
MGPIKDLKCVQRVMGCLAALSRFISRLGERGLPLYRLLRKTERFTWTPKAEEALRNLKALLTSAPILVPSAAGEALLIYVAATTQVVSAAIVVERREEGHALPVQRPVYFISEVLSETKIRYPQIQKMLYAVILTRRKLRHYFESHPVTVVSSFPLGEIIQYREASGRIAKWAVEIMGETISFAPRKAIKSQVLADFVAEWVDTQLPAAAIQPELWTMFFNGSLMKTGASAGLLFISPLGKHLRYMSRFHFPASNNVAEYEALVNGLRIAIELGVRRLDARGDSQLVIDQVMKNSHCRDPKMEAYCDEVRRLEDKFYGLEVNHVARRYNETANKLAKIASARTTVPPDVFSRDLHQPSVKTDDTPEPEKASARLEAPSATEGFYWPTAVADATRIVRTCQGCQFYARQTHLPAQALQTIPITWPFAGWGLDLVGPLQKAPGGYTHLLVAIDKFSKWIEVQPLNNIRSKQAVAFFTNIIHRFGVPNSIITDNGTQFTGRKFLDFCEDHHIRVDWAAVARPMTNGQVERANDMILQGLKPRIYNDLHKFGRRWMKELPLVVWSLRTTPSRATGFTPFFLVYGAEAILPTDLEYGSPRARAYDDRRNRTNREDSLDQLEEARDMALLHSARYQQSLRRYHARGVRSRDLQVGDLVLRLRQDARGRHKITPP

SEQ ID NO: 231726 - protein, 51 aa, Zea mays
  Clone ID: MRT4577_14292C.1.pep
VDILGDEVDTLLSVLGKIYIALDHYSPVLKHYPGATEILMLVQKVLKGESV

SEQ ID NO: 231727 - protein, 86 aa, Zea mays
  Clone ID: MRT4577_142930C.1.pep
ILTKFSVDSDLCFAVVYTLDIEVLDRTEEYAQILRIRRYLYDQNGLNFPTDSFHMSTSEWDPLGQRNQVRVPLSFLYEITNTLPSD

SEQ ID NO: 231728 - protein, 146 aa, Zea mays
  unsure (1)..(146): unsure at all Xaa locations
  Clone ID: MRT4577_142931C.1.pep
MPFGLRNAGATYQRCMNHVFGEHIGRMVGAYIDDNVVKTRKASDLLSDLEVTFRCLKAKGVKLNPEKCVFGVPRGMLLGFIVSKRGIEANPEKIAAITQXQALIGDTRGLHAPLGRAACHRQSSEALDKRTGRQSRRGLHQHFESL

SEQ ID NO: 231729 - protein, 77 aa, Zea mays
  Clone ID: MRT4577_142932C.1.pep
NPGKYYFWGQLIFKPPSPPPNFLNPPPKKILPFPKKKKKKKKKKKKKKKKKKKKKKKKKKKKKKKKKKKYSALLPLL

SEQ ID NO: 231730 - protein, 45 aa, Zea mays
  Clone ID: MRT4577_142933C.1.pep
KAASQTANKHAHNVIRRYIYGYKLHNQSSCPDILFLVHRSTRTRG

SEQ ID NO: 231731 - protein, 108 aa, Zea mays
  unsure (1)..(108): unsure at all Xaa locations
  Clone ID: MRT4577_142934C.1.pep
GGCLSQGTGDVYNHTYPSDQAGDVAISYDTIVKVIHIAYTLQVQEQPAFDPESXVXYIKRYIMNLTAECYTYTAHVMSLDIVGXTNXLTSKLLDLESVDPDSLNDDTL

SEQ ID NO: 231732 - protein, 67 aa, Zea mays
  Clone ID: MRT4577_142935C.1.pep
GSFALLRSNVGRHIHSLGVLCTLVTILSESILPGIFISLYYDVICSHTKQLRLIHREIWAEHSMVGG

SEQ ID NO: 231733 - protein, 32 aa, Zea mays
  Clone ID: MRT4577_142936C.1.pep
LLIYELYLCRHLLGLPEPEDMRSASLSEYQFH

SEQ ID NO: 231734 - protein, 144 aa, Zea mays
  Clone ID: MRT4577_142937C.1.pep
MSSYCDRLFVGISITGASLCVIIFGCIFLMCVFDGYDELASNNNVEYIAGGATQNSIRVAQYELFVSSLKYFCAAATSAKAYNREAARKSLLRKKAYIQQLESCRLKLSQMEQDMQRARSQARFLPLLFFCLLNCNRTSEGSSI

SEQ ID NO: 231735 - protein, 43 aa, Zea mays
  Clone ID: MRT4577_142938C.1.pep
YWDWPCRGLLTAVTEVVTHRATATIASTVERVHWLFGKPFSLR

SEQ ID NO: 231736 - protein, 111 aa, Zea mays
  Clone ID: MRT4577_142939C.1.pep
MDQQGMHDHEGVHVVGFEVPPSPDSSYDNPVPGNEDEGREPPLMPPHLQHTLLSFPPSQDESSPLPQPQTVVLNHLYIEKENTRSMVALGITHRFKAKFVTVVLYKPVLRR

SEQ ID NO: 231737 - protein, 119 aa, Zea mays
  Clone ID: MRT4577_14293C.1.pep
PLPFTSNCQARGRLFEKQRGVCMNLYLAYLMHHHRTWRPLCRTMNLQMFLPTFHLCQRRQNPNPLQRKCLHASFHQVQHLPAETLLLHLKPRMKSFFRTIRKFPNFGKLLKTSSPVELT

SEQ ID NO: 231738 - protein, 42 aa, Zea mays
  Clone ID: MRT4577_142940C.1.pep
EFTGVLVIIDVDRGIDHSSIIEVSLVQQLWQVFDNREIRDCM

SEQ ID NO: 231739 - protein, 91 aa, Zea mays
  Clone ID: MRT4577_142941C.1.pep
TSVQPSPYSWTPTLDYSNEPLVRQVPACNLLFLILSPGSLGLHTKSVKAHHVTNQRSLWAVLSSKGPSPSPRQRRAAADRTARPPSNSAAA

SEQ ID NO: 231740 - protein, 108 aa, Zea mays
  Clone ID: MRT4577_142942C.1.pep
SALRVKFLHFEISIVRTLGFVRSFRLGDSDVHVSSLGSWAEVSAQARVFVELSVPGRAGEFVSLLVGRCRELVEAVVCDVVFGVAQDWCRAHRGGGRFGSMKFGGTRK

SEQ ID NO: 231741 - protein, 43 aa, Zea mays
  unsure (1)..(43): unsure at all Xaa locations
  Clone ID: MRT4577_142943C.1.pep
MGVHGVVSGTVRLELRQVRXVASPIVLLLDEVDDPARVHAGAY

SEQ ID NO: 231742 - protein, 142 aa, Zea mays
  unsure (1)..(142): unsure at all Xaa locations
  Clone ID: MRT4577_142944C.1.pep
NSARGSAASVARAAPAVSDDLVLRIAEQLEDSVTSTSPLLAPLHSASALSLLSTLWPTRRSSETFRFTDISYLRSRPISLPSREPDLALPXSPLSLPYGRPRDHAAAALAAAAEFAHKNLFYDFNADGARDAVFEHVPEGGN

SEQ ID NO: 231743 - protein, 197 aa, Zea mays
  unsure (1)..(197): unsure at all Xaa locations
  Clone ID: MRT4577_142945C.1.pep
RGGSPNPPGKKKQKPPPPPTAPERPNVRVAPPPRFPGVPLPPPPGGKAPLFFGPPPSPKPLPAPGXPRVRPSPAPARPGGXAPPGPTQGGGPGPGEPPPGGGGKIPFPPGFGGGDGFPPPPGEPXSKPPLGRLLALPPRSHPRGIPPFPPPGXNFPRPPNPLGIFFFWVRFFFFFFWIPRRGFGPNEPKRCFVLVPS

SEQ ID NO: 231744 - protein, 1055 aa, Zea mays
  Clone ID: MRT4577_142946C.1.pep
MGSLQQPLRPETVLRLGSLEFMSFDGSYDMILLPPPCDNDNGGRQPARRRRNRRHLPRVVEEQHSSSLRPLPRQRRRRRGNQGQAGGRASSAVERIDAPDAPTEGTPGVDLAFETKASAVPPRHADPEREDDASALAESLQGVALVPEMTAQPVPDVTTSLRVDQKVLTNSHLTSFRLGLNPPSNLALAGALIEASATPLGFHMRLPWDRLTDVSTYGPSGSEEDDDPSVCWDFSGLGNPSAMRDFMTACDYCLSDCSNGSRSLDDEGCGPSRECFHIELGDPSEGNHLGMPVDGDLPRPVPHADIPRELAVVPVSAGGHDPQLEQVRGAQARLDEGTGALEPIRRDVGQVWAGQPPAGEIRHLPQGLQHRVANDVRVRPPPASSGVGQNLAAAAMLLRAMPEPSTAEGRRIQGELKNLLEGAAVRRAESTASRRQGYTSEPHAATSRFMQEASVYTERTRNTAPAAPGHLGNEHHRRDRRAHLDERVRRGYHPRRGGRYDSGEDRSPSPEPPGPQAFSRAIRRAPFPTRFRPPTTITKYSGETRPKLWLADYRLTCQLGGTDDDNLIIRNLPLFLSDTARAWLEHLPPGQISNWDDLPGESLRDYIRRFSKQRIELPNITDSDVIGAFLAGTTCRDLVSKLGRKTPTRASELMDIATKFASGQEAVEAIFRKDKQPQGRPSEEAPEASTPRGAKKKGKKKSQSKRDAADADLVAAAEYKNPRKPPGGANLFDKMLKEPCPYHQGPVKHTLEECVMLRRHFHRAGPPAEGGRAHDDDKKEDHQAGGYPEVRDCFMIYGGHAANASARHRKQERREVCSVKVAAPVCLDWSDKPITFDQADHPDHVPSPGKYPLVVDPVIGDVRLTKVLMDGGSCLNIIYAETLKLLRVDLSSVRAGAAPFHGIIPGKRVQPLGRLDLPVCFGTPSNFRRETLTFEVVGFRGTYHAVLGRPCYAKFMVVPNYTYQKLKMPGPNGVITVGPTYKHAFECDVECVEYAEALAESEALIADLENLSKEVPDVKRHAGNFEPAETVKAVPLDTSGDASRQIRIGSGLDPK

SEQ ID NO: 231745 - protein, 184 aa, Zea mays
  Clone ID: MRT4577_142947C.1.pep
YVPKKKKKKRPQKKKKKKKDLDFIVLRNLSIDGIRTIGSVLGQSIALDYYIRQVDGMVAEFTDINRGMEKTGTFTMERKKLFQLVGKANSNLADVILKLGLFERSNIAWKNANYAQIWEYLRDEYELTQRFGNLDFKLKFVEHNIRFLQEILQNRKSDFLEWLIIILISVEILISVYNIIQEQM

SEQ ID NO: 231746 - protein, 1012 aa, Zea mays
  Clone ID: MRT4577_142948C.1.pep
MGSLQQPLRPGTVLRFGSLEFMSFDGSYDMILLPPPRDNDNGGRQPARRRRNRRHLPRVVEEQHSSSPRPLPRQRRGRRSNQGQAGGRASSAVERIDVPSAPTEGTPGVDLAFEMKASAVPPRHANPEQVDDASALAESLQDVALVPETTVQSVPDATMTLLVDQKVPTDSHPTSFRLGLNPPSDLALAGALVEASATPLGFRMRSPWDRLTDVSTYGPSGSEEDDDPSICWDFSGFGNPSAMRDFMIACDYCLSDCSDGSRSLDDEDCGPSRECFHVELGDPSEGNRLGMPEDGDLPRPAPRADIPRELAVVPVLAGGHDPQLEQVRGAQARLDEGAGALEPIRRDVGQVWAGQPLAGEIRHLPQGFQHRVATNDVRVRPPPASSGVASVYTGRTRNTAPAAPGHLGNEHHHRDRRAHLDERVRRGYHPRRGGRYDSGEDRSPSPEPPGPQAFNRAIRRASFPTRFRPPTTITKYSGETRPELWLADYRLACQLGGTDDDNLIIRNLPLFLSDTARAWLEHLPPGQISNWDDLVQAFAGNFQGTYVRPGNSWDLRSCRQQPGESLREYIRRFSKQRTELPNITDSDVIGAFLAGTTCRDLVSKLGRKTPTRASELMDIATKFASGQEAVEAIFRKDKQPQGRPSEEAPEASTPRGAKKKGKKKSQAKRDAADADLVAAAEYKNPRKPPGGANLFDKMLKEPCPYHQGPVKHTLEECIMLRRHFHRAGPPAEGGRAHDDDKKEDHQAGEFPEVRDCFMIYGGHAANASARHRRQERREVCSVKVVAPVYLDWSDKPITFDQADHPDHVPSPGKYPLVVDPVVGDVRLTKVLMDGGSCLNIIYAETLRLLRVDLSSVRAGAAPFHGIIPGKRVQPLGRLDLPVCFGTPSNFRRETLTFEVVGLRGTYHAVLRRPCYTKFMAVPNYTYLKLKMPGPNGVITVGPTYKHAFECNVECVEYAEALIADLENLSKEVPDVKRHAGNFEPAETVKAVPLDPSGDTSKQIRISSGLDPK

SEQ ID NO: 231747 - protein, 842 aa, Zea mays
  Clone ID: MRT4577_142949C.1.pep
MATGFIKEVFRPKWLANPVLVRKKGGKWRMCVDYTGLNKACPKVPYPLPRIDQIVDSTTGCETLSFLDAYSGYHQIRMKESDQLATSFITPFGMYCYVTMPFGLRNAVKTRKASDLLSDLEATFRCLKAKGVKLNPEKCVFGVPQGMLLGFIVSERGIKANPEKIAAITSIVSIKDLKGVQRVMGCLAALSRFISRLGERGLPLYRLLRKAECFTWTPEAEEALRNLKALLTNAPILVPPAAGEALLIYVVATTQLVSAAIVVERREEGHALPVQRPVYFISEVLSETKICYPQIQKLLYAVILTRRKLRHYFKSHPVTVVSSFPLGEIIQCREASGRIAKWAVKIMGETISFAPRKAIKSQVLADFVAEWVDTQLPTAPIQPELWTMFFDGSLMKTGAGADLLFISPLGKHLRYVLRLHFPTSNNVAEYEALVNGLRIAIDLGNSHCRDPKMEAYCDEAQRLEDKFYGHELNHIARRYNETAGELAKIASGRTTVPPDAFSRDLHQPSVKTDDTPEPEKASAQPEAPSAQSEIPSARPEAPSAQPEAPSIRPETPSGPEGEALRIEEERSGVMPNRNWQTPYLQYLHRGKLPLDRAKARRLARRAKSFVLLGDEKELYHRSPSGILQRCIFIAEGQELLQEIHSGACGHHAAPRALVGNAFRQGFYWPTAVADATRIVRTCEGCQFYARQTHLPAQALQTIPITWPFAVWGLDLVGPLQKAPGGYTHLLVVIDKFSKWIEVRPLNSIRSEQAVAFFTNIIHRFGVPNSIITDYGTQFTGRKFLDFCEDHHIRVDWAAVAHPMTNGQVERANGMILQGLKPRIYNDLNKFGKRWMKELPSTV

SEQ ID NO: 231748 - protein, 64 aa, Zea mays
  unsure (1)..(64): unsure at all Xaa locations
  Clone ID: MRT4577_14294C.1.pep
PKGXXXXEPXQXAAGADVVSSXSXLREKXXLRSSVXTGIXSKSRHVHIXXECHFCXLXYXEXSK

SEQ ID NO: 231749 - protein, 921 aa, Zea mays
  Clone ID: MRT4577_142950C.1.pep
MPFGLRNAGATYQRCMNHVFGEHIGRTVEAYVDDIVVKTRKAPNLLSDLEVTFRCLKAKGVKLNPEKCVFGVPRGMLLGFIVSERGIEANPEKIAAITSMGPIKDLKGVQRVMGCLAALSRFISRLGERGLPLYRLLRKAECFVWTPEAEEALGNLKALLTKAPVLVPSADGETLLVYVAATTQVVSAAIVVERQEEGHTLPVQRPVYFISEVLSETKIRYPQVQKLLYAVILTRRKLRHYFESHPIIQCREASGRIAKWAVEIMGETISFAPRKAIKSQVLADFVAEWVDTQLPTTPIQPELWTMFFDGSLMKTGAGAGLLFISPLGKHLRYVLRLHFPASNNVAEYEALVNGLRIVIELGVRRLDARGDSRLIIDQVMKNSHCRDPKMEAYCDEVRRLEDKFFGLELNHIARRYNETADELAKIVSGRTTVPPDVFSRDLHQPSVKLDDAPEPEVPSAQPEVPSAQPEVSSAQPKVPSAQPEVPSAPEGGALNVEEGQSGATPDQDWQAPYLQYLRRGELPLDQVEARRVARRAKSFVLLGDEEELYHRSPSGILQRCIPIAEGRELLQEVHSGACGHHAAPRALVGNAFRQGFYWPTAVADATRIVRTCEGCQFYAKRTHLPAQALQTIPITWPFAVWGLDLVGPLQKAPGGYTHLLVAIDKFSKWIEVRPLNSIRSEQAVAFFTNIIHRFGVPNSIITDNGTQFTGKKFLDFCEDHHIRVDWAAVAHPMSNGQVERANGMILQGLKPRIYNDLNKFGRRWMKELPSVVWSLRTTPSRATGFTPFFLVYGAEAILPTDLEYGSPRARAYTEQSNQASREESLDQLEEARDRALLHSARYQQSLRRYHARGVRSRELQVGDLVLRLRQDARGRHKLTPPWEGPFVIAKVLKPGTYKLASNQGEIYGNAWNIKQLRRFYP

SEQ ID NO: 231750 - protein, 133 aa, Zea mays
  unsure (1)..(133): unsure at all Xaa locations
  Clone ID: MRT4577_142951C.1.pep
MAAAPTTATELEHLRNRKMLDGCNVRLRHLSXTLGCTMTFSIDAGSSWGSNLSELHWLSRLTCSDENFIIKSGVQCGDAAHGIDLVVSDASACGINIEGEPHSYDLGWCAAIYVNAANEKWKNWRMHDYIVKE

SEQ ID NO: 231751 - protein, 1004 aa, Zea mays
  Clone ID: MRT4577_142952C.1.pep
MGSLQQPLQPGTVLRFGSLEFMSLDGSYDMILLPPPRDNDNGGRQPARRRQNRRHLPRVVEERHSSSPRPLPRQQRRRRGNQGQAGGRASSAVERIDVPSAPTGGASGVDLAFETKASAVPPRHANPEQVDDASALAEGLQDVALVPKTTAQSVPDVTMSLLVDQKVLTDSHPTSFRRGLNPPSDLALAGALVEASATPLGFRMRSSWDRLTDVSTYGPSGSEEDDDPRVCWDFSGFGNPSAMRDFMTACDYCLSDCFDGSRSLDDKDCGPSRECLHVELGNPSEGNHLGMPEDGDLPRPVPRADIPRELAVVPVPAGGHDPQLEQVRGAQARLDEGAGALESIRRDVGQVWAGQPPAGEIRHLHQGFQHRVANDVRVRPPPASSEVGQNLAAAAMLLRVMPEPSTTEGRRIQGELKNLLEGAAARWAESSASRRQGYPSEPHAATSRFMREASIYTGRTRNTAPAAPGHLGNEHHRRDRRAHLDERVRRGYHPRRGGRYDSGEDRSPSPEPPGPQAFSRAIRRAPFPARFRPPTTITKYSGETRPELWLADYRLACQLGGTDDDNLIICNLPLFLSDTARAWLEHLPPGQISNWDDLVQAFAGNFQGTYVRPGNSWDLRSCRQQPGESLRDYIRRFSKQRTELPNITDSDVIGAFLAGTTCRDLVSKLGRKTPTRASELMDIATKFASGQEAGPVKHTLEECVMLRRHFHRAGPPAESGRARDDDKREDHQAGEFPEVRDCFMIYGGHAANASARHRKQERREACSVKVAAPVYLDWSDKPITFDQADHPDHVPSPGKYPLVVDPIVGDVRLTKVLMDGGSCLNIIYAETLRLLRVDLSSVRAGAAPFHGIIPGKRVQPLGRLDLPVCFGTPSNFRREILTFEVVGFRGTYHAVLGRPCYAKFMAVPNYTYLKLKMPGPNGVITVGPTYKHAFKCDVECVEYAEALAESEALIADLENLSKEVPDVKRHAGNFEPAETVKVVPLDPSGDTSKQIRISSGLDPK

SEQ ID NO: 231752 - protein, 871 aa, Zea mays
  Clone ID: MRT4577_142953C.1.pep
MPFGLRNAGATYQRCMNHVFGEHIGRTVEAYVDDIVVKTWKAPDLLSDLEVTFRCLKAKGVKLNPEKCVFGVPRGMLLGFIVSERGIEANPEKIAAITSMGPIKDLKGVQRVMGCLAALSRFISRLGERGLPLYRLLRKAECFAWTPEAEEALGNLKALLTKAPVLVPPAAGEALLVYVAATTQVVSAAIVVERQEEGHALPVQRPVYFVSEVLSETKIRYPQVQKLLYAVILTRRKLRHYFESHPAIKSQVLADFVAEWVDTQLPTAPIQPELWTMFFDGSLMKTGAGAGLLFISPLGKHLRYVLRLHFPASNNVAEYEALVNGLRIAIELGVRRLDARGDSRLVIDQVMKNSHCRDPKMEAYCDEVRRLEDKFFGLELNHIARRYNETADELAKIASGRTTVPPDVFSRDLHQPSVKLDDAPEPEAPSAQPEVPSAPPGGPSALPEGQSGATPDQDWQAPYLQYLRRGELPLDQVEARRVARRAKSFVLLGDEEELYHRSPSGILQRCIPIAEGRELLQEVHSGACGHHAAPRALVGNAFRQGFYWPTAVADATRIVRTCEGCQFYAKRTHLPAQALQTIPITWPFAVWGLDLVGPLQKAPGGYTHLLVAIDKFSKWIEVRPLNSIRSEQAVAFFTNIIHRFGVPNSIITDNGTQFTGKKFLDFCEDHHIRVDWAAVAHPMSNGQVERANGMILQGLKPRIYNDLNKFGRRWMKELPSVVWSLRTTPSRATGFTPFFLVYGAEAILPTDLEYGSPRARAYTEQSNQASREESLDQLEEARDRALLHSARYQQSLRRYHARGVRSRELQVGDLVLRLRQDTRGRHKLTPPWEGPFVIAKVLKPGTYKLASNQGEIYGNAWNIKQLRRFYP

SEQ ID NO: 231753 - protein, 68 aa, Zea mays
  unsure (1)..(68): unsure at all Xaa locations
  Clone ID: MRT4577_142954C.1.pep
PALASKNKRVEGKPSMNLMADRCCRKRLNDRLSILRSVVPXISKMDRTSILGFTIYYIKELLVSINLL

SEQ ID NO: 231754 - protein, 991 aa, Zea mays
  Clone ID: MRT4577_142955C.1.pep
MSFGLRNAGATYQRCMNHVFGEHIGRTVEAYVDDIIVKTRKASDLLSDLEVTFRCLKAKGVKLNPEKCVFGVPRGMLLGFIVSERGIEANPEKIVAITSMGPIKDLKGVQRVMGCLVALSRLISRLGERGLPLYRLLRKVECFTWTPEAEEALGNLKALLTNAPILVPPAGGEALLIYVAATTQVVSAAIVVERREEGHALPVQRPVYFICEVLSETKIRYPQVQKLLYAVILTRRKLRHYFESHLVTVVSSFPLGEIIQCREASSRIAKWAVEIMGETISFAPQKAIKSQVLADFVAEWVDTQLPTVPIQPELWTMFFDGSLMKTGAGAGLLFISPLRKHLRYVLRLHFPASNNVAEYEALVNGFRIAIELGVRRLDARGDSQLVIDQVMKNSHCRDPKMEAYCDEVWRLEDKFYGLEFNHIARHYNETADELAKIASGRTTVPPDVFSRDLHQPSVKIDDMPEPEAPSAQSEVPSAQSEAPSARSEAPSARPEAPSARLEAPSVQPEVPSAPEGEALRVEGEQSGVAPNRNWQTPYLQYLHRGELPLDRAEARRLARRAKSFVLLGDGKELYHRSPTGILQRCISIAEGQELLREIHSGACGHHAAPRALVGNAFQQGFYWPTAVADATRIKAPGGYTHLLVATDKFSKWIEVRPLNSIRSEQAVAFFTNIIHHFGVPNSIITDNGTQFTGRKFLDFCEDHHIRVDWAAVAHPMTNGQVECANDMILQGLKPRIYNDLNKFGKRWMKELPSVVWSLRTTPSRATGFTPFFLVYGAEAILPTDLEYGSPRTRAYADQSNQASREDSLDQLEEARDMALLHSARYQQSLRRYHARGVRSRDLQARILTVEGSSSTLGVNYAFGEAPTATMNKTPAFKVPLQTELRFHLRRYEQPHMIGGPAEQQKADGRLAVARSSSSDDDNFCSGGPNSSSDDLRVDAAAIRPSPMPSLERQGRAEGRRVGGQSVGGTGYLVGGETSSGCRGGRRCRKRL

SEQ ID NO: 231755 - protein, 115 aa, Zea mays
  unsure (1)..(115): unsure at all Xaa locations
  Clone ID: MRT4577_142956C.1.pep
TMTVRVMSFSINIFLIQIVGLALPRNPKMLLVLKGVELPLEGNKVYGRNRSIDEAKPILIRKDCPSSSNISFQNALDTIGNNFTQQVVSLFRLLSCDDPQYLXSRHHXLQNSNRL

SEQ ID NO: 231756 - protein, 840 aa, Zea mays
  unsure (1)..(840): unsure at all Xaa locations
  Clone ID: MRT4577_142957C.1.pep
MPFGLRNAGATYQRCMNHVFGEHIGRTVEAYVDDIVVKTRKAYDLLSDLEVTFRCLKAKGVKLNPEKCVFGVPRGMLLGFIVSERGMEANPEKIAAITSMGPIKDLKGVQRVMGCLAALSRFISRLGERGLPLYRLLRKAECFTWTPETEEALGNLKALLMNAPILVPSAAGEALLIYVAATTQVVSAVIVVERQEEGNALPVQRPVYFVSEVLSETKIRYPQVQKLLYVVILTWRKLRHYFESHPVTVVSSFPLGEIIQCREASGRIAKWAVEIMGEAISFAPRKAIKSQVLADFVAEWADTQLPTTPIQPELWTMFFDGSLMKTGAGAGLLFISPLGKHLRYVLRLHFPASNNVAEYEALVNGLRIAIELGVRRLDARGDSQLVIDQVMKNSHCRDPKMEAYCDEVRRLEDKFYGLELNHIARRYNETADELAKIASGRTMVPPDVFSRDLHQPSVKIDDTPESEAPSAQSEAPSARPEAPSVQPEVPLAPEGETLHVGGERSGVTPDQNWQTPYLXISTKESYPXTEPKLDGWRGAPSRSSCWEMGRSSTTAAPQASSNDASPSPKKAPGGYTHLLVAIDKFSKWIEVRPLNSIWSEQAVAFFTNIIHRFGVPNSIITDNGTQFTGRKFLDFCEDHHIRVDWAAVAHPMTNGQVERANDMILQGLKPRIYNDLNNFGKRWMKELPSVVWSLRTTPSRATGFTPFFLVYGAEAILPTDLEYGSPRTRAYADQSNQVNREDSLDQLKEARDKALLHSARYQQSLRRYHARGVRSRDLQVDDLVLWLRQDARGRHKLTPPWEGPFVIAKVLKPRTYKLANSQGEVYSXLGTSNSYVASTL

SEQ ID NO: 231757 - protein, 1028 aa, Zea mays
  unsure (1)..(1028): unsure at all Xaa locations
  Clone ID: MRT4577_142958C.1.pep
MGSLQQSFQPGTVLCFGSLEFMSLNGSYDMILLPPPRDSDNGGRQPARRRRNRRRLPHVVEEQHSGLSRPLPRRRRRRRGNQGQAGGGTSSAVERVDSAGAPTGGTSGIDLASETKTSAVSPQHANPKQTDDASTLANDLLGVTLVPETTVQSAPDVTSSPPVDQEVPTDSHLVPFGFGLDPPSDFASVDALIEASPNPLGYRMRSPWDRLTAVSTYGPSGSEEDDEPDFCWDFSGLGNPNAMRDFMTARDYCLSDCSDGSLSLGDEGCGPSRECFHVDLGGPGEGNHLGMPENGDPPRPVPRVDILRELAVVPVPAGGHDPQLEQISEMQARLDEGAGTLEPIRWDIGQEWAGQPPAGEVRHLPQGFQHRIADDVRVRPPPTSSGVGQNLAAATILLRAMPEPSTTEGRRIQGELKNLLEDAAVRRAESSASQRKGCPSEHRAATSRFMREXSVHTGRTRNTAPAAPGRLGNEHHHRNRRAHLDERXRAIRRAPFPTRFRTLTTITKYSGETRPELWLANYRLACHLGGTDDDNLIIRNLPLFLSDTARAWLEHLPPGQISNWDDLVQTFTGNFQGTYVCPGNSWDLRSCRQQPGESLRDYIRRFSKQRTELPNITDSDVIGAFLAGTTCRDLVSKLGRKTPTRASKLMDIATKFASGQEAVEAIFQKDKQPQGRPPEDVPEASTQYGAKKKGKKKSQAKRDAADADLVAAAEYKNPRKPPGGVNLFDKMLKESCPYHQGPVKHTLEECAMLRRHFHKAGPPAEGDRARDDDKKEDHKAGEFPEVHDCYMIYGGRVANASARHRKQERREGDHPDRVPSPGKYSLVVDPVISNVRLTKVLMDGGSGLNIIYAETLGLLRIDLSSVRTGAAPFHGIIPGKRVQPLGQLDLPVCFGTPSNFRRETLTVEVVRFRGTYHAVLGRPCYAKFMAVPNYTYLKLKMPGPNGVITVGPTYRHAYECDVECVEYAEALAESEALIADLESLSKEAPDVKCHAGNFEPAETVKSVPLDPSNDASKQIRIGSELDPK

SEQ ID NO: 231758 - protein, 306 aa, Zea mays
  unsure (1)..(306): unsure at all Xaa locations
  Clone ID: MRT4577_142959C.1.pep
MEAYCDEVRHLEDKFYGLELNNIARRYNETADELAKIASGRTTVPXDVFSRDIHQPSVKIDDTLELEEASAQPEVPSATEGEALRVEEERNGVAPNQNWQTPYLXISTEGSYPSTRLKLGNWLGTPSRSSYWVMKRSSTTAAPRASSNDAYPSPKDKSCCKRYTRGLAVTTQHLEPSWEMPSDKKALGGFSHLLVAIDKLSKWIEVRPLTSIRSEQAVAFFTNIIHRFGVPNSIIADNGTQFTRKKFLDFCEDHHIRVDWAAVAHPMTNGQVERANGMILQGLKLWIYNDLNKFGKWWMKELPSVV

SEQ ID NO: 231759 - protein, 70 aa, Zea mays
  Clone ID: MRT4577_14295C.1.pep
NMGADIGKRHDLNKFHKTRMHVIKCIFITNSKFTRLGKIIFDQIKHDNTGAPWIVPELIVMHLPYKWLNR

SEQ ID NO: 231760 - protein, 125 aa, Zea mays
  Clone ID: MRT4577_142960C.1.pep
MAASLLLRQGRAGALKTVLLEAGVFRGVAPAVSLSAESGKNEKGLPPNPKKQSPPKNVVEPKERGQQLAPPTADAVSKTLSAPTSSPSVVSQSRTLASPNPDASVLHTDQRLPKLLSRKTLVEFP

SEQ ID NO: 231761 - protein, 88 aa, Zea mays
  Clone ID: MRT4577_142961C.1.pep
PNIFIGWFPSIQLGGFKSLEWCQALFFKWGPPNKNLPPLRPPTTPALGGPPPLNSLKDWAAQMAIMSKQPLVHQKWTSPPHEKYSLVL

SEQ ID NO: 231762 - protein, 50 aa, Zea mays
  Clone ID: MRT4577_142962C.1.pep
LYHIGVPEDRAPFIAPRCPLLVCKHHMCSLQLRDSTTTLFSDLREIRAHL

SEQ ID NO: 231763 - protein, 288 aa, Zea mays
  unsure (1)..(288): unsure at all Xaa locations
  Clone ID: MRT4577_142963C.1.pep
MPKGAKKRAKLKKQQQQGHPDDAGNTNASNGNCNGCDDNNSASSGRDGDHHLRIPPKVSRVDANEDSMESSEEMVTPRAAASEPDEEETKATAAEVPVERTVDADVAGSGEVIVDAFPPETVGQEREGKVDEAEVEVHAVVAQEPEVKDVLVAEESVVQEPVSDAPVAEASEVKELAKVHSVLESEPRVDEGRDEVVVVDETPVVPEVQEPEVKGVDATVVLKEQEKNSGNVVAKDSAEVSRSQEAAGVHITEXWSGDLQWQXLLQGSGQYGGISAAFLMPLLVQGDR

SEQ ID NO: 231764 - protein, 223 aa, Zea mays
  unsure (1)..(223): unsure at all Xaa locations
  Clone ID: MRT4577_142964C.1.pep
LRIRSRCWXSLLVPLAAWLSYREQDPDEALVEGGVTLQADRYHXDGAKHPFMVLELYAPMXGHCXNLGPQYXNAARXLTKHDPPIVLATXDANEEKNRTLAXTKYETPGFPILKMLRNRWKNIPEYKGPREDDDIAHHWNXRYGPAVLEIKSAERARRHLMHKNIYIDEIFREFTEAEVTNFMQIAEKMMTDYDFGHILYGSHLPRADVSEKNALIWLLEAFD

SEQ ID NO: 231765 - protein, 117 aa, Zea mays
  unsure (1)..(117): unsure at all Xaa locations
  Clone ID: MRT4577_142965C.1.pep
MPLFTPTELTTREDLMQIPSAPLLKAYHTVYEDYLSELDKVIKVLHDLVDEQNYASLMLLHPWYFIHTLDVRTKTGRPFCAFINPVXLAPGDYGGLASAIRLLXXINDEFLILSYSD

SEQ ID NO: 231766 - protein, 87 aa, Zea mays
  Clone ID: MRT4577_142966C.1.pep
LKSISRAKRAYSTRYHLAIGGGTDEQISYAQLHARNSSTLPTSIHMKCARPNNIASSLVVRSYLKQRNSSGMSMASYATSFYYTKNT

SEQ ID NO: 231767 - protein, 49 aa, Zea mays
  unsure (1)..(49): unsure at all Xaa locations
  Clone ID: MRT4577_142967C.1.pep
PFPXFLGTTTDSIHFFPKEKMTRLVGPFSFYSATNTLHDGTGFFGRGVH

SEQ ID NO: 231768 - protein, 50 aa, Zea mays
  Clone ID: MRT4577_142968C.1.pep
LCKASYSCFSQAESHTEFLRVRNKKAHGNLKGLVYFINTFYSLGSGIKAR

SEQ ID NO: 231769 - protein, 91 aa, Zea mays
  Clone ID: MRT4577_142969C.1.pep
LVMHKPTLAVLHLTGREYSVKKLHLVLLQGYGLVSTAVAPIKPQCLAVVGVAPTPSVPPPHQLVSGLYEGAFVPQGRVLGSGLSSPISLSC

SEQ ID NO: 231770 - protein, 67 aa, Zea mays
  Clone ID: MRT4577_14296C.1.pep
PFSLNKADAFYFEEGNDQLNTKIDRKDSTRMHLPDDGADSITGIIRQDEAADQYCVEEPHLNLCAAT

SEQ ID NO: 231771 - protein, 68 aa, Zea mays
  unsure (1)..(68): unsure at all Xaa locations
  Clone ID: MRT4577_142970C.1.pep
MGKHRTGTTGFRRIGMLVXAVVLHTEDVEVSSGNEPLITTDYMTYMFKXDTVDGQCNHSDLALKDVET

SEQ ID NO: 231772 - protein, 195 aa, Zea mays
  unsure (1)..(195): unsure at all Xaa locations
  Clone ID: MRT4577_142971C.1.pep
MRPNIITEAGVSTRLNQWWGSTPFITSGVTIICAAIYLVCLLVGYDSYAEICFLPSAVASHFQVYRFYTSVLFHGSLLHVLFNMLTFVPLGTELERIMGSVRLLFLMFLLATTNAIFHLIIAFLVDYNPLYHVSYLVDECSIGFSGVIFSMIVIETSLSGVQYRSVFGLFNVPANXYAWILLILFQFLARNVSLL

SEQ ID NO: 231773 - protein, 58 aa, Zea mays
  Clone ID: MRT4577_142972C.1.pep
PPKRISVPEAFEPPYMSPLYYPRANPPAQGPLVLGIDENLRSKIIREIIWPEIFSSPP

SEQ ID NO: 231774 - protein, 61 aa, Zea mays
  unsure (1)..(61): unsure at all Xaa locations
  Clone ID: MRT4577_142973C.1.pep
MAPALLSVGVVRGGAAEWALCGGPXGLALARGVVRCWFLAVWAGAGAAGALRLPVFCPVFG

SEQ ID NO: 231775 - protein, 236 aa, Zea mays
  Clone ID: MRT4577_142974C.1.pep
AYMILFGLSRNAVFVLMLFWYILYTAYSATLALTDWSSVFYSLIYTSVPTVVVGILDKNLSHNTLLCYPRLYEAGLRNEGYNLTLFWITMLDTLWQSLVLFYVPFFTYNISTMDIWSLGSLWTIAVVIIVNIHLAMDIQRWVLITHLAVWGSIAATFLCMVLIDSIPIFPNYGTIYNMAASRTYWLSVCLIIVLGLLPRLLCKVVYQTFWPSDIQIAREAELFKKLPQQLGSKACK

SEQ ID NO: 231776 - protein, 113 aa, Zea mays
  Clone ID: MRT4577_142975C.1.pep
QFTRNCGSRNVPCQCRCILIIITETHPLNLRPSRQRGRKMKPRGGAMGIETRTKIRLWVRDIPRVRGQPPAPRLGLLDLHGPHLPNSLARAQQIYLSRIRRSPEFVPIMDRDS

SEQ ID NO: 231777 - protein, 1528 aa, Zea mays
  unsure (1)..(1528): unsure at all Xaa locations
  Clone ID: MRT4577_142976C.1.pep
MGSLQRPFQPGTPTRETSGIDLASETKTSAISLQHANSKRTDDASTLAKDLPGVTLVPKTTVQSTPDVTSSSPVDQEVPTDSHLVPFGFGLDPPSDFASVDAFIEASPNPLGYRMRSPWDRMTAVSTYGPSGSEEDDEPDFSWDFSGLGNPSAMRDFMTACDYCLSDCSDGSRSFGDEDCGPSRECFHVDLGGPGEGNHLGTPENDDVRARPPPASSGVGQNLAAAALLLRAMPEPSTTEGRRIQGELKNLLEDAAVRRAESSASRRQGYPSEHRAATSRFMREASVHTGRTRNTAPAAPGRLGNEHPHRNRRTHLDERAFSRAIRRASFPTRFRTPTTITKYSGETRPELWLADYRLACHLGGTDDDNLIIRNLPLFLSDTARAWLEHLPPGQISNWDDLVQAFVGNFQGQYVRPGNSWDLRSCRQQPGESLRDYIRRFSKQRTELPNVTDSDVIDAFLAGTTCRDLVSKLGRKTPTRASELMDIATKFSSGQXEDVPEASTQRGTKKKGKNKSQAXSDVDLVAAAEYKNPRKPPGGANLFDKMLKEPCPYHQGPVKHTLEECAMLRRHFHKAGPPAEGGRARDDDKKEDHKAGEFPEVHDCYMIYSGRVANASARHRKQERREVCSVKVAAPVYLDWSDKPITFDQDDHPDRVPSLGKYPLVVDPVIGNVRLTKVLMDGGSSLNIFYAETLGLLRIDLSSVWAGAAPFHGIIPGKRVQPLGQLDLPVCFGTPSNFRRETLTFEVVGFRGTYHAVLGRPCYAKFMAVPNYTYLKLKMPGPNGVITVGPTYRHAYECNVECVEYAEALAESEALITDLESLSKEAPDVKRHAGNFEPAETEAVLVDFLRANADVFAWSPSDMPGIPRDVAEHSLDIRAGARPVKQPLRRFDEEKRRAIGEEIHKLMAAGFIKEAKGVKLNPEKCVFGVPRGMLLGFIVSERGIEANPEKIAAITSMGPIKDLKVVQRVTGCLAALSRFISCLGERGLPLYRLLRKAECFTWTPEAEEALGNLKALLTNAPILVPPAAGEALLVYVAATTQVVSAAIVVERREMGHALPVQRPVYFISEVLSETKICYPQIQKLLYAVILTRQKLRHYFESHPVTVVSSFPLGEIIQCREASGAGAGLLFISPLGKHLRYVLRLHFPASNNVAEYEALVNGLRITIELGVRRLDARGDSQLVIDQVMKNSHCRDPKMEAYCDEVRRLEGKFYRLELNHIARRYNETADELAKIASGRTTVPPDVFSRDLHQPSVKTDDAPEPEAPSAQPEAPSAPEGEALRVKEERSGVTPNRNWQTLYLQYLHRGELPLDRAEAQRLARRSPSGILXVGGREGAQRLGDGKELYHRSPSGILQRCISIAEGQELFQEIHSGPCGHHAAPRALVGNAFRQGFYWPTAVADATRIVRTCEGCXFYARQTHLPAQALQTIPITRPFAVWXGLDLVGPLQKAPGGYTHLLVAIDKFSKWIEVRPLNSIRSEQAVAFFTNIIHRFGVPNSIITDNGTQFTGRXSWTSARIITSGWTGPPWLTP

SEQ ID NO: 231778 - protein, 690 aa, Zea mays
  unsure (1)..(690): unsure at all Xaa locations
  Clone ID: MRT4577_142977C.1.pep
MPHHGSHRPPAPPPGGPVFPRATSTVVPDPSRFFAPPLLAAPLPTNSFFQNFVLKNGDQPEYVHPYSVRSPGGAALDICYPSRNHSPSFVIQTFVPDLTVSDAAGSAQRHCVSAFDDLSVTLDVSPSLRAHLVRGCPYVTVTTTXPAPXISVASVHAFLDVASCDDSGTKWRLGMNSGQTFLLYASAPIRLAQTTTTQLSAPGFAGAIRVAYLPDASMEPVLDRYSRCFPTAGHAALNRPFCVDYAWRKDGPGELLMLAHPLHLRLLAEDCPVRVLDDFRYRSIDGDMVGVVGDAWVLRTDPVSPTWHSTRGVSEDGVAEVVAALRVDVAGLASTAITTTSSYFYGKAIARAARLALIAEEVGCPDVIPAVQQFLKAAVTPWLDGSFQGNGFFYDAKWGGLVTLQGLKDSGADFGFGIYNDHHYHLGYFLYAIAVLSKIDPCWGRKYMPQAYSMVADFMTLSRNKAGASFTRLRMFDLWKLHSWAGGLTEFADGRNQESTSEAVNAYYSAALVGLSYGDAHLVSVGSTLTALEMLAAQTWWHVREGEGIYEDDFSGNNRVVGVLWANKRDSGLWFAPPEWKECRLGIQLLPVLPISEALFPDVAFVKDLVAWTLPALARDGVGEGWKGFVYALEGIYDREAALTKTRALKGHDDGNSLTNLLWWLHSRGSVVCDGDAGFGRCCWYRQYCH

SEQ ID NO: 231779 - protein, 530 aa, Zea mays
  Clone ID: MRT4577_142978C.1.pep
MTSRLMREASVYTGRTRDMTPAAPGRLGNEHHRRDRRARLDEKDDLVKAFARNFQGMYVRPRNSWDLRSYRQQPGESLREYIRRFSKQRTELPNITDSDVIGAFLADTTYRDLVSKLGRKTPTKASELMDIATKFASGQEVVEAIFRKDKHSQGRQQEEVPEAFAQRGTKKKAKKKSQAKRNAADVDLVAAVKHRNPRKPPRGANLFDKMLKESCPYHQGPVKHTLEECVMLRRYFHKAGLPTEGGKGQDNDKKEGDKAEEFPEVHGCFMIYGGQVANASARHRKQERQEVCSVKVAVPVYLVWSDKPITFDQGDRPDCVPSPGKYPLVVDPVIGNTRITKVLMDGGSSLNIIYDETLGLLEIDLSTIRAGAAPFHGIIPGKRVLPLGQLDLPVCFGTPSNFRKETLTFEVVGFRGTYHAVLGRPCYAKFMAVPNYTYLKLKMSGPNGVITVGSTYRHAYECDVECVEYAEALAESEALIADLECLSKEVPDAKRHAGNFEPTEAVKTVALDPSNDACKQVRIGSELDPK

SEQ ID NO: 231780 - protein, 715 aa, Zea mays
  Clone ID: MRT4577_142979C.1.pep
MPCLRNAGATYQRCMNHVFGEHIGRSVEAYVDDIVVKTRKASNLLSDLEVTFRCLKAKDVKLNPEKCVIGVPRGMLLGFIVSERGIEANPEKIAAVTSMGPIKDLKGVQRVMGCLAALSHFISRLGERGLPLYRLLRKAECFTWTPEAEEALGNLKALLTKAPILVPPAAGEALLVYVAATTQVVSAAIVVERQEEGHALPVQRPVYFVSEIIQCREASGRIAKWAVEIMGETISFAPRKAIKSQVLADFVAEWVDTQLPTAPIQPELWIMFFDGSLMKTGAGAGLLFISPFGKHIRYVLRLHFPASNNVAEDEALVNGLRIAIELGVRRLDAHGDSQLVIDQVMKNSHCRDPKMEAYCDEVRRLEDKFYGLELNHIARRYNETADELAKIASGRTTVPPGVFSRDLHQPSVKIDDTPEPEAPSAQSEVPSAQPEVPSAQPEAPSARPEAPSVQPEVPSTPEGEALRVEEERSGATPDRNWQTPYLQYLHRGELPLDRAEARRVARRAKSFVLLGDEKELYHRSPLGILQRCISVVEGFYWPTTVADATGIVRTCEGCQFYVKQTHLPAQALQTIPITWPFAVWGLDLVGPLQKAPGGYTHLLVAIDKFSKWIEVRPLNSIRSEQAVAFFTNIIHRFGVPNSIITDNGTQFTGRKFLDFCEDHHIWVDWSAMAHPMSNGQVERANDMILQGLKPRIYNDLNKFGKRWMKELPSVV

SEQ ID NO: 231781 - protein, 52 aa, Zea mays
  Clone ID: MRT4577_14297C.1.pep
TCHCYGALYELFSQFYGTVMLKCGADPNFETCRVVSGRSELNRHIEPKPVLI

SEQ ID NO: 231782 - protein, 115 aa, Zea mays
  unsure (1)..(115): unsure at all Xaa locations
  Clone ID: MRT4577_142980C.1.pep
TKNHGPHVQVVEKYTETQAAVKQQRHVFLARAHMAKIRASSXKYLTTLENTLLRKFTLCSRERLTDIMYMHVRFHETYCFRQTCYCQIGLFTIIQDIVVSLGTYGQFQQIEVPAG

SEQ ID NO: 231783 - protein, 654 aa, Zea mays
  Clone ID: MRT4577_142981C.1.pep
MVLGFGSLEFMSLDGGYDMILIPPPGDSGNGGRQSARRRRNRRRLPRVVEEQPSSSPRPLPRRRRGRRGNQGQAGGSASSAVERVDSASTSTGGAPGIDLALETKTSAISPRHANPEQADDASTLAEGLLGVTLVPETTVQSVPDVTSSPPVDQEVPTDSHPTSFGFSLDPPSGFALAGALVEASPNPPGFRMRSPWDRLTDVSTYGPSGSEEDDEPSFCWDFYGLGNPSAMRDFMTACDYCISDCSDGSRSLGDEDCGPSRECFHVDLGGPSEGNHLDMPEDSDLPRPVPRVDIPRELAVVPVQAGGHDPQLEQIRGVQARLDEGAGALEPIRRDVGQAWAAQPPAGEIRHLPQGFQHRIADDVRVRPPPASSGVGQNLAAAAMLLRAMPEPSTTAGRRIQGELKNLLEGATVRRAESSASRRQGYPSEPHAATSRFMREASVYTGRTRNTAPAAPGRLGNEHHHRDRRAHLDERVRRGYHPRRGGRYNSGEDRSPSPEPPGPQAFSRAIRRAPFPTRFRPPTTITKYSGETRPELWLADYRLACQLGGTDDDNPIIRNLPLFLSDTAHAWLEHLPPGQISNWDDLVQAFADYIRRFSKQRTELPNITDSDVIGVFLAGTTCRDLVSKLGHKTPTRASELMDIATKFASGQEA

SEQ ID NO: 231784 - protein, 56 aa, Zea mays
  Clone ID: MRT4577_142982C.1.pep
AGRVPGSDHSVRPCVRPRGRFNVRLRCAPLALSFTTLEHCLTQDPSHWHSIGDPDT

SEQ ID NO: 231785 - protein, 858 aa, Zea mays
  Clone ID: MRT4577_142983C.1.pep
MPFGLRNAGATYQRCMNHVFDEHIGRTVEAYVDDIVVKTRKASDLLSDLEVTFRCLKAKGVKLNPEKCVFGVPRGMLLGFIVSERGIEANPEKIAAITSMGPIKDLKGVQRVMGCLAALSRFISRLGERGLPLYCLLRKAECFTWTPEAEEALGNLKALLMKAPILVPPAAGEALLVYVAATTQVVSAAIVVERQEEGNALPVQRPVYFVSEVLSETKIRYPQVQKLLYAVILTQRKLRHYFESHPVTVVSSFPLGEIIQCREATGRIAKWAVEIMGEAISFAPRKAIKSQVLADFVAEWVDTQLPTIPIQPELWTMFFDGSLMKTGAGAGLLFISPLGKHLRYVLRLHFPASNNVAEYEALVNGLRIAIELGVRRLDARGDSQLVIDQVMKNSHCGDPKMEAYCDEVRRLEDKFYGLELNHIAWRYNETADELAKIASGRTTVPPDVFSQDLHQPSVKIDDTLELEAPSAQPEVPSAQIEAPSAQPEAPSAPEGETLRIEGEQSGVKPDQNWQTPYLQYLHRGELPLDRAEARWLARRAKSFVLLGDGKELYHHSPSGILQRCISITEGQELLREIHSGACGHHAAPRALIGNAFRQGFYWPTVVADATRIVRTCEGCQFYARQTHLLAQALQTIPITWPFAMWGLDLVGPLQKAPGSYTHLLVAIDKFSKWIEAVVFFANIIHRFGVPNSIITDNGTQFTGRKFLDFCEDHHIRVDWAAVAHPMSNGKVERANGMILQGLKPRIYNDLNKFGKRWMKELPSVVWSLRTTPSRATGFTPFFLVYGAEAVLPTDLEYGSPRTRAYTDQSNQASREDSLDKALLHSARYQQSLRRYHARGVRSRDLQVGDLVLRLRQDA

SEQ ID NO: 231786 - protein, 194 aa, Zea mays
  Clone ID: MRT4577_142984C.1.pep
MLKESCPYHQGPVKHTLEECVMLRRYFNKSGPLAEGGKAHDNNKKEGHKAEEFPEVANASARHHKQERREVCSVKVAAPVYLDWSDKPITFDQGDHPDRVPSPGKYPLVVDPFIGNVRLTKVLMDGGNSLNIIYAETLGLLQIDLSTIQAGAAPFHGIIPGKRVQPLGQLDLPICFGTPSNFRKETLTFEVVGF

SEQ ID NO: 231787 - protein, 946 aa, Zea mays
  Clone ID: MRT4577_142985C.1.pep
MPFGLRNAGATYQRCMNHVFGEHIGRTVEAYVDDIVVKTRKASDLLSDLEVTFRCLKAKGVRLNPEKCVFGVPRGMLLGFIVSERGIEANPEKIAAITSMGPIKDLKGVQRVMGCLAALSRFISRLGERGLPLYRLLRKAECFAWTPEAEEALGNLKALLTKAPVLVPPADGEALLVYVAATTQVVSAAIVVERQEEGHALPVQRPVYFVSEVLSETKIRYPQVQKLLYAVILTRRKLRHYFESHPVTVVSSFPLGEIIQCREASGRIAKWAVEIMGETISFAPRKAIKSQVLADFVAEWVDTQLPTAPIQPELWTMFFDGSLMKTGAGAGLLFISPLGKHLRYVLRLHFPASNNVAEYEALVNGLRIAIELGVRRLDARGDSQLVIDQVMKNSHCRDPKMEAYCDEVRRLEDKFFGLELNHIARRYNETADELAKIASGRTTVPPDVFSRDLHQPSVKIDDAPEPEVPSAQPEIPSAHPEVPSVQPEVPSAHPEVPSVQPEVPSARPEVPSAPKGEALGVEEEQNGATPDRDWQAPYLRYLRRGELPPDQVEARRVARRAKSFVLLGDEEELYHRSPSGILQRCISIAEGRELLQEIHSGACGHHAAPRALVGNAFRQGFYWPTAVTDATRIVRTCEGCQFYAKRTHLPAQALQTIPITWPFAVWGLDLVGPLQKAPGGYTHLLVAIDKFSKWIEVRPLNSIRSEQAVAFFTNIIHRFGVPNSIITDNGTQFTGKKFLDFCEDHHIRVDWAAVAHPMSNGQVERANGMILQGLKPRIYNDLNKFGKRWMKELPSVVWSLRTTPSRATGFTPFFLVYGAEAILPTDLEYGSPRTRAYTDQGNQASREESLDQLEEARDRALLHSARYQQSLRRYHARGVRSRDLQVGDLVLRLRQDARGRHKLTPPWEGPFVIAKVLKPGTYKLANNQGEIYGNAWNIKQLRRFYP

SEQ ID NO: 231788 - protein, 339 aa, Zea mays
  unsure (1)..(339): unsure at all Xaa locations
  Clone ID: MRT4577_142986C.1.pep
GVAPNRNWQTPYLQYLHRGELPLDKAEARRLARRAKSFVLLGDEKELYHRSPSGILQRCISVVEGQKLLQEIHSGACGHHAAPRALVGNAFRQGFYWPTAVADXLGLYAPAKEGTGGFSHLLVAIDKFSKWIEVRPVTSIRSEQAVAFFTNIIHRFGVLNSIITDNGTHFTGKMFLDFCEDHHIRVDWAAVAHPMTNGQVEHANXFGKRWMKELPSVVXSLRTTPSRATSFSPFFLVYGAEAVLPTDLEYGSPRTKAYDDRSNQTSREDSLDQLEEARDVALLHSARXDTRGRHKLTPPWEGPFIIAKILKPGTYKLANDQGEVYINAWNIRQLRRFYP

SEQ ID NO: 231789 - protein, 885 aa, Zea mays
  Clone ID: MRT4577_142987C.1.pep
MPFGLRNAGATYQRCMNHVFGEHIGRTVEAYVDDIVVKTRKVSNLLSDLEVTFRCLKAKGVKLNPEKCVFGVPRGMLLGFIVSERGIEANPEKITAITSMGPIKDLKGVQRVMGCLAALSRFISRLGERGLPLYRLLRKAECFAWTPEAEEALRNLKALLTKAPILVPPADGEALLVYVAATTQVVSAAIVVERQEEGHALPVQRPVYFISEVLSETKIRYPQVQKLLYAVILTRQKLRHYFESHPVTVVSSFPLGEIIQCREASGRIAKWAVEIMGETISFAPRKAIKSQVLADFVAEWVDTQLPTAPIQPELWTMFFDGSLMKTGAGAGLLFVSPLGKHLRYVLRLHFPASNSVAEYEALINGLRIAIELGVRRLDARGDSQLVIDQVMKNSHCRDPKMEAYCDEVRRLEDKFYGLELNHIARRYNETADELAKIASGRTTVPPDVFSRDLHQPSVNINDTPEPEAPSDQPEVPSAQPEVPSARPEDSSVQPEVPSAPEGEALRIEEERSGATPDRDWQTPYLQYLRQGELPLDQVEARRVARRAKSFVLLGDEQELYHCSPSGILQRCSSIAEGQELLQEIHSGACGHHAAPRALVGNAFRQGFYWSTAVADATRIVRTCEGCQFYAKQTHLPAQALQTIPITWPFAVWGLDLVGPLQKAPGGYTHLLVAIDKLSKWIEDHHIRVDWAAVAHPMSNGQVERANGMILQGLKPRIYNDLNKFGKRWMKELPSVVWSLRTTLSRATGFTPFFLVYGAEAVLPTDLEYGSPRTRAYDDQSNQASREDSLDQLEEARDRALLHSARYQQSLRRYHARGVRPRDLQVGDLVLRLRQDARGRHKLTPPWEGPFVIAKVLKPGTYKLANSQDEVYGNAWNIQQLRRFYP

SEQ ID NO: 231790 - protein, 126 aa, Zea mays
  unsure (1)..(126): unsure at all Xaa locations
  Clone ID: MRT4577_142988C.1.pep
RAYLLLPVDPGCSFPGNAYIMLSIREFHSTNDVKQIFHHMLEWLKHIPKFDSSFAHYDVKPGNXVLLPGVKXQAPVATLMDFGRAKPSKKEIRSRFKEYKFKNWPLSNSLFLNGPLNYWTCPSLPI

SEQ ID NO: 231791 - protein, 150 aa, Zea mays
  unsure (1)..(150): unsure at all Xaa locations
  Clone ID: MRT4577_142989C.1.pep
LSLGYPFEQGGLYVHXLRMGPYVCAMWNLSGSPVWLRYVPGISLHADIGLLKDAMQALVEKIAFMKNSNGLFEWRCGTIILAQEENEDGPMELGMGAGAQSYCNWAARMAGDTXSRVPCVMXLYYDALGPVIDTWNGFYCDYLGGNFNSE

SEQ ID NO: 231792 - protein, 108 aa, Zea mays
  unsure (1)..(108): unsure at all Xaa locations
  Clone ID: MRT4577_14298C.1.pep
VLPHRFVFRFWFLGQKEEIAASDLXSRCLFGGLAWATDNHSLNNALRPSGRALRSKTILDRETQRSRGFGFVTFSTEDPFPTAIKGLNGRSLNGXNINGYKGQSPGRP

SEQ ID NO: 231793 - protein, 894 aa, Zea mays
  Clone ID: MRT4577_142990C.1.pep
MSFGLRNAGATYQRCMNHVFGEHISRTVEAYVDDIVVKTRKASDLLSDLEVTFRCLKAKGVKLNPEKCVFGVPRDMLLGFIVSERGIEANPEKIAAITSMGPIKDLKGVQRVMGCLAALSRFISRLGERGLPLYRLLRKAECFTWTPEAEEALGNLKALLTKAPILVPPAAGEALLVYVAATTQVVSTAIVVERQEEGHALPVQRPVYFVSEVLSETKIRYPQVQKLLYTVILTRRKLRHYFESHPVTVVSSFPLGEIIQCREASGRIAKWAVEIMGETISFAPRKAIKSQVLADFVAEWVDTQLPIAPIQPELWTMFFDGSLMKTGVGAGLLFISPLGKHLRYVLRLHFPASNNVAEYEALVNGLPIAIKLGIRRLDARGDSQLVIDQVMKNSHCRDPKMEAYCDEVRRLEDKFYGLELNHIARRYNETADELAKIASGRTTVPPDVFSRDLHQPSVKIDDTPEPEAPSAQPEATSAQPEAPSAPPEVPSAQSEATLARSEASSVQPEVPSAPEGETLHVGGERSVVTPDQSWQTLYLQYLHRGELPSDRAEARRLARRAKSFVLLGDEKELYHRSPSGILQRCISIAEGQELLQEIHSGACGHHAAPRALVGNAFRQGFYWPTAVANATRNVRTCEGCQFYARQTHLPAQALQTIPITWPFAVWGLDLVGPLQKAPGGYTHLLVAIDKFSKWIEVRPLNSIRSEQAMAFFTNIIHRFGVPNSIITDNGTQFTGRKFLDFCEDHHIRVDWAAVAHPMSNGQVERANDMILQGLKPRIYNDLNKFGKRWMKELPSVVWSLRTTPSRAMGFTPFFLVYEAEAVLPTDLEYGSPRTRAYTDQSNQASREDSLEQLEEARDKALLHSARYQQSLRRYHARGVRSRDLQVGDLVLRLR

SEQ ID NO: 231794 - protein, 88 aa, Zea mays
  unsure (1)..(88): unsure at all Xaa locations
  Clone ID: MRT4577_142991C.1.pep
GYAAVRKHAPAAYVVISNRLSSRNSTELLXFADHGFPGAVVKVHXLNGFQKLFRKFHREQNIDFVRDNFSDEIAAVTXPKWPLTFVGE

SEQ ID NO: 231795 - protein, 149 aa, Zea mays
  unsure (1)..(149): unsure at all Xaa locations
  Clone ID: MRT4577_142992C.1.pep
GNQNPTQRHSEREQNTRNERGAAAAAARAAPKNATRAEAPQGPPNGRRAATNADGPKKKNKTDKPDGEGGGQTDDDDANGRKGKGKGENQDDDKDGANDDGNSPSNNEEDRXPTGDDNGGGTTGQAEQDRNPRKKATEEEPTQGNNTKG

SEQ ID NO: 231796 - protein, 43 aa, Zea mays
  Clone ID: MRT4577_142993C.1.pep
CGVQEPENSAQIIRLQNWRFFGQMHIPLALLDHPALSVAWLWP

SEQ ID NO: 231797 - protein, 150 aa, Zea mays
  Clone ID: MRT4577_142994C.1.pep
PGLPPGFLPAFLPGLGIFVEIVKPLSGNFPLAGVFLVPHFDFPQAVFGLFCPPPPSGFANVGIPFFPGFLSAQVGGFFFHASRGRVSFARLCSPPSPPPVFSFFLWGLFFIKPPLLFSPPLLSFFSPPSCLGFFSFLVPPFFLFLFFFFS

SEQ ID NO: 231798 - protein, 65 aa, Zea mays
  Clone ID: MRT4577_142995C.1.pep
MALPIGAKFIPLRKPRKLPGERFHDHACSVFLLLLNPSPHSALYPAVAFVDLVPSLWRHPDQVYV

SEQ ID NO: 231799 - protein, 40 aa, Zea mays
  Clone ID: MRT4577_142996C.1.pep
TYKCTCVTNWQGLNYTRGWRPDRPANNAQHMATLILDYRI

SEQ ID NO: 231800 - protein, 85 aa, Zea mays
  Clone ID: MRT4577_142997C.1.pep
MGRGKSSFFASLFGCKKQVSGGRQEESAAARPPLTHRPYQGCGGAMTTIDDYYGQNWYADRDINRRASDYIERVHRVILASEQGE

SEQ ID NO: 231801 - protein, 61 aa, Zea mays
  Clone ID: MRT4577_142998C.1.pep
TPLPTHKNPFSNLLSHLYLNNLIFFILSPSIPNTIIPKKNPFSSNYNPTFIFPLQTKKPPT

SEQ ID NO: 231802 - protein, 158 aa, Zea mays
  unsure (1)..(158): unsure at all Xaa locations
  Clone ID: MRT4577_142999C.1.pep
QESALISFAKRYIWLASSCCWLCSPSRASSCRRSSRASRRRRSASTESTPATGTGVVVQINAGTYIEKVVVPASKPYVTFQGAGRDVXXVVKWHDRASDRGPDGQPLRTYNTXSVTILANYFNAKNISFKVSSRLPSRPPSTWPRDDGAAGAGKVTKP

SEQ ID NO: 231803 - protein, 92 aa, Zea mays
  unsure (1)..(92): unsure at all Xaa locations
  Clone ID: MRT4577_14299C.1.pep
IFQFNGSSSCIQERAKALEVVQYIKDTFHDGKCEVAGVEDGKLMASVXTGEFWALFGGYAPLPRKAPSEDKGRDKKIVIKLICLKQGKLGAN

SEQ ID NO: 231804 - protein, 48 aa, Zea mays
  Clone ID: MRT4577_1429C.1.pep
RLCPILLLSRADVHTQRVHRKHLNRGMTTRHPKFSVSPTYERHCITHV

SEQ ID NO: 231805 - protein, 67 aa, Zea mays
  Clone ID: MRT4577_142C.1.pep
FHHTTLQLLFPSINYPPAVGFLPSVGLPYSLLSYSSSTSSSYHPSFLHLHILHSFLYHFLALHPLIN

SEQ ID NO: 231806 - protein, 206 aa, Zea mays
  Clone ID: MRT4577_143000C.1.pep
MSRLDTQNTAPAPMPGTQGGQAVAFRISGDKAFFFGCGFYGAQDTLCDDAGRHYFRDCYIEGSIDFVFGNARSLYKDCELHSTAQRFGSVAAHGRRDPCERTGFAFVNCRVTGTGRLYVGRAMGQYSRIVYAYTYFDSVIAPGGWDDWDHTSNKSMTAFFGMYRNWGPGVDAVHGVSWARELDYFAARPFLGKSFVNGYHWLTPDV

SEQ ID NO: 231807 - protein, 250 aa, Zea mays
  unsure (1)..(250): unsure at all Xaa locations
  Clone ID: MRT4577_143001C.1.pep
AFRISGDKAFFFGCGFYGAQDTLCDDAGRHYFRDCYIEGSIDFVFGNARSLYKVRSTAAAAAYVRSRALATDRRRPSNNCGNARAQDCELHSTAQRFGSVAAHGRRDPCERTGFAFVNCRVTGTGRLYVGRAMGQYSRIVYAYTYFDSVIAPGGWDDWDHTSNKSXTFSSSSRQLHYIPCRPCGANVSDCYCYLLAGAHRCAFFGMYRNWGPGVNAVHGVSWAREIDYFAARPFLGKSFVNGYHWLTPDV

SEQ ID NO: 231808 - protein, 106 aa, Zea mays
  Clone ID: MRT4577_143002C.1.pep
FWLKKKKEVVRTLEKDMPVGTYPLNFDDGRPTKLCDANRMQTPKNKTFFPEEAFRDFLSRGGGPFFRGYGGYKNVDTLDDLRPGVMYQGLRSLGDLFCNIYFGQTC

SEQ ID NO: 231809 - protein, 74 aa, Zea mays
  Clone ID: MRT4577_143003C.1.pep
QRTFPHFTRLGAMAKLALALLLLLAGGDPRRPAAGGHLDIDLGFPFFWGTPEGVPRHGWPECLSEESDEEGLGP

SEQ ID NO: 231810 - protein, 76 aa, Zea mays
  Clone ID: MRT4577_143004C.1.pep
QMNEFPFCQKKRGDATKYSYLHKVLFYLLLPSKGHNSACDCAVTLKIQVGCSMVRRQTQALKHSARPQQILNLRII

SEQ ID NO: 231811 - protein, 125 aa, Zea mays
  Clone ID: MRT4577_143005C.1.pep
TPEDKKSARKITAVRCTKQTKSRIPIKQQQNHRFVLPHLTLPPSSSDEIWKMRDEKRTRNPSRNASTAAPPLVTKCWNRKQSQKSLQTRVARTLQRVGKPPDFAQDKRTKINSRRKYNCTYSSHI

SEQ ID NO: 231812 - protein, 153 aa, Zea mays
  Clone ID: MRT4577_143006C.1.pep
HGRFLPASAMFPGKMSPKEVFEQMINVQNKNLSYFVEWVPNNVKSRVWDIPPRGLSMGSPFIGNLTSIQEMFRRVSEQFPSMFRRKAFLPWYPGEGMDKMEFPQAESNMNALVLEFHQFQDAASPEEEFEDEEEVQAHYILGEGCFCVKPFGP

SEQ ID NO: 231813 - protein, 151 aa, Zea mays
  unsure (1)..(151): unsure at all Xaa locations
  Clone ID: MRT4577_143007C.1.pep
KRNPLPNSTGAGRAKRPGATGKPXGETKPNPTPPNATPTKPPAPSPKNPKRHGGRARGGSGEQGKGPLGAQGDPQKNADGPGPGGGPPGPPGKPGPAPGSRPRAPGGGRLKPGRSQGQSGAPGEKGNPPATPSPKAPGPKQGSPGGPKKGA

SEQ ID NO: 231814 - protein, 57 aa, Zea mays
  Clone ID: MRT4577_143008C.1.pep
PGGLKGGEQGWAPPPIWAHWDPWFLRPPPEKGIPRVQAKPPSPIQAPKKLPREKLAP

SEQ ID NO: 231815 - protein, 109 aa, Zea mays
  Clone ID: MRT4577_143009C.1.pep
RFRKGALTCMVGLVYIIRMGLVMLKTKSRRGAGTITKNRKSVVVDVCRHWPAWACRLLLEDGGYRWYFCLLTEVRRVVVFKCGIQWEFELGTKGVARILCRVHVRKTMG

SEQ ID NO: 231816 - protein, 136 aa, Zea mays
  unsure (1)..(136): unsure at all Xaa locations
  Clone ID: MRT4577_14300C.1.pep
NWGPFNLPFKGPNSPYREWYXKLXLAGVLKRGDWKNLGVPKLNRFEENPLFASCLITKKARTDRLSKNLPTLNGKXNPPCSGELSAGGVXVTPKVTVKFARALTPVLFVFFLSFFPLLAGFPRKVLNGGAPXLGFQ

SEQ ID NO: 231817 - protein, 122 aa, Zea mays
  Clone ID: MRT4577_143010C.1.pep
MSVAKRYVLRLFISLKYVTANVVDRQSGRIVTTASTAERPLRDGLECGRACNAKAAAAVGEVLAMRLKVDGLAREPIYANAEKEVAKKGFKNQTKVWAILNALRSHGVNLHIDDDGDHRPHV

SEQ ID NO: 231818 - protein, 69 aa, Zea mays
  Clone ID: MRT4577_143011C.1.pep
VRQCHTRGKCGTGGERWVQGSVRKIRCPRSGGWSFGSCQQGQRSGSAGLCVCFEVACTLDRIVVWAKGE

SEQ ID NO: 231819 - protein, 125 aa, Zea mays
  unsure (1)..(125): unsure at all Xaa locations
  Clone ID: MRT4577_143012C.1.pep
MADYYHVGRAMYSITDECYDAGRHVGCVRAYSRTDKYYDDVDDRMRRTAYGADDCAYGGRQTGEYADEYSRGGRYERYGVXCEHFKMKDKDYMHKERLAEVSVLYALTFDLCDARHAKRVTEDPL

SEQ ID NO: 231820 - protein, 74 aa, Zea mays
  Clone ID: MRT4577_143013C.1.pep
PSRVFFFLFFFFFFFFFFFFFLGTPNFSLSSSSITPLQTATGATKFFSQKSYEKTFLLASKISGHIQILQGPFL

SEQ ID NO: 231821 - protein, 231 aa, Zea mays
  Clone ID: MRT4577_143014C.1.pep
TPAGSGPEFPGRPTRPLILGFIIAFVLAFSVGANDVANSFGTAVGSGVVTLKQACILASIFETVGSALLGAKVSETIRNGLIDVELYNETQDLLMAGSVSAMFGSAVWQLVASFLKLPISGTHCIVGATIGFSLVANGQKGVKWSELIKIVMSWFVSPLLSGIMSGILFFLVRAFILRKADPVPNGLRALPIFYACTIGINLFSIMYTGAPLLGFDKLPLWGTILISVGCA

SEQ ID NO: 231822 - protein, 118 aa, Zea mays
  unsure (1)..(118): unsure at all Xaa locations
  Clone ID: MRT4577_143015C.1.pep
DHDQAPSTSLVKEAHALGLEVYASGGANDIDLSYNYSYDPREYFLQXMDNPDFSEDGVLTDFPSTASRSGASXSFQGXPLPPPGKDTRPVIITHKGASGEFPGSTDLAYQQAIKDAAD

SEQ ID NO: 231823 - protein, 150 aa, Zea mays
  unsure (1)..(150): unsure at all Xaa locations
  Clone ID: MRT4577_143016C.1.pep
RASXXVRQVSCESCGIVLSAPAPSIGREGKGCSFAAPFEKPRVRTGQVNPFCXSAAPRAAFKKGAGXRLPCLLANAHVRRSFVFLPRHGQASYDXSPPPXTHGRKLIEKVXGLRXXAEKXQPTAFAATINXXWXXKTRKTMVLCNREINL

SEQ ID NO: 231824 - protein, 100 aa, Zea mays
  Clone ID: MRT4577_143017C.1.pep
SSAACVDPWRYMWSCHSVPHAPSDSGLHAAPPGIRISYLVRQPISEPSQLLAPASRAWRRPEKRTSGPSAGCGSREPARSVVRSRPALPDAVGSPADAVV

SEQ ID NO: 231825 - protein, 34 aa, Zea mays
  Clone ID: MRT4577_143018C.1.pep
KQNLQSCTILIKGFAFKVGSYYSVICGTVCGRGA

SEQ ID NO: 231826 - protein, 132 aa, Zea mays
  Clone ID: MRT4577_143019C.1.pep
GVGPHIFITFHEYRRVHDLFFVYSPEVRLHYIRSISQVSIYSFIWQLTTQLRGVKWNKRIHLESSYFCPFGGCDGEVSQSDVEPNSVEKQGLEPGQMIVVARGAGAVRSRSPRGAGCEVRLIRQRGFLSFLR

SEQ ID NO: 231827 - protein, 401 aa, Zea mays
  Clone ID: MRT4577_14301C.1.pep
MRPLCLCSNPPLHSKSHGGSHRSLARLRFPCSLGMELITNVTEYEKLAKERLPKMVYDYYASGAEDQWTLKENREAFSRILFRPRVLIDVSRIDMATNILGFSISMPIMIAPSAMQKMAHPDGELATARAAASAGTIMTLSSWSTSSVEEVNSVGPGIRFFQLYVYKDRNIVRQLVKRAEMAGFKAIALTVDTPILGRREADIKNRFALPPHLVLKNFQALDLGTMDKTNDSGLASYVAGQVDRTLSWKDVKWLQTITSLPILVKGIVTAEDTRLAIEYGAAGIIVSNHGARQLDYVPATISCLEEVVREAKGRLPVFLDGGVRRGTDVFKALALGASGVFIGRPVLFSLAVDGEAGVRKVLQMLRDELELTMALSGCTSLREITRAHVITDSDRIGRSRL

SEQ ID NO: 231828 - protein, 56 aa, Zea mays
  Clone ID: MRT4577_143020C.1.pep
QKNKNYFVVGSEYDCRLTCSTPLSTSLAIGERISEMNITRNRKFRIQFPGIRIEKS

SEQ ID NO: 231829 - protein, 28 aa, Zea mays
  Clone ID: MRT4577_143021C.1.pep
TPAKISIGKITISEAELLDITDNAKVKT

SEQ ID NO: 231830 - protein, 62 aa, Zea mays
  Clone ID: MRT4577_143022C.1.pep
RMAGITISFSLGLSFVTSVQKKHISNLVGSLSVYMVINWFSGCPNVCSILYWRRGQGKALRG

SEQ ID NO: 231831 - protein, 61 aa, Zea mays
  Clone ID: MRT4577_143023C.1.pep
MPPLPCTVRMYMPTAPFTARHLFAGKALADIVPTSHNRVVRHVNRTDYRVIDISEDGFAIL

SEQ ID NO: 231832 - protein, 64 aa, Zea mays
  Clone ID: MRT4577_143024C.1.pep
TFLRANHTDGFVQMDIFSYSLLKVLLGDSLFQPFRFSGKQTLAYMEKRTNALMDGWQCCTFNNL

SEQ ID NO: 231833 - protein, 53 aa, Zea mays
  Clone ID: MRT4577_143025C.1.pep
SSVRPPLIVSPCSGHNELLFVEAAGCWEVEGRRVADDLARDEHHNYKEVYPLV

SEQ ID NO: 231834 - protein, 151 aa, Zea mays
  unsure (1)..(151): unsure at all Xaa locations
  Clone ID: MRT4577_143026C.1.pep
CSCCSXSGLLFARCRAWRAXLVXALGLALXFRPALXLLWVRLGGALVRAPGVXVLALAPAPGLVLLAVVXXACPSXAXFXXLPPLLXRLVXVWXLXXLPPRLCRCRXPSCLPRLVGFCCSACGPGRSLCFGVFARASPAGPPXPSVCLPLP

SEQ ID NO: 231835 - protein, 183 aa, Zea mays
  unsure (1)..(183): unsure at all Xaa locations
  Clone ID: MRT4577_143027C.1.pep
LKKPKKTQKRTPTPPPKKTGGTXPPPGTNENKKXRGGQKQPKPPNKKGKKREGEQKQPKKGQSPTPTGKNNKNRGGQKTGPPPQKKRAPPGTXWGDFGPQKPHPPGGGRPKGPXPPRGGKKKGQPREDPPPRGVNPEKAXKTPGWPRRKPXAGGSKTPKETPEKKKAGPPPNGGEGGTQPKTR

SEQ ID NO: 231836 - protein, 249 aa, Zea mays
  Clone ID: MRT4577_143028C.1.pep
MEVPAPPAWASPLATTTTILLVTAALVLVTTTVLRRRAHRHRKRQRQAPPGPRPWPVIGNLNLLGALPHRSIHELSARYGPLMSLRFGSFPVVVGSSVEVAEVVLRTQDLAYLDRPRMACGKYTVYNYSGMLWSHYGPYWRQLRKLWVTELLSARQLRLTERVRAEEVRAMLRDLHPHPATSTTSTAAVVLKERLLMVTLNVISRMVLGKKYVGEDDAGGPGAAATPEEFRWMIEEIFFLNGALHVGDM

SEQ ID NO: 231837 - protein, 38 aa, Zea mays
  Clone ID: MRT4577_143029C.1.pep
RCVAIKDVVVFRSPHIGAVVRSRVMTTIELVARYGRIL

SEQ ID NO: 231838 - protein, 104 aa, Zea mays
  Clone ID: MRT4577_14302C.1.pep
ARLFASLPSPSLQLLRPEFSVPSQVSPSKHAAEFLTNSTRTVALHLLRAYKRGVLLHLPNDKQHILRSTPSHFWQACVGKSLVSPRPPDAGQRQLLLQIFFQHS

SEQ ID NO: 231839 - protein, 108 aa, Zea mays
  Clone ID: MRT4577_143030C.1.pep
SLLFFFFFFFFLVGFFFRPPREKHQRTTKFFLYGPTLKEEKENGSRAYVTLALQPGDWFLNIPELQLYCSAGERTPLQLCHMAHFLTRAFLSILPGEEYQKTGDPKTT

SEQ ID NO: 231840 - protein, 68 aa, Zea mays
  Clone ID: MRT4577_143031C.1.pep
FDRGIRQWVFDEHNYGYKMNRATSAPVLATISIKHTSLSFFLAKKLSLEPTSLDQRYVTTLQQSPGGL

SEQ ID NO: 231841 - protein, 100 aa, Zea mays
  Clone ID: MRT4577_143032C.1.pep
KNTIVLHNTCEGSRLAAPIILDLVLLAELSTRIQLKAEGEDKFHSFHPVATILSYLTKAPLVPPGTPVVNALAKQRAMLENIMRACVGLAPENNMILEYK

SEQ ID NO: 231842 - protein, 93 aa, Zea mays
  Clone ID: MRT4577_143033C.1.pep
KPTLPCHLHLASERLSEDSLFPDHHRTMAEQTDYGVFKGKLGCPTDAPELQINRIRITLSSKNGKNLEIVCATFGKRSQGQLFGRLNGPAMIP

SEQ ID NO: 231843 - protein, 458 aa, Zea mays
  Clone ID: MRT4577_143034C.1.pep
MMPTFLFWWCRVMLVGWGGNNGSTLTAGVIANREGISWATKDKVQQANYYGSLTQASTIRVGSYNGEEIYAPFKSLLPIVNPDDIVFGGWDISNMNLADSMTRAKVLDIDLQKQLRPYMESMVPLPGIYDPDFIAANQGSRANSVIKGTKKEQVEQIIKDIREFKEKNKVDKIVVLWTANTERYSNVCAGLNDTMENLLASVDKNEAEISPSTLYAIACVMEGVPFINGSPQNTFVPGLIDLAIKNNCLIGGDDFKSGQTKMKSVLVDFLVGAGIKPTSIVSYNHLGNNDGMNLSAPQTFRSKEISKSNVVDDMVSSNAILYEPGEHPDHVVVIKYVPYVGDSKRAMDEYTSEIFMGGKNTIVLHNTCEDSLLAAPIILDLVLLAELSTRIQLKAEGEDKFHSFHPVATILSYLTKAPLVPPGTPVVNALAKQRAMLENIMRACVGLAPENNMIMEYK

SEQ ID NO: 231844 - protein, 108 aa, Zea mays
  Clone ID: MRT4577_143035C.1.pep
TSEIFMGGKNTIVLHNTCEDSLLAAPIILDLVLLAELSTRIQLKAEGEDKFHSFHPVATILSYLTKAPLVPPGTPVVNALAKQRAMLENIMRACVGLAPENNMILEYK

SEQ ID NO: 231845 - protein, 450 aa, Zea mays
  Clone ID: MRT4577_143036C.1.pep
WCRVMLVGWGGNNGSTLTAGVIANREGISWATKDKVQQANYYGSLTQASTIRVGSYNGEEIYAPFKSLLPMVNPDDLVFGGWDISSMNLADAMTRAKVLDIDLQKQLRTYMESMVPLPGVYDPDFIAANQGSRANNVIKGTKKEQVEQIIKDIREFKEKNKVDKVVVLWTANTERYSNVCAGLNDTMENLLASVDKNEAEISPSTLYAIACVTEGVPFINGSPQNTFVPGLIDLAIKNNCLIGGDDFKSGQTKMKSVLVDFLVGAGIKPTSIVSYNHLGNNDGMNLSAPQTFRSKEISKSNVVDDMVSSNAILYGPGEHPDHVVVIKYVPYVGDSKRAMDEYTSEIFMGGKSTIVLHNTCEDSLLAAPIILDLVLLAELSTRIQLKPEGTDKFHSFHPVATILSYLTKAPLVPPGTPVVNALAKQRAMLENILRACVGLAPENNMILEYK

SEQ ID NO: 231846 - protein, 62 aa, Zea mays
  Clone ID: MRT4577_143037C.1.pep
HLKMSPPSPLCLQQPSSLLQNIPWVCLGAHNIKAHHLQQLGLPNHPTYCDNISRFHSSHQLA

SEQ ID NO: 231847 - protein, 76 aa, Zea mays
  Clone ID: MRT4577_143038C.1.pep
GHGEISNVFVKGLKHRLPTNFGGLDRCPPTREIIYFVLDKTPIKKKSCHICFGTKINQMGETWSPPPQKLGLGPGP

SEQ ID NO: 231848 - protein, 137 aa, Zea mays
  unsure (1)..(137): unsure at all Xaa locations
  Clone ID: MRT4577_143039C.1.pep
WEGEIDDSWVKEINCXEWESFAFHHSPLVVLXFDRYKKASDNWKTLKELEKAIKVYWDAKDRFPPRAVKIDLNIETDLAYVFKVKECPQFFFLRGNRFLYREKDFRPADELVHMIAHFYYKAKRPSCVAKVNVTPSC

SEQ ID NO: 231849 - protein, 424 aa, Zea mays
  unsure (1)..(424): unsure at all Xaa locations
  Clone ID: MRT4577_14303C.1.pep
MELITNVTEYEKLAKERLPKMVYDYYASGAEDQWTLKENREAFSRILFRPRVLIDVSRIDMATNILGFSISMPIMIAPSAMQKMAWNAGELATARAAASAGTIMXKDHTACGTSSHDPNTNPLCXLWFFQTLSSWSTSSVEEVNSVGPGIRFFQLYVYKDRNIVRQLVKRAEMAGFKAIALTVDTPILGRREADIKNRFALPPHLVLKNFQALDLGTMDKTNDSGLASYVAGQVDRTLSWKDVKWLQTITSLPILVKGIVTAEDXLAIEYGAAGIIVSNHGARQLDYVPATISCLEEVVREAKGRLPVFLDGGVRRGTDVFKALALGASGVFVXRRRRRAHCLLKTLLFRSSPAPDAVAWCVLQIGRPVLFSLAVDGEAGVRKVLQMLRDELELTMALSGCTSLREITRAHVITDSDRIGRSRL

SEQ ID NO: 231850 - protein, 510 aa, Zea mays
  Clone ID: MRT4577_143040C.1.pep
MFIESFRVESPHVRYGPTEIESEYRYDTTELVHEAKDGASRWVVRPKSVKYNFRTSTAVPKLGVMLVGWGGNNGSTLTAGVIANREGISWATKDKVQQANYYGSLTQASTIRVGSYNGEEIYAPFKSLLPMVNPDDLVFGGWDISSMNLADAMTRAKVLDIDLQKQLRPYMESMVPLPGVYDPDFIAANQGSRANNVIKGTKKEQVEQIIKDIREFKEKNKVDKVVVLWTANTERYSNVCAGLNDTMENLLASVDKNEAEISPSTLYAIACVTEGVPFINGSPQNTFVPGLIDLAIKNNCLIGGDDFKSGQTKMKSVLVDFLVGAGIKPTSIVSYNHLGNNDGMNLSAPQTFRSKEISKSNVVDDMVSSNAILYGPGEHPDHVVVIKYVPYVGDSKRAMDEYTSEIFMGGKSTIVLHNTCEDSLLAAPIILDLVLLAELSTRIQLKPEGTDKFHSFHPVATILSYLTKAPLVPPGTPVVNALAKQRAMLENIMRACVGLAPENNMILEYK

SEQ ID NO: 231851 - protein, 65 aa, Zea mays
  Clone ID: MRT4577_143041C.1.pep
LMPGPPQFFCFFPKFALWLFHPQCCQFIFSWSKLVLCFNETYIRLIFLKGDSNLFPSSEFEMFKA

SEQ ID NO: 231852 - protein, 510 aa, Zea mays
  Clone ID: MRT4577_143042C.1.pep
MFIESFRVESPHVRYGPTEIESEYRYDTTELVHEGKDGASRWVVRPKSVKYNFRTRTAVPKLGVMLVGWGGNNGSTLTAGVIANREGISWATKDKVQQANYYGSLTQASTIRVGSYNGEEIYAPFKSLLPMVNPDDIVFGGWDISNMNLADSMTRAKVLDIDLQKQLRPYMESMVPLPGIYDPDFIAANQGSRANSVIKGTKKEQVEQIIKDIREFKEKNKVDKIVVLWTANTERYSNVCAGLNDTMENLLASVDKNEAEISPSTLYAIACVMEGVPFINGSPQNTFVPGLIDLAIKNNCLIGGDDFKSGQTKMKSVLVDFLVGAGIKPTSIVSYNHLGNNDGMNLSAPQTFRSKEISKSNVVDDMVSSNAILYEPGEHPDHVVVIKYVPYVGDSKRAMDEYTSEIFMGGKNTIVLHNTCEDSLLAAPIILDLVLLAELSTRIQLKAEGEDKFHSFHPVATILSYLTKAPLVPPGTPVVNALAKQRAMLENIMRACVGLAPENNMILEYK

SEQ ID NO: 231853 - protein, 510 aa, Zea mays
  Clone ID: MRT4577_143043C.1.pep
MFIESFRVESPHVRYGPTEIESEYRYDTTELVHEAKDGASRWVVRPKSVKYNFRTSTAVPKLGVMLVGWGGNNGSTLTAGVIANREGISWATKDKVQQANYYGSLTQASTIRVGSYNGEEIYAPFKSLLPMVNPDDLVFGGWDISSMNLADAMTRAKVLDIDLQKQLRPYMESMVPLPGVYDPDFIAANQGSRANNVIKGTKKEQVEQIIKDIREFKEKNKVDKVVVLWTANTERYSNVCAGLNDTMENLLASVDKNEAEISPSTLYAIACVTEGVPFINGSPQNTFVPGLIDLAIKNNCLIGGDDFKSGQTKMKSVLVDFLIGAGIKPTSIVSYNHLGNNDGMNLSAPQTFRSKEISKSNVVDDMVSSNAILYGPGEHPDHVVVIKYVPYVGDSKRAMDEYTSEIFMGGKSTIVLHNTCEDSLLAAPIILDLVLLAELSTRIQLKPEGTDKFHSFHPVATILSYLTKAPLVPPGTPVVNALAKQRAMLENIMRACVGLAPENNMILEYK

SEQ ID NO: 231854 - protein, 108 aa, Zea mays
  Clone ID: MRT4577_143044C.1.pep
TSEIFMGGKNTIVLHNTCEDSLLAAPIILDLVLLAELSTRIQLKPEGTDKFHSFHPVATILSYLTKAPLVPPGTPVVNALAKQRAMLENIMRACVGLAPENNMILEYK

SEQ ID NO: 231855 - protein, 83 aa, Zea mays
  Clone ID: MRT4577_143045C.1.pep
AEPPEVWRSRGGGEEDTGNAVRGRKTIGEGIFAKVTHAHDSRTGAVRAIPVLDRSHVTPPQDGRADQTGDFDLKLIKHPNVVQ

SEQ ID NO: 231856 - protein, 140 aa, Zea mays
  unsure (1)..(140): unsure at all Xaa locations
  Clone ID: MRT4577_143046C.1.pep
ASKRVLCLALNLLXFTEDNACGSCPXTPTPPVEPEPQAPADTPPPSSXRVKCPLNTLKVSMQRHALRLVIGEXIARVPDNIRXNLMNRLADFKAAAXLCSYIIGIVLGIVLDVPIKPNAPANYSGNCVPKGYTRAVNPDI

SEQ ID NO: 231857 - protein, 510 aa, Zea mays; identical to SEQ ID NO: 231850
  Clone ID: MRT4577_143047C.1.pep

SEQ ID NO: 231858 - protein, 113 aa, Zea mays
  Clone ID: MRT4577_143048C.1.pep
TLFTITEKRQSESARIRDKYPDRIPVIVEKAGKTDVPEIDKKKYLVPADLTVGQFVYVVRKRIKLSPEKAIFVFVKNTLPPTASLMSAIYEENKDEDGFLYMTYSGENTFGSA

SEQ ID NO: 231859 - protein, 96 aa, Zea mays
  Clone ID: MRT4577_143049C.1.pep
IDFKQDLSHYKFDCPATIHRILASGMSLKARSLARLQLSRWTFRVCLNSKSILASPILFGILAPKQARRCMLSEPLDKNGRYSLQLLCGMTNSNQY

SEQ ID NO: 231860 - protein, 417 aa, Zea mays
  Clone ID: MRT4577_14304C.1.pep
MEIEEHTDSLSIEEPITRLPPDIIEGILLRLPVNSLMRLRQVCKQWWNMVSVPRFIKEHAYHAPKHLLLYLPKLNISASLHPKTAKPCLATIINEKWSPLTWASSHMDPDDHLFASCNGLLCFYKTYTLKISNPATGQCLHLLKPDGILLYDFHYLYSFGFHPITGEYKLVHFLREPQRYKSGQPFHFDTIQVYTLGEDKWRAIRAPIPCCMVHLGVVNVDGVMYWLTEDKGTSCGMAVVSFDLREEMFALIHLPALEVKETASCATIKVAYYMTEIDDKVCVVTMPYQSHAPRWRRNNAELSGRTDIWALESDKWFLKYSIQSPSLSRYVPQPCFIHREKIILQDSESNVWYHDLRGKNVQIEHADGAKLLHLGDYRFYETQSYFYKETLAPLSIYARAAIVRAPPEPLARSVALH

SEQ ID NO: 231861 - protein, 83 aa, Zea mays
  Clone ID: MRT4577_143050C.1.pep
VLYTTKGQMMGGTSPKPSTSKHQCSDDCTILEEQRQRPAQDIKLIHRLCSPPVGELAIDIATIGNPDTECLPHAFPDAWVGPG

SEQ ID NO: 231862 - protein, 118 aa, Zea mays
  Clone ID: MRT4577_143051C.1.pep
APRGCVSVVHFRFVAPCSTRPHDSYASSSSSCVNPNSTVAYSQSVYYSSQATRPLTRVLIGIGGACMSTRYEVHQQPNAMQFVGNQVGCRHTQCNQPRARARRPDHWTRNFRMRLGLR

SEQ ID NO: 231863 - protein, 38 aa, Zea mays
  Clone ID: MRT4577_143052C.1.pep
AGICVFFCVFKKKKKKKKKKKKKKKKKKKKKKKKKKKK

SEQ ID NO: 231864 - protein, 49 aa, Zea mays
  Clone ID: MRT4577_143053C.1.pep
VRRSSRPGQYRVYHPSAQAASSSSSGREKGWRLVIRLSDAGRPQKTRSV

SEQ ID NO: 231865 - protein, 88 aa, Zea mays
  Clone ID: MRT4577_143054C.1.pep
TSFAAHENNFFLSSLWGWLKNNKKGRAGSKKKVLCGVCVKKKKKKFFSLQSLSECLAPVFVLMNVCQKEFWLNQLRLLKPKINWPPMF

SEQ ID NO: 231866 - protein, 119 aa, Zea mays
  unsure (1)..(119): unsure at all Xaa locations
  Clone ID: MRT4577_143056C.1.pep
ARRPWGSPWFAVVRVACYVRFFGCSWLPPAGVCCGSSACVLWAFPGCGLAGLCVLVYCFGWLPLCWCPLCRACFLVGSWAWVAGCVFPLCVARVLLLGSGRLSGRCGSVPGXPGLCLPG

SEQ ID NO: 231867 - protein, 265 aa, Zea mays
  Clone ID: MRT4577_143057C.1.pep
MKRGGDIASLFRKHEAKKLATSPTYPSSTPAVNQGQPSNEQEEEGVIEENHNHMPSSSPPPASQSSAPPVYDINRLPHDPGERQPISNYHVNDHDAIRRAYVLKGPLQPYGHEFPKRKIGDRDRNFNFVWFHNFPWVEYSIKNDAVFCFVCYLFKNKKSKGKGTDAFTVGGWRNWNIGSKSLLKHAGSMAHKAAQEKYIGYMNPNASIDNQIEKWSDEDLRLYKIKLTYSIRYFQYLLHPGLAFRGHDESKESSNRGNFIELLKF

SEQ ID NO: 231868 - protein, 61 aa, Zea mays
  unsure (1)..(61): unsure at all Xaa locations
  Clone ID: MRT4577_143058C.1.pep
PGVLGRALPXAWWICLQPFLDAVATKCKFFFCEHCAVKHHFNNYLLYVVRTHSLGFFIDTH

SEQ ID NO: 231869 - protein, 231 aa, Zea mays
  unsure (1)..(231): unsure at all Xaa locations
  Clone ID: MRT4577_143059C.1.pep
MGDWVPRGRPGLFVWTSRNSLPMLGWRRRSQHFAPRRGRPRSRLLSRKEPLVTHGVLHWWPGMMPWNDVGLGRNLELAIPKPSNVSTYMQFKVVYKQGKANLVADALSRVGYLMAXVGGXEVQPLWIQEIVNSYVTDSEAHXFLVRLCVHNPNDQGFWLHKGIIKKHKLIWVGENSALGTKIIVALHDSVLGXHSGVXATYHRVKKLCTWRGLHEFIILLILQKKKKKGAA

SEQ ID NO: 231870 - protein, 131 aa, Zea mays
  unsure (1)..(131): unsure at all Xaa locations
  Clone ID: MRT4577_14305C.1.pep
AASPLAMVVSASYLXQKHVISSSPLAVVYAPTSLHRQFLQEIATALAELTCANSAASMXHLLPFHQPTVANFAASVXHRLQLVNPPAVADPLVVAFVQHLGFFPSTPFSLIPPALLGQQPLVGGAIFYSRC

SEQ ID NO: 231871 - protein, 257 aa, Zea mays
  unsure (1)..(257): unsure at all Xaa locations
  Clone ID: MRT4577_143060C.1.pep
MATQLLSTVAHRDTLPEGYTRPENDRPQLADVVTDSNIPLIDLASPDKHRVIAEIDQACRTYGFFQIINHGISEELLEKVMAVGLEFFRLPPEEKAKLYSDEPSKKIRLSTSFNVRKETVHNWRDYLRLHCHPLEEFVPDWPSNPETFKEIISTYCCEVRLLGLRLLGAISLGLGLEEDYIENVLGEQEQHMAVNYYPRCPEPDLTYGLPKHTDPNALTILLMDPHVSXLQVLKDGAQWIAVDPGPXALVVNLGDQL

SEQ ID NO: 231872 - protein, 168 aa, Zea mays
  unsure (1)..(168): unsure at all Xaa locations
  Clone ID: MRT4577_143061C.1.pep
HTSLGLVLSLAIQRTRRGRQRAGCGLPPWRWRCWRRWATAAAPRKPVDVPLHKNNTPSGAQXDHIHYIDGGREEQLDLNKCTGTGCQTRGAYLFGHFSTHMNLDGGDSAGTXVTDFYLSAHNVEHDENDFLFLGXNRTGQSYMLQTNVFTRQPGANSKQADPTSWLGP

SEQ ID NO: 231873 - protein, 74 aa, Zea mays
  Clone ID: MRT4577_143062C.1.pep
RTAPELFPYVILCSCMVPLSGMGNQCSSELLQFRAVHVLKARSLLTCEFLVLPLMMYRCPFMYEQRVLQFPFKK

SEQ ID NO: 231874 - protein, 63 aa, Zea mays
  Clone ID: MRT4577_143063C.1.pep
SKRAVDLTSGGHCRPCHFSKKPFVSGKTNSQSYPFIKSLQLGPGIHRVNHGFHRNSVRRPFFR

SEQ ID NO: 231875 - protein, 128 aa, Zea mays
  unsure (1)..(128): unsure at all Xaa locations
  Clone ID: MRT4577_143064C.1.pep
SRTLNANPSAXGGTSDESVDDPPENEDDIVDTXHLQDQPXFDQKSCVPYIKKYLKNLTAVVETDKADEFKEGVQHATKFLLRKLKDLQFFXVGEPLKDDASVXFAYYKDGAXDPTFLYFSHVLKEIMC

SEQ ID NO: 231876 - protein, 104 aa, Zea mays
  Clone ID: MRT4577_143065C.1.pep
AFPARLLPPTARPSPSRLPILALSCRRSARSPWRRRGARPALPARSPSSRNGPLACLPSRSAPLQLAVATVAHGHVKLAVPAPSIIDLTQRRPRPYPHLCIDAL

SEQ ID NO: 231877 - protein, 152 aa, Zea mays
  unsure (1)..(152): unsure at all Xaa locations
  Clone ID: MRT4577_143066C.1.pep
FLGDYGKIVSWNTTSWTRTGSKKITREAISAFAVSPNGALLAIGTIEGSXSALRVAHALLAIASIIVVDSKDMRTLVTVKKAHLGVVTTLSFSQDSRTLLSTSFDSTARVTYVGSPKSNGTSIWPILLVIILAVLVYYCMQHKEDILAMLPR

SEQ ID NO: 231878 - protein, 90 aa, Zea mays
  Clone ID: MRT4577_143067C.1.pep
DRRVRSHGDHTAGPGDHEKYTDHHAQPLAWLYSSSYVSLYHDLQRDDHDQLPCVVHSQDVLHDSLHSLLLAPAPLVISLCYEIYNNCCLI

SEQ ID NO: 231879 - protein, 219 aa, Zea mays
  Clone ID: MRT4577_143068C.1.pep
RSRARPRRAARPLRVLLLACRGLLFPSSAPYRLLQRVSLPASAPCSSSESLPGRRAVELPRALLLAARPAKLSWISRAPGSYFCSVRAHLSPMVVCRSTLVSFPQSQLVVFPCAHAARSRVPMLAWPVPARTAIISELPAMRSPSSDFIARSLVRHPVLLHGWPMLLHRFALATHMGRSFSCVVRVPSSFAVTSRREVSLHASSSRAESFFSSPVTPGV

SEQ ID NO: 231880 - protein, 164 aa, Zea mays
  unsure (1)..(164): unsure at all Xaa locations
  Clone ID: MRT4577_143069C.1.pep
FPKCGPPFRKEISGEKGGPVKEKKNFLQQPEKPLVVNLPHQIQAIKGVQTLDILXSAFAPXEESMGAFADPSWLAKPLEKSAFVKFGGRIKEIGGFIVRCPNNLDQKNRFGAGMVPXQLPKPFXKPGVAGGGLPLSIPCVPPPPCLGHLIKRGWTIFVQRVLRG

SEQ ID NO: 231881 - protein, 113 aa, Zea mays
  Clone ID: MRT4577_14306C.1.pep
RRADVRPAERACPLTDGHCLRSWAPVGRRPAPSGSFLQGRASTDKAPHVVDLTLSTLREAAVALARHESHGGRPAVGLGGHPHPLHVRRAGRHDQARPHDSRTPLGRPWGRRC

SEQ ID NO: 231882 - protein, 111 aa, Zea mays
  Clone ID: MRT4577_143070C.1.pep
FLFFSGFVFGCIVYELQFPPGKFFPLFSPFFIIPPFRKMCPPPRSRALISGGGPPAAPPGFPINFWAPGGTNPQPPGLGAQFSLKAFFLFGINIGRIGVVPPPPNISPLFC

SEQ ID NO: 231883 - protein, 71 aa, Zea mays
  Clone ID: MRT4577_143071C.1.pep
FNKHAARKSWTPMKTLQELVPRCTKRYNKASVPDDITNYIHTTHMQAAFLATKLEAANTHAHQSTELLTTT

SEQ ID NO: 231884 - protein, 48 aa, Zea mays
  Clone ID: MRT4577_143072C.1.pep
MKIIVPVILRTIIPILSMYVPHRLAPILHVLHKYHSTRAFLRSLYNII

SEQ ID NO: 231885 - protein, 82 aa, Zea mays
  Clone ID: MRT4577_143073C.1.pep
ELFFLGSARPGIPLLVWSCFILFGGDDNSSLLSSLLRWSSPSVSCDISEYIRTRRASFLSLLQVDSFAIDVAGESCVVGRLG

SEQ ID NO: 231886 - protein, 567 aa, Zea mays
  unsure (1)..(567): unsure at all Xaa locations
  Clone ID: MRT4577_143074C.1.pep
MATMKLGSKPEIFVLQDLTWRCTTELESDVVVEVGEMSFYLHKFPLLSRSGVLQRMISEYQAPADGGGMCTLQLDDIPGGAKAFELAAKFCYDVKIELNALNVVCLRCAAEYLRMTDDYAEGNLITQAECFLVDVLANWKDSIKALETCEGVLPTAEDLHLVSRCITALASKACGXPTLPRQWSGTPASTGAAAGMDWWYEDVSFLSLPMFKRLIQAMEAKGMRDESIAGAIMFYAGRFLPGLKRNTSFSNALASYGADGSGGAGGGMSSRNITPRAASVSAPSEGDQRYFLEEIVALLPTKKGVASTKFLLGMLRTAMLLHASPLCRENLERRIGAQLEDASLDDLLVPNLGYHVETLYDIDCVQRILDYFMSSTDGIGTGYTSPRPVDDGIYRAIDIYLKSHPWLSESEREQLCRLLNCQKLSLEACTHAAQNERLPLRVVVQVLFFEQLRLRTSIAGWFFVSDNAAGGDGAXPTRRRRHRPQGHRGXAGCPQADADSDVEGDAPDGKETITDVKARVSDLEKECKSMKQEIRRLGKPRRSWSLLTRKCGFGAKVQQAQTAMSGK

SEQ ID NO: 231887 - protein, 662 aa, Zea mays
  unsure (1)..(662): unsure at all Xaa locations
  Clone ID: MRT4577_143075C.1.pep
SHYLPRRCTTELESDVVVEVGEMAFYLHKXVPHCSRVLISACSESEVNRRASLGYAXFPLLSRSGVLQRMISEYQAPADGGGMCTLQLDDIPGGAKAFELAAKFCYDVKIELNALNVVCLRCAAEYLRMTDDYAEGNLITQAECFLVDVLANWKDSIKALETCEGVLPTAEDLHLVSRCITALASKACGSDAAAPVVRNASVDKDALWNGIRSGERRSSAAAAAAAAGMDWWYEDVSFLSLPMFKRLIQAMEAKGMRDESIAGAIMSXAGRFXLPGLKRNTXFSNALASYGADGSGGAGGGMSSRNITPRAASVSAPSEGDQRYFLEEIVALLPTKKGVASTKFLLGMLRTAMLLHASPLCRENLERRIGAQLEDASLDDLLVPNLGYHVETLYDIDCVQRILDYFMSSTDGIGTGYTSPALAEEGGGSLGIPQGATPSSSLSPITMVAKLMDGFLAEVAPDTNLKLPKFQALAAVVPDYARPVDDGIYRAIDIYLKSHPWLSESEREQLCRLLNCQKLSLEACTHAAQNERLPLRVVVQVLFFEQLRLRTSIAGWFFVSDNAAGGDGARPHAGGAIVPKGTAAIAGCPQADADSDVEGDAPDGKETITDVKARVSDLEKECKSMKQEIRRLGKPRRSWSLLTRKCGFGAKVQQAQTAMSGK

SEQ ID NO: 231888 - protein, 401 aa, Zea mays
  Clone ID: MRT4577_143076C.1.pep
MEYGAVLAAAPLVARPNWLLLSPPPLAPSIQIQNRLYSISSFPLKAGPVRACRALASNYTQTSETVDLDWENLGFGIVQTDYMYIAKCGTDGNFSEGEMVPFGPIALSPSSGVLNYGQGLFEGLKAYKKTDGSILLFRPEENAERMRTGAERMCMPAPSVEQFIDAVKQTVLANKRWIPPTGKGSLYIRPLLMGSGAVLGLAPAPEYTFIIFVSPVGNYFKEGLAPINLIVEDKFHRATPGGTGGVKTIGNYASVLMAQKIAKEKGYSDVLYLDAVHKKYLEEVSSCNVFVVKDNVISTPAIKGTILPGITRKSIIDVALSKGFQVEERLVSVDELLDADEVFCTGTAVVVSPVGSITYQGKRVEYGHQGVGVVSQQLYTSLTSLQMGQTEDWMGWTVQLN

SEQ ID NO: 231889 - protein, 101 aa, Zea mays
  Clone ID: MRT4577_143077C.1.pep
KGFGSGCPPHPRGVRFFRATFSPGRKGTGDSRLFIQPLPEKAPAVGRLDLTSSSSASASRFDPCVAKKRGVFFGVEAPPPNKNALHWFVFFFQPIGIVPPS

SEQ ID NO: 231890 - protein, 94 aa, Zea mays
  Clone ID: MRT4577_143078C.1.pep
TVLSQGWRPLRSQCQGPKNSPGGWLIKPGFGWWILDHPGPFLGLKPMVKPFGSKQGEVEGPFPAKRLVFFLMVQPLTPQISHARAINLGGPKVA

SEQ ID NO: 231891 - protein, 95 aa, Zea mays
  Clone ID: MRT4577_143079C.1.pep
TTLSNPRPTRRSFAGNGIRRRPRRRAARRTAELAPPLAAATGAVYSGRAVLLLALCLPVWCGTRFWCGSVESGEVIDREWEEGTGESRYEGNPRC

SEQ ID NO: 231892 - protein, 98 aa, Zea mays
  Clone ID: MRT4577_14307C.1.pep
MRECIWIHMGQADIQVENACWELYCLKHGIQAEGKMPGDTTIGGGDDALNTFLSEHWAGKHVLQAVLGDLGPTDMGEGRTGTYPELLHPGDLIRGAGG

SEQ ID NO: 231893 - protein, 187 aa, Zea mays
  Clone ID: MRT4577_143080C.1.pep
MKANVAADDPGAVLRVFRQMRSDGVDPDLVTYNTLIFGLARAGMVAKARAFLDAMAAEGHLPDVVTYTSLMNGMCVKGDALGALKLLEEMQGKGCQPNERTYSTLLMGLCKNKKLDKAVEVYKSMAAAGTKLESPAYASFVRALCRSGSVADAYEVFDYAIQTKSFAEVTAYSELENSLKWLRRMSS

SEQ ID NO: 231894 - protein, 114 aa, Zea mays
  Clone ID: MRT4577_143081C.1.pep
NVFVVKDNVISTPAIKGTILPGITRKSIIDVALSKGFQVEERLVSVDELLDADEVFCTGTAVVVSPVGSITYQGKRVEYGHQGVGVVSQQLYTSLTSLQMGQTEDWMGWTVQLN

SEQ ID NO: 231895 - protein, 89 aa, Zea mays
  unsure (1)..(89): unsure at all Xaa locations
  Clone ID: MRT4577_143082C.1.pep
GKGGFSPRXFWXGTPGFFPSWRCQPAAPPIYFGAPNRRLCRSLPGGVSLGFLRRPPPFFFFFFFFFFFFFFFFFFLFFLFIFFFFYSFN

SEQ ID NO: 231896 - protein, 102 aa, Zea mays
  Clone ID: MRT4577_143083C.1.pep
GATRLGRGAVLVGLSPALSAPPDGSVLEPWLRDTSSSSGGWPRSSSCSMIYDRRSSCAPTLIDLPRPHPSCIPHPDTHPRDGGDKKGSVPRKKTDRERERSP

SEQ ID NO: 231897 - protein, 45 aa, Zea mays
  Clone ID: MRT4577_143084C.1.pep
LIERGFIVFFPLVHLVVHGLVFDRWGILNLKMVHGVPGADGEEGS

SEQ ID NO: 231898 - protein, 49 aa, Zea mays
  Clone ID: MRT4577_143085C.1.pep
SGLLLPQPVYKQVLHQCTGVNNRFVLTPANLEQSTNIRHLWPPSSTLSC

SEQ ID NO: 231899 - protein, 483 aa, Zea mays
  Clone ID: MRT4577_143086C.1.pep
MSGGSVSAVFYADKYHPIQAGSIDGTDVAPHDNAVLRALICSQAGLYDPFGDPKASGDPHRTVFVGRLSRQTDDDTLRKAMSRYGRVKSMRLVRDIVTGASRGYAFVEYETDREMHRAYEDAHHSVIEGSEVIVDYYRQQLMPGWIPRRLGGGLGGMKESGQLRFGGRERPFRAPLRPIPYDELKKLGIPPPPEGRYMTRYQVPPPPRRKSSNIDIEDSPPGRRSKDRAGVSTYRRQRSSNDDDETLLKRKSSRDGLEESQSRRSARSSITKEDNRYSSQRKSKEHDKGHRKHRRSQDPGEVSPPAEEDGSYERQRTLEEPDRSPDRYHHHWHHRDDTYESRHLRHRDHRKRRRSQEPGEVSPPEEDCSHERERTSDEPGRSPDRYHHHWHQRDGTYESRHSRHRDHRKRRRSQEPGVSPLEEDSSYERERTSDELGRSPDWYHHHRHHREDTYESRHSHHRDRRRHGDRHRTKRSESRDYRD

SEQ ID NO: 231900 - protein, 128 aa, Zea mays
  Clone ID: MRT4577_143087C.1.pep
KFLSYLFVQNRRPIPYDELKKLGIPPPPEGRYMTRYQVPPPPRRKSSNIDIEDSPPGRRSKDRAGVSTYRRQRSSNDDDETLLKRKSSRDGLEESQSRRSARSSITKEDNRYSSQRKSKEHDKGHRKH

SEQ ID NO: 231901 - protein, 95 aa, Zea mays
  Clone ID: MRT4577_143088C.1.pep
ELPSPCNLDSRFSWCDAGHHGVGDPCGESVCSHMYPPCDADGDGTNQGCDQVRLKFFPFHSYCLPLVEIRLALGFVCACDDPCGVECLLSYVPSL

SEQ ID NO: 231902 - protein, 69 aa, Zea mays
  Clone ID: MRT4577_143089C.1.pep
GYRALVRGFRWRPSRQASLVRHMGIVPLGYSSEVALRGRVCSWPDESPAKRQAPGPVARVLRSPGRRHR

SEQ ID NO: 231903 - protein, 58 aa, Zea mays
  Clone ID: MRT4577_14308C.1.pep
RSMCLYLGYAVHNLVYMRFCYWVLFVIHTIIKMAVMGFQKKGLTMPTLYMDADHEKVT

SEQ ID NO: 231904 - protein, 96 aa, Zea mays
  Clone ID: MRT4577_143090C.1.pep
CSFLVLPKGMESLCCTLTLPMVPDSFCSGRLDMMYDLLIYYYYNICFFLFSAELCESCVLPTEFSSYSRKNLKKSSALFCVISFLSVQFRKPFLFG

SEQ ID NO: 231905 - protein, 74 aa, Zea mays
  Clone ID: MRT4577_143091C.1.pep
PLVLYILQKQVIITNGVTVTFHFDYHNTHNLHIFHSNTITITKILIEVCCESHYTIPGKNIKNIHLNNRIPNNL

SEQ ID NO: 231906 - protein, 76 aa, Zea mays
  Clone ID: MRT4577_143092C.1.pep
MRVGNIDVEVVGIMSNRVGVVVNEGEHGLRGEFSSEKNGVHGRGQVLLGFELIEWAPCRRDGLEVSISWKVLAKAW

SEQ ID NO: 231907 - protein, 115 aa, Zea mays
  Clone ID: MRT4577_143093C.1.pep
LIINNKTSFLLLSFYKKKKKKKKKKKKKKKKNKKKKKRKGEKKNKKKKKKNFAHARWATLMGENQPPGARILGNQLAPQTRGIFGQTGFLGEIFFLSHFPKPILSPGQKCKARGA

SEQ ID NO: 231908 - protein, 78 aa, Zea mays
  unsure (1)..(78): unsure at all Xaa locations
  Clone ID: MRT4577_143094C.1.pep
MFSKKGRGLCNKGMYRPEMFLPMDCHNXVIVTEWGLSLERPKMINKGPPTRRDLFGPEFDFGLIKKNPTRLVGPPPPS

SEQ ID NO: 231909 - protein, 119 aa, Zea mays
  Clone ID: MRT4577_143095C.1.pep
AFGHQLACLYPGSLNSSLSSCWFPCPDLSHRRRVSFFPRLASAQVPTLQAGFAPKPLKNFQRAWPSWIWFFEAPAIDIDVMPGTNPVFCKSPNCVFRSHISPSHVCLNVEALCLCFYYM

SEQ ID NO: 231910 - protein, 494 aa, Zea mays
  unsure (1)..(494): unsure at all Xaa locations
  Clone ID: MRT4577_143096C.1.pep
MSQLAPLPKVVMGSLAFGVFWMLAVFPSVPFLPIGRTAGALLGAVLMIVFHVISADDAYASIDLPILGLLFATMVVGGYLKGAGMFKHLGKLLAWRSQGGRDLLCRVCVVTALASALFTNDTCCVVLTEFVLELAAERNLPAKPFLLALATSANIGSSATPIGNPQNLVIAFNSKITFLSFFFGILPAMLAGMGVNTVMLLCMYWNDLEGAAACGSPGDEKEMEAIEEGRSPASVLSLKSSPAAAXPARRPAPAPEXRGHDADDDDPDSMMSENIPTKHRWFMQCSEHRRKLFLKSFAYVVTVGMLVAYMLGLNMSWTAITTAIPRVRVDFRDAEPCLDKVSYSLLVFFSGMFVTVSGFNKTGLPGAIWNFMAPYAKINHVSGVTVLSLIILLLSNLASNVPTVLLMGDEVAASAATISASAVTRSWLLLAWVSTVAGNLSLLGSAANLIVCEQARRAPRNAHDLSFWSHVVFGVPSTLVVTAIGIPLIGKIAF

SEQ ID NO: 231911 - protein, 68 aa, Zea mays
  Clone ID: MRT4577_143097C.1.pep
AAFFFFFLLPNFTGYKNFTLFYRSDYKSISLKYMLAQVIILNKKIKTGYTYIRRPSPPALNTITTAQG

SEQ ID NO: 231912 - protein, 117 aa, Zea mays
  Clone ID: MRT4577_143098C.1.pep
LGPPLPARCWQRLCSASRWRWYPGPQTIRRNSHMKGDNTARLRGSSWPAQSSVPLADAATDDRTFSHAAWPPVWRSKEDDHVDKLPGQPTGVDLEQYACYVTCRRRGRARAVLLPDR

SEQ ID NO: 231913 - protein, 95 aa, Zea mays
  Clone ID: MRT4577_143099C.1.pep
NGQRPENNFQRRPQKKGPGGFQRVQVHNAGDPRLGGLIDLIVVLCGNWHGGPAFCQNSPGFGSLIKKFFSIVLPIPGLVVMKMPCPVCVSHNHGM

SEQ ID NO: 231914 - protein, 83 aa, Zea mays
  Clone ID: MRT4577_14309C.1.pep
ELTCYTEHFAQIEVNYGCYLGLWCIPHFLLGGSGEPNSLLLDYVCVSVCGSAPLLGCRPIRVRVSCVSIYCNPIYYQYNTLHS

SEQ ID NO: 231915 - protein, 60 aa, Zea mays
  Clone ID: MRT4577_1430C.1.pep
DPRVRTTSHLTVYSFLSLLPHSGKWDLNIQSAQTAMPSLSIRVHFLWPMLCTGASVLDAT

SEQ ID NO: 231916 - protein, 42 aa, Zea mays
  Clone ID: MRT4577_143100C.1.pep
APGINIYLAIPNFLARGRVAPNFQRQGTLFPNSNDSTIQAFF

SEQ ID NO: 231917 - protein, 61 aa, Zea mays
  Clone ID: MRT4577_143101C.1.pep
KRGEPPGFCLIQQPPSKLTAASFFLHYPHWLSNARDPPGLSWFALPSPAPNRTLTKQLIKT

SEQ ID NO: 231918 - protein, 62 aa, Zea mays
  unsure (1)..(62): unsure at all Xaa locations
  Clone ID: MRT4577_143102C.1.pep
YQYTEISCGDHRCKVVDGXRGLDLTLDRSSGCXRQSTSVYLAGQIDMQNKLLPPNSXGTITT

SEQ ID NO: 231919 - protein, 78 aa, Zea mays
  Clone ID: MRT4577_143103C.1.pep
FFTFTPTLTLGSGTSDGAPRPSYMPSKLEPSQTVEVFRPTDQLTGQNILFNVPQDPSALSFLKNDLKEHYQVHMHGLN

SEQ ID NO: 231920 - protein, 77 aa, Zea mays
  Clone ID: MRT4577_143104C.1.pep
TGAIMWQAQHQGAIQVPDPQLAVIFGLGQQDLRVVLGVAERSRHPHRPPRVRPSLLHSSVWVTKPKHAWTDECSYAW

SEQ ID NO: 231921 - protein, 59 aa, Zea mays
  Clone ID: MRT4577_143105C.1.pep
PVPARQLAPVGRVRQAHDGAVHTGGVPRSCRAAGPRRRTLHPALIARSRRQSLQLTGPA

SEQ ID NO: 231922 - protein, 93 aa, Zea mays
  Clone ID: MRT4577_143106C.1.pep
IASVPLGRPATVSPNLYSFLQGISESPSPNLYSSATSTYVHILTKRRVQGHFGKYTTKYTSKYLLYCTVYTHTTPMANAQARRSAAGTCGYWM

SEQ ID NO: 231923 - protein, 82 aa, Zea mays
  unsure (1)..(82): unsure at all Xaa locations
  Clone ID: MRT4577_143107C.1.pep
XGNPLXXSDPHEIXXTRPYXNLLSSXITSNSXGNXAIXNXPRXWNVFXIXXXDLYXHPHIXXLXXMPAXXXXQVXRXVLXGX

SEQ ID NO: 231924 - protein, 265 aa, Zea mays
  Clone ID: MRT4577_143108C.1.pep
MSTRIHPSSSDAAGRAHRRRRAAAAERERRPPAVYTVWKRSSMGFQGTDGFCVYDDAGRLAFRVDNYSRRRKLCAGDLLLMDGHGTPLLSLRPQLLSLHDRWNCYTATEDAVVDKKAPPASSAQQQVFTMSRCSALRSSSDNAEVHMSASRPGSAAAASSSSSSLSLSCNKHNPQAAAPGYRVEGSFSRRSCKIRRGSDGREAARITRKSAGVASRPVATLGDDDVFSLVVRPGVDVATVMAIVVVMDRICRRPYTPMVCPSQCE

SEQ ID NO: 231925 - protein, 128 aa, Zea mays
  Clone ID: MRT4577_143109C.1.pep
MIAQSIRASRQALVRVARQQPAYVARRTFITPTAVRSADLVQDMYLRELKNYKVPQVKASDAEGQVKKFAIPKAPASPEETDIASELKAYETQTVEVEGASSEDGEVLPQEDWFEEENESITTAGATH

SEQ ID NO: 231926 - protein, 29 aa, Zea mays
  Clone ID: MRT4577_14310C.1.pep
IANYPSIIPIAFIVSCHHLVVLYNNPSHM

SEQ ID NO: 231927 - protein, 182 aa, Zea mays
  Clone ID: MRT4577_143110C.1.pep
PTREKKKKGGGGKKKKKKKKKKKKKKKKRGGRFGGSLFGGAAFGGPAFFFGASYFLLFGRGGAPFLSGKPLLVPHFIGVAPLSLFAWWPYSHKGPGPLGLSQQGPPLIGHWDSPFNGALMGAPLLVPLFGPGSLWRPLGPAPFGWSPSFLALFAGFPRDFLIGGLLLGWRFRGSGSWAQIFG

SEQ ID NO: 231928 - protein, 215 aa, Zea mays
  Clone ID: MRT4577_143111C.1.pep
MARVYVGNLDPRATAREIEDEFRVFGVLKSVWVARKPPGFAFIDFDETRDAKDAIRELDGKNGWRVELSTKSGSGRGRERERSGGSDMKCYECGESGHFARECRLRIGSGGLGSGRRRSRSPRHRSRSCSPRYRRSPSYGRRSYSPRDRSPRKRSYSRSPPPARARSTSRSPPPARGRSISRSPPPAPCAKHQQVTACPCKHQQVTTASSRRKHQ

SEQ ID NO: 231929 - protein, 80 aa, Zea mays
  Clone ID: MRT4577_143112C.1.pep
GCFLVKLIFFFFCFVQEPLNHDWATLQTWCWQLDGDKNTKWLPVYFSSPSTIAHCFNMDFLLRVTISPIVAYHVGFYTHY

SEQ ID NO: 231930 - protein, 75 aa, Zea mays
  unsure (1)..(75): unsure at all Xaa locations
  Clone ID: MRT4577_143113C.1.pep
HASGGTLAPTGVLVAGTKYMVSQGEPATGIRGKKATGGITIKKTGLSLIIRIYDEPMTPXGLCNMAAERLGDYPD

SEQ ID NO: 231931 - protein, 61 aa, Zea mays
  Clone ID: MRT4577_143114C.1.pep
VLSNLVQFQTSYLFIILIYLRQFATLTFILSTIFLMYCYDKILHLVKFYFVFYNYYYFIFN

SEQ ID NO: 231932 - protein, 35 aa, Zea mays
  Clone ID: MRT4577_143115C.1.pep
MARRGGWFCCALAESLAQLGRRARGGAVAVAAQVV

SEQ ID NO: 231933 - protein, 66 aa, Zea mays
  Clone ID: MRT4577_143116C.1.pep
RHTPPPKKNGGGDRFLQGPKTNLSLANPIKIIFSPPEKSYLQHALLGFFPSTHRAPCLELGGKIFI

SEQ ID NO: 231934 - protein, 110 aa, Zea mays
  Clone ID: MRT4577_143117C.1.pep
IVLLFTIEYGYIYIATFQSRWDLKNNASIHYFACTFMPKQTESKKSLGNISTTHKLHLLRRRCISGHRICIWLKPSEPSMTKGAQNLSERCSSTPFSMLTLATLSTCAIS

SEQ ID NO: 231935 - protein, 213 aa, Zea mays
  unsure (1)..(213): unsure at all Xaa locations
  Clone ID: MRT4577_143118C.1.pep
IIPIGCSEFDIAGLILYVGNTYLCNNKKKQWLFLTDGSKFVSGQGCEEQDCLLAVSFSSATTDEDSTLFSYTLSGNTVCFILILYVEFLFLVLKPLDGTPVWEIYCXHLXHLKVITLFRFKLNPFKTSVASAYCXFLAQVGFSNLVKRQKDETRQVWVAEATESSSYTLSNEIPRKSHLKEAAVLAERWASRSYHKIQELKERVLCIVGNAGV

SEQ ID NO: 231936 - protein, 94 aa, Zea mays
  Clone ID: MRT4577_143119C.1.pep
GFCKKKTPPQALERQRALKNDPCKGQIPKPIGKPYRLFRPGPKTHWFGEDGGPPNLKNWGLIFFEGKPRRGGLDPMALKKRLGPAIWGGGWHPP

SEQ ID NO: 231937 - protein, 314 aa, Zea mays
  Clone ID: MRT4577_14311C.1.pep
FPGGDPSESKHLMALFKVAAKEIAADVRIALPGAIQSLFECLLYTFLFLWTPALSSNAGYQSEMLQILSRITPSMFAIWLSSNSYDAHYSHMNLMACMTLVCLSCFGNMLIPAMQSVSYMVLALYIFGYHTHLQVVVPVLIVRVAALYKVTGDCLLFSYTWIIQQKNHLICLDALRGSYLLSFKEVVLIWVWGIWISIFFAQVDLFSWCSENSDLSRLIALNCPADSDNAMVLMMYHGAPSTYLPYGAIVMVQPLLAQVANGQRYIPMKVAGVNEWRLIQYQCPFTCSPDQANIISDRAVLQKHFLATTIQCCM

SEQ ID NO: 231938 - protein, 70 aa, Zea mays
  Clone ID: MRT4577_143120C.1.pep
KNFLGFFFLIKTAEVPLLLKIAFAWGFFHWGETFQHKQHNQGGGPISPLIRAVQHKRYPPTKMGIEPKKI

SEQ ID NO: 231939 - protein, 88 aa, Zea mays
  unsure (1)..(88): unsure at all Xaa locations
  Clone ID: MRT4577_143121C.1.pep
MWAERVVGERRMRQIQRFARNAKLTVVCLLLTVVVLRGTVGAGRFGTPQQDLIELRQHFVXTRXRXAEHHDARSRASTTTTSSSSSSS

SEQ ID NO: 231940 - protein, 135 aa, Zea mays
  Clone ID: MRT4577_143122C.1.pep
MEVGMQTKEVSAAADDLIEVGAALVPSAQDHTAVAACLVNDDCNIIITGGVHRSDDQTVQEFGGDSLDADEVAPLVNDVQDDSARMDMDVAAHGDVHAQDRESSQLDVATALLNEVGTELVEAGDHAVQECTNMD

SEQ ID NO: 231941 - protein, 248 aa, Zea mays
  unsure (1)..(248): unsure at all Xaa locations
  Clone ID: MRT4577_143123C.1.pep
MSSSTALAWRRTLRNALLXRLSAARRGARAVXPARPPRPARRRMLQLQPRRRRCHRXPRKGRLLTGAMIALAIGGGAYVSTTDEGKFCGWLFKSTELVNPLFALLDAEFAHSLAVKAAAHGFVPREKRPDPSVLGVEVWGRKFSNPIGLAAGFDKNAEAVEGLLGLGFGFVEVGSVTPLPQEGNPKPRIFRLKEHGAVINRCGFNSEGIVVVAKRLGAQHGKRKMEETSSSTLSSTSDIKQGGKAGPG

SEQ ID NO: 231942 - protein, 57 aa, Zea mays
  Clone ID: MRT4577_143124C.1.pep
FLYNVPYFKFPGLTLLTWLLVNPSFSPFYSPCNASTFLHFNYLPRFLNHSHFPSFAQ

SEQ ID NO: 231943 - protein, 95 aa, Zea mays
  unsure (1)..(95): unsure at all Xaa locations
  Clone ID: MRT4577_143125C.1.pep
HASAPLFSRPNTATVAPKHDLHVLAFVLLVTAVKDAYEDWRRHRSDRAENGRLAAVLFXAPPGAXQFVPTEWKHVRVGDVVRVLSDXSLPADMVL

SEQ ID NO: 231944 - protein, 76 aa, Zea mays
  Clone ID: MRT4577_143126C.1.pep
KNFLIRGFMKIKFKEANVSKAKIYKTQTQISHTQYKVYIIFRLLDEEIARFIVNNRTANDILLLCILMNCHIMRGI

SEQ ID NO: 231945 - protein, 72 aa, Zea mays
  Clone ID: MRT4577_143127C.1.pep
IRLELRLNLNCLPPENKHNGGGIVHTRTSIPHKPYDEIDRNTVETTCRSHHARTWHQGTTLNAGRKYDRAVH

SEQ ID NO: 231946 - protein, 95 aa, Zea mays
  Clone ID: MRT4577_143128C.1.pep
TSIKKFGHTPPNHYSPTTSMSRGRGGGPKNAGGPWTPWGFDPWARGCTTIPGTPPPPLPWRWRTYPTAQGSAETPATPRGPDARSPDAKSPGASA

SEQ ID NO: 231947 - protein, 78 aa, Zea mays
  Clone ID: MRT4577_143129C.1.pep
FSKKTLLWRPRFPRVSQFGGKVFFAKVFFFSTLKGFFISFPPLPWFWGLPLFLVGKFPATTSQKGKGFKWVLGSGLFF

SEQ ID NO: 231948 - protein, 108 aa, Zea mays
  Clone ID: MRT4577_14312C.1.pep
PVQRKGPWGVSYPVGSLTWPWASGCRGRGTCSPLPMLVATCSGERLRHPQRRSSHDQGDLGFFLSLPQHIACSQGSSFVSLLLLPGLWSGPHHLLPTLSTASSLSHRL

SEQ ID NO: 231949 - protein, 102 aa, Zea mays
  Clone ID: MRT4577_143130C.1.pep
FLLASLSNVFLQVEVWLQTFGPGQRTPIHRHSCEEVFIVLKGKGTLLLGSSSLKYPGQPQEVPVFQNTTFLIPVNDPHQVWNSNEHEDLQVLVIISRPPGKM

SEQ ID NO: 231950 - protein, 226 aa, Zea mays
  Clone ID: MRT4577_143131C.1.pep
LINAWQKIFPELFLPFSSMPSTLKSHIRYPVDMFSTQSERLLTYHMEDIDVFYNREDQWRIPQETYADEQQPIAPYYLIMKLAGIDAKEEEFVLSQVYTPNARNNLIALLFARCDEQNYGKLLLYTLPKERLVYGPEQIEALVNQDPVISERISLWNRRGSRAIQGNLLVIPIEESLLYVEPIYLEAEKNSLPTLARVVVVYGNQIAMAESLNEAIEAIFDRRNGD

SEQ ID NO: 231951 - protein, 75 aa, Zea mays
  unsure (1)..(75): unsure at all Xaa locations
  Clone ID: MRT4577_143132C.1.pep
MVAFRFHQYQVAGRALPTPGDAHPKIYRMRLWXTNEVRATSKFWYFLRXLKKGKQSNGQVLAINEIFERNPTTLK

SEQ ID NO: 231952 - protein, 135 aa, Zea mays
  Clone ID: MRT4577_143133C.1.pep
MSTTRPEDTQQLINSAAASPNRSAPSAAPSDMERGSGTAASSSRASTTSHSHQRATHRVVEEEEEEEPSSSRGGGSLCSGYLSLPALLLVGVTASLVILPLVLPPLPPPPSMLMLVPVAMLLLLLVLAFMPTSST

SEQ ID NO: 231953 - protein, 42 aa, Zea mays
  Clone ID: MRT4577_143134C.1.pep
TLYMDLKGSVRMLSSIRFSIIIKIPPRRESASVNKMVCTNVC

SEQ ID NO: 231954 - protein, 41 aa, Zea mays
  unsure (1)..(41): unsure at all Xaa locations
  Clone ID: MRT4577_143135C.1.pep
DRWNYEYVSMGXDAMPVLKGRTPIQCYADFMRTFGDHFASS

SEQ ID NO: 231955 - protein, 780 aa, Zea mays
  unsure (1)..(780): unsure at all Xaa locations
  Clone ID: MRT4577_143136C.1.pep
MARLAICALLAAAVVVSAAVATMESEAEEPVSTYIVHVAPAHAPRATRPRALSGAYRSFLREHLPARVARPAPRLLYSYAHAFNSFAARLTGAQAAHLASRRSAVLAVVPDATQQLHTTLTPSFLRLSDSSGLLQASGGATDVVVGVIDTGVYPKDRASFAADPSLPPPPSTFRGRCVSTPAFNASAYCNNKLVGAKFFGLGYEAAHGGGAVDETDSRSPLDTNGHGTHTSSTAAGSAVPNAAFFDYAKGTAIGMAPRARIAAYKACWARGCTSSDILMAFDEAIKDGVNVLSVSLGAVGQAPPFYSDSTAVGAFSAVRRGIVVSASAGNSGPGEFTAVNVAPWILTVGASTVNRRFSANVVLGSGDTFAGTSLYAGTPLGPSKIPLVYGGDVGSSVCEAGKLIASKVAGKIVVCDPGVNGRAAKGEAVKLAGGAGAILVSAKAFGEQPITTPHSXPATAVTFAVAEHAKRYIRTSASPVATIVFLGTVVGGTPSSPRMASFSSRGPNLLAPEILKPDVTAPGVDILAAWTGENSPSELDSDTRRVKFNIISGTSMSCPHVSGIAAMLRQARPGWSPAAIKSALMTTAFNVDSAGDVIRDMSTGGASTPFVRGAGHVDPNRALNPGLVYDAGTDDYVSFLCALGYTARQIAVLTRDGSVTDCSTRPGSVGDLNYPAFSVVFGSGDDEVTQRRVVRNVGSNARATYTASVASPAGVRVTVEPPTLEFSAAQQTQEYAVTFAPEQGSVAEKYTFGSIVWSDGEHKVTSPIAIAWSASQAAAM

SEQ ID NO: 231956 - protein, 280 aa, Zea mays
  unsure (1)..(280): unsure at all Xaa locations
  Clone ID: MRT4577_143137C.1.pep
PQPQHGPGPPXLPXAXTPPXXPPXPAGXAPPXPPPPPPPPPPLCRPPPXPPPEDLEERHPRLPPPPPPHQHRTSPSPPPPPPPPGPPPHPPATPPPXPPPPPPPPXPHPPPQPPPNPPPTTHPPPTPPPRPPPPPPPXPTSPPPPPAPSRGPPPPPXPPNPPPPHPTPPPPPPPPPPXPPPPPPPSSPPPPPLPPPPPLLPPPSPHPPPPTPPPPHHPRQPPPPPPPPPPPNPTPPPPTPPXPPPTPPLPQSPPPTPPPPXPPPPPTPPXTHPHPPPPPP

SEQ ID NO: 231957 - protein, 53 aa, Zea mays
  Clone ID: MRT4577_143138C.1.pep
ALRRLLPAASPAVAAARPGPRSFPESREDGESKQSAGEYHLTPHLVRSPWGNF

SEQ ID NO: 231958 - protein, 138 aa, Zea mays
  unsure (1)..(138): unsure at all Xaa locations
  Clone ID: MRT4577_143139C.1.pep
GAWSANAATVTITNNCGVTVXPAATPXXRGTQLNPGGTWTVNXPAGTSSGRVWGRTGCSFNGNSGSGQTGDCGGALAXTLSGQPXXTLAEFTIGGSQLTTGHRGTTSPGLSAAPRAAGHGLGARVPPPTTETQPGART

SEQ ID NO: 231959 - protein, 88 aa, Zea mays
  Clone ID: MRT4577_14313C.1.pep
GEPGPKGFPGLPGQPGPPGLPVPGQAGAPGFPGERGEKGDRGFPGTSLPGPSGRDGLPGPPGSPGLPRQPGYTNGIVECQPGSPGDQG

SEQ ID NO: 231960 - protein, 141 aa, Zea mays
  Clone ID: MRT4577_143140C.1.pep
GKKKKKKRGPRGGGLYKNRVSPGLQNLYLGFFNPPPLGGGPKTNFPLWVFIFRALKTRFFNKVECGKTPVLPPFNTLRRNPPFPNGVKKKKSPPHRPFQMSGGALGKIEISNFLIFGKISPQICGNPPYFLPKKGKSRNPL

SEQ ID NO: 231961 - protein, 74 aa, Zea mays
  Clone ID: MRT4577_143141C.1.pep
AYTYHSRITTRIGCAYGGFRRDYTTVAFTTLPGSLLIPCTTYTNRCLIYQAPSYLSSSPYTWSTYNDPTIPRVP

SEQ ID NO: 231962 - protein, 249 aa, Zea mays
  Clone ID: MRT4577_143142C.1.pep
MSSIGTGYDLSVTTFSPDGRVFQVEYATKAVDNSGTVVGIKCKDGIVLGVEKLVTSKMMLEGSNRRIHSVHRHSGLAVAGLAADGRQIVSRTKSEAASYEKVYGEPISVKELADRVASYVHLCTLYWWLRPFGCGVILGGYDRDGPQLYMIEPSGVSYKYFGAALGKGRQAAKTEIEKLKLSELTCREGIVEVAKIIYGVHDEAKDKAFELELSWICEESKRQHQKVPNDLLEHAKAAAQTALEEMDAD

SEQ ID NO: 231963 - protein, 249 aa, Zea mays
  Clone ID: MRT4577_143143C.1.pep
MSSIGTGYDLSVTTFSPDGRVFQVEYATKAVDNSGTVVGIKCKDGIVLGVEKLVTSKMMLEGSNRRIHSVHRHSGLVVAGLAADGRQIVSRTKSEAASYEKVYGEPISVKELADRVASYVHLCTLYWWLRPFGCGVILGGYDRDGPQLYMIEPSGVSYKYFGAALGKGRQAAKTEIEKLKLSELTCREGIVEVAKIIYGVHDEAKDKAFELELSWICDESNRQHQKVPNELLEQAKAAAQAALEEMDAD

SEQ ID NO: 231964 - protein, 467 aa, Zea mays
  unsure (1)..(467): unsure at all Xaa locations
  Clone ID: MRT4577_143144C.1.pep
GLYVAAEKGHAEVVREILRSVXVQTAGIKASNSFDAFHIAAKQGHLEVLKEMLQALPALAMTTNSVNATALDTAAIQGHVDIVNLLLETDASLARITRNNGKTVLHSAARMGHVEVVRSLLNKDPRIGLRTDKKGQTALHMASKAQNAEIVVELLKPDVSVIHIEDNKGNRPLHVATRKGNIIIVQTLLSVEGIDVNAVNRSGETAFAIAEKMDSVELVNILKEAGGEAAKQHXHPPNSAKQLKETVSDIRHDVQSQFKQTRQTKMQVNQIKKRLEKLHIGGLNNAINSNTVVAVLIATVAFAAIFTVPGNFVEELSQAPPGMSLGQAYVASNPAFIVFLVFDALALFISLAVVVVQTSLIVVERGAKKRMVFVMNKLMWLACLFISVAFIALTYVVVGRDDWWLAWCTMGIGAAIMLTTLGSMCYCIVAHRQCFVSPEAAPWHAAPHQSSSTKGTGGPPGRPRGTQ

SEQ ID NO: 231965 - protein, 62 aa, Zea mays
  Clone ID: MRT4577_143145C.1.pep
MAPKAEKKPAEKKPAEEKAEKKPRAEKRVPSKEGAEKREKRRPRSTFGTYKFYFFKVLNQFH

SEQ ID NO: 231966 - protein, 254 aa, Zea mays
  unsure (1)..(254): unsure at all Xaa locations
  Clone ID: MRT4577_143146C.1.pep
GFRRRAARPARLARRPVLLPPLRSAGRRRRRMYGHRGAMMGSGGVSDGYEGSKRPRMMESNPYFAVNAGSPLDVSKRARMMEPGPPYFAGMGSSAGGSGSGFYPTYGGNMAGAAGVNSGIQNFPAVRLRGLPFDCEDVDISKFFAGLDIVDCLLVHKNGRFSGEAFVVFPSSMQAEFALHRNRQNMGRRYVEVFRCKKQDYYSAIAAEVNQGGALLEPEHRHSSPPLRSRRLSEXSSMEYTEVLKLRGLPYSAT

SEQ ID NO: 231967 - protein, 90 aa, Zea mays
  Clone ID: MRT4577_143147C.1.pep
TALRLCEKQTGGGGESEKMVVLVVATASDPASIGPAAAFLAMPGWSPGPPIPEGMESFTNGNVRLLKHERSIVAEDDLDRRWQEATGEAV

SEQ ID NO: 231968 - protein, 80 aa, Zea mays
  unsure (1)..(80): unsure at all Xaa locations
  Clone ID: MRT4577_143148C.1.pep
PPTAVFLFNTPPFPPLSPSVVGEPPTPFTPPAFVPPCPSFLPIPAAPFRQPPXGGPPFRLPPRXTPSYPPPPFVWGPPLF

SEQ ID NO: 231969 - protein, 67 aa, Zea mays
  Clone ID: MRT4577_143149C.1.pep
YTQLADRLYTWWGGKQNKKKLKTTGGSEQPADRPTNTYGDAFLATNSTAVLQTLMPMQNGVKLGCTV

SEQ ID NO: 231970 - protein, 72 aa, Zea mays
  unsure (1)..(72): unsure at all Xaa locations
  Clone ID: MRT4577_14314C.1.pep
MKVLIGALALLALAASAAYSTSGGCGCXTPPFHLPPAFYMHAPYYLPAQQYAAPWQYPTRPPEVNPCQQFGS

SEQ ID NO: 231971 - protein, 126 aa, Zea mays
  unsure (1)..(126): unsure at all Xaa locations
  Clone ID: MRT4577_143150C.1.pep
AKDPLEAKYWLRTIEQKLGLIHCDDVQKTQCAAQHLEGQAEAWWKKSLALNQEGHKFSGAESREVFRTRYIPKALMEIKXXEFLDLNQGKKKSVMEYFERFTRLSQYVLDFVNPIKKKRFTSQGAL

SEQ ID NO: 231972 - protein, 87 aa, Zea mays
  Clone ID: MRT4577_143151C.1.pep
NSPSDHFFLPSSKDHDESQEPGSHMSHPPCMEPKGVLGQILFDVCVPRNVEGWDIKPTVSPNGRPTFASARQLGPFNPIRYFRRSRL

SEQ ID NO: 231973 - protein, 221 aa, Zea mays
  Clone ID: MRT4577_143152C.1.pep
MWPGCGGRFYWAPESAPLVQARGVAVLFAWVWSDEAQLRPFVELYSSLGWRCLVCHPDLVALYLSEKAISLATGVINELVKELKIKIVPIGLASFSGGSRGCMYKVIQLLDGICEGDAIMKDYRLVRNCICGQIYDSSPVDFVSDVDAQFVQKPADGNSSQPTILHSWMAKALASVMDTLFPSRIEAQRAEYWHTLYSAAGLGPGLLFCSEADNLAHAILS

SEQ ID NO: 231974 - protein, 399 aa, Zea mays
  Clone ID: MRT4577_143153C.1.pep
MWPGCGGRFYWAPESAPPGQARGVAVLFAWVWSDETQLRPFVELYSSLGWRCLVCHPDLVALYLSEKAISLATGVINELVKELKIKIVPIVLASFSGGSKGCMYKVIQLLDGICEGDAIMKDYRLVRNCICGQIYDSSPVDFVSDVGAQFVQKPADGNSSQPTILHSWMAKALASVMDTLFPSRIEAQRAEYWHTLYSAAGLGPVLLFCSEADNLAPCYIICGFARRLIELGTEVKLMKWNSSQHVGHYNSHETEYRTAVDDMLKKALLTFCHRSQLYDSNMAGDREYKIAHSVCSLHNAAANSNESLRGVPNSPSDHFFLPSSKDHDESQEPGSHMSHPPCMEPKGVLGQILFDVCVPRNVEGWDIKPTVSPNGRPTFASARQLGPFNPIRYFRRSRL

SEQ ID NO: 231975 - protein, 154 aa, Zea mays
  Clone ID: MRT4577_143154C.1.pep
LPRPSSRLVRPPSKQRRDQTERWREGESCSRVVSVARGEEIFWAPPPLVLAPSTKKGEQRERTESGSPRPRLAPRNPMPPWSGSAVSMSVTTGSGSSARSRIPSRHPTSACGHRPRRTPARSGALVCPCHRLPAGGGNSSPRNHTTAWPSLPMA

SEQ ID NO: 231976 - protein, 103 aa, Zea mays
  Clone ID: MRT4577_143155C.1.pep
MKTSFRVQSVLSFHHGYHGGNYVNKTTHTCITEMGVIEKNRNNRKVSEYHTMHIGSPSPHGASAHDRSRTCPAHWEDYTSCSLIWRRSLFKYHQFARTQEEGL

SEQ ID NO: 231977 - protein, 195 aa, Zea mays
  Clone ID: MRT4577_143156C.1.pep
MGFVDPAAPLLATCGGDTVKLFDVTVETGDPCVLAYTPAPAHPVNAVKWNHTNLIVASAGDDKKISLWHKKGQNVGQLPTSTVDRGDDIEECIYSISFSNKGSRYLCSCGSGHIVRIWDLQRKRCIKWLSGHTDTITGVMYNCKDEHLASISMKGDLILHNLASGARVSELSDPNGQVLRVLDYSRNSRHLLVTA

SEQ ID NO: 231978 - protein, 150 aa, Zea mays
  Clone ID: MRT4577_143157C.1.pep
PDSGLDVATPVAYLHLPVLASNPFALPKVAAYQQHQQLQQFMPELRLLAMVNLADYLQQRQLLSSSPLVVANAHTYLRHQLLQQIAPALTQLAAANAAAYYAQLLTFNQLTVSNSAAYVQQRLQVLNPVSVPNPLFTALLQLQQLLPYSQ

SEQ ID NO: 231979 - protein, 104 aa, Zea mays
  Clone ID: MRT4577_143158C.1.pep
FFFFFFFFFFFFFFFFFSFVFVFFFFLFLQKKGWERLNKNGPKCYEKVLMGTGWGSKNRRGRGLKKICPFNVKKAVPKLNRGGNLALCWEPLKRRCGFNLAIPI

SEQ ID NO: 231980 - protein, 63 aa, Zea mays
  Clone ID: MRT4577_143159C.1.pep
SPSFSLVVGETLPRPILNGNHAMNFYVALILLLAFLENAWSQLQRSSSPGAIIFSLFKRLSRY

SEQ ID NO: 231981 - protein, 203 aa, Zea mays
  Clone ID: MRT4577_14315C.1.pep
MPAVAFASAPAIFASASARPCRSAAPGILSSDSGRPRRGARGAVQCEVASSSAPSAAGPQAARWAQRTVVIPPQRRGCHLITNKIVNEIGNDLADFKCGMAHLFLQHTSASLTINENYDSDVQVDTETFLSRIVPEGPSAPWRHTIEGPDDMPAHIKSSMFGCSLMIPITNGRLNMGTWQGIWLCEHRDYATPRQIVITLNGI

SEQ ID NO: 231982 - protein, 67 aa, Zea mays
  Clone ID: MRT4577_143160C.1.pep
FSCPIKKLLCSKHAYVKFDPLKTPPPFFYYFFFFLLSLFFFNPFFFFFFFFLFFYFFFFFFFQLFLS

SEQ ID NO: 231983 - protein, 434 aa, Zea mays
  Clone ID: MRT4577_143161C.1.pep
MPVLCTHHVQLRLWWRRLGRRSATFALALLAVALVLTLSRYAAGPAPSPPPSSSYGHRLPALVDITLVYGAIDKGAVCLDGTPPAYHFLPGFGDGSHNWLLHLEGGSWCRNFESCARRKKTNLGSSAHMDTRAEFVGILSDDQSQNPDFYNWNKVKIRYCDGASFSGNVQEEVKNDTGFFFRGQRIWEAVMAELLSKGLARAKQAFLTGCSAGGLSTYIHCDDFRALLPNTPTVKCLADGGFFLDVEDISGRRYMRGFYNDVARLQDVRKIFPHCSSDMEPGQCFFPQEVAKSITTPMFILNPAYDVWQVEHVLSPEGSDRENLWQNCRMDISRCSSKQLEVLQGFRKALLDAINEFKKRRDWGMFIDSCFIHCQSMKALAWHSPSAARVNNKTAAEAVGDWFFERREVKEIDCEYPCNPTCYNVVLDQPYKED

SEQ ID NO: 231984 - protein, 36 aa, Zea mays
  unsure (1)..(36): unsure at all Xaa locations
  Clone ID: MRT4577_143162C.1.pep
SRRQWRLSSLGASVTIDASYSXNAPLARRDDNXXGR

SEQ ID NO: 231985 - protein, 135 aa, Zea mays
  Clone ID: MRT4577_143163C.1.pep
PRWASSPVGFLTGFLPFGKGQNQIFPMGFREPPSRFLGFSLPPHNFWAQITLLKKIRFKPFGGAKGFCWGGPPFFLVFPSGPLFLFGGGFWAFLAPPEGINLLFFPRVFSREILGIDLLPRSPPKTLPWAPGPGG

SEQ ID NO: 231986 - protein, 49 aa, Zea mays
  Clone ID: MRT4577_143164C.1.pep
FILFIKTMPVSRKALCHLLLPNCVLKPRLAMKFSLNHSCVKCRVLHVCT

SEQ ID NO: 231987 - protein, 134 aa, Zea mays
  unsure (1)..(134): unsure at all Xaa locations
  Clone ID: MRT4577_143165C.1.pep
DAKDDMDPDGVFTFSDSAATNLDELRLXLNDKXPPEANEISVQCRSIFCIAQIAEXPDARKKLVRXIHSAPLFVKVDWXKCCDEDDDAADINMYGMDFSNFCDMSAMSGMGVMCDMHDTGGLAVMTGMPGRGGM

SEQ ID NO: 231988 - protein, 102 aa, Zea mays
  Clone ID: MRT4577_143166C.1.pep
EATDARVSTDWETGRERGFDSVNYSDSDAAKEAISAMNGQVIDGQQIHINMANERAAENLRDDGYSEQYYRGSNYECNGGYRGGGYGGCRQRYDACRGQDPI

SEQ ID NO: 231989 - protein, 66 aa, Zea mays
  Clone ID: MRT4577_143167C.1.pep
VVLRALCAWGAVKSRTILSWHMVKCSMVIRIRLMMLSMLSPGAFLRTVGRAKRPAKRGTGNPKRGR

SEQ ID NO: 231990 - protein, 64 aa, Zea mays
  Clone ID: MRT4577_143168C.1.pep
LLIRRHFQSSSVRVVSSVLCLTKFHLLYCAAPSILHVQVQHRGTGTYVVRRPDQSCFTDSCVHS

SEQ ID NO: 231991 - protein, 97 aa, Zea mays
  Clone ID: MRT4577_143169C.1.pep
MSDLGRKGLGDQVQEKVTPDSQKSTLDQAKEGVTGAYDRAAGAVQPEQDKSATQKLGDSTRSGKDEASGQGQGILASAQETLGNAAQSVQDTLGGKK

SEQ ID NO: 231992 - protein, 51 aa, Zea mays
  Clone ID: MRT4577_14316C.1.pep
REHVFAFHQRLQFPVSSAQTFHNYLKPKNVPKFLEGKKWKILSRPGGNSSI

SEQ ID NO: 231993 - protein, 73 aa, Zea mays
  Clone ID: MRT4577_143170C.1.pep
GGAFFVVRLAFCSTGFVLLVVVFWTLVLFQNAVLFWDFVCVIDSGYKAFVGVCCSCRPPSRAAGCWSAPRPRQ

SEQ ID NO: 231994 - protein, 86 aa, Zea mays
  Clone ID: MRT4577_143171C.1.pep
CSSCPKFLSFTAELKYCSFYYKFCRHTISIITNYLIFINSHQILSTFFLIFLSYLFFIFYLFIFYLNILFFYYILYIILNYLFFFI

SEQ ID NO: 231995 - protein, 108 aa, Zea mays
  Clone ID: MRT4577_143172C.1.pep
LDLPCPTILCMKQNSGSLDLFPIQRFLFSCPIRRTQKRKEKITVNGSTARVGGVPGCAPLAVGETADEDEEAKQVGLPYCVPLAVSGARERRRADEAGKGRNPKRRTN

SEQ ID NO: 231996 - protein, 135 aa, Zea mays
  unsure (1)..(135): unsure at all Xaa locations
  Clone ID: MRT4577_143173C.1.pep
KDHYPMPFVDQMPFVDQMLERLAKHSYFYFLDSYSRFLXIPIRPEDQEKTTFPCLNGTFSHXKDSFGLCNAPVIFQRCMMTIFSDFIEGIIEVFMDDFSVCGPSFDDCLENLSKVLQXCEEMNLVLNWEKCHFMV

SEQ ID NO: 231997 - protein, 83 aa, Zea mays
  Clone ID: MRT4577_143174C.1.pep
LVGNPLLRCPVANPFLVNGASTMQTFDHALEFLPGVVHPGPLRVAALAKSLACQVIALLSSHSAPYRDPFIHMQDFHDTLTLV

SEQ ID NO: 231998 - protein, 56 aa, Zea mays
  Clone ID: MRT4577_143175C.1.pep
IRLRCRCGGCSIIEVRSMVRSNKGRMFSSGGEASVYGSSDRTEAATLVSLRRGAPA

SEQ ID NO: 231999 - protein, 54 aa, Zea mays
  unsure (1)..(54): unsure at all Xaa locations
  Clone ID: MRT4577_143176C.1.pep
IEMSXGQGPSLMSCSENXVLSTIIYLFPKIYKMVVIIFLIQNPSDLITDAHTNS

SEQ ID NO: 232000 - protein, 42 aa, Zea mays
  Clone ID: MRT4577_143177C.1.pep
YQALDPPYRSLVLLSLNARGSLPIRPLSVPGIRIEGHCVHMY

SEQ ID NO: 232001 - protein, 40 aa, Zea mays
  Clone ID: MRT4577_143178C.1.pep
HHDRLNHYWQVHQHEFRAVLQSLCFLTGCDHPVSHLHTSN

SEQ ID NO: 232002 - protein, 194 aa, Zea mays
  Clone ID: MRT4577_143179C.1.pep
MIGVGKAKQYANVLDKPLSRGRQEVSLSAFAFLFSELVQYNQTQVDNITELERRLEDAGYAVGARVLELLCHREKGNRRETRLLGILSFIHSTVWKVLFGKVADSLEKGTEHEDEYMISERELLVNRFISVPKDMGAFNCGAFVAGIVKGVLDNAGFPAVVTAHFVPIEGQQRPRTTILIKFAEEVLHREARLG

SEQ ID NO: 232003 - protein, 202 aa, Zea mays
  Clone ID: MRT4577_14317C.1.pep
MPAVAFASAPAIFASASVRPCRSAAPGILSSDSGRPRRGARGAVRCEVASSSAPSAAGPQAARWAQRTVVIPPQRRGCHLITNKIVNEIGNDLADFKCGMAHLFLQHTSASLTINENYDSDVQVDTETFLSRIVPEGPSAPWRHTIEGPDDMPAHIKSSMFGCSLMIPITNGRLNMGTWQARKYLTWLVPYCRHLITSRANV

SEQ ID NO: 232004 - protein, 194 aa, Zea mays
  Clone ID: MRT4577_143180C.1.pep
MIGVGKAKQYANVLDKPLSRGRQEVSLSAFAFLFSELVQYNQTQVDNITELERRLEDAGYAVGARVLELLCHREKGNRRETRLLGILSFIHSTVWKVLFGKVADSLEKGTEHEDEYMISEKELLVNRFISVPKDMGAFNCGAFVAGIVKGVLDNAGFPAVVTAHFVPIEGQQRPRTTILIKFAEEVLHREARLG

SEQ ID NO: 232005 - protein, 72 aa, Zea mays
  Clone ID: MRT4577_143181C.1.pep
RTRGRTRGRTRGRTRGGSRRFILSQRIVNTCHEGEILYNLKIQEPELWGSYDCRIYQRLRAKLARGMTPSSY

SEQ ID NO: 232006 - protein, 243 aa, Zea mays
  Clone ID: MRT4577_143182C.1.pep
MAMGEALRAAAADAVVTFLWVLCVSTLGASTTAVTSYLRLQGVHFALLVTVSLLSVLLFVFNILCDALGGASFNPTGVAAFYAAGVTSPSLFSIALRLPAQAAGAVGGALAISELMPAQYRHMLGGPSLKVDPHTGAGAELVLTFVITLAVLLIIVKGPRNPIIKTWMISICTLCLVLSGAAYTGPSMNPANAFGWAYVNNRHNTWEQFYVYWICPFIGAILAAWIFRAMFLTPPPKPKAKKA

SEQ ID NO: 232007 - protein, 47 aa, Zea mays
  unsure (1)..(47): unsure at all Xaa locations
  Clone ID: MRT4577_143183C.1.pep
AGVLPSLFTYWNGTRQXVESFVSFSHRTGFDNLIEVVNKWAESPSAA

SEQ ID NO: 232008 - protein, 64 aa, Zea mays
  Clone ID: MRT4577_143185C.1.pep
LIDCLIFNYYILLYIYLTYFKFLFITIILFLITPISFTFLFYNYSYISLILYSFFLSIIIFPII

SEQ ID NO: 232009 - protein, 125 aa, Zea mays
  Clone ID: MRT4577_143186C.1.pep
ELALAFGELLRSLWTTDGKPVPPHYFKEKIACFAPQFGGFNQHDSQELLAFLLDGLHEDLNQVKCKPYEEAKDASGRPDEEVADEYWSNHLARNDSVIVDTCHGQYKSTLTCPTCSKTSVTFDPF

SEQ ID NO: 232010 - protein, 194 aa, Zea mays
  unsure (1)..(194): unsure at all Xaa locations
  Clone ID: MRT4577_143187C.1.pep
NGYQHLALLALLALFVSATNAYIIPQCSLAPSXAIIPQFLPPVTSMRFAHLAAPANPQQQALATSVLQQPIAQLQQQSLPHITIQAITTSHXHASYQQLAHLPMVNPAAYLQDXLFASTPLALANVVAYHHQQQLQQSLPTLSQLAMVNPADYVQQHQLLSSSPLAVGNVPTYLQQQLLQQXIVPPLTQLAVAN

SEQ ID NO: 232011 - protein, 260 aa, Zea mays
  unsure (1)..(260): unsure at all Xaa locations
  Clone ID: MRT4577_143188C.1.pep
ALVHDPARSDITVKEGRKVEQQSGVTQPDPLPLPSAPPAGVGMGEALGILLYILMVGFLLLWWYSALCWSGVMPMECWPPSLARSVRWLSTSSSASSPWWRQKGGGGSDASSPNKRVAASVRAALVFSRLASSRHGGGKGRGGMARRGSSLWWVFSLDLSFQRDCPALICWRASSVPPAAASIAVMEXLEVVTREAWMSLMEFVSSLXRWDLEKLWRPCWSAARLIPTSRRILQGRRATICIPPGHXXXRGRQDCFSRWS

SEQ ID NO: 232012 - protein, 92 aa, Zea mays
  Clone ID: MRT4577_143189C.1.pep
ASCSTAGVSWVPAGAAPSATAAGSAASGSSAPAGAAASASASACCSAAGSSSGSAGAAALASASTGAVSSGSTAGGGVSTRGASSTAATVGR

SEQ ID NO: 232013 - protein, 86 aa, Zea mays
  unsure (1)..(86): unsure at all Xaa locations
  Clone ID: MRT4577_14318C.1.pep
LLLFXFGXXSXLRACXLLCALLPSXPAPRCCRSXCPLRLRWXPSXXCPPCCPSXPLLVLPSXVLPPXLXWRCPLWLLCVLFCLRFL

SEQ ID NO: 232014 - protein, 70 aa, Zea mays
  Clone ID: MRT4577_143190C.1.pep
LAHSVCSHRINGVYPPTSMTTVGLVELSCVYIVLAYEASIGNGIFIRKTRSSTHLIKCSPLIPSVETTCG

SEQ ID NO: 232015 - protein, 58 aa, Zea mays
  Clone ID: MRT4577_143191C.1.pep
MRASRVCIYYMRRWGCPPGRFPLKFDAALTCYLVKGRVRAAVKGSRECVDKHYNFDPS

SEQ ID NO: 232016 - protein, 111 aa, Zea mays
  Clone ID: MRT4577_143192C.1.pep
MGTASTSPDTMEAARLPSLSITVEKNPPEARLLQLGVKSWPKWGCPPGRFPLKFDAALTCYLVKGRVRAAVKGSRECVEFGAGDLVVFPKGLSCTWDVVVGVDKHYNFDPS

SEQ ID NO: 232017 - protein, 111 aa, Zea mays
  Clone ID: MRT4577_143193C.1.pep
MGTASTSPDTMEAARLPGLSITVEKNPPEARLLQLGVKSWPKWGCPPGRFPLKFDAALTCYLVKGRVRAAVKGSRECVEFGAGDLVVFPKGLSCTWDVVVGVDKHYNFDPS

SEQ ID NO: 232018 - protein, 118 aa, Zea mays
  unsure (1)..(118): unsure at all Xaa locations
  Clone ID: MRT4577_143194C.1.pep
MGTASTSSDTMEAARLPGLSITVEKNPPEARLLQLGVKSWPKXLYYMRRWGCPPGRFPLKFDAALTCYLVKGRVRAAVKGSRECVEFGAGDLVVFPKGLSCTWDVVVGVDKHYNFDPS

SEQ ID NO: 232019 - protein, 82 aa, Zea mays
  Clone ID: MRT4577_143195C.1.pep
MRASRVCIYYMRRWGCPPGRFPLKFDAALTCYLVKGRVRAAVKGSRECVEFGAGDLVVFPKGLSCTWDVVVGVDKHYNFDPS

SEQ ID NO: 232020 - protein, 53 aa, Zea mays
  Clone ID: MRT4577_143196C.1.pep
HSSCSSSAEAGSHSTVQPRGKVDGQVTPATISSRERYHTLILIRISSRRQLIP

SEQ ID NO: 232021 - protein, 39 aa, Zea mays
  Clone ID: MRT4577_143197C.1.pep
RSGTRGALARYTTYSIHRLNQLIGCVHTYKVVVSRETQV

SEQ ID NO: 232022 - protein, 91 aa, Zea mays
  Clone ID: MRT4577_143198C.1.pep
LLRRSVGGLVYRHVFSGGSDRHDHIYVCVNSIQHVYYYYGLMDLYAHVVRVSVCHGHRGDGNPAWLYDGLIWTYAAFIYFHVHTMYKACFF

SEQ ID NO: 232023 - protein, 59 aa, Zea mays
  unsure (1)..(59): unsure at all Xaa locations
  Clone ID: MRT4577_143199C.1.pep
AGIIDNTRAPAFAMDYWPLPAEAKLNDLLTVIXRADKAHHLDVKHSGSDILYQGMNLKD

SEQ ID NO: 232024 - protein, 63 aa, Zea mays
  unsure (1)..(63): unsure at all Xaa locations
  Clone ID: MRT4577_14319C.1.pep
LREQAPLRLHSEKPVCRISAICSPRDSMYQSVCLISQARXECVHCPGGIRQDAILDIPAHTRG

SEQ ID NO: 232025 - protein, 109 aa, Zea mays
  unsure (1)..(109): unsure at all Xaa locations
  Clone ID: MRT4577_1431C.1.pep
MHITIYLSTVATTILSLLALLALFASSTNAFIISQYSIATSSIITQFLPPVTXMGFKHPSVQAYRLQQAFAVCVLXQPIYQLHQHCLSHVTIQTISTHQQQQFLPALSH

SEQ ID NO: 232026 - protein, 47 aa, Zea mays
  Clone ID: MRT4577_143200C.1.pep
LLAHHLQGQICIFPQHLSLSNGLGTESLNNLVQIVVVPSLYFLIDYF

SEQ ID NO: 232027 - protein, 159 aa, Zea mays
  Clone ID: MRT4577_143201C.1.pep
VCQPRLTLPEWPFVRAVRERGRCSRRRRRRRQFLSFGSQGGVANGHQPAWTTCARALDPRTFGARKQGAPDLGAVGHSLPPLTCAFAGDVTSVGVPDGAANYVGNVWDRCRTKECVLAGEFLAVAQRRHEPAVPHGQLHPASQPSIMPLGSIRYLLCII

SEQ ID NO: 232028 - protein, 79 aa, Zea mays
  Clone ID: MRT4577_143202C.1.pep
CPCSIAFPNSWTLTARGVAPETQDFVLIIYPYGAGFWYSQGMYHSFCHRIYWFPLIYVFDPLKFCFSVFIREGKVCVCP

SEQ ID NO: 232029 - protein, 99 aa, Zea mays
  Clone ID: MRT4577_143203C.1.pep
FPALLRFICESPSRVDVLVKAQFWSPKEERAQKKGGKALVVHQNMFGQLFPLALPPPPMPGRGGPPPPMGGMGLPPMGFPPIPPFGIPPMGSFFFGFPA

SEQ ID NO: 232030 - protein, 116 aa, Zea mays
  Clone ID: MRT4577_143204C.1.pep
IREPPLNRVEKNACTPASSTVAPVAIGTRCKGVDVGAIHLHHPFLNQHYVPIALVSAQIEAHVWWCWVFLFAMSMLYSPKCPGVMCGIGCPQANNVLINAPNNLSFLVNVILPEKK

SEQ ID NO: 232031 - protein, 150 aa, Zea mays
  Clone ID: MRT4577_143205C.1.pep
GRGAARPRWLWPAWPATVPKRRRLPRLTSARRGPSPEPPGPGGPRVAGSRARAAGAGGPRAVGTHARAAGAKRPRVAGSRASEPLRPGAAAPRGDAPGRETSGPWLPRSSRHGRRAPMPTEGRTPVLAVGWSPGGGGALLLKPTRPPTRP

SEQ ID NO: 232032 - protein, 96 aa, Zea mays
  Clone ID: MRT4577_143206C.1.pep
NPNMNINHIILNITILFSFSCLTLTMVDFITNVLFSFPNFQSTITTIFVYLFYNYYFSTNFGPYRRPQFITVMVQVRHGEAVTPFQIGQSSAGVTI

SEQ ID NO: 232033 - protein, 133 aa, Zea mays
  unsure (1)..(133): unsure at all Xaa locations
  Clone ID: MRT4577_143207C.1.pep
PAGIPGDGRCLFRSVVHGAYIRSRKPIPNEDHQRRLADELRTKXFVEGDFDTYVSQIRKPQVWGGEPELLMASHVLQMPITVYMHDKAAGGLIAIAKYGQEHGTEAPVQVLYHGYGHYDALHIPGEGGPRSRL

SEQ ID NO: 232034 - protein, 116 aa, Zea mays
  unsure (1)..(116): unsure at all Xaa locations
  Clone ID: MRT4577_143208C.1.pep
DHQRRLADELRTKVADEFIKRRAETEWFVEGDFXTYVXQIRKPQVWGGEPELLMASHVLQMPITVYMHDKAAGGLIAIAKYGQEHGTEAPVQVLYHGYGHYDALQIPGEGGPRSRL

SEQ ID NO: 232035 - protein, 310 aa, Zea mays
  Clone ID: MRT4577_143209C.1.pep
MLINMPNICWRSFTLCNTYSPSNQLQGGCTQRMDLWITSCSQAARHHARIGSVDFPVKKNVKSSQLQNTTCFVGLVRQLQCRRSAKSHILNVKSDTVSHQKVSGVSWSLENTPRRIGCVVSGLGFAAYGLASAEGPVNNNIDSTESAMSSTNLSHGKEVHTDYSVTGIPGDGRCLFRSVVHGAYIRSRKPIPNEDHQRRLADELRTKVADEFIKRRAETEWFVEGDFDTYVSQIRKPHVWGGEPELLMASHVLQMPITVYMHDKAAGGLIAIAEYGQEHGTEAPVQVLYHGYGHYDALQIPGEGGPRSRL

SEQ ID NO: 232036 - protein, 49 aa, Zea mays
  Clone ID: MRT4577_14320C.1.pep
MASTSDQRSNQGNEDNSSIGEGHPITSPNPEKVGKMLIIILMPAKGPLA

SEQ ID NO: 232037 - protein, 109 aa, Zea mays
  Clone ID: MRT4577_143210C.1.pep
METSTPRRAPAADAAATSSYVSMSPSPSHTPRSSTKAKRTLNNGAAIVASSPSPSPSLAKGGGGGGGVNIQVLLRCRPLSKEELSINTPVVITCNEQRREASAAQNIAN

SEQ ID NO: 232038 - protein, 76 aa, Zea mays
  unsure (1)..(76): unsure at all Xaa locations
  Clone ID: MRT4577_143211C.1.pep
KKKRTKRGVVLQRIVNTERGVPPFKLGPHAADFNXPANPITFLFRLNPRTIXADYYVLVPIFMQIKDQIVAQGLPI

SEQ ID NO: 232039 - protein, 99 aa, Zea mays
  Clone ID: MRT4577_143212C.1.pep
LPFRFFFLVFCFFQLFLWLLRWALSALASPVRLLLLRAQVSCIGRSKGRIVPRRVSRWRPAPPRYCCRLGRSPARRVGIPRPRLGCRGLCSLSCCGGLV

SEQ ID NO: 232040 - protein, 44 aa, Zea mays
  unsure (1)..(44): unsure at all Xaa locations
  Clone ID: MRT4577_143213C.1.pep
AVPLNXAAWWPHDTILFLPIXXXNHAMXKKNSQLPRGAGRMRSR

SEQ ID NO: 232041 - protein, 194 aa, Zea mays
  unsure (1)..(194): unsure at all Xaa locations
  Clone ID: MRT4577_143215C.1.pep
VDPAFVQAAPSSGGDGLLSRVHHTNLVGTPPVLVTAGDAQLGYXLMLGGTLHDSLAGKHRLHVDWNKRLPVALAAARGLNYLHKLADPAIIHRDFKAINILMDEHLXSRSTDFRLSKLVFHSDRGHVRTQVKGTLHYLDPEYYMFQQVTGKSDDYSFCVVMLALIVYKHPIEKGKYTVRXRRTGXDSYDSEFCG

SEQ ID NO: 232042 - protein, 74 aa, Zea mays
  unsure (1)..(74): unsure at all Xaa locations
  Clone ID: MRT4577_143216C.1.pep
MASETETIAFQAEINQLLSLIINTIYTNKEIILREHIANSSDALDKIRFESITDKSKLDAXPELFIHLVPDKAT

SEQ ID NO: 232043 - protein, 77 aa, Zea mays
  Clone ID: MRT4577_143217C.1.pep
AASTERRIDDILDPRIAASFDDPASVPPVERMVKTAMWCLQDRAEIRPSMGKVSKMLEGSVEIPEPVKPTIFCVQDD

SEQ ID NO: 232044 - protein, 99 aa, Zea mays
  Clone ID: MRT4577_143218C.1.pep
KRVDDGASGHVRDVAKPCGVWAMWWLCAGALVQAEFLTGIMLAVDQLRLETALSTPRIQGQEHVPQDEAHGGCCDVFMRDLDRRLPVNFGLLDRCLLTM

SEQ ID NO: 232045 - protein, 165 aa, Zea mays
  unsure (1)..(165): unsure at all Xaa locations
  Clone ID: MRT4577_143219C.1.pep
SFFFFFYSPSCFLLAFLFCFLSFWPLAPPTVIIPSCRLLVGGGGPRTVLARHLRHLVLAXLAAYSQRLQFLPLRQLAALNSASXLPQRPLPFSQLPVAYPQPFLPFNLLAALRSPAYLQRRQLLSFSPLAGVSPATFLTHPPVVXFYLLAAPFAGSLLHLPXLLP

SEQ ID NO: 232046 - protein, 47 aa, Zea mays
  Clone ID: MRT4577_14321C.1.pep
LNKLNMEKKLVKRFCSPHASIILQITFSTGTPITTGPKTVSVSGHLI

SEQ ID NO: 232047 - protein, 642 aa, Zea mays
  Clone ID: MRT4577_143220C.1.pep
MTGRPGSISCAPNIGIWEDRRPHSASASLRLDSRPHLSTPPEVRLRRHRHAMSKPADQQPSDMQVDSSVAEEKPAIRFSINVLELMREAQMQHGLRQSDYTRYRRYCSARLRRLYKSLKFLHGRGKYNRRNITESTVTDVRFLHVVFYMAERAWSHAMEKKTAGTNAKQRIYMLGRFRKAVKWASLFSQLCSVKGDSRTSLEAEAYASYMKGALFFEQDKNIDAAMINFKNTRAIYEELGKYGSIENQLLCRQRIDEVEPMIDFCSHKLGGSYLQAHELLDTANDLLKAKMEAVLSETRSQQAASMTEFNWLGRTFPITNAKTRVSILKAQQLERDLSAAATESVAADKKLAIFDKIFSAYHDARSCIRNDLASAGNAEDIKDDLNGLDKAVSAVLGLRTIERNQLLVSIGKSKFTKHRDEKNERITKPEELVRLYDLLIQNVTDLTDLVSSGRNKNEEENSFIHEYELKGLAFRAERCFFLAKSYSSAGKRAEAYALFCHAHTLTGSALQQHSNSHDKALIQDLEFLSNNCRSNSCIEHATGIMEEEIVPLKLSKGVSTMSLADNKTKENKYLLDMLESYESAIGEPNTKAPCRIAQFPPPFQAVPCNPIVLDMAYNSVEFPNLENRMKKEKKGLLSRFWG

SEQ ID NO: 232048 - protein, 120 aa, Zea mays
  unsure (1)..(120): unsure at all Xaa locations
  Clone ID: MRT4577_143221C.1.pep
SSRPLXSVKXLEXDMVTDAPGIALPPAFAAPIRPDVARFTHKLLSCNKRQPYAVSRRAGHHTPAESCPTARAVSRIPRAPGGATHRAGPGAFGNLRRAARMPPPTKIXRQCHRRANDNLP

SEQ ID NO: 232049 - protein, 111 aa, Zea mays
  unsure (1)..(111): unsure at all Xaa locations
  Clone ID: MRT4577_143222C.1.pep
KXXXXXXXXXXXXXXXXXXKPXXXXXXXXXXXXXXXXXXXXXXXXXXXXXXXXXXXXXXXXSKVEDKVIMILPKLPTVLLMXXXSFYRREPHQHCKGSGHKCSTKGYSPGC

SEQ ID NO: 232050 - protein, 199 aa, Zea mays
  Clone ID: MRT4577_143223C.1.pep
SVASSVPCNTWLLASLAASLLNLPKQMCHLSAVVLIGASLHHRPQLSGARPWRPPCPRSEAGRRVCSVSRAPSFRAPASANSKNLGRLGPARYPRHQLARVPSFLFSLFLPRSDIASEGPRAPSFESWFSPYSLRSQSTARWLPCARLRMPSPDPCALARSLCLAELITAARLCIAVLSHASLVVLHILISKQDHAADY

SEQ ID NO: 232051 - protein, 260 aa, Zea mays
  unsure (1)..(260): unsure at all Xaa locations
  Clone ID: MRT4577_143225C.1.pep
XKKKGCNTWLLASLAASLLNLPKQMCHLSAVVLIGASLHHRPQLSGARPWRPPCPRSEAGRRVCSVSRAPSFRAPASANSKNLGRLGPARYPRHQLARVPSFLFSLFLPRSDIASEGPRAPSFESWFSPYSLRSRRRLPARSATSLPVHSSLASLCAVADAVARSLCLGPILVPCRAHHRRETLHRCAQPRLPSRLAHTHLQTGPRCRLLTPSLPRSARTLSLSLDNVFARHHVTFSNTALLDSVRSSTPGYRSSXRRAP

SEQ ID NO: 232052 - protein, 54 aa, Zea mays
  Clone ID: MRT4577_143226C.1.pep
GSTLGPSSTFLPGRGWKDFICLVELGNQPKAFATDQAERRTQSNFNNRNNWPKG

SEQ ID NO: 232053 - protein, 94 aa, Zea mays
  Clone ID: MRT4577_143227C.1.pep
QGPPLLPSVAAASGVAATAGAASSSSSLASTTATSLVSTAIFGSAASTGAAAASVSAAGASASVSSSFTSVSAAGAAAFEHASLGYASVGSAPA

SEQ ID NO: 232054 - protein, 123 aa, Zea mays
  Clone ID: MRT4577_143228C.1.pep
APLILPGFQLGFMETVAIQPSERFQSALQFARAEGVFPGPEPTPPISPGIKEGLECKRAREEKVFLMALWGAGPFYLPGVQKVLRGDMVVFLPPGGKMGASLPSGAKILGGWGPQPIGLEWGE

SEQ ID NO: 232055 - protein, 52 aa, Zea mays
  Clone ID: MRT4577_143229C.1.pep
QGGLAVRDLKQLLLWGFSPRKKKKKKKKNKKKKKKKKKKKKKKKKKKKLEKG

SEQ ID NO: 232056 - protein, 900 aa, Zea mays
  unsure (1)..(900): unsure at all Xaa locations
  Clone ID: MRT4577_14322C.1.pep
MGKRGHRRSASQDDDNVGCVWGLMRMLYFRRDPKLLLDAKQLSGRHAFREVSGRGHSAKRPNDFDGIEEDGNIEDRTLQKPTVKNLMEDELEKLMLLKXISNDEVQRRKPTXGIDVSLGRSSEHTNKSIDRSYHQAGISTPSIPPMDSGVLNYAEEYDLESVLMNFLGEIYSCHDECPHSDCKNKNELCPSLKSLIHKKVNELNNLPRNIGCAQSQEGNDAKLSDQNNLSNTMAARSKQFKDALEINIRNDESSPAEQRRDDIHIVDSIQKHENSKVAAGSEASEVDGDANFGLEEAETPEPRASAKLISDETPNQSDWKKERSNRSIMLLRTIPEKSWTKILILQPRLXKCMXNQKAATARTLHQQPCTSHAPECGGIDNSKFSIKEVKTRFRFVNSESRRESNLAPAEDLQGYPRKFKDSFVAINKDFRHFPEXGSXQNKSGSDIKNAIKPFISSKQNGSISGNSGHIVAPKGPAVFYEEARRHLSEMLKDNDCSINYPEVQISKSLEGILSLPHGNVSTTGSSLRGKDYLDPSPGETDVYDACEVQREECTQERSQSQEDFGSIAHCTCATVDDQVTVREGYYTNEAQEGPRHAHDEPDTLYIEGLDKFICRENIRNEESSPAEQSRDDICQEILEEINQGKEHVKMSLASVEGIDEKLGQQEPETPEPRASAKLISDGSPNQSDEKQERPSPVSVLESSFEDIGSPDCINKKECELHGLQRTLYFPDNEPDVNVLWEDKNVRLDYIKLVLELSELCAEQNLEVWYLEDELISPCLFEELQSQGDQTDDRMLLFDCICEALTEIQERYFRLSSWLTFLKHDIRTPPTGENLITEVDRYVNGYIIQYSLPSTLEQTIKRDLEVQTWMNIRSKTEGIIMEMWEFVLDELIDETVFDLWI

SEQ ID NO: 232057 - protein, 71 aa, Zea mays
  Clone ID: MRT4577_143230C.1.pep
QRRVLFFFFFFFFFLSRFLENMDKTEATFGSFFRTSFPENLDSRRIWLCGESGYHEAYMRRKMKTSTGFRI

SEQ ID NO: 232058 - protein, 608 aa, Zea mays
  unsure (1)..(608): unsure at all Xaa locations
  Clone ID: MRT4577_143231C.1.pep
MNSHKFLLAVLLLLLLNYASYAATSKEDDDFLKSCPSHRCHKHGPEIRFPFRLPSHPPSCGAPGMQLSCSGHDTILDHPVLGSCRVTAIYYRHRVMNVIPPEDSSSHCQLQKLVKRNQSTDVYTPVVNPVSVLVGCSREATNQDGIVGPSSCLSLINNASQLWYLVDPSTDMSTLPMGCEVVAKGIPVPYTYDKNGPNYNTFSGRSLFNEKANRTINFGETSFNWNLNNITGSCQRCEQEGKHCGFSSNRRQAFCLHHGSHVILIAATTSVATFVVLVVTALYLSLKKRYNEAIHLKVEMFLKTYGTSKPTRYTFSEVKKIARRFKEKVGQGGFGTVYKGQLPNGVPVAVKMLENSTGEGEDFINEVATIGQIHHANIVRLLGFCSEGTRRALIYEFMPNESLGRYIFLPQELLVPEKMLDIATGIARGMEYLHQGCNQRILHFDIKPHNILLDYSFNPKISDFGLAKLCARDQSIVTLTAARGTMGXYIAPEIYSPNFGGVSYKSDVYSFGMLVLEMVSGRRNSDPGIENQNGVYLPEWVYERVVTGQDLTLSKKIADQEKETVRQLAIVALWCIQWNPKNRPSMTKVVNMLTGRLQNLPIPPKPYA

SEQ ID NO: 232059 - protein, 103 aa, Zea mays
  Clone ID: MRT4577_143232C.1.pep
GKPGTTHAAIYTNAHTHQEGGQKNNGGDHKNSNPGNTTHAEQPTTNRDTYSNPKAQENLHPLPHPERGEGKHPTAKGQGGVSHPRTKDPNDSAKAQALNHHQD

SEQ ID NO: 232060 - protein, 76 aa, Zea mays
  Clone ID: MRT4577_143233C.1.pep
YYIFFFFFFLGTGDVVHLTVQHPRTLDNATCHGMRIRKRRQGSYTKKKEHRHTRTHIWIHQYTEKAPTRTTAAQNW

SEQ ID NO: 232061 - protein, 41 aa, Zea mays
  Clone ID: MRT4577_143234C.1.pep
KSKNIVACKLLTRTSNYKKYTVSQSLLLHARFMLGLNNKLQ

SEQ ID NO: 232062 - protein, 136 aa, Zea mays
  unsure (1)..(136): unsure at all Xaa locations
  Clone ID: MRT4577_143235C.1.pep
PCKAPKKKESQCPFPLKPMGPAPPGKRPLFPGXPPGSGGKPPPGGGSPGKRKXKLTLRPPPPXAGYLFGPPDPLVNKDPXGGKLPSFAPPMAPVGPGPLAPPPIFPPGPPVFPPKFFCPXPPPGCAQQKFGVVCFL

SEQ ID NO: 232063 - protein, 138 aa, Zea mays
  Clone ID: MRT4577_143236C.1.pep
HWDPSSRPGPLIPLSSPADSFVVRSSSSTAFEDSFSAGGGLEIRHHLHRDESMTVDQETSLRLHSVEHLLLHFITSLLSISARLVQYLANLNMHFDRPVQPFCIFPSSSLVFSPPLHMPHFLPRGLLAPDLLYSSSTS

SEQ ID NO: 232064 - protein, 67 aa, Zea mays
  Clone ID: MRT4577_143237C.1.pep
DTSLKVGDANSQGWTSLYQCPHLIVGVLGSLNEKGIAHIQYADDIVLMTNGSNKSITNIKIMLYCFE

SEQ ID NO: 232065 - protein, 53 aa, Zea mays
  Clone ID: MRT4577_143238C.1.pep
INPMNHSNNHVLCPPLLIITTILTLAFKEVGSFSASLSKESKGEKQARKKEKY

SEQ ID NO: 232066 - protein, 181 aa, Zea mays
  unsure (1)..(181): unsure at all Xaa locations
  Clone ID: MRT4577_143239C.1.pep
IRHEAPPRSPRPSSASPVHLAVSVMPREGLGNFGAEEEARDGGQEGLVTEMDVEESSPSSSPMSSPAGSSDSIDLNFLPFLKREPKSEPSSPELGPLPLPVSLTQTPPQQHAAAAAPATEASVPPPPATPDLSSASMMTPLQSLPPNPDEDSLLREYYRLARLYLSSAXSGAIVPTPAPEA

SEQ ID NO: 232067 - protein, 247 aa, Zea mays
  Clone ID: MRT4577_14323C.1.pep
SVEGIDEKLGQQEPETPEPRASAKLISDGSPNQSDEKQERPSPVSVLESSFEDIGSPDCINKKECELHGLQRTLYFPDNEPDVNVLWEDKNVRLDYIKLVLELSELCAEQNLEVWYLEDELISPCLFEELQSQGDQTDDRMLLFDCICEALTEIQERYFRLSSWLTFLKHDIRTPPTGENLITEVDRYVNGYIIQYSLPSTLEQTIKRDLEVQTWMNIRSKTEGIIMEMWEFVLDELIDETVSDLWI

SEQ ID NO: 232068 - protein, 46 aa, Zea mays
  Clone ID: MRT4577_143240C.1.pep
TLECFRLRFLKSENVTYYFWLSPLSILLSLKNKSPLPHHIIGGALN

SEQ ID NO: 232069 - protein, 78 aa, Zea mays
  Clone ID: MRT4577_143241C.1.pep
ADSLICRNLQSELRVLVDELVLLKYLPSGIMSNELEHQRKNLRAVTAATHDLTVLTRIRIPRSRVYYNFMWTNARAEL

SEQ ID NO: 232070 - protein, 69 aa, Zea mays
  Clone ID: MRT4577_143242C.1.pep
ARARISPMSKTATFGETLFALKLPSGIKSPVDECNYRGPPFFLFFFNTHAEGGGRLIRLTASTAVMKSI

SEQ ID NO: 232071 - protein, 98 aa, Zea mays
  Clone ID: MRT4577_143243C.1.pep
LCHTTLVGSVASPCKARCPYAERCACIHLREITCKGCKGSVMEPVHGSSIAMGPWCTEAALCHERYQLPVFGKRVFKAFSPPRKLLSRRLPKLGWTPW

SEQ ID NO: 232072 - protein, 247 aa, Zea mays
  Clone ID: MRT4577_143244C.1.pep
FLLPLPPAPPPAAQNPNPRSRGPADMASKFGLAGGIPERRVRPIWDAVDSRQYKSALKLCTALLAKHPTSPYALALKALTLERMGKPDEALSVCLEAKELLYSNNIFHFDDLTLSTLQIVFQRLERLDLATSCYEYACTKYPNNLELMMGLFNCYVREYSYVKQQQTALRMYKTVGEERFLLWAVCSIQLQAYFSSGGEKLLAFAEALLKKHISSHSLHEPEALSLYVSILEQQAKYDAALEVLSGD

SEQ ID NO: 232073 - protein, 84 aa, Zea mays
  Clone ID: MRT4577_143245C.1.pep
MDPSPAWPSRRIRQEILTFFESKAHTRWPPSPVVPVNNHTLLLANAGMNQFKPVLLGTMAPDSPLERLHRACNTQKCNSSGGKH

SEQ ID NO: 232074 - protein, 60 aa, Zea mays
  Clone ID: MRT4577_143246C.1.pep
NDAIACGCGYADLIEYGGYFFVNPDLLMCFAKNAPLTKYDRSTLYTFDPVVGYTDYLFFD

SEQ ID NO: 232075 - protein, 64 aa, Zea mays
  unsure (1)..(64): unsure at all Xaa locations
  Clone ID: MRT4577_143247C.1.pep
PKPEPKPQPKPEPXPDPKPEPKPEPKPELEPKPEPKPEPKPXPEPKPEPKPKPDPEHIPPSDLN

SEQ ID NO: 232076 - protein, 76 aa, Zea mays
  Clone ID: MRT4577_143248C.1.pep
GSHQWVWGLFFVNFVMLQGRFAPLFFGCFTRVSLGDKKRLWFPPPFLFSRGGDQKTLLPVVKKIFSRKRVLRNIVF

SEQ ID NO: 232077 - protein, 142 aa, Zea mays
  Clone ID: MRT4577_143249C.1.pep
AATGVFCWGGHSRGRKFVPGFSLNWGGKTSPTSGGMGRKKFLAPQGSSPPPSLELLGKFSPPGGQNSPFFFSFCAPLSPLCGEGGKNHFPPLPGWGLFSPLKKNGSPKVFPPNLKFFFYRGAPAFPCIILGGAHKKKFNFLG

SEQ ID NO: 232078 - protein, 126 aa, Zea mays
  unsure (1)..(126): unsure at all Xaa locations
  Clone ID: MRT4577_14324C.1.pep
RNTLSSMRRSXLTHPSASLNRWDPTLVNPCTCFHSACNSYNRXTRLNLGNLNLCGHPGSEVAKLXHLNDLQLYKNNIQGTIPSELANLKNLVSCYLNNNNISSTITPALAKMKSXLVFLRLNGNHL

SEQ ID NO: 232079 - protein, 75 aa, Zea mays
  unsure (1)..(75): unsure at all Xaa locations
  Clone ID: MRT4577_143250C.1.pep
ASNTHSPXERKRKYMISPXXKPRPHPSQSYNRGNSDPKLPTLALTQLLTKPDRLPPPQNTRHKQVPPCTARLYHT

SEQ ID NO: 232080 - protein, 55 aa, Zea mays
  Clone ID: MRT4577_143251C.1.pep
DFGLWPIGQAIQVLVNHTTPTLVALSAYRIPPDNILLALSLLNRRSHPIPPRPEV

SEQ ID NO: 232081 - protein, 219 aa, Zea mays
  Clone ID: MRT4577_143252C.1.pep
MDQVPNGRHKVSFAKPRVVVLSDSDSDSEGFVEELTPVHSKSNGKASSASLKTGGKASAFSKGEASKGKAYSSDKGGKGSSSHAVPTKSDAELKLELDIPPNSRMLMNCEAAELLQEIHEHMAILSEDPKIKIPESFDKAFQYSKDGNHFTTASSVKQAIEPLKKCGVSDGEICMIANIGPETVEEVYALVPSLKANRSAIEGSVTEVLTALANIKAAK

SEQ ID NO: 232082 - protein, 51 aa, Zea mays
  Clone ID: MRT4577_143253C.1.pep
ASCHSMSQSNSSMHMSAYTHGSSGSYRSLILSRRTDRLLAWIMPSRVESVS

SEQ ID NO: 232083 - protein, 44 aa, Zea mays
  Clone ID: MRT4577_143254C.1.pep
ESLCNPLIAKMAPGPGAHMGGSPGMDQDPPPENGGPGPQIKEVD

SEQ ID NO: 232084 - protein, 245 aa, Zea mays
  unsure (1)..(245): unsure at all Xaa locations
  Clone ID: MRT4577_143255C.1.pep
SKAVAGQRKXPRRXPAAMSRTVMRLVEQGSGARQFFPWTSSKEKKRERVGWLTASEVHRSGRGMPAPRNPGRGGVPPRXALAYRCCWPHRRGCARPRPXVRALLQGACEEXDVGRGAARCAATGAAAGADRSEFVEGERGRHGEGKVEEWARLSTDEGARREVPRRRAWLGRDEARRPTEGARARWAGTLARLGHAHDQEEGGDGRPGRLNRASAMAKVRHAEGNEGRGRGDGERKGEGSWMRGR

SEQ ID NO: 232085 - protein, 97 aa, Zea mays
  Clone ID: MRT4577_143256C.1.pep
GNADVRKPCWFGPLGRGGSLLDRYHSACHGMIKVLVLVVAAVHVEQGLFRRFRHSSIVWSLFYVCGVYGVVVHTEPGYCSCLHDVGVYGLIRVLVPV

SEQ ID NO: 232086 - protein, 39 aa, Zea mays
  Clone ID: MRT4577_143257C.1.pep
GLGKKQGLTARCPIPVSCKRPSSGCPPAHQKKKKKKPRR

SEQ ID NO: 232087 - protein, 86 aa, Zea mays
  Clone ID: MRT4577_143258C.1.pep
RIGILFTRQNKQKNCLCLPPSSSCCSSAHTIRFRSLLRGHGSRPFSLLAVHGTRSVAVTPSPAAFWFLCLPSFLSFSSYASPFFHL

SEQ ID NO: 232088 - protein, 106 aa, Zea mays
  Clone ID: MRT4577_143259C.1.pep
REQGPGLLLPPCFKNQEVGGKGPKQTPKNRPLPFYLGIREGRPPVGWEPFCGLFKQTPRGFGSKGFPVFIKGSRVFLKNNRKTGWFGGDPCFYFEIFAFKVPPGAP

SEQ ID NO: 232089 - protein, 68 aa, Zea mays
  Clone ID: MRT4577_14325C.1.pep
AKLNSVTQARFIACVYVPPHLKGRLCLAFLLTPSPGQITYFTAESISHVDDAGDAFRVAHYVYRMVDL

SEQ ID NO: 232090 - protein, 413 aa, Zea mays
  unsure (1)..(413): unsure at all Xaa locations
  Clone ID: MRT4577_143260C.1.pep
MSSGDFHYHDELAALFAQRPAPAGEMTMALQQQAPAASWFADYLHAGAPGMGMDMDYDLLCRALDLPVPGDEDGVVKRELLLVADTGGGGGGFAAPLTPNTTSSMSSSSSEAAGAAAGGGGGGSFGAAEEESQSLGRCKKEDDGDGEESKDKEAMKGEEDDADTGKKGSAAGKGKGKGEKRQRQPRIAFMTKSEVDHLEDGYRWRKYGQKAVKNSPYPRSYYRCTTQRCPVKKRVERSHQDPAVVITTYEGKHTHPIPSTLRGSSTHLLAAQLHHHHHHNIVGAFPPPPPPPQTMCLPFVGRTGDGGGVIDMLGLCLPPRNHAAVPPAATGLAPSPCSMSGPVGTVAGATQTTAXTTTVTTTTTSSPPPPPSLQTMQHFMAQDDFGLLQDMLPSSSSSLSFVVHSNGSNVQLP

SEQ ID NO: 232091 - protein, 270 aa, Zea mays
  unsure (1)..(270): unsure at all Xaa locations
  Clone ID: MRT4577_143261C.1.pep
LVDVRTGGADEIDADADAGSLACCRSAAGKGKGKGEKRQRQPRIAFMTKSEVDHLEDGYRWRKYGQKAVKNSPYPRYVVHAQHVYTAIPTGYCTYIQHLSSXLLHDARYGRHCCMSXVMACRSYYRCTTQRCPVKKRVERSHQDPAVVITTYEGKHTHPIPSTLRGSSTHLLAAQLHHHHHHNIVGGVIDMLGLXPASAQPRRRAAGGDRPRAVPLLHERSXVGTVAGATTTTXPTTTTVTTTTTSSPPPPPSXQKMQHFMAQDDFGLLQ

SEQ ID NO: 232092 - protein, 70 aa, Zea mays
  Clone ID: MRT4577_143262C.1.pep
ILPTHPVITTIPHTQSNFSTIYEEALITLIIIPFNLPSLSPYHLLFHMNTLLFFFYISSLYLILLLPFLF

SEQ ID NO: 232093 - protein, 88 aa, Zea mays
  Clone ID: MRT4577_143263C.1.pep
MLAVFSGQVVEVPAELVAAGSRTPSPKTKASQLVGRFLAASEPAVSVQLGDHGHLAYSHTNQALLRPRYVRSCTGLHTALLLAGTAAP

SEQ ID NO: 232094 - protein, 126 aa, Zea mays
  unsure (1)..(126): unsure at all Xaa locations
  Clone ID: MRT4577_143264C.1.pep
MISSTVLGEAPQGLPTLGRRASSFAVVCSNKKIQTDQPYGIGGALTAQADANGRKVKVKGVYHCDHKYGANVNGYSPIYNEDDWTPTDDVYVVGTTGLLMCAVTLAXGILGXGGGLLAYRPCALSG

SEQ ID NO: 232095 - protein, 148 aa, Zea mays
  Clone ID: MRT4577_143265C.1.pep
MLAVFSGQVVEVPAELVAAGSRTPSPKTKASQLVGRFLAASEPAVSVQLGDHGHLAYSHTNQALLRPRYVRSCTGLHTALLLAGQAGISSILHAHCLPLPSYEYYYYCYLSDLCWISRAQASRLRSSTSSSSRKDSTVPFHPSNFWKK

SEQ ID NO: 232096 - protein, 96 aa, Zea mays
  Clone ID: MRT4577_143266C.1.pep
VCAHGPVQSVRVTHSNSRRCSSPALLASSCFTRVAIFRMYISLASCCGRGGGLSLRVSPPMKSSSSCFFGSSPDPPVKESLVPGGAACTSCSSSPR

SEQ ID NO: 232097 - protein, 54 aa, Zea mays
  unsure (1)..(54): unsure at all Xaa locations
  Clone ID: MRT4577_143267C.1.pep
PCNLLYVIKFPLIYCLGVNFPSKFRLPCESQIRVFLYDFFIXLCLSWVSADGNL

SEQ ID NO: 232098 - protein, 100 aa, Zea mays
  unsure (1)..(100): unsure at all Xaa locations
  Clone ID: MRT4577_143268C.1.pep
TGAPGGGFKRXVEGIRVELQATGGREMSMDIVEWEALXSSSGRCTGTGQGARAPAEQWVVESLLVCWERSCVLGALFSWKQKPCIRYXTVGHCPSFSLPH

SEQ ID NO: 232099 - protein, 99 aa, Zea mays
  Clone ID: MRT4577_143269C.1.pep
GTGSLRLSRSHRLSLSQPPETERRPPRLAGGARASEAWCRWTLVRGAGYRHHHAGSRYHSCTPLRIPQPLASSRTLPWEAGTSRTSILLCFLYFDVIWL

SEQ ID NO: 232100 - protein, 42 aa, Zea mays
  Clone ID: MRT4577_14326C.1.pep
MGSTAGDVVASVDEEACMYAMQLASLSILPMTLKNAIELGLL

SEQ ID NO: 232101 - protein, 172 aa, Zea mays
  unsure (1)..(172): unsure at all Xaa locations
  Clone ID: MRT4577_143270C.1.pep
MRALFVALALLDLCESDTSTHTDGGCGCQPPSPVHLPTAVYLTPTAHLSPPEDLPPTDHLPPTVHLPAPAHVMTPINLPTSPXHYATQPPRTQTNTHSRLXPCQHXYPNPSHLHGTCSGGKTSILCQSTKTMMHQCSSRVTPYCSSHXQTVRKQRCQXIHGSENYIHRYQAI

SEQ ID NO: 232102 - protein, 75 aa, Zea mays
  unsure (1)..(75): unsure at all Xaa locations
  Clone ID: MRT4577_143271C.1.pep
CGVHFRPAGPRKKGYFVTEELKAXIESLVGLCPGINTVIRERGCGSAHVITFRPFFGINSGCTGLYIDNHVPMTP

SEQ ID NO: 232103 - protein, 89 aa, Zea mays
  Clone ID: MRT4577_143272C.1.pep
TLFFVKKALLYHLCIIAYLHSPKSYAQRLQIRDSVYLTLKLHYLNRSTLYNCDSILTSSRPGGRSIQDDLYSIKDPTDPHACIAYTRSR

SEQ ID NO: 232104 - protein, 104 aa, Zea mays
  Clone ID: MRT4577_143273C.1.pep
EITPYKTTTHKNHAEGGDRTQDPTTDLAENIDKAKKVRHKNQKANETRPQTKLLPKTGRKKKKGHDQKALAGMPRGGTPKLRRSIQYLATIIPTAKRERSLYRK

SEQ ID NO: 232105 - protein, 132 aa, Zea mays
  Clone ID: MRT4577_143274C.1.pep
MEGAQLTLEWRAVRAQQRQERRVAAMEKEGYHLLISCPHITRNGGETRQEKLAIESGQTGIQTGLLGTGLLWLAVCCGTSHKQQASGQRTAKATGAQAEADKKQTTTQKIGCLRHEYYASQPQRWWQQPSRD

SEQ ID NO: 232106 - protein, 206 aa, Zea mays
  unsure (1)..(206): unsure at all Xaa locations
  Clone ID: MRT4577_143275C.1.pep
MASRRASNGRSPLVRKQSQITAFFSSPTPSPSPSGPSPGASKPSPSPLNPSARTRSPLAAVSPSSPKLPQPQQKQKEVKKVKEEHDAALVPAPAAAEVVGRXXRVYWPLDDAWYKGXVEAYDAASRRHRVKYDDGDEXXVDLXGREKFEWAAVVEESTLLPARKLRRLRRMSDILVAKSPAEAEDGAGGFTEDEDWKRGYCCGGCF

SEQ ID NO: 232107 - protein, 66 aa, Zea mays
  Clone ID: MRT4577_143276C.1.pep
IRFKSTNMRCIRLQTRVSKIRTYKTSTLFFFYFFFFFFYFFFFFFLLILFIFFFFIYTYFFFGRVG

SEQ ID NO: 232108 - protein, 53 aa, Zea mays
  Clone ID: MRT4577_143277C.1.pep
ARRKRGPRCLGRKLDSEDGGKCLRGSRKLSNTCVWRSLVALYGITHPWYLALV

SEQ ID NO: 232109 - protein, 89 aa, Zea mays
  Clone ID: MRT4577_143278C.1.pep
HASVFCRSRAGTLDSLMLRVGTGEEYKKARFIYGRATLVPGLRPAYAAAGLWPFCHVIQYLAGIWIKLLPPSGWGHMCMYICMCLYTEQ

SEQ ID NO: 232110 - protein, 54 aa, Zea mays
  Clone ID: MRT4577_143279C.1.pep
KGWSYHFTYHAAKDASSYTKLDTLQVRNIDGLGNPLPQQSPFPLGGSGAHPRSP

SEQ ID NO: 232111 - protein, 144 aa, Zea mays
  Clone ID: MRT4577_14327C.1.pep
IRATPFRLQAPATPTRLVPRIQIHRTSALSPTPRRDGLRNPNRRRELPNPRRMGTGKKWCVQLQICCPTAGALQQTSRKPVGGCRGASGVEEDGLRRGSWVLLPSLLLRLRVLGETKAARRPGGGADARCTHQTGLTGSPTRPA

SEQ ID NO: 232112 - protein, 48 aa, Zea mays
  Clone ID: MRT4577_143280C.1.pep
LNYFLISNALQGGGLADKKSISETLRDACRKRLLDALGQAKLRLGNIP

SEQ ID NO: 232113 - protein, 268 aa, Zea mays
  unsure (1)..(268): unsure at all Xaa locations
  Clone ID: MRT4577_143281C.1.pep
MMDTAAHVLVFPWPRQGHINPILHFATTLVDAGVQVSFLHTERNLRRLAQAPLPGLRLLSIPDGLPDDQPCSFLDLMESMCTTGSAAYRALLLSLLSAVDAPVTCVVADGTMPFAFDIAEELGIPALAFAPYSACSYLALLSMPKLLELGDTAFPADDPVRGVPGMEGFLRRRDLPRGLSCAEKGDGDPLVLKLAEVTARSCKARALIINTAASMEGAALAHIASCTCEVFAVGPLHARSRIAASASLWXEDDXCMAWLDGTRTIRRV

SEQ ID NO: 232114 - protein, 87 aa, Zea mays
  Clone ID: MRT4577_143282C.1.pep
GPKGWPLAPPLVWVLKVGPQPSTRSKPMQTPHAWVPVPRKIFLPVVSPPFFFANGWGAKRPNSFKGVVIHFLNPPKKKKKKRTFFWS

SEQ ID NO: 232115 - protein, 144 aa, Zea mays
  unsure (1)..(144): unsure at all Xaa locations
  Clone ID: MRT4577_143283C.1.pep
AFAACLCRRFSASSSRARHGRLLELLPLRPPXSWLVCAACLFVSGNASGAAHRVVDPEWHPATATWYGSAEGDGSDGGACGYGTLVDVVPMKARVGAVSPVLFKSGEGCGACYKXRCLDHGVCSRRAVTVIVTDECPGGVCAGG

SEQ ID NO: 232116 - protein, 56 aa, Zea mays
  Clone ID: MRT4577_143284C.1.pep
FFFFSPRTSLLGYLLPRGGPILPLAFFTNHYTRCRRLTFQSYFSTFPSARAEIVLS

SEQ ID NO: 232117 - protein, 123 aa, Zea mays
  Clone ID: MRT4577_143285C.1.pep
NTHCSSSLLSLHNSSICWYVPVTPWFSYPYTCMLLHKSISFSLKDRPGAVVRGLSTEPKGLGLTQPLRKNVGLRLALVITSPDPTHAGAVSIGRYTWSVRIICASTRTVTTILHQVDVHTSQI

SEQ ID NO: 232118 - protein, 48 aa, Zea mays
  Clone ID: MRT4577_143286C.1.pep
SRSYTTPNNNVLALDLDGATVVSRRITRHTRSPARVESTIHHTGGGGR

SEQ ID NO: 232119 - protein, 182 aa, Zea mays
  Clone ID: MRT4577_143287C.1.pep
MRTYALLWPLAAFLVTRTSGSAIPMWEFLSRGEKMSHLFNMFVKQVADFCDSSSMPDCNKVLLVYGLTNLAKMGDDSLDKMDPYQRGSRIMIWESMMKGGFFTSQTTDKSEQELNDPLETSGGNDLGSASNNVEEIATPPGGYIIGPMVVRVMPDGRPVPGDSQRPLPKDEDAEEFIAMRSK

SEQ ID NO: 232120 - protein, 65 aa, Zea mays
  Clone ID: MRT4577_143288C.1.pep
ATTITVSVSHHSHLLGWLGEGGILPSSCLRLSLSHHHQGLSQSSFSFTRVAGRGRNTTFQLSEIK

SEQ ID NO: 232121 - protein, 251 aa, Zea mays
  unsure (1)..(251): unsure at all Xaa locations
  Clone ID: MRT4577_143289C.1.pep
MAREQLEVLTALDAAKTQWYHFTAIVIAGMGFFTDAYDLFCISLVTKLLGRIYYYREGADAPGSLPPNVAAAVNGVAFCGTLSGQLFFGWLGDRMGRKRVYGMTLMCMVLCSIASGLSFGSTPGSVMATLCFFRFWLGFGIGGDYPLSATIMSEYANKKTRGAFIAAVFAMQGFGILTGGVVTLIVSAAFRAAFPTQAYQDAPLASTPAQADFVWRFILMFGAVPXLMTYYWRMKMPETARYTALVAKNAK

SEQ ID NO: 232122 - protein, 54 aa, Zea mays
  Clone ID: MRT4577_14328C.1.pep
CSSKKKKKKKKKKKKKKKKKKKKKKKKKKKKKKKKKNSPPPGRPRPKSQIPPQP

SEQ ID NO: 232123 - protein, 99 aa, Zea mays
  Clone ID: MRT4577_143290C.1.pep
SSSCLSPSCLVPSWFFASFFWVFPYGVLSQALFSASFFCDCFCSVPLCAGPLLVWATLFFCVLFFCVRPVRNCPVLVFLVFVFLCSVRVQFWGLPFWRP

SEQ ID NO: 232124 - protein, 981 aa, Zea mays
  Clone ID: MRT4577_143291C.1.pep
MASVKNQAGTASAPKLVLSITGGSCSEPANKKQKKEAQRRVQHVGVQGPFIKSRWSHIPITFSQEDLQLKDYPHNDAMVISCVIIGFLVHNVLVDTSSAADIIFAKAFRQMQEPEDKIHAATHPLCGFGGRQIVALGKITMPVTFGFVNNTRTEQIVFDIVDMEYPYNAIIGRGTLNAFEAILHPAYLCMKIPSDQGSIAIYGSQEAARKAEGNWTDSKAIHNIDEAEAYVFAWSANDLCGVNRDVIEHSLNVDPSFRPKKQRLQKMSDDKAEGARNEVKRLLSVGVIREVKYPEWLANTVMVKKANGKWRMCIDFTDLNKACPKDEFPLPRIDSLVDAAASSELMSLLDCYSGYHQIWMKKEDEPKTSFITPSGTYCYLQMPEGLKNAGGSFSRMTAKVLQSQIGRNVLTYVDDIIVKSTKQENHITDLQETFANFRQAGLKLNPEKCVFGVKKGKFLGCLVSTKGIEANPNKIEAILRMEPPSTKKGAQSLTGRLASLNRFISRSAERNLPFFEVLKSAEVFQWGPIQQKAFEELNQYLMDLTTLTPPTPGAPLLLYVAASHSAKVLYAVLMASRKLRHYFQAYNIIVPSSQPLKDIMRNREATGRIGKWAAELNEFCIDYVHRSSIQSQALADFIADWTPGAQVEEANKDAEAWTIFCDGSWGTFGAGAVAVLVAPSKVKTCYAARLDFSCTNNIAEYEALLLGLRKLKAMGIRRAVLKTDSQVISGHIDKSCKARDPKLEKYLDTVRRIEASFEGFSVKNIPRGENEHADLLANEDWRTEIISYLKGNFLSDDEAYNKRIEARARPYVIIEGELYKHGVCSLLLKCLSRAEGIMKLIFNQPRGKWPEELIKVVWSHNTIVSRSTGFTPFKLLFGDEAITPEEAKAGSIRTMASAIDEADCSVDKDAIEGIRLQAVENINKYQAETIKWRDRKVRLKNIKPGHLVLRRVANPDTVGKLQLKWEGPFLVVSSSRPGSYR

SEQ ID NO: 232125 - protein, 99 aa, Zea mays
  Clone ID: MRT4577_143292C.1.pep
DQPQTQVHMKNAQHGTKTDAGYRRKQNTRGTQTEQALTKSGTQNQMYPQLGWQAYRTFPATERTITRSSATTAGNRKTQSTPNYKLYTPTTISPDAQNQ

SEQ ID NO: 232126 - protein, 1071 aa, Zea mays
  Clone ID: MRT4577_143293C.1.pep
MASFKNQAGTASAPKLILPITGGSCSEPANKKQKKEAQRRVQHVGVQGPFIKSRWSHIPVTFSQEDLQLKDYPHNDAMVISCVIKGFLVHNVLVDTGSAADIIFAKAFRQMQEPEDKIYDATHPLCGFGGRQIVALGKITMPVTFGFINNTRTEQVVFDIVDMEYPYNAIIGRGTLNAFEAILNPAYLCMKIPSDQGPIAIHGSQEAARKAKGNWTDSKAIHNIDEAEACDQYKYRREKAASADQPKPMLLCEDIAEHKVLLGSQLSEQQEKTLIRFLFNNKGYHQIWMKKEDEPKTSFITPSGTYCYLRMPEGLKNAGGSFSRMTMKVLHSQIGKNVLTYVDDIIVKSTKQENHIADLQETFANFRQAGLKLNPEKSVERNLPFFEVLKSAEVFQWGPVQQRAFEELKQYLIDLTTLTPPTPGAPLLLYVAASHSAVSAALVQEKLEGQVKKQPPIYFVSEVLSLSKKNYTELKVLYDVLMASRKLRHYFQAYNIIVPSSQPLKDIMRNREATGRVGKWAVELNEFCIDYVHRSLIQSQALADFIADWTPGAQEEEAMGIRRAVLKTDSQVISGHIDKSCKARDPKLEKYLDTVRRIEASFEGFSVKNIPRGENEHADLLAKSAAQGLPLPSEVFFETIKAPSVELLERAVLNISPVYSEDWRTEIISFLQGNFLSGDEAYNRRIEARARPYVIIEGELYKHGVCSPLLKCLSRAEGIELMKEIHAGLCGSHIGSRPLLGKVFHQGFYWPKAASDAAELVQKCEGCQKCARDQKQPSSLTQLIQPTWPLQRWGLHLLGPLPPAQGNLRYVVVAVEYFSKWIEAKPLATITSVTIQKFFWQNIVCRFGVPKAITVDNGTQFDSEAFREFCEQIGTKIHFASVRHPESNGLVERANGIIMTGIMKLIFNQPRGKWPDELIKVVWSHNTTISRSTGFTPFKLLFGDEAITPEEAKAGSIRIVASVEDEAEADYSVEKDAIEGIGLQAVENISKYQAETIKWRDRKVWLTNIEPGHLVLRRVANPETVGKLQLKWEGPFLVVSSSRPGSYRLKDMDGNNIPRSWNADELRRYYV

SEQ ID NO: 232127 - protein, 84 aa, Zea mays
  Clone ID: MRT4577_143294C.1.pep
SPRPSRLREFPPSPFSKKAKRVGPFLGPKREKSWPFFKNIPGPGLGLGFPKLNQIRCCRPLGAAPMAGKGGGKTILAFLFLGDF

SEQ ID NO: 232128 - protein, 268 aa, Zea mays
  Clone ID: MRT4577_143295C.1.pep
GNFLSDNEAYNRRIEARARPYVIIEGELYKHGVCAPLLKCLSRAEVLKAITVDNGTRFDSEAFRNFCEQIGTKILFASVRHPESNGLVERANGIIMTGIMKLIFNQPREKWPDELIKVVWSHNTTISRSTGFTPFKLLFGDEAITPEEAKAGSIRIVASAEDEAEADYSVEKDAIEGIRFQAVENINKYQAETIKWRDRKVRLKNIEPGHLVLRRVANPETVGKLQLKWEGPFLVVSSSRPGSYRLKDMDGNDIPRSWNADELRRYYV

SEQ ID NO: 232129 - protein, 1170 aa, Zea mays
  Clone ID: MRT4577_143296C.1.pep
MGTDEHLDLNAGGKSVDQKECHLVVVKHILRYLVHTPYIGLWYPKQSTFDLIVYSDSDCAGCKVDRKSTSGTCKILGRSMVFWSSKKQTIITLSTAEVEYVAADNPIEHSRTKHIDVQHHFLRDHQQRGDIDVCHISTDHQLADIFTKPLHEKSDFGVVPKVNGKGNGGLAKDLQLKDYPHNNAMVISCVIKVFLVHNVLVDTGSAADIIFAKAFRQMQEPEDKIHDATHPLCGFGGRQIVALGKITMPVTFGFVNNTRTEQVMFDIVDKEYPYNAIIGRGTLNAFEAILHPAYLCMKIPSDQGPIVIHGSQEAARKADGNWTDSKAIHNIDEAEACEQYKYRREKVASADQPKPMLLCEDIAEQKAEGARNEVKRLLSAGVIREVKYPEWLANTVMVKKANGKWRMCIDFTDLNKACPKDEFPLPRIDSLVDAAASSELMSLLDCYSGYHQIWMKKQDEPKTSFITPSGTYCYLRMPEGLKNAGESFSRMTAKETFANFRQAGLKLNPEKCVFGVKKGKFLGCLVSTKGIEANPNKIEAILRMEPPSTKKGAQRLTGRLASLNRFISRSAERNLPFFEVLKSAEVFQWGPVQQRAFEELKQYLIDLTTLTPPTPGAPLLLYVATSHSAVSATLVQEKLEGQVKKQAPIYFVSEVLSLSKKNYTELEKVLYAVLMASRKLRHYLQAYNIIIPSSQPLKDIMRNREATGRVGKWAAELNEFCIDYVHRSSIQSQALADFIADWTPGAQEEEASKDTEVWTSCKARDPKLEKYLDTVRRIKASFEGFSVKNIPRGENEHADLLAKSAAQGLPLPSEVFFKTIKAPSVELLERAVLNISLVYSEDWRTEIISFLQGNFLSDDEAYNRRIEARARPYVIIEGELYKHGVCSPLLKCLSRAEGPLPPAQGNLRYVVVAVEYFSKWIEAKPLATITSVTIQKFFWQNIVCRFGVPKAITVDNGTQFDSKAFREFCEQIGTKIHFASVRHPESNGLVERANGIIMTGIMKLIFNQPRGKWPDKLIKVVWSHNTTISRSTCFTPFKLLFGDEAITPEEAKAGSIRIVASAEDEAEADYSVEKDAIEGIRLQAVENINKYQAETIKWRGRKVRLKNIEPGHLVLRRVANPETVGKLQLKWEGPFLVVSSSRPGSYRLKDMDGNDIPRSWNADELRRYYV

SEQ ID NO: 232130 - protein, 437 aa, Zea mays
  Clone ID: MRT4577_143297C.1.pep
MASFKNQAGTASAPKLILPITGGSCSEPANKKQKKEAQRRVQHVGVQGPFIKSRWSHIPITFSQEDLQLKDYPHNDAMVISCVIKGFLVHNVLVDTGSATDIIFAKAFRQMQEPEDKIHDATHPLCGFGGRQIVALGKIIMPVTFGFVNNTRTEQVVFDIVDMEYHYNAIIGRGTLNAFEAILHPTYLCMKIPSDQGPIAIHGSQEDARKAEGNWTDSKAIHNIDEAEACEQYKYRREKAASADQPKPMLLCEDIAEQKVLLGSQLFEQQEKTLIRFLFNNKDVFAWSANNLCGVNRNVIEHSLNVDPSFRPRKQRLRKMSDDKAEGYHQIWMKKEDEPKTSFITPSGTYCYLRMPEGLKNAGGSFSRMIAKVLHSQIVKRPNPLGLKCDTITSPRRLVNTFIHQMIPDLLKRDKPIKVANNFKSWSTTRDISSEWG

SEQ ID NO: 232131 - protein, 151 aa, Zea mays
  Clone ID: MRT4577_143298C.1.pep
LKKEREKEEKEKEKEKAKAQASQSQSDVKGTSSGQMANRTATAPGLIPKHQTPQQILIAKEEERQRKQAEEREKRAAAAERRLAALAVQSAGTSASGAAATNCSAKRAAPDDNSCSCCFGSLVGKVPFHRYNYKYCSTTCMHLHSEMLQDD

SEQ ID NO: 232132 - protein, 1140 aa, Zea mays
  Clone ID: MRT4577_143299C.1.pep
MASFKNQAGAASAPKLILSITSGSCSEPANKKQKKEAQRRIQHVGVQGPFIKSRWSHIPITFSQEDLQLKDYPHNDVMVISCVIKGFLVHNVLVDTGSAADIIFAKAFRQMQEPEDKIHDATHPLCGFGGRQIVALGKITMPVTFRFVNNTRTKQVVFDIVDMEYPYNASIGRGTLNAFEAILHPAYLCMKIPSDQGPIAIHGSQEVARKAEGNWTDSKAIHNIDEAEACEQYKYRREKAASADQPKPMLLCEDIAEQKVLLGSQLSEEQEKTLIRFLFNKKDVFAWSANDLCGVNRDVIEHSLNVDPSFRPRKQRLRKMSDDKAEGARNEVKRLLSAGVIREVKYPEWLANTVMVKKANGKWRMCINFTHLNKDCPKDEFPLPRIDSLVDAAASSELMSMLDCYSGYHQIWMKKEDEPKTSFITPNGTYCYLRMPEELNNAGGSFSRMTAKVLHSQIGRNVLTYVDDIIVKSTKQENHIADLQETFANFRQAGLKLNPEKEKLPFFEVLKLAEVFQWGPVQQKAFKELKQYLIDLTTLTPPTPGAPLLLYVAASHSAVSAALVQEKLEGQVKKQAPIYFVSEVLNLSKKNYTELEKVLYAILMASRKLRHYFQAYNIIVPSSQPLNDIMINREATGRVGKWAVELNEFCIDYVHRSSIQSQALADFIADWTPGAQEEEASKDTEAWTVFCDGSWGTFGAGVAPVLVAPSKVKTCYAARLDFSCTNNIAEYEALLLGLRKLKAMGIRRAVLKTDSQVISGHIDKSCNARDPKLEKYLDTVRRIEASFEGFSVKNIPRGENEHADLLAKSAAQGLPLPSEVFFETIKAPSVELLERAFLNISPVYSEDWRTEIISFLQGNFLSDDEAYNKRIEARARPYVIIEGELYKHGVCSPLLKYLSRAEGIELMKEIHAGLCGSHIGSRPLLGKVFRQGFYWPKAASDAAELVQKCEGCQRCARDQKQPSSLTQLIQPTWPLQRWGLDLLGPLPPAQGNLRYVVVAVEYFSKWIEAKPLATITSVTIQKFFWQNIVCRFGVPKAITVDNGTQFDSEAFREFCEQIGTKIHFASVRHPESNGLVERANGIIMTGIMKLIFNQPRGKWPDELIKVVWSHNTTISRSTGFTPFKLLFGDEAITSEEAKAG

SEQ ID NO: 232133 - protein, 64 aa, Zea mays
  Clone ID: MRT4577_14329C.1.pep
VVPCLAHAVAMGCQSEILLAPRRTSSSFPCMVHVALLFFEQTVVARPRRSYLIDRCIARPGRPR

SEQ ID NO: 232134 - protein, 656 aa, Zea mays
  Clone ID: MRT4577_1432C.1.pep
MVAKMLPCSWISACVLVLLLSLHPRVHAFYLPGTFMHTYSPGEVISAKVNSLTSIETELPFSYYSLPYCKPLDGVKKSAENLGEILMGDQIDNSPYRFQVNVNESVFLCTTDPLTKEQAELLKRRARDLYQVNMVLDNLPVMRFTEQNGVIIQWTGFPVGYNPIGSNEDYIINHLKFRVLVHQYQAQGDVVVTSEDGVAMVESDRKSGFQIVGFEVVPCSVRRDPESMSKLKMYDKVDSVNCPLELEKSQAIRENERITFTYEVEYVKSNIKWPSRWDAYLKMDGAKVHWFSIMNSMMVVFFLAGIVFVIFLRTVRRDLTRYEEMDKEAQAQMNEELSGWKLVVGDVFREPSFPKLLCVMVADGIQITGMAVVTIVFAALGFLSPASRGMLLTGMIILYLFLGIIAGYVGVRVWRTIKGTSEGWKSVAWLTACFFPGIVFIILTVLNSILWGKKSTGALPISLFFTLLALWFCISVPLTLIGGLLGTRAASIDYPVRTNQIPREIPERKFPSWLLVLGAGTLPFGTLFIELFFILSSIWLGRFYYVFGFLFIVLFLLVIVCGEVSLVLTYMHLCVEDWKWWWKAFFASGSVAFYVFLYSINYLVFDLRSLSGPVSATLYLGYSLIMALAIMLSTGAIGFLLSFYFVHYLFSSVKID

SEQ ID NO: 232135 - protein, 123 aa, Zea mays
  unsure (1)..(123): unsure at all Xaa locations
  Clone ID: MRT4577_143300C.1.pep
DTESPWGYGRKKNLDKAMQHNXDNVHFYVRWHPFFLNPHAPKNDMRKSDFYKQQLWSXHHEHVISHMAEIFRGLFLDHDMAPLTADTLDTHRLIPLAEHQGYDKQNALGEELFLNYFCERKNI

SEQ ID NO: 232136 - protein, 68 aa, Zea mays
  Clone ID: MRT4577_143301C.1.pep
PSILPAFLRVLAFPNSRTFGFPVPLPLLLLESLPPSFWFVRGHALVNSPDYFCSNLNLNRFTIKKTQP

SEQ ID NO: 232137 - protein, 76 aa, Zea mays
  Clone ID: MRT4577_143302C.1.pep
GHYGAVHEGLLIGVRQGVRGEGGRGHQCLQRHLRQGEEPSPQRELLEVLHPSSLLKLTLFEMNEPCMHAMYACAGV

SEQ ID NO: 232138 - protein, 69 aa, Zea mays
  Clone ID: MRT4577_143303C.1.pep
AALSAGNFFEPLCEALTFRTMKWEDDYMGFYTDGNIRGHPQGPSLRYPPCAKNKSTGLQANRTGNPIMS

SEQ ID NO: 232139 - protein, 139 aa, Zea mays
  unsure (1)..(139): unsure at all Xaa locations
  Clone ID: MRT4577_143304C.1.pep
IQKKAPTTIALSYNKHFLLSHLNLFSQHQLFYLLNHLTSMTYPSFIPPPHVPVSKIYHASHHLFLLFNXQLTSFNYQAXIXQHLILPYSQLSGVNPATFLTQPQLLPFYQHTAPNAGTLFQLQQLLPLKLLTLAYQPAF

SEQ ID NO: 232140 - protein, 281 aa, Zea mays
  unsure (1)..(281): unsure at all Xaa locations
  Clone ID: MRT4577_143305C.1.pep
RVLNLQLSGQGCRDNDMADLTGISEMFQLRYLKIASDVCIKLPNHVLQCLGTLDITDARFAPVPWDVNFPRLLHLHMSLPVERDLLDWIDRTRSPSLMSLGKLNHLQELHLTFSSLSTFQHVAKNMEALGSLIGGHRNLKTVAVAQVSSVKNTPASKTYISWDCMEPPPLLQRFEFSPHSSCIFSQVPSWVGKHGNLCILKIVVKGLPAHCADILRGLPALTALSLYVETPPDDTIIFDKAGFSVLXYFKLTFMRGIALGNFEADAMPSLWKAQLXFDAIP

SEQ ID NO: 232141 - protein, 109 aa, Zea mays
  unsure (1)..(109): unsure at all Xaa locations
  Clone ID: MRT4577_143306C.1.pep
MGASATPSPAGGGRFFTGFTKLCKGLAVIIFLAHILVHLFPSAATYLTLIPARXIMSIVGLLLLGKVLEPLWGAKELLKFIFIVNLSTSACVFVTTIVXYYITQEEGYL

SEQ ID NO: 232142 - protein, 152 aa, Zea mays
  Clone ID: MRT4577_143307C.1.pep
MAASLWRAVMGTGAASTNTTDSSGGGVEFWRAPERVGWLTKQGEYIKTWRRRWFVLKQGRLFWFKESTVTRASVPRGVIPVASCLTVKGAEDVLNRPYAFELSTPRETMYFIADTEKEKEEWINSIGRSIVQHSRSVTDAEVVDYDSRPGDK

SEQ ID NO: 232143 - protein, 202 aa, Zea mays
  Clone ID: MRT4577_143308C.1.pep
SRDAKPSRTLSPQPLAAVAAAGGAAREEMRQTVVNTLERKLFYIPSFKIYRGVAGLYDYGPPGCAVKSNVLAFWRQHFVLEENMLEVDCPCVTPEVVLKASGHVEKFTDLMVKDEKTGTCYRADHLLKDFCKDKLEKDLTLSPETAAEFKRVLAVLDDLSTEELGAKIKEYGIVAPDTKNPLSAPYPFNLMFQTSIAPTGLS

SEQ ID NO: 232144 - protein, 66 aa, Zea mays
  Clone ID: MRT4577_143309C.1.pep
LLIGARKGWIPHEPATIRLKEHDKATPFHNCVSIGRWGREARRGLPRRWNHHTIRQCSLYLGRLST

SEQ ID NO: 232145 - protein, 68 aa, Zea mays
  unsure (1)..(68): unsure at all Xaa locations
  Clone ID: MRT4577_14330C.1.pep
YISLQQLLLPLIIHVALANLSLYSYQQQYVTFNRLITLYPAAYXSNXLLPFMQLASDYFKQQQLHPFN

SEQ ID NO: 232146 - protein, 73 aa, Zea mays
  Clone ID: MRT4577_143310C.1.pep
GLFRLVLVFPLGVCPRTFPARAIDPSTLPMSPPTQTCCARSLWEHPPPRVLRGAAAAAHASAHASADAGRTRG

SEQ ID NO: 232147 - protein, 121 aa, Zea mays
  Clone ID: MRT4577_143311C.1.pep
LSMFSPRATSGSLAGPCPRSRSPTARPGPQQLPSLLSSAAPSPPFCNCVCQLCICPFVVGAPHPSSRSQLLPALGPVGGRLADASPRRSVAGWAAIFVTGLERTRPLTGVGFRRQCKSRRC

SEQ ID NO: 232148 - protein, 90 aa, Zea mays
  Clone ID: MRT4577_143312C.1.pep
QWATSLRWHLTPNQSLDTRLKTPQETLFRRSGMWGMGTGTRPLTPREVEWRRKAPGLGVVGVGVSAGSTAAWPAALRGCFDALAVASCRI

SEQ ID NO: 232149 - protein, 97 aa, Zea mays
  Clone ID: MRT4577_143313C.1.pep
PGRPVGPFPPVGPRVVGASWGAPPWVGGGFLWPHPGLGPVIFSPHGRGRPPLSVGVWAPVVPLVWGRVPPWFPLFAPGFCSPHFFVPQGFCLQIFPP

SEQ ID NO: 232150 - protein, 101 aa, Zea mays
  Clone ID: MRT4577_143314C.1.pep
ERSPKSTAASRWSVLSASRITLFMFSIHPWFWVAYVPKGVIKFITRGSARFKYVLRSCMTTSVRLELMRFRPSAHSTCNIHIRQPMVPKGGRRNNSSSTRQ

SEQ ID NO: 232151 - protein, 34 aa, Zea mays
  Clone ID: MRT4577_143315C.1.pep
IHGHRTYSTTSMPMMFEYMDIVLIQLQACPSIQH

SEQ ID NO: 232152 - protein, 250 aa, Zea mays
  unsure (1)..(250): unsure at all Xaa locations
  Clone ID: MRT4577_143316C.1.pep
DFTYGAYYIGKMVWSKGYRELLDLLSKYQSKLVGLEVDLYGSGEDSDEVCESAKRLSLSVNVHPGRDHADPLFHEYKVFINPSTTDVVCTTTAEALAMGKIVICANHPSNEFFKQFPNCRVYDNEDEFVQLTLNALSEQPAPLTDTQRYELSWDAATERFIEASDINPHVPESRAHQNSRAXACFSKNSXKLKQNLEDASVYLHQALSGLEVTRCAFGAVPKTLQPDELLCKDLGLAPPAKKRRLKIKKT

SEQ ID NO: 232153 - protein, 348 aa, Zea mays
  Clone ID: MRT4577_143317C.1.pep
MREEGPWGPPPPAPPPPSVRLSLSLVVLLLLLLLPGRAASFSTSCWCQGREGVAEVARMGLAGDGSADTAHLSNNENGRFIYGVASSPGKRASMEDFYEARIDDVDGEKIGMFGVYDGHGGVRAAEYVKQHLFSNLIKHPKFITDTKAAIAETYNLTDSEFLKADSCQTRDAGSTASTAIIVGDRLLVANVGDSRAVISKGGQAIAVSRDHKPDQTDERQRIEDAGGFVMWAGTWRVGGVLAVSRAFGDKLLKQYVVADPEIKEEVVDSSLEFLILASDGLWDVVTNEEAVAMVKPIQDPQEAANKLLEEASRRGSSDNITVVIVRFLYGTTGDKSGADKETTNDQNS

SEQ ID NO: 232154 - protein, 344 aa, Zea mays
  Clone ID: MRT4577_143318C.1.pep
MREEGPWGPPPAPPSARISRWCSSSSSPCSRGGRSPVPPPCWCQGREGVAEVARMGLAGDGSADTAHLSNNENGRFIYGVASSPGKRASMEDFYEARIDDVDGEKIGMFGVYDGHGGVRAAEYVKQHLFSNLIKHPKFITDTKAAIAETYNRTDSEFLKADSSQTRDAGSTASTAIIVGDRLLVANVGDSRAVISKGGQAIAVSRDHKPDQTDERQRIEDAGGFVMWAGTWRVGGVLAVSRAFGDKLLKQYVVADPEIKEEVVDSSLEFLILASDGLWDVVTNEEAVAMVKPIQDPQEAANKLLEEASRRGSSDNITVIIVRFIDGTTGEKSGDDKETTNDQHS

SEQ ID NO: 232155 - protein, 69 aa, Zea mays
  unsure (1)..(69): unsure at all Xaa locations
  Clone ID: MRT4577_143319C.1.pep
VCPHLPLCRRRPPPYRISLSATSTTPTLLPIAGSAIRSPRLGGRAPRPRLARARQGXAADRSALTRLVC

SEQ ID NO: 232156 - protein, 127 aa, Zea mays
  Clone ID: MRT4577_14331C.1.pep
THSHSFTPLLQAPYEPWRGIHLLITPPPVKHPPLVFPKHGQSPVMHFTSDNMDSPIARIRLQPQQRVEPCSASTPKKGLRYHIIPSGYFRLFIQRFTHHIIQAHRDPLLYIFHSHQVQTVTPLLERP

SEQ ID NO: 232157 - protein, 72 aa, Zea mays
  Clone ID: MRT4577_143320C.1.pep
IGSQARNTSSLGCQFCSGLITAGRPQPSLKVNVTFRGWSPYSRYLLTSSQLRSSPHASSDARGRRRGKDVII

SEQ ID NO: 232158 - protein, 61 aa, Zea mays
  Clone ID: MRT4577_143321C.1.pep
YLTSRTSSSLVVVPSHALVNRALITSPLSSSQGLRLPLTLIYLTFLITCQYSTPTTTRPMI

SEQ ID NO: 232159 - protein, 46 aa, Zea mays
  Clone ID: MRT4577_143322C.1.pep
VPETCVLWYVWCFHSYDAMLRTKHVFTQTPLSGRELDVTSQLKGSR

SEQ ID NO: 232160 - protein, 71 aa, Zea mays
  Clone ID: MRT4577_143323C.1.pep
AGHGRRPKKKPYHREPGLDKAMDLQKKPALLLRLRDLILAQKTGSLLVRDLEKEVGFVQKWDFLSLIGRHP

SEQ ID NO: 232161 - protein, 99 aa, Zea mays
  Clone ID: MRT4577_143324C.1.pep
QNSCEKCKDLHPTAEELLDCQRYVNWSDPNETQLEEILLKSLGTTFDNAVSLITTMGYSEAVARAAVVRAAAQYNWRESLAGFGEAAVEVLKTEGDMLP

SEQ ID NO: 232162 - protein, 43 aa, Zea mays
  Clone ID: MRT4577_143325C.1.pep
NLFTKEFSIVFGHKIPCHISVNPNFFKPGPKIKKLFNFFFKRF

SEQ ID NO: 232163 - protein, 114 aa, Zea mays
  Clone ID: MRT4577_143326C.1.pep
GAGGTRPHRGLLRAGGPFLPDIPEGGGRNSRPPRIFEFPVNFWPHFRNNGLVFLFRNQDFSPLGGGPRSKASQDSFQKGGGSPMCQWGSPPRGHSIIKAPNPQKFFPTPFFFFS

SEQ ID NO: 232164 - protein, 86 aa, Zea mays
  unsure (1)..(86): unsure at all Xaa locations
  Clone ID: MRT4577_143327C.1.pep
AANGAIVEXSDPLNWGAAAGELARSHLDQGKRMGAQARQAVVKIEGFTLRVGQVGGVDFDKDAFGVAVELDEEARPRVKASSEWIL

SEQ ID NO: 232165 - protein, 77 aa, Zea mays
  Clone ID: MRT4577_143328C.1.pep
KLTGGKAWSGPTPSISPKKKTPQGFGALFFCPIGNLGPGKKTLFRLAFKALGRPGGQTRTLLWIPEKKKKWDRFFFP

SEQ ID NO: 232166 - protein, 344 aa, Zea mays
  unsure (1)..(344): unsure at all Xaa locations
  Clone ID: MRT4577_143329C.1.pep
MFVLRKTLLHAPPAAAAAVPSRISSLLRLIPSASFSEVSGGGEEWGASSPGGGGGRGGGGNEWSSTWSTGLTKDHFDGSSPSVGRSVPSESAPVSRERAAIRAMDEWDERVRELERNNVEAKAYVDSWDDRMRETCALLKQVREPGARGSYLKDSEKQEMYRLHKEDPATYTVERLAKDFRVMRQRVHAILWLKEMEEEEERKRGQPLDDSIEILLDSCPEFFNSHDREFHVASLPYKPDFKVMPEDWDGTTRDXPDEFLYGFSFXEDKLQDXVKCPKYSRRKPDNGWSYMVEKLGPQGKRGGGGGWKFISLPDGSSRPLNDMEKMYVKRETPKRRRRIIAPYK

SEQ ID NO: 232167 - protein, 42 aa, Zea mays
  unsure (1)..(42): unsure at all Xaa locations
  Clone ID: MRT4577_14332C.1.pep
SCGLLLPPLVGTGDGASHLENSQEKEQVMEQQRGLLXPSERY

SEQ ID NO: 232168 - protein, 134 aa, Zea mays
  Clone ID: MRT4577_143330C.1.pep
HDREFHVASLPYKPDFKVMPEDWDGTTRDPDEVLYEISMKEDKMLYEEFVQRLEFNKKKVAGEVKCHKYSRRKPDNGWSYMVEKLGSQGKRGVGGGWKFISLPDGSSRALNDMEKMYVKRETPKRRRRIIAPYK

SEQ ID NO: 232169 - protein, 94 aa, Zea mays
  Clone ID: MRT4577_143331C.1.pep
TSHELVTTSSKHLILWYLFLTSVFVVQIPAHGETRTHDGHQFRREIESGSGEDPSLGGHGNHSRAMAKNSLRQSSGPGCWHRRRRQASPPDPHL

SEQ ID NO: 232170 - protein, 75 aa, Zea mays
  Clone ID: MRT4577_143332C.1.pep
IKLIHHSSTKTRRQAYPKSNTNHKLCSVTPWSETKGQGHLVAPCLPRAPSSVAPPPVQMWLILSASLSDDCCDIR

SEQ ID NO: 232171 - protein, 75 aa, Zea mays
  Clone ID: MRT4577_143333C.1.pep
PSEEIGQKLARRHDGRAGAHGARPLLFPSSPAPSCAARTRRGFVKWRPAEIGSRASTLKSIPRTNPLLMLSHSPL

SEQ ID NO: 232172 - protein, 125 aa, Zea mays
  unsure (1)..(125): unsure at all Xaa locations
  Clone ID: MRT4577_143335C.1.pep
FXTLLILILCRTHDHRGPFKVYFPVFPPITKKKRGISLGKKKTPVPPKSWNHKSGPHVCYRLQRGGGEKNKKKKGGGGNLGRPKKRPTAKKPIRMPRGVKDTQLRTHLWGRGSFFHPKKTGLGTY

SEQ ID NO: 232173 - protein, 117 aa, Zea mays
  Clone ID: MRT4577_143336C.1.pep
LQLECAVACASRLTWAEPWRCAGGVCLALGSSLSPALPKGGRGPETVLLSLGLFSLCGDWDALCTGPLTCVVCGGGAQGDRYVSPVVGARFSRSLSFLSPLVRCLSSSFSPWWLAWG

SEQ ID NO: 232174 - protein, 45 aa, Zea mays
  Clone ID: MRT4577_143337C.1.pep
YLTHAGDRIYSTPVFNDGTDHRSQRSGQIASAALVKGYPTVNEDY

SEQ ID NO: 232175 - protein, 104 aa, Zea mays
  unsure (1)..(104): unsure at all Xaa locations
  Clone ID: MRT4577_143338C.1.pep
HIRSXXXTIGSNLXXQLADIDLAPRCRCHHHTGKSVSRSRHNVPSNHVSGSSKPVKSLLLVASRYLIKLGLILRNYCTAKVSIXXXPKTVSSSMINSFRQSKSD

SEQ ID NO: 232176 - protein, 99 aa, Zea mays
  Clone ID: MRT4577_143339C.1.pep
SRAGFFMLVFWTYNKLRQKRMSTCDSWRGNGEELYTKNTCNHVSGSSKPVKSLLLVASRYLIKLGLILRNYCTAKVSIDPLPKTVSSSMINSFRQSKSD

SEQ ID NO: 232177 - protein, 65 aa, Zea mays
  Clone ID: MRT4577_14333C.1.pep
FKIFNLAKKKKNNIYQKKKKKKKKKKKKKKKKKKKKKKKKKKKKKKKKSKKKKKVKKKKKKKKKY

SEQ ID NO: 232178 - protein, 49 aa, Zea mays
  Clone ID: MRT4577_143340C.1.pep
FIRLSISLVEVCVLLELVQMPAVLKARGVGSANVKIFKVVYMPGPIVPR

SEQ ID NO: 232179 - protein, 39 aa, Zea mays
  Clone ID: MRT4577_143341C.1.pep
VDVSETRPIWIRKIENESIPEVPRRALSTIGSLHAALRW

SEQ ID NO: 232180 - protein, 91 aa, Zea mays
  Clone ID: MRT4577_143342C.1.pep
SGIPASTHASDQDMATPEMVSMLKRNNCGKALDIARQARDILGGNGISDEYHVIRHAMNLEAVNTYEGTHDIHALILGRAITGIQAFTVGK

SEQ ID NO: 232181 - protein, 144 aa, Zea mays
  unsure (1)..(144): unsure at all Xaa locations
  Clone ID: MRT4577_143343C.1.pep
TDLIALNHADFIITSALQEIAGDNDTXVGTTESHMACTLPGLYRVGHSIGELXPKLNILSPGANLCIYLPDTQXHKKMSSLHPEIEELLYRQTEITEHMFVLNDRNKPIIFSMAQSNRVKNLTVLVDLYRRNMRLQELLNLMVA

SEQ ID NO: 232182 - protein, 75 aa, Zea mays
  Clone ID: MRT4577_143344C.1.pep
DRAATTGVSLIHRRRREGRRLAAVQRRGIRERAARLNTAGTHHAGCLREPFLMRDGPQGAPRSYGGGRQGVLGGV

SEQ ID NO: 232183 - protein, 56 aa, Zea mays
  unsure (1)..(56): unsure at all Xaa locations
  Clone ID: MRT4577_143345C.1.pep
KKRGRKARPNLKVGICXKHGGKPSWVAFFAKNGVDXVFCSPLRVPMVRQTTVQVFV

SEQ ID NO: 232184 - protein, 39 aa, Zea mays
  Clone ID: MRT4577_143346C.1.pep
VLYCHHQDSFCKSPFLNKWVLFLSVPINLWSPIRVWLLY

SEQ ID NO: 232185 - protein, 119 aa, Zea mays
  Clone ID: MRT4577_143347C.1.pep
GILFLSRCSAPHGPRGTTTNQTRRTRAKSSGGARAEANQWAAEFDAWLKDSLLDGRYEDVNRFEEKAPHGRVAHPWPDHFYPLHVALGAAGDGAKAEQIHQCWTNATLSYASYRFTTKS

SEQ ID NO: 232186 - protein, 132 aa, Zea mays
  Clone ID: MRT4577_143348C.1.pep
INSFVPFQLKYPAPGAPDLALRTVELLEQAGFGPVKQDHSRGLDHGAWVPLMLMYPDASIPVCQLSVQTDRDGTYHYNLGKALAPLREEGILILGSGSATHNLRKISPSDAPVPQWAAEFDTWLKDSLLDGR

SEQ ID NO: 232187 - protein, 77 aa, Zea mays
  Clone ID: MRT4577_143349C.1.pep
RKRGWKDRSLVMKNPPCPLEGNSRQLGGSYLCFRERDHSGGNTVKTSSLDKMVVPRESDLDTKPEAKREIPGGRKKG

SEQ ID NO: 232188 - protein, 86 aa, Zea mays
  unsure (1)..(86): unsure at all Xaa locations
  Clone ID: MRT4577_14334C.1.pep
KEFLGXSGDKRKEVLSSMEEEADKLSGFAARHGKVFVPLAKKILKKGHEYSXKETQRLDRMLEKSLSPPKAGEFIIKKNVLLTFSS

SEQ ID NO: 232189 - protein, 265 aa, Zea mays
  Clone ID: MRT4577_143350C.1.pep
MDTFFLSHGSPTLSIDDSIPARHFFKSWVPAKVAGDQPPRAILVVSGHWETATPAVNVIRGSNDTIYDFYGFPKPMYQLKYPAPGAPDLALRTVELLEQAGFGPVKQDHSRGLDHGAWVPLMLMYPDASIPVCQLSVQTDRDGTYHYNLGKALAPLREEGILILGSGSATHNLRKISPSDAPVPQWAAEFDTWLKDSLLNGRYEDVKRYEEKAPHARVAHPWPDHFYPLHVALGAAGDGAKAEQIHQCWSNGTLSYASYRFTTNT

SEQ ID NO: 232190 - protein, 80 aa, Zea mays
  Clone ID: MRT4577_143351C.1.pep
PKKNSPGLARVTPDRVSCVSLFKVPPGVCVFIKSPPTAPPKKVCPWWVAPPSTPHCLSRRSCTTPLRFLVTNKMIYLILF

SEQ ID NO: 232191 - protein, 265 aa, Zea mays
  Clone ID: MRT4577_143352C.1.pep
MDTFFLSHGSPTLSIDDNIPARHFFKSWVPAKVAGDQPPRAILVVSGHWDTATPEVNVIRGSNDTIYDFYGFPKPMYKLKYPAPGAPDLALRTKGLLEQAGFGPVKEDHSRGLDHGAWVPLMLMYPDADIPVCQLSVQSDRDGAYHYSLGRALAPLREEGVLVLGSGSATHNLRKMGPFDAPVPQWAAEFDAWLKDSLLDGRYEDVNRFEEKAPHGRVAHPWPDHFYPLHVALGAAGDGAKAEQIHQCWTNATLSYASYRFTTKS

SEQ ID NO: 232192 - protein, 43 aa, Zea mays
  Clone ID: MRT4577_143353C.1.pep
ISLYTHEQRINVHSKQVQHLLIDLTAQNGSMDNSTIRRQPHRG

SEQ ID NO: 232193 - protein, 275 aa, Zea mays
  Clone ID: MRT4577_143354C.1.pep
MFVNICIPSSFLKKKKKKKKKKSRGRPGRTKPETRHATREGEQQRRRGDIARPGPEATAEEGQRRPPRVPAPATMDTFFLSHGSPTLSIDDNIPARHFFKSWVPAKVAGDQPPRAILVVSGHWETATPAVNVIRGSNDTIYDFYGFPKPMYQLKYPAPGAPDLALRTVELLEQAGFGPVKQDHSRGLDHGAWVPLMLMYPDASIPVCQLSVQTDRDGTYHYNLGKALAPLREEGILIPRLGSATHNLRKISPSDAPVPQWAAEFDTWLKDSLLNG

SEQ ID NO: 232194 - protein, 159 aa, Zea mays
  unsure (1)..(159): unsure at all Xaa locations
  Clone ID: MRT4577_143355C.1.pep
MLLNPASEALVLDSIRQHLMEDTAAAAAPVAEARRQRPAYCRSASFGSLVADQWSESLPFRADDSDDMVVYGALRDAFSCGWLPDGSFAAVKPEPLLPSPDSAYACDGPSCFGFLEPETPPATSPGEAXRXEXXXXXXXEAAAAXARGXXYRGXRXRPG

SEQ ID NO: 232195 - protein, 239 aa, Zea mays
  unsure (1)..(239): unsure at all Xaa locations
  Clone ID: MRT4577_143356C.1.pep
MFLRRPSKHPIHSLSLLCSPRTTGHHHKPDATHARKISRRSQGGGKPETRHATREGEEQRQRPTERDAAAEEGQRRAPPRVPATMDTFFLSHGSPTLSIDDNIPARHFFKSWVPAKVAGDQPPRAILVVSGHWDTATPEVNVIRGSNDTIYDFYGFPKPMYKLKYPAPGAPDLALRTKGLLEQAGFGPVKEDHSRGLDHGAWVPLMLMYPDADIPVCQLSVQSDRDGAYXYSLGRALAP

SEQ ID NO: 232196 - protein, 64 aa, Zea mays
  Clone ID: MRT4577_143357C.1.pep
QHFYISYYYYMERRKRRLKKQGAITKGIFFTPPLHPASLQQKKHQNRTDRKREIFYPTIQLQEA

SEQ ID NO: 232197 - protein, 319 aa, Zea mays
  Clone ID: MRT4577_143358C.1.pep
MGQSQGRAGRAKPETRHATREGEQQRRRGDIARPGPEATAEEGQQRRPPRVPATMDTFFLSHGSPTLSIDDSIPARHFFKSWVPAKVAGDQPPRAILVVSGHWETATPAVNVIRGSNDTIYDFYGFPKPMYQLKYPAPGAPDLALRTVELLEQAGFGPVKQDHSRGLDHGAWVPLMLMYPDASIPVCQLSVQTDRDGTYHYNLGKALAPLREEGILILGSGSATHNLRKISPSDAPVPQWAAEFDTWLKDSLLNGRYEDVKRYEEKAPHARVAHPWPDHFYPLHVALGAAGDGAKAEQIHQCWSNGTLSYASYRFTTNT

SEQ ID NO: 232198 - protein, 68 aa, Zea mays
  Clone ID: MRT4577_143359C.1.pep
TSSPISFVHLDAQMVHACAVANKLRGQGWPMEMIVTASHTGLLKLQLLMQLYHDAVANTRLFDTTSTA

SEQ ID NO: 232199 - protein, 52 aa, Zea mays
  Clone ID: MRT4577_14335C.1.pep
FLFSATRSRTAGRGSCHITWAITSVKCEKGSLSTSSEIAHRSILISTWRRCY

SEQ ID NO: 232200 - protein, 115 aa, Zea mays
  unsure (1)..(115): unsure at all Xaa locations
  Clone ID: MRT4577_143360C.1.pep
EGALGLFRGIFKSFSASKMKKMFFXRGRXFPLNKRGPFCKPKLWGFLPPNLFPSSAPVKLGAENGFFEYYVCLNGPILGSCPFIPLFVFGGPKEEWSSLVLGCCVKSRACCLGGG

SEQ ID NO: 232201 - protein, 71 aa, Zea mays
  unsure (1)..(71): unsure at all Xaa locations
  Clone ID: MRT4577_143361C.1.pep
IEVGASEHATTLVSKGSDPLKDAVSGAAIGDPIKAATGPSLIILIXLMTVESLVLXAPFLAAHGGILFKWL

SEQ ID NO: 232202 - protein, 60 aa, Zea mays
  Clone ID: MRT4577_143362C.1.pep
PGGLQRGFKEITLNGYKLFISLKYMLAQGTLLNKKIKRGVTYIKRASPPGLNTINRGTKL

SEQ ID NO: 232203 - protein, 85 aa, Zea mays
  unsure (1)..(85): unsure at all Xaa locations
  Clone ID: MRT4577_143363C.1.pep
HASGPGAVSEQQWVTDASRRPPSLYLNKELLADCFCQKRRTARLAYAVSTVMCRYLGSGATFFHVKRIPLGFPYKPPFXXICSCP

SEQ ID NO: 232204 - protein, 54 aa, Zea mays
  Clone ID: MRT4577_143364C.1.pep
ELFKLQLHSLIPLQQPSPSNPKTPKSPPKLHQNACCRFRRYLRCNRHGPDWRSR

SEQ ID NO: 232205 - protein, 76 aa, Zea mays
  Clone ID: MRT4577_143365C.1.pep
GVYKRALQKTRFNQGGFSITSFNRTSLSASRWPRENHLFTQGGRLGERFQTSERGFVWGISTNFWLLALVPPRIKP

SEQ ID NO: 232206 - protein, 83 aa, Zea mays
  Clone ID: MRT4577_143366C.1.pep
YQYASNMFCSKILSWRFIPCIPVVLILSLSLSLSLSHTHTHTHTHTHTQTQVLAVKKFDPLSFSGSSDFMDLVNSIFKLHHSN

SEQ ID NO: 232207 - protein, 220 aa, Zea mays
  Clone ID: MRT4577_143367C.1.pep
MEGGETTLTRIRAGRFRDRSVSSFPGPSWKDSASTSDLVAYTSVVHCPPMPQWLAFLQQVNPHPPHLSSLTAHRRLCAAADKECRIAKTSTRTTTSSSCPGSMEGGDGETTLSGFGVGGVDTKVLHAFQTSFVQVQTLLDQNRLLISEINHNHESKVPGDLSRNVGLIRELNNNIRRVVDLYADLSSLFAASDGASEGGSVGTVRQAGAAGHKRIRSGLD

SEQ ID NO: 232208 - protein, 118 aa, Zea mays
  Clone ID: MRT4577_143368C.1.pep
MEGGDGETTLSGFGVGGVDTKVLHAFQTSFVQVQTLLDQNRLLISEINHNHESKVPGDLSRNVGLIRELNNNIRRVVDLYADLSSLFAASDGASEGGSVGTVRQAGAAGHKRIRSGLD

SEQ ID NO: 232209 - protein, 124 aa, Zea mays
  Clone ID: MRT4577_143369C.1.pep
MEGGETTLSGFGGAGAPGVDTKVLHAFQTSFVQVQTLLDQNRLLINEINHNHESKVPGDLSRNVGLIRELNNNIRRVVDLYADLSSLFAAADGGGGRAASEGGSVGTVRHQAGAGHKRIRSGLD

SEQ ID NO: 232210 - protein, 46 aa, Zea mays
  unsure (1)..(46): unsure at all Xaa locations
  Clone ID: MRT4577_14336C.1.pep
GXFLXLKXXPXFXYXXSLXSXXXCSHGKLKVELXILXWATSXSPXS

SEQ ID NO: 232211 - protein, 142 aa, Zea mays
  Clone ID: MRT4577_143370C.1.pep
MLVIGQQPKSIVGTPAYIAHEVLLKKEYNGKVADVWSCGVMPYVMLTITIPEIRNHPWFLKNLLADQMDDNTMSKQYEEPEQPMQSMNEFMQILVEATIPAVGSRGLNQFLNDDIDLDDDMEDLDSDAGLDLESSGEIVYAI

SEQ ID NO: 232212 - protein, 84 aa, Zea mays
  Clone ID: MRT4577_143371C.1.pep
KPKNFSHGRRTAGEASADWNIDRVIAARGRGGGRKMAECRGLLECLLKLLNFILTDPCLTMDGYRIYLLDERTKTPEDSSNGGL

SEQ ID NO: 232213 - protein, 210 aa, Zea mays
  unsure (1)..(210): unsure at all Xaa locations
  Clone ID: MRT4577_143372C.1.pep
MYSSVLYSQPKSIVGTPAYIAHEVLLKKEYNGKVLCVVSLXSTLDILFLFSVXYYSPLEQHXFVKTFYTRTICSHXITGNYVGRFECXKLVTNSLLLNXVADVWSCGVMPYVMLTITIPEIRNHPWFLKNLLADQMDDNTMSKQYEEPEQPMQSMNEFMQILVEATIPAVGSRGLNQFLNDDIDLDDDMEDLDSDAGLDLESSGEIVYAI

SEQ ID NO: 232214 - protein, 80 aa, Zea mays
  unsure (1)..(80): unsure at all Xaa locations
  Clone ID: MRT4577_143373C.1.pep
KNQADPPTTEGLRVDRWAGARYADGRRXEAXMADADDGEQAARLEDRLXGTRWADFMNDARMNNPILTYTGYAEQSWPLR

SEQ ID NO: 232215 - protein, 119 aa, Zea mays
  unsure (1)..(119): unsure at all Xaa locations
  Clone ID: MRT4577_143374C.1.pep
VAMAFGHTCGRNYVRIQASCVGTALRXGREEGGGLGXDGMLAQRNVEAELFRGRRLSAKSNREKLDAFAEELVKEQERRARGLLPAVAIKQQAPAATPRPSYSSSATVPLPASQGSYQP

SEQ ID NO: 232216 - protein, 90 aa, Zea mays
  unsure (1)..(90): unsure at all Xaa locations
  Clone ID: MRT4577_143375C.1.pep
RPGRLPIEGRSEQEGRRGPTPPSRLRAEPEAVVEPPRAPHDPLEGAIVSPADALDRCRRPFTARAGRAGGRGXPCPAPAGRKKGGGPPRG

SEQ ID NO: 232217 - protein, 74 aa, Zea mays
  Clone ID: MRT4577_143376C.1.pep
LKRGPYIVLWPSGPKDQIVRCARANEHESKLCRSTKEGFKCVYGRCCPCIPEPVAASCACLPHRIRSQVHRTVH

SEQ ID NO: 232218 - protein, 123 aa, Zea mays
  Clone ID: MRT4577_143377C.1.pep
APHLNLVAVVVVAVRNVHALTFRADEAHRRLVRQPLRRRRDNVRGPSATARLHVVVLDRLLHYGQYEQGRRPSGPVTVSEVQEGLQRIMPSSPCFLSGGNAAPPHQATLYDSPAHTHAFVDST

SEQ ID NO: 232219 - protein, 67 aa, Zea mays
  Clone ID: MRT4577_143378C.1.pep
DVTAQIICASIACDTVLACCYTHEPPQSGLEVGLTNYATAYCTGLLLARRVLKTRGLYNEYEGNVEA

SEQ ID NO: 232220 - protein, 107 aa, Zea mays
  unsure (1)..(107): unsure at all Xaa locations
  Clone ID: MRT4577_143379C.1.pep
RFYRGAQGRLCSFSXKTATIKKFKDALAKPKPDRCSFGPTRGLDESELLALAANKELQFTYTREPELTPRGDTPGEVIAPEPAKLPAATKPLVKLGSEERSLVSPGR

SEQ ID NO: 232221 - protein, 59 aa, Zea mays
  unsure (1)..(59): unsure at all Xaa locations
  Clone ID: MRT4577_14337C.1.pep
ITTHKAQFPIHHXSPKPLPYNLHLYTQFQPFXXSSLSLLQCPSFLIIHFPTQNHSIPPL

SEQ ID NO: 232222 - protein, 56 aa, Zea mays
  Clone ID: MRT4577_143380C.1.pep
SLKPPDVTVLRTTWICIYTCACFKVGSAHRVPTKLRNSKCLLQFYKDFLMGSLFSP

SEQ ID NO: 232223 - protein, 105 aa, Zea mays
  unsure (1)..(105): unsure at all Xaa locations
  Clone ID: MRT4577_143381C.1.pep
GYMDEPYTPSXSSSSNNFYSSTRWPAYEPYYYRGLQPALFASCTSTSRLFSSVGFFLQRASFRGAPTLRLCRATATCSTTRSPILCNRTCGRAGCLCKTMGMYVD

SEQ ID NO: 232224 - protein, 60 aa, Zea mays
  Clone ID: MRT4577_143382C.1.pep
GFRYGHFSILISDQCGFQIPLGMPFSFPLGSGYVLIRPHIVPSRDMGISAALFIGNVECV

SEQ ID NO: 232225 - protein, 129 aa, Zea mays
  Clone ID: MRT4577_143383C.1.pep
MKAGSKQRRRFLNLKAFLHAWKRLAAAETAGGAGWAQLDGGEGEGEAAIPRDVPRGHTVVYVGEALRRYVVRVSSLDHPLFRDLLDRARDEYGFAAADTRLCLPCDEDMFLAVLCHVDAQREWSPALCS

SEQ ID NO: 232226 - protein, 158 aa, Zea mays
  unsure (1)..(158): unsure at all Xaa locations
  Clone ID: MRT4577_143384C.1.pep
PRDVLAPADLLIGMKCGMGTLHDMNHLKNKRIRSEADLIRDQLGLALARLENVVKGAISAAIRHILIPTPQNLVTSTPLTTTYESFLGLHPLYQVLDRTNPLTQIVHGRKLSNLGPGGLTGRTCXNFALRAHHPXHYGKYXTIDTSEGINVGLLGLFD

SEQ ID NO: 232227 - protein, 53 aa, Zea mays
  Clone ID: MRT4577_143385C.1.pep
RLRALARLPADLIPSVDPRSNGQRSPIPLRPRKLHKETPGFLHINPPSLEFRS

SEQ ID NO: 232228 - protein, 65 aa, Zea mays
  Clone ID: MRT4577_143386C.1.pep
ILGTIPFQWRKLLGNLGGWIYKGEEVTGQFEVLPLVWVTSHFFLIVPSISQTVCFYAEEFYMKFS

SEQ ID NO: 232229 - protein, 76 aa, Zea mays
  unsure (1)..(76): unsure at all Xaa locations
  Clone ID: MRT4577_143387C.1.pep
HENNDPKTHVLSLNRAGGAGVSSSERVQGEIPVHLKLLAKFSNNNGIMAHQXRKAIYPRVHRXXWSRXLGWIQGXS

SEQ ID NO: 232230 - protein, 23 aa, Zea mays
  Clone ID: MRT4577_143388C.1.pep
CYINDIWSNLLYYCIIKASPHLT

SEQ ID NO: 232231 - protein, 41 aa, Zea mays
  Clone ID: MRT4577_143389C.1.pep
RIKDRYENTDLLNRETGKRQKLCQKLEMSRESTITDILKTC

SEQ ID NO: 232232 - protein, 84 aa, Zea mays
  Clone ID: MRT4577_14338C.1.pep
MDVPIVIRYPAHITLLRGNHESRQLTQVYGFYDECQRKYGNANAWRYCTDVFDYLTLSAIINGQVSSSREKIQVFISCYLGKST

SEQ ID NO: 232233 - protein, 94 aa, Zea mays
  Clone ID: MRT4577_143390C.1.pep
SLSRRPLGSGWLLMELYTRTMVLVLDAQLLLQLPMSVLGRQDSVFRVDQPHRLPCSVHVRDTLSVALEHVFRVYGVILAPKGLIANTLYGAMSS

SEQ ID NO: 232234 - protein, 67 aa, Zea mays
  unsure (1)..(67): unsure at all Xaa locations
  Clone ID: MRT4577_143391C.1.pep
GLYFGMYYFFKPLLLINTPADXLLASFFLQXNITIDAGLASYPIYTVPPPMMMTSCEAVKYNNSLDA

SEQ ID NO: 232235 - protein, 51 aa, Zea mays
  Clone ID: MRT4577_143392C.1.pep
GQTTGSVYIAVNKSLLFINNERDRLLKAVKCGGIKLFLFSKPNKKSSPIRF

SEQ ID NO: 232236 - protein, 110 aa, Zea mays
  Clone ID: MRT4577_143393C.1.pep
LHVHTSACPLSSRSSPSPLPRPPTSRSPRARRTVNRKILPSSLCRLSRKASRFPSPRRAPPPPATMRPPPGRGGSAWSSLCRIYRPHRRPTVIAGAQHRRGTPWEWRSDG

SEQ ID NO: 232237 - protein, 75 aa, Zea mays
  unsure (1)..(75): unsure at all Xaa locations
  Clone ID: MRT4577_143394C.1.pep
APLADDADEDDFLFEDRFSIVYNLDREFGPRFNDHMQYCVNHLEEIYKLSKVKVHLSAVXGIMMDIIDKILVRGE

SEQ ID NO: 232238 - protein, 137 aa, Zea mays
  unsure (1)..(137): unsure at all Xaa locations
  Clone ID: MRT4577_143395C.1.pep
LFQLLNQNKNSKYIRRHMAHHLRDLRSDVIVPLATWESMFHPLDFLFEKSFDRKLQSYQFPPYHCPMSGRPQNYTAHTITKACRLVSTSGFVPKLRGGIWRIYLSIRQDNRNLDMRFIITTSLISPXLLKKQEPDDC

SEQ ID NO: 232239 - protein, 56 aa, Zea mays
  Clone ID: MRT4577_143396C.1.pep
TKPRTGHDYGSRLPHDALRNHHLHKWWGRINYTLTRLIGEAKARLTLTGRAIYRSP

SEQ ID NO: 232240 - protein, 106 aa, Zea mays
  Clone ID: MRT4577_143397C.1.pep
GAHFPLWGAHLQFLGPPLPPPSRGKPGRSPFLIALGEQMPHFPPRWRSFPKGPPPCALTDSCPPWGVKGPPLGGSFNPAGCRGHPPGARSLGLRPYPRPLGCLPSL

SEQ ID NO: 232241 - protein, 75 aa, Zea mays
  unsure (1)..(75): unsure at all Xaa locations
  Clone ID: MRT4577_143398C.1.pep
RRRGKARPVCRXKIPDPDSLLDSVLVVKKPDPALWDKSPRRNCCRVLSSPGTGKDGNNTMTIDVSVCEDWEINQL

SEQ ID NO: 232242 - protein, 132 aa, Zea mays
  unsure (1)..(132): unsure at all Xaa locations
  Clone ID: MRT4577_143399C.1.pep
MYSGGEVDRRGVDRINNRVDEFNTKKPLFFYVDLANRCLQRHGDVHVXRSLWMAXITTVCSITCAEIXAHCAFAVDKNIETSTXVEIXCDEHVVXFHHGRIEIILLKSDTFAELMSAAAQHRGEAEDGVEQA

SEQ ID NO: 232243 - protein, 157 aa, Zea mays
  Clone ID: MRT4577_14339C.1.pep
MVGIFSRFSAGAHRRSKSVAEAVETLAPNISTGESDPAAAVPAESPHGIEVGVEFKPVERPVEPINLDEPVKCPLPEPSILHDGRIWKEKMSSVSTRVRTDLPVVKEGSQLEPDGSSARSRSAVPRRAILPSVSAPEHNILALLDECDVSGSRGSAE

SEQ ID NO: 232244 - protein, 156 aa, Zea mays
  Clone ID: MRT4577_1433C.1.pep
PPAFFGRAGPIGFWACFGFPRLVSPPGKIDWGPIYARKARVSVRGPRDRAPLWGLGIPPPLLGFSGKKVFFWGLGYELLGVGGGLTPLGLVRFGENPPVLGGVGRVLTPTRGKSPPIPPHPPPYPGNFHTRPPPLGFGPGQKNRGAPPGKGRAPLP

SEQ ID NO: 232245 - protein, 262 aa, Zea mays
  Clone ID: MRT4577_143400C.1.pep
GLPYSSANDGDDSALCFQDQIGSIMDKTNVHSISSLTFSSYSSDPNDVNERNLNKANVYQCQKCNLTFGDRTSYAQHHLAYHEMSVKRRRTGKFGEPVVGKDGKFECPICHKTFEEEPQYFGHVGSHARYEGLAPEAFLDKATSRRAANDSLAEIPFSLQELTESHGQNNKVSYGEKGFQHHNHSNKHGDNNLTAIDLFGTNYSDNFIRPNKTCGSPEEGPSCNDAPSVSRYTNCTGHADVIVSRRASISNNQSGSNINGLY

SEQ ID NO: 232246 - protein, 95 aa, Zea mays
  unsure (1)..(95): unsure at all Xaa locations
  Clone ID: MRT4577_143401C.1.pep
MRECIYIHIGQAAIQVQNPCWELDCLEHGXIQADGQMPSDKTIDGGDDAFNTFISETGAGKHVPHAGIDDLGPTGIDDERTGAYRQLFHPEQLIS

SEQ ID NO: 232247 - protein, 72 aa, Zea mays
  Clone ID: MRT4577_143402C.1.pep
SYYQSPMDMAGEVRIQWVGTSANDPTYEHKAFMTIAGQINNRTAGHTRLHVVLVDLEPTKCGVSLFLNKSAA

SEQ ID NO: 232248 - protein, 67 aa, Zea mays
  Clone ID: MRT4577_143403C.1.pep
HTRTATPPSGLPQRTDCSLLLSTSLAHNLLRQQEGLWPTICLASTAACGPFHQCGPDLDPLRLTNGR

SEQ ID NO: 232249 - protein, 51 aa, Zea mays
  Clone ID: MRT4577_143404C.1.pep
PQRGLVPWPSAQGMQQGEFSEAREDLAALEKDYEEVAAEGGSDVGVEEEEY

SEQ ID NO: 232250 - protein, 244 aa, Zea mays
  unsure (1)..(244): unsure at all Xaa locations
  Clone ID: MRT4577_143405C.1.pep
MATKLAVLATLVLALLGPVSCQQQQAGYGYGAGSPTPTSSPPPPAAYPPMTTSPTPSSPTAYPPPPPPTPSPPPPAAGAGLSVGYYKDKCAEAETIVQEAVRAADAGTKAGLVRLFFHDCFVQGCDASVLLKPDNDTNPQPEMLGVPNLSLRGFEVIDAAKAAVEARCPGVVSCADIVAFAGRDASAFLSGGAINFTMPAGRYDGTVSLANETLPNLPPPFADVRRLKAXFGRQGLDTVDMVAL

SEQ ID NO: 232251 - protein, 59 aa, Zea mays
  unsure (1)..(59): unsure at all Xaa locations
  Clone ID: MRT4577_143407C.1.pep
LGHPPXIKPRVAAXSPRXRLXPAFLPNPSPSPFSLRRASPNXPSPSPLRCXAXPVLVWL

SEQ ID NO: 232252 - protein, 144 aa, Zea mays
  unsure (1)..(144): unsure at all Xaa locations
  Clone ID: MRT4577_143408C.1.pep
MQCIHSCVQVITETLRMGNIINGIMRKAVRDVEVRGHLVPKGWRVLVYFRAVHLDAAVHDDPHAFNPWRWKERPDVVAMSGFQPERXCPGLDLARLDLARLEASIFLHHLVTNFRWVAEEDTVVNFPTVRLKRGMPIAVTPRTC

SEQ ID NO: 232253 - protein, 95 aa, Zea mays
  Clone ID: MRT4577_143409C.1.pep
VATCRTSHSATPRRLPEETRPPSRGTLSEGTRLCWRATTTAWKHTVSKYKDDTAESNGRSNSRGNTKFIVRNQPWRRPDQHTWHRPVHRPDETRG

SEQ ID NO: 232254 - protein, 47 aa, Zea mays
  Clone ID: MRT4577_143410C.1.pep
VLQADASAFVPWYPRSLMELMGQSSILVLGGGLQRRVHGLAAAFFIR

SEQ ID NO: 232255 - protein, 111 aa, Zea mays
  Clone ID: MRT4577_143411C.1.pep
LPSAMPAPWAALAAREGPDRLSTQFQYAVYDRTLPRHMPDRNRAGFMFCTIWGIVFLTLLITAMYKGVDTGIVVSGCVLHASNTACPFFLDILSKSLSLCQPEQKACFVLA

SEQ ID NO: 232256 - protein, 82 aa, Zea mays
  Clone ID: MRT4577_143412C.1.pep
FLAVPLMDAEDGGGTDTGCLRMRAAEVSSGSCGDAEQVEARMRLSMPSGRARVARVTEVSASRLLALGFLLAWRRRRRGSVS

SEQ ID NO: 232257 - protein, 90 aa, Zea mays
  Clone ID: MRT4577_143413C.1.pep
SLLLSLNFKQINSECTYSILDAASKNLRTLTTLALCVWLTRLSRNNYSFSFSKYDAGISTGGSKADTPLNCSRGLFQLGHCDYAYANDLT

SEQ ID NO: 232258 - protein, 68 aa, Zea mays
  unsure (1)..(68): unsure at all Xaa locations
  Clone ID: MRT4577_143414C.1.pep
MTFKRRNGGRNKHGRGHVKYIRCSNPAPCCTKDKAIKRFLVRHIVEQXAVRDVRRLCNDXYVLPNCMK

SEQ ID NO: 232259 - protein, 63 aa, Zea mays
  Clone ID: MRT4577_143415C.1.pep
FVPRKRKHSDKKGSIVFGRYIYGNRANEHMNVDELNALERYLEIWMYNTRSAKVIHHPNASFL

SEQ ID NO: 232260 - protein, 34 aa, Zea mays
  Clone ID: MRT4577_143416C.1.pep
HLSLVLKKKKKKKKKKKKKKKKKKKKKKKKKKKK

SEQ ID NO: 232261 - protein, 141 aa, Zea mays
  Clone ID: MRT4577_143417C.1.pep
MGIGEHFEGVKQHWASNFAFLDYYKKVYGRAEPLPKWSDADVDEFIASDPVYGPQLKALRESRKFALVGAFAGAAHLGGVALKYSKAPHGVVLATGFGAITGAVLGSEVAEHWYQLYKMDKQGANLRFIYWWEDKVSGQKS

SEQ ID NO: 232262 - protein, 151 aa, Zea mays
  Clone ID: MRT4577_143418C.1.pep
MAAASAAEANSVSNDEFLVRDDVPGLLAALKEMKDGLDLVRGKVEAITRKVKANQLPAGNGIGYLEAKNHMLLGYCQDIVYYLLRKTKGLSVDGHPVVRSLVEIRLFLEKIRPIDKKAEYQIQKLTNAADNATAREKAGNAEVKGKGRAFG

SEQ ID NO: 232263 - protein, 281 aa, Zea mays
  Clone ID: MRT4577_143419C.1.pep
VKANQLPAANGIGYLEAKNHLLLGYCQDIVYYLLRKAKGLSVDGHPVVQSLVEIRLFLEKIRPIDKKAEYQIQKLTNAADSATALEKTINDLDLKKGGHSDEEDLLKYRPNPDMMDTKPGPDGQDTDGVYRPPKFMPTSMDDEEKRRKKDSRRDKAIARVAIENPYIKEIIDDAADRPEEWKETVGDESREFGRYMRQREEQEKQEEELFTRAPVTKRDKQIEKRIRRQLHGLGGLTDGFDLGMNMLLGGDKEDDGGSSKSHGKSGNRKKHLKSSKKRKRH

SEQ ID NO: 232264 - protein, 53 aa, Zea mays
  Clone ID: MRT4577_14341C.1.pep
FWTFLFCRLRRYVLDLPGLTNHLDLIFVCAVLWLLFWFKEFNPFVSTPTGFLD

SEQ ID NO: 232265 - protein, 47 aa, Zea mays
  unsure (1)..(47): unsure at all Xaa locations
  Clone ID: MRT4577_143420C.1.pep
AKELKVWHRDFPDVISGAHIIEVIPDTAAEPVGLKXNDVIISINGRP

SEQ ID NO: 232266 - protein, 77 aa, Zea mays
  Clone ID: MRT4577_143421C.1.pep
RKVGTPASSDPEYRAPSILSTQVNASSRWANFLHSNNGDRNDVGHGGHPSALKLNPSVHIHWPRHPAHDDLTSVNID

SEQ ID NO: 232267 - protein, 311 aa, Zea mays
  Clone ID: MRT4577_143422C.1.pep
MDMDETDYHPVAAAAAGPCEGRKEKKGMDFSRWREFVGDAPPKRRQGKPVQAKKQSDQRIDAGAVASKVGGVAAEGRGLEGGAMRLDSGNASEGPGPVLLVSDVVSKKPMSQVESRDELVNTSEARNLASQAESMDLDGRESSMEAEISAENMARLAGMSAGEIAEAQADIVNKLNPALLEMLRRRGREKSGGTKDVGKAKGLKTSGLQKNKRATPGDWLTAGEHTGHSWKVWSERVERIRSCRFTLDGDILGFQSSHEHQDGKKMPSESVAERDFLRTEGDPAAVGYTINEAVALTRSMLPQIIGSGDSN

SEQ ID NO: 232268 - protein, 118 aa, Zea mays
  unsure (1)..(118): unsure at all Xaa locations
  Clone ID: MRT4577_143423C.1.pep
FVGWLLGSPFLXPVVFAFVFCVSCLLVYGSFSRCVGLSFCCSLFARDGCFALVPAPGCLLACLLTASLCTVQGRLGAGFASSALGFFSGAAARVPAPLASAXAWYFIVGRPGXSGPVP

SEQ ID NO: 232269 - protein, 194 aa, Zea mays
  Clone ID: MRT4577_143424C.1.pep
MSSVSSSLSNFLLCCFYPSSAGHHRGGAYYYSSHPTSASTLHYHEGTFAGRRAMGRSSRPLSLQTVELKVRMCCSGCERVVKHAVTRLRGVDSVEVDVEMEKVTVTGYVDRHRVLKEVRRAGKKAEFWPNPDLPMHFTCAKDYFHDEESYRRTYNYYRHGYNGDKHGQLHEPHRGADPVSNMFNDDDVNACSVM

SEQ ID NO: 232270 - protein, 72 aa, Zea mays
  Clone ID: MRT4577_143425C.1.pep
VLHVQKGNCSCKGKMCSHKNNQLQAFSNPPRAVLGKKSQKMGLKSEGGVLGNVMPPAKQRPPILLRGFRVGH

SEQ ID NO: 232271 - protein, 68 aa, Zea mays
  Clone ID: MRT4577_143426C.1.pep
DAGHVPNYGHCGIISPLLANVCRNELDWWMEEKINQYFCPSKHDSIWKEVGDDGCHNPAWPEFVPSAG

SEQ ID NO: 232272 - protein, 48 aa, Zea mays
  Clone ID: MRT4577_143427C.1.pep
AHAFALLFGHHHAPSDRHVYRAIRWHSRRHLASLDEPDATGQGHRRRT

SEQ ID NO: 232273 - protein, 112 aa, Zea mays
  Clone ID: MRT4577_143428C.1.pep
DDQARKRKQRVKTMQKNWKKLQIKEEHGLWPKQWATEQQQGGIANTRARLGIAIGNAGAGAQNQRCCTIRGGGRINRAHGGGKRGLRRAWRTPSGGLWPTCSTFKPEKNPTL

SEQ ID NO: 232274 - protein, 113 aa, Zea mays
  Clone ID: MRT4577_143429C.1.pep
RTRSPACPMKSTLPSRRTMTLPHSSGAWSAFVLCGVSGLSVAAPRGTTHGDTPLNQTQLSEAPARRNTAARSFNAAQVMRHCVENLKHHCSPVGTRYCSPQSQALQQQSYHQI

SEQ ID NO: 232275 - protein, 497 aa, Zea mays
  Clone ID: MRT4577_14342C.1.pep
MAAAVLAPKPPPSLPTRAFPSSSPSRFAPAFISPRHPLRRLLLRPIPCASSPSSVLMPNPDLETEPAHDGDGDGDEAPPESRPRRIALFVEPSPFAYVSGYKNRFQNFIKYLREMGDEVIVVTTHEGVPQEFHGAKLIGSWSFPCPWYQKVPLSLALSPRIIAEVARFKPDIIHASSPGIMVFGALIIAKLLCVPLVMSYHTHVPIYIPRYTFSWLVKPMWLIIKFLHRAADLTLVPSVAIGRDLQAARVTAANKIRLWNKGVDSESFHPRFRNMEMRSRLTNGEPEKPLVFYVGRLGVEKSLDFLKRVMDRLPGARIAFIGDGPFRAELEQMFSGMPVVFTGTLQGEELSQAYASGDVFVMPSESETLGFVVLEAMSSGVPVVGARAGGIPDIIPEDQEGRTSFLYTPGDVDDCVGKIKRLLSSEELREAMGRAARKEMEKFDWRAATRKIRNEQYSAAIWFWRKKRAQVLRPLQWVLRLLRRTMPGAADAAAKQS

SEQ ID NO: 232276 - protein, 110 aa, Zea mays
  Clone ID: MRT4577_143430C.1.pep
PHRFLPASHRAGANRQAPPKRQKKLPNSQQGGVSPATHRHGHRLYQSTSPAHLTQAPYNKYINSPPPTYLRKQAQAAFLPPTDHKRGPVLLLIMSHTRWHVTSLIGTYDQ

SEQ ID NO: 232277 - protein, 348 aa, Zea mays
  Clone ID: MRT4577_143431C.1.pep
MSNKEEKECQMTKEEKRRKKREKHKDMGQSGDYEGKAVMSNKEEKDCQVTEEEKKRKKGKKHKDKGQGSNSDSSCARNHSIEMEQADVSAKMAEDSCLEHAEAVTSKSSAKKHRKKKRKDKEVETIGQKQILDADENVGSEDTKRNSREREHDRKSKKHKRKHQDDETASNGSSGNQIVLGEDKRTEKEYLVTLDLEEDNKSDMSKIGKKTDSKKKRRKERNDGVDLRQNTLVGEGKNGKNNKEKKMCEDENGGGEREKENMGKQKDKCRRVSFTDHVEVFNIGGSDDVEGDGSGETELVHGRRFSPEEDAKLMEAILKYAELKQLGEKGLQMIGESNKHPETRGCWA

SEQ ID NO: 232278 - protein, 69 aa, Zea mays
  Clone ID: MRT4577_143432C.1.pep
AGVVNAAVVLIAALGAAECAMRAPPGPVFWVLLHVNLQVGGLPPVALVGFPPVEGNPTDDLGPLLPREK

SEQ ID NO: 232279 - protein, 138 aa, Zea mays
  Clone ID: MRT4577_143433C.1.pep
AELYPTPIARDGRGWLLDPVAAARDAGLPGGALVCLLLHVGQIQPGGLRGNHRHHTCNETFVIWGAKTKFRLENAGIKDEGYGEAMIAADEVAIVASARSTAHALINMDVRPTFFLGCQDTPINPNSSNTDYKVWKDL

SEQ ID NO: 232280 - protein, 66 aa, Zea mays
  Clone ID: MRT4577_143434C.1.pep
LHRWIIAWIEPHPSEGIVPSKSIFLAEGLAFGRPFFLTIGLGKAHVCMVFSGLYDTVIKMPPSRRW

SEQ ID NO: 232281 - protein, 79 aa, Zea mays
  Clone ID: MRT4577_143435C.1.pep
DEPPPVSYVQPLTRARLLSSSSSLDTRIAPRYSSSSSTSSSSIIIIIIIIIIGTMMRIHHLQLLASSATLSFLLSWTLS

SEQ ID NO: 232282 - protein, 108 aa, Zea mays
  Clone ID: MRT4577_143436C.1.pep
LKTGVVPWGLIWSGSGGTLEQSCRLGTQRTRGEGQASAIGVTYHGKEGRKWDRPAKIKTTEDRGNPSLFWGRSQRTCRGPRNKKAAPITMEHSSRRGPLGGGDEPSWG

SEQ ID NO: 232283 - protein, 85 aa, Zea mays
  unsure (1)..(85): unsure at all Xaa locations
  Clone ID: MRT4577_143437C.1.pep
ASSGATESADADMDAACAHETDEXLGTLSFLECRSNSLVFNHHLLYEMILSAQVNRLGEHRCFFIFAWTFVQTSTSVFPSLWYLV

SEQ ID NO: 232284 - protein, 168 aa, Zea mays
  unsure (1)..(168): unsure at all Xaa locations
  Clone ID: MRT4577_143438C.1.pep
RYDSGTTIFSXQGSIYQEEYXLHAIGNXAXGLTILVVDXLLLVAXKKGASISYSTSRSAEKXFKIDSHLACAVAGXICTNTNMLINTAXRLHAHALLCSSYEGVPYPXHLDQFLCHTKQGYTQKGGLLPLXVSFLKKKXDKHHCLQFYMTYPSVSYGRWNVGAVGANN

SEQ ID NO: 232285 - protein, 58 aa, Zea mays
  unsure (1)..(58): unsure at all Xaa locations
  Clone ID: MRT4577_143439C.1.pep
VPAVIIXQISLNPMVDPVTLRTAHTYEQANITRCLALGRRTWPAPHAVSCWQLTRLHL

SEQ ID NO: 232286 - protein, 105 aa, Zea mays
  Clone ID: MRT4577_14343C.1.pep
ISAGQTPSMSEACNVLEHLCPPLRAFPPGFVAIQSDLRRICSALQCMSQRDCSMALVCAPSLSTQRSAQREPELPRGTCSLSVCCLNLALSRINPPIWPAFPGSE

SEQ ID NO: 232287 - protein, 143 aa, Zea mays
  unsure (1)..(143): unsure at all Xaa locations
  Clone ID: MRT4577_143440C.1.pep
STQKCXQWDIRLLCFLLKHCRLLVSLLIAARAVRRRRRRGRRVVRRPWWRRGAXAGGXXSIXXXXXALAXXXDLHPHTTRQVWEVGRSAAAVLRRVSARALLLQQGPSHQAHKQKQIGPPDRRTHASSALTAVLLYSFFFICV

SEQ ID NO: 232288 - protein, 271 aa, Zea mays
  unsure (1)..(271): unsure at all Xaa locations
  Clone ID: MRT4577_143441C.1.pep
ALNHVWMSGLLGDGFGATHGMIRNNLIWVVSRMHVQVDQYPIWXLNSRHGPIACMHHRLRXIHDRQAYLGLSRCFRGEVLDIDTWVGSSGKNGMRRDWLIRGRNSGDVFVRATXKLAWSYRPNVRCMQQMMMKAKVFCHLXSTWVMMNKVTRRLSKTPEEVRGEIAPWFIDRHAISSVXMQTLPDHFQQQNQLSSIILEYRKECGSSDVVQSICQPDDDSIPPQEDVSMAIGPSLSPELISGHHSLAGALQHSPMKYTHLLQLKAGDKPGR

SEQ ID NO: 232289 - protein, 77 aa, Zea mays
  Clone ID: MRT4577_143442C.1.pep
SKVAENIENFLHECQSQRADKIIDSFIVPRSVTLGYNLLFTERVVIRPLYIKDPLVNCFGRFTMGGGAIIDYLQVAS

SEQ ID NO: 232290 - protein, 232 aa, Zea mays
  Clone ID: MRT4577_143443C.1.pep
MITHHPSLLRLRAPLPAGLRHGTSHALLFTAAAYSPPPPPLRLLPLRVAAGGASPVGPDGGNRATPPPLGAAALDFARSNFLPLALIGGMTLGLLDPTLGCLAHKYSLSKYSTFGIFIISAMAFSCIGLTLRTKELGAALQAWPAGLFGLGSILLFTPFLAQFLVQIQLFPREFITGLAMFCCMPTTLSSGVTLTQLAGGNYALALAMTVISNLLGHYVCTFDSWQVHWHWK

SEQ ID NO: 232291 - protein, 304 aa, Zea mays
  Clone ID: MRT4577_143444C.1.pep
MDDQVYMQPEDNRKRRLSEDTLLCDSEESLTKRKLDFSRPVGGDTGTATLTPYPTITGNEDFVPSSSDVAQVGDGDDDVTNFCLTRREPPTCDVAQVGDGDDDVTNFCLTRREPPTLTRREPPTSPFIDSCVDTTELAEDYSSFPCALPSAVNFSDIDSFLDGCDQLFENQPLNIISPIEIHPSMDTVATLEDLFLKTARQALANVLDGLNAHTLRDPVRCSSLCLASSCLTGQFASIARIKAMLDKLITISEQLQRTYSNFEVAKNKTKKALLKSSRRLTFKGKLFALLMRNWPLLKSSGQKP

SEQ ID NO: 232292 - protein, 92 aa, Zea mays
  unsure (1)..(92): unsure at all Xaa locations
  Clone ID: MRT4577_143445C.1.pep
IAVKFYDLIPKIDRCYGKELEKESXFLKRGYSGMVKMIPPKPXMVVETLSQYPPLGRSAAHDMGQAVAVGVIKSVEKKVFPVAKVAKSAAKN

SEQ ID NO: 232293 - protein, 88 aa, Zea mays
  Clone ID: MRT4577_143446C.1.pep
ILISLILGLSGRHILLQIGLKNRHCWLMGTGNRRNTQPTMRGGSDLNSPITRFSMDRGQEQLDLPLHERDQPDVNCARAHQPKVGEHP

SEQ ID NO: 232294 - protein, 57 aa, Zea mays
  Clone ID: MRT4577_143447C.1.pep
SQYKIPFRLFEIYFLYINKIFIFSNNYFCAFVHFHKSIFLFYIRFLLQLCIIFFYNK

SEQ ID NO: 232295 - protein, 205 aa, Zea mays
  unsure (1)..(205): unsure at all Xaa locations
  Clone ID: MRT4577_143448C.1.pep
RGNDNKTFESNRSEGSLMNRWSVIQHDVNVFCGCLSRIEARNHSGWSVDDKIANACAMFKAEDPKERKFSYLHCWKILKDKPKWMDRRKEIGNAKKTSCKKQKTLATSPTPFAAPDGPVAXINQDGEQAARPEGKKKEKQKLRQRSTIEAVDYLMEKKKEADHDKELKKEVRCNKAFALQEERIKLEKEKFEFQRQMEEERILGL

SEQ ID NO: 232296 - protein, 124 aa, Zea mays
  Clone ID: MRT4577_143449C.1.pep
MATEEIIVNNFEDQTTDETDASSEKALLKTLKSYFKLCSQAEDKRIFLKDPMFGTMLLTFISDSRPLVVHYVAKILIILTEKSENAKLVYKIDGMLDAIGHACNKYLPPRVLHNLLIAQSRLNV

SEQ ID NO: 232297 - protein, 95 aa, Zea mays
  Clone ID: MRT4577_14344C.1.pep
AHRGRGGYDTGRPNHGTNAERWKGGSHLEYQPVGSQNKAGGDFQLSQGMEDRTEGPPASGQAFGERGHSRGLRPAGRFVRRNTASTSTTNSHQHE

SEQ ID NO: 232298 - protein, 150 aa, Zea mays
  unsure (1)..(150): unsure at all Xaa locations
  Clone ID: MRT4577_143450C.1.pep
VPPGEYLVRDSRAGKVYRGSGSRKSKRVRLPSRKVVSLNQRQGHKRQLRAAAGWVQHAVRISGHPIDMVPVCFDYLHRRQRRSLVLDVTNYMTQRPVLVQVYLYVQGTYIGHMRRLNIDSHXASFIQCKMAGAISGSHRNITTKRTKEAR

SEQ ID NO: 232299 - protein, 89 aa, Zea mays
  unsure (1)..(89): unsure at all Xaa locations
  Clone ID: MRT4577_143451C.1.pep
DNLISVHEYVXPYFSGSKLKSFLAGHNITITDGIDKTSATLQFRKLADCDFLKRNFKQMSNVLWVAPEDXASLWSQLHYVSCNNLEMQE

SEQ ID NO: 232300 - protein, 499 aa, Zea mays
  unsure (1)..(499): unsure at all Xaa locations
  Clone ID: MRT4577_143452C.1.pep
MAVASRLAVTRVSPADGARPAAAAGRRSGLAVVRLPPTDSRGRRRRRGGAVAASPPTEEVVQMTEPLTKEDLVAYLFSGCKPKENWRIGTEHVTIAIELDNCLPLKNDHFRVINXGLCISWPRVXMYRNNXILTATGMVIFGIXTGGQVAVRXAELHTLNNLENHLTTIFPEVXAIGEERGVRFLGLGMEAKWALTDIPIMPKGRYEIMRNYMPKVGTLGLDMMFRTCTVQVNLDFSSEQDMIRKFRAGLALQPIATAIFANSPFKEGKPNGFLSLRSHIWTDTDNNRAGMLPFVFDDSFGFEQYVDYALEVPMYFVYRNKKYIDCTGMSFRDFMQGKLPQAPGELPTLNDWENHLTTIFPEVRLKRYLEMRGADGGPWRRLCALPAFWVGLLYDEESLQSILDMTFDWTKEEREMLRRKVPSTGLKTPFRDGYVRDLAEEVLKLAKNGLERRGYKEVGFLREVDEVVRTGVTPAERLLNLYETKWQRNVDHVFEHLLY

SEQ ID NO: 232301 - protein, 99 aa, Zea mays
  Clone ID: MRT4577_143453C.1.pep
ELRSLRWLSIMATPLIDNLPESTNQTYVPVSLQIRRWDNLKQLPDVMQHLTSLERLNLICCGELTVLPKMTDNVLSTLGEMTDNSLFRYALSNGCYYFV

SEQ ID NO: 232302 - protein, 325 aa, Zea mays
  unsure (1)..(325): unsure at all Xaa locations
  Clone ID: MRT4577_143454C.1.pep
KKTKKKKSVQGIFPFVFDESFGFEQYVDYALEVPMYFVYRNKKYIDCTGMSFRXFLPLMSFYSCSSVLXSGGFXFFCTLHLHDTVSGFHXKLIPFDLYLFXDFMQGKLPQAPGELPTLNDWENHLTTIFPEVYPFICLHDGISVVARYRNNSCLVHSACXRLKRYLEMRGADGGPWRRLCALPAFWVGLLYDEESLQSILDMTFDWTKEEREMLRRKVPSTGLKTPFRDGYVRDFAESALKLAQNGLERRGYKEVGFLREVDEVVRTGKCYSAPSHLHSFGGLSVSEDPNYLQLATGVTPAERLLNLYETKWQRNVDHVFEHLLY

SEQ ID NO: 232303 - protein, 78 aa, Zea mays
  Clone ID: MRT4577_143455C.1.pep
RFLFKLSSTLQMIQLSNDTIPLTMMAPCDPRRKQEAQNHLCSQGQPSHVSGVLAYLCMAARCLYPAPRSNDGCRSELG

SEQ ID NO: 232304 - protein, 81 aa, Zea mays
  Clone ID: MRT4577_143456C.1.pep
QNRFFPKVNVSQTSSKPHYVWCNVVCFFLFLHCSMFQTTFLKCPNNTTLIAFAISVLMHAESVHVLQREQVKPVMMEYYIC

SEQ ID NO: 232305 - protein, 43 aa, Zea mays
  Clone ID: MRT4577_143457C.1.pep
MNCFWPPKPKKKKKKKKKKKKKKKKKKKKKKKKKKKKKKKKAA

SEQ ID NO: 232306 - protein, 83 aa, Zea mays
  Clone ID: MRT4577_143458C.1.pep
IPHARRKTLTLGYAQQICRITNTNCAHGEYTTFKLHCYYFHNKRTSLCIQMISSTQYMDNYGPEVVESDLTSHRALFKEQRPL

SEQ ID NO: 232307 - protein, 67 aa, Zea mays
  Clone ID: MRT4577_143459C.1.pep
NCAGAIMQSGIVPPLVPFAQTFAAVITAALTGTLYYVATTPKGDPDVLLTTTVLIRVTMLISFGFFL

SEQ ID NO: 232308 - protein, 84 aa, Zea mays
  Clone ID: MRT4577_14345C.1.pep
YRYMILMLTTVDSSLTTDTNRPPKCIQICKPQNMLAMEGAEIWECSLYRPRRHILPTCCETPPRRRVFSCSSADVAAAEDYSCW

SEQ ID NO: 232309 - protein, 243 aa, Zea mays
  Clone ID: MRT4577_143460C.1.pep
PVSLDAEDIRNEKVKVLRSMRQLKLEDVVVGQYKGHSKGGKSYPGYADDPTVPKGSVTPTFAAAALFIDNARWDGVPFLMKAGKALHTRRAEIRVQFRRVPGNLYRRNIGADLDKATNELVLRVQPDEAIYLKVNNKVPGLGMRLDRSNLNLLYSERYRREIPDAYERLLLDAMEGERRLFIRSDELDAAWAIFTPALRELEDRKVAPELYPYGSRGPVGAHYLAANYNVRWGDINSDDDGAF

SEQ ID NO: 232310 - protein, 100 aa, Zea mays
  unsure (1)..(100): unsure at all Xaa locations
  Clone ID: MRT4577_143461C.1.pep
PYHSAPEGREFLRCSLGQYIPRPYSPLVCVFRVSGPRFFGLHFGTWHXGPLFLGGVVNLYFLELNNPDVVDATALLFXKHVCITFVVEALLVEVSQSDFP

SEQ ID NO: 232311 - protein, 82 aa, Zea mays
  Clone ID: MRT4577_143462C.1.pep
RHIAHLMQQQTRRLQNNSVILPSNARWVHRITTRLFPPGPGHRRRDHSPLRRQYDRHQLKTASRDISCATPQQTPRRLIRHS

SEQ ID NO: 232312 - protein, 110 aa, Zea mays
  unsure (1)..(110): unsure at all Xaa locations
  Clone ID: MRT4577_143463C.1.pep
PQKGKGKQRAHANRDRQPERGARRAPSKRRARARDXGPKRSGGKRDPRNQXXGGKRATSKQKEAXGXNRAKTEXSRERDSNNCIQDCYGFXINLVTRLARMKSQXXGMEM

SEQ ID NO: 232313 - protein, 47 aa, Zea mays
  Clone ID: MRT4577_143464C.1.pep
GWALVRGGSGYCSAAQSWGSSVHMGCVGWARLLELHRGFVWSKRCLG

SEQ ID NO: 232314 - protein, 56 aa, Zea mays
  Clone ID: MRT4577_143465C.1.pep
QILVGRLVKVRSAGAAQRGLGLPEGEQVDKRCVNPGLDCSFSYGSNTDIVARLNDA

SEQ ID NO: 232315 - protein, 206 aa, Zea mays
  unsure (1)..(206): unsure at all Xaa locations
  Clone ID: MRT4577_143466C.1.pep
LVPGLDIHCATNAIKQLRTLEGPFSDCDRVVLQGGKKHPALKPINTGLDAXFLLPPQVSDAGVXSDIHVEPLTAICDPRDNPMIARQHLRAQNEVAAQEIAAMGPIETRDIVVRXLGTPIKNAVGTSPVYFNDXQTRATRDAAWIAGLNVXLRIINETTAAAIAYGLDRNATSVXEKNALIFDLGGGPXDXLLLXIEAGIFEVKPQ

SEQ ID NO: 232316 - protein, 44 aa, Zea mays
  Clone ID: MRT4577_143467C.1.pep
ASGSLLQCGRGLAPPFQAILSRQGSRNGGTYPRESGATGVAEWG

SEQ ID NO: 232317 - protein, 80 aa, Zea mays
  unsure (1)..(80): unsure at all Xaa locations
  Clone ID: MRT4577_143468C.1.pep
RIDSYRRLGTRAAGKETAKKSKTSIHMPTXDGSDGGGGAGAGAGEKKSSQAPAKPGACGAAKFLAGLPXXXXFSSGSAPS

SEQ ID NO: 232318 - protein, 51 aa, Zea mays
  Clone ID: MRT4577_143469C.1.pep
LGAPDCPVCTGLSGAPSARWGQAGPRQCFSVGAPVAHRWRTGGAPDCPVRH

SEQ ID NO: 232319 - protein, 111 aa, Zea mays
  unsure (1)..(111): unsure at all Xaa locations
  Clone ID: MRT4577_14346C.1.pep
PSKRKEKKKNKKRPFLLSPLQVTARVAFTHGHGLKYPDPPGLGDTSTITLVLAASHTKAVFGELFGTGDASLSPAAALVGTGTLSGPFXPMAAWSPFFDELPVSDELCLGT

SEQ ID NO: 232320 - protein, 250 aa, Zea mays
  Clone ID: MRT4577_143470C.1.pep
CRRRAPTTTGVPKKKRHGGGTVRVRCAATAPMGEKTEYRDGPLERAFMGLFARKMEKYAAKKPAAQAKEERAVWEWDYESFVDVSRRVMLGRTRAQQQQAVREVLLSMLPPGAPAQFRRLFPPTRWACEFNAALTVPFFRWLVGPSEVVEVEVGGVRQRSGVRIEKCRYLESSGCVGMCVNMCKVPTQDFFTNEFGLPLTMNPNFEDMSCEMIYGQVPPPLEEDPASKQACYPSLCSMSTPSAPACPKLQ

SEQ ID NO: 232321 - protein, 73 aa, Zea mays
  Clone ID: MRT4577_143471C.1.pep
RSLSVCTSNILFGPRRPPHQCPLRYSPCEPVRPRSQPVSRGLRSPLPGWSITCHPLPCPCSFTVRRCWRCRFH

SEQ ID NO: 232322 - protein, 54 aa, Zea mays
  Clone ID: MRT4577_143472C.1.pep
CSEFFFFLALFFFFFFFFFLKRPVRQPVGHPSQASLTRNDPLQHQTKHRADPGR

SEQ ID NO: 232323 - protein, 101 aa, Zea mays
  Clone ID: MRT4577_143473C.1.pep
IRVKRNPHYWLAQENKGLNHSIRTLKEKYVVSRCSICQGAILYMFTHTSELDSHFCGAFYNALIESTIRINLKFISTEFPSCGLKIQALSAVLPLSSCDTA

SEQ ID NO: 232324 - protein, 69 aa, Zea mays
  Clone ID: MRT4577_143474C.1.pep
CARVRPSSSCLPATLCRCWSGGLPGRPPPQQLQLFTAGHQRFLVFLLDTPVLYICCLSVCMARPELRSL

SEQ ID NO: 232325 - protein, 92 aa, Zea mays
  Clone ID: MRT4577_143475C.1.pep
IWELALVVFFLALPFICWFALSFLGKALGLRGVGLLVNDLPGQSVELNWRVPRFAWVTVSGSFFLAPLGDSSGASGIKFPCTIIQKMCGNIS

SEQ ID NO: 232326 - protein, 160 aa, Zea mays
  unsure (1)..(160): unsure at all Xaa locations
  Clone ID: MRT4577_143476C.1.pep
TXGVGPFGLLVMASGDMREHTAXFFRVFRILHEYAVLMCTDLSRSSTKAGVYKPTHGGFVDVDIEKDMSISLRTLIDHSIVESFGGGGRTCMTARVYPEHVAAGSSSHLYVFNNGSAAVKVSKLEAWELASASVNVDDDGGLMAGGSFANMCRAEEYNSS

SEQ ID NO: 232327 - protein, 56 aa, Zea mays
  Clone ID: MRT4577_143477C.1.pep
TYAHSHWNSRPMVISGCKYPFSHLALNIYQLLVLVKRLYPPRVMLIKTVLFNKKPK

SEQ ID NO: 232328 - protein, 107 aa, Zea mays
  unsure (1)..(107): unsure at all Xaa locations
  Clone ID: MRT4577_143478C.1.pep
PSPSSPHPHCVFRARSGGTHDALLACSGLQNAAHTGPLLAGPPLAARGSSPTAYLSVWIPESELDQIGASACVRLLWSTIYDHGRGLTLHRPHVEAXDWRSLSVLAR

SEQ ID NO: 232329 - protein, 38 aa, Zea mays
  Clone ID: MRT4577_143479C.1.pep
YPRFVFEDYMNLYVRHKFEAKEPRFKAMKADAAPIATA

SEQ ID NO: 232330 - protein, 77 aa, Zea mays
  Clone ID: MRT4577_14347C.1.pep
KHIRNWMAFISLVLCTQKQTRSSNVDDLCKPRCNLRYNITAMVTRLYRIRLEYAKLASPDLRVARAVCPCHVAVQSS

SEQ ID NO: 232331 - protein, 148 aa, Zea mays
  Clone ID: MRT4577_143480C.1.pep
GIPPRARPSPLYPPWPKLLLAPARLPLPSSSSPLASSANATMHLWCSPPPSSDCVPLCSFPMALALQLRCALLVFWVGPAVAGFVQCRSLARRGVRFPARAPGFLLSDCRAPSSPSLHAELLHHGFLLPRQRVSFSGLLCRARPDRRR

SEQ ID NO: 232332 - protein, 80 aa, Zea mays
  unsure (1)..(80): unsure at all Xaa locations
  Clone ID: MRT4577_143481C.1.pep
LIDKVSRSYDKFFFGDAAREKCDYFXWGDFADWYIEASKTRLYHSSDKIAAATAQSVLVYVFENILKLLHPFMPFVTEEI

SEQ ID NO: 232333 - protein, 72 aa, Zea mays
  Clone ID: MRT4577_143482C.1.pep
SGKRPPKKRGGAGKEKNYWGKQLWGFKPQGGPELGNFYEPRGFGGRRISLTLFFFFLLPQRALFGAPVLNMF

SEQ ID NO: 232334 - protein, 312 aa, Zea mays
  Clone ID: MRT4577_143483C.1.pep
MAAAAGPYKEMLEVVNACAARIRWRLRPASKRRLLNDILFLCTGLRPVVLVDYGGTMPQLQENLCGLLYHARQETSILNPLRVMIIRDMLYLIHVKGLAEHASPNARSQQGLAFVDLEKRCCNLLTTIEENDTVLELVSIQDQFAAKFPVDLSDVRPGITKQMSGNPQSTVVAECTDNHVEDRTLLVVDLSSFLENTQIALPSLNGWLLGYPVTYLFRNASSEAAIQNLSRQSLHIYRVYVCGSYRSAGERTEEELMSFSVPCGASTKRDEEVWARSFIARMNEKLRRCSQVWASIRLEVEVFQSQSQVIVL

SEQ ID NO: 232335 - protein, 179 aa, Zea mays
  unsure (1)..(179): unsure at all Xaa locations
  Clone ID: MRT4577_143484C.1.pep
GPCREGSCLRTALAAGFHISFLRSAPPGGRGLXRLKRPYXTERALLCSVLLGNGGGLTQRAQGVRRNAHAELAGMDIDHLRLRAXRQARGRHARVRGDAGRXGATAPNAFVLAGVLRCCAGLGDVXSGRRIHGWILRSGVCPDVVLCXAVLDMYPKCGDHGPPXRAFGALAPKDPPSWN

SEQ ID NO: 232336 - protein, 105 aa, Zea mays
  Clone ID: MRT4577_143485C.1.pep
LVSNSFIWPRAVILLRHVALYKEFMPSARNNSHTDLNYNTMTCDWLWKTSTSSLMDAQTWLHRLSFSFMRAMNDLAHTSSSRFVLAPHGTEKLISSSSLRSPADR

SEQ ID NO: 232337 - protein, 101 aa, Zea mays
  Clone ID: MRT4577_143486C.1.pep
GQIASIGFLNFCKENLFWGGEGDGEGGCEGEEMVVVPQEKILHRINSKMSLHWYQLGNQLSFRWTTGAGGGCRGRHRAPTNNYTSLSYQGCNNKNSSAGSF

SEQ ID NO: 232338 - protein, 34 aa, Zea mays
  Clone ID: MRT4577_143487C.1.pep
PRVRSECAICSNSKKLPYTLRMIQARKTVSTTIL

SEQ ID NO: 232339 - protein, 114 aa, Zea mays
  Clone ID: MRT4577_143489C.1.pep
MVVVPQEKILHRINSKMSLHWYQLGNQLSFRWTTGAGPRIGCVRDYPPELQFRSMEQVSLSPRGGAEHPRFGGTPPRQSPCAPLVPSTPGGPVSPLYGHGGAGTPSPRLQHGAA

SEQ ID NO: 232340 - protein, 19 aa, Zea mays
  Clone ID: MRT4577_14348C.1.pep
MMLFKMTTVAFAWQAIHAD

SEQ ID NO: 232341 - protein, 58 aa, Zea mays
  Clone ID: MRT4577_143490C.1.pep
SSSASYLGARRLPRTIVVDEPSLNTDSTGPFLAGVYRANPCIFLHRLPKVERLPPVST

SEQ ID NO: 232342 - protein, 72 aa, Zea mays
  Clone ID: MRT4577_143491C.1.pep
PHRPAHPVILNNAPTCRLRLILPPYPTASPTTRALLPAERLKTRQGRPRLNHQPDGGLRHAPQGAGYLLPLI

SEQ ID NO: 232343 - protein, 146 aa, Zea mays
  unsure (1)..(146): unsure at all Xaa locations
  Clone ID: MRT4577_143492C.1.pep
RIDQYGNAHTRFILQIPVHRQGLKASFRYLVTCRTETWPRTVDFTRTKVPVNTSIVLMVTKEQDHVGGPGPLIIESNIHGLPYLDAVVKESMRLHPVVPLLIPRVAREHTTVAGYDVPAGTRVLVNVWAIGRDPNVGGPTPGSXRP

SEQ ID NO: 232344 - protein, 41 aa, Zea mays
  Clone ID: MRT4577_143493C.1.pep
ISLQYCIELPVCAYLFLTCQGVVLMPVSISAITESDTISEP

SEQ ID NO: 232345 - protein, 336 aa, Zea mays
  Clone ID: MRT4577_143494C.1.pep
MSSLAYPLLRLPCRCSIAPAPAPASQLPAPVCLSASASANAGGDLTAREKRAQRRERRELRATDWKEEVQDRLIHEPARRRKKPPKRSWREELNLDLLAELGPQWWLVRVSMAPGTDYVDLLTKAISRRYSEVPFKIYNPSIQVKRRLKSGAISVKSKPLHAGLVFLHCTLNKELHDFIRDTEGCYGFIGATVGSIKRQIKKPKPIPVDEVESIIREEKEEQERVDREFEEMENMGNIEPFSKPVEESELMLMNKIKKQFKKSSSQGGTRHSAFSPGATVHVLSGPFADFTGSILEVNRKNKKATVQLSLFGKESFVDLDFDQIEAVEVDDDDSKL

SEQ ID NO: 232346 - protein, 40 aa, Zea mays
  Clone ID: MRT4577_143495C.1.pep
QVCPYGVCPVVVTSLVSVPRHVLLRRGTVGVRANAFFRDP

SEQ ID NO: 232347 - protein, 105 aa, Zea mays
  Clone ID: MRT4577_143496C.1.pep
EETVASRTHMHGLKSSETTTLFFFRFFFFLLRGHTGVTVLVKLAYRDAAGVGVVGALRYTSRGCCNADVWREYGPLRNAGRVGRFPNIMIRRKRTLWDIYNIAVL

SEQ ID NO: 232348 - protein, 230 aa, Zea mays
  Clone ID: MRT4577_143497C.1.pep
MASVLHHLFPLVVVLLLAAAADAATFTVTNNCPYTVWAAAVPGGGQQLDNGQTWSIDVPAGTTGGRVWARTGCSFDGSGNGQCQTGDCGGVLQCAQYGQAPNTLAEFGLNKFDGLDFFDISLVDGFNVPMDFLPAGDASGCPKGGPRCDADVTSQCPAALQAPGGCDNPCTVFKTDQYCCTGSAANNCGPTDYSKFFKGLCPDAYSYPKDDATSTYTCPGGTNYNVVFCP

SEQ ID NO: 232349 - protein, 331 aa, Zea mays
  Clone ID: MRT4577_143498C.1.pep
MDAAVSTLTALAIFASTVEHAAYRSVQGYRVVGRKGGGWVRWERWVERQFVLSLSFPRCVEVALPAAAPRILPAGWRSRPVFREGQTVDTWRCIVAFDSVAAVAPSSPPPPVLSPFVNPQLQYLSNLYNDLLMVFRFREEKTVPQLVNSKQPIRCGEQGKTSDLGDASESDSDGDCQSGKELAPPVQKHTRANRKHIDSITLVDIAQYFHLPIRDASKTLKIGVSILKRKCRQYGIPRWPHRKIKSLDSLIHDLEFVLAREDEDEEEEKQLQKDRLAAAINALTKRKSMLESEKETIQQKPAMDLMAETKLFREDVFKRRYRAKSSVMDMD

SEQ ID NO: 232350 - protein, 403 aa, Zea mays
  unsure (1)..(403): unsure at all Xaa locations
  Clone ID: MRT4577_143499C.1.pep
MALCAAAASTATASASARLSASTARPRGPSSTSLPSSFVGAFPCAVAVRTRRRRAAAAAARATVTVRAEARKSVLIVNTNGGGHAVIGFYFAKELLAAGHAVTVLTVGDEASDKMKKPPFSRFSELTSAGGRTVWGDPADVGAAVGGASFDVVLDNNGKDLDAVKPVADWAKTAGVGQFLFISSAGIYKPTEEPPHVEGDAVKESAGHVGVEKYIAEQFGSCWASFRPQYMIGSGNNKDCEEWFFDRIVRNRPVPIPGNGMQLTNVAHVRDLSSMLSLAVEKPGAAAGRVFNCVSDRAVTLAGMAKLCAAAADXSSXDIVLYDPXAVGVDAKKAFPFRNMHFYSEPRAAKAALGWTSTTSVPVDLKERYAEYAASGRGHKSMAFDLDDVILAAIGKAPASVAV

SEQ ID NO: 232351 - protein, 42 aa, Zea mays
  unsure (1)..(42): unsure at all Xaa locations
  Clone ID: MRT4577_14349C.1.pep
HSWNRRRPKTCSXSSNSCSYENHAYSLANKDFHWHAHEQHHQ

SEQ ID NO: 232352 - protein, 59 aa, Zea mays
  unsure (1)..(59): unsure at all Xaa locations
  Clone ID: MRT4577_1434C.1.pep
FSQHHWTQGLVPLPGPINESWCQGLDGSTSRXLIFSRTIVSIPCGPSALAVKKVAWGLA

SEQ ID NO: 232353 - protein, 73 aa, Zea mays
  Clone ID: MRT4577_143500C.1.pep
ELNPAANMKQEKLGPFAHTPAAKRASFMTQQQLLPFNQQFAANPAALLQLQQLMPFVQQAKKKKRVYVGPAVV

SEQ ID NO: 232354 - protein, 89 aa, Zea mays
  Clone ID: MRT4577_143501C.1.pep
LLKPGKKNFVDPSRKVCKKKKLGNLLPLPGYGNSEILCLFTPGAGGFALAVVNIFVTVGTVSPDLLYVKEVFEKVAFLFAKKKKNPKKS

SEQ ID NO: 232355 - protein, 85 aa, Zea mays
  Clone ID: MRT4577_143502C.1.pep
MTMPLHSRTMKSYLVPLTLKHRFSLMTLELAVTSIFESHLFFIATSPKLCRYNEANVVSDGCVMWTPGARKDSRQCVPVCERQIK

SEQ ID NO: 232356 - protein, 71 aa, Zea mays
  unsure (1)..(71): unsure at all Xaa locations
  Clone ID: MRT4577_143503C.1.pep
LQKKKKKKKKKKKKKKKKKKKKKKLKKKKKKKKKKKKKKKKKKKKKKKKKKKKKKKKKKKKGXGGLKKKKF

SEQ ID NO: 232357 - protein, 57 aa, Zea mays
  unsure (1)..(57): unsure at all Xaa locations
  Clone ID: MRT4577_143504C.1.pep
KNQQIIFYEDPELLGDSFTCALGKTLVLVNNENRMXHFYGQPQCSTIYILYREKHNK

SEQ ID NO: 232358 - protein, 452 aa, Zea mays
  Clone ID: MRT4577_143505C.1.pep
LEAWPRELQPAAAAPYYFGELEEALIHGTRTSVDHGMIGSDVDTERKTAGYLAARPPTLEIFPSWPMSHLQQPYSGNSHSVGSTTESSSGQNSMPQTELVSPGSMRADSGQRQELLMVTVDDYNYEQGLGAAATTAPIFQQHAAGQDKGKHGSTRKDGRLLDAKTERRLAQNREAARKSRLRKKAYVQQLETSRIRLQQIEQELHGARSQGLFPGGGGAAGDLSSGAVIFDMEYARWLEDDASRMTELQAVLQPQIIDANLGAIVEDCMRHYDELFHLRAMLARSDVFHLMTGLWATTAERCFLWMGGFRPSEILKMLIPQLDPLAEPQLLGMYNLQRSSEQTEEALVQGLQQLHQSLADAVGASPLSDGANVANYTALMALALDRLDTLESFYRQADSLRQQTLHQMRRILTTRQTARCFVSISEYHRRLRALSSVWASSRPPTPPSEGVV

SEQ ID NO: 232359 - protein, 89 aa, Zea mays
  Clone ID: MRT4577_143506C.1.pep
DGCGFGVLGPMLHGAVLRLSPHACPSLSLSAQGVLVANLISVWRAYRLPVATIFVCCCGYTDVNNPPFKSMGACGNIRNLQGLSGLWVL

SEQ ID NO: 232360 - protein, 45 aa, Zea mays
  unsure (1)..(45): unsure at all Xaa locations
  Clone ID: MRT4577_143507C.1.pep
LRKKWFPXAXXXXXXXMSHSXIXKXFFXPPIVAPIXCYCXPLSML

SEQ ID NO: 232361 - protein, 58 aa, Zea mays
  unsure (1)..(58): unsure at all Xaa locations
  Clone ID: MRT4577_143508C.1.pep
KEIKNGRLAMFSMFAFFIQALVPGEGPVENLPLNXLKDPFGNNLFPVFFGAPKRTPTL

SEQ ID NO: 232362 - protein, 118 aa, Zea mays
  Clone ID: MRT4577_143509C.1.pep
IKFFSPWGVHVRHFPLDMESHITEGQAWYSGVESPGHGFKAASPHLRGEALPRFIAFIALTYVGAFGTRSAIFLWKVRLHPCNRNSMNVFKNEPCKFIAGCGAQITVVVNYCNSHVIS

SEQ ID NO: 232363 - protein, 127 aa, Zea mays
  Clone ID: MRT4577_14350C.1.pep
RYIKDWILCFESFVAALFLEQRWAVPLLLKDYTNEVHNSDYKVIPVLSVLTNYGTHNYAQELLTQDDAFSLPSTQDSPAISFGIYSSRPPIKKLDDATNSHIPTRYAILRIMNSARQHDKDRLPSPP

SEQ ID NO: 232364 - protein, 88 aa, Zea mays
  Clone ID: MRT4577_143510C.1.pep
WTCLFQRLIGIRLPWPIVVFRSNLPGILYQFRPLGVASAFIMIFRRWCKTKPVSAPIHDFFSSNWFLFVPPLCFRGFISRFLVPDACL

SEQ ID NO: 232365 - protein, 252 aa, Zea mays
  Clone ID: MRT4577_143511C.1.pep
MLPLWGTRPLGKALPKEGHSVASSFQHLSKTRIATTSTRRPWSGLQPWKGEPLGGQINPECSGRGNRSLNEVTVKNKYPLPQIEDVFDQCVLEDRSEVSVFMDCLDKFVVVFTDDILIYSQNEQDHEEHLRKVLQRLRDCYLYAKLSKCKFWISEVLFLGHIINQDGLVVDPKKVAAILDWKAPKDVRGIKSFIRMAGYYWHFIEGFSKIEGRVVAYSSRQLKIHEKNYPTHDLELAAVVHALKTWRHYLYG

SEQ ID NO: 232366 - protein, 81 aa, Zea mays
  Clone ID: MRT4577_143512C.1.pep
PTPSEKKKKKKKKKKKKKKKKKKKKKRADELKRTKNRGAPACERSKLPFCGHAKFISLVWGHTKSNTGDHRFTTQLIGKNP

SEQ ID NO: 232367 - protein, 58 aa, Zea mays
  Clone ID: MRT4577_143513C.1.pep
FLIHSIPPGPGATLNTPWFATRHWSHQRQESKIPDVLNLKDSLVISYILYTYWTVKGI

SEQ ID NO: 232368 - protein, 101 aa, Zea mays
  unsure (1)..(101): unsure at all Xaa locations
  Clone ID: MRT4577_143514C.1.pep
YRNRPGPSPRPSVPRPSVLGDQLMHLIERAQXSVPRPMCMSPKXILALPLXXSLXVFXCKCLLYGXXQFXXAMAFARLSISXXPSXSPVPFSLXAVSFRYL

SEQ ID NO: 232369 - protein, 114 aa, Zea mays
  Clone ID: MRT4577_143515C.1.pep
TMVPFPSTSLSSIMSWSSALRRVLSQRIASLLPHSLAVTHPSPVLVEETEGLLELADHARLVSSSLITTPAVAARWIGGGERPHQREQARDGTAAADARANRERPGAFCGFPIR

SEQ ID NO: 232370 - protein, 85 aa, Zea mays
  Clone ID: MRT4577_143516C.1.pep
STRSETASTFKDGCGLGIREGETEYRIQKRLPCLRCEKLNIFVVKEPVFSASCLIAGFGLFIPAVVRPILVSWLSTVQVTPPFLN

SEQ ID NO: 232371 - protein, 176 aa, Zea mays
  unsure (1)..(176): unsure at all Xaa locations
  Clone ID: MRT4577_143517C.1.pep
MRHVVTADDDEXSPSYKLKEMCXLLRASEVRIVKEVDGFILKRLENKSPRLQAQCXRVITTSPXKSGTDFLREMRRHSPAXMRQLVYYKGHXDPLEEGMPYNKVXRDTVNEAIAAIVSTEDPKPGVAIESLGKRIQGFVKTNYQPSTDDKKSFLIELIEVSGIASAYIKXGLSNFA

SEQ ID NO: 232372 - protein, 209 aa, Zea mays
  unsure (1)..(209): unsure at all Xaa locations
  Clone ID: MRT4577_143518C.1.pep
HFVYFSQVPLYPASLFQNETDGEGMSFVLYFRLSDGYSKELPPSFIESIRRLIDDHVEKIKAFPMETTIPFRERLKILGRVANLEDLPLSAPERKLMHAYNEKPVLSRPQHEFYLXTPNSDCLMEGXEASLSSVQSDNYFEIDIDMHRFSYISRKGFETFLDRLKACVLDVGLTIQGNKAEELPEQILCCVRLNGIDYTKYQPLLTHAA

SEQ ID NO: 232373 - protein, 140 aa, Zea mays
  Clone ID: MRT4577_143519C.1.pep
IRLEAARSVYSCTARTADFINKPEDAAKLINMWVKQSTKDTVTSLLPDGLIDKNTGLVIGSALYFRGRWLDRTDTRSDAVQKFCCLDRTCVDVPFVEYDRTRPFAVHDGFKVIKLSYQQGNNERKFSMYIFLPDAHDGLF

SEQ ID NO: 232374 - protein, 254 aa, Zea mays
  unsure (1)..(254): unsure at all Xaa locations
  Clone ID: MRT4577_14351C.1.pep
YACRFRSGIPGSTHASAGAEPAERGAGEGDGRREPAPFRAVRRDTMEPAVSLAVCALLFLLWVRVKGLEFVLIHQRWVFVCLFLLPLSLIFDIYYYVRAWVVFKLSSAPRLHEQRVRDIQKQVREWKEQGSKTFMCTGRPGWLTVSLRVGKYKKTHKNIMINLMDILEVDTKKQIVRVEPLVSMGQVTALLNSIGWTLPVLPELDDLTVGGXLIMGTGIESSSHKYGXLFQHICTAYELILADGSFVRCTPSET

SEQ ID NO: 232375 - protein, 325 aa, Zea mays
  Clone ID: MRT4577_143520C.1.pep
CIASAVGVNEKKRTPSSRTHSIRCLFEAFLKKKSGEAHPSSTLLSTKDFLERPLAGSQVQLCLLETNTLNSWSRIDPGTFRVRGANYFRDKKKELAPNYAAYYPFGVDVYLSPQKLNHISRFVQLPDIQLSSKLPPLLVVNVQVPLYPASLFQNETDGEGMSFVLYFRLSDGYSKELPHSFIESIRRLVDDHVEKIKAFPMETTIPFRERLKILGRVANLEDLPLSAAERKLMHAYNEKPVLSRPQHEFYLSDNYFEIDIDMHRFSYISRKGFETFLDRLKACVLDVGLTIQGNKAEELPEQILCCVRLNGIDYTKYQPLLTHGA

SEQ ID NO: 232376 - protein, 89 aa, Zea mays
  unsure (1)..(89): unsure at all Xaa locations
  Clone ID: MRT4577_143521C.1.pep
RXKKKKKKKKKKKKKKKKKKKKKKKKKKKKKKKKKKKKKKKKKGGGGFKGSKFTSGGLGRNSFFLGPPKSNQWAVFLKRGNWKNLGVPK

SEQ ID NO: 232377 - protein, 341 aa, Zea mays
  unsure (1)..(341): unsure at all Xaa locations
  Clone ID: MRT4577_143522C.1.pep
MARSRTSGGGEYESGSDHDGALQKPLLPNSGSWYRMGMGSRQSSLNAAGTSSMAVLRESHVSAFLCTLIVALGPIQFGFTGGYSSPTQASIIRDLNLSISEFSVFGSLSNVGAMVGAIASGQMAEYVGRKGSLMIAAIPNVIGWLAISFAKDSSFLYMGRLLEGFGVGIISYVVPVYIAEISPQNMRGALGSVNQLSVTLGIMFAYLLGLFVPWRLLAVIGTLPCIVLIPGLFFIPESPRWLARMNMMDDCETSLQVLRGFDADITAELNDIKRAVMSANKRATIRFQELNQKKKKKSGRTPLILGMGLLVLQQLSGINGIIFYAGSIXKAARLKNSNLDT

SEQ ID NO: 232378 - protein, 260 aa, Zea mays
  unsure (1)..(260): unsure at all Xaa locations
  Clone ID: MRT4577_143523C.1.pep
MGGGSNRGGAGAGEESGSDHDGVLRRPLLNTGSWYRMSSRQSSFAPGTSSRXVLRESHVSAFLCTLIVALGPIQFGFTSGFSSPTQDAMVRDLNLSISEFSAFGSLSNVGGMVGAIASGQMAEYIGRKGSLMIAAIPNIIGWLAISFAKDASFLYMGRLLEGFGVGIISYVVPVYIAEISPQNMRGALGSVNQXPILASISSICELSVTLGIMFAYLLGLFVPWRLLAVIGTLPCIVLIPGLFFIPESPRWLAKMNMMDD

SEQ ID NO: 232379 - protein, 58 aa, Zea mays
  Clone ID: MRT4577_143524C.1.pep
PLFRRRVRLHATGDTLWARGKKDLISFTRYPLRTTGYTRLLQAEIVQIFLRKSHHHLT

SEQ ID NO: 232380 - protein, 56 aa, Zea mays
  Clone ID: MRT4577_143525C.1.pep
SGGDDRRNHLHMSVGLARLKVVSWPALGVCSTSCSLMWCARLEPAGTRRGRLDVWV

SEQ ID NO: 232381 - protein, 71 aa, Zea mays
  Clone ID: MRT4577_143526C.1.pep
ALGRHGRGIHMRNARHANMMKYLKIMTERHVEGLLRHDPHEYHLPSKAAWCRHTQQAANPLLGYSTVELTG

SEQ ID NO: 232382 - protein, 307 aa, Zea mays
  Clone ID: MRT4577_143527C.1.pep
MATEEWELREEDAYAYEFEFDLENPFTSPADEPIASLLDAEGHHAPSISAAASATRRAAAAFISKVRFGGELAVHPRVAYLALNYVDRFLSKRQLACEQQPWAPRLLAISCLSLAAKMQRVATFSTADIQRDEDFMFDAVTIRRMERVVLGALEWRARSVTPLAFLGFFLSACYPPPQHPPQVAAVKARAVDLLLHAQPEVKMAEFSPSVVAAAALLAAAGEVAAANLHAFQASLAACPFVNSEKLRECGEVLAAAGGVGRGRAAPSADTPVTVLGHQRSASSASETDWINGGDAKKRCMGPPSQWG

SEQ ID NO: 232383 - protein, 54 aa, Zea mays
  Clone ID: MRT4577_143528C.1.pep
AKKGGMTEHQPLIKQRKLALLNLKKLSKQSKPICTESKKKKKKKKKSTLRCYHC

SEQ ID NO: 232384 - protein, 72 aa, Zea mays
  Clone ID: MRT4577_143529C.1.pep
SQITKRNFSYLVGDNDHLVSFRSAGRIQTPSFDKERSRKTKVSLGSSTTRPKPKCEGEDRAEERARRRERKG

SEQ ID NO: 232385 - protein, 82 aa, Zea mays
  Clone ID: MRT4577_14352C.1.pep
GGILHERPGPGRIWFRHGPTLCKILVRAKWTFTRSGKRKKGPLFVVHSTHGQHSWVIEWQWLCDRNNHSLGWVNLGVTPLQV

SEQ ID NO: 232386 - protein, 106 aa, Zea mays
  unsure (1)..(106): unsure at all Xaa locations
  Clone ID: MRT4577_143530C.1.pep
RRGLLEEXTWRAYCNGRKCGFAVRRDCGADEWRVLGAVEPVSVGAGVLPDDDVAGSVSGSGAAEGDLMYMRARFERVVGSRDSEAFYMMNPDGSGGPELSIYLLRV

SEQ ID NO: 232387 - protein, 172 aa, Zea mays
  Clone ID: MRT4577_143531C.1.pep
SGPCAERGSRILSPSPPLRRYFPVAGISRVGSRGIKRCGRPARIRCLRCSPHSLPFEPPLPSPPGTPPSPVPIVSSIVLVVVILVVVIVINLCVPSVAHAPRLGPHLRISVLVWLCSIRGLLWFCGFSPCRSLVSGFDLQIGRKQGGHYHLQDKRYQNHSAVAMEPFIRLQS

SEQ ID NO: 232388 - protein, 447 aa, Zea mays
  Clone ID: MRT4577_143532C.1.pep
MGQGTPGGMGKQGGAGDRKPGDAGEKKDKKFEPPAAPSRVGRKQRKQKGAEAAARLPNVAPLSKCRLRLLKLDRVKDYLLMEEEFVAAQERLRPQEDKAEEDRSKVDDLRGTPMSVGSLEEIIDESHAIVSSSVGPEYYVGILSFVDKDQLEPGCSILMHNKVLSVVGILQDEVDPMVSVMKVEKAPLESYADIGGLDAQIQEIKEAVELPLTHPELYEDIGIRPPKGVILYGEPGTGKTLLAKAVANSTSATFLRVVGSELIQKYLGDGPKLVRELFRVADELSPSIVFIDEIDAVGTKRYDAHSGGEREIQRTMLELLNQLDGFDSRGDVKVILATNRIESLDPALLRPGRIDRKIEFPLPDIKTRRRIFQIHTSKMTLADDVNLEEFVMTKDEFSGADIKAICTEAGLLALRERRMKVTHADFKKAKEKVMYKKKEGVPDGLYM

SEQ ID NO: 232389 - protein, 321 aa, Zea mays
  Clone ID: MRT4577_143533C.1.pep
MDEPSVDFSAEGVSSRSGLCQSTCLNPGCKHDRACWEDDYVKAVISHGQDDLAVDEIGLALTEVMHAYDDDKWSSLYEDFDDGVGDEPILPLESDSTGDFVDIDSASPTFPSDDAMESSITNSFARNCSINGTPSLVSAMKGTRVKKGITTKLSVSWAPDVYDPPITSDSHTVKGHHTSSTKGNYKYKTSKSSSTTRRKKDKKHSRHSSSNGGGSKRDKKHSYRSSASSSRAITSGSQYCDAYSGGGINSRTVPESAKISPLVVAENVTPQEMVPVLKTLEPIKCTTSCGKEKPFALLSRQFSPARYKGMFTFWNQNQLAS

SEQ ID NO: 232390 - protein, 61 aa, Zea mays
  Clone ID: MRT4577_143534C.1.pep
KGLYKSARVGKIKGFHGIYAAYEAPLNCEIEIKEINGVSPSPFNMPGQWFPSLERKAFLTE

SEQ ID NO: 232391 - protein, 72 aa, Zea mays
  unsure (1)..(72): unsure at all Xaa locations
  Clone ID: MRT4577_143535C.1.pep
FXPXYXSKXSTNSKQXQIKXXXXXSTSKLPIXHXXPXXXXIKKKQPSXXTPXPPFTHXXXPXTHSXHTXNTL

SEQ ID NO: 232392 - protein, 61 aa, Zea mays
  Clone ID: MRT4577_143536C.1.pep
EHIHGSFLLVPERRSSYICPSAVNSFVWQCGRLRSYDLWTKHPHITGHQETAGISEIVWGS

SEQ ID NO: 232393 - protein, 140 aa, Zea mays
  Clone ID: MRT4577_143537C.1.pep
DFLRFLFELDIVDETTQLKDIRAESHSINNDGTNVADDGLGKSNSTSPMSSSQSVKQLDKGSPNGLVRSESFEIHSISPAKQLTTAVSTCNDVDEYLEKTAFQKGRFKVIHDYSKLEGATPREKELLDRISSLEQMLLAT

SEQ ID NO: 232394 - protein, 121 aa, Zea mays
  unsure (1)..(121): unsure at all Xaa locations
  Clone ID: MRT4577_143538C.1.pep
KKKGKKKKKKKKRKKKKKKKKKKTADHPEPQQKSGRGAHPGHYKQPGXPKQPERPKGGGARQTSRPGGPGGPEPGPRPHGGXRPPPXGPPRPAPPPRGRPPPSTTRTTEGPGAGAPGETTS

SEQ ID NO: 232395 - protein, 268 aa, Zea mays
  Clone ID: MRT4577_143539C.1.pep
MALQLRAAALCPPLPLTAFHGRLVAPWPPPPLVSIAVAAASSPGPSAPLSCRGPAPRWRRSSVRARTGAGGGGQRESPYEVLGVSPSAAPNEIKRAYRRLALKYHPDVNKEPNAQEKFLRIKHAYNTLMNSESRSKYASSSSDSSWSSSSRERKSAAAEEPFYGFADFLKDLQAEFQNWEAGLNSDQKPKSLWEELAAIGEEFVEFLENELKIDDSRPEDVTGDDPYTQFGQQAKSAKDDKTSTNSFDDGLSEIEAALENLKKELGLG

SEQ ID NO: 232396 - protein, 87 aa, Zea mays
  unsure (1)..(87): unsure at all Xaa locations
  Clone ID: MRT4577_14353C.1.pep
VAPHRILFQRNSIFPSPSIECQHKDPIVLVSPGIFKHTCQNQFSFPSSRSASSISPSSGPPRRYITFVPPDQNLSQLSTXLPIHFLL

SEQ ID NO: 232397 - protein, 39 aa, Zea mays
  Clone ID: MRT4577_143540C.1.pep
IINLNRSPCCMLRNHLKHGLGCLNIKSIKYASLFSVLNV

SEQ ID NO: 232398 - protein, 135 aa, Zea mays
  Clone ID: MRT4577_143541C.1.pep
MMMARGRGGAIGGGGVIALVLLVGLFVATSAPPVAEAAASYMVGDYGGWKFNVDRWAKGRTFRAGDVLVFSYNRAVHDVAVVNAAAYRSCAVPNKGARVLRSGRDKVRLGRGTHYFACTVRGHCQAGMKLAVRAV

SEQ ID NO: 232399 - protein, 65 aa, Zea mays
  Clone ID: MRT4577_143542C.1.pep
LSTPCHTSLPPNRIITNTKQSSTLCRGNPRNHSAGNFSPHTTHLQEMHSLSRRQPGDAAIGPFVG

SEQ ID NO: 232400 - protein, 101 aa, Zea mays
  Clone ID: MRT4577_143543C.1.pep
ALLSALGVSLYTYMISLGMGCANLSCAAACSSCRTAAVRCVGRGFPPPLFYLLLSWLLVCRAAAYRSESTARCYVRAGAPAARGLWAVDDDRIGQKECRSD

SEQ ID NO: 232401 - protein, 55 aa, Zea mays
  Clone ID: MRT4577_143544C.1.pep
GSNWAPKNRESPGKKKKNPEGFLPKKKKKKKKKKKKPKKKKKKKKKKKKKKKKKK

SEQ ID NO: 232402 - protein, 167 aa, Zea mays
  Clone ID: MRT4577_143545C.1.pep
CRPRPPILTPIDASLAFISLAPPSSPSVSWTACRRTPAWVGAMRQSRMSQMLAVQGQPPPCKRERRWARAPYVRQNATTAAAASVALCLSPLGSSVPHRLAFSYSSACATAPLFASEHRHATPQVAWRRLYRPLRLDCIDKKVAVEVTVSAVYLLHLIPLFDSSVPK

SEQ ID NO: 232403 - protein, 71 aa, Zea mays
  Clone ID: MRT4577_143546C.1.pep
LLYSFSGSAFSSCLKRPACTSPIVAAGGFMASRSIPSSLKGLNKAVSPPTAPFLVLVVHAAPECRRLSSAC

SEQ ID NO: 232404 - protein, 78 aa, Zea mays
  unsure (1)..(78): unsure at all Xaa locations
  Clone ID: MRT4577_143547C.1.pep
DATEFIHQLPKERGEYIPSATCPDAARMNNGVCCYTCWCLVKEFKKDDKXTIEHVXHWTGTKPKTGANHTRYIGYERF

SEQ ID NO: 232405 - protein, 82 aa, Zea mays
  unsure (1)..(82): unsure at all Xaa locations
  Clone ID: MRT4577_143548C.1.pep
PRPLCLDSSPTQSKVQELNQVVKKSQLEKGKTNNSLHQKPGGRGGTXKTFSIKXXQKNIFGTMNGQSLAKERSTVXHMAAAI

SEQ ID NO: 232406 - protein, 166 aa, Zea mays
  Clone ID: MRT4577_143549C.1.pep
ASSCATRAGASWPAKVSHRWNKWTHQLWSIRVVAQVRTSTVHTERRLHNKATATAARIGFVPQTGKIPVVIPRPPGRGRCMGSAPLVRAVRAWDHRCWSGAKGVPQSGDKRAHSMQSRGSPGGEFKEAGAGPTKSWAPSVLASGRGRPEDGRRGGAQPLEVAGRVG

SEQ ID NO: 232407 - protein, 89 aa, Zea mays
  unsure (1)..(89): unsure at all Xaa locations
  Clone ID: MRT4577_14354C.1.pep
KFGIGGGDYFXLVGXDFPRYIEGQDWVDAAYKDKKKWAKMSIFNTSGSGKIRNDWTIAQXAKEKWDIKANPVVLNKGVRFNTQRSFLGG

SEQ ID NO: 232408 - protein, 192 aa, Zea mays
  unsure (1)..(192): unsure at all Xaa locations
  Clone ID: MRT4577_143550C.1.pep
MKQLHKSSPTHAPSPAHAPAPKAAKTARPGPRSWIGYVLXTFFLLRPYLSLSPSSHLPDARPLFSFATRSGVPAGFRPPQRRVVVTGGAGFVGSHLVDRLLEQGDSVIVVDNFFTGRKENVAHHLRNPRFELLRHDVVEPILLEVDRIYHLACPASPVHYKYNPIKTIKTNVMGTLNMXGLAKRIGARFFVT

SEQ ID NO: 232409 - protein, 92 aa, Zea mays
  Clone ID: MRT4577_143551C.1.pep
IVVQIVHVGLHFIKLIIQVRVGPVVPAQPVLRQAVQDVAVREVLVLVERDELVPHRPGKGNVRAGSHQAGRLLVHISCLHAPLLCLRCMHCL

SEQ ID NO: 232410 - protein, 69 aa, Zea mays
  Clone ID: MRT4577_143552C.1.pep
RFVRRGAGIPKGRGGMSRAVPTLDGAVLSDNVPKSNRALEFGLAWLQAGPPGEGSMRVCGDTSLVINDM

SEQ ID NO: 232411 - protein, 459 aa, Zea mays
  unsure (1)..(459): unsure at all Xaa locations
  Clone ID: MRT4577_143553C.1.pep
MEQLHKSSPTQAPSPAHAPAPKAAKPARPGPRSWIGYILREQRLLFVLLGALIATTFFLLRPYLSLSPSSHLPDVRPLFSFAARSAVPAGFRPPPRRVVVTGGAGFVGSHLVDRLLEQGDSVIVVDKFGTXDVAHHLRNPRFELLRHDVVEPILLEVDRIYHLACPASPVHYKYNPIKTIISFTTGSRRLILLTLKAXVLIPSSSSLFCISGGGWRLAGGLVSDRNGGXGDPXKNNVLLNAITQTASSVCFQTGFLSFLKHPKXKRLWLEIRLDKHHLLALVLNNFRDQLMXLKILEIITSQYMSSGAGGGRSRSRTXGVEVRIARIFNTYAVCACVXSNFVAQAXMRGVYGDGKQTRSFQYVADXVAGLMALMESDHIGPFNLGNPGEFTMLELAQVVKETIDPMATIEFKPNTADDPHMRKPDITKAKQLLHWEPKGALREGLPLMVKDFRQRISDE

SEQ ID NO: 232412 - protein, 220 aa, Zea mays
  Clone ID: MRT4577_143554C.1.pep
MKQLHKSSPTQAPSPAHAPAPKAAKPARPGPRSWIGYILREQRLLFVLLGALIATTFFLIRPYFSLSPSSHLPDVRPLFSFAARSAVPPGFRPPPRRVVVTGGAGFVGSHLVDRLLEQGDSVIVVDNFFTGRKENVAHHLRNPRFELLRHDVVEPILLEVDRIYHLACPASPVHYKYNPIKTIKTNVMGTLNMLGLAKRVGARFLLTSTSEAYGDALEHA

SEQ ID NO: 232413 - protein, 48 aa, Zea mays
  Clone ID: MRT4577_143555C.1.pep
MTRTMAVMMIVVGKQQRRWLHKVRLNPKVCGHRNCCQTIARAEFRAYV

SEQ ID NO: 232414 - protein, 498 aa, Zea mays
  unsure (1)..(498): unsure at all Xaa locations
  Clone ID: MRT4577_143556C.1.pep
MKQLHKSSPTQAPSPAHAPAPKAAKPARPGPRSWIGYILREQRLLFVLLGALIATTFFLLRPYLSLSPSSHLPDVRPLFSFAARSAVPAGFRPPPRRVVVTGGAGFVGSHLVDRLLEQGDSVIVVDNFFTGRKENVAHHLRNPRFELLRHDVVEPILLEVDRIDPRGRPPNPSHSPTPSAAVPGTHQATTRSPTTHPPPPARSPAMKQLHKSSPTXEHSAAHREATTRSPTTHPPPRSWIGYVLREQRLLFVLLGALIASTFFLLRPYLSLSPSSHLPDARPLFSFATRSGVPAGFRPPQRRVVVTGGAGFVGSHLVDRLLEQGDSVIVVDNFFTGRKENVAHHLRNPRFELLRHDVVEPILLEVDRIYHLACPASPVHYKYNPIKTIKTNVMGTLNMLGLAKRIGARFLLTSTSEVYGDPLEHPQKESYWGHVNPIGVRSCYDEGKRTAETLTMDYHRGAYCPYTYGVVYLFYMYCNFFIIADGSFAQRLPYYFSPP

SEQ ID NO: 232415 - protein, 193 aa, Zea mays
  unsure (1)..(193): unsure at all Xaa locations
  Clone ID: MRT4577_143557C.1.pep
RRRSRRPCAGAARPLRRRRLLPCGSITRRRMRRPCRRPRRRRLLSLPGALTPGLRRRSSAPARPLXHRRRRRRLVVARHAPSASGGARRRXHTANKATSHATRRTSSTXASKNVTXRRCSTTSPPVTTPRRRCCQEGSRQALMLHRRSSTRSPAARRCSSGVLQQLQVVCTSRGWTWRVARRRGTPTAPTTTR

SEQ ID NO: 232416 - protein, 73 aa, Zea mays
  Clone ID: MRT4577_143558C.1.pep
VITLIRIKLEPFRVANLYLPPEGKGVVFIGSIWPMVPFQLILNGFLDYLLGRLKPWPNLLQRIPNGNQGSQKL

SEQ ID NO: 232417 - protein, 204 aa, Zea mays
  unsure (1)..(204): unsure at all Xaa locations
  Clone ID: MRT4577_143559C.1.pep
MGNLVSGAAAASGGGKVVMADGSVRALSEPVSVAELMMDHPRHFVVDARVLKKLGHHNHHHHQQQQQQQSGAKVAPLPADHVLGAGGVYVLLPATRGKVSAEEARRALSAARSLARSRSMPGLRRKLSSSSSSNKGRGQPGAEEXASAPRGGRXEAEAEAARPDGFEEHRPEFLSRELSSRGWKPSLRTIEERVLPKKTPHWLF

SEQ ID NO: 232418 - protein, 113 aa, Zea mays
  Clone ID: MRT4577_14355C.1.pep
NIFPHVTYDGMVDIDKITDPVQRRSVQNQICYFGQTPSQLLTVPHIRRRSLTQILQLQTIFRNPSEVRSYVLPSPEHCNVPASTMLVSNDCLVVIDSNVPTAHVALHHWQPNT

SEQ ID NO: 232419 - protein, 58 aa, Zea mays
  Clone ID: MRT4577_143560C.1.pep
LWRVPSTSAGKVRPSSTFGYPPPAVSRWYLNKSNAKEEPRKETRPIMSLSRHSTHMPP

SEQ ID NO: 232420 - protein, 47 aa, Zea mays
  Clone ID: MRT4577_143561C.1.pep
FFFLKKGGGTNYFPYTTMSSYKNYETLHLGTIFTKTSQTHHFSPNQL

SEQ ID NO: 232421 - protein, 64 aa, Zea mays
  Clone ID: MRT4577_143562C.1.pep
VSFPFYNQHIQGKSIPGFRLSPACLYIFIMIRSYVRPCDNILCANANNCFVKPTAVKLLSVLEC

SEQ ID NO: 232422 - protein, 112 aa, Zea mays
  Clone ID: MRT4577_143563C.1.pep
FFFFFFFFFFFFFFFFFFKWGTRIFPFLNDLGFYILEKRKKLRSEILVGGISHPFLFLFFFRFTFLLLNILFSLGWWFSKRLTLPPPRTPTECWRGLFWIIQKKKKGKGKCR

SEQ ID NO: 232423 - protein, 66 aa, Zea mays
  Clone ID: MRT4577_143564C.1.pep
VTLGKVCFAECLTGTLGKIYFKIILRTGGFRLLLSNNSRIDYNFILYLLIYDIMFFLFQVTKEKRL

SEQ ID NO: 232424 - protein, 67 aa, Zea mays
  Clone ID: MRT4577_143565C.1.pep
FPGASWEVGLGASYGLHWMDEATLTPLPGWWRHVFCYFKPYHIDASPTTILICQKQEFASIHIKFIV

SEQ ID NO: 232425 - protein, 50 aa, Zea mays
  Clone ID: MRT4577_143566C.1.pep
LLEDYFKIGIILELKIKKMIHLFVVRKEILGRRCKMVYIIFFKKKRGIRF

SEQ ID NO: 232426 - protein, 230 aa, Zea mays
  unsure (1)..(230): unsure at all Xaa locations
  Clone ID: MRT4577_143567C.1.pep
MAMAALRREGRRLLLAPTVPNPSSAAASAAVTRSSAMSQPEMAPLGARSISTQVVRNRMKSIKNIQKITKAMKMVAASKLRAVQTRTENSRGLWQPFTALLGDAPSVDVKKNVIVAITSDKGLCGGINSTSVKVSRALHKLTSGPEKESKYVILGEKGKVQLLRDSKNSIEMTASELQKNPINYTQIAVLADDILKNVEYDALRVIFNKFHSVISFKPTWXTILSPEVAE

SEQ ID NO: 232427 - protein, 330 aa, Zea mays
  Clone ID: MRT4577_143568C.1.pep
MAMAALRREGRRVILSSTVPNPSLAAASSAVTRSSAVSQPEMAPLGARSISTQIVRNRMKSVRNIQKITKAMKMVAASKLRAVQTRTENSRGLWQPFTALLGDAPSVDVKKNVIVAITSDKGLCGGINSTSVKVSRALHKLTSGPEKETKYVILGEKGKVQLLRDSKDSIEMTATELQKNPINYTQVAVLADDILKNVEYDALRVIFNKFQSVISFKPTMVTILSPEVAEKESEAGGKMGDLDSYEIEGGETKSEILQNLAEFQFSCVLYNGALENACSELGARMSAMDSSSRNAGDMLDRLTLTYNRTRQASITTELTEIISGASALEG

SEQ ID NO: 232428 - protein, 65 aa, Zea mays
  Clone ID: MRT4577_143569C.1.pep
MDLLLLPLRLPLPLPSLPRPPFPADPGLWLRRRVSRLREFQPAFPSAVWATLSLGTSRARCGLTA

SEQ ID NO: 232429 - protein, 58 aa, Zea mays
  unsure (1)..(58): unsure at all Xaa locations
  Clone ID: MRT4577_14356C.1.pep
RRRSIDYGRRGLLAGLVLHRVRDWKXTSPXSLVAPPASARPSFASSWITAPKSASRTI

SEQ ID NO: 232430 - protein, 115 aa, Zea mays
  unsure (1)..(115): unsure at all Xaa locations
  Clone ID: MRT4577_143570C.1.pep
ARHAAGXEADVAGKPAVDPAIGGGRRRNRCAGWEPAQPRPPKGARAPPGPCTSRQPGRKQPEPQRRCRWPCGQMCALLRTSLSPVRRAGAGAPKEPLRDADTVEAVTCGRLCGXR

SEQ ID NO: 232431 - protein, 29 aa, Zea mays
  Clone ID: MRT4577_143571C.1.pep
LKYHGHLNHRAETRLNYKPKLLINRLKSF

SEQ ID NO: 232432 - protein, 140 aa, Zea mays
  Clone ID: MRT4577_143572C.1.pep
RNPARRETVKTYAEKMHDVIVGVAGELATSLGLGLEEHSFQDWPCQFRINRYNYTQETVGSSGVQTHTDSGFLTVLQEDECVGGLEVLDPATGEFVPVDPVAGSFLVNIGDVGTAWSNGRLPHVKHRVRCVAPVPRISIG

SEQ ID NO: 232433 - protein, 299 aa, Zea mays
  Clone ID: MRT4577_143573C.1.pep
MAEIPVIDLRVARSAAEESARLRAACERLGCFRVTGHGVPSVLLAEMKAAVSALFDLPDDAKRRNADVITGSGYVAPSPTNPLYEAFGLLDAAVPTDVDAFCALLDAPPNIRETVKAYAEKMHDVIVGVAGELASSLGLVEEHSFQDWPCQFRINRYNYTRETVGSSGVQTHTDSGFLTVLHEDECVGGLEVLDPGTGEFVPVDPVAGSFLVNIGDVGTAWSNGRLHNVKHRVRCVAPVPRISIAMFLLAPKDDSVSAPAAFVDADHPRRYKVFNYNDYRRLRLSTGEHAGEALARMAA

SEQ ID NO: 232434 - protein, 85 aa, Zea mays
  Clone ID: MRT4577_143574C.1.pep
YVSPFCWVGHLVGHIRRSLVNSLLFDHIRHGNHFLGCARNFLGPVANWWLITWTDSMAILHMLVSFFVYAHGAPVIVYHASNNRV

SEQ ID NO: 232435 - protein, 301 aa, Zea mays
  unsure (1)..(301): unsure at all Xaa locations
  Clone ID: MRT4577_143575C.1.pep
MAEIPVIDLRLAGSSPDESARLRDACERLGCFRVTGHGAPAGLLADMKAAVRALFDLPDDAKRRNADVIPGSGYVAPCPANPLYEAFGLLDAAAPADVDAFCARLDAPPKVRETVKTYAEKMHDVIVGVAGELATSLGLGLEEHSFQDWPCQFRINRYNYTQGDXVGSSGVQTHTDSGFLTVLQEDECVGGLEVLDPAAGEFVPVDPVAGSFLVNIGDVGTAWSNGRLHNVKHRVRCVAPVPRISIAMFLLAPKDDRVSAPEALVDAGHPRRYKPFNYDDYRRLRLSTGERAGEALARMAA

SEQ ID NO: 232436 - protein, 146 aa, Zea mays
  unsure (1)..(146): unsure at all Xaa locations
  Clone ID: MRT4577_143576C.1.pep
RGRWFGLWKNSSELLSRDYVQCFEEQMSLVYDPAINEYRNLAGVETRVPNFGSTRAFSHKNPLKSDWCLGKLRAALEDMGYRDGDTMFGAPYDFRYAPPSPGQTSEVYSRYFKELMELVEAASERTPEKAVILXHSFGGMVALEFV

SEQ ID NO: 232437 - protein, 84 aa, Zea mays
  unsure (1)..(84): unsure at all Xaa locations
  Clone ID: MRT4577_143577C.1.pep
MNSLAAVSVYPVAIKGRVGRSVSVRKLAGAWPSPRSIRRSRVAXAVVVKYXARXVYFDFEDIDXSTGQWDLHGSDAPPPYHPLQ

SEQ ID NO: 232438 - protein, 439 aa, Zea mays
  unsure (1)..(439): unsure at all Xaa locations
  Clone ID: MRT4577_143578C.1.pep
MASSLLQQLLSLLLLLLPSPLRLREHLSGNHAVSANNFHPIFLVAGVSCSDLEARLTEEYRPSVPHCGAMKGKGWFGLWKNSSELLSRDYVQCFEEQMSLVYDPAINEYRNLAGVETRVPNFGSTRAFSHKNPLKSDWCLGKLRAALEDMGYRDGDTMFGAPYDFRYAPPSPGXTSEVYSRYFKELMELVEAASERTRKKAVILGHSFGGMVALEFVRNTPPAWRREHIERLVLVAXRSPAGSWSRCATSRPGRTSXLVPATTPLATRAMWRSFESAIVNFPSPAVFGRLQAPLVVTRERNYSASAHDMERFLAAVGSGEAAEPFRRRAVPKMGSFAAPMVPMTYISGVGNRTPLRLVFWGEDFDAAPEVAAYGDGDGKINLISVLAFEKEMRRQPEQKKQFKSIKINKAQHSTIVTDDFALHRVIQEIVEANNQKIPS

SEQ ID NO: 232439 - protein, 143 aa, Zea mays
  unsure (1)..(143): unsure at all Xaa locations
  Clone ID: MRT4577_143579C.1.pep
AFGSALLFLRACVRGSCWVVPSSGCVAGSCCALCACCHSGFVSCVRCSSLPCSVLLCGLPVWGRGAPGCGVSLLPGLWVALRAPVVFGWVFGPLGGACLHPSSVGSPLLGVGGGWSGPFLSXPCFSGRPPRGGLVVPGFGSGP

SEQ ID NO: 232440 - protein, 212 aa, Zea mays
  Clone ID: MRT4577_14357C.1.pep
MAAVQPSVEMTTQQGPPAASYSPARDGGGGRSAEDEEKEKAAAIDNWLPISATRNAKWWYSAFHNVTAMVGAGVLGLPYAMSQLGWGAGITIMLLSWVITLYTLWQMVEMHEMVPGKRFDRYHELGQHAFGERLGLWIVVPQQLVVEVGVNIVYMVTGGTSLQKFHDVLVCGDAACEGGRKIRLTYFIMIFASCHFVLAQLPNFDSISRRVP

SEQ ID NO: 232441 - protein, 79 aa, Zea mays
  unsure (1)..(79): unsure at all Xaa locations
  Clone ID: MRT4577_143580C.1.pep
GAXXFLLEHWXSFVGFVLLAVVFYSCWVVLYLWGHLWVRLLFHHYDLERGRQSFRALRVFRPPVLSTNVTWCAGHLFSF

SEQ ID NO: 232442 - protein, 55 aa, Zea mays
  Clone ID: MRT4577_143581C.1.pep
KRVVPLKGDPPPKNRNGPAEVPHTVVFPHPPDQKGEAPGIPPQGISNRISPLVLF

SEQ ID NO: 232443 - protein, 100 aa, Zea mays
  Clone ID: MRT4577_143582C.1.pep
SYPLKLMLKNAGVNDSVVTEKVLAYETFRYGYNLAQGEYKNFMANGIIPPAKVVRFYLDFSASVGKSFFTFNTVVVDAKVTHQAPSSRAIPMSMGGGSGL

SEQ ID NO: 232444 - protein, 72 aa, Zea mays
  unsure (1)..(72): unsure at all Xaa locations
  Clone ID: MRT4577_143583C.1.pep
LSKLTKLHHENIAXIIIYYADGNHRTLAYDSVPCRTLEHHLLDLPADKKPIDSCTMIKVAHGATHELQYLHE

SEQ ID NO: 232445 - protein, 54 aa, Zea mays
  Clone ID: MRT4577_143584C.1.pep
ADPDELRLRHLLTAASSSIVPSMHIQTMLYKLINLVHWHLPDIIIPRDMITTIT

SEQ ID NO: 232446 - protein, 100 aa, Zea mays
  Clone ID: MRT4577_143585C.1.pep
EPLQEGQWCVEIHRGSSCFFFTLFGPVFFKFFWPPPLPQCFPFGVQGSSSVSVCGRAKAPFMVIRDPFSQIGDVFMWALIDRLGIFPFWWPILFIPFGGG

SEQ ID NO: 232447 - protein, 56 aa, Zea mays
  Clone ID: MRT4577_143586C.1.pep
RKLPSLSLSPHVSLISRTHSSDKRLETRRQESLTRTPLLCSYPPCYLLALPCLCLP

SEQ ID NO: 232448 - protein, 126 aa, Zea mays
  unsure (1)..(126): unsure at all Xaa locations
  Clone ID: MRT4577_143587C.1.pep
MRECIWIHVGQVGMHTRNARXELYCLDHGIXGCWXMPGDKTIAGGVCDQNTFFSVTAGADDDPGTEVVGLEPTEINKVMTVAYSQILDPVHFIKGVEDTCHNIGRGHYDIGLEIDDLKVVRIMELD

SEQ ID NO: 232449 - protein, 40 aa, Zea mays
  Clone ID: MRT4577_143588C.1.pep
LGLNVSEAYVLGILFVVVLSCTIYAELLTVFGSEIFTFQR

SEQ ID NO: 232450 - protein, 102 aa, Zea mays
  Clone ID: MRT4577_143589C.1.pep
MAGLHFVLVPLLAQGHIIPMVDLARLLAGRGARVSVVTTPVNAARNGAVVESARRAGLDVELAEVAFPGPGLGLPEGMENVDMVAEKEHFMPFFQATWKKDA

SEQ ID NO: 232451 - protein, 228 aa, Zea mays
  unsure (1)..(228): unsure at all Xaa locations
  Clone ID: MRT4577_14358C.1.pep
MAAVQPSVEMTTQQGPPAASYSPARDGGGGRSAEDEEKEKAAAIDNWLPISATRNAKWWYSAFHNVTAMVGAGVLGLPYAMSQLGWGAGITIMLLSWVITLYTLWQMVEMHEMVPGKRFDRYHELGQHAFGERLGLWIVVPQQLVVEVGXVNIVYMVTGGTSLPEXFHDVLVCGDPACXAGRKIRLTYFIMXIFASCHFVLAQLPNFDSXISGVSLGAAVMSLSYFTI

SEQ ID NO: 232452 - protein, 64 aa, Zea mays
  unsure (1)..(64): unsure at all Xaa locations
  Clone ID: MRT4577_143590C.1.pep
CNLTVTRMRVQRRNVKXMVLLLDTGYYLCRSEAVFHXTRIVDEIYNASNNXLVRTQTLVMSAIG

SEQ ID NO: 232453 - protein, 67 aa, Zea mays
  Clone ID: MRT4577_143591C.1.pep
TERTRSLYLVISRHLVIAFKCFLCLVTRNSIHYRVAKIRLIMFKVYDLLFVMFVLCSFNLKKRNYYA

SEQ ID NO: 232454 - protein, 167 aa, Zea mays
  Clone ID: MRT4577_143592C.1.pep
MPMPLPAVGTGPASAIAPVTAAAPLRYRPIRLRASPSTVSSPSTSAISSPPLPPSARHSRKHLAGRGHAPARPSKDRVFFLDVNPICFRGSQRSLGAFARWLALFFTHVSLRDPVVAVFDGAGGNEYRRRLLPSYKAHRTRGVGTGADSRVVDVLCECNVPIVQVDG

SEQ ID NO: 232455 - protein, 182 aa, Zea mays
  unsure (1)..(182): unsure at all Xaa locations
  Clone ID: MRT4577_143593C.1.pep
RGPRASSPSARRRRRRRKFRRGPCRSAASPSWPRIHPSWPVPRPRPQPPPPSPSPGRRQRDPXSPPXRRRWGPPPPRXALTRXRSPPPRSHSPRQCRPRGRRPPSWRPDPGKDRGSXPKPPADRHAXAYQPPPPTKTKPRGGRESPRWEWVSNAGARAPSPWWTWGEDDPPTGLPGGVAELD

SEQ ID NO: 232456 - protein, 269 aa, Zea mays
  Clone ID: MRT4577_143594C.1.pep
PFPPVSVAANALPHGPARQRSQFLLPLRFFFLPRRGPRPCPLSSPSPPCLSHPIIVVSLPQSKKGPGGTEPFLRRIAPLALSVSLILTSIRASFGKQRYRINPLDHPWCPGIGRTVPLLPPRPRRRSPFKEPDRQNNGKACILSDTTRILKDLLSQVESLRKENNTLKNESHYVALERNELLDETNMIRGEISDLQNEMRMRLEDNSIWSHDTSRPNLTAPHPATTVFTLQHSPHPQVIATMTLPLQQPAVVEQSYAAPRRELQLFPEA

SEQ ID NO: 232457 - protein, 85 aa, Zea mays
  unsure (1)..(85): unsure at all Xaa locations
  Clone ID: MRT4577_143595C.1.pep
EEVNLYVLSFSQRXRSSILPGLKHLTQXHLSGRGTTLAPGRPRRRSSYSAAGAHRWRPSPSQRKPRYRPPRRRPAQTPXLEQLTP

SEQ ID NO: 232458 - protein, 266 aa, Zea mays
  Clone ID: MRT4577_143596C.1.pep
MVPRDRAHSAAAATAPPTEKPVQGPIQNNKCEKKAPKKVHKSEREKRKRDKQNDLFGELGNMLEPDRQNNGKACILSDTTRILKDLLSQVESLRKENNTLKNESHYVALERNELLDETNMIRGEISDLQNEMRMRLEDNSIWSHDTSRPNLTAPHPATTVFTLQHSPHPQVIATMTLPLQQPAVVEQSYAAPRRELQLFPEAAPTEDTEPPQNEGTSNHVMRPQARSPPAMTTLPGHVYPVLPRVEDEQRSSGTTGSRKEGGVGNR

SEQ ID NO: 232459 - protein, 47 aa, Zea mays
  Clone ID: MRT4577_143597C.1.pep
LSSSLFLAHSVLSVGRDINCFCLPKHPPFIARGVGCNETRGSVQPVP

SEQ ID NO: 232460 - protein, 76 aa, Zea mays
  Clone ID: MRT4577_143598C.1.pep
LQLSTYRNRKVAIVLSIPIRYFVEINNVFYYISGEDTPSRCHPRQRNATLHDVKVVNPKKKKKKKKKKVLCVVTTA

SEQ ID NO: 232461 - protein, 69 aa, Zea mays
  Clone ID: MRT4577_143599C.1.pep
WGRKGSTYRSCCHRPRAPRRDECGVHPADERVDVVLICCVVASRGRDLLVEMEMRESRRSSPASLGAAP

SEQ ID NO: 232462 - protein, 92 aa, Zea mays
  unsure (1)..(92): unsure at all Xaa locations
  Clone ID: MRT4577_14359C.1.pep
LISLQILLIITFSATELILFYILFEATLIPTLIIITRXGKXNRTLNAGIYFLFYTLIGSIPLLIALISIQNSIGTLNFLILSLTTHPPPSTK

SEQ ID NO: 232463 - protein, 122 aa, Zea mays
  Clone ID: MRT4577_1435C.1.pep
TRKKKKKKQKKKKKRKKKKRKKKKRKNKKGKKKKKKKKKKKKKKRRKRKKKKEEEHRKERKRQKKTDGRRTRTPRGRSREGEGSSSRTAAGAATGTAPGSRRRRTESTRHTHHRPLRPPRWR

SEQ ID NO: 232464 - protein, 69 aa, Zea mays
  Clone ID: MRT4577_143600C.1.pep
PCHEPPKVDHTIVAYQKGKGLNAAYLLSTGLEGSKGLLESTKPLPPLYPTRHMRDLYYAEENCCQSFSG

SEQ ID NO: 232465 - protein, 167 aa, Zea mays
  unsure (1)..(167): unsure at all Xaa locations
  Clone ID: MRT4577_143601C.1.pep
MLSVDMLSASAGGRLTHWEPQEPEDVPVQNNYLTTRAYDHMHYIYRTREEXAEYDXSTGTGFQMLSSYLFGXLPMHINFVXSTPPWTGTVFYLSTQNSXHYEIEFXLLRNRTGXPSILQTNVTHRXLRRIQHQQIYLCLHATRGYHSYSDLWNHYMHGGLPALRADP

SEQ ID NO: 232466 - protein, 128 aa, Zea mays
  unsure (1)..(128): unsure at all Xaa locations
  Clone ID: MRT4577_143602C.1.pep
SIYPLLTSPPLRLLPTRGGRGSNLYTQLTTPHCQAHCVTPQGKSKTFPRTPNKTYNTKYYEILRAPNITYQDALKKVYRKAAIKNHPDKSHNPXKLKELAQAYHALSYPHKREIYYPYCEDAPKERMG

SEQ ID NO: 232467 - protein, 255 aa, Zea mays
  unsure (1)..(255): unsure at all Xaa locations
  Clone ID: MRT4577_143603C.1.pep
YNQVYMIDFGLAKKYRDTSTHQHIPYXRENKNLTGTARYASVSTHLGIEQSRRDDMESLGYVLMYFLRGSLPWQGLKAGTKKQKYEKISERKIATSIEALCRGYPSEFQSFFHYCRSLRFEDSPDYQYLKRLFRDLFIREGFQFDYVFDWTILKYQQSQMTSVPPRAIAAAAGQSSGMAPIACNNRLSATEEGRRSGWSDDPTRRQVPPTGINAGSLSKQKSPVRPDVSAPKEAVLSSSTXLXRSGVSSRRPAVS

SEQ ID NO: 232468 - protein, 56 aa, Zea mays
  Clone ID: MRT4577_143604C.1.pep
SSFVSSATSEFFIVIPRNMVQVGFSCVMIAIRTQMIFSLGNAFTRTGNNSSRDACL

SEQ ID NO: 232469 - protein, 178 aa, Zea mays
  Clone ID: MRT4577_143605C.1.pep
IVRSAAGRKDRHSKVCTARGLRDRRVRLAAHTAIRFYDVQDRLGYDRPSKAVDWLIRNAKAAIDELSADREEGQPAAEAADATTTEPAEQVTSTSYGFAIGGVAGSFMPHSVGADDVSGSGSGSGSGNVKSLFPSSSTTSTTPTQDEYRGSPPDLLSRTTSSNQPQELCLTLQSTNNH

SEQ ID NO: 232470 - protein, 123 aa, Zea mays
  Clone ID: MRT4577_143606C.1.pep
RPPPGSAEPAPPPVSFFQSRLMGPRGFRHFLGLSFPQSLTVFLIFFLYLSVPGLMLAPPQLLMVYAVRFIFLFFLPSLFRFQVSICLLFFRIRCFKNRCGLSCFFFWSGVAFLPFLAMVTRIP

SEQ ID NO: 232471 - protein, 51 aa, Zea mays
  Clone ID: MRT4577_143607C.1.pep
PVSFDDCSPVSIKASWVTAVGVQIWGGSDGERNNRMARDDGAEMSPGRPRG

SEQ ID NO: 232472 - protein, 192 aa, Zea mays
  Clone ID: MRT4577_143608C.1.pep
MFLEQAGQEGIAFPTNQAYYMMGMESYALPTNLNGTLNAELQSDQENNTTNLANGNTDTGVTIQSRRATTSPANISLAAGKIKMQVGINRSATSSSVSINQTMRFTDNRGRRLDLKTDDVEHQKKTTNSAISAKQSRAANPEGHSSQGYLKGFKNTFRCSSAGFKAYISFAFFVVGVAAAAELHHHRSCANL

SEQ ID NO: 232473 - protein, 143 aa, Zea mays
  Clone ID: MRT4577_143609C.1.pep
LKQNKETTKKPPQKPQPPPTRPPDSRGGAGKGGRGAEKGIFKPRGKPRNPAKKPGARTQTPKGNPRAPPKTGGGPQGGAGGPAGGRDGGPAQETGKRTGTRKRQRGAQTGRANERGRLEQRGGGEGDRAANQGGEPGQRDLGR

SEQ ID NO: 232474 - protein, 72 aa, Zea mays
  Clone ID: MRT4577_14360C.1.pep
VRSSLVTSTREPFLSCLVLSFDHVSAADEVRSQRSPLVMLPASTSSAHFRNFSAIGSSSCSSSYWMVTASTA

SEQ ID NO: 232475 - protein, 182 aa, Zea mays
  unsure (1)..(182): unsure at all Xaa locations
  Clone ID: MRT4577_143610C.1.pep
LDPAYEPALEPAYEPVXDPAYEPASEPAYEPASEPAYEPAPPPFEPACEPASDPAYEPAPPPFEPACEPAYDPAPPDPAFEPEFEPDQDPEPEPDPDPDAEPEPEPAPDPDPDAEPEPEPEPPTPMPIPVPIPRPPPTPTPRPPPPPRLTPRSFRAMWRLSAARKKAATTAAPRTTAAFFVQ

SEQ ID NO: 232476 - protein, 115 aa, Zea mays
  unsure (1)..(115): unsure at all Xaa locations
  Clone ID: MRT4577_143611C.1.pep
GRPLGFXRPLXVRLLAAPSASLCARCLAPFPRVAXWLAWAALXLXGCWCXVPPCXLFXVPAPPPASAVRPXGPLSXAGAGALPGGPRVRLPAVXRVVLFSPPCCLPFCLCPCSLA

SEQ ID NO: 232477 - protein, 92 aa, Zea mays
  unsure (1)..(92): unsure at all Xaa locations
  Clone ID: MRT4577_143612C.1.pep
QNILKLPSLLLPSVTVEILKSTMVEKLPNDLEGMESSMGKLYILIDEIYKYXVDDVVEGPVAPDNKIGRVIXSDSFASVPKLSPVAFDKLFN

SEQ ID NO: 232478 - protein, 138 aa, Zea mays
  unsure (1)..(138): unsure at all Xaa locations
  Clone ID: MRT4577_143613C.1.pep
TTGDQARCTATVKTQGENPPAKQRKKKKQHKRGDKKHKXKECKQKETKQNKKTRTKPKQAKKDKTPEKKEKKDHPKEQREXRRRRTGTKGKKNREKRGNRGKNRKKTPTPKKAGKXRNDGTRKKNKRQQRFKKNQKMP

SEQ ID NO: 232479 - protein, 56 aa, Zea mays
  Clone ID: MRT4577_143614C.1.pep
SLWYTLHENIHLQILMSIALTVQQPYALLQQPCSMNVYLQRIAAHQLPSQLLPTIN

SEQ ID NO: 232480 - protein, 107 aa, Zea mays
  Clone ID: MRT4577_143615C.1.pep
CWCEKCLLFLFIYPNNVPNYSLEMYSCTENPRCRERVYIQSHKCPLRDVSPMSQTYHRCSILTTALLVKKLRWMRPRLFRVLSNNYAEQIQERLPSHRRLKCFIIEL

SEQ ID NO: 232481 - protein, 83 aa, Zea mays
  unsure (1)..(83): unsure at all Xaa locations
  Clone ID: MRT4577_143616C.1.pep
KAVMNKMYGLIETYKLNGXFRWICSQMNRVRYGELYRVICDTRCAFVQPAVYEAFGLTVVEAMTCGLPTFATCNGGPAEIIVH

SEQ ID NO: 232482 - protein, 100 aa, Zea mays
  unsure (1)..(100): unsure at all Xaa locations
  Clone ID: MRT4577_143617C.1.pep
NSARGFLPRPRSEPRRLRPWRATATSTRTSSSRLRCRSRRRGTSXHQRPPAANKPVVNLVRPPAPTARGXXGRPRGRRSXRRASPAAAETRTKTQMLSCS

SEQ ID NO: 232483 - protein, 75 aa, Zea mays
  unsure (1)..(75): unsure at all Xaa locations
  Clone ID: MRT4577_143618C.1.pep
VISLMTLVYRLLERADXEALMEVDGVLYDKHLLLPXRSSLLLRHISSAPGAGGRIPWVVGAVLFRAGEPARRLER

SEQ ID NO: 232484 - protein, 52 aa, Zea mays
  Clone ID: MRT4577_143619C.1.pep
LIWGPCVPYAAKLIFWGGGLPTVACLRSPQAPLRRSTIGCIRRAPTNAISAL

SEQ ID NO: 232485 - protein, 122 aa, Zea mays
  unsure (1)..(122): unsure at all Xaa locations
  Clone ID: MRT4577_14361C.1.pep
QFMLFTHLSALNHACYLHQHTTSFXSQLSGAYPQQFFQFXNCAALNYNAYLHSYYLFPFSQLGGVSLASLLNQQQLFQFYQHGASIAGTLLXLQQLVPFGQRDLTNPPAFXQHPXIIGGALF

SEQ ID NO: 232486 - protein, 89 aa, Zea mays
  unsure (1)..(89): unsure at all Xaa locations
  Clone ID: MRT4577_143620C.1.pep
VILVTHSKWFIKIHGNHLNRIHHQKFDYNMIYKTAIYCELLHSIQVSPSVIRCTLDEGSXISMMLTPFEVIKKREMPAIYPIRGHINAL

SEQ ID NO: 232487 - protein, 72 aa, Zea mays
  Clone ID: MRT4577_143621C.1.pep
VLIFSPNTTGEGHLFLWCSNPHTNITDVHIFKDTFIFTNTNYVLVAVPQHLFFLGDYNTNLITLYKAPITNL

SEQ ID NO: 232488 - protein, 106 aa, Zea mays
  Clone ID: MRT4577_143622C.1.pep
RRGVRFIYRPYTKKNILHLPLLRRCRHHTHPLSVSHRPVPLTPPPRPQSTHTSHSRTLVALFLVRIVWLHYTLSCTFVIWSFCDRHKHCNIPLVSLIMLWLPDRTT

SEQ ID NO: 232489 - protein, 128 aa, Zea mays
  unsure (1)..(128): unsure at all Xaa locations
  Clone ID: MRT4577_143623C.1.pep
LNKYMXSLGGRVDMRQTKKIIQYIIGSGMDYRTKNNPYLGFIYTSIQXRAIIISQGNTAYHAKEFDDLKLTQICGIIASNEKRHETVYTKIMEKLFEIDPDGTMVALANMMXFDRQDDKLFEHLSMIA

SEQ ID NO: 232490 - protein, 217 aa, Zea mays
  unsure (1)..(217): unsure at all Xaa locations
  Clone ID: MRT4577_143624C.1.pep
LLDSLLNNALTTAVVVGSSSMPLSFTPLACKDVKSLLRSSFADACVRMSKTXATPEPFFTVERPGNGAERELYLSQLAVHSPCYVTVEYPRDYGWHTVELSRELETLALKRXLXAIYSRWAMLLALGXGFPELIARAGSKLRDRVRLKDGSQILTEAGLDYVDNPSLMLLQRILAIWSWHIWLMVAADDYRIARGPLGHVDDPLYDDDRFDAFVLCD

SEQ ID NO: 232491 - protein, 83 aa, Zea mays
  Clone ID: MRT4577_143625C.1.pep
PTSCYPCAEKGHYPNPLTKLLTEPLLTGSQFLSYRHRLYLHAEHPSIKPSNRLSFHYIHEPLAEIPRRRSLNSQRLQNRRVTC

SEQ ID NO: 232492 - protein, 108 aa, Zea mays
  Clone ID: MRT4577_143626C.1.pep
RDPDHDHNHFSHLLLHPRADGQHDQPRHMRCGSCPPCCVHTSISSRFAATPRPPSPSPRGPCSKRRWRSTSRRLSFVSVSAAPPLLPCGPALHATAPNLSYRVIEDLG

SEQ ID NO: 232493 - protein, 148 aa, Zea mays
  Clone ID: MRT4577_143627C.1.pep
GLVGEWPNEFQRLYGTIDLYWIVRDGGLMLLLSQLLLARDGFESCKIQVFCIAEEGTEAEELKADVKKFLYDLRMRAEVIVVTMKSMEAHSEISPNAKKDPQEEYASAQDRIRAYLSQMKEDAQREGRPLMDDGRQVVVNEEKVEKFL

SEQ ID NO: 232494 - protein, 46 aa, Zea mays
  Clone ID: MRT4577_143628C.1.pep
RGQRPNLHLCLSKKKKKKKKKKKKKKKKKKKKRKKKKKKKTLKKFL

SEQ ID NO: 232495 - protein, 549 aa, Zea mays
  Clone ID: MRT4577_143629C.1.pep
MSRLLSRQHLAAVRRSAPFACVSRWLHTPSFATVSPQEVSGSSPAEVQNFVQGSWTASANWNWIVDPLNGDKFIKVAEVQGTEIKPFVESLSKCPKHGLHNPLKAPERYLMYGDISAKAAHMLGQPAVLDFFAKLIQRVSPKSYQQALAEVQVSQKFLENFCGDQVRFLARSFAVPGNHLGQRSNGYRWPYGPVAIITPFNFPLEIPLLQLMGALYMGNKPVLKVDSKVSIVMEQMIRLLHDCGLPAEDMDFINSDGAVMNKLLLEANPKMTLFTGSSRVAEKLAADLKGRVKLEDAGFDWKILGPDVQEVDYVAWVCDQDAYACSGQKCSAQSVLFMHKNWSSSGLLEKMKKLSERRKLEDLTIGPVLTVTTEAMIEHMNNLLKIRGSKVLFGGEPLGNHSIPKIYGAMKPTAVFVPLEEILKSGNFELVTKEIFGPFQVVTEYSEDQLELVLEACERMNAHLTAAVVSNDPLFLQDVLGRSVNGTTYAGIRARTTGAPQNHWFGPAGDPRGAGIGTPEAIKLVWSCHREVIYDVGPVPESWALPSAT

SEQ ID NO: 232496 - protein, 94 aa, Zea mays
  Clone ID: MRT4577_14362C.1.pep
AGLLLFLRAAAPSVACSGRAGATVAAKMLSLLMLLALSTCVACATFFAECSQSPIACLVAACLAWVVAAVWRGPAVGPCGLGRAVGARVVPWWG

SEQ ID NO: 232497 - protein, 64 aa, Zea mays
  Clone ID: MRT4577_143630C.1.pep
GRSAEQSVDGRQLHAHQSTRPISPRRGMAMRMGTSCAPPASTSHKLRASLPLASESAGVAWHLI

SEQ ID NO: 232498 - protein, 174 aa, Zea mays
  Clone ID: MRT4577_143631C.1.pep
MSRLLSRQHLAAVRRSAPFACVSRGLHTPSFATGSPQEVSGSSPAEVQNFVQGSWTASANWNWIVDPLNGDKFIKVAEVQGTEIKPFGESLSKCPKHGLHNPLKAPERYLMYGDISAKAAHMLGQPAVLDFFAKLIQRVSPKSYQQALAEVQVSQKFLENFCGDQVRFLARSFA

SEQ ID NO: 232499 - protein, 197 aa, Zea mays
  unsure (1)..(197): unsure at all Xaa locations
  Clone ID: MRT4577_143632C.1.pep
LFARLHACVHTFQLNRICFLHLHLDAQQCVNADLPLSCICLNHSCSVQGSWTASANWNWIVDPLNGDKFIKVAEVQGTEIKPFVESLSKCPKHGLHNPLKAPERYLMYGDISAKAAHMLGQPAVLDFFAKLIQRVSPKSYQQALAEVQVSQKFLENFCGDQVRFLARSFAVPGNHLGQRSXGYRWAYGPVGIITPFI

SEQ ID NO: 232500 - protein, 58 aa, Zea mays
  Clone ID: MRT4577_143633C.1.pep
VTKFSLVIKGTNQGFKLYSQTFCQILPKLSCNHSIFTMQKGNEKKVQKWFISFTWVTY

SEQ ID NO: 232501 - protein, 81 aa, Zea mays
  Clone ID: MRT4577_143634C.1.pep
FARGFLSTPVRELDREGTPQEQRSSLPAEVAGAGIVRASATHRAGPRDGCGCMGRILAKRAERRAAKLDHAHYTLCVPDCP

SEQ ID NO: 232502 - protein, 284 aa, Zea mays
  Clone ID: MRT4577_143635C.1.pep
EKLAADLKGRVKLEDAGFDWKILGPDVQEVDYVAWVCDQDAYACSGQKCSAQSVLFMHKNGSSSGLLEKMKKLSERRKLEDLTIGPVLTVSQGRSQPFFGGQLTPVTTEAMIEHMNNLLKIRGSKVLFGGEPLANHSIPKIYGAMKPTAVFVPLEEILKSGNFELVTKEIFGPFQVVTEYSEDQLELVLEACERMNAHLTAAVVSNDPLFLQDVLGRSVNGTTYAGIRARTTGAPQNHWFGPAGDPRGAGIGTPEAIKLVWSCHREVIYDVGPVPESWALPSAT

SEQ ID NO: 232503 - protein, 93 aa, Zea mays
  Clone ID: MRT4577_143636C.1.pep
RAFSSRVRICRFLSQHSVSEEVLGVDDASRQVHILDERCPVHSNRLPQHPLYGGGRSQDSATYSRCLCMRSSTASRAIWIGTGRVSAVIGHTS

SEQ ID NO: 232504 - protein, 107 aa, Zea mays
  unsure (1)..(107): unsure at all Xaa locations
  Clone ID: MRT4577_143637C.1.pep
TRPITRTTTKSAANYLVADLVGNASPYADHLTDNLDAIVWEVDNEKIELLMEQLIGQDITEVIAELMDKFAXTHVEXCGGGAAAAPAAGRAACGADAXNEEKVEEKE

SEQ ID NO: 232505 - protein, 37 aa, Zea mays
  Clone ID: MRT4577_143638C.1.pep
LLNQGVHWDVDQAPSTNCGLGSMQASSAIKFQGHNND

SEQ ID NO: 232506 - protein, 48 aa, Zea mays
  Clone ID: MRT4577_143639C.1.pep
PYSYHGTFQYFKGHSKLTHPISYIKPSLLSYSLNLHNFIQIFKQLPSQ

SEQ ID NO: 232507 - protein, 82 aa, Zea mays
  Clone ID: MRT4577_14363C.1.pep
RMQFVTICVVTAEKRQGMQFSAREGKKRDFLVSTGRYQQGFFLLQGAADRFFRASHTVTQVPNRGFFLAAFYQKSLHGTETF

SEQ ID NO: 232508 - protein, 200 aa, Zea mays
  Clone ID: MRT4577_143640C.1.pep
AAFFFFFSFFFFFFFFFFFFYQIEAKIDRKTSYTTTRKGGSHEPTEERETAAPHITTRKSWGGKNEAPTNTKAGKQSLRTKSRTHKHTNDQRATRHLKCKPRLHKGGPKKGMLTLTQRYRRSRAAGTGSPTHKRPSADMSHQKCLKPYIGQELGTQRIKEALPGIGPAQKIGRPPGRNETRAEPREGTLHRERKKKTPSW

SEQ ID NO: 232509 - protein, 37 aa, Zea mays
  Clone ID: MRT4577_143641C.1.pep
YTYTIKNSVIISLFTLDGVPYIAVPQVHIIQLRTYSR

SEQ ID NO: 232510 - protein, 111 aa, Zea mays
  Clone ID: MRT4577_143642C.1.pep
KNKQHFFMIKPFAGAPNFGGTRTHRGHETRLVSIHGTNHTEFFGRPPPPGARGETLKNPDPGGASTTGGLKTPPKTGPPGGGAPLLEIGARRGATILQVFAGKNKTLLGGG

SEQ ID NO: 232511 - protein, 86 aa, Zea mays
  Clone ID: MRT4577_143643C.1.pep
RRDRSGNPGAYHTRPSTRPPRQPPRGPFTDPFVTSEADKDGKHVTGQCKPRGKKLSLCQPSQLCGYMIRTTLPYSLLNNIRTHQKY

SEQ ID NO: 232512 - protein, 106 aa, Zea mays
  unsure (1)..(106): unsure at all Xaa locations
  Clone ID: MRT4577_143644C.1.pep
MTVSRTHRRSFEHRGGREMKEGTANCIDILIAIILPPLSAFLKFDCXVELWLCLLLMFLAYLPGIIYWIYVISLDYPDIAVYRYKAKELGDQAAKAMYMNVLLRSL

SEQ ID NO: 232513 - protein, 306 aa, Zea mays
  Clone ID: MRT4577_143645C.1.pep
MASLQVTPTSAFTQWNELKFEGLYLFHKYQGSGANQTQVISNKAPIGIGATVVNNWTVCDGPGPNAKLVARAQGLHIQAGNWVNSFSLVFVDQRFSGSTLEVTGIVVESGEWAIVGGTGQFAMANGVISKKLHGKTSEGDIIQLTIHAFCPVLGPTKRSATKVGPWGGSGGSPMDITAEPQRLKSITVATGIAVTSIAFSYVDSAGQTQSAGRWGGSGGETEPVIQLGDSEVLTELSGTIGNVDGLTVITSIKFVTSLKTYGPFGAWGDGSDTPFAIPVQQGSAIVGFFARAGIYLDALGVYVRSL

SEQ ID NO: 232514 - protein, 141 aa, Zea mays
  Clone ID: MRT4577_143646C.1.pep
RRLTRRRITPIRLLKRPIFICNNSRRLKTVKIKPMIDRKRHANFDINILRILIKRSNTTMSKLTPHTITINRITSLSRRPQSSPIRHQPLMPRELTKLNGSFLPYTGYSRILYDFEGNIPRRSRRSPTYELTISLSIRTST

SEQ ID NO: 232515 - protein, 306 aa, Zea mays
  Clone ID: MRT4577_143647C.1.pep
MASLQVTPTSAFTEWNELKFEGLYLFHTPLGSGANQARVIDNKAPIGIGATVVNNWTVYDGPGPNAKLVARAQGLHIQAGNWVNSFSLVFVDQRFSGSTLEVTGIVVESGEWAIVGGTGQFAMANGVIFKKFHEQRSEGNIIQLTIHAFCPVLGPTKRLATKVGPWGGSGGSPVDITAEPQRLKSITVATGIAVTSIAFSYVDSAGQTQSAGRWGGSGGETEPVIQLGDSEVLTELSGTIGNVDGHTVITSIKFVTSLKTYGPFGAWGDGSDTPFAVPVQQGSAIVGFFARAGIYLDAVGVYVRSL

SEQ ID NO: 232516 - protein, 306 aa, Zea mays
  Clone ID: MRT4577_143648C.1.pep
MASLQVTPTSAFTQWNELKFEGLYLFHKSLGSGANQTQVISNKAPIGIGATVVNNWTVCDGPGPNAKLVARAQGLHIQAGNWVNSFSLVFVDQRFSGSTLEVTGIVVESGEWAIVGGTGQFAMANGVISKKLHEQRSEGNIIQLTIHAFCPVLGPTKRSATKVGPWGGSGGSPMDITAEPQRLKSITVATGIAVTSIAFSYVDSAGQTQSAGRWGGSGGETEPVIQLGDSEVLTELSGTIGNVDGHTVITSIKFVTSLKTYGPFGAWGDGSDTPFAIPVQQGSAIVGFFARAGVYLDALGVYVRSL

SEQ ID NO: 232517 - protein, 158 aa, Zea mays
  unsure (1)..(158): unsure at all Xaa locations
  Clone ID: MRT4577_143649C.1.pep
KERPPGGQGPRAAPERRGPPKRGRAATTASTKAAKGGRQPADRADGAEGDRKGHGEXGGGRAKEXTEATTKAARNGRRNRATGPGTKTXTAPHRADADEGAAKEKKRPAGPGAGAXAGGAARPAXERAXAENAAGXKQTRNKNPPNNARATTTATQTR

SEQ ID NO: 232518 - protein, 37 aa, Zea mays
  Clone ID: MRT4577_14364C.1.pep
TRLSSSMFGLPIAESTGSMKVCCLLSVLVEAYMVVEL

SEQ ID NO: 232519 - protein, 151 aa, Zea mays
  Clone ID: MRT4577_143650C.1.pep
NSARGGAGGSTAVFRGRYEILSISATFLAPSTPAAVARATVRDLSVSLAGPHGQVVGGAVVGPLVFFFTDLTFHRLPLEDDAPASVSGTAGADERRGHGRHQPPEQHDAGGSSHPQAMAPATQPVPLFARESHELWPAAPASAQRPRSPYQ

SEQ ID NO: 232520 - protein, 56 aa, Zea mays
  unsure (1)..(56): unsure at all Xaa locations
  Clone ID: MRT4577_143651C.1.pep
GISISYLACTVKQPPSTTSSLQLVSRVCHVAVDLGLQISCSDDLACTVKQXPQQKR

SEQ ID NO: 232521 - protein, 175 aa, Zea mays
  unsure (1)..(175): unsure at all Xaa locations
  Clone ID: MRT4577_143652C.1.pep
ENPKKRARPGRQKNEKKKPKGRGKGSGPRGGXRGRPPPKGPAQGAAKRPPHKANPLKKKPDGPFGKSTRGGNGEGKPGDKRGESQGVPKAGPPQSDGQAPWKKNXPQKGKRGPPQKEGQKGPPRGRGNGKKTPPXGPPARGHPQACSPFFLFFFFFFFFFFFFFFFFFFFFFFFF

SEQ ID NO: 232522 - protein, 102 aa, Zea mays
  Clone ID: MRT4577_143653C.1.pep
LFPFGRVGLAYFKKQKFFPFNQWAPLNPPVYLHQQILLPFSQLVAPTRVSFLTQQQVFPFSHRFGANPPPLLQIHQLLPFGHLVLTNPAAPSHQPIMGGAPF

SEQ ID NO: 232523 - protein, 103 aa, Zea mays
  unsure (1)..(103): unsure at all Xaa locations
  Clone ID: MRT4577_143654C.1.pep
YCTVXIDALGHXHFIRNMITGTSQADCAVLIIDSTTGGFEAGIYKDGQTREHALLAFTLGVKQMIGWCNKMDATTPKDWQVRDDEIVKEECGYLGKXEYDGDA

SEQ ID NO: 232524 - protein, 331 aa, Zea mays
  unsure (1)..(331): unsure at all Xaa locations
  Clone ID: MRT4577_143655C.1.pep
INDGCPGDNSTAHGSYAFLVRWFQRFPQHKAKEFYIAGESYAGHYVPQLADVIVEGNKKASEENHINFKGILIGNAYMDGDTDLVGIFDSAWHHAIISDELYGDVQKNCDFSLVELSPECSADVDQYTALYRVIDIYSLYTDRCELGYPDFNYSVSPKTARGASRXADAWTLLEVPMGYDPCTQTYATEYFNRVDVQKALHANVTGVPYPYSLCRNSINDAWKDSDLTVVPVVKKLVEAGLRIWIFSGDTDARIPTTSTRYTLKKLGLPIKEDWSPWFHRKQVGGWTVVYDGLTFVTVRGAGHMVPSTQPQQALELFKHFLANTNLPSQPF

SEQ ID NO: 232525 - protein, 73 aa, Zea mays
  Clone ID: MRT4577_143656C.1.pep
MTPTLMRSRSQILRRRSYSSEYGQPEREVDMLGAADSIGQTLSLLMQLNLLVSSLKLYDIAGTPGVPVDVSKI

SEQ ID NO: 232526 - protein, 29 aa, Zea mays
  Clone ID: MRT4577_143657C.1.pep
CLYSFRPDYLLLNESILYPLFLADAWADS

SEQ ID NO: 232527 - protein, 91 aa, Zea mays
  unsure (1)..(91): unsure at all Xaa locations
  Clone ID: MRT4577_143658C.1.pep
ISGEQAVSASGKWLDGIRKWYYNAAGFNKLGLMRDDTIYEDEDVKEAIRRLPENLYNDRMFRIKRALDLNLKHQILPKEQWXKYEEENFYL

SEQ ID NO: 232528 - protein, 61 aa, Zea mays
  Clone ID: MRT4577_143659C.1.pep
EEPIRHMGHAIQHIGILIKLHPEEHSWTDHSTSVSKLYLFGCMAHCLANFATCNATFTFVL

SEQ ID NO: 232529 - protein, 55 aa, Zea mays
  unsure (1)..(55): unsure at all Xaa locations
  Clone ID: MRT4577_14365C.1.pep
DDXDHPLALPXXLTHDRTHLSCSSPTSXVTSFSPCNHPGRXDHDYXVIDTDXTXT

SEQ ID NO: 232530 - protein, 66 aa, Zea mays
  Clone ID: MRT4577_143660C.1.pep
MLQLMMALAFSAAPLTLYVPPVRSLSLFVEAMETVCRECAPYSQGAVSRFRLGLSRIFAGLARALR

SEQ ID NO: 232531 - protein, 54 aa, Zea mays
  Clone ID: MRT4577_143661C.1.pep
LINFFGKKSDFIAQSEGIHNMNWWNNLQDKDEIVYKTQHAPQDSNPYCFVIGNR

SEQ ID NO: 232532 - protein, 111 aa, Zea mays
  Clone ID: MRT4577_143662C.1.pep
ARVDIYSSIPYHQNLTTRPLRALIFSGDQDMIVPYTSTFKWIKNKLNIVPIVDWRPWFVNSQVAGYVTDYSNGSYNLTFTTIKGAGHVAPEYKPRESFAMFQRWIAFRPLS

SEQ ID NO: 232533 - protein, 84 aa, Zea mays
  Clone ID: MRT4577_143663C.1.pep
VACRDVSSEFGSRLGHRSFTTLRSAPTGGGPTLPGGAHALRNCEPPCPSDSDAQGCPTLPLLPEHSPQRPHGHPGGVLPTHAHP

SEQ ID NO: 232534 - protein, 165 aa, Zea mays
  unsure (1)..(165): unsure at all Xaa locations
  Clone ID: MRT4577_143664C.1.pep
SWFASLYAFYRGXSMRYKIAPINNAXSPLVVALKPXNSLYAGVRTIDINGTWEYPDYKGAEVFMTPNEGIHELSIPYYSSYPVTLTTFNTSGSDVLDARNGFNRVIARFHQDTNAYVYRAAGDDFSFGFLLGPPIVNHAXHSVRLVRVSYHXEFXSCENYASDMR

SEQ ID NO: 232535 - protein, 111 aa, Zea mays
  Clone ID: MRT4577_143665C.1.pep
HTATHLIFLELHRRVAYHFIQEEEDTTPEGWKEAPPLPATHHQKVTYAPRTKPKRTTTQGCSGFQPWLPAEQLMEGRVCGHTLELTLLCYFLTHQGNTRTKTLKTHTFLCL

SEQ ID NO: 232536 - protein, 51 aa, Zea mays
  unsure (1)..(51): unsure at all Xaa locations
  Clone ID: MRT4577_143666C.1.pep
FKKKKKKKKKKKKKKKKKKKKKKRKKKEKRKKKRKKKKKKKKKKERKKXKX

SEQ ID NO: 232537 - protein, 113 aa, Zea mays
  unsure (1)..(113): unsure at all Xaa locations
  Clone ID: MRT4577_143667C.1.pep
MPVKKINSNSLAFSPVRKDNTFLRLQPETMRSVSXSCQEDTKHHVXKSVKKQLALPEHAEVCGESKFSELGADVLDTLEIVMXSLEEHCDIMVEESSAHTIATVEEAADLIDK

SEQ ID NO: 232538 - protein, 61 aa, Zea mays
  Clone ID: MRT4577_143668C.1.pep
VTSIIHPCFQAPTNQITSSLIKNYSPSTNKNQQPHFYLLLILTLTIASNLFSLHKETILQI

SEQ ID NO: 232539 - protein, 92 aa, Zea mays
  Clone ID: MRT4577_143669C.1.pep
TTNFHSGVITHYAGCTAGFLHHHTISPTMCVVNSGHDQGGSAELSPCCCKKLYQLREAHSNRVAFFLGTAPWDTLHCLLFLRHPRVCHSGTS

SEQ ID NO: 232540 - protein, 123 aa, Zea mays
  Clone ID: MRT4577_14366C.1.pep
MGAAAGAAGADPPPSEAAATPAREDQQHYVAAATGGVSGESCDAAAPPAGGGGADDAVEPVVIDASAVAGGPGEEEQGECGFCLFMKGGGCKDEFVAWEKCVEEAEAAGPSVDVVELCQDATA

SEQ ID NO: 232541 - protein, 136 aa, Zea mays
  unsure (1)..(136): unsure at all Xaa locations
  Clone ID: MRT4577_143670C.1.pep
MVGIVSGVSXAVNNXGYGYGGPLIGKLLLSIWVIVHLEQFIKGLMGRQTRTPTIVVLWSIPLAPILLLVWARCDPFIPKGKGPILKPCESRDELTQPPHLLHVRTPPCVWSSRHLWARPIMIGFFFLNFVQDLVVE

SEQ ID NO: 232542 - protein, 35 aa, Zea mays
  Clone ID: MRT4577_143671C.1.pep
KKKKKKKKKKKKKKKKPKKNKKKKKKKKKKKKSLY

SEQ ID NO: 232543 - protein, 62 aa, Zea mays
  Clone ID: MRT4577_143672C.1.pep
TFPSLITLLYQRNLTNIWQADKTFTNQFTYQSTTSENIPNFTQEKPYHTDKIQNFINIPHNS

SEQ ID NO: 232544 - protein, 50 aa, Zea mays
  Clone ID: MRT4577_143673C.1.pep
VRKKKKKKKKKKKKKKKKKKKKKKKKKKKKKKKKKKKKKKKKKKKGGAPF

SEQ ID NO: 232545 - protein, 62 aa, Zea mays
  Clone ID: MRT4577_143674C.1.pep
SRATAPARATLTAATPDSKETEDATLLPATRSIVSPYSYGDGAHLKHNLSRRVDRRVHGRVT

SEQ ID NO: 232546 - protein, 71 aa, Zea mays
  Clone ID: MRT4577_143675C.1.pep
LLRGNSRAWGFPFLPPRLGAFLGHRVPPQLRVMAPLYAFLRGCFPFSLGHMPLGILSDMAIHVGFFFFHSS

SEQ ID NO: 232547 - protein, 91 aa, Zea mays
  Clone ID: MRT4577_143676C.1.pep
NINIDQTKVHPWRHKVNWEMPPRSNRTPHCVDPLEPPVLLLGLEIPGTRMIPQILVSALRNPPSAELPTMPPHGPAVIHVLLPYSRRCLLN

SEQ ID NO: 232548 - protein, 70 aa, Zea mays
  Clone ID: MRT4577_143677C.1.pep
ITIKMHRTDLQVLFKSFNSRRKNLQTENTLNKVLYSVTVYGHLPNFHPGSCDLACSSDQLLVHEAQATAT

SEQ ID NO: 232549 - protein, 47 aa, Zea mays
  Clone ID: MRT4577_143678C.1.pep
ASSMGKLCCSQEDDEPAVRPPGAARHRRSRPAAAHAVHANPTHALDL

SEQ ID NO: 232550 - protein, 74 aa, Zea mays
  Clone ID: MRT4577_143679C.1.pep
LPLATWTTHLILLGTRSELEVSDITFTKTREAHAPSVTYLYVAKLLTQKVLEQIVPAGGRIWWSSLAALKTRPG

SEQ ID NO: 232551 - protein, 36 aa, Zea mays
  Clone ID: MRT4577_14367C.1.pep
GVCAVPRWACRPFRGNILVTSDGRSKLARFCKSASG

SEQ ID NO: 232552 - protein, 64 aa, Zea mays
  Clone ID: MRT4577_143680C.1.pep
MMEPQVVDLEDDSINFWASLGVSPHVDQMPLHSVHIVDHQAQSALAAAAAAIQPQSVCRDLFPV

SEQ ID NO: 232553 - protein, 590 aa, Zea mays
  Clone ID: MRT4577_143681C.1.pep
MAMAMARPCAFLLFFLVLFSYDGSGPGSSRRTRRSGVAQATQRVFLYPQAPKVSSIVSSKYRTAYHFQPPKNWINDPNGPMYYNGIYHQFYQYNPNGSLWGNIVWAHSVSTDLVNWIRLAPAIERTTPSDINGCWTGSATILKSGRPAIIYTGADTEKRQVQNVAFPKNLSDPYLREWVKPHDNPVIQPVGRGLNPGQFRDPTTGWIGPDGLWRIAVGAEVDGHSAALLYESEDFVRWDRVDHPLYSSNASAMWECPDFFAAMPGENSGLDMSAAVPDGAKHVLKMSLDGSDKYMVGVYDLKGDAFVPDTVIEDRRLWSRIDYGNYYASKSFFDSKKGRRVIWGWTNETDSSSDDVAKGWAGIHAIPRTIWLDKDSKQLLQWPVEEIESLRGKQVRHQGLELRKGDLFEIKEIDTLQADVEIDFELTSIGSADPFDPSWLLDIEKQCREAGASAHGPFGLVVLASESMEEHTSVHFRVYYRSQEKHMVLMCADLRKSSLRPELYTPAYGGFFELDLEKEKTVVSLRTLIDRSAVESFGGGGRVCIMARVYPAALVDDGGTRMYAFNNGTSTVRVPRLEAWSMRRAQVNKG

SEQ ID NO: 232554 - protein, 136 aa, Zea mays
  Clone ID: MRT4577_143682C.1.pep
PQGFFFLWKTIPLPLFFKPKINFPGFLTRINHGKCAAFFPPQQDFPYPLNAAGVPSQLWFPPLGQGPWVLPSPFSPPCKGFFKGLGWLFPPLSSKGLISNSNLLGAPGVFWELWAKSPLPPVWGFFPAPNFFFLNL

SEQ ID NO: 232555 - protein, 116 aa, Zea mays
  unsure (1)..(116): unsure at all Xaa locations
  Clone ID: MRT4577_143684C.1.pep
RTDDTCVVXFGELXSKRVHRFIMIKMDDEHKDTDEHHTSDSTIKNDDFTNSLPDNDCGYSIYDFDFDNEDDAQNSKIFYILWNTFSAEEESKMLYVRCXRKLKIELHEIQEELQVT

SEQ ID NO: 232556 - protein, 525 aa, Zea mays
  unsure (1)..(525): unsure at all Xaa locations
  Clone ID: MRT4577_143685C.1.pep
MNSAFSEDILAGKLAKLNNTQQCIETLSHWCIYHRKNAEQIVQTWDKQFHSFGKEQKIPFLYLANDILQNSKRNGTEFVEEFWKVLPGALKDVSENGDDRGKKVASRLVDIWQERRVFGSRAGGIKDVMLGAAPLPVLDMTKKRSRSSAIRIVKRDSRSVKLRLGIGGTAERIISALHTVLSEQADEDDDLEKCKTSMRHVGKMEKDVDSACSKAEDPRREVLCTELKDEEANMKKCIEKLKAVEKNRAAIVFELKEALQEQESELEKVRTQLQLKQXVHEASNMQRRLKNEPTIPLPRSASLVEPGKVVSNGQVKEQHKTAAAILADKIAASSNSQQILQSALSKFAAEEAKNSSETRSDKRQKAEQLSQVPSVANAAAFVPMPQVVATTAQQQPQAILVQQAPMQSQATASQPQYNIYQAPPQQFVPQPGGVMMGMPYNMSSMTPPPPPPPQMMSLGRPSPSAPQPQMAVMPQTQPPAPPMLQQQMPMNLGPQMQFTLQPPGVPPFRPMQPPPGMQYFHPQSQ

SEQ ID NO: 232557 - protein, 71 aa, Zea mays
  Clone ID: MRT4577_143686C.1.pep
HGRADPHRERTARDRQERGAHGEDAHQSEERGGAGPEHPREGAKASDQQEEQPHKAPGDGTDHSGGGHREP

SEQ ID NO: 232558 - protein, 45 aa, Zea mays
  Clone ID: MRT4577_143687C.1.pep
FQKPKLCIICLGIYATLQLRSKSCSGFFLMCMQKCISCISKIQSY

SEQ ID NO: 232559 - protein, 99 aa, Zea mays
  Clone ID: MRT4577_143688C.1.pep
TSPYFWNRTLFDQFARHFGNCDCGNFRKRRGRRGLLRFAQKVGINGYRYRNALSSDHNGAYRGRWVIMLASRRTSVPGTQKRMERRRVGHEHHAQFSFL

SEQ ID NO: 232560 - protein, 134 aa, Zea mays
  unsure (1)..(134): unsure at all Xaa locations
  Clone ID: MRT4577_143689C.1.pep
MRSGGNTINLFYLKRRKNHSVRWGLLLVASLSLLSLGARPTRIHTGGGCGXPPTAVHLLAAGHLSPTVHLPPAVHVSPTVHLSAAVHLPPTVHVPAPVDVSSAPCHYPTQPARPESYTQPHPCPCQQTDSFTCQ

SEQ ID NO: 232561 - protein, 60 aa, Zea mays
  Clone ID: MRT4577_14368C.1.pep
RLGPSRPAGLLLLTLLIFLVSAEQHLFTGLHMTAHKHYYTDLELKNMRLTRFLFAILLTY

SEQ ID NO: 232562 - protein, 178 aa, Zea mays
  Clone ID: MRT4577_143690C.1.pep
YHRDCVLGKPSTHSSRRKIYARPNDETALRLMNESASLMMEQYPDIVFGYGFSNEYSFVFHEKSELYQRRESLILSSCSSYFTSLYMTKWKEFFPYTELMQTPHFEADALCYPKLKIICEYLSWRQAECHAGNQYNTCFWMLVKSGKSEKEAHEILKGTLSKDKNELLFQQFQMNYNN

SEQ ID NO: 232563 - protein, 71 aa, Zea mays
  Clone ID: MRT4577_143691C.1.pep
NQRQLYPFMQKKKKKKKKKKKKKKKKKKKKKKKRKKKQKHLEPLRDGLFAALGIFLLIVCSLRNFCSHYNN

SEQ ID NO: 232564 - protein, 376 aa, Zea mays
  Clone ID: MRT4577_143692C.1.pep
YAYSLFVPSGHINNQYNTCFWMLVKSGKSEQEAQLALKGTFAKDKNELLAKQFQINYDDELAMFRKGSSVYREKVETIVKIDDYGEPIKRPRLKVTVAHVDIIGTEFWENHPHILREGKFMHGFVKKFGINHIFSPCNWIIVRIIACQFDQFSTIHSFDKPNDETALRLMNESASLMMEQYPDIVFGYGFSNEYSFVFHEKSELYQRRESLILSSCSSYFTSLYMTKWKEFFPYTELMQTPHFEADALCYPKLKIICEYLSWRQAECHAGNQYNTCFWMLVKSGKSEKEAHEILKGTLSKDKNELLFQQFQMNYNNEPAMFRKGSCVYRRKVEELAGAEDGGNGTSRERWHVKVDHVDLGPGFWRKHPWLMTNCTQ

SEQ ID NO: 232565 - protein, 79 aa, Zea mays
  Clone ID: MRT4577_143693C.1.pep
YTNRPTKYCQNHFALQPTIKDLGPCKKTKSESLINHFYPKVKFAEHFEQVKKLLQKTTFQNTDRIQFTLKRLFETHLLQ

SEQ ID NO: 232566 - protein, 123 aa, Zea mays
  unsure (1)..(123): unsure at all Xaa locations
  Clone ID: MRT4577_143694C.1.pep
MSTYCGEYKDELIKNADYIGTPGMGILAADESIGTVGRRLSSINVENVEENRRALRELLLXCPGALQYXSGGSLFQETLYQKTKDGXPFVGVLNEGGVLPGFKVDKGTTEVGGSEQDTTTQGH

SEQ ID NO: 232567 - protein, 42 aa, Zea mays
  Clone ID: MRT4577_143695C.1.pep
KVYCVTTFSNYNKHSYNPGACIFCDDTCKRTVKHTESQNALA

SEQ ID NO: 232568 - protein, 247 aa, Zea mays
  unsure (1)..(247): unsure at all Xaa locations
  Clone ID: MRT4577_143696C.1.pep
MRFSRVVPLLPLASALVITDTEVFQNLERAGNSVLDNAQNVLDDAFGKAYDAYDKVKDEAKNVYSKVHHAGCDVDAWLQGSSFDDDVIDFEEDHDHPHPXHRGPPRRPPHHGPPPHHGKPHHPPHDDKPNRTVYELINESKYTTKLAKLINEYDDLVKVLNGTKANYTVFAPTDEAFEKIPDHGKKPFKGSLEKHSFLYHVSDDFYPSWPCGFTVTPSPLSTSPRKNLGHKQRLDRSRHTQGPAITS

SEQ ID NO: 232569 - protein, 79 aa, Zea mays
  Clone ID: MRT4577_143697C.1.pep
APSHYTRTHKSASTPSRRHRRRTPNQTRRAPTTFSCSPPTTYMTSEDLTTIIRTNTPITTIINLANDANLTPQSVKAPS

SEQ ID NO: 232570 - protein, 105 aa, Zea mays
  Clone ID: MRT4577_143698C.1.pep
GESVHRYPPPSTISGVSSRYKPWVIRYWSFSFQYLSDPRCAVSLSSSLSGMAWRRPGWLSAPGFQWPLCQSCLQFFLPPQQPSRTNPTPVASASVYNGMPSTSSR

SEQ ID NO: 232571 - protein, 66 aa, Zea mays
  Clone ID: MRT4577_143699C.1.pep
MTQGLSGISIGRLFVFVYIKPTERKIRCTGAPAIHRILLLCFFKCTRELHLRPALYQSTLCDKKYL

SEQ ID NO: 232572 - protein, 151 aa, Zea mays
  unsure (1)..(151): unsure at all Xaa locations
  Clone ID: MRT4577_14369C.1.pep
GGPWQGKRARVGGSAHTTTPPQGKATGAGPRPPLPVGLKLGKGKGGPARPFKDSTPRKRGKGGQGPIRVRRAQGQGQPQAARMERGPAKGSGVHRKKKGKANAPAEGGETGGPEERSTAPPFFFFFLFFFPFLLVFLFFFFFFFFFFFFFX

SEQ ID NO: 232573 - protein, 45 aa, Zea mays
  Clone ID: MRT4577_1436C.1.pep
LCRDCRLISGTQHPTVAISIRSPTNPNPVEPHEPETEPYVEDKPT

SEQ ID NO: 232574 - protein, 55 aa, Zea mays
  Clone ID: MRT4577_143700C.1.pep
ETTPHKKSYTKGTFFSLPTRVNAGGSSFSPFLLYIRALSGMNLISCNLKGGKIDF

SEQ ID NO: 232575 - protein, 50 aa, Zea mays
  Clone ID: MRT4577_143701C.1.pep
CPKKKKKKKKKKKKKKKKKKKKKKRRTKKRNQIYKTKNKKKGLPFWGIQI

SEQ ID NO: 232576 - protein, 41 aa, Zea mays
  Clone ID: MRT4577_143702C.1.pep
CVKVQPRGGSRSPLWSQGRVISIVARIYRVREFKRFYTDST

SEQ ID NO: 232577 - protein, 179 aa, Zea mays
  unsure (1)..(179): unsure at all Xaa locations
  Clone ID: MRT4577_143703C.1.pep
VIATEERLTVTEGRTICSCWSASPSLFWHMPCGISFQSRSLCPPFPLLRLSARRIGPGGGGDPRHAVADGRHLSVVSVMGASVRAFVASPRRHLVVVVSESIFSRCPSLPSLPRGVSRPRASVACAWLCQSAVSPCRPASSCGGRASSQGSRGWSSFRISRGKLYLSRPLENLSRXASR

SEQ ID NO: 232578 - protein, 124 aa, Zea mays
  Clone ID: MRT4577_143704C.1.pep
TWSAQLTIFPTLLGPRTVDCSLPCGPAAPASHTFTAARDPRVITHLRQNRIRAAIPTSSACTGSLSPDSNLLSPRRPQYYTCADPQFHPRPSKSIQRARHRWEAPQGGTVDAPCPDPRIRPHWS

SEQ ID NO: 232579 - protein, 67 aa, Zea mays
  Clone ID: MRT4577_143705C.1.pep
MLKKVGAFFKDPIPETWVTVFGVFELNAWAHAWGGPVWVNQPQVPHWNDVCLKRCQREGLKLSSNLM

SEQ ID NO: 232580 - protein, 145 aa, Zea mays
  unsure (1)..(145): unsure at all Xaa locations
  Clone ID: MRT4577_143706C.1.pep
LLPPPPXAPPPKAVPLSPPXTAAPPLSPPSPSPPSTATSAPPPPPPRPPPPSPLSPSRITSSTPAASPGRNPSRRPGPSPISGPPPTPTPSAPSSRASASPAPTSPPSSPPTRSSSAPRWTGPSPPASPSSAISGYPLPRSRASS

SEQ ID NO: 232581 - protein, 70 aa, Zea mays
  Clone ID: MRT4577_143707C.1.pep
LKGGKSSGGRMEVLFLRSGVPPTPGSSNRTLVKAPFFLIMFAPVFFGPFSASRGYHRQKEFFSFQNPFFP

SEQ ID NO: 232582 - protein, 84 aa, Zea mays
  unsure (1)..(84): unsure at all Xaa locations
  Clone ID: MRT4577_143708C.1.pep
LGGGPNFIFASHNTQLYMEKRTVFITTRAGNFCTPSLLGSCILGGGGLTHXXPTIXXFLLPIPPHPXPXXISXPXLSPSFSNLL

SEQ ID NO: 232583 - protein, 38 aa, Zea mays
  Clone ID: MRT4577_143709C.1.pep
YYIAVKRSGGSKLYVKRGLSISMVRLVRRCVMTFKHKV

SEQ ID NO: 232584 - protein, 169 aa, Zea mays
  unsure (1)..(169): unsure at all Xaa locations
  Clone ID: MRT4577_14370C.1.pep
LQPCTFPPGLPSPPLHSLSESWRGKERRGGGGGAGGLTRTPRGGGGXGXEXXXAARGHETXXAXGAXRNPXKAAXGKRPAGTXPAAAAPAXEAEDDXDXXXXGDETEEDKKAXEERAAAAKAAGKKKERGERRAPRGAKPGDDETDTKKPXEXAPHGPRGEGRTRGRHK

SEQ ID NO: 232585 - protein, 138 aa, Zea mays
  Clone ID: MRT4577_143710C.1.pep
APRSIPQSPPHLRLRATTSSPHAPPPWRAPQLLLLPLLLRPISVPNLFSPGGAGGRFRRSWLPRRHSWSGGFVIWPRAASAVAETRRAFSARPLDNPWWVSAPARPTTPWGSVAVVVRRRERAVSGAASTESRTGLFW

SEQ ID NO: 232586 - protein, 138 aa, Zea mays
  Clone ID: MRT4577_143711C.1.pep
FGGPPLFFFSFISSLFSAPDFYFFQFFFFFFFFNLLMRCRIGRGPARSSCAWRGGCDGCASAEGGGRDPWRWRRGDCPRVGQRRGGRGDPPAERSNGGAESGLPSFFFFFFFFLTRALCVFCRWLTSLAVLVRVGRAG

SEQ ID NO: 232587 - protein, 119 aa, Zea mays
  Clone ID: MRT4577_143712C.1.pep
RTCQRRRGAGRTVGRRPPSLLSPRPLSLLWLRLRLRCLVVVRCGGRTRSGYIYWWCGVTHTQRGQGQHAVRACVRACGGGGGPQLPDNCVLAIHPASLGKILITAAAWMDLKGGRKEEG

SEQ ID NO: 232588 - protein, 40 aa, Zea mays
  Clone ID: MRT4577_143713C.1.pep
VEMCRHHIQPQWTLFVHVNGTPNKDNFAMCPKEEAAIQTC

SEQ ID NO: 232589 - protein, 83 aa, Zea mays
  unsure (1)..(83): unsure at all Xaa locations
  Clone ID: MRT4577_143714C.1.pep
DFPRFIRAAAVFETHIARWIGAMTKXEQAQDPXKLFTRLTLNHMPTHPISLNDYRGSSREGISLNNAXLWGGGGPEQPGQHKS

SEQ ID NO: 232590 - protein, 79 aa, Zea mays
  Clone ID: MRT4577_143715C.1.pep
VDITGTREIRMIPFGAGRRICPGLNVATLHLEFFVANLVREFEWRQLEGETVDVEGEKAEFTVVMAKPLRARLVPRASD

SEQ ID NO: 232591 - protein, 109 aa, Zea mays
  unsure (1)..(109): unsure at all Xaa locations
  Clone ID: MRT4577_143716C.1.pep
PAGIPSTSLPYXPEIMSSQITDESLREAIKERLEAAHVEVTDMSGGCGQAFNSVIVSSQFQGLNSLKRHRLVNAALKEEIAIIHAWTAKCQTPEEYAKTKEAADAPAQA

SEQ ID NO: 232592 - protein, 81 aa, Zea mays
  Clone ID: MRT4577_143717C.1.pep
PFYYSSTLQIAPRVHPILVGLSLNAQSPVCVCALKPSRSFLALHSICACWLRWDPLACPSRVSCASSCSECVSCSYRLCHL

SEQ ID NO: 232593 - protein, 139 aa, Zea mays
  unsure (1)..(139): unsure at all Xaa locations
  Clone ID: MRT4577_143718C.1.pep
MCEVHYSSLPAGDAAHDARWVQRTECIPPQRTGGNLFSLEIENEIGNDLADCTCGXMTHLILKLTTGMVSINENYHSDVQVRTDAFLTSIALEGPSAYMRXDIDMTDDLSEHIISSMFGCYLMIAITDGRLEMGTCDSI

SEQ ID NO: 232594 - protein, 128 aa, Zea mays
  Clone ID: MRT4577_143719C.1.pep
GPPVCPQATRGRFPPGTPPSKGPGTSTTTPRSGTLTPFSSRPSGWWITPSWTPEGLFCAGLDGGRRRRRLFLGLGEGRGRHCPLEFFPYPGLFKCGGQGKRKRFESVPDYSPRSIKCQNSIYIYPRDN

SEQ ID NO: 232595 - protein, 95 aa, Zea mays
  unsure (1)..(95): unsure at all Xaa locations
  Clone ID: MRT4577_14371C.1.pep
FFXXXFYLFFHXKFIFGLVKISKKQSYTPPLFLTGTTTTKKTPSFKNALHAIKNFLNPTRCFNLYQLTLNNQFNIFYIPTLSNNPISQNSKKTFG

SEQ ID NO: 232596 - protein, 103 aa, Zea mays
  Clone ID: MRT4577_143720C.1.pep
MAKAGATAVLVTVLVVLAATAEMAHGVCNLSSAGIRACQPAAAIRNPTDQPSSECCAALAGADLACLCRYKNAAGVWVRFYRIDINRAMGLPGKCGLAMPANC

SEQ ID NO: 232597 - protein, 112 aa, Zea mays
  Clone ID: MRT4577_143721C.1.pep
DGQRERLNVHSDAKDAQAHTPLGRLPPTVPHRSAHRRNPHTCYGCELVAPSPKTELTSLCGPPATASTRTDGQISITSLPVCDALRICDATSALVGWLSDTRVVATCGECNG

SEQ ID NO: 232598 - protein, 103 aa, Zea mays
  Clone ID: MRT4577_143722C.1.pep
MAKAGATAVLVTVLVVLAASAEMAHGVCNLSSAGIRACQPAAAIRNPTDQPSSECCAALAGADLACLCRYKNAAGVWVRFYRIDINRAMALPGKCGLAMPANC

SEQ ID NO: 232599 - protein, 121 aa, Zea mays
  Clone ID: MRT4577_143723C.1.pep
MFHDLTDVLVPLFITARRFAGDVHLLVGDAQPWWLDKFRPLLGGLSRHAVVDMGRGSSSGGVLCYPHVILGLEFHKEMSVDAARTAGGGEYSMADFTLLARRSYGLPRDKAIRVHGGVRPR

SEQ ID NO: 232600 - protein, 61 aa, Zea mays
  Clone ID: MRT4577_143724C.1.pep
DRRPEKTSERLRARISCILQLSRDSHCLFVQRSLTYCYTRQPSIATELTYIISGASARDGL

SEQ ID NO: 232601 - protein, 96 aa, Zea mays
  unsure (1)..(96): unsure at all Xaa locations
  Clone ID: MRT4577_143725C.1.pep
LYLYDPLTHHIMSATIGGTCGEPKKTIXYMAHTFVVTASFLIVFHAKCLXTDDTVAINKFLHYKLYKNMXLLIMRSIYHYNSLSFNHYLLSTTINI

SEQ ID NO: 232602 - protein, 122 aa, Zea mays
  unsure (1)..(122): unsure at all Xaa locations
  Clone ID: MRT4577_143726C.1.pep
PRPTDPATYTPSPSXSTPKPTPPTYTPXPKPXTPKPTPXTYTPXPKPHTPAPKPTTDVTVPKPXAPKPPTTSPFPSSTPKPPXSNSTPKSRPPSXTTSTRRATPQPAPILLERCLHTTLCSL

SEQ ID NO: 232603 - protein, 32 aa, Zea mays
  Clone ID: MRT4577_143727C.1.pep
STNNLSPRKINSEVQLSRLNLQSAVFNWELSS

SEQ ID NO: 232604 - protein, 72 aa, Zea mays
  unsure (1)..(72): unsure at all Xaa locations
  Clone ID: MRT4577_143728C.1.pep
KLNLVXHDGLKPSLTFPLFXXGDTIQHFGVIXVXLLICIYVYILRILLCYFFFCNVFFWFLVFFLCFFFFVF

SEQ ID NO: 232605 - protein, 81 aa, Zea mays
  Clone ID: MRT4577_143729C.1.pep
HLQKDLHILLPDLLNLCKTTLIHIHNNKLLIHLHSKHHLNLNQLIIYKINFKAFKLDVQHISLLIFNDYYSNLDDVLYILN

SEQ ID NO: 232606 - protein, 108 aa, Zea mays
  Clone ID: MRT4577_14372C.1.pep
RVVLSISSSQVWGSATPASGRESIISDLMFIVVVITSLLHPTPYYFACSTQTTIAELGADAGSALGVETASSREPSPSTVVGLIIQSGMPDVAVTAGEFCRQGEEEVT

SEQ ID NO: 232607 - protein, 58 aa, Zea mays
  Clone ID: MRT4577_143730C.1.pep
LLRLGMAVQEAESAPICCPALPRRRSSATQLLPTWQRRTDITTPSTSSLSCQRIPPGR

SEQ ID NO: 232608 - protein, 71 aa, Zea mays
  Clone ID: MRT4577_143731C.1.pep
QWIYSCTSRAKMRAQLGLPETPFWDCLVHFFCELCALCQQYKGLKAFGFDPVLGWDRNAIMLPPSAQGMGL

SEQ ID NO: 232609 - protein, 156 aa, Zea mays
  unsure (1)..(156): unsure at all Xaa locations
  Clone ID: MRT4577_143732C.1.pep
KNKRGKPGKPKGPPPPXGRNKKGGGSPLGRXQGLKGQKTHRGNPGPPARGKNSRGGREKKTPDPPKNFQKPKWEGKRAGXDPKKKITPGTPKTPAYPDKKGSWGPFRGPXPGGKQTPRPQRGHPKQXGGPNGPLKPKKALKRGGGAPGGGPPTGGA

SEQ ID NO: 232610 - protein, 142 aa, Zea mays
  unsure (1)..(142): unsure at all Xaa locations
  Clone ID: MRT4577_143733C.1.pep
CLFPPCASLSQQATPPPHHRSPDHRPSTSSSSSPAHRPSLLWCRAFKQEAGDGDPAEADAWKRXKGPLYKLKAAIXGLTGSRSAAAEVYGGEYQYQRVVEKAEEIFFSNLQWLHICASTLENKCLQSRQVIGGSSIAGVQED

SEQ ID NO: 232611 - protein, 106 aa, Zea mays
  Clone ID: MRT4577_143734C.1.pep
GIFFGALSRGPLRFGPNLGPPLKFLGLPTPPFGARGSGSFLYFSPLPEREREKKKRVFVSPVKTKGCFFCGPVFKPSFTCGPMWGFTKGPGESRAPCFRKKRGPSG

SEQ ID NO: 232612 - protein, 61 aa, Zea mays
  Clone ID: MRT4577_143735C.1.pep
GYFVWFFLATFEWFSGPPERFGFFFFFPNNGSKPYFKRSPNWFKKFNSSKKPPPQKIFSPP

SEQ ID NO: 232613 - protein, 161 aa, Zea mays
  Clone ID: MRT4577_143736C.1.pep
SSTAPSISISSSGNMLPWCVFVSMVYSLPSSANGNTVVGVDDQPRDVLPDGFGRRVAVQTLGVPRVPVEDLPVEVEDVSDLPQRLDGEDSVAASAGCDDEEEPPRRSRSGRRWSLDTCRLSSAWPSSSARIFFNRSRSSSASIAGGRRTYDGADRSITHGR

SEQ ID NO: 232614 - protein, 57 aa, Zea mays
  Clone ID: MRT4577_143737C.1.pep
PTYHLIHTDFLLPHLIQSPTIHPHIPNHIYYPTIHYTSPLNSLITLLLIPLTFTSFH

SEQ ID NO: 232615 - protein, 160 aa, Zea mays
  Clone ID: MRT4577_143738C.1.pep
KNDGVKKKKGLTTNKKGQTPTRPNKETQGAGGRGKTGPGGRPGNAGPGPAGGPAGRKGGGRRGGGKKGQRGPRGERGKRPQFNPKKEPEGKRGKTGGAKEGKKPKERGGAQSPAPNRENRRAKRIKERGNPGGEGGGVKGAKGGLLLTRETGNSGKALTG

SEQ ID NO: 232616 - protein, 68 aa, Zea mays
  Clone ID: MRT4577_143739C.1.pep
LPDSFSWERIHIATYAALCVPTARASTTYLGNATTGDEVYEQSLVKLVARDTTRLDQLIGFKMLNHVQ

SEQ ID NO: 232617 - protein, 53 aa, Zea mays
  Clone ID: MRT4577_14373C.1.pep
DGPAMTSKSRILSADMSYLSEELYPYDSPVRFIICVANRAVLSLMLMSVWTVS

SEQ ID NO: 232618 - protein, 96 aa, Zea mays
  Clone ID: MRT4577_143740C.1.pep
EQASNMAWSWLADELASLPPLLAAAVAAAGGGARPHHMDDDAASTWTGSDDFFHRGYSPEDLTHTTGRRLSGVGASTEASALQENCAVRVKETCTT

SEQ ID NO: 232619 - protein, 60 aa, Zea mays
  Clone ID: MRT4577_143741C.1.pep
ASPPPTVFGNIFFKKKKKSSPPQKKKKKKKKKKKKKKKKKKKKNPKKKKKKKNPPPARPF

SEQ ID NO: 232620 - protein, 111 aa, Zea mays
  Clone ID: MRT4577_143742C.1.pep
VWHFIFGLQVPVCESIISLCPVCTHHLLRQNQVSVATVVWAAMETLSKSDVRKASTFASRWDIVIFLNAVFLLNLDWVKLCRHPVRQVVHNDLQAIFGRLSLFAVNRNLFF

SEQ ID NO: 232621 - protein, 48 aa, Zea mays
  Clone ID: MRT4577_143743C.1.pep
SITLASERDSHLSVKLLPSVSTLVREHRHTCILLQHTMESIPHDHTHL

SEQ ID NO: 232622 - protein, 242 aa, Zea mays
  unsure (1)..(242): unsure at all Xaa locations
  Clone ID: MRT4577_143744C.1.pep
KNGFVQDLDDESGGMRGSGGRGTKRSRTAEVHNLSERRRRDRINEKMRALQELIPNCNKIDKASMLDEAIEYLNTLQLLGKMKAVRNRRCTPPMVLPRAMQXLXINSLTQAHRLCTERDHGXGDFQVSTTXAVSEHPLPXPWKSLTSFMIRQPDVSLEKGPINQDGFGGGMFRLSELRCSIVLXFVDGTGLPVRPNLAPQVPAVMANMVQEQQQGVATQQQQSLNNEAQQKANTGDPQILQK

SEQ ID NO: 232623 - protein, 236 aa, Zea mays
  unsure (1)..(236): unsure at all Xaa locations
  Clone ID: MRT4577_143745C.1.pep
PCLSXRHQTLLTGFFNHSVQVIIXGRSNHNVSQVSEGVLSGDENHTEDTPTRHALSPYLEYMAYLYQRMDPLPEQERFEINYRDFLQSPLQPLMDNLEAQTYETFEKDTVKYTQYQRAIAKALVDKVSEDEVSTTRTVLMVVGAGRGPLVRASLQAAEETGRKLKVYAVEKNPNAVITLHSLIKLEGWESMVTIISSDMRCWDAPEKADILVSELLGSFGDNELSPECLDGAQRFL

SEQ ID NO: 232624 - protein, 59 aa, Zea mays
  unsure (1)..(59): unsure at all Xaa locations
  Clone ID: MRT4577_143746C.1.pep
MDFLQEQSVQTTVAVAVAVADVAAXAAFLLLRSTKPKGCLDPENFKKFKLVEKKQISHN

SEQ ID NO: 232625 - protein, 104 aa, Zea mays
  unsure (1)..(104): unsure at all Xaa locations
  Clone ID: MRT4577_143747C.1.pep
GFPPGGPPKYLWRSHHLLPRPHRSRSLNPTPLGAHTITPHGYSLSKDIGPGRYLSNNIFSPRXYHWAVYLYPHYNNAEDNYNYFSAFDTLATDCINVLTLFELT

SEQ ID NO: 232626 - protein, 70 aa, Zea mays
  unsure (1)..(70): unsure at all Xaa locations
  Clone ID: MRT4577_143748C.1.pep
ILPAADATGCSMYPDVETXVTSMVKTTVLDVPTTKASAERLKAVTDGGXCNCNTCKCGTSCXXCSCCSCN

SEQ ID NO: 232627 - protein, 134 aa, Zea mays
  unsure (1)..(134): unsure at all Xaa locations
  Clone ID: MRT4577_143749C.1.pep
HVEADQTLLXLTEYXGGQLTPFKKSAPIPEVNNEPSKVDCSDNEHXLTGRXGNTVLIAFYAPRCGHCKKLAPILDEGITTFQIDQXVLIANMDATANDDTKELDIQGYPTLYFHTLYGKGTYYDSGTTVEDILD

SEQ ID NO: 232628 - protein, 123 aa, Zea mays
  Clone ID: MRT4577_14374C.1.pep
HVHRKPEGDRRGTNLWALLPQHAARLPHQLMQNRYRYRSELAASWPWWWLRPPIGRRRSTCTRMCRSGRNHMIACSMYVYIWYMWACFASPWSEYPIQLVEYLLPDAYTVSDPESVFPMSLLY

SEQ ID NO: 232629 - protein, 68 aa, Zea mays
  Clone ID: MRT4577_143750C.1.pep
RNQEVARRSRLESPAGREAPSGTRPGGPGQAPGARGTRAPTAPSARRRRRGRCRPSLRPPRRRRRDPP

SEQ ID NO: 232630 - protein, 131 aa, Zea mays
  unsure (1)..(131): unsure at all Xaa locations
  Clone ID: MRT4577_143751C.1.pep
LVSARTTVXAIDIFKLMSSTYILAHRGAFYLRHLFENIKESLKNTETQVDNKVLTMNLLDELSSARFINKELIITIYRDDVFTYSEDALSANLSLIQKMLAELVDHSLISXQHGALALRVLQDHQLLGGST

SEQ ID NO: 232631 - protein, 184 aa, Zea mays
  Clone ID: MRT4577_143752C.1.pep
LSLTLSLVPSSSFSRVRRALSVSGGGDWAASAAALRQDPRLHLPYARRRASPQVEWEAEMSRGRSPEPLDFFIWTVQDVGLWLEEINLGSYRQAFEENGVNGEYLESLSVFTTEQILRFIRRCHMKWGDFITLCKELRRIKVACLKGEQEVRRPWWAPSCLSVVFTRVARHNRQSRVVSLKLEA

SEQ ID NO: 232632 - protein, 77 aa, Zea mays
  Clone ID: MRT4577_143753C.1.pep
TTIFFCSANKKRGIFLPDRDTPWGCFPKHGENTESRLQEAPQKEASGQLEPGPQDLTIVLTLAPKLIETIFFPETWN

SEQ ID NO: 232633 - protein, 159 aa, Zea mays
  Clone ID: MRT4577_143754C.1.pep
GILLLTLSLCPSSSFSRVRRALSVSGGGDWAASAAALRQDPRLHLPYARRRASPQVGWEAEMSRGRSPEPLDFFIWTVQDVGLWLEEINLGSYRQAFEENGVNGEYLESLSVFTTEQILRFIRRCHMKWGDFITLCKELRRIKATREKRWHCWEQQSVD

SEQ ID NO: 232634 - protein, 102 aa, Zea mays
  unsure (1)..(102): unsure at all Xaa locations
  Clone ID: MRT4577_143755C.1.pep
GPGPAATATIGLVGVCWSCFRGGWGAARCLRVGWVCVCCLCLRCLLWALLRAWFVXSVLAGGWLPLCVSACAGWCVPRVLACVVCVSFGVGGLLGCALVWWL

SEQ ID NO: 232635 - protein, 198 aa, Zea mays
  Clone ID: MRT4577_143756C.1.pep
RELVAFPFLLWFPRHTLTLSLGPSSSFSRVRRALSVSGGGDWAASAAALRQDPRLHIPYARRRASPQVGWEAEMSRGRSPEPLDFFIWTVQDVGLWLEEINLGSYRQAFEENGVNGEYLESLSVFTTEQILRFIRRCHMKWGDFITLCKELRRIKVACLKGEQEVRRPWWAPSCLSVVFTRVARHNRQSRVVSLKLEA

SEQ ID NO: 232636 - protein, 63 aa, Zea mays
  Clone ID: MRT4577_143757C.1.pep
KNTCLIILLHLTDPSHICSPVACLKGEQEVRRPWWAPSCLSVVFTRVARHNRQSRVVSLKLEA

SEQ ID NO: 232637 - protein, 42 aa, Zea mays
  Clone ID: MRT4577_143758C.1.pep
CDYHNQLDHKNVHPCSSLCYGFCFFLKFSLQMAINYLHRRCT

SEQ ID NO: 232638 - protein, 205 aa, Zea mays
  Clone ID: MRT4577_143759C.1.pep
PTHSLPRSLLVLLPRPRSRGGLSLTLSLGPSSSFSRVRRALSVSGGGDWAASAAALRQDPRLHLPYARRRASPQVGWEAEMSRGRSPEPLDFFIWTVQDVGLWLEEINLGSYRQAFEENGVNGEYLESLSVFTTEQILRFIRRCHMKWGDFITLCKELRRIKVACLKGEQEVRRPWWAPSCLSVVFTRVARHNRQSRVVSLKLEA

SEQ ID NO: 232639 - protein, 541 aa, Zea mays
  unsure (1)..(541): unsure at all Xaa locations
  Clone ID: MRT4577_14375C.1.pep
QXQXKTVSISGSIGSXVSDLTLEDSYASSGHVFSSFNIVAIDSGVPRRPPASKRAKDQESYPKLVELTLNNFDYSSKLLFEVSFGKLGTPGHEEFDVPSDYSYNSPLSESDMVATVHSFRGGFRSALRDLQRFHIFLITLYQKLDGLLKIFFNLMYKCSNEYAREDAGTSDSPLCSVEPQGDSNDTDVPRHLRKPSRTLSRESLDQSSPCRDSFITRHFKGNGDSSRGLRLTMKLRDFNKYAKVKTFEVWIDKLSIINCLXRRFLVVFFTLIDXSHYLVAGSQIAKWLHAFFYVRRAASAAVXTADPVRIXIIHLIICVVCLSFNLFKLDYIXEGKQTGQVYHVILLVIEHIXQIDSELSKEIEQWNDMLRTEVVKLCQDNNFQTGFFEGTDNSTAVDSYELKVNLNVLEAWNMLKVHRRAHPNDEFAKVLLDLDKKLHGKISMEWXRKRPSTAMKVCPIXCGKNAGLSSSSLKLHLQKAHKKISSGKTGSVDSAXAILIEEIQKAIEAIKAGWSGSHSHTPTHKALSHVEGFSSSILHSH

SEQ ID NO: 232640 - protein, 196 aa, Zea mays
  Clone ID: MRT4577_143760C.1.pep
MAPAAKKPPLKSSSSHNSAAGDAAGKTIEEMYQKKTQLEHILLRPDTYVGSVQNHTQTLWVYEDGAMVNRPVSYVPGLYKIFDEILVNAADNKQRDPSMDSLKVDIDVEGCCISIYNNGDGVPVEIHQEEGVYVPELIFGHLLTSSNYDDNERKTTGGRNGYGAKLANIFSTEFVIETADGHRLKRYRQVFSENMG

SEQ ID NO: 232641 - protein, 63 aa, Zea mays
  Clone ID: MRT4577_143761C.1.pep
ERCIHPPRPPQLAHDGEELIGQSIDHDGGPAVSGCWATNGCCSSRIAGGRFAGFFWRQRLMKS

SEQ ID NO: 232642 - protein, 254 aa, Zea mays
  Clone ID: MRT4577_143762C.1.pep
RRGWEGLLDPLDSDLRRELLRYGDFVQAAYQAFHSLPTASARHRGLMLPDRSYRPTRSLFATSALSMPPWAKRPNTPEWLTQQSNWVGYVAVCESEREVARMGRRDIAIVLRGTATCLEWAENLRASLVPLDGGDSSDGADTPPPEPEPKVARGFLSLYKTAGDKVRSLSEEVMDEVRRLMDKYKGEELSITVVGHSLGAALALLVADEVATSIPDAPPVAVVSFGGPKVGNDAFVDRLASSGKVNVLRIVNAG

SEQ ID NO: 232643 - protein, 88 aa, Zea mays
  Clone ID: MRT4577_143763C.1.pep
HASASIKAFDWLKCIYWDRQTNSIPDVQAELRLRLHEIARFLKENNSQESKPGSKRKRSEKLVSKAMKYVRRLYYACPSEVVSVLLDL

SEQ ID NO: 232644 - protein, 48 aa, Zea mays
  Clone ID: MRT4577_143764C.1.pep
GRRLTTSSMIASAISLISSSPFGGGPEDALEGSEGGQDTATLLLQIAN

SEQ ID NO: 232645 - protein, 45 aa, Zea mays
  Clone ID: MRT4577_143765C.1.pep
LLDPKVNFYTTSTFRNRFYIEINTLGGRKEYPTRGTPPFFLNRGL

SEQ ID NO: 232646 - protein, 60 aa, Zea mays
  Clone ID: MRT4577_143766C.1.pep
GVIVPVLCSWLRCIIGMIFVVKAGGCWSQLFSLKTRLFVWLLGRENKNVSGRERLKRLCG

SEQ ID NO: 232647 - protein, 46 aa, Zea mays
  Clone ID: MRT4577_143767C.1.pep
EVTFAEKKKKLEPCPLPGLSGGKCPSHMARGCSLRSGFRARSRGLS

SEQ ID NO: 232648 - protein, 114 aa, Zea mays
  Clone ID: MRT4577_143768C.1.pep
RSSSGPPKFFFFLGLKQGFPPVLGTSAVQRPKDLAWGGSSSKSLSNLKPFVGSPRPLWGYVRKDALFKTGGRSLVGWGPKLFPMGGHFPRGRFGVKLGPLFFFLGGGNFPPPLG

SEQ ID NO: 232649 - protein, 38 aa, Zea mays
  Clone ID: MRT4577_143769C.1.pep
GQWWDWDWDRNWTEAPAFRILINTRGDWVLYDVNPARP

SEQ ID NO: 232650 - protein, 132 aa, Zea mays
  unsure (1)..(132): unsure at all Xaa locations
  Clone ID: MRT4577_14376C.1.pep
MEDICIVDSGTTNTILRETKYFHTIMKNVGSITTIAGSDSCVIGSGKATITLPMGTQIEIKEALLYPESTRTLLSFRDIRANGFHVETTEENGKEYLYIIKYGEYDKEXIEKFPSLESGLYYTKISAPAAYT

SEQ ID NO: 232651 - protein, 86 aa, Zea mays
  Clone ID: MRT4577_143770C.1.pep
RLTTHDIRALQSHHIRENSVMLDPMPTLETNSTRDKEFRPDRPKLNTTTINNELLIPRFRSGTYVPYLEYKGHPNCAHPLGLHLHV

SEQ ID NO: 232652 - protein, 61 aa, Zea mays
  Clone ID: MRT4577_143771C.1.pep
GGMRTQSLTCPLRGCAKLLIYFWRGQACVLVSRYGLYVLTFACVYYPHKASRCKIPVPASP

SEQ ID NO: 232653 - protein, 50 aa, Zea mays
  Clone ID: MRT4577_143772C.1.pep
YLKQRKIIDVIILLINACWLFYSSILSISHDSLNTQNSSLERRTNAGRPG

SEQ ID NO: 232654 - protein, 64 aa, Zea mays
  Clone ID: MRT4577_143773C.1.pep
NAIRGRIPAQVADLAGLQLFNVSYNKMCGVVPTGGSMAKFDAYSYQHNKCLCGTPLPACGHRYY

SEQ ID NO: 232655 - protein, 82 aa, Zea mays
  Clone ID: MRT4577_143774C.1.pep
HASAHASAQLSPHDTKPGPGAREGTNNGLRELHRRRAQTRRGNASSRRLIIGGETVELGRTRGRPCRSARTVCPSSPSSVIT

SEQ ID NO: 232656 - protein, 85 aa, Zea mays
  Clone ID: MRT4577_143775C.1.pep
EPHFIHTAKRTIYFFTPKTIANKKFNVPNIYYPKRICTQPSAVQTILSDNTSMAYPSTIASYSFSVTSDQSLVISLPTHNISHSA

SEQ ID NO: 232657 - protein, 38 aa, Zea mays
  Clone ID: MRT4577_143776C.1.pep
STIIDRLRGLITNPAWPGRQTPRQLARRAGASLPCRCC

SEQ ID NO: 232658 - protein, 85 aa, Zea mays
  Clone ID: MRT4577_143777C.1.pep
EEQCGIVIVNMKKEPPKFVLKRTLIWSVGVHTKFFSSCYLLSSSYSCFHINDMLIYILLLFVYFPLISMHVKFLCYFYGQLLLPQ

SEQ ID NO: 232659 - protein, 76 aa, Zea mays
  Clone ID: MRT4577_143778C.1.pep
LGEDLLKNELLGAPHRYVHCVIKRKACNLLYVKLNGFTLIDGSFYDRTGGGTTVHGEIRSVLLLSFGLNVNTMFCP

SEQ ID NO: 232660 - protein, 81 aa, Zea mays
  Clone ID: MRT4577_143779C.1.pep
IPVWRGAMKAQSQGVATQTSLVQQICDFLDAQDGHWAVLEQTVSNDVTPIDPDEVLDNHRVGELIATFTSAANAAFSSTTY

SEQ ID NO: 232661 - protein, 356 aa, Zea mays
  unsure (1)..(356): unsure at all Xaa locations
  Clone ID: MRT4577_14377C.1.pep
DTDVPRXLRKPSRTLSRESLDQSSPCRDSFITRHFKGNGDSSRGLRLTMKLRDFNKYAKIDSELSKEIEQWNDMLRTEVVKLCQDNNFQTGFFEGTDNSTVVDAYELKVRLEHILERISLISDAASTERPSQITDYLYIGGALAARSTHTLKHLGITHILCLCANEIGQSESQKPDLFEYRNFSINDDDNADIGDLFQDGSDFISYVDHLRGKVLVHCFEGKSRSATVVLAYLMLRKNCTLLEAWNMLKKVHRRAHPNDGFAKILLDLDKKLHGKISMEWQHKRPAMKVCPICGKNAGLSSSSLKLHLQKAHKKISSGSVDSAMTLEIQKALEAIKAGWGGSDSPVHKSQSHIERF

SEQ ID NO: 232662 - protein, 79 aa, Zea mays
  Clone ID: MRT4577_143780C.1.pep
KHVGPGVLSMANFGPPPNGSLFFFCPVKTPWLATRPVVFGPVLKGMDVVKHLYSQKTTGSDFPKHPCRIVFCGGVPLAT

SEQ ID NO: 232663 - protein, 84 aa, Zea mays
  unsure (1)..(84): unsure at all Xaa locations
  Clone ID: MRT4577_143781C.1.pep
LHYKWPYPSETKKMALAETTGLAPKQITNWFINHRKRHWKXXSKYMPFAMMEGGFHVAQGTAALYMDRPAPPFMADGGMYRLGS

SEQ ID NO: 232664 - protein, 270 aa, Zea mays
  Clone ID: MRT4577_143782C.1.pep
MESDTERDVHNSSRSTNPSGHHQRPLRLVKSTAFKREERRKRKDRKRQRHLVDELVRWQPLGAPTPLPAATGSVSPSQAQPDTPWPCDPPPPPDPAEADSWSWGPPAVPSPTPTQPTVDVAGAVPLHPQVVAVRSCRAFFESQFEEDEEEENEGSAARFFSELLGSDAALRGFYEAERDKGHFLCLVCEGSGARLGKRFAGCAALVQHAGSIARTKWRLAHRAFADSVGLLLGWGAGRIAPPPVPPPADSDSDGSFDQVGSSQMVEMELS

SEQ ID NO: 232665 - protein, 136 aa, Zea mays
  Clone ID: MRT4577_143783C.1.pep
MALYFIIDLCLLGFFYELRPWPRAQLHTRAPLVRSCPYRSGCHRVRYGKKLLTGGVISTVYDDVGKSSITGIRGRAKLGQGGGMHCIYLPRVGLGETDMTTLGQGSLGWDGDSPKLTFYPRLRGQPSSLRVGQEDD

SEQ ID NO: 232666 - protein, 58 aa, Zea mays
  Clone ID: MRT4577_143784C.1.pep
GGLYRYPGKSNTPDHVSADHCIWISSDHCLNGFINSLKVPSLCKKFLLMRGVQRDLFT

SEQ ID NO: 232667 - protein, 38 aa, Zea mays
  Clone ID: MRT4577_143785C.1.pep
HCGHNILRWGPYLNAKLYIYLIVCHDYHSLIYCQLQRN

SEQ ID NO: 232668 - protein, 136 aa, Zea mays
  unsure (1)..(136): unsure at all Xaa locations
  Clone ID: MRT4577_143786C.1.pep
MGMVLMPEGRNXRAHRIGPKXSDDVYLKLLVKLYRFLFRXRTKINFTAVILNRFFMSKTNCTPMSMRRLVKFMESKEKNIADIVGTLTDYKRIQEVPAVKVTALLLTDTARARIVNAAVECLTFDQLALRSPLGEN

SEQ ID NO: 232669 - protein, 61 aa, Zea mays
  Clone ID: MRT4577_143787C.1.pep
MVGTKRGGVKSIISCWSKYFTPISLVVGGVQSISYQGRFITRLCFIFLRKNNPTTCTKTLL

SEQ ID NO: 232670 - protein, 180 aa, Zea mays
  unsure (1)..(180): unsure at all Xaa locations
  Clone ID: MRT4577_143788C.1.pep
MTHPRPDHEPSGEVSLALALSTDSSGSAGAPAAKRARRRGAAAATSGEGEFVCRTCSRAFTSFQALGGHRTSHLRXATASSSASAPGRSGSSTSIISRPAAAAAAAAXGGGGDREPQAQHECHVCGLGFEMGQALGGHMRRHREETTTGAADAWVWRADDALQRARGGAADPPVLLELFA

SEQ ID NO: 232671 - protein, 203 aa, Zea mays
  Clone ID: MRT4577_143789C.1.pep
MGAALLASWPWDNLGFYKYVLYGPLVGKAVASRAWEAASPDRWILLLLLLFGLRALTYQLWSSFSNMLFATRRRRVVRDGVDFDQIDKEWDWYHAIHHTKKEANFCLFMPLFDLLGGTIDRRSWDMQRKMSAGVDEVPDFVFLAHVVDVMQSLHVPFVMRTFASTPFSVQLFLLPMWPFAFLVMLAMWVWSKTFVISCYNLRG

SEQ ID NO: 232672 - protein, 251 aa, Zea mays
  unsure (1)..(251): unsure at all Xaa locations
  Clone ID: MRT4577_14378C.1.pep
MPPPAAPATNRVALYLRRARLIDSLRVRLRSSSPSSPPALPPDDPVVALHAIRAAPTASCALSLFRALPSQPPPPLPLYQALAARLSSLAALSDLRAHLASFPLPAPPLARLRLLAAAGDRASALEAFGSLPATPRRPAEAHNVVIELHXGGGDHAAAVEAFRRMVREGALPNARTYTVVIAHLAAAGFVDQALEVFRILPSLRVRRTTRQYNVLAEALASXGRFDQLRWLVREMAAVDGVMPGPQMRAAI

SEQ ID NO: 232673 - protein, 72 aa, Zea mays
  Clone ID: MRT4577_143790C.1.pep
GVSQDPGGFPRPKVKGIKNGPPPLFSLLGFFGRAFVPGKGPPENLPGPIPDPVNKNAWAFPPHFFPPKLKRA

SEQ ID NO: 232674 - protein, 319 aa, Zea mays
  Clone ID: MRT4577_143791C.1.pep
MGAALLASWPWDNLGFYKYVLYGPLVGKAVASRAWEAASPDRWILLLLLLFGLRALTYQLWSSFSNMLFATRRRRVVRDGVDFDQIDKEWDWDNFLILHALMAAAALCAFPSLRHLPAWDGRGFAVALVAHAAATEPLSYLAHRALHGSSGRLYARYHSLHHSSRVPQPFTAGLATPLEHVALGALMSLPLAAARAAGCASVALAFAYVLAFDSLRAMGHCNVEVVPASLFRAIPALRYVLYTPTYVPRDSPHQEGGQLLSLHAAVRSAGWHNRPTLVGHAEEDERRYTRRLVLCPWSMTGHQTTYIGLTHFSFNNLTS

SEQ ID NO: 232675 - protein, 69 aa, Zea mays
  unsure (1)..(69): unsure at all Xaa locations
  Clone ID: MRT4577_143792C.1.pep
RRTHGIIAVSYLTDQESFNTVKQRLNDIRRCARENGNKLXVENNCDPTDNRVNAYNAGADVTDYIGIPS

SEQ ID NO: 232676 - protein, 240 aa, Zea mays
  unsure (1)..(240): unsure at all Xaa locations
  Clone ID: MRT4577_143793C.1.pep
DLEAGHPAFSSTTTAPPKYPXNAKEPKDIQEVPSHAAAAGPAKTAVDARVCVPAPHXPVSEQVATVKEHLASLLSLKQQXPQPPAVDGPSTHGNDESRGVVGERAPPEVPDVSHLLRRHXYTLKDLESVTGMFVDVNVIAEGVYGXIVYRGXLENGTYVAVNNLLCNTVVNASEXFTALRNEADRFECLHKNPVSVLGYCADGNHMMLEYDYDDYVNLXKWLRDYADAMNPLVCDVRLQI

SEQ ID NO: 232677 - protein, 84 aa, Zea mays
  Clone ID: MRT4577_143794C.1.pep
PHPIGSLHAKVKHPPPCAPSPWWSVSHGSFKLPMRAASSGALSPYVGCQRYLACSCHQSLSVLCLITGRVCCVPFVPTPMANHE

SEQ ID NO: 232678 - protein, 104 aa, Zea mays
  unsure (1)..(104): unsure at all Xaa locations
  Clone ID: MRT4577_143795C.1.pep
TDRAYDIGDEYGRGRFGVVRRCVSRARGDAFAVRSEDRSLLGDYLDRALAELEPXLARVAGGEGHGNPHVLHVRAGYQDDAWTHTVMVLCSXPDLXLTWIPLQC

SEQ ID NO: 232679 - protein, 93 aa, Zea mays
  Clone ID: MRT4577_143796C.1.pep
SALFFVCVSCFLPWFRLVGSFSLFPVGFSSLLLFSWRLSARSPCVLLGDSSVGPVLVGCCWPCLLCVWSCLFCCQCLFCLRFSLFWPPPPGRP

SEQ ID NO: 232680 - protein, 77 aa, Zea mays
  unsure (1)..(77): unsure at all Xaa locations
  Clone ID: MRT4577_143797C.1.pep
PTRSTRSSTRSVLKRYAEEXNVEPSPHDEEWTNSEAIGKFLAAFGESPKAFSAHRRPTSHLFLHKGLCIHQALKNEN

SEQ ID NO: 232681 - protein, 100 aa, Zea mays
  Clone ID: MRT4577_143798C.1.pep
PPPPHRPHSRLLPRQSSWARSSTSRLRGSAVVPANLLRSGTRVTPSSLSISSQTLRPSPVWHYHELPDPPHEKCCSVSCWDGRRHAVSRPAVVLLLWVES

SEQ ID NO: 232682 - protein, 282 aa, Zea mays
  Clone ID: MRT4577_143799C.1.pep
MPIDGMVSVVATVSGYHGDERHRLVNLIAETGASYVGSMSRSITHLVCWRLEGKKYDIARRPGTLVVSHWWFTECLREGRRLPVDSYLMVSGEEAGPVPELPSRSCTQGKKSAIMEDRVFQELPDDFWDTPLARTSYKVKFDDSDSDSDFESALLKENSVGDGDSKKNRSSDVKKRKRMKHVNTSTDRNVLNSQDNVSSVMERHFLHLSSHTTSKSTSKQKENLSHLLHNEVPIRMGERNDLTENFENDSLSDSFSEPQISDTLCVEAQRKFTKTSAPSSSL

SEQ ID NO: 232683 - protein, 174 aa, Zea mays
  Clone ID: MRT4577_14379C.1.pep
MIMWAFCSPYGAEKIVGTGTVMKDQLENKVVWSLSTGDTLTISLGDELSFQLKNDSSEEEARLLVGRRLSYRVNTDNASSNLVEEEQYLTLVRKSPYHHGDRATVLLNWKLLAVEFLPEEDAVFVLLLCMVIARTMTEIRREDVAGLLVRRRISEARAGQRDWGSVMLPGSAFL

SEQ ID NO: 232684 - protein, 60 aa, Zea mays
  Clone ID: MRT4577_1437C.1.pep
DDRVCILLTPTGSLIRCFVEIFLMYGVSYINTSHLNIVCSCRKKRRIHLVSYQIKCRRAR

SEQ ID NO: 232685 - protein, 79 aa, Zea mays
  Clone ID: MRT4577_143800C.1.pep
RAPRGLRGSGSSPPRIATLRFKLGARGGEVTIEPKPMVATSLAVAPPPAVAWCGNNSLSFYLSAAGVTAAAVMRDVKEG

SEQ ID NO: 232686 - protein, 61 aa, Zea mays
  Clone ID: MRT4577_143801C.1.pep
LGSPELHGCTFKTPRTHLAKTGTQKGAAYIHVCPGEKIHLNTASTDRITAFTFRSMPNGSD

SEQ ID NO: 232687 - protein, 138 aa, Zea mays
  Clone ID: MRT4577_143802C.1.pep
RGVYTIAQTLTSVDFWLMFASFLMGVGTGLAVMNNLGQMGVAMGYVDVSLFVSMTSIWGFFGRIASGTISEHFIKTRGIPRPLWNAASQVLMAVGYIVMALAMPGSLFIGSVVVGICYGVRLAVNVPTASELFGLKYY

SEQ ID NO: 232688 - protein, 52 aa, Zea mays
  Clone ID: MRT4577_143803C.1.pep
TKHSRNQILQWWISPCRRALIAMPSTPDESSLDWLLGAVRLLDFVPGQNIDA

SEQ ID NO: 232689 - protein, 94 aa, Zea mays
  unsure (1)..(94): unsure at all Xaa locations
  Clone ID: MRT4577_143804C.1.pep
MVLEWIWANVIGVDSNKHMENXARSAIVSAGLPSSSFTFXEEVLEALPVEDNSIDVVIGTQIVXNHTNIXIKRVVKSNGLYVFIEHAATPDDTL

SEQ ID NO: 232690 - protein, 112 aa, Zea mays
  Clone ID: MRT4577_143805C.1.pep
FLLCYPKSCWPNMCPITWRGASGKVRYSNLLTPVPVEPMSARRWCRPRFLVPPPHHHPPLKKNVEGPVNPPPATQAHLVSSPQPKQPPSHIKKHKKKKKKKKKKTPKKKKNT

SEQ ID NO: 232691 - protein, 75 aa, Zea mays
  Clone ID: MRT4577_143806C.1.pep
SGGGSCLFVSLVSRFCVVLGADAFCSLVLGLSPQFVLFSCSVQCGIRRSVFGVGCSLFLCGILWGGVEAPAKTVI

SEQ ID NO: 232692 - protein, 55 aa, Zea mays
  Clone ID: MRT4577_143807C.1.pep
LAFQLSKPDRLLIGLLLASEYRWCPGFTRMCIGSGRVNYSPPFPTGIFWFVNRAR

SEQ ID NO: 232693 - protein, 61 aa, Zea mays
  Clone ID: MRT4577_143808C.1.pep
PNWLSAIPKPNNPGSTLWSQHGRDFWQHGHPFLGGSLATRSQTHESPEACAYAWPDAWLGP

SEQ ID NO: 232694 - protein, 577 aa, Zea mays
  Clone ID: MRT4577_143809C.1.pep
MAQTPNPSRRSWVGPAPMPFLTPRPERRHLEMRWADGVSQSAARRSGVGAIARDGCERDQEVNVQVMLRCRPLSEEEQRVNAQSAISCNESKREVTVLHSLFKQADRTFTFDKVFGPQSQQRSIYNHAVAPLVTEVLEGYNCTVFVFGQTGTGKTYTMEGEMRQKVSELPDTAGVIPRAVCHIFEILTARRADYSMKVTFLELYNEDITDLLSLEDQSRFPEGRQKRPITLMEDGKGGAVIRGLEEIVVYSPSDIYSLLEHGSARRRTADTALNKQSSRSHAVFSINIQVKETTVGNEELIKYGRLNLVDLAGSENIARSGAREGRARETGEMNKSLLTLGRVINALVEHSVHVPYRDSKLTRLLRESLGGKAKTCIIATVSPSAHSLEETLVTLDYAARAKSIRNKPEANKKTCKTVVLKELYQEMERMKQDVKAAREKNGIYISHERFAQDETKRKTMKEKIEHLELSLEKQNKEVQKFKALYLAEQECHWDFESQNNDLKVNLESLKGKFIDLEEAHCRAHMSLREKDFIISNLLHSEHLIIERAKDMRNTLENATEDISVLLNKQERHQKLKL

SEQ ID NO: 232695 - protein, 59 aa, Zea mays
  Clone ID: MRT4577_14380C.1.pep
LHSSSPLSRCQCTPIALFSLARVSLSVGQCWSLPTVCFPMTLVVFVDFSWPYLMDRALF

SEQ ID NO: 232696 - protein, 63 aa, Zea mays
  Clone ID: MRT4577_143810C.1.pep
MLSNREKGESAMNTFAFIQLYGICYDPICRSCIELEKKGYAESYEQGQEMQKKLISEASEEEK

SEQ ID NO: 232697 - protein, 47 aa, Zea mays
  Clone ID: MRT4577_143811C.1.pep
EKQNCVTLKTNGLFYDLQGVSNLCLEVETTSGPTSSDGVMNNKVTEF

SEQ ID NO: 232698 - protein, 107 aa, Zea mays
  Clone ID: MRT4577_143812C.1.pep
VDDVDPDSRAGSSGGKYTGDPVGSSFHKSQDAAVGYLVHLLKSARPLRDFSYSSHTSMGESIQAGSTSSFMSRRTSDALEEFESFKEIRENLLARSRSWLQESLDKS

SEQ ID NO: 232699 - protein, 79 aa, Zea mays
  Clone ID: MRT4577_143813C.1.pep
KPNKLSSFKEHKINAGGGGFPKLTRVGLRRACKAKTIFSPKGGTKKIKGGSSLYGDYTKSKRPPIPKIYRGLVFLKKGS

SEQ ID NO: 232700 - protein, 85 aa, Zea mays
  Clone ID: MRT4577_143814C.1.pep
VKIKQAGLQISLGPQIFSNLRVSPRQSVHIPCQKIGTVSMAVQIQKSQKPAPHLLAVDHVQNADVDGVIPWPQKNKVEALQTSSR

SEQ ID NO: 232701 - protein, 91 aa, Zea mays
  Clone ID: MRT4577_143815C.1.pep
MSDNGKNGEELVTKPFKFVTAGFDARFPNQNQTKHCWQNYVDYHKCINAKGEDFAPCNQFKLAYKSLCPSGWTSRWDDQREAGNFPVKLDQ

SEQ ID NO: 232702 - protein, 44 aa, Zea mays
  Clone ID: MRT4577_143816C.1.pep
NNLGTYHLLSTNYLIPYLFISFSYSQFFTFSSSFTYSIPSFPST

SEQ ID NO: 232703 - protein, 72 aa, Zea mays
  unsure (1)..(72): unsure at all Xaa locations
  Clone ID: MRT4577_143817C.1.pep
KRRSEDAFCHRQFIKCEPCIIPHTCCIPIIVFLGVHXAYSXKKXXKRGGXLLRAIXQAYRXXRAIATXHSXF

SEQ ID NO: 232704 - protein, 138 aa, Zea mays
  unsure (1)..(138): unsure at all Xaa locations
  Clone ID: MRT4577_143818C.1.pep
TRYQLPNDGSRRTPRSSASVTSSASAPLLVPRTTTKNHHKMPLRNSLXQGDLPRTXKAPSEDTNDSGVNQLIKQLMVKLDAVEDKPTVLLYGGGADVALWLTSDVVGAINAVPLLPKILELIGLDYTGWIVYRYLLFK

SEQ ID NO: 232705 - protein, 49 aa, Zea mays
  unsure (1)..(49): unsure at all Xaa locations
  Clone ID: MRT4577_143819C.1.pep
MSKAKVYTDVNALRPKEYCDYEALTAQXPEHDDYEGAPKVGRREYREVF

SEQ ID NO: 232706 - protein, 615 aa, Zea mays
  Clone ID: MRT4577_14381C.1.pep
MALRRVASVLLRTRLRGPVTSPARKALVHPLQAPPRRQFSPRPPPPVPFAAAAAADAAEEAFEAARSTNDMLAAFSRLEATVPANDKRLALACLKLGQHLEASGSADTSRVLALALRCLGILEASPNASTPSSASDAVSLAMALHLAGSASFDLSRFHDALSFLSRALRLLAPLLPETGVAFEVGEEPGGFDVRPVAHAVRLQLANVKTALGRREEALADMRACLDLKESILPPGSRELGVAYRDLAEAHATLLDFKQALPFCQKALELHESTLGKNSVEVAHDRRLLGVIYTGLEQHEQALEQNEISQRVIKSWGAASPDLLLHAEIDAANINIALGKFDEAVSVLKNVAKQVKKDSETRALVFISMAKALANQEKAGDTKRCLEIACDILEKKKFATPDKVAEMYIEVSSLFETVNELEKAISLLKKSLGMLERMPQAQHLEGNVAARIGWLLLLTGKVSEAVPYLEDAVERMKDSFGPKHYGVGYVYNNLGAAYMEMDRPQSAAQMFALAKEVMDVSLGPHHSDTIEACQSLANAYNAMGSYPLAMEFQKRVIDSWRNHGADARDELKEAMRLYNQIKAKALACLSPGGSANALPESQEQETDSDTAKAAQR

SEQ ID NO: 232707 - protein, 287 aa, Zea mays
  unsure (1)..(287): unsure at all Xaa locations
  Clone ID: MRT4577_143820C.1.pep
GYLEAGRETVRSPRDKRVVKDEVTAQDLWWGKGSPNIEMDEKTFLINRERAVDYLNSLEXVRQRXQYLNWDPENRIKVRIISARAYHSLFMHNMCIRPTDXQLEDFGTPDFTIYNAGQFPCNRYTHYMTSSTSIDLNLARREMVIMGTQYAGEMKKGLFGVMHYLMPKRGILSLHSGCNMGKDGDVALFFGLSGTGKTTLSTDHNRLLIGDDEHCWSDNGVSNIEGGCYAKCIDLAQEKEPDIWNAIKFGTXXLENVVFDEHTREVDYXRHSVTENTXXLLPIEYTP

SEQ ID NO: 232708 - protein, 149 aa, Zea mays
  Clone ID: MRT4577_143821C.1.pep
MQGRMLFLAHPSWPTMAQLPMRIESRILALSFKNEFSASYRPTSQCSGWTLLGSTSSPSPRRFSWFTYGSLRVRPCWTAGDPYQGCPGRAPLPRSSWLRISSSWWAICSPTLSCSGPPPTLAAALELCAPTPQLPLLVLGGRIVKSLRS

SEQ ID NO: 232709 - protein, 60 aa, Zea mays
  Clone ID: MRT4577_143822C.1.pep
YKWSFPGASQRSISLRIFYILCGSEYETQRLMLDLRCGQVMPIWTVVIVSWRVRLGRHMC

SEQ ID NO: 232710 - protein, 76 aa, Zea mays
  unsure (1)..(76): unsure at all Xaa locations
  Clone ID: MRT4577_143823C.1.pep
MMTLLMLREHFLLVSLLYQNFSALLSFFSSGFTLXLWRLHNFRFGFLLRFCPFHKQFLKKANNGNGNFALFFFFLK

SEQ ID NO: 232711 - protein, 42 aa, Zea mays
  Clone ID: MRT4577_143824C.1.pep
MDRNQHVNNVKDIGWILGSVPLDVLEDYHLTRINLELPREGP

SEQ ID NO: 232712 - protein, 69 aa, Zea mays
  Clone ID: MRT4577_143825C.1.pep
CLPVETAICKPEGKSQHKRMARPLGKRLETRSGYHQGLLGYTWRISALPPKICYSKEGKSIYQHKVSTI

SEQ ID NO: 232713 - protein, 51 aa, Zea mays
  Clone ID: MRT4577_143826C.1.pep
YVIKILVSCSDGRDHVVYDLFCGFAYPFMNDWFFQFRHPVRTTVYIYTVLL

SEQ ID NO: 232714 - protein, 115 aa, Zea mays
  Clone ID: MRT4577_143827C.1.pep
PSPRVARLLESHPAVDAHAVVSCTAPLSCLWGQGCPALQQPHGVFCVYWGELGCYRELSLFYQGLVHACPRYWLFGLALCTLAGLLARPLLEYSIIYEPQKNLFSVYQNKKNKQG

SEQ ID NO: 232715 - protein, 137 aa, Zea mays
  Clone ID: MRT4577_143828C.1.pep
NFGLIYVLGESGLSYDTTPDVVLSSVSSAVVELSLVVVVGDGVYLGHLDEGIRMADVVGVGAGLGLESWCSEECWFGCTTDTMYVHALDSSVPVLGVAMGFPAYSKELTVNGLEHNSLESWPERYTGIYADVLGYTN

SEQ ID NO: 232716 - protein, 88 aa, Zea mays
  unsure (1)..(88): unsure at all Xaa locations
  Clone ID: MRT4577_143829C.1.pep
FTSLCRLEEPGLCSYIPCVQLAALPYLTDIFVSITIHGRSSVIENWEWCSRLLLFFAQKCVLNLLXRMLXRXLFGSFTSPAWSICITA

SEQ ID NO: 232717 - protein, 227 aa, Zea mays
  unsure (1)..(227): unsure at all Xaa locations
  Clone ID: MRT4577_14382C.1.pep
MAAEGAPVLVRHAGGVEELRQLPPGFRFRPTDEELVVQYLRRKALGAPLPAAVIPVVRDLYSLDPWDAVDVPAAPDASSQGERYFFAVRPAGGVGSARRATASGRWRPAGKEKPVALPRPCGGGSLLVGVKRAMAFVPRXEEEGGGGGGPGDXWVMHEYRLAAPLHKHGCSLAQAQGEWVVCRVFQKGSGRPRRRRQRPVSPSPSSASSCVTDGSSSSSSDMDEVSS

SEQ ID NO: 232718 - protein, 53 aa, Zea mays
  Clone ID: MRT4577_143830C.1.pep
QKHWLALMKLKYNEDHLTLSYRRSGRLVKDTDVKQQCYRAKRCLSWIRQAAMP

SEQ ID NO: 232719 - protein, 83 aa, Zea mays
  unsure (1)..(83): unsure at all Xaa locations
  Clone ID: MRT4577_143831C.1.pep
MKVLIGALAVLALAASAGSSTSGGCGCQTPPFHVPPPFYMPXPSLYLAPQQQSXTWQYPTQPPQLSPCQQLGSCGVCGVADRS

SEQ ID NO: 232720 - protein, 96 aa, Zea mays
  Clone ID: MRT4577_143834C.1.pep
RSPPPGTQFIAQSANKPRNPPRRSAKPPTPARSSPTTGALRAPDTPNLSSPKSSRRSPNPPATIRRDGSQGPIRSLRGAYISSVVGRIMASLRSLS

SEQ ID NO: 232721 - protein, 71 aa, Zea mays
  Clone ID: MRT4577_143835C.1.pep
NRYYYCRVTINSLNHNCCSDLWDHLLQRDRSKRLPLQYYNAARLRICLKQNKKKILFSQTKQKWPHLLYKT

SEQ ID NO: 232722 - protein, 231 aa, Zea mays
  Clone ID: MRT4577_143836C.1.pep
MSRFVDKLPFFDRRSSLMEEAGDIPRSGLLHMHHHQPHHSGLLMQPQPSPPAKQSSFTLAQLLKRVNEARSDASSPTSSPTHSHYTIELGGSVPGSTGSDLSERIGGGGGDGPLLPFVLKFTDLTYSVKQRKRGPCLPVLPFRRGAGEPAEPEVPRMKTLLDNISGEAREGEIMAVLGASGSGKSTLIDALANRIVKESLRGSVTLNGESLDSNLLKVISAYVMQDDLLYR

SEQ ID NO: 232723 - protein, 45 aa, Zea mays
  Clone ID: MRT4577_143837C.1.pep
LGGPTGGSDLFNFPKISREFLADLGLDLRHQSQDSAGSWILRRLQ

SEQ ID NO: 232724 - protein, 96 aa, Zea mays
  Clone ID: MRT4577_143838C.1.pep
TEWGAEITSPEPRRERGARSQSGVAAASTRTNSHTGASTRHRISNSGLAAARNLQDGGISGVWTRRVVGPPDAWNPDSSEAWGKGRKGPPRMFEIE

SEQ ID NO: 232725 - protein, 121 aa, Zea mays
  Clone ID: MRT4577_143839C.1.pep
MPADSDDVASPASTLGSVHKRGGGGGGGGKSGGHGGGRRRPGPAYRGVRMRAWGKWVSEIREPRKKSRIWLGTFPTAEMAARAHDAAALVVKGRGAVLNFPEMAARLPRPASAAPRDVQAA

SEQ ID NO: 232726 - protein, 82 aa, Zea mays
  Clone ID: MRT4577_14383C.1.pep
AGPCLSSPSYTFLIRHTVRQAYELFRFHPGRAPPQISTPLKPILPRFAPSSFISESASDFLSRPQECCTGPRDSVVLICQLA

SEQ ID NO: 232727 - protein, 107 aa, Zea mays
  unsure (1)..(107): unsure at all Xaa locations
  Clone ID: MRT4577_143841C.1.pep
XXKRGKFLQIPFHYKIVGRPFFLGPCADTITGRSLFLVHVYWQGFFYSHVWKTKGLFVPLENFFFLFWGHWNRGKLFFIFLNFFFFCLTRFWRGNVGGGFSHPFFFF

SEQ ID NO: 232728 - protein, 106 aa, Zea mays
  Clone ID: MRT4577_143842C.1.pep
KGRQRPFDLNLPSIAISQLRGTVTVTRTVTSVSEETETYTIMTRMPPEVALEVTPPAVTVLPGASRELAVTLTARSVTGTYSFGEIAMKGDRGHLVRIPVVAMGFK

SEQ ID NO: 232729 - protein, 63 aa, Zea mays
  Clone ID: MRT4577_143843C.1.pep
LLGRVLTKVISTEYIIKQGSKMQQDLEEEKNKAVIQDLAENVENHEANLKKKDFAIQDLELMV

SEQ ID NO: 232730 - protein, 71 aa, Zea mays
  Clone ID: MRT4577_143844C.1.pep
LFLVTKQYSTPTVIIPLKHAAIPRPGVLLALPSFFFCPCFAPHLYRFKSGQNASHWKGEQPFGTFRGPKNL

SEQ ID NO: 232731 - protein, 75 aa, Zea mays
  Clone ID: MRT4577_143845C.1.pep
KKFGGNNPWSDRCGVFSGGHYQLLKTNKRGAKGPHNTTKRKPPWSTESLCRRRRATRQVIMNHRIGGQSPRQPFI

SEQ ID NO: 232732 - protein, 73 aa, Zea mays
  Clone ID: MRT4577_143846C.1.pep
DGHADHIRARTNDQLCPVTPPPPPRPTRRMDRASPSDLPRPVVRRNFTAYASGVGAVTGQMVNVRTSIACASA

SEQ ID NO: 232733 - protein, 110 aa, Zea mays
  unsure (1)..(110): unsure at all Xaa locations
  Clone ID: MRT4577_143847C.1.pep
VLTTWVGKILSLFALLALFMSTTNAFIIPQFSLTPSAIIPQFLPPVTSMCFEHPSVQAYMLQQALSSEXVLQQPIVQLQQHILAHLTIQTIASQHDQQFLPALIQLALVN

SEQ ID NO: 232734 - protein, 60 aa, Zea mays
  Clone ID: MRT4577_143848C.1.pep
GRPYFFFFSSWEFLTGTFMRTRGAKNKHIIACHNNDNSCNREKTLSTDNITYHTRRMNKV

SEQ ID NO: 232735 - protein, 117 aa, Zea mays
  unsure (1)..(117): unsure at all Xaa locations
  Clone ID: MRT4577_143849C.1.pep
NGKFVGVRRPSSKLPIGAKGKEKPIEKAIGRTGRGFKTDPGVPIVXAGFGGPKLTTRISYLSPSQKWALQKGRTVVVGGKTNRAQLEFFEKMNRVLDKGPKLISADENFLDTKSAAP

SEQ ID NO: 232736 - protein, 104 aa, Zea mays
  Clone ID: MRT4577_14384C.1.pep
YKRSPWQFFTSVQPVPPIVNTHTFDLTTSLKPPTFAYGCTKSTLARGGYLPPTHLCHLVRSMGITNLLIPHVPPITFYDLLCARLKRSVLTCAAFLGLCRNLHG

SEQ ID NO: 232737 - protein, 100 aa, Zea mays
  unsure (1)..(100): unsure at all Xaa locations
  Clone ID: MRT4577_143850C.1.pep
STTARRGTTQRLAGRLKRERRAYKSSGNITIPFDNLTVLHHNYAAVGLHTVDLVALSEAHTFERVQXQFVTERLYNFSGTNRPDPTLNYGYRAFLAHMCP

SEQ ID NO: 232738 - protein, 219 aa, Zea mays
  Clone ID: MRT4577_143851C.1.pep
NLQLFISMSNNRLKDLLLLLKASPFVDMKSIIVYCKFQGETDYVSKYLCDNNITAKSYHSGLLMKNRNRVQELFCSNKIRVVVATVAFGMGLDKSDVEGVIHYSLPESLEEYIQETGRAGRDGRLSYCHLFLDSTTFYKSRSLLHSDGVDEYAMSKFLFQVFSCENSVGCICSLVKESTSRKFDIKEEVLFTVLTQLEIGGQQYLRLLPQFSVTCTLYF

SEQ ID NO: 232739 - protein, 115 aa, Zea mays
  Clone ID: MRT4577_143852C.1.pep
LWDMSILVVACLIEVLSSHVFVFVDLDRDDGIGVELILFRIFGRLFAARGALRFTVQVRVSVSFFGGGQCQVIHHFFVVVVAAARAQAECRGSHRVRCTASSRRAGAVSMESWCR

SEQ ID NO: 232740 - protein, 54 aa, Zea mays
  Clone ID: MRT4577_143853C.1.pep
ILGVLNFNIAQYIVIVTLTSGYLVHYSDVLKARNTQDLMSCFSRCAISRNPTPL

SEQ ID NO: 232741 - protein, 98 aa, Zea mays
  Clone ID: MRT4577_143854C.1.pep
SFNSGVRLSMGGLYRQAGVSVHIVTVYTIVFRVHRYTSCCGEAWLTVTRTASASELNYISVMCNRHHPCSREQYVANRPHPLTLRGMGMPPLSMSTFH

SEQ ID NO: 232742 - protein, 87 aa, Zea mays
  Clone ID: MRT4577_143855C.1.pep
LFQTRGLSLRFHDPHETAFPLPTKPQGLQSCIWVLERKPSPYLFVGTGHLMIRHPAASYPLLRRLLQQTSDLGDYGCYFLSLILSIA

SEQ ID NO: 232743 - protein, 68 aa, Zea mays
  Clone ID: MRT4577_143856C.1.pep
YTYTSDMSSTTPYPIRGITITRQPTFSEQQERKRLWRATTTRSLRNRTFKGYSTYSTDTQTASSTDYS

SEQ ID NO: 232744 - protein, 97 aa, Zea mays
  Clone ID: MRT4577_143857C.1.pep
FRSLTEVNWLTQEHGGELAFSRTRRCCTQTTDMDGCSSTFLNKPIHVMFGKCKPHAYPLDTVIDRSFTSCQYSVFQCQVTYSEQQLEICSCTDSSRS

SEQ ID NO: 232745 - protein, 641 aa, Zea mays
  unsure (1)..(641): unsure at all Xaa locations
  Clone ID: MRT4577_143858C.1.pep
ADVIRVVDDVANGIPSTYTNGVSSPPSTPSCSQNESLDPAAHLITGNEINNEALTSPSSVQDSPEDKIMQVAKAVSCGSEVVKADTLPYAMLRPIVVPSISRRSSRSEIKGAHDHRRSPCVPSTRRDIPILRRPPSPVVLSVPRVPRPPPPSPAGESRKRGFPIVRSGSSSPRHWGMRGLFSEDKIFHRAQFCLDGPEVVWPSWGNKGTSGTLVQTIEDTVLQDHLVKISQLSCDQHPDVALPVQPLDMLNGSSHKASLSLMHNALHEEIDQFCKQVAAGNLVRRPYINWAVKRVTRCLQVLWPRSRTNLFGSNATGLALPTSDVDLVVSLPPVRNLEPIKEAGILEGRNGIKETCLQHAARCLTNQDWVRSDSLKTVENTAIPVIMLVADVPCDXICPMSXSVLDGSQDYSVNMLGEQGSPPRSDTSSSEGSNMLMCSKLNKDDCDIVQSIRLDISFKSPSHTGLQTTELVRELSQQFPAVIPLALILKKFLADRSLDHPYSGGLSSYCLVLLIVRFLQHEHHLGRPINKNLGSLLMDFLYFFGNIFDPRHMRISIQGSGIYLNRERGQSIDPIHIDDPHCPANNVGRNCFRIHQCIKAFADAFAVLENELLQFSSECSMPVSSFNILKKIIPSIDSDEL

SEQ ID NO: 232746 - protein, 179 aa, Zea mays
  Clone ID: MRT4577_143859C.1.pep
ILYWQARPLFNDRRKLPKMADPGLEGQFPTRGLYQALAVASMCIQSEAASRPLIADVVTALSYLANQIYDPSLAHASKKAGGSDQRNRVGDSGRALSKNDDAGSSGHRSPSKDWADSTREQFPGAANRGQDRDRMVAKAKMWGENWRVASVTKDCFGRACSVTDCFLPLCGKDEHFRVC

SEQ ID NO: 232747 - protein, 226 aa, Zea mays
  Clone ID: MRT4577_14385C.1.pep
MASASDILTLVSSLALRLSIWIFLRWIPTTIVPALATALTLVYIPSFFTSFQDTAQYKIISDELDIIVKETVGGKSDDSSDDIKLIDGADEGPLQELDVQETVQYEEREPKVLRTLLTGLPSPSSALWSWVTFGINMALIAMVLDVVYRAPLLHQCHDASFARVGYVSENSAKILVREPFAFDVRVLYRSIDETKRSWMHKTHRASQPDYWLTTRLILHCPQARAS

SEQ ID NO: 232748 - protein, 47 aa, Zea mays
  unsure (1)..(47): unsure at all Xaa locations
  Clone ID: MRT4577_143860C.1.pep
GVVAGIRGGGPLGVLGGLGVPGEXSGLPLYSHEAFCLVPPAAVRTPA

SEQ ID NO: 232749 - protein, 116 aa, Zea mays
  unsure (1)..(116): unsure at all Xaa locations
  Clone ID: MRT4577_143861C.1.pep
PTRTEMCAEELXSRXERHDVKKLKSHGGLHGLYYKLSTSESDRLTTFADKLATPRDRCGCNKFAEAAYRGFLVLQRQAQHDMTLMILVRCAVLNLIATISAXGWPIGTHYILCIVG

SEQ ID NO: 232750 - protein, 486 aa, Zea mays
  Clone ID: MRT4577_143862C.1.pep
MGCFPCFGSTREEELKYYGSKGPGGGNGGGGRATASSSSSAAAGGGGGRVEEAVVAPPRAQRGPAGVDKTRAKGNAGSKKELSVLRDASGNVISAQTFTFRQLAAATKNFRDECFIGERTRGRARGGRLDMGQVVAIKQLNRDGNQGNKEFLVEVLMLSLLHHQNLVNLVGYCADGDQRLLVYEYMPLGSLEDHLHDLPPDKEPLDWNTRMKIAAGAAKGLEYLHDKAQPPVIYRDFKSSNILLGEGFHPKLSDFGLAKLGPVGDKSHVSTRVMGTYGYCAPEYAMTGQLTVKSDVYSFGVVLLELITGRKAIDSTRPASEQNLVSWARPLFNDRRKLPKMADPGLEGQFPTRGLYQALAVASMCIQSEAASRPLIADVVTALSYLANQIYDPSLAHASKKAGGSDQRNRVGDSGRALSKNDDAGSSGHRSPSKDRADSPREQFPGAANRGQDRERMVAEAKMWGENWREKRRAAQGSLDSPTGGG

SEQ ID NO: 232751 - protein, 51 aa, Zea mays
  Clone ID: MRT4577_143863C.1.pep
AQLHAFVFLIYDAWNTNKITSIGLLSGPITLLQIHRSVDHIHPWRNHGRLN

SEQ ID NO: 232752 - protein, 107 aa, Zea mays
  Clone ID: MRT4577_143864C.1.pep
WHLQACPYAGGGTCNVASHDLTFMLHSLGISNHAMLNKFMTTADYIFKHVRMPVVFKTDTTLQMLTSLKNLFKHSQQKCIASRSHLSGDECPVDLLYAFFSLRHCLL

SEQ ID NO: 232753 - protein, 101 aa, Zea mays
  unsure (1)..(101): unsure at all Xaa locations
  Clone ID: MRT4577_143865C.1.pep
NFKTGFPPILFKYFFPAGPDEVKXLQINRQIKAPQAAGANPPDFERGFICPKVXKFKNLKKLGSEFAVKAAGKTNQEGKTYVVQDGGIFFFKFNGSGGGKK

SEQ ID NO: 232754 - protein, 84 aa, Zea mays
  unsure (1)..(84): unsure at all Xaa locations
  Clone ID: MRT4577_143866C.1.pep
MASXXRXQAHIYGFYYXHXVLDPASLGVPWADPAAVEIPPYLLSALGEYLSGSAARGDVEAGGGRRVHDARVQGAAFRALTEPR

SEQ ID NO: 232755 - protein, 288 aa, Zea mays
  Clone ID: MRT4577_143867C.1.pep
MARQQPERVPPQRRPIGCGGGWKRDGVCGSPPLSGGWLEARQGLREPAPERRAIRGVPRGGPEDVLLTVCPWDPRVRGGTLFHQTTFSLLVRRAVLFVAEVHRLRDLEPRALCGVELYDGILMRYVKASTAYLGKPAPRGEPSGDMVDFDITYYRSCDPGQARLFEDVLEEVEQMGIFKYGGLPHWGKNRNLAFVGAARKYPGLPRFLRVKDAYDPDGLFSSSGSERCGQLRALVLLVEHDVGERGQRRGRCTHGGVRVPDAAQRGSQEPGHERRDGVPRVLPGDERQ

SEQ ID NO: 232756 - protein, 473 aa, Zea mays
  Clone ID: MRT4577_143868C.1.pep
MKILYSLRRFYHVETLFNGTFVLAGRDQETTGFAWWAGNARLINLSGKLLGAHVAHAGLIVFWAGAMNLFEVAHFVPEKPMYEQGLILLPHLATLGWGVGPGGEVLDTFPYFVSGVLHLISSAVLGFGGIYHALLGPETLEESFPFFGYVWKDRNKMTTILGIHLILLGLGAFLLVLKALYFGGVYDTWAPGGGDVRKITNLTLSPGVIFGYLLKSPFGGEGWIVSVDDLEDIIGGHVWLGSICVLGGIWHILTKPFAWARRAFVWSGEAYLSYSLGALSVFGFIACCFVWFNNTAYPSEFYGPTGPEASQAQAFTFLVRDQRLGANVGSAQGPTGLGKYLMRSPTGEVIFGGETMRFWDLRAPWLEPLRGPNGLDLSRLKKDIQPWQERRSAEYMTHAPLGSLNSVGGVATEINAVNYVSPRSWLATSHFVLGFFFFVGHLWHAGRARAAAAGFEKGIDRDLEPVLYMTPLN

SEQ ID NO: 232757 - protein, 83 aa, Zea mays
  Clone ID: MRT4577_143869C.1.pep
VRDQIEICSQLYLKVVWRIINMTIAFQLAVFALIATSLVLVISVPLVFASPDGWSNNKNVVFSGTSLWIGLVFLVAILNSLIS

SEQ ID NO: 232758 - protein, 60 aa, Zea mays
  Clone ID: MRT4577_14386C.1.pep
DPWSQLSLLGVATNGGHSVTTPLRMKMRNSQRNAQTWLFNPLLILNISRGFTIMSINTYP

SEQ ID NO: 232759 - protein, 144 aa, Zea mays
  Clone ID: MRT4577_143870C.1.pep
MVPHTAAQHASRHPTHNAAPPEATPNTPRPKVPQGPAPPMVPTRKAPTSEAPPLAKYQAARLTLPAAPKAHTPSTRLAPAPPCRAALHKFKVPDGPNKARPPPPGRPYGPKTQIPRATYANKKKKKKKKTKQQKKKKKKKKQAW

SEQ ID NO: 232760 - protein, 69 aa, Zea mays
  unsure (1)..(69): unsure at all Xaa locations
  Clone ID: MRT4577_143871C.1.pep
RKTMIDFGAVLSLRPGAECTVRHDALHGGAGPDAXHIFVLELGPHENXLLTCLPTEHFEVHHPEPNLSY

SEQ ID NO: 232761 - protein, 93 aa, Zea mays
  Clone ID: MRT4577_143872C.1.pep
EGNESTSVTQKRMSSQREQYGSTVHLFIGTGRSPYKITLMPFTLDNKHIVLCRGLNSLFILKSVPTAAVSPKLSCLHLRRFTNLRIILVYSDA

SEQ ID NO: 232762 - protein, 55 aa, Zea mays
  Clone ID: MRT4577_143873C.1.pep
MHTAIHLPSKEPIKEATDEHTHEHNHSDEQNVPETVIEHLIENLKENHIEAENAG

SEQ ID NO: 232763 - protein, 74 aa, Zea mays
  Clone ID: MRT4577_143874C.1.pep
RGSPPAFYHPGGPKKNFLEPPNRQFWGPNQGAGKKKLGGQKTKKPLTARARERPRGRGEATFVECPGPKKNPCL

SEQ ID NO: 232764 - protein, 57 aa, Zea mays
  unsure (1)..(57): unsure at all Xaa locations
  Clone ID: MRT4577_143875C.1.pep
MAGRGKVICSCAAKMATSRSSKAGLQFPVGRIARFLKAGKYAERVGAGXPVILAAVL

SEQ ID NO: 232765 - protein, 145 aa, Zea mays
  Clone ID: MRT4577_143876C.1.pep
PKETIILNVLSATVDFPTCESIRMSQQVDRTGERTLAVVTKVDKAPEGLLEKVTMDDVHIGLGYVCVRNRVGDETYDQARVAEAQLFKNHPLLSQIDKSMVGIPVLAQRLMQIQATIIAKCLPDIVKQINDRLIRSSTELDRMPP

SEQ ID NO: 232766 - protein, 90 aa, Zea mays
  unsure (1)..(90): unsure at all Xaa locations
  Clone ID: MRT4577_143877C.1.pep
KPLFPGDFEIXGPFXIFRILGPPNYQSWPGVSCLPDFKTAFPRWQAQDLAPVVPNFAPGGLALFFKMLRSEPSKKIPPRQALGPEFFKAL

SEQ ID NO: 232767 - protein, 62 aa, Zea mays
  Clone ID: MRT4577_143878C.1.pep
GQGRAARRDLSRHAPQCGVTSPSERPPGQAESPSHSTLPACATALLASHPIDHRHGSCSDVH

SEQ ID NO: 232768 - protein, 94 aa, Zea mays
  Clone ID: MRT4577_143879C.1.pep
SVSGKEKLGGRVQSLGLHISLLRQAKQTEVSAAKLQANMSGSGNSSQEKDLLKNASFHTHKKALDKRFISLTNRIKELPGINKHIHFDSTNDET

SEQ ID NO: 232769 - protein, 60 aa, Zea mays
  Clone ID: MRT4577_14387C.1.pep
MGAGATEIQAPSFVLLACCVLPTHSLSYCRLQLLVVGPGVRYVGAAKHTLPLYSAPLNSA

SEQ ID NO: 232770 - protein, 217 aa, Zea mays
  Clone ID: MRT4577_143880C.1.pep
MNTAMATTSLSLQGRPSHAPTRKLSSPFLGAPASFLRPLAPTPAAGPSSRRTLAVRAMAPPKPGGKPKKVVGLIKLALEAGKATPAPPVGPALGAKGVNIMAFCKEYNAKTADKPGYIIPVEITVFDDKSFTFVLKTPPASVLLLKAAGVEKGSKEPQRQKVGKVTVDQVRAIAQEKLPDLNCKSIDSAMRIIAGTAANMGIDVDPPILVKKEKVLL

SEQ ID NO: 232771 - protein, 33 aa, Zea mays
  Clone ID: MRT4577_143881C.1.pep
PRVRFSIREKLNDMLGPISNLGTRYLTTPSQTT

SEQ ID NO: 232772 - protein, 51 aa, Zea mays
  Clone ID: MRT4577_143882C.1.pep
IPTLVVLLVRKHAKYKKKYTVLLHTRNISLSVSIYIIDQIFKWYGNQLASR

SEQ ID NO: 232773 - protein, 55 aa, Zea mays
  Clone ID: MRT4577_143883C.1.pep
LKLPNSTTALTLIELIAVLSTAKIRNNLWSIMIEYHMHAVKYCTSLVYSFPTTSQ

SEQ ID NO: 232774 - protein, 63 aa, Zea mays
  Clone ID: MRT4577_143885C.1.pep
HNSLARWPSSGDVLARRILLDPGQAVPSDLPAYGDCSHAYGAHRAHGALELVEKVSLPDQSVN

SEQ ID NO: 232775 - protein, 77 aa, Zea mays
  Clone ID: MRT4577_143886C.1.pep
MQKEEPTKVTHYMLGCFAQQLHAAAEALDDMPIKKLYTLVEMAAQGPTGGSAEAIYAGEEKIDINHFFSILSDIIRY

SEQ ID NO: 232776 - protein, 74 aa, Zea mays
  Clone ID: MRT4577_143887C.1.pep
TLQISKVMELQTFLRQKQQVTAVHIAIYMSREDPQNSDEVRSLVPPTSQATKSQCILVTVELRLRLIGRLLVPS

SEQ ID NO: 232777 - protein, 102 aa, Zea mays
  Clone ID: MRT4577_143888C.1.pep
MEAEQQKQQRPRQRPRRKGQKRKLEDEASAATAAAASSLGSAGADDDNEEEDGSAGTPEICRHSHAALAREVRAAGDVLNRLPFSWGQAKRGRGKGANQVLG

SEQ ID NO: 232778 - protein, 277 aa, Zea mays
  Clone ID: MRT4577_143889C.1.pep
RDTGSATVPTSQPLCLSSRQSRIDRQPLHCTHALPHSPTPQSPPNLSASFSLHRRVRPHCPSPCGDLSRAGRRVLVTGTREKRPWWVAAAGHGGAAGDEWCVCRQDASQAALQKTIDYACGSGADCNSIHESGACYNPNTVPAHCSWAANSYYQNNKAKGATCDFAGTATLTTSDPSSSGCSYPTTSASAAGTVTPTTGGTMGGAGGPGTLTPAGTGAGTAGTTGMGTAGTTGTGFGGLGPAGMDTAAAAAGGLLLLPEAGLCAALVALLLSAIVLA

SEQ ID NO: 232779 - protein, 184 aa, Zea mays
  Clone ID: MRT4577_14388C.1.pep
MASIIVIAAVLVLDVLAFVLAIGAERRRSYVNYVSVDPAGGSYCVYSSDASTAYGVSALLLLLAAQAVAMVATRCFCCGRALSPGRWRAWSGICFILCWVTFVIAELCLLAGSVRNAYHTKYFPKGDGPPPCAMLRKGVFAAGAAFTFLTALFAELHYLFYARARDAAAAVAPPIVGGIGMTRM

SEQ ID NO: 232780 - protein, 77 aa, Zea mays
  Clone ID: MRT4577_143890C.1.pep
KAARNGLGSFCWGQSMGMRGGQPMYDSDEDESDDSDPPRVFNSLKLGAPPFSVKKSFQPKERSLFFGEGAVQPLGTL

SEQ ID NO: 232781 - protein, 110 aa, Zea mays
  Clone ID: MRT4577_143891C.1.pep
MEALLVTVLLLLLSSTLAAAQWCVCRQDASQAALQKTIDYACGSGADCNSIHESGACYNPNTVPAHCSWAANSYYQNNKAKGATCDFAGTATLTTSDPSKWNQRTVMHAV

SEQ ID NO: 232782 - protein, 68 aa, Zea mays
  Clone ID: MRT4577_143892C.1.pep
SYLYVSEEEKSKFCSRECRHGRQGLLIFGMSNFDSMIPQDSLSVGRRVIIVIIIYMNSFVCRAKKKKK

SEQ ID NO: 232783 - protein, 199 aa, Zea mays
  Clone ID: MRT4577_143893C.1.pep
MEALLVTVLLLLLSSTLAAAQWCVCRQDASQAALQKTIDYACGSGADCNSIHESGACYNPNTVPAHCSWAANSYYQNNKAKGATCDFAGTATLTTSDPSSSGCSYPTTSASAAGTVTPTTGGTMGGAGGPGTLTPAGTGAGTAGTTGMGTAGTTGTGFGGLGPAGMDTAAAAAGGLLLLPEAGLCAALVALLLSAIVLA

SEQ ID NO: 232784 - protein, 64 aa, Zea mays
  Clone ID: MRT4577_143894C.1.pep
ELTSWRPPLPVQVEGRFYALSLTCLQSRSRSMWAAPAGGGRFSYSTIHQRSVRCGLTPCTGKTS

SEQ ID NO: 232785 - protein, 45 aa, Zea mays
  Clone ID: MRT4577_143895C.1.pep
SLLKLLLLYGLSQPSGVGGKQTIAYMEKRTNALMDGWQWCTLNYL

SEQ ID NO: 232786 - protein, 70 aa, Zea mays
  Clone ID: MRT4577_143896C.1.pep
GGLRPWIILLGAYPCMENKVESFSNKEESYLSTSSMCPTLNFFCFCLLFQINLVPAITNQFPLCAKLDSL

SEQ ID NO: 232787 - protein, 89 aa, Zea mays
  Clone ID: MRT4577_143897C.1.pep
KLPIQRKTFAQKKRRTPLKDPAQIRHRSQSDAARMPQGASTISRSQARTTSTQRACPRSGHGTLPGWSRPRGWACRRTSSWGETIFGPK

SEQ ID NO: 232788 - protein, 150 aa, Zea mays
  Clone ID: MRT4577_143898C.1.pep
CWPCLPTPSLDLLAPRHHRAAALDVVLGPLTPTPTSSNSATSWSSPRRWGLLRLSYRSADRRLPALPARLAPSFTTVPALCHRRRLNLTASAAAQFASVRHRTGLPVLKLADVIFPGACSRPRPWSSSSHDTPSCRTLDMFDEIPQQAPS

SEQ ID NO: 232789 - protein, 86 aa, Zea mays
  Clone ID: MRT4577_143899C.1.pep
TCWCAQRSLARWGCFLCFPCCSSSFLVKWINYVCYLGYLAGRGILHGFRALLSWRAQVGAILSVFLDGELGGGKNLVPVGGIFCSL

SEQ ID NO: 232790 - protein, 102 aa, Zea mays
  Clone ID: MRT4577_14389C.1.pep
MASIIVIAVVLVLDVLAFVLAIGAERRRSYANVTAADSSGRAYCVYSSDASTAYGVSALLLLLAAQAVAMAATRCFCCGRGLSPGRWRAWSGTRFLICWMTF

SEQ ID NO: 232791 - protein, 85 aa, Zea mays
  Clone ID: MRT4577_1438C.1.pep
YYLPRQKLQSPIGPIRGTNKLKGGGKTKDFPKGNKTRKIFRGLFRGLFRGKKTLPPPNLLPPKKIKGGWGPPPRLFFRPWPAVYP

SEQ ID NO: 232792 - protein, 90 aa, Zea mays
  unsure (1)..(90): unsure at all Xaa locations
  Clone ID: MRT4577_143900C.1.pep
MSTLRSSSDCFYXIXDLLLIEFSDCFSETNSNLLTYMAALSPNNCFGDFKAESLMELDKLYPDDFSSDELNDLAYDLPISTSISMIYLKE

SEQ ID NO: 232793 - protein, 99 aa, Zea mays
  Clone ID: MRT4577_143901C.1.pep
MASAAAATQVGTYFLRNYYNLLQQTPDVVHQFYSEASTMVRVDDLTGNNTATRSCRSAIAKPRAGNKLLLRPSPKTCMVMGTAEKSVLCFFYQFIKVLV

SEQ ID NO: 232794 - protein, 48 aa, Zea mays
  Clone ID: MRT4577_143902C.1.pep
AYMHYQPFRQAGSCCQVSIWGHSGHGKVGSGPRGSDVWKSAKVAVRVT

SEQ ID NO: 232795 - protein, 272 aa, Zea mays
  unsure (1)..(272): unsure at all Xaa locations
  Clone ID: MRT4577_143903C.1.pep
LPPYSPTPSALLSPTSPIWPLSLARLSFIFSHGQGRTSHINIVAIGXHVDSGQSTTTXGHLIYKLGRIDKCGLERTDNDAAEMNKRAFQHAWVLDKLQDERERGIAIDIALWKFETTKYYCTGIDAPGHRDFIKNMISDTSQGDCAVLIIDSTTGGYEAGISKDGQTREHALLAVTLGVKQMTRCCNKMDATTPRYSKARYDEIVKEVSSYLKIGGHNPDEIAFVPISXCEGDYMIESAPKLDWLQGPTLLEALGQITEPXRPSDKPLRLPL

SEQ ID NO: 232796 - protein, 110 aa, Zea mays
  unsure (1)..(110): unsure at all Xaa locations
  Clone ID: MRT4577_143904C.1.pep
VFPLFPRAVRALLVCFLVLLRFLVVAFLRGDLPFPGPLLFLSLPPCVLALAFVLLLLLFPLVSLFFLLVSFXLLVVCVARFFSFSPPFFVFFVRGFSPXRGSTQLPRSCP

SEQ ID NO: 232797 - protein, 80 aa, Zea mays
  Clone ID: MRT4577_143905C.1.pep
GGTTVEFVIGAAESFSGCWVWYDWSLSMVVVVVCVLTYVVERVGSSFRGRRSAADAVKVLKGKSRLYYEAVGKGTSASCG

SEQ ID NO: 232798 - protein, 81 aa, Zea mays
  Clone ID: MRT4577_143906C.1.pep
RQLVARVAPLLVAVSKESSPPPPGDGAARKNDVHRGYAARPAGQDGGRAAGKTRKGASYRARGSRHRAVVKRLSAISEDGE

SEQ ID NO: 232799 - protein, 62 aa, Zea mays
  Clone ID: MRT4577_143907C.1.pep
RHNLVWLRLLVSFYKSWFMQNVNAKLNTWWNHNVLNQKPPFERLHTAPNCILVVALMRSCLR

SEQ ID NO: 232800 - protein, 102 aa, Zea mays
  Clone ID: MRT4577_143908C.1.pep
KTGFFFTLGPCPHLAGGFFGAPIPLVNKKRGGLVPMFLPLSWAIWAQGSWPGPLFFSRGPLFFVPKFFCPLVLPGLGPLKVGVGLFFLRFLLGPFKKKIKSG

SEQ ID NO: 232801 - protein, 34 aa, Zea mays
  Clone ID: MRT4577_143909C.1.pep
APPAWPRKEPAPPPPPTPPPPPPPPRTPPPPPPP

SEQ ID NO: 232802 - protein, 76 aa, Zea mays
  Clone ID: MRT4577_14390C.1.pep
QSTNLDQVRHVNNQRSSTTLITHTSLSTRACTEQKQIVQGSTTERKEWWWWWEGLGERRWKDCKTHAWAHPSIPDR

SEQ ID NO: 232803 - protein, 71 aa, Zea mays
  Clone ID: MRT4577_143910C.1.pep
SCHYVVCIVEFNDRGRVIKKRIVSAMIKNHDHRVNCCRGQLFCLVQCPRLRWCKASQKTRMRQRMRGRMCG

SEQ ID NO: 232804 - protein, 102 aa, Zea mays
  unsure (1)..(102): unsure at all Xaa locations
  Clone ID: MRT4577_143911C.1.pep
NASVEFFDITGLCNDSSNYGEIDTDEQIGHRALFLQDRTHMIMYQILVWTLIRLELGMNWTGXVGSXYAMGIELIEYVHRAELTIAGGPIEWLDHIEIYPVA

SEQ ID NO: 232805 - protein, 153 aa, Zea mays
  unsure (1)..(153): unsure at all Xaa locations
  Clone ID: MRT4577_143912C.1.pep
MDAPPVRAQDRYDYVMKVVLIGEYAGCNSCLLRXVYERCSSRSLITTFGLDLCIRLLELNGTRIKIQMXETACKQRLRTITTRSYRAGMGIXTXYEGSDHMLIRTIRKWITNIEQXRSDNVNTIMPXYKADVDDSXGLQPTTKGQGVXDEYGI

SEQ ID NO: 232806 - protein, 93 aa, Zea mays
  unsure (1)..(93): unsure at all Xaa locations
  Clone ID: MRT4577_143913C.1.pep
CMPLSIAGDGGIRPGQGPPPPTLXDGALQPFLVTPCGVSQSIGSPGMIVMVVELLEDLPCRRPNPNNGRTDGREGGGGVGXGRRRRVSLCTPR

SEQ ID NO: 232807 - protein, 75 aa, Zea mays
  Clone ID: MRT4577_143914C.1.pep
TTLATKILYILALLALFASATDAFIIPQCSLAPRSIIPQLLPPHTSMACEHPTALAYRLPQAIAASVLPQPIAQL

SEQ ID NO: 232808 - protein, 206 aa, Zea mays
  Clone ID: MRT4577_143915C.1.pep
MARASSSSLSMGVVAALAVLVVLCAAVRAAAQGKTGPPAPKLSSNFKTIHPGRFGKRAQVLTCDDEKDKKNPCVATCDKVRCPNECIVMCPGCKTYCMCDFYPGVSCGDPRFTGADGNNFYFHGKKDQSFCVVSDADLHINAHFIGKRNPTMSRDFTWIQALGIRFADHRLYMAAQKTVEWDSDVDRLELAFDGMPIDIPTEVDAE

SEQ ID NO: 232809 - protein, 45 aa, Zea mays
  Clone ID: MRT4577_143916C.1.pep
LTRFTLHEFKAADIPKRLASTIGIHTYHRHMNKYLYCLHSQFHRL

SEQ ID NO: 232810 - protein, 124 aa, Zea mays
  Clone ID: MRT4577_143917C.1.pep
MGKVKVGVNGFGRIGRLVTRAAFNSGKVDIVAINDPFIDLNYMVYMFQYDSTHGKFHGTVKAENGKLVINGNPITIFQERDPSKIKWGDAGAEYVVESTGVFTTMEKAGAHLQGGAKRVIISAP

SEQ ID NO: 232811 - protein, 85 aa, Zea mays
  Clone ID: MRT4577_143918C.1.pep
PRKGVGINCGGPINRNFLGFVGENPSRKGVKKTTLFFFITPPLRFGFMVQKPPIFGGRGCNLNDQWLGIFPGEKREEFGFPRKAD

SEQ ID NO: 232812 - protein, 92 aa, Zea mays
  Clone ID: MRT4577_143919C.1.pep
GFQANQGSLSVGGLYTGDSQTPGKARVNSNGSVAVVLHQEVKPKSVLRISGEFGIESLGRTNKFGLAIKEYAKWFNQFGVVRKSSKKILAPD

SEQ ID NO: 232813 - protein, 129 aa, Zea mays
  unsure (1)..(129): unsure at all Xaa locations
  Clone ID: MRT4577_14391C.1.pep
LFXXSFSSFPRGXCSLRVSRLFXALXGVSRPVWAAFPAALPRCRRLVVRLGLGRAGLXPSLASLSGVLGPGPSLGPPLRXPFRAAXPPXSPAGLLPVRSPFLGPSSWVSSPVFXXLLXFXGWSRLGRVG

SEQ ID NO: 232814 - protein, 120 aa, Zea mays
  unsure (1)..(120): unsure at all Xaa locations
  Clone ID: MRT4577_143920C.1.pep
GNRKTPAWIPTEDNIRLGPFLFSERQAIGPFYFDTDDKDYXEPPPXAVFKSGDITLGFFYRSGIMKVDATFNFLYVSILNGMGVSESTLHCASVGIQGIASANPSLIFDLIYCYAGVYVC

SEQ ID NO: 232815 - protein, 89 aa, Zea mays
  unsure (1)..(89): unsure at all Xaa locations
  Clone ID: MRT4577_143921C.1.pep
RRRRRRWRRPRPPPPHGGITPGSTARARRRGAGQALSPXPKVEPVVDLTVLMPGQRYPTFLAQPAPLAPCPREGVLWPSHDRRRSFVPP

SEQ ID NO: 232816 - protein, 85 aa, Zea mays
  Clone ID: MRT4577_143922C.1.pep
GPLGRGGPRVMFCAPRAPVSYLRLTFLKGWRFFEPKPPLGGFETFFWAGLPFFSVCPPVPARELGPLFRGGCRPRIGGGPVLPPY

SEQ ID NO: 232817 - protein, 79 aa, Zea mays
  Clone ID: MRT4577_143923C.1.pep
MGAHANSIQPGFFPIPTTYINHYLISDATTGIAYGLAHIEYAYTPATITCKFNHSRSTDIHNVGPHEYQNGPSTICRRP

SEQ ID NO: 232818 - protein, 167 aa, Zea mays
  Clone ID: MRT4577_143924C.1.pep
MALALASPMASLSFHSGRISAASIGGVGRTRRAATVGVSASPFLRSSFVSSSSTSSASASPASLAAAVSASLAFTSSSSFAGSSLGIEFSYSIMTTRRSRGMQIRAGKAALCMTKRSRSRKSLARTHGFRRRMRTTSGRKVLKRRRAKGRKVLCTRTNSNSGKKRMF

SEQ ID NO: 232819 - protein, 74 aa, Zea mays
  Clone ID: MRT4577_143925C.1.pep
LNQNNTIYWSGQPRLSFSVDICWAVPCNQSSLCTYLGMRPSSLGPSSTLHPSMVPTGSCGFRPSSSSPTLMSRF

SEQ ID NO: 232820 - protein, 169 aa, Zea mays
  Clone ID: MRT4577_143926C.1.pep
MALALASPMASLSFHSGRISAASIGGVGRTRRAAPVGVSASPFLRSSFVSSSSTSSASASASPASLAAAVSASLAFTSSSAFAGSSLGIEFSYSIMTTRRSRGMQIRAGKAALCMTKRSRSRKSLARTHGFRRRMRTTSGRKVLKRRRAKGRKVLCTRTNSNSGKKRMF

SEQ ID NO: 232821 - protein, 145 aa, Zea mays
  unsure (1)..(145): unsure at all Xaa locations
  Clone ID: MRT4577_143927C.1.pep
VTRHKASLSSIFSKQKQCENNKLGLDXDFGNLTDISNRLSCCCFFLSRDGSIVPACMRCEQCLTQESGPEHHSRNGGDVHVHVRTSLQNTHPILMRHACDATCAHRHRHRRRERLTVTVTGEGREKEPGLCSTASARGGRRWAPR

SEQ ID NO: 232822 - protein, 67 aa, Zea mays
  unsure (1)..(67): unsure at all Xaa locations
  Clone ID: MRT4577_143928C.1.pep
FFFFFFFXXXXXXXXXXLLKCPLSKPLRPLHFFFSFQNARLFFRLSNTGCRSITLTPFVFSQGQLMF

SEQ ID NO: 232823 - protein, 76 aa, Zea mays
  Clone ID: MRT4577_143929C.1.pep
IHGAAEGLKGFACRQGLSEGACLPPFQHGWAMTTCVDSSMFSVYAVMDPRAPDYTLKKKGRGGLRRESSSTLESGP

SEQ ID NO: 232824 - protein, 81 aa, Zea mays
  Clone ID: MRT4577_14392C.1.pep
PFPTLVRFWFLLPSPSSCSILLAALLFSVMVGNTLFFRLPPFARHFLCLFTPPVGFDNFLSSMASLRPCGVPPPPSILCLC

SEQ ID NO: 232825 - protein, 230 aa, Zea mays
  unsure (1)..(230): unsure at all Xaa locations
  Clone ID: MRT4577_143930C.1.pep
MPWQPSPLFAVFRQQRLASSWAAAIAGHARCGRHAAALTVFRRVLRAHPAVAASDQFAYAALLRCRDRRLAYQIHAQACRRGLTASNPVLACSLLIFYAXTARSGTAPPGCSXEMPCPDTVSYTAMISALLRAGDCHGALALYPCMLPLCAPTQHTFSKLLAPCASMRLHRHGSQLHAQLLRWGCWGPHLGLVLKTALVHMYAACGAMVSARAVLHATPETDVVLWTAII

SEQ ID NO: 232826 - protein, 138 aa, Zea mays
  unsure (1)..(138): unsure at all Xaa locations
  Clone ID: MRT4577_143931C.1.pep
RGHASRGSARHTNRISLSTTYQQCLARCLYFLALLALFASASNAYIIPECSLAASYIITQLLLPVTXMAFEHSAVQAYTLHQAIAASVLHQPIAQLQQQSLVHITIQTIAAXQQQQLLPSLIHLAMVNTVRYLQQQLL

SEQ ID NO: 232827 - protein, 295 aa, Zea mays
  unsure (1)..(295): unsure at all Xaa locations
  Clone ID: MRT4577_143932C.1.pep
AVAVGMEAAITRSDSXITAYRDHCTYLARGGDLVSAFSELMGREAGCSRGKGGSMHFYKKDANFYGGHGIVGAQVPLGCGLAFAQKYKKEETATFALYGDGAANQGQLFEALNISALWKLPAILVCENNHYGMGTAEWRAAKSPAYYKRGDYVPGLKVDGMDVLAVKQACKFAKDHAVANGPIVLEMDTYRYHGHSMSDPGSTYRTRDEISGVRQERDPIERVRKLLXLAHDLATAAELKDMEKEIRKQVDDAIAKAKXESSMPDTSELFTNVYKKGFNVESFGPDRKELRATLP

SEQ ID NO: 232828 - protein, 392 aa, Zea mays
  Clone ID: MRT4577_143933C.1.pep
MAAAALLRRLPAARAQAQAPAFMAARPISDSTAALTIETSVPFTSHLVDPPSRDVTTTPAELVTFFRDMSLMRRMEIAADSLYKAKLIRGFCHLYDGQEAVAVGMEAAITRSDSIITAYRDHCTYLARGGDLVSAFSELMGREAGCSRGKGGSMHFYKKDANFYGGHGIVGAQVPLGCGLAFAQKYKKEDTATFALYGDGAANQGQLFEALNISALWKLPAILVCENNHYGMGTAEWRAAKSPAYYKRGDYVPGLKVDGMDVLAVKQACKFAKDHAVANGPIVLEMDTYRYHGHSMSDPGSTYRTRDEISGVRQERDPIERVRKLLLTHDLANAAELKNMEKEIRKQVDDAIAKAKESSMPDTSELFTNVYKKGFGVESFGPDRKEMRASLP

SEQ ID NO: 232829 - protein, 394 aa, Zea mays
  unsure (1)..(394): unsure at all Xaa locations
  Clone ID: MRT4577_143934C.1.pep
MAAAALLRRIPAARAPATAFMAARPVSDSTAALTIETSVPFTSHLVDPPSRDVTTTPAELVTFFRDMSLMRRMEIAADSLYKAKLIRGFCHLYDGQEAVAVGMEAAITRSDSIITAYRDHCTYLARGGDLVSAFSELMGREGGCSRGKGGSMHFYKKDANFYGGHGIVGAQVPLGCGLAFAQKYKKEETATFALYGDGAANQGQLFEALNISALWKLPAILVCENNHYGMGTAEWRAAKSPAYYKRGDYVPGLKVDGMDVLAVKQACKFAKDHAVANGPIVLEMDTYRYHGHSMSDPGSTYRTRDEISGVRQERDPIERVRKLLLAHDLATAAELKDMEKEIRKQVDDAIAKAKESSMPDTSELFTXKKKNVYKKGFNVESFGPDRKELRATLP

SEQ ID NO: 232830 - protein, 225 aa, Zea mays
  Clone ID: MRT4577_143935C.1.pep
MQLQHGPRPGVAGAARPRSSLPRRPSLPRRRRSSSSRTRTTTTALAVLVAAATRDGARKTTASGSRATAADVVRQFYDGVNRRDLAAVEPLIAEGCVYEDLVFPRPFVGRERVVGFFGEFMGTISPDLQFVIDDISAEDSAAVGVTWHLEWRGRPFPFSRGCSFYRLLGSGSDSDADSDSEQQRLQIVYGRDCVEPAAKPGDLALVIIRGVTWILERFPSLASRL

SEQ ID NO: 232831 - protein, 170 aa, Zea mays
  Clone ID: MRT4577_143936C.1.pep
TGRQQDHAGSARPPAPRRLVYSPGRRLLWRLLDQRSPAPRIWQGRDSRSTSGRIQPPPGRACRPLPLGGPRGSGPGARGDQRRSLAPGAHRRSTLAAPTLEWGSSLTSPVLCLPRRPTQQCAVPRCGAPLGDLQGPSWWPPSPGDPAPPGGPVGLPESGPGRSAWPDTLS

SEQ ID NO: 232832 - protein, 220 aa, Zea mays
  Clone ID: MRT4577_143937C.1.pep
MQLQHGPRPGVAGAARPRSSLPRRPSLPRRRRSSSSSRTRTTTTALVVLVAAATRDGARKTTASGSRATAADVVRQFYDGVNRRDLAAVEPLIAEGCVYEDLVFPRPFVGRERVVGFFGEFMGTISPDLQFVIDDISAEDSAAVGVTWHLEWRGRPFPFSRGCSFYRLLGSSDSEQQQRLQIVYGRDCVEPAAKPGDLALVIIRGVTWILERFPSLASRL

SEQ ID NO: 232833 - protein, 53 aa, Zea mays
  Clone ID: MRT4577_143938C.1.pep
NIFFYQPFQTNCGFFITREGSPINSYKIHSPKCNHINLSLLFFQPHSTYFTYI

SEQ ID NO: 232834 - protein, 68 aa, Zea mays
  Clone ID: MRT4577_143939C.1.pep
KVELKMKGAFFLNAVVNKGATIGNRLGVKINSTVVPTVSPLVVKTSISVASSEQDSPQGGCGLGLEDR

SEQ ID NO: 232835 - protein, 72 aa, Zea mays
  Clone ID: MRT4577_14393C.1.pep
PFVMHIFHIRHVQVPPWQVQWKHHEVKVTDYKAFLSCIKIEYEQVIKIHYSSKKFLQSSKNRLYSIGAFSVQ

SEQ ID NO: 232836 - protein, 95 aa, Zea mays
  Clone ID: MRT4577_143940C.1.pep
MSVSCLCFLYVELFSSSGSSDGGAGPALRRSSSASSKVENPVQGLIAYCKRSQQLAFVRKSASDAGFRFLSSSASRIAAESESDDLDELTEICRG

SEQ ID NO: 232837 - protein, 257 aa, Zea mays
  Clone ID: MRT4577_143941C.1.pep
MAAEDQTPCTKLRPGKAKTRKKTKRDKWGQPISAAAADEEPSVEPEQEHPAGVVEAAVQVEKEEEEEATAAAEGYEPGKVVASGLPYTTTEADIRKLFEFYGPIQSMQLSRFPDSGNFRGLAFLCFESEEDAIKSLELDGFKIGSRYMRVERCRVTATSNKKRKAEFETDPKKSEGCLSAYVGNLSWNVDENDLRGFFGPSKIASVRFAVDKRTGGSRGFCHVEFQDDESLEKAIAMNQSKLQGRPVKVAYSVSNRG

SEQ ID NO: 232838 - protein, 79 aa, Zea mays
  Clone ID: MRT4577_143942C.1.pep
LCYWWISSAAPLTWKHSLCSSADDVDENAAVKNYAVLPRVQWSGCTFYKSYAFFFPKGGCGGSRVDRIGSVMLTFVPAV

SEQ ID NO: 232839 - protein, 146 aa, Zea mays
  Clone ID: MRT4577_143943C.1.pep
IRLESKFVIMDFFDAGGETCGTVIQRATTELIRNPWRTRKAQAAVRSPLAGQSTVTGAGLTDLHYLGLVIKETLRLHPPATVLLWECLSARKVLGYHLACGAMGLVNAGSMTKAQARDRTALAVQSTVTEAGLTDLHYLRLVIKED

SEQ ID NO: 232840 - protein, 159 aa, Zea mays
  Clone ID: MRT4577_143944C.1.pep
SRADRPVRFNLKGKWHLDVAFGCLLFPLVNLLSHINISLVPASPGPAVGVSSVEQSIVARDPVAMALYAVVVTVCAPIWEEIVFRGFLLPSLTRYMPLPWSILASAAAFALAHFNAQRVMPLVFLGVVMGGVFARSRNLLASMVLHSLWNGFVFLDLMK

SEQ ID NO: 232841 - protein, 72 aa, Zea mays
  Clone ID: MRT4577_143945C.1.pep
SRQGGPLHRVGAVRRHAGASVLRHGAGERGARVLRGVMLARASTSPVEGSCNRTAADVPKAHGSMKGRCGRS

SEQ ID NO: 232842 - protein, 92 aa, Zea mays
  Clone ID: MRT4577_143946C.1.pep
PSAVRRLTNPFCDISIMLVLSTVRRVKKKRAVSKHRCLGAVFRCIRQGKLDRTSLARRILRPDCDGLPEHDVVVVSPSRWSPWAALPAAAVG

SEQ ID NO: 232843 - protein, 85 aa, Zea mays
  unsure (1)..(85): unsure at all Xaa locations
  Clone ID: MRT4577_143947C.1.pep
RGGTWARPKGSHDGYSSDSVLKNAFSDFRKLGXRIFVFVIGGSSVKRVKLCTVAXSKVKPHIILGSYSLHDPRQVDSKIKVDVSE

SEQ ID NO: 232844 - protein, 106 aa, Zea mays
  Clone ID: MRT4577_143948C.1.pep
MVQIIGHHDLSPEDFLMEEGAASSMPRGSNRPAPGAAAMHAAQQHTPVQTSRTLSRAAHGGVLSAARELLRNPPSSTASPGAMRQWREDVDHLLGMTHPDSARSRP

SEQ ID NO: 232845 - protein, 119 aa, Zea mays
  unsure (1)..(119): unsure at all Xaa locations
  Clone ID: MRT4577_143949C.1.pep
MINLTAPMATNRLYGLMILDEAECADNATIDLQYXQRGIGALLGPYLPSPTATGRDKRRLQPYRLQQVLGTRHLRVLPLMLQQSAAPITGTXLVQTMRPQQLARLTLPAISRLTLSNLS

SEQ ID NO: 232846 - protein, 42 aa, Zea mays
  Clone ID: MRT4577_14394C.1.pep
ARKSGELSFLEVKWPGNYPNPQRSPREINNLKRCWCYGVVRY

SEQ ID NO: 232847 - protein, 95 aa, Zea mays
  Clone ID: MRT4577_143950C.1.pep
FARAFVKDPRFLFLDEAPSALDSESERFFQDALDRVMFNRPPVVFAPRLSTIQNAVLFPVVRNGVFFEKGKPAPLVNVKDGGYGSLFALHSAAFL

SEQ ID NO: 232848 - protein, 507 aa, Zea mays
  Clone ID: MRT4577_143951C.1.pep
MSGGSSPSSRRNSFNSLSKDLDLPSEQGCLSIVVLGASGDLAKKKTFPALYHLFEQGFIQSGEVHIFGYARSNLSDDGLRERIRGYLKGAPEDLSEFLQLIKYVSGSYDTGEGFEKLNRAISEYEVSKSSGSYRRLFYLALPPSVYPSVCKMIRTYCMNPSSHPGWTRVIVEKPFGKDLDSAEELSAQLGELFEEHQLYRIDHYLGKELVQNLLVLRFANRLFLPLWNRDNIDNIQIVFREDFGTEGRGGYFDQYGIIRDIIQNHLLQVFCLVAMEKPVSLKPEHIRDEKVKVLQSVNPIKPEEVVLGQYDGYKDDPTVPDDSNTPTFASVVLRVHNERWEGVPFILKAGKALSSKKAEVRVQFKDVPGDIFRSKKQGRNEFVIRLQPSEAMYMKLTVKKPGLEMATEQSELDLSYGMRYQNVKIPEAYERLILDTIRGDQQHFVRRDELQAAWKIFTPLLHDIDDGKLKALPYEPGSRGPKEADELSARVGYVQTHGYIWVPPTLA

SEQ ID NO: 232849 - protein, 53 aa, Zea mays
  Clone ID: MRT4577_143952C.1.pep
QVKIIPNSSCWESASAEGPQTTNSKFYDLFPDHSSSRHASAESYKMKTKVWSK

SEQ ID NO: 232850 - protein, 40 aa, Zea mays
  Clone ID: MRT4577_143953C.1.pep
SMMFSISVMQLLLHSSISVYIVSLVINLVFAFKQSNIIFF

SEQ ID NO: 232851 - protein, 64 aa, Zea mays
  unsure (1)..(64): unsure at all Xaa locations
  Clone ID: MRT4577_143954C.1.pep
NTLSLRPFFTSQIVQVLGFIGGKVNLHLRAGFADRIAVQSNRXFRRAILFFETCKVQQYPFTLN

SEQ ID NO: 232852 - protein, 133 aa, Zea mays
  Clone ID: MRT4577_143955C.1.pep
CWLLNMAAYELCQPQGDATDSFPVSSYVTLVSLLVNRPEDVQEMRAKGLVVSVFDDAETLGFFKALAPHLSVGYRYYEVFQGLQEYRQERWLWIAVHRFLYNNIKTIATVFSIVGVLAGLFKTILSVKQPHGP

SEQ ID NO: 232853 - protein, 97 aa, Zea mays
  unsure (1)..(97): unsure at all Xaa locations
  Clone ID: MRT4577_143956C.1.pep
LEAFVNEILDRFDFEPMAADSLGQVYRARVNGQHVVINVQRPGMEDLINIDLKNLREIAXYLQIVXSRSDGAXRDCVAIYNECSYGLFVEIFYMNEA

SEQ ID NO: 232854 - protein, 93 aa, Zea mays
  unsure (1)..(93): unsure at all Xaa locations
  Clone ID: MRT4577_143957C.1.pep
THTSGTKLYSTIASKTHSHHTGRSISKSAAPPTINPQCTQATIASLLPPYLSPTESSECXENPIIQPYKIQQAITSGILPLTPMYLQQSSILL

SEQ ID NO: 232855 - protein, 58 aa, Zea mays
  Clone ID: MRT4577_143958C.1.pep
AHRSLHCLGPHRQHHQRRCQVLRRDQLLGGGASGHYCRSERSSCQLVLASTLNKRLLV

SEQ ID NO: 232856 - protein, 51 aa, Zea mays
  Clone ID: MRT4577_143959C.1.pep
NEPRSLEPEVEERTVIESYGVELCDGESGPASPVQRGLAGVWNGAIHPVRP

SEQ ID NO: 232857 - protein, 148 aa, Zea mays
  Clone ID: MRT4577_14395C.1.pep
PVYPAFFKRTPDPMRGRVLYLKTIFSAVSSPSSTTTCTTGCTNALSNVLSFILGFNFYISIYNSWGGGSSLSFVLLPRLHLGVALSIAAGGAAAPAEGHRYGHHYSHHENPDDDALDHVLVYGGVYDGARDAAPRLRDRLGHCCRHFL

SEQ ID NO: 232858 - protein, 84 aa, Zea mays
  Clone ID: MRT4577_143960C.1.pep
SRTMALCDRSNIVYSARFRELSPSESDWGYLRTASAARYIYLRHGIPTSTLSDNLCRTTYEWVIHSSVLHKQRWHLTFRPSLSA

SEQ ID NO: 232859 - protein, 56 aa, Zea mays
  Clone ID: MRT4577_143961C.1.pep
PILLSSHKKGKTTYLTWIEEDSACASSWSFSEFERLWRRQIRCSSLKLLPEILSVA

SEQ ID NO: 232860 - protein, 41 aa, Zea mays
  Clone ID: MRT4577_143962C.1.pep
QGGVFPYFKHFNYRIYYNWAFQNLLKRIIGKKDFYIWKDFT

SEQ ID NO: 232861 - protein, 91 aa, Zea mays
  Clone ID: MRT4577_143963C.1.pep
APLHSDDATPRGRQSCSYRPRDKNCRTDTRNGRITCLPVWTAVVLAVQRACEPRRRCDYSPVPTERDVCSGDTNLIEDIIVRFLRYLLITR

SEQ ID NO: 232862 - protein, 71 aa, Zea mays
  Clone ID: MRT4577_143964C.1.pep
PTRPAYEKSQHACVVACFCRLRVGYFVLFHKKFTPTSLMETKAIGLQDHASVYLACNFLYCALFNSRQHIL

SEQ ID NO: 232863 - protein, 102 aa, Zea mays
  unsure (1)..(102): unsure at all Xaa locations
  Clone ID: MRT4577_143965C.1.pep
VFFSVSKGGLTGCGEAXRLKTIMXAVGALAALSLRRXLQSPSTRVGNCMNLSFCQIDXSGDGRLSLLELTEGIEDLCAGCDYAAPLMHLLVCSRDCSLRSVE

SEQ ID NO: 232864 - protein, 115 aa, Zea mays
  Clone ID: MRT4577_143966C.1.pep
RGQPPIRRPSRLLRTSSWMIRNPMRQHLTRRRLPVELKSARTAKQGAQNRELSKVSRRESGLLHDLAIMIYRYSTVWTNLPTCMLSHAYEHIYIIRLDPDKMLRRLHYIYYIPLI

SEQ ID NO: 232865 - protein, 62 aa, Zea mays; identical to SEQ ID NO: 211964
  Clone ID: MRT4577_143967C.1.pep

SEQ ID NO: 232866 - protein, 86 aa, Zea mays
  Clone ID: MRT4577_143968C.1.pep
ALREVVTMDASNTEGEGGSIAWVPHSCMLRPAGKKTESVFLAWSATEEPVAEDPGEQQVEVAEQELIEGEEQVVQEEPQGEEFDLI

SEQ ID NO: 232867 - protein, 92 aa, Zea mays
  unsure (1)..(92): unsure at all Xaa locations
  Clone ID: MRT4577_143969C.1.pep
MGLPGLALSALYVTASQACIIPHCSLAPSAIISQFVPPVTSMRFEQLAVHANMHQHALAASVLLQLIAXLRQLYLAHLAIQAITTHQEQQLL

SEQ ID NO: 232868 - protein, 42 aa, Zea mays
  Clone ID: MRT4577_14396C.1.pep
HPRGAGEVTSHLKTKVGPWIFKSQVKNRSRRFRRMENVVASS

SEQ ID NO: 232869 - protein, 101 aa, Zea mays
  unsure (1)..(101): unsure at all Xaa locations
  Clone ID: MRT4577_143970C.1.pep
MDKMDEAAAASLCLAALMAVVVWQGQVELQRLRDLQCCQEVQESPLDACRQVLDRQLTGGGCRRRVGPLRXRTVLRMLCCQQLQDVSLECHXDVIRSMVKG

SEQ ID NO: 232870 - protein, 57 aa, Zea mays
  Clone ID: MRT4577_143971C.1.pep
GMRQPGSPPRLINTATVVSRLPTNGLITTNACDAWVNKDLSLVYRRSQALFIWLTAS

SEQ ID NO: 232871 - protein, 96 aa, Zea mays
  Clone ID: MRT4577_143972C.1.pep
EELPADPGNKGGQTTNEDITNNSRSPVADTDLTIPSKKTIHVPPFNSFLVLEVSEKHKADDSSCDRYPVKVLRLLNEHSGTECAVHLCDEWFDSIV

SEQ ID NO: 232872 - protein, 102 aa, Zea mays
  Clone ID: MRT4577_143973C.1.pep
PLFFFFFCYFFFFFFFFFFFVFSFFFFFCATCQIFISTKGCHAKAFFAKLDNIHPAKNCLKGRGPCPVKRKKKKEKRKEKTKQAKGTRGPQAKPNHKNNSWD

SEQ ID NO: 232873 - protein, 64 aa, Zea mays
  Clone ID: MRT4577_143974C.1.pep
SRNYPGSGHNPDSHEPGKASPRVCEAPEPPHSCRRAAPRAQDAAAISPSHRTLTRSHGVDRSLL

SEQ ID NO: 232874 - protein, 125 aa, Zea mays
  Clone ID: MRT4577_143975C.1.pep
RYYRCLAHDHQVSSCKNPFRCIRCCRPGHRERHCRFRSSSPVRQVNSSVQCDHPQQSRTWAEVVAMPSPSMLSADAIAKSPSQGHRDPPSASQPIGLRGKDGDPCCRSCFCASLASIPLNLQSLI

SEQ ID NO: 232875 - protein, 57 aa, Zea mays
  unsure (1)..(57): unsure at all Xaa locations
  Clone ID: MRT4577_143976C.1.pep
XTPVPAPNAPPYLHQQYFQHGVLNKTHRVVANTARYFAPVLSFIPLTMLNSCADLPL

SEQ ID NO: 232876 - protein, 185 aa, Zea mays
  Clone ID: MRT4577_143977C.1.pep
GRPFFFFFFAIKQENILIKYTEIHFSCTRTGKNKRVLCCTQDLAHATEAENPRNSWPEKEEKKTHETDSVHRIYAHNMVLPAQFQLLTRGERISDVCSEASQHQCQATWTFCSSDANTHSSRLQRLPIHTTTKTSQHFSHDTSCYLPQGNLAPNTISRTLVRIWVPCWRCVGIRAHAHCTERSLQ

SEQ ID NO: 232877 - protein, 124 aa, Zea mays
  Clone ID: MRT4577_143978C.1.pep
IFPIVFVFLPSIAARPPSSSNLLHGRPWRCFPLDAAHPSRTGTRSCLALLQPLDQSHHHVAWPGERGDSTVTTSPVGLLRRTHRPRCGPALPSTGPAVMVTTGLPISNGDGGLLYPTARLAHRP

SEQ ID NO: 232878 - protein, 166 aa, Zea mays
  Clone ID: MRT4577_143979C.1.pep
HHQTRNILIKYTEIHFSCTRTGKNKRVLCCTQDLAHATEAENPRNSWPEKEEKKTHETDSVHRIYAHNMVLPAQFQLLTRGERISDVCSEASQHQCQATWTFCSSDANTHSSRLQRLPIHTTTKTSQHFSHDTSCYLPQGNLAPNTISRTCRPCSRALHRAQFAIR

SEQ ID NO: 232879 - protein, 128 aa, Zea mays
  unsure (1)..(128): unsure at all Xaa locations
  Clone ID: MRT4577_14397C.1.pep
TRSEIRLAGGGGVYSYCIIAATTRAASLHAVVTLMHAAKIGWAGATLXLAFRPSSELACTAFGVDAGAGRITCSVQDVISRCVNSAKLAGFALATLGLLVLGASAEGAPKMLTYDQMQSRTYMEVKGT

SEQ ID NO: 232880 - protein, 167 aa, Zea mays
  Clone ID: MRT4577_143980C.1.pep
FFLVNILVQIIMFTIKQENILIKYTEIHFSCTRTGKNKHVLCCTQDLAHSTEAENPRNSWPEKEEKKTHETDSVHRIYAHNMVLPAQFQLLTRGERISDVCSEASQHQCQATWTFCSSDANTHSSRLQRLPIHTTTKTSQHFSHDTSCYLPQGNLAPNTISRTCRLG

SEQ ID NO: 232881 - protein, 61 aa, Zea mays
  Clone ID: MRT4577_143981C.1.pep
KHRVKNHRHDWVTKGPYWPKTWPCSSRRRHSMKWFNKTAGRRVAFKVVTCLQVATLCWEHG

SEQ ID NO: 232882 - protein, 60 aa, Zea mays
  Clone ID: MRT4577_143982C.1.pep
GLRGTLLHVAIVQAALPQGIVPFVFAKEYGVHPDILSTAVIFGMLIALPITLVYYILMGL

SEQ ID NO: 232883 - protein, 76 aa, Zea mays
  unsure (1)..(76): unsure at all Xaa locations
  Clone ID: MRT4577_143983C.1.pep
IVRGGRDLXPLXPXAWGGSGQIKKIGWGSQGPAQAQNLRDSLVEAKSDIXIKLXLRAGASCLXESXFSGGGAPTHF

SEQ ID NO: 232884 - protein, 363 aa, Zea mays
  Clone ID: MRT4577_143984C.1.pep
SLKSKLHFRGFVISDWLGVDRITSPPGANYTYSVQAGINAGIDMVMVPYNYTDYINDLTSLVHKGVINISRIDDAVKRILRVKFTMGLFENPLADLSFAEQLGKKEHRELAREAVRKSLALLKNGNSPDQQFLPLPKRARSILVAGSHASNLGYQCGGWSIQWMGDSGNITTGTTILDAIKSTVADSTSVVYSENPDDSFMKHNDFSFAIVVVGEPPYAETVGDSTDLTMLDPGPDTIRTVCAAVKCAVVIISGRPIVIEPYVPLVEALVAAWLPGTEGQGVADVLFGDYGFTGKLPHTWFKSVDQLPMNVGDLQYDPLYPFGFGLMINSSLPGFSGVDNLGYRKQRVLFAVLCSLLSLVLIS

SEQ ID NO: 232885 - protein, 81 aa, Zea mays
  Clone ID: MRT4577_143985C.1.pep
MRHQLGSGNLAKADNAHTVATGQAASRKVLDKDAVHRSGMAENVNTDGDVMQAVHQHNGPSLHKMMAMRAKIYVVMQNASR

SEQ ID NO: 232886 - protein, 78 aa, Zea mays
  Clone ID: MRT4577_143986C.1.pep
KKVNVGFGEDTQSPVKMLCSINGCSLKFLVHQKKKKKVCDAFKTNEPFSSKFQPPPVNFYWPRKGPWNSEVFFFFFFF

SEQ ID NO: 232887 - protein, 100 aa, Zea mays
  Clone ID: MRT4577_143987C.1.pep
CSSVFEILLQVLTIIWLFLYGALNIGMISEKKINFILEKTFVDVSHVTIFTLTYLFFCASLILIGEHIVWIQRQLNHPLYLKGHLYPGRFCAQCQLSELF

SEQ ID NO: 232888 - protein, 241 aa, Zea mays
  Clone ID: MRT4577_143988C.1.pep
MEKAIDRQRVLLAHLLPSSSAAPSRISASACAAGDSAAYQRSSCFGDDVVIVAAYRTPICKAKRGGFKDTYPEDLLTPVLKAVLDKTGINPAEIGDVVVGTVLGPGSQRAIECRTSSLLAGIPETVPVRTVNRQCSSGLQAVADVAAAIKAGFYDIGIGAGLESMSVNSVGWEGQVNPRVIELQKAQDCLLPMGITSENVAQRYGVTREEQDKAAAESHARAAAATASGKFRDEIIPVHTK

SEQ ID NO: 232889 - protein, 247 aa, Zea mays
  unsure (1)..(247): unsure at all Xaa locations
  Clone ID: MRT4577_143989C.1.pep
MEKAIDRQRVLLAHLLPSASSQTQLSASPCAAGDSAAYQRSSCFGDDVVIVAAYRTPICKAKRGGFKDTYPEDLLTPVLKAVLDKTGINPAEIGDVVVGTVLGPGSQRAIECRTASLLAGIPETVPVRTVNRQCSSGLQAVADVAAAIKAGFYEIGIGAGLESMSVNSVGWEGQVNPRVIELQKAQDCLLPMGITSENVAQRYGVTREEQDKAAVESHARAAAATXASGKFKDEIIPVHTKLIDPKL

SEQ ID NO: 232890 - protein, 102 aa, Zea mays
  unsure (1)..(102): unsure at all Xaa locations
  Clone ID: MRT4577_14398C.1.pep
CVFSXXVWFRIFSMVNLRHFSPTRADLVFQDXWANLEGKIPHVLRKGINSLMMLLAWWLWKQRNKCVFEGMXPSGNQIIQNIKDNAQRWCLAGAKDLCAIWT

SEQ ID NO: 232891 - protein, 124 aa, Zea mays
  Clone ID: MRT4577_143990C.1.pep
LSLVPTQLTALMAPSSASPSPQRPPCGPSLYKARRRAHGAGSPFSLELIPTPLLLVARDRPASTPPLVVELAADRSRAAESCSLPADPLLRPVDPMLVDSSLRKNYWSKVEDDTNFVFYFQNYV

SEQ ID NO: 232892 - protein, 65 aa, Zea mays
  Clone ID: MRT4577_143991C.1.pep
HASVHTYVHAFEQLPIQFWVAVHPTSELWTMHRCCSSSYYAWLTRCTTTTSWFTIPRSWSMSFDS

SEQ ID NO: 232893 - protein, 259 aa, Zea mays
  unsure (1)..(259): unsure at all Xaa locations
  Clone ID: MRT4577_143992C.1.pep
IGTLEPACCHALEYLHFYCDPPLYHGDVKPSNVFLDKNYLAKLAGCGLAHHSSSGNTTPSCTPVNVKAQATPGYVDPEYMVTQELTPKSDVYSYGVLLLELVTGKPVIQDNKSLVEWSRELIGTDYRLHELVDPSVADAFDLDELQVVADVIHWCTHRDGAARPSMKQVLRILYERLDPLSGRFARAVEGEEGXLLPRWRAGEGEAGGRXVIQFSGDXRGLGXSSSSTSRSHCSRSVLLECNSPEPQSSPAHGNGAFLA

SEQ ID NO: 232894 - protein, 66 aa, Zea mays
  Clone ID: MRT4577_143993C.1.pep
ENGSSGVTAPTLFRRRSEATTNETILGQWSNPDAQIPVGFNSVAGDSLYGLRAPPQFAQFQRVVHK

SEQ ID NO: 232895 - protein, 70 aa, Zea mays
  Clone ID: MRT4577_143994C.1.pep
FLVLYIIVQCKYIPKLNVQTSRACSVKHAVATVAKEQTHADTRHQHNKLEAAAVSDAIDHYRNTPNSKGF

SEQ ID NO: 232896 - protein, 141 aa, Zea mays
  unsure (1)..(141): unsure at all Xaa locations
  Clone ID: MRT4577_143995C.1.pep
ILQQLQQLLLTNLAAYSQXHQFLPFNQLAALNSASYLQQQQLPFSQLSAAYPQQFLSFNQLTALNSSAYLQQQQLLPFNQLTRVSPATFLTQTQFVPFXYHNTALNTYTLLQLXQLLSFKPLSLTNSTXFNQQPKFVCPLF

SEQ ID NO: 232897 - protein, 188 aa, Zea mays
  Clone ID: MRT4577_143996C.1.pep
MRPLTEKETQTLFEKLANYTGGSLKNLIAPLDDSPNADRYVFRLVRDRVFYVRLSIANLATSIAREKLLSLGTCLGKFTKTGKFRLHVTALPIIAEHARYKIWVKENGTMPFLYGSNIVKAHVGRWSEDCPEHQGVVVYSMNDTPLGFGVTARSTAEARRLDPTGITCFRQADCGEYLRDEDNLFATG

SEQ ID NO: 232898 - protein, 203 aa, Zea mays
  Clone ID: MRT4577_143997C.1.pep
NNRPPSPRKFPKFGRPKSWTEIDGRRRPRPPPHRRHRSLTTTTSSARSSSASPSPPASSTPLSSASGGSSTPPARPSSAASASATRPASPAPASATPAGIASCLSRGSPRSSPPPYAARPPAATPPSPADARESSTAGAAASSSRSSATAASITPLWCRFSPGSLQPSSHQPCCPTPTVTTGRGALNSLRCSYPRMAATAYRW

SEQ ID NO: 232899 - protein, 368 aa, Zea mays
  unsure (1)..(368): unsure at all Xaa locations
  Clone ID: MRT4577_143998C.1.pep
MEVRSEQGLMAGRDLFGMPKSPPAPAPPSSAAMQSVRMAYTADGTAVFAPVSSSAATPSYQPQGAAHGASMSAATVIGGNGAAAAPSMGEPVPKKKRGRPRKYGPDGSMALAMVPASAASGSPATGQGFSGPFSPPAXSGELSGGGXPDGFKKRGRPKGSTNRPRVDAAGSSGAGFTPHVITVQAGEDVASKIMSFSQHGTHGVCVLSANGSISNVTLRQTATSGRTVTYEGQFEILSLSGSFFLAEDGVQRSRNGGLSVSLAGPDGRLLGGGVAGLLVAASPVQIVLGSFNSGGGKEPQKQAPSEPTSAPPRVAPTAGMGGPSSPSSRGTLSESSGGAGSPPPLHRAMAASASNSNQPPFLSSMPWR

SEQ ID NO: 232900 - protein, 76 aa, Zea mays
  Clone ID: MRT4577_143999C.1.pep
CWLMGTNFVRMLSDLRYHFDGSSHIRESSFYVLVIQATHSIELVSPVMNILLNDIFTLRKIYASSCSVCLCCLIKN

SEQ ID NO: 232901 - protein, 43 aa, Zea mays
  Clone ID: MRT4577_14399C.1.pep
KRILFTECLIDFNYISTRKKVARRIQVTITHSSANKGRTMYRL

SEQ ID NO: 232902 - protein, 186 aa, Zea mays
  Clone ID: MRT4577_1439C.1.pep
PSSGGVHSSTWCLRGNVQQHELLIPIDSGSSHNFTSDIWQPRLSGVQSIHCRLADKVDNGQTISCPHHLPGAEWFISCYQFVNDLVDWLNKWRVIPYQSTSICLNWFAVCSWYLAFKVLQEDKNDYCSELFELAATFFSSGHGEYGANLLLNCKSLLTSVNGMLMANDLNKGIEMLGRDGKLLALP

SEQ ID NO: 232903 - protein, 59 aa, Zea mays
  Clone ID: MRT4577_143C.1.pep
KMCGCCSEHETFYSGNCGQAQWKACSLNDELLHTIHARENYVADPLRFALDGIMYTVIA

SEQ ID NO: 232904 - protein, 368 aa, Zea mays
  unsure (1)..(368): unsure at all Xaa locations
  Clone ID: MRT4577_144000C.1.pep
MEVRSEQGLMAGRDLFGMTKSPPAPAPPSSAAMQSVRMAYTADGTAVFAPVSSSPATPSYQPQGAAHGASMSAATVVGGNGAPAAPSMGEPLAKKKRGRPRKYGPDGSMALAMVPASAASGSPATGQGFSGPFSPPAXSGELSGGGXPDGFKKRGRPKGSTNKPRVDAAGSSGAGFTPHVITVQAGEDVASKIMSFSQHGTHGVCVLSANGSISNVTLRQTATSGRTVTYEGQFEILSLSGSFFLAEDGVQRSRNGSLSVSLAGPDGRLLGGGVAGLLVAASPVQIVLGSFNSGGGKEPQKQAPSEPTSAPPRVAPTAGMGGPSSPSSRGTLSESSGGAGSPPPLHRAMAASASNSNQPPFLSSMPWR

SEQ ID NO: 232905 - protein, 137 aa, Zea mays
  Clone ID: MRT4577_144001C.1.pep
MAAYAGTLVPPFLTVRLAVSHLRSITPGSYSLSHCLPRLAVARAASRGNGDGDGGPPAEGEKERRRSSLPALSEIRWGELLSPDPTNAVAVVLTGALVWAGASLLLQLALISAAIFAAAVKYSFVAALLLFVLIALL

SEQ ID NO: 232906 - protein, 94 aa, Zea mays
  unsure (1)..(94): unsure at all Xaa locations
  Clone ID: MRT4577_144002C.1.pep
PNFHPIPNNNLRCPFNIFSHPHYNSQXPWFLINHNYTLLYNDTKCPLLYPLTGYPHPHRPYYCAVGANNSYTPYIVHAHYNDCLYDPIDINDIN

SEQ ID NO: 232907 - protein, 116 aa, Zea mays
  Clone ID: MRT4577_144003C.1.pep
CAALEAAGCDGGPAPATVVWPLAMGARPPTEDACPTVAVVGAGPTLAADPAADYLATWASRSRLSHVATLREQCGRRHQECGRWRGINHCIGVDWRATCPGCHRRTATKSRQRGCW

SEQ ID NO: 232908 - protein, 73 aa, Zea mays
  unsure (1)..(73): unsure at all Xaa locations
  Clone ID: MRT4577_144004C.1.pep
CICFAEVSSFIVEFYFFIFLYLFFLFIIFLYLFYXFFFLYLFLLFWFFFLFLCFFVIIYLYFFIVIFFIIMFF

SEQ ID NO: 232909 - protein, 68 aa, Zea mays
  Clone ID: MRT4577_144005C.1.pep
PANPLFYCAMTRGRERAPLRSSWDLEFQVPGQLGPCSLFLPPHVPINQNDLQRLIFMGPKRLPKFFYP

SEQ ID NO: 232910 - protein, 130 aa, Zea mays
  unsure (1)..(130): unsure at all Xaa locations
  Clone ID: MRT4577_144006C.1.pep
GVGGGGGVFGSRRGGEGVRGGVARGDVVLVGGRGLRSLGEARVEEGFGARAPPQDXGGGRGGGGRRLRRXRLXRAPREEEGPQGGRGGRRREEAPLLRLXIDPPISXSSLAVCYPACEXYERXPAREGRP

SEQ ID NO: 232911 - protein, 176 aa, Zea mays
  unsure (1)..(176): unsure at all Xaa locations
  Clone ID: MRT4577_144007C.1.pep
MASEGIEQKMENLNVEKPSTSQSAEPTEKPAQQDKERKDQKKAAKPKKEKGENKQGQGKQGQGKQGQGKQGQGKKKEEDNADTKGITVTKAEDLSEWYQQVILKAEMLEFTDVPGCYIYLPRSYMIWEEIRDFFDAKIKAMGVENSYFPLFISEANLQREXSRLXGFAAEAEWVTE

SEQ ID NO: 232912 - protein, 43 aa, Zea mays
  Clone ID: MRT4577_144008C.1.pep
QDRPLKCDEPILSNRSGDHRGKFKVASFRKKYELRAPVAGTCY

SEQ ID NO: 232913 - protein, 112 aa, Zea mays
  Clone ID: MRT4577_144009C.1.pep
NIYHIIFWTLNMLYIPPCGVSFLKMMSVSPPLPPTVLEPNMLKLFFSRTENLLGSRSIAVLGVVERKYQIMSGCLLDVHCTATNEIGIVDTLTGDLCSCLSLKLHNQGSRQG

SEQ ID NO: 232914 - protein, 80 aa, Zea mays
  unsure (1)..(80): unsure at all Xaa locations
  Clone ID: MRT4577_14400C.1.pep
PPAHSRVPRVXKKKKKKKKKKKKKKKKKKKKKKKKKKKKKKKKKKKKKKKKKKKGGPFLEVPFFFPLACNLLLFFWGPLI

SEQ ID NO: 232915 - protein, 94 aa, Zea mays
  Clone ID: MRT4577_144010C.1.pep
AGFRSWFTSAVVPCFSVVLCLLLFVSMGGFLWVLSLCVFVVASAVRPSFIGPWVVPVPLSVALISHVSGCLFVWHPHLFEKIPHVCSSHLPKYN

SEQ ID NO: 232916 - protein, 37 aa, Zea mays
  Clone ID: MRT4577_144011C.1.pep
NVTAAGKDSNLTGHSGSHRRRLTLWEGAATRCCCIML

SEQ ID NO: 232917 - protein, 63 aa, Zea mays
  Clone ID: MRT4577_144012C.1.pep
IRITLWNRLADKIDSDSKKNHVNKNMLKIKAFVDGEQLKYNRIGIILNCCTRKKITGKKNKTK

SEQ ID NO: 232918 - protein, 218 aa, Zea mays
  unsure (1)..(218): unsure at all Xaa locations
  Clone ID: MRT4577_144013C.1.pep
MAPLIAAVMNHAAAHPVLMRHLLRPNHERFSRHQLAASSPQSSKXAQAISCTTRSVRVRRQNXVQMLSPSEIAQRDWLPSDFTFGAATSVYQIERAWNEYGKVESNWDDFCHNXPERILHGSNSDIGANSDHMYKTDVRLLKEMRMHAYTCSISWSTILSEGTKXNXINPDGIKYYRDLINLLLENDIQPYVTMFHWDAPLALDEKYGGFLDISLRGL

SEQ ID NO: 232919 - protein, 68 aa, Zea mays
  unsure (1)..(68): unsure at all Xaa locations
  Clone ID: MRT4577_144015C.1.pep
RRPLSHSIPXKIYSICAWYLFHTHIISISANMKKLLILLKYFLAIITSLLLSSLLNKIFFTLQKIHLY

SEQ ID NO: 232920 - protein, 99 aa, Zea mays
  unsure (1)..(99): unsure at all Xaa locations
  Clone ID: MRT4577_144016C.1.pep
NPGAAQAFNPLANPFNSFFFLTANSKKTGVFFLKFPVKTNXFPSKFFNPFKTXTSKAFSKKNFLRFGGFLKKNFKFFPSSKIGNNSILTYNIFSXGPNF

SEQ ID NO: 232921 - protein, 186 aa, Zea mays
  Clone ID: MRT4577_144017C.1.pep
MASASRVRLGTLVPLTKDNAGSSNGSVSSIPIFQGPNVVGRDHLVVVDKRISRKHLSLHASTDGSIEVVVEGPNPIIVRSKGQRRKVCAKETAKIAHGDVLELIPGDYFVKYVDMGDEHVPMHLSDLMKGKRYSEEHGAAVKRIRQIMEDEALAKTLQESFAADDAAVSGMPSGQKIVHMTVVLPK

SEQ ID NO: 232922 - protein, 82 aa, Zea mays
  Clone ID: MRT4577_144018C.1.pep
ITQPKIGSYHINRQDTMVTIVLLCQDTMTIRCVSCSQGCSDECVVQVSTTPRMWTAVFLRQVYGDHSHHTRSMLLHCEHIRE

SEQ ID NO: 232923 - protein, 102 aa, Zea mays
  unsure (1)..(102): unsure at all Xaa locations
  Clone ID: MRT4577_144019C.1.pep
RDEKARLLGNLXWAYMQSENYEEAEMLYRQALAIEADYNKECNLAICLMKTGKLAEAKYLIHAIPYNCNDESHVKSLSRATEMLREFDLQSIPSPITQAKSK

SEQ ID NO: 232924 - protein, 186 aa, Zea mays
  Clone ID: MRT4577_14401C.1.pep
ASTGKPSECNTYNDIEAVYDCLKKEYGIEEEDLILYGQSVGSGPTLHLASRLENIRGVVLHSGILSGIRVLYPVKVTLWFDIFKNIDKIKQVDCPVLVIHGTADEIVDFTHGKRLWELAKEKYEPLWIKGGGHCNLETYPEYIRHLRKFINAMEKLAKDSKAARAPPPSSMADEVRRTKCLRFGKR

SEQ ID NO: 232925 - protein, 82 aa, Zea mays
  Clone ID: MRT4577_144020C.1.pep
TPVVFHIECVTEPRMNWVWATRICCELCPYLDLRFLSFFIFGVLPGSFATVVGFFGVDLSTGFWNFKGSILLFYRPSGPIMG

SEQ ID NO: 232926 - protein, 106 aa, Zea mays
  Clone ID: MRT4577_144021C.1.pep
VFFFPRPLRRTLLLDQWEPLAPGPLGGTAPRNLCGSLLETTFCFPSIRERGSRGGAGGSLCPGGFTGRVFFFGPPTQKGPGGDKKFFFLGPPLSFFCPCLEMLGAF

SEQ ID NO: 232927 - protein, 71 aa, Zea mays
  Clone ID: MRT4577_144022C.1.pep
CIASCVFRQYGCWLASICQHLLFRHDIVTRFTMGEGCLVKSHRHPTRSLWCMPFPAWYNVARHGVPLIASD

SEQ ID NO: 232928 - protein, 165 aa, Zea mays
  Clone ID: MRT4577_144023C.1.pep
MHGIELYIQCLFEFSIKLYLVLISVLLLKDVVANELWRTVDANGWRASSAPHIYWPHIPAESESNGYLCVRCNGGLTLQISVLMVAATLVLLCTKSLESSLLNDGPWLLTVPSIAIIGREVLDFLHELFDILKDRSYMLTEAEAAIFLPCLIMKSRFVARTKKSR

SEQ ID NO: 232929 - protein, 178 aa, Zea mays
  Clone ID: MRT4577_144024C.1.pep
MDRYQRVEKPREESPIGANEIRITAQGRPRNYITYALALLQDNATDDIVIKAMGRAINKTVAIVELLKRRIAGLHQNTSIESIDITDTWEPLEEGLVTLETIRHVSLITIKLSKKELDTSSPGYQPPIPADQVRPAADFDQDAEAVPSGRGRGRGRRSRGRGRGRGVSSGVDYDDEIG

SEQ ID NO: 232930 - protein, 162 aa, Zea mays
  unsure (1)..(162): unsure at all Xaa locations
  Clone ID: MRT4577_144025C.1.pep
NGEDLFLCCTLGSYERPYDRXEPRAARRLERXKDGSSVKATTTEQPVIRRLAEEXDKATLXATDAILAGLMCXPRSMTSHWDISSRRXVGNKLILDKRDGSQVDLLTANETAHEHIPENKDEINCEHSIAAEATYINQNFSQQVLHRDGEKGNFDEPNXPFA

SEQ ID NO: 232931 - protein, 99 aa, Zea mays
  unsure (1)..(99): unsure at all Xaa locations
  Clone ID: MRT4577_144026C.1.pep
SKSPPXSPSXPPQQLMLPPPHAXSPPKPKPPISTXTXPPPPPXPPIXXPLRQPGPHRKRTQPPAXAQPPXPFPSPRPDPQPPCSCLREQAQPVPVCPTK

SEQ ID NO: 232932 - protein, 63 aa, Zea mays
  Clone ID: MRT4577_144027C.1.pep
EIQTDTTIGVRYYARHHPNNATNSPNSCAIIGCNALQVPRNSPMIGWTRWSCPVSGAPSRCLV

SEQ ID NO: 232933 - protein, 156 aa, Zea mays
  Clone ID: MRT4577_144028C.1.pep
WVPRGRPGYVGTSYAQSASRAKNPHFPFPAPNPRSEREMASEWLHATPRADGVPPRVADEGEGVGVEDGPGGRHRGRRCTRGISAQGGERASLMGALQSRRGSYGCPSMRSCVLTTWRTRSRTHLILAPQPELLALRIPVPHAGARRTALHPDAFH

SEQ ID NO: 232934 - protein, 204 aa, Zea mays
  Clone ID: MRT4577_144029C.1.pep
HVRVMAAAEARAAWQRAANRCLVQEDAKRAPKLACCPPSLRPHDTSDGNPPSPQDLHAPMFMPINWNLMNSSMPMETQWWLQLQPSFGCQTALAREHLNYVGGDAAEKGMEGLAPVSKLEDVQAKTVDPFEPPWIVSTTLMKQTPDTGSEELKNLASYTPASLKCKGNANKCIYEDKEFRVKAFDPLVPNSHKRTLRNAAGAEI

SEQ ID NO: 232935 - protein, 83 aa, Zea mays
  Clone ID: MRT4577_144030C.1.pep
CGFGDGGVQGAGEVVGSGATDDGNESSIAADHARGYGVGEGRECGMVEGKPWASLVVGFGGSTGGLGDVGSLSGERWRQLSGC

SEQ ID NO: 232936 - protein, 86 aa, Zea mays
  Clone ID: MRT4577_144031C.1.pep
VAFTMFGLVSGTQTPPPPVFVGLVWCVSVREGRYVTLFPVLKSALVSCQWVLTHVCYFHAWLVLKREQYLIRLARLYTLVLFVAFK

SEQ ID NO: 232937 - protein, 53 aa, Zea mays
  unsure (1)..(53): unsure at all Xaa locations
  Clone ID: MRT4577_144032C.1.pep
PEASDGSGSWEDAALLTEANLPAPAPXSASAPVLETLGSSEPAGGALRQRPTC

SEQ ID NO: 232938 - protein, 48 aa, Zea mays
  Clone ID: MRT4577_144033C.1.pep
ITAEVLNFCCGAHKYGHHNEDFIAIYFASCMEFIWVSLLHMVAVDILM

SEQ ID NO: 232939 - protein, 115 aa, Zea mays
  unsure (1)..(115): unsure at all Xaa locations
  Clone ID: MRT4577_144034C.1.pep
KRTPTPQRRKGPQITRRTLQSCGRPSRPTERRDPTKPSSNQCQIESALATEPLTVKAGANHDEATPHGVTKGPGKSETHEPRRSRGATTXTTWRTRSWPGRRPGPPGHDKEDHPA

SEQ ID NO: 232940 - protein, 88 aa, Zea mays
  Clone ID: MRT4577_144035C.1.pep
RMTGIGFMDDFVVDCLGFVVDTKDEVGEGPFNYMLQGLKQECIDRISFTIKLGLKNYSDTMEKPLGWLKPFGTSAFCTAMKCANGQLQ

SEQ ID NO: 232941 - protein, 149 aa, Zea mays
  Clone ID: MRT4577_144036C.1.pep
RISKVILISKAVGRRKITTSLDVGSPSSFKDVLLAGTVSASVSVTSGGTGSHDAQARTLQASVQNSSGAGGRFVCRSSPLRSSVQPKRQKPLVDRDGFTLVESRRTQKQRRRLERSFGIQGLETFKGRCFKCLSPHHRVALCRSIIRAS

SEQ ID NO: 232942 - protein, 539 aa, Zea mays
  Clone ID: MRT4577_144037C.1.pep
MASPPLYMSFPSPVAPVTVRALLHNDQLIRGLFVSFDPVWNLILQDCVEIHPQAGRHVPGPLVFPCAAIASLAVEPVSSPSLPSTYIGAPSLALSAHTVPSPPPPPPPSTDWVVDSGASFHTTPTTSSLLHSHPPHPSHPSSIVVGNGSTLPVTSVGASVLPGQFCLNDVLVAPGLTHPLLSVRRFTSDNQCSMEFDPWGLTIHHLPTRAVLARCDSSGPLYSLQLPTTPHTRIASSPALTTTTTSHALTTTTTSSAIWHRRLGHPGPDVMSQLAGHSNISYTRGSSEHLCHACQLGRHSRLPFSTSTSRAVQAFDLVHCDLWTSPVLSLSGYKYYLVILDDYSHFLWTFPLRLKSDTFTTLTHFFAWVSTQFRRPVRALQCDNGREFDNNASRSFFLTHGVQLRLSCPYTSAQNGRAERMIRTTTNMIRCLLFQASLPATYWAEALHTATHLLNRLPSKAVSHPTPHFALYGTAPSYDHLRVFGCACYPNISATAPNKLSPRSTRCLFLGYSPDHKGYRCLDLTSHRIIISRHVVFDE

SEQ ID NO: 232943 - protein, 79 aa, Zea mays
  unsure (1)..(79): unsure at all Xaa locations
  Clone ID: MRT4577_144038C.1.pep
MPYITSQTLGLNALPPECPSYAPFANEVRKPPVLSIALSCKKRHLRGNHXXXXKKASSKKRVADGAGNPRRTIEGRPRV

SEQ ID NO: 232944 - protein, 459 aa, Zea mays
  Clone ID: MRT4577_144039C.1.pep
ISVCSLSLVLVGLVSDDKLVDLLGSCKTLRDITETGVEPLALMSQLATIITDILAGSYAFNRERPKRKFFKRPTLSKEDMGKLRQALKILSETEKQLRVSSDKTTWLTAALLQLAPDKQYLLPSSSTSTSLNHGLLVGPFPDRGVGRASAVEHKCNLAGTSYGERTVEHTENGHVLSTSSVKANEGTKNRKADNEMIWQAVLESIQSDTLRKMMAKEARLNSVSLGTAPTVQLIISSHISKSKAENYRAQILQAFESVLRSAIILEIRYESKNDAKPGHAPSMFPYPENDSTLRRSFTKHSPLSSGEGEIIEVGPSRMHWHAQTNNDVLDVNERRKENTWEEETSSSPNQESVTNPKGRNGNRQNRQNSIVRGKVSLAHVIGRAEACSQRGGWSRRKAISIAEKLEQENLRMEPKSSLLCWRTSRTRRKLSSIKVRNRRSRTISRLILCGRCISTKSPR

SEQ ID NO: 232945 - protein, 92 aa, Zea mays
  unsure (1)..(92): unsure at all Xaa locations
  Clone ID: MRT4577_14403C.1.pep
ETDPSTISPPSLPFLFYPFSPXQAVQKTAILKTHTPPHQHNLKLYHPTTTHPHNNNPTSILNLPARTPLTIHIRPNPVRIFIDTFINTPHIV

SEQ ID NO: 232946 - protein, 56 aa, Zea mays
  Clone ID: MRT4577_144040C.1.pep
TLYWPGVVGLVYHCYPVICPKWPPTCYVSAGSNLSGVVWFTTYVVKLYSPPLLLGY

SEQ ID NO: 232947 - protein, 83 aa, Zea mays
  Clone ID: MRT4577_144041C.1.pep
PGRPTRPRTRGRTRGRSRAHRVPCLRSVRARVDGGCRRSRRAITVPDGQLERGTTTVLPTSYRRMNRPIPVLQKMHRWIIPSC

SEQ ID NO: 232948 - protein, 95 aa, Zea mays
  unsure (1)..(95): unsure at all Xaa locations
  Clone ID: MRT4577_144042C.1.pep
MMAESTAGTARDVNPHDFVKAYCAHLKRSSKMELPEWVDIVKTARFKELTPYDPDWYYMTAASIARKIYLRHSFAVSGSQKIYRGRXRNGSLPPH

SEQ ID NO: 232949 - protein, 35 aa, Zea mays
  Clone ID: MRT4577_144043C.1.pep
ANGLPAMGHVSYIYVKQLGLARHSMVVCNAERLPC

SEQ ID NO: 232950 - protein, 90 aa, Zea mays
  Clone ID: MRT4577_144044C.1.pep
IPTGAVFLIKVELTLVLGSFGGKRNQKCWPQKHFSYKSSISPFYKKAAAWSTRQKRQVHLGRTRGKETPKTRGKATIRGTLGRLINLAQR

SEQ ID NO: 232951 - protein, 478 aa, Zea mays
  unsure (1)..(478): unsure at all Xaa locations
  Clone ID: MRT4577_144045C.1.pep
MPARTWLADLRSRLRVGPRKNDGLGILAFEAAANMSRLVSLHRTVSDVEVRRLRADVLRAEGVARLTSTDQSLLLRFACGELLADLDRAAGSVACLGARCCAGDAPLLRDFDRVYAEAKRGRLAQLDATVGFSRGATRRFKEMERHVVVAAKLYAEMDALSELEASERRMERWKQHSGPIPAQTTGTGKGSAADPGEKLMSKLREQRQKVRRVMEGSLWNVAASKAARLMAKSVLAVLARISLAFAAFVPGLPPWTVGRAWALGHSSGSGPLHRSATPAALQHSAPIFGQRDSASLLSASSIKPSVSTVGGSSMELRYANVILAAKTLLXAEAAGRXNEEAHEGMIDLSKRDALYKMLPVGIRKAMNAKLREIWKKAQPVDEVSAAASKDAVECLLRWLSPMAHDTVRWNDEQSMERAQRFSMQPRALMVQTLHFADRKKTDAAIVDVLIGLTCVCWYDDEQRRLESPDRDDDDEYQL

SEQ ID NO: 232952 - protein, 162 aa, Zea mays
  unsure (1)..(162): unsure at all Xaa locations
  Clone ID: MRT4577_144046C.1.pep
LNQPPCPPQGSPLWNPPVPHLPSXPFPWWPSRPXELPQLXWPPPXPSPVACPEFPKELPPPPFPPXKGPXSPRPLPKLPRGPXPLPPLFPFLLALKLTSXPPKPXPNPKPNLVLRSKPTKPPPGPPAPHLGPPPPPPLLPLATLTPRLPPPPSMPQFDPRAE

SEQ ID NO: 232953 - protein, 53 aa, Zea mays
  Clone ID: MRT4577_144047C.1.pep
LPPNRAVSAKSPVKLSASAPAAALFVSSLPSRMPSQLLHRFNELDRLSCAANP

SEQ ID NO: 232954 - protein, 333 aa, Zea mays
  unsure (1)..(333): unsure at all Xaa locations
  Clone ID: MRT4577_144048C.1.pep
VWSKKLLYAGSPRFFAARTLERLGWALRIRWLWLEKTDPFKPWSGLTVQVPQIARSLFDAAVITAIGDGNSCXFWTDCWLPGRXVAELAPNLFXMIPKRVAKRHTVSQALVNRNWMADIRGALSVHVLVEYLLIWDLVEDVVLQPDVSDQHLWKFSASGMYSCKSAYNSMFIGTIMFSHWKKIWKSWAPANCEFFIWLAINNXCWTSDRLAKQGLPHQPTCLFSDQDEETINHILSSCVLVQEAWTRILQGLNLNXILPPNSTSRFRSXWSEAVNHLPKDLWKGFNSLVILVTWEIWKHRNACVFDGFRPQMQSILASVLQRDRFPAGLEVPN

SEQ ID NO: 232955 - protein, 120 aa, Zea mays
  unsure (1)..(120): unsure at all Xaa locations
  Clone ID: MRT4577_144049C.1.pep
LAAAEVHYSTVRVEGHVSATTPELEKATRXPCVIGVACGXAYGXKSTVCXMMIDHLRDQRATSVTHEPFYYVLTAEELADVDNYKFDHPDALXDAELLLSSYAKLEMWAKMLTLPNYCFA

SEQ ID NO: 232956 - protein, 94 aa, Zea mays
  unsure (1)..(94): unsure at all Xaa locations
  Clone ID: MRT4577_14404C.1.pep
MAWWRKKVVSPARRAWAAVSTRVRARNTGGGGGSILKLHEDVQTCGYRDVQVMFDILXRRSWRRPRSAPPPSTTTSASGRRRRRRRGPDTRHPP

SEQ ID NO: 232957 - protein, 77 aa, Zea mays
  unsure (1)..(77): unsure at all Xaa locations
  Clone ID: MRT4577_144050C.1.pep
MRVLLVALALLALAASATCRXSSGGCGCQPPPPVHLPPPVHLPPXVHLPPXVHXPPPVPGRAGHLHRGHVPRVIART

SEQ ID NO: 232958 - protein, 98 aa, Zea mays
  Clone ID: MRT4577_144051C.1.pep
RDLGKRVMTGDISPDRFVNMSDEELKSEDQRKMEIELEKENMKKAQVPMAEKSISDSLECGKCKKKRVSYTQAQTRSADEPMTTFCECMNCGNRWKFS

SEQ ID NO: 232959 - protein, 131 aa, Zea mays
  unsure (1)..(131): unsure at all Xaa locations
  Clone ID: MRT4577_144052C.1.pep
PTRPFDIGLKIGNLEDTRNRTLHGILRVQSCFRGHQARHHARERTRGVLTLQSFIRGENARQIYSSLLRKHRAAVVLQRNVRCWLARRYFINVRKASVIIQSGIRGSLVRRCNGNIDLINVLREFESXQVQ

SEQ ID NO: 232960 - protein, 85 aa, Zea mays
  Clone ID: MRT4577_144053C.1.pep
RSLDNPELRDGVQGTIPGPIGSADLEAPSKNPQPDAVVATTAITHFNKDMDDVPPPAIEDGALHASLKHTGGILEVHHGDCLWHV

SEQ ID NO: 232961 - protein, 524 aa, Zea mays
  unsure (1)..(524): unsure at all Xaa locations
  Clone ID: MRT4577_144054C.1.pep
MKTTKGGKAMNPTDAFRKEQRKKELKRNKKERKKVREVGILKKDPDAIREQIEKLEKMKADGALDKARKHKKRQLEDTYNLIVKKRKEYEQKMKEKGEQPIMFSHLAPPKRRPTADEDDRANPKPEDSVYYHPTLNPSGAPPPGKPPMYKSSIGPRIPLPSLSSTGASSSMSESEAGPSTLPPPPPPPPLPDTSESIDPSAPHFPLPPLPPPPPPPPKPNSDTALPGLPPPPGPPLREPVSGHTVLQPPPPPSQRSLNPPAASSANESKTDSVQLQPSVVLPPPPPPPGLPPKSNDMEAAGTSKDTPGLKEDTAARVLPPLPPPPXFATFTSKASNXQSDMLAPGVMRFPPPPPPPDSRPSLMAAGVNRPPPPPPGFPPSQMPMPPYGVLPGPPPMLRPPFLPGPPMQLDEFAAFAPRPQLPQQPSYVKSAAPTVVKRPLAQHTPELTAMVPASVRVKRESALPKPKPKVQQQPQLSTVSISKPSVTLIRSDARPPSAAPKPPSIDDSYMAFLEDMKELGALDG

SEQ ID NO: 232962 - protein, 37 aa, Zea mays
  Clone ID: MRT4577_144055C.1.pep
IYKMESRYTLSIITTLDPYHCYLTYMWDHMSQGHEAP

SEQ ID NO: 232963 - protein, 172 aa, Zea mays
  unsure (1)..(172): unsure at all Xaa locations
  Clone ID: MRT4577_144056C.1.pep
MSESEAGPSTLPPPPPPPPLPDTSESIDPSAPHFPLPPLPPPPPPPPKPNSDTALPGLPPPPGPPLREPVSGHTVLQPPPPPSQRSLNPPAASSANESKTDSVQLQPSVVLPPPPPPPGLPPKSNDMEAAGTSKDTPGLKEDTAARVLPPLPXPPSLPPLPPRPPMQSDMLA

SEQ ID NO: 232964 - protein, 73 aa, Zea mays
  Clone ID: MRT4577_144057C.1.pep
KILVLGDKLPSNPFTCQQLRGPPLLTESGRPSTQKLRRCYHSGPAIRPRWARSNREPHSRDGVPMFGHTLAPS

SEQ ID NO: 232965 - protein, 82 aa, Zea mays
  Clone ID: MRT4577_144058C.1.pep
LSASVLQPRRRPPPGAPLRGRDVHCPHPRFAVRRWLASPSLRVMRASRCRASPLACLAVCRRCKVSIVYTLVTLFHYAVCFK

SEQ ID NO: 232966 - protein, 66 aa, Zea mays
  Clone ID: MRT4577_144059C.1.pep
VWKPEFFPSWPNPIMNITLQFWGILQFFSKPGKNFCPQTPLRFQYMSLDKILRHFLRGLNILGSWA

SEQ ID NO: 232967 - protein, 87 aa, Zea mays
  Clone ID: MRT4577_14405C.1.pep
KCTVVVVIIIIIDCGERDQHTLWKRTCDHRFRFSATAVVLNPGIFEARRRSTYVRRFHDRSMNEHNDYIASTSRSTDYCLDKVLISA

SEQ ID NO: 232968 - protein, 208 aa, Zea mays
  unsure (1)..(208): unsure at all Xaa locations
  Clone ID: MRT4577_144060C.1.pep
MGVECRYELAQAAYVKLALHALKHPAAAVNGLLVGTLADPAASPAVVSVADAVPLSHQPHHLPLLPTLELALTLVEDHFQAQGLAVVGYYHANARRDDADLPAVAKRVGDHIFRYFPRAAVLLLDNVKLEEVVKGNSRDAVVQLYTRDSSKSWRQAGSDGSSQLXLKEPSTNVVLADHVTTKRWQQVVDFDDHLDDISKDWFDASLLG

SEQ ID NO: 232969 - protein, 89 aa, Zea mays
  unsure (1)..(89): unsure at all Xaa locations
  Clone ID: MRT4577_144061C.1.pep
SLLALLALXASATNTFIIHTMXLATSSIITQYLPPITAIGFEHPAVQAYRLQQAIAASVIQQPTFELQQQSLSHVTIQTLATQQQQHVL

SEQ ID NO: 232970 - protein, 96 aa, Zea mays
  unsure (1)..(96): unsure at all Xaa locations
  Clone ID: MRT4577_144062C.1.pep
FFGSKRVAGAIPAPYVHIERQFFSEVCSLGQQERVQLQDYWRKGWTFHAKGXVHRDLEAQIAIVTANQALQQQLHQDQEQLYLRSGVVSSATFEQP

SEQ ID NO: 232971 - protein, 50 aa, Zea mays
  Clone ID: MRT4577_144063C.1.pep
EDGAAGMDRGWGSDVVEGGINFRAFTRSALAPCFNSTLNLKLPLAPLHLG

SEQ ID NO: 232972 - protein, 96 aa, Zea mays
  unsure (1)..(96): unsure at all Xaa locations
  Clone ID: MRT4577_144064C.1.pep
MVRITSIFAGLSLVAGSIAAPSPEGMFSTLAKRGGTPNXSXMNNXFFYSWWXDGGAEXTYENXAGXSYSMSCQTAGNVLRGKGWSPGKARTISYEG

SEQ ID NO: 232973 - protein, 55 aa, Zea mays
  Clone ID: MRT4577_144065C.1.pep
VTDGTENHLVLWDLRPLGLTGNKVEKLCDLCHITLNKNGVFGDSSALSPGGVRIG

SEQ ID NO: 232974 - protein, 75 aa, Zea mays
  Clone ID: MRT4577_144066C.1.pep
HSSPASTGTVDGNLGISFVGALHTRSVSLIFSTDPSHAESVVVHLARSSSRTETEALSGVAVVSTEASARPCVSC

SEQ ID NO: 232975 - protein, 85 aa, Zea mays
  Clone ID: MRT4577_144067C.1.pep
NPRTPPEDSPHSTHYLHRSPLTSRSVDHYGEGLTAGPPWESWRCCMSSAPPSCRVRLSEPCWRQSHRRRRPKRPPALPLVRVPRP

SEQ ID NO: 232976 - protein, 206 aa, Zea mays
  Clone ID: MRT4577_144068C.1.pep
MVDAIDEYAVGQLKEFEGKKLVSATEEGLKLDETEDEKKRKEELKEKFEGLCKVIKEVLGDKVEKVVVSDRVVDSPCCLVTGEYGWTANMERIMKAQALRDSSMVGYMSSKKTMEINPENPIMDELRKRAEADKNDKSVKDLVMLLFETALLTSGFSLDDPNTFGNRIHRMLKLGLSIDEDEPVEAEAEMPQLEDDAGESKMEEVD

SEQ ID NO: 232977 - protein, 75 aa, Zea mays
  Clone ID: MRT4577_144069C.1.pep
VSYVSQNIYQIGTSGERVCFTKLGLDTRVMFVLHLNHILRLHYHEKKKIPSNCGRKELKPMNKSFNPDISKAYKK

SEQ ID NO: 232978 - protein, 74 aa, Zea mays
  unsure (1)..(74): unsure at all Xaa locations
  Clone ID: MRT4577_14406C.1.pep
PRAESSSSSGIAGFKVTRITDGPVKPASATPEETLPQAWVDRYPTHRSQEESMHIFRSDAGXXPAVIQAALAKA

SEQ ID NO: 232979 - protein, 99 aa, Zea mays
  Clone ID: MRT4577_144070C.1.pep
RAGDPNIMIKIYPTLISHGPHEAYAHARTLPHSLSTLLPFPAGDGDDRRRIHDAPAAVTVPTSHREFAPALVLWNPGAILLVESIRWSTTNEDHFIMRC

SEQ ID NO: 232980 - protein, 144 aa, Zea mays
  unsure (1)..(144): unsure at all Xaa locations
  Clone ID: MRT4577_144071C.1.pep
RPRDRRGXTPPXRVPSIFPSQGTESSXICSSTXXSPPVWFWPPFSTAPSLVCQQGTXXRALHXSIXXRLRVNPTGVPFXHAXASIGVRSPSTRKGCXPPEIGSPPRTWIDQALDWALAGKWESPQGANSTLIPSQRDKLSTXNG

SEQ ID NO: 232981 - protein, 52 aa, Zea mays
  Clone ID: MRT4577_144072C.1.pep
CSSVSSGSINLNGKLIVEVRRPGGDTVMSNILHLVEEAQTKVVPVQRLADRV

SEQ ID NO: 232982 - protein, 67 aa, Zea mays
  Clone ID: MRT4577_144073C.1.pep
FFLSGKSLLPAPYFFFGGVWHHPTGRINKTTRNIGEEGSASRATSTMQADSGSLRNRYSLFLYIVCS

SEQ ID NO: 232983 - protein, 120 aa, Zea mays
  Clone ID: MRT4577_144074C.1.pep
LARQARAGARANGREMAARFRQGRANTERGKRRLADTRSYHLPVGHSVEHRISDARNSTVFSNPSPISRIPQLQAPTLLLRIQDNGQASTKPREETERAQGDGHRGTSGSRTRHTRRSTA

SEQ ID NO: 232984 - protein, 73 aa, Zea mays
  Clone ID: MRT4577_144075C.1.pep
KLIAETCGAEEVTKLRRSARLTVEREVEDTPLSETESEEEAPQEEDVDFESDQDDVITAGYDYELDAEEDNDG

SEQ ID NO: 232985 - protein, 124 aa, Zea mays
  unsure (1)..(124): unsure at all Xaa locations
  Clone ID: MRT4577_144076C.1.pep
MSIHXVGDGGIDAGNAGRDLYCLEDEIQADGRMPGDDTIVXRDDAFNTFFSETGAGKHVPCAVFVDLELTVIDEERTDTYRQIFQPEELIRDIEDADNNFARGHYTSGKEIVDLSLDRSRKLAD

SEQ ID NO: 232986 - protein, 122 aa, Zea mays
  unsure (1)..(122): unsure at all Xaa locations
  Clone ID: MRT4577_144077C.1.pep
GRVGFFFFFFFFFFFFXFFFFFFFFXFFWKTNGLFFLKKSGLGQSSLLGGDYFWMGLAKTLNLGLKHGGTNLGFCPLFLKTWGLLWHKIVVGGGTSPGGGGGGGSFFLAPKEFWRGLGPGFF

SEQ ID NO: 232987 - protein, 37 aa, Zea mays
  Clone ID: MRT4577_144078C.1.pep
AEIDYSLIEQRRQFLPLQHQRRGDLYQLVDVQRLGSH

SEQ ID NO: 232988 - protein, 45 aa, Zea mays
  unsure (1)..(45): unsure at all Xaa locations
  Clone ID: MRT4577_144079C.1.pep
WIXDPCLSPTSGESSVKVPVSPFRHLPFASLPLGLPLLLWVAFNT

SEQ ID NO: 232989 - protein, 254 aa, Zea mays
  unsure (1)..(254): unsure at all Xaa locations
  Clone ID: MRT4577_14407C.1.pep
PRLAEAPAQGLRALAPEKPHARAAGPAXPTPPGPRPRAGRALCPRVGGPRPSLXLPPAGVLDPQGLAGAPAPPGASAPAPLWHARPQGRPRRXGGRDPAGRASAPXAPRLXSWEPHGTAVPAFARRGCARASLGLTSAVGANPRAQGRPHPRTXARRRPSSAPRSPRSRAGGPXCPRAPEAVPAXARRGPRTHGRAAAQTRPRAVGGAAARHALALGRSRRVRAATEAGCGGREPPGPQAAGAGPTTAGAAPTA

SEQ ID NO: 232990 - protein, 183 aa, Zea mays
  Clone ID: MRT4577_144080C.1.pep
FNGKLSDFGLAKLLGAGKSHITTRVMGTFGYVAPEYANTGLLNERSDVYSFGVLLLESVTGRDPVDYGRPANEVHLVEWLKMMVGTRRAEEVVDPDMELKPATRALKRALLVALRCVDPDSEKRPTMGQVVRMLEAEDVPSREDRRSRRGHSGNADSESKASSSEFEISSDRRELGPSARFQS

SEQ ID NO: 232991 - protein, 170 aa, Zea mays
  unsure (1)..(170): unsure at all Xaa locations
  Clone ID: MRT4577_144081C.1.pep
NCLSSGYMSPEYVTSGAFSIKSDTYSFGVLLLEIVSGLKIISTQFIMDFPNLIAYVXRGILKFSINIKNINLIEKRYTFFQTWKLWEEGNATKLVDSLVAESCPLHEAFRCIHVGLLCVQDNPNARPLMSTVVFMLENETTLLPAPKEPVYFSPRNNETEETRRNIEGFL

SEQ ID NO: 232992 - protein, 108 aa, Zea mays
  unsure (1)..(108): unsure at all Xaa locations
  Clone ID: MRT4577_144082C.1.pep
EFLEPLFLIYKSLCDCGDKGIVDGSRLDLLXGVHVLXFSLVNLYMRXESDRHTNIFDTISTHLCFGTHRKXLPVKRQVSLITYLRGNRSMMTSNLPQILHIIDVIQLI

SEQ ID NO: 232993 - protein, 133 aa, Zea mays
  Clone ID: MRT4577_144083C.1.pep
GGFQRSVLAVGLRHAFQELDFYVRGDTRNIICRSVPKGVGSLLGRFCFSQVPFVDCITYVVLGGLNIVICFFDGLSLPSTSVTASGILVLRRVLLPAVFVNIASRVGKLVFNGVGTISVSFRGSRRRHCPYCF

SEQ ID NO: 232994 - protein, 384 aa, Zea mays
  unsure (1)..(384): unsure at all Xaa locations
  Clone ID: MRT4577_144084C.1.pep
RDSQTTRDSREPPPATAATCPLCLPSLPSSPPSKVCHRRPIRGRCHPQQPWRSCLRPRLTQGPRGPAPRCLVDVLLVTANRPNHTFDYVVRAXACDALRTLDAALPGLLAEVLGHLSXRSPARQSYLLLLASGARHAVCLRRLASSVSILVVACPPIPFIIPPHLLLPPGXSMAPPSKXRDIRKVLALLLDRSXVLTPAAAMEMMVILAKVASAMLQWAPAIAAHIQVHFXGMLHSSNAMLLHSLLTPLLQFPDAFXELRMSAREVHHQLAVSLLALHWLLGWLRNLVPGLTHWFYPVVFDPLGLKGKKLDCLPYVATGVDGEKVAVTGRASEQLIRLKIWKIHFGNPLPTTTIFHCRHDLASLYGGMSQSHDAKPDGTTRRRS

SEQ ID NO: 232995 - protein, 85 aa, Zea mays
  Clone ID: MRT4577_144085C.1.pep
GNGNGKASNFLGFNKIDKAAIFLSFMMVLRLARFSDGAKATKMAKVATMNMQTPRKRIVIKFVFDFKSKFRYKNNEIKQLKVDAV

SEQ ID NO: 232996 - protein, 427 aa, Zea mays
  unsure (1)..(427): unsure at all Xaa locations
  Clone ID: MRT4577_144086C.1.pep
MAAAQEEAAAAPPSTESDATETEEAPPGGAESDATAMEAAAEYSWLQLRFDRPPRRLYHFARQFRSATSSGSNSSGENFLKGVKWSPDGSSFLTSSDDNSLRLFYLPEEAYIAAEPVAEAAVESEDSYGAFIQANEGEPVYDXLVPVPSHXYLQAPVVIIRYTFGMPPVXLRCTYRAYDAMDEITAALSISFNSSGSKLFAGYNKAIRVFDVHRPGRDFDQYSLLKGGEGPTGIISSISFSPQNGMLAVGSYSQTTAVYAENNMEPLYVLHGQLGGVTQVVKDPYILCWDIRNTVDIVYKLYRSADTTNQRIHFDIEPCGRHLATGGQDGMVHVYDLQGGQWVTGYQAAADTVNGFSFHPYLPFAVTSSGHRRFGMQDEFEDELNLAGAEPPISLGNRISDITVRNDEIQPITKRTPSGTNPYILSY

SEQ ID NO: 232997 - protein, 444 aa, Zea mays
  unsure (1)..(444): unsure at all Xaa locations
  Clone ID: MRT4577_144087C.1.pep
MAAAQEEAAAAPPSTESDATETEEAPPGGAESDATAMEAAAEYSWLQLRFDRPPRRLYHFARQFRSATSSGSNSSGENFLKGVKWSPDGSSFLTSSDDNSLRLFYLPEEAYIAAEPVAEAAVESEDSYGAFIQANEGEPXTISAGTRVCPCLTQPLVYLQAPVVIIRYTFGMPPVXLRCTYRAYDAMDEITAALSISFNSSGSKLFAGYNKAIRVFDVHRPGRDFDQYSLLKGGEGPTGIISSISFSPQNGMLAVGSYSQTTAVYAENNMEPLYVLHGQLGGVTQVLFSKDGNYLYTGGRKDPYILCWDIRNTVDIVYKLYRSADTTNQRIHFDIEPCGRHLATGGQDGMVHVYDLQGGQWVTGYQAAAGMSLLNMCFQRRFNSVFGCEPGKRCCSRWLPRPSISSSWWLDRPAWASAPGQSPSQACLSLSLFLYYIHFNLIST

SEQ ID NO: 232998 - protein, 229 aa, Zea mays
  unsure (1)..(229): unsure at all Xaa locations
  Clone ID: MRT4577_144088C.1.pep
AFSSFHGTMSLFSRHLILIASSAFSLLFIALSLATAIQIRGISPQIVQISSAQAARIPDDGDVVAAKALLNGTEFDRGDVFNGSSVISGLPLASTLVTMTLESTDTAATLVSSTLDMAILSTAAVKTTISTVLTKTLASTTLTTTIVATTLVKTRVSTTTTKETVPTLMTETQEGIIGFTPEPQSSGSWDAEGVLGPKLTPKPTPSRGSSPQTPRPSSPAXPHPCPHIR

SEQ ID NO: 232999 - protein, 109 aa, Zea mays
  Clone ID: MRT4577_144089C.1.pep
NHSTAAFADQAFYRAHQSPAAIGSCDYLAREDARTPLRTGLRIHTTRTSMASGGARARATTCGDESFRHSTARLNEERMSQPLRRTLTRTSYNAYYDHLLPDPYAYSPH

SEQ ID NO: 233000 - protein, 112 aa, Zea mays
  Clone ID: MRT4577_14408C.1.pep
DKKLGAGFFTGRLFIWTREFAIGQGCTNFFFTNRGKGGIQHPALHPRVKLGPLGAPFFQKKGLDPMTEQLVSCMQEPSVGVIGVCLFLGVFQLWHFGQKGRVNPLGNFTGGF

SEQ ID NO: 233001 - protein, 123 aa, Zea mays
  Clone ID: MRT4577_144090C.1.pep
SLRSPFGYSRHPLAGASNTTGFLHVHCWQLILGSSYISACASYKRLHVDVASVQTTFYTGGSEVGLILCCNHTHVCPCSTCSWSPPCQRSHSYLCRAWVPMRALAPEPPMCSMASLTRMIRPF

SEQ ID NO: 233002 - protein, 75 aa, Zea mays
  Clone ID: MRT4577_144091C.1.pep
ICADSRESGWYGRRLCLGLVDLVWFVLIIMSMFFFFFFFSLIHTFYSSVRRTMQEKLWNKKQIPTRPSTRRPTRP

SEQ ID NO: 233003 - protein, 86 aa, Zea mays
  Clone ID: MRT4577_144092C.1.pep
HKNNVANGCNSSKLTCLLFQTTIMAMMASKLHNLDLFYKKKILSKPWQAPPLSTSRIKDLFKDSPIAPMSSATALSHVNAYNDIIS

SEQ ID NO: 233004 - protein, 93 aa, Zea mays
  Clone ID: MRT4577_144093C.1.pep
YCGENFYGIILMWSSRSHKANDCRNTCYWTTTGRVILLIPAHQGMYGFKLLRGIKKAQAYPFLRYQCVIAFEVVQNLEGLSRNLCFCCSSALD

SEQ ID NO: 233005 - protein, 240 aa, Zea mays
  Clone ID: MRT4577_144094C.1.pep
MVDPRQVLAGFLTLSMFVMLGNMIKHDHFTSVSELAVDATGVELNAMKIADNTEITKAGVELEATEEIKPCWTKPSPKDDQSNGFVTLSLTIGPEYHASQIADAVVIARYLGATLVLPEIRGNELGKSRKFQDMYDVEKFKMNLDGVVKVVDKLPAELTTKKPAVIRVPNRVTEDFILDTIQPAFQKNSYLRLAIIFSSVSLKPKGTNNKDLDSTACHAMFTGLKLNAEYSEVAEQMLGR

SEQ ID NO: 233006 - protein, 98 aa, Zea mays
  Clone ID: MRT4577_144095C.1.pep
RVEAAVASGPPSPPCSLCWLVWRTAPPCPRSGTPEARSWCRWARRSISTASSSCRRRRRLLSCHLPPLPSASLAYQRRRQRVRRSSRPRRGSWARCRH

SEQ ID NO: 233007 - protein, 89 aa, Zea mays
  unsure (1)..(89): unsure at all Xaa locations
  Clone ID: MRT4577_144096C.1.pep
RAESARGITLIQNSAISNLXRVAAWKKGCLMVKIVMSGNAAVKRSDWASLVQVFLTNSNSTEHFDACKWTKSEPHSWELIFPIEVCGPN

SEQ ID NO: 233008 - protein, 96 aa, Zea mays
  Clone ID: MRT4577_144097C.1.pep
MAIAGGGARLDGEWLKVAQLRALVQEDHRAKEGDSLTLRRFLRARGHCVVKAGAMLLKLLRWRAVAAPGGGSVREEHVRGELEQDKIYMGGCVQDR

SEQ ID NO: 233009 - protein, 146 aa, Zea mays
  Clone ID: MRT4577_144098C.1.pep
MASKAGGDGKEAINEQVVANTYANMRTEMNQLYTKITELEMEVSEHSLVIGAIEPLDPSRRCYRMIGGVLVERTIKEVLPAVKRNKEGLEEVIARMHEALERKKKEITEFELKYKIRIRKADNDAEDEGGKKEGTAQGVLVGPAGQ

SEQ ID NO: 233010 - protein, 201 aa, Zea mays
  unsure (1)..(201): unsure at all Xaa locations
  Clone ID: MRT4577_144099C.1.pep
MFLHLPSSSRSSIFRSLPSSRSAHRRRRRSSCSGSQRRHQLLPLPPLANRLEPSPPVLRTPAGDPASCHSSFHTSGICISGEMASKAGGEGKEAINEQVIANTYANMRTEMNQLYTKITELEMEVSEHSLVIGAIEPLDPSRRCYRMIGGVLVERTIKEVLPAVKRNKEGLEEVIARMHEALXRKKKEITEFELKYKIKIR

SEQ ID NO: 233011 - protein, 52 aa, Zea mays
  Clone ID: MRT4577_14409C.1.pep
LSPYDLKYADFLLVVQYFQRSLTFFGLACSFLTYLFTTLLGIVIMLSILKNI

SEQ ID NO: 233012 - protein, 77 aa, Zea mays
  Clone ID: MRT4577_1440C.1.pep
HFYWKKKKKKKKKKKKKKKKKKPKKKKKKKKKKKKKKKKKKKKKKKKKKGGGRFRGPKFTSGGLQGNSFFLGPLKLN

SEQ ID NO: 233013 - protein, 49 aa, Zea mays
  unsure (1)..(49): unsure at all Xaa locations
  Clone ID: MRT4577_144100C.1.pep
SDSSXLHMRLFGLSCRRVVSNHLSLSISLLAESVHPDLVSXFCCPHPRS

SEQ ID NO: 233014 - protein, 142 aa, Zea mays
  unsure (1)..(142): unsure at all Xaa locations
  Clone ID: MRT4577_144101C.1.pep
GKVASDKVTKXVFKEPSECEPNIXHYWQSSFDALPPEWTDQFASGIHTIAVIQAGHGLLHFFSCKIIPEDLHFVLRMRHMFESLGYQSGFFLSQLFSSSRGASPTPTPPFPLKQPPAAPAARAPPQLFWPGHHQPQQLPSPA

SEQ ID NO: 233015 - protein, 66 aa, Zea mays
  unsure (1)..(66): unsure at all Xaa locations
  Clone ID: MRT4577_144102C.1.pep
EESGSISFNRILNDLKDLHNDPPTSCIACPVAXNMFYCHATIIGPSNSPYAVCVFFVTIHFSPDYP

SEQ ID NO: 233016 - protein, 63 aa, Zea mays
  Clone ID: MRT4577_144103C.1.pep
NRCSVFRFGGGIEHVSDLWVISVRGRCFVLHGSNRVFLSCDDPSGCVVCVIENKPPPLWVVYV

SEQ ID NO: 233017 - protein, 80 aa, Zea mays
  Clone ID: MRT4577_144104C.1.pep
QAARPEANLRVAVAGVDGAMATQVRMIEGGGRPLSLSRQRLRRAAATAAGITTGGRGLRRAVGDCGGRAWERRGQSTLGS

SEQ ID NO: 233018 - protein, 41 aa, Zea mays
  Clone ID: MRT4577_144105C.1.pep
FKLGNTTVEIWDIIKEVVNFVSIKWPPLFFSYSNFCLALPV

SEQ ID NO: 233019 - protein, 82 aa, Zea mays
  Clone ID: MRT4577_144106C.1.pep
GVRYPDSWTSTAVLRAYSCYFKEKGDDSPIHHSDVRNFNFGSEHVVLHGIVVARKRSGKGFKQGNPFVILAAGKPDAWADAW

SEQ ID NO: 233020 - protein, 72 aa, Zea mays
  unsure (1)..(72): unsure at all Xaa locations
  Clone ID: MRT4577_144107C.1.pep
PPHXPNFIFLVRDPKYTSEFITPPPKKQPXRYINPNNKPTHNRDNCAQSTFFGSSPVAPTLRRTRGRTLGYS

SEQ ID NO: 233021 - protein, 521 aa, Zea mays
  Clone ID: MRT4577_144108C.1.pep
MGKGISGDARLAAAPYDQWVLLSPAGGSPRPPARYKHAAQVVQDKLYVVGGSRNGRSLSDVQVFDFKTSSWSALSPARGSKHPNHENDATGGSFPALAGHSMVKWKNYLLAVAGSTRSSSSLNKVSVWLIDVQANSWSAVETYGKVPTARDGQSVSILGSRLLMFGGEDNKRRLLNDLHILDLETMMWEEVKSEKGGPAPRYDHSAAVYADQYLLIFGGSSHSTCFNDLYLLDLQTLEWSQPDAQGAHITPRSGHAGAMIDENWYIVGGGDNASGSTDTVVINASKFVWSVVTSVSARDPLACEGLTLCSTTVDGEKVLIAFGGYNGKYSNEIFVLKPKPRNLVQPRLLQSAAAAAAAASVTAAYAVITATDEKTRDIVATDDFDIKRAQPASNSKKFVAEIDVLNGENGKLAARLAEVRDENSKLKDKLDMTNLSYGELAKELKSVQDQLAAEGSRCQKLESQIAAARKRLESAGSLENELEVLHQHISQVEETIATTQRRKSGGVWKWVAGSTEVSDDE

SEQ ID NO: 233022 - protein, 72 aa, Zea mays
  Clone ID: MRT4577_144109C.1.pep
LFFLFFLFRAQFKQKSHTGSIFSFKTKHAQLADPREGMSPSGGLKKEPSCTRAFSVAMVNRALGPPSTTAKG

SEQ ID NO: 233023 - protein, 133 aa, Zea mays
  Clone ID: MRT4577_14410C.1.pep
ARGPPRPLTPTPLDVSDQKLLNELSELAVLKRARIERMKALKKMKNAKQGSSGGNLCPLIITIIFCIVILWQGFFSGHESAVSFHGSPESSVRAHSSLISIRFYKKNHSNVRPPSETTAAPDNVETVSRLLEP

SEQ ID NO: 233024 - protein, 79 aa, Zea mays
  Clone ID: MRT4577_144110C.1.pep
KPKTPALFTQFIVAVGTTEDDLNHHYTFRHIVFIEGGFFGRFFILKKTKLLIFWNILNGFKIFGPKPPDESSIDRSIDR

SEQ ID NO: 233025 - protein, 89 aa, Zea mays
  unsure (1)..(89): unsure at all Xaa locations
  Clone ID: MRT4577_144111C.1.pep
VNNPVRSPIPKRQAREKAPLTPPPHPPPPPPHTRPPPXSARPAPHEEPPSRPQPAAPPRPPRRAPARQXTQFRXLLQPPARVVDPGIPD

SEQ ID NO: 233026 - protein, 107 aa, Zea mays
  unsure (1)..(107): unsure at all Xaa locations
  Clone ID: MRT4577_144112C.1.pep
VDNAPKYLHNQLSQQIDPAFTHLIVAKPXVAYLQQLLPFTQLILSNSAAYLXQRQQLLNPLVVANPLVPPFLHQQQLLPYNQFSPPPPPMXRQQPIVEGASFRLHMR

SEQ ID NO: 233027 - protein, 112 aa, Zea mays
  Clone ID: MRT4577_144113C.1.pep
FRSAGSEDDDSAQTIPDAIQYKRTSRQVSWSTVLMCTVFLMPPPADFGGLPALRMPPLFLAGVVHSPRLPRLTAHRHHPAASISVCDALAHPCSPPWSLAHREFSWQGNSFS

SEQ ID NO: 233028 - protein, 229 aa, Zea mays
  Clone ID: MRT4577_144114C.1.pep
MKEAQVSKGMVVTIKDVEIPQPGPKQVIIKVVVSGSNPKDWKLLEMGYMNDANTGDDIAGYVHSVGSEVYEFKPGDRVASFHEMMTPGGSFAEYAVGWQHTTFHIPKSVSFEEASTIPLAAMTSAIGLQLRLGLPDPWTPVPDGKKLPLVVYGGATAVGAFAIKIAQKANIHPIIAVAGRGISYVESLLDRSRGDTVVDYRNGDEAVVKGSEMRFKEKTLHTFDGVSEK

SEQ ID NO: 233029 - protein, 66 aa, Zea mays
  Clone ID: MRT4577_144115C.1.pep
ARNSARDVPHLFLISRLLVLLLPCCYIFTVFASVGVTIAYSLTPGLDAKWASMYKAIISIIALVPY

SEQ ID NO: 233030 - protein, 93 aa, Zea mays
  Clone ID: MRT4577_144116C.1.pep
ARDLGEHVKGKRWGKRQGHRHWEEEAGAHVGLRASSASTKGEVAAAPAMAEGELIVKVEQSQGAMGWMGKTTWRPTLEEDGEGMGKMTSGALA

SEQ ID NO: 233031 - protein, 115 aa, Zea mays
  unsure (1)..(115): unsure at all Xaa locations
  Clone ID: MRT4577_144117C.1.pep
MMLAREPXIPRTDKPFKTSIVFSLEEGPGQLFKALAVXALRDINLTKIXSRPHKERPLRVSDDCSSLLKNFDYLFYVDLEASMADPKTQNALGNLKEFATFLRVLGSYPTDVNEP

SEQ ID NO: 233032 - protein, 393 aa, Zea mays
  Clone ID: MRT4577_144118C.1.pep
MAPTACLRTPFFPARARSTNATPFSPHRRFSLKCSASNGDNSNPNSISISPTSPPRLTVSDGVESVDVNGLRRPPAPASVPAARDPHWLPRPLTSADVMEVDGKGLKVAYQGCAGAYSEAAAKKAYPNCETVPCEHFDTAFQAVQNWVADRAVLPLENSLGGSIHRNYDLLLRHSLHIVGEVRLAVRHCLLANPGVKIENLKSAMSHPQALAQCEHTLTSLGIEHREAVDDTAGAAKIVAEHMLQDTGAIASSLAAKLYGLDVLAENIQDDKDNVTRFMMLAREPIIPRTDKPFKTSIVFSLEEGPGQLFKALAVFALRDINLTKIESRPHKERPLRVSDDCSSLLKNFDYLFYVDLEASMADPKTQNALGNLKEFATFLRVLGSYPTDVNEP

SEQ ID NO: 233033 - protein, 183 aa, Zea mays
  Clone ID: MRT4577_144119C.1.pep
MDRGRSESGLRSHGSGKVSSRPGSGSLAFPEEQPILADRDGGDRREVVVKIDGSGNGHAPFSFHGADAGADGGGGKAENATSSTNSTATTPQAESRSMSSETNYPMPPANVCRREGSYEFWNNDGGSAEAFSFQNRPPQGPHSSSPSISPPPPPEGGGMDPPARLNGSFPREQVASDGEMSLR

SEQ ID NO: 233034 - protein, 369 aa, Zea mays
  unsure (1)..(369): unsure at all Xaa locations
  Clone ID: MRT4577_14411C.1.pep
MGIKENRKECHHNKQLKIDADENDLRFCFRIISPVKAYTLQAESGADQKDWIQKITGVIASLLNSPFPQQLSYGNVAAESNRSTSSVDSLSIEDNKSSEGHDDIFNLLRNIPGNDSCAECRSPDPDWASLNLGILICIECSGAHRNLGVHISKVRSLRLDVKVWEPVIMDLFHALGNDYANSIWEALLPKEDQGMNDSNGAILFIEKPKPSDAFSIKERYIQTKYVDKLLFARDPDQNTINILEAIRKNDVRAAYRILAIAEVSANMTYDALSKDVHHVQPVTDKMLLDPISCEIIQDSGKPEGCLQXDFHGRTPLHHCVQKKNDELTKHLLKRGARTTIKDGGGLTALERRMELGAITDEDLFILFVR

SEQ ID NO: 233035 - protein, 74 aa, Zea mays
  Clone ID: MRT4577_144120C.1.pep
MRKPTRRRGTSAKGSSGGGIIKAATLPAKQMVLSGYRGTVDAFDCLPDDLVLAVLAGIAARARCPADLAAAALP

SEQ ID NO: 233036 - protein, 120 aa, Zea mays
  unsure (1)..(120): unsure at all Xaa locations
  Clone ID: MRT4577_144121C.1.pep
MALTGREGQAGSGRPRSPRNSPDRVLPLGPLAGEPPXSYLHGTQFPGDYGWHTGAMPADPGTLAKNRELEAIHXRWAMLGALGCVFPELLARNGDNYGEAVRFKASYXIFSEGGLDYLGN

SEQ ID NO: 233037 - protein, 76 aa, Zea mays
  Clone ID: MRT4577_144122C.1.pep
LGGQTTLGLKNPRFGETRIILPKLWKNFTPKHPLKFQTGPNSFKTTDGPQKIFIIMLGEGTKIQLAATWGGRRYLV

SEQ ID NO: 233038 - protein, 48 aa, Zea mays
  Clone ID: MRT4577_144123C.1.pep
ENVPFFFFFFLFGNILYFLSKKKKKKKKKKKKKKKKKKKKKKKKKKKK

SEQ ID NO: 233039 - protein, 48 aa, Zea mays
  Clone ID: MRT4577_144124C.1.pep
VYFEIPTSTTILSKIGTELTNYACCLTCSSLIFLDQHLLQRYSEHFYS

SEQ ID NO: 233040 - protein, 85 aa, Zea mays
  Clone ID: MRT4577_144125C.1.pep
MIVTQGFDTVNSKKKFDPPTKKKKCKKKKKKKKKKKKKKKKKKKKKKKKKKKKKKKKKKKKKKKICTPPALLKGEFAEPSHGGVR

SEQ ID NO: 233041 - protein, 51 aa, Zea mays
  Clone ID: MRT4577_144126C.1.pep
CPRFSGRMCPVTQSVADRSVDHLDITASPSSASSAAQIMKPSHQRKDRKEQ

SEQ ID NO: 233042 - protein, 88 aa, Zea mays
  Clone ID: MRT4577_144127C.1.pep
TNTWHNEATILFGNIYICTYATVHLCPAKMAKMVRNLCSRSKRRRRRQFLFTEAVHAEQRCCCRRAGCTSSSGARPEPVNLTGFLYLH

SEQ ID NO: 233043 - protein, 81 aa, Zea mays
  unsure (1)..(81): unsure at all Xaa locations
  Clone ID: MRT4577_144128C.1.pep
NFVPWLHFCLDLLLACXSYRLARFLRFTEVSFVQNSQDHHVFSGKVLLKKKKKKKTKKKKKKKRGGGKKKKKKGEKKKQHL

SEQ ID NO: 233044 - protein, 147 aa, Zea mays
  Clone ID: MRT4577_144129C.1.pep
SRAQPTPAWARVLLFDKAVTPSDVGKLNRLVVPKQHAEKHFPLKRAPPSVEAQAPTTAKGVLLNFEDGEGKVWRFRYSYWNSSQSYVLTKGWSRFVREKGLRAGDTIVFSHSTYGSEKQLFIDCKKTKTTTPATDGVPVPLPAPAEK

SEQ ID NO: 233045 - protein, 128 aa, Zea mays
  unsure (1)..(128): unsure at all Xaa locations
  Clone ID: MRT4577_14412C.1.pep
CLSKDVHHVQPVTDKMLLDPISCEIIQDSENQKXCLQGCSLLHFACEYGYPIMVELLLLFGADINMQDFHGRTPLHHCVQKKNDELTKHLLKRGARTTIRDGGGLTALERRMELGAITDEDLFILFVR

SEQ ID NO: 233046 - protein, 50 aa, Zea mays
  Clone ID: MRT4577_144130C.1.pep
WVKRDWAMQLKCAKVEKQTQVAVVFLLFFSYFFLVQFPNFKFVFEFQTLV

SEQ ID NO: 233047 - protein, 126 aa, Zea mays
  Clone ID: MRT4577_144131C.1.pep
MASSQEDKMKALMKVLVDCTEDATKSLGGLVDHALDHMHDEEILARTLFAIKDKLELLQQDALEAKVQAFPKLAKYDWDDISVDPPSPSPPPTVTDPSVDEEEFYCPDASDEWYFSDSDRSTRNSY

SEQ ID NO: 233048 - protein, 441 aa, Zea mays
  Clone ID: MRT4577_144132C.1.pep
MASSTEDKMKALMKVLVDCTEDATKSLGGLVDHALDHMHDEEILARTLFAMKEKLELLQQDALEAKVQAFPEIAKYEWDDISVEPPSPSPPPTVTDPSVEEEEFYCPDVSDEWNPLGSGEVNPFPDSIPPSNTSTPLQGSNTIPSLPVNLDSDAEHSVHDINSPEKNAAPVQKPKKSKEQNFTGPEDLLLCTTWLQISSDPVVHTGQRREGLWARIEKRYNEQRGKFPCRVNRALSSRWDKIRADVSKFSGYYARVLREKQNGLTDDDKTSKAATLFAHEENKPFQYMHCWHQLKGEPKWESICSGQSFRRLNANPIGSTGKRPCGHDFSKSERHKPASSSSPEYLSRLQELTEKQIQRSIEKGEKKEKCSEEDREMEKKRLELEAQKVIIRQRELKLQELDSAEKRLQRLEATNEEDVDPEVWIMMKEQKKLQQFIFSFE

SEQ ID NO: 233049 - protein, 73 aa, Zea mays
  Clone ID: MRT4577_144133C.1.pep
VIVRNHAPLTNLFMCAWFNEVVRFTSRDQLSFPYVLRRLRPPGVHLFPVCARKDLVNSFGHKRKVKPLVKDTT

SEQ ID NO: 233050 - protein, 216 aa, Zea mays
  Clone ID: MRT4577_144134C.1.pep
MAKRLLRSSSLPLAPVPPLLLLLLVTGSLAGATALGSFPGERRGRSLQQLPNPMPQPVPQPQPQPDPNVRPQPGPPNPLPPQPLPQPNPNPQPQPLPQPQPGPQPDPNPQPQPQPQPLPQPQPGPIPPQPDPNPQPQPQPLPQPSPIPQPGPIPNPQPMPMPDPNVQQPQPQPAPNQNPQPQSDQLSGGPQPLPNSEPRMLNPRYTMLLSFAALLL

SEQ ID NO: 233051 - protein, 60 aa, Zea mays
  Clone ID: MRT4577_144135C.1.pep
AEPHQRLIYVQGRHPVLQRGLPLLADAPLRASTQGSRPAFCGCSNSLICSVAYVALSVGA

SEQ ID NO: 233052 - protein, 226 aa, Zea mays
  Clone ID: MRT4577_144136C.1.pep
MAKRLLRSSSLPLALVPPLLLLLLVAGSLAGATALGSFPGERRGRSLQQLPNPMPQPVPQPQPQPQPDPNVRPQPGPPNPLPPQPLPQPNPNPQPQPQPLPQPQPGPQPDPNPQPQPQPQPLPQPQPGPIPPQPDPNPQPQPQPLPQPLPQPQPGPIPQPNPNPNPQPVPMPDPNVQQPQPQPAPNQNPQPQSDQLSGGPQPLPNSEPRTLNPQYAMLLSFAALLL

SEQ ID NO: 233053 - protein, 83 aa, Zea mays
  Clone ID: MRT4577_144137C.1.pep
VLCRRYCEGENSSRRPKPRCADTRPVQVPAGCRGCPLVTFAPTSGDLKVRLGPIFWSAWLLHAEAAGRNRWGFLLYNLRRASN

SEQ ID NO: 233054 - protein, 209 aa, Zea mays
  Clone ID: MRT4577_144138C.1.pep
SLPDLSSFGGYSRSTTVESTSSAQPYLQRSSSLAESSRQQEPDIVSARSSSSGSGAASERKKRASEERTSTVKKSKQEGSKPSPPKQQQVPKVKIGEKITALQQIVSPFGKTDTASVLFETIKYIKFLHEQVQLLSEPYTNSSRSKGNNHFPWGDHRAAAETSKQGDEAEHDLSDRGLCLVPVSWTPQVYRDGTAMDYWTPAYRGCLYR

SEQ ID NO: 233055 - protein, 128 aa, Zea mays
  unsure (1)..(128): unsure at all Xaa locations
  Clone ID: MRT4577_144139C.1.pep
TLPQYQTIQSYMVYXAIQASILRGLALTVLQPYALLQQPSLVHLYLQRIAAQQLQQQLLPTINQRFAKNLAAYLQQQQFPTFNQLNSVNPAIYLHAQQLLPFNQLVGSPYAFLLQQQLLPFHLQAVAN

SEQ ID NO: 233056 - protein, 74 aa, Zea mays
  Clone ID: MRT4577_14413C.1.pep
NKDPLAYLDTTTSCMASYQKSEANPATLLQLKQPIPFVATGFDKPSKLLPTTHHRAVPSFRLLISCHSELKFFG

SEQ ID NO: 233057 - protein, 100 aa, Zea mays
  unsure (1)..(100): unsure at all Xaa locations
  Clone ID: MRT4577_144140C.1.pep
MLNKPVDEKTIQRLTGADKKKLRRTAKGRCSQAYDADLDAILPSKGEITVAKHPNHVLVYGIQGEYPMILNTDARGHELVPTDYAXLWKGPHMLPAFTLK

SEQ ID NO: 233058 - protein, 71 aa, Zea mays
  Clone ID: MRT4577_144141C.1.pep
GRWGFYVKVGVSGKIRFFFMPCFGKFCNSLGPGLLWGFISIKTKAFLAMGAPFLFVRILFKTMDGRIFCHP

SEQ ID NO: 233059 - protein, 86 aa, Zea mays
  unsure (1)..(86): unsure at all Xaa locations
  Clone ID: MRT4577_144142C.1.pep
ELEFSMYAAHEVSIAVAELXNSILTIDTSLEDSDCAFMVDNEAIYGICRRNLDIERPTYTNLDRLICQIVSSITTSLRFDGPLIVD

SEQ ID NO: 233060 - protein, 194 aa, Zea mays
  Clone ID: MRT4577_144143C.1.pep
MASLSCASTLPWTPASYPRPSAGRCLTASRRAPSLVIVAQGKVKKYRQVILTDDIEEVGEKGDTLKVRAGFYRNFLLPKGKATLLTPEVLKEMQLEQERIEAEKKRVKEDAQQLARVFETIGAFKLPRKGGKGKQIFGSVTAQDVVDIIKSQLNRDVDKKLVTVPEIREIGEYVAEIKLHPDVTARVRLNVYAK

SEQ ID NO: 233061 - protein, 194 aa, Zea mays
  Clone ID: MRT4577_144144C.1.pep
MASLSCASTLPWTPASYPRPSAGRCLTASRRAPSLVIVAQGKVKKYRQVILTDDIEEVGKKGDTLKVRAGFYRNFLLPKGKATLLTPEVLKEMQLEQERIEAEKKRVKEDAQQLARVFETIGAFKLPRKGGKGKQIFGSVTAQDVVDIIKSQLNRDVDKKLVTVPEIREIGEYVAEIKLHPDVTARVRLNVYAK

SEQ ID NO: 233062 - protein, 48 aa, Zea mays
  Clone ID: MRT4577_144145C.1.pep
FKTGAFSYVSLFSTRTGRIVELAKTSKNLPEHRLRELIKNIGVLVHQP

SEQ ID NO: 233063 - protein, 83 aa, Zea mays
  Clone ID: MRT4577_144146C.1.pep
CTRGATAGRRGTLSSRLRLRPRPRRCCSPPVCNSSSSTADPGTRFSRVGTLSRQSLTGFITTSPFGRRKPTTAGMTHAEEARY

SEQ ID NO: 233064 - protein, 64 aa, Zea mays
  Clone ID: MRT4577_144147C.1.pep
RCPSPVVCSPSAVHACCAPWPPRISDGVRCVLKRTRERCCSPGKVPAASFCIFFYLVSQVPKSR

SEQ ID NO: 233065 - protein, 89 aa, Zea mays
  Clone ID: MRT4577_144148C.1.pep
GPSSSAGFPHSPCVTARYPPPTRFSMPAIDGPHRAGAESCTHLSPTLRQVLCRPPDLPSNEHGWSRPSCRRPTRVRVSLLRWTRHVRIV

SEQ ID NO: 233066 - protein, 90 aa, Zea mays
  Clone ID: MRT4577_144149C.1.pep
KPNPSTLQDPTGRSHLASCLYYPCYSDTRHIVLQQEPLGGGSAHNMRAHHASTARASAPCCVLSGRAESNVHPASFIELCFLLETASTSI

SEQ ID NO: 233067 - protein, 94 aa, Zea mays
  unsure (1)..(94): unsure at all Xaa locations
  Clone ID: MRT4577_14414C.1.pep
EGAWXSSPLFFVRFFFKELLTGEKEALLQLPSAKALLYDPSFRPLVNKSTPDXSLFFADXPRRHLKXLSKLGFPQGYRLIRVWCVWPPGLEFRV

SEQ ID NO: 233068 - protein, 45 aa, Zea mays
  Clone ID: MRT4577_144150C.1.pep
KKKKKKKKKKKKKKKKKKKEKKNKKKKKKKKKKNKKKNKFNIKKK

SEQ ID NO: 233069 - protein, 65 aa, Zea mays
  Clone ID: MRT4577_144151C.1.pep
NKKSILSCYFQSKKKTTTSKPLLGPEHQPDRTHTLTPTTQGKPTTITGCAKKQKNVTPNHHPSTS

SEQ ID NO: 233070 - protein, 79 aa, Zea mays
  Clone ID: MRT4577_144153C.1.pep
NSRVSSLQSAAALRGFVFFKEGRDPAQMPGSEQNNRKNNYNLTMVFTKEYHPSPLKALNTWTKHRRVYTKEPYRNGIND

SEQ ID NO: 233071 - protein, 42 aa, Zea mays
  Clone ID: MRT4577_144154C.1.pep
NLETLNINPVLNVLLFVVRSNASLVMYRFAYSIVSIVSLFLL

SEQ ID NO: 233072 - protein, 170 aa, Zea mays
  Clone ID: MRT4577_144155C.1.pep
RPGREHSTDKPLIIMESPSSPRCWCSPCSRSPHRRSLSRERRRNRSDTRASADRHPRPEESPCLPAEYRQTRCALTAYHKPPCLLAVYASAAPAAGDTPSHCDRWRKPYTEKQGTPKRVSTASVMHDADMHAHAIIGQVTHLRAQTRRLPGRIYETRSTCADDYDHCCPL

SEQ ID NO: 233073 - protein, 210 aa, Zea mays
  Clone ID: MRT4577_144156C.1.pep
MARRWLQVTLALVVVTAAATTLSSAQQTAASFPAMPSCPPAPLSLSPCIGYVFGVGSATLASCCSQLRGFLQAQAPCICAASKLAPSPIGVFLGQAQGMIPNVCDLPSPCDAGAAGEGSTPPAGDTSPVSTTTTPAAEPSAGAPAAAVPDASGAPPAPTSDDSATAMAPAGTASKLPELLHAAGATSSRDVAAGTVFVAVFLAALATMYV

SEQ ID NO: 233074 - protein, 48 aa, Zea mays
  Clone ID: MRT4577_144157C.1.pep
KKLSPTPNIRVKSFVLPNPDLLLLKSSYCVLHGTSTENMHHGSGGDKW

SEQ ID NO: 233075 - protein, 74 aa, Zea mays
  Clone ID: MRT4577_144158C.1.pep
EHGAMWVTSQGVAHVLPAFIMDVRDADLGEVLNEEWNDGIADVGGATSDEGHLPFQSITGRGEGGLAPRAGYSI

SEQ ID NO: 233076 - protein, 63 aa, Zea mays
  Clone ID: MRT4577_144159C.1.pep
DSSYVFEPDRSDVSQDEEDNLSKTLLPHNIFPKLEHVDYSDPPHGSCNFGIPEEDQAIWSWPY

SEQ ID NO: 233077 - protein, 46 aa, Zea mays
  Clone ID: MRT4577_14415C.1.pep
KKKKKKKKKKKKKKKKKKKKKKKKKKKKKKKKKKKKKRGGPSRNKN

SEQ ID NO: 233078 - protein, 70 aa, Zea mays
  unsure (1)..(70): unsure at all Xaa locations
  Clone ID: MRT4577_144160C.1.pep
MVRTHSHGKGIYSSALANTRTPLIXIKTPTSEVAEMNTKDGKNGQKTGDNGVLLRHQEGNHLVKSVTDIK

SEQ ID NO: 233079 - protein, 174 aa, Zea mays
  unsure (1)..(174): unsure at all Xaa locations
  Clone ID: MRT4577_144162C.1.pep
FPCRSSDGEIXHASQASAIEKYTIRYLIQQDCRDDFIPLHIATSNILSQGVDCCYKHVHVGTVAAAASKAASDDALAGSANIIVASGEDLKNXDVHFTKVDQGTLFHLILAGNYLNITALLYLTXHTVADMIKAQTPEQIVKTFNIKNDFTTEDEEDILQDDQCSFILERCWIY

SEQ ID NO: 233080 - protein, 76 aa, Zea mays
  Clone ID: MRT4577_144163C.1.pep
ADGSRVCSSPPSSFPHYPSRLLFSPSPSLPRLAHVSSMYRDGERFATSFPNCVCDVTLASLSPDRGLMDAAAELRA

SEQ ID NO: 233081 - protein, 50 aa, Zea mays
  Clone ID: MRT4577_144164C.1.pep
TSITLVPRSSLYYIYNRGAGVLNNQHRKQKAGRLVIADRGSMQQAIPDLR

SEQ ID NO: 233082 - protein, 284 aa, Zea mays
  unsure (1)..(284): unsure at all Xaa locations
  Clone ID: MRT4577_144165C.1.pep
MAANGGDHTSARPHVVLLPSAGMGHLVPFARLAVALSEGHGCNVSVAAVQPTVSSXGVQAPRRAXFVAAAPAVRXARLPPGAVRRVRVPGRRPXFLRFEATRRSAPLLGPLLDAAEASALVTDIVLASVVLPVARERGVPCYVLFTSSAAMLSLCAYFPAYLDAHAAAGSVGVRVGDVDIPGVFRIPKSSVPQALHDPDHLFTQQFVANGRCLVACDGILVNTFDAFEPDAVTALRQGSITVSGGFPLVFTVGPTXSGEIQAEETADYMRWLSAQPARSVVYVS

SEQ ID NO: 233083 - protein, 46 aa, Zea mays
  Clone ID: MRT4577_144166C.1.pep
MAYSTWNSRPWDLHVVTSVSYWLRHIIKASSPLSTKSIRRSPSARK

SEQ ID NO: 233084 - protein, 93 aa, Zea mays
  Clone ID: MRT4577_144167C.1.pep
MKRHKQVEDEATQLAREREVRGSDDFSIKNYIAVLNTLEVIKEEKVKAYKVFKDSDNRQIFLSACNDDREAALMWLRDEVGSHRLPGVELCMK

SEQ ID NO: 233085 - protein, 170 aa, Zea mays
  unsure (1)..(170): unsure at all Xaa locations
  Clone ID: MRT4577_144168C.1.pep
LCLGAWQHDRIQIIDNEQYNRITXSYDAICDSERHDEYAGESQHAMNAINTDYDVHGIIEKRITADSVQREIKLRSMKVIRAPGEKPMIVVHYDVEEKQFAAEEISSMDLIKMREIAEAYLVSTIKNAVVTAPAYFIDSQRQATKDAGXVIAGLNVLRIINDPTAAAIAY

SEQ ID NO: 233086 - protein, 61 aa, Zea mays
  Clone ID: MRT4577_144169C.1.pep
KEYLPYNKTAFGIYHNPARESPLTKKHDTWCNKTGKPPQCFFSGKCLFFLKKCLTHPKLTI

SEQ ID NO: 233087 - protein, 113 aa, Zea mays
  Clone ID: MRT4577_14416C.1.pep
VYQYHKILRALLSSPSDNLLEVGGARGTILGDLDIVTLCRYLPVRPRQKRRRGPRASPRIPKRSTAHNHPRSFHHGGGRRARQGVPARGRRDTWRGIDLVAGRREQHPSKSRG

SEQ ID NO: 233088 - protein, 107 aa, Zea mays
  unsure (1)..(107): unsure at all Xaa locations
  Clone ID: MRT4577_144170C.1.pep
SHERPKRAAKQTPTXTAAGGEAPTAAEXKTAAAEAQPGGARXKGXXTQAHKGPNHNARRXKRQQDEQQTTHEPETGSGETXAXQQHTQTGSKKQRNAPDAXKARKKE

SEQ ID NO: 233089 - protein, 52 aa, Zea mays
  Clone ID: MRT4577_144171C.1.pep
PYVKNDHFKAGGVLMEENKTAPVGGTPRKCGPPFVNRNPTMVLMAWPNCSRG

SEQ ID NO: 233090 - protein, 81 aa, Zea mays
  Clone ID: MRT4577_144172C.1.pep
PASTISNRLSSYPRTCTSTYTTTTRMTRNHMHSNTLTTIPNYLPPQTNPSPTVTNTNTWSTITSNTLGYADSICNRTFQLY

SEQ ID NO: 233091 - protein, 75 aa, Zea mays
  Clone ID: MRT4577_144173C.1.pep
ILRLGSPSTREHQKSLPFYRNVFNCLDNKGRTWGREPIGISARPFLAGQSHLIGGIPNYRHEAPLCASLLGVVRP

SEQ ID NO: 233092 - protein, 74 aa, Zea mays
  Clone ID: MRT4577_144174C.1.pep
SNGPIISVPKFGIHRPIYLTWNVDKCGDCVAVLAHHEVTNSLTIIGYSILQTVNILIAAHVPYSHHPSMHLSLL

SEQ ID NO: 233093 - protein, 98 aa, Zea mays
  unsure (1)..(98): unsure at all Xaa locations
  Clone ID: MRT4577_144175C.1.pep
MDVSHSGSSVAGEAPTTGEHQVGTTIVRVCYQGCVVLRAESMSXTGMYVANRASHKITQLAENVXFCHSGSAADTHLISDYVRYFLDQHTIHLGQPAT

SEQ ID NO: 233094 - protein, 51 aa, Zea mays
  Clone ID: MRT4577_144176C.1.pep
SSSAASLIGKRLFRHLLLPVICAQVMWLACQCLCRNVFMCFACSSNHFSLL

SEQ ID NO: 233095 - protein, 113 aa, Zea mays
  Clone ID: MRT4577_144177C.1.pep
SASRLQCKNLSSLQSPLNVTATCASFAEKRSAPVHATAEGSEAGAAEQPEEPKPATKIEEMPLESKQKMIMEQRARMKLAKKLRQRRKRLVRKRKLRKKGRWPPSKMKKLKNV

SEQ ID NO: 233096 - protein, 123 aa, Zea mays
  Clone ID: MRT4577_144178C.1.pep
VVCLFVITVVAASRLQCKNLSSLQSPLNVTATCASFAEKRSAPVHATAEGSEAGAAEQPEEPKPATKIEEMPLESKQKMIMEQRARMKLAKKLRQRRKRLVRKRKLRKKGRWPPSKMKKLKNV

SEQ ID NO: 233097 - protein, 232 aa, Zea mays
  unsure (1)..(232): unsure at all Xaa locations
  Clone ID: MRT4577_144179C.1.pep
WLLLPPLLSPTAASRHTPLLTAPSALLPPASIRFCAPRHRPCRRPRLPLSAADGDASTSSTVSAANQRGSSASSVLTFQQAIQRLQEYWASVGCAVMQCSNTEVGAGTMNPLTFLRVLGPEPWNVAYVEPSIRPDDSRYGDNPNRLQRHTQFQVILKPDPGNSQDLXLHSLSAIGINIHEHDIRFVEDNWESPGLGAWGLGWEVWMDGMEITQFTYFQQGRLIKKGLLHDSC

SEQ ID NO: 233098 - protein, 167 aa, Zea mays
  unsure (1)..(167): unsure at all Xaa locations
  Clone ID: MRT4577_14417C.1.pep
VAIVTQSSCRRRPKRPRGRPRSSRTIPTRWPPARSPIPPRPRKRLRRRXVFMRRIFPFLLATNVFIGVYVFAKTYKRDQEKKNAQTTAAAALSSPASTSAEAPDPAPAPAPKSVLPPLSEDEQWNLYKWILEEERKIKPRNATEKKKIAEEKALLKEIIRDKSLPRL

SEQ ID NO: 233099 - protein, 623 aa, Zea mays
  Clone ID: MRT4577_144180C.1.pep
MATRPGPLTEWPWQRLGNFKYLVMAPVVVHGARRVVARGWGDIDLAFALILPSLLLRMVHNQIWISAARYQTARGKHRIVDRGIEFDQVDRERGWDDQIILNGLLFYVGYLAIPSARRMPAWRSDGAVAMALLHAGPVEFLYYWFHRALHHHFLYSRYHSHHHSSIVTEPITSVIHPFAEHMVYYVLFAIPMLSTLYMGNASVLGIVLYIAYIDFMNNMGHCNFELVPRWMFQLFPPLKYLMYTPSFHSLHHTQFRTNYSLFMPLYDYVYSTMDKSSDQLYETSLRGAEETPGLVHLTHMTDLQSVYHLRIGFASVASRPSATGAMWWYMWVLWPVAWLSMALAWAYGSSAFVVERIKLGKLRMQTWAVPRYNFQYGLSWERESINGLIERAILDADARGVKVLSLGLLNQAKQLNGGGELFRHRYPKLRVRLVDGSGLATAVVLRSIPRDAKQVLLHAGPSKVACATAAALCERGVQVVMNPNKEYDMLKSQIADSKASYLERRSDNHHTPQVWLVDSIDDEEQKMAPKGAVFVPISQFPIKKIRKDCTYLSTPAMKIPETMQNIHACENWLPRRVMSAWRIGGILHALEGWTVHECGDAMVHAEKAWSAAIRHGFVPLTKA

SEQ ID NO: 233100 - protein, 54 aa, Zea mays
  unsure (1)..(54): unsure at all Xaa locations
  Clone ID: MRT4577_144181C.1.pep
QQWCPLLEALLHLDAQIXLCAGIKAXVTXIDLNAPLILLCIINNCCMICPEDFT

SEQ ID NO: 233101 - protein, 54 aa, Zea mays
  Clone ID: MRT4577_144182C.1.pep
GQVSQAVLVMLPLLFHQAREQFIQSVHVIDVRRRYMHAVQRPSGLRASVITASR

SEQ ID NO: 233102 - protein, 118 aa, Zea mays
  unsure (1)..(118): unsure at all Xaa locations
  Clone ID: MRT4577_144183C.1.pep
ARGKRKRKGKDKGAAARKATTAGDRARRAAQKERXRXHNRRAXKDTHNXADHRHXXNQDAKEXRDGXEANRHXXNXDXDERQKDEAEXESRNRQDPGPNKEAGAPGGTKGTRNHAAPE

SEQ ID NO: 233103 - protein, 82 aa, Zea mays
  Clone ID: MRT4577_144184C.1.pep
QKKPIFFKKTPPLGAKPISGKKAGRPRQPNSFKTGNPGGSFFLPHKNPPRRILRPRFFQGPLPAVQGLGFWVGPPTGTEPGG

SEQ ID NO: 233104 - protein, 95 aa, Zea mays
  unsure (1)..(95): unsure at all Xaa locations
  Clone ID: MRT4577_144185C.1.pep
RPATGGALVHSPRRRWWARPAPPPRRNSKVSGGGVVPPPPQKKACKWSGPTPHWPGRSLPSTRGAGPGRFPDRTLIGTLFFFFXGGSXRGSRTXQ

SEQ ID NO: 233105 - protein, 99 aa, Zea mays
  Clone ID: MRT4577_144186C.1.pep
LCEPTVYPSIWQGTADDIVDLAHGKRLWELAKDKYEPLWIKGGGHCNLETYPEYIRHMRKFISAMEKLAKDSSKAAQAPPPSSMAAEERHTKCLRFGKR

SEQ ID NO: 233106 - protein, 60 aa, Zea mays
  Clone ID: MRT4577_144187C.1.pep
GGQGQDCWFYPREGDAPALFLWTIVNLVHFWLVLLSRFKCRGGMFYRALKIVPPQGGGGG

SEQ ID NO: 233107 - protein, 157 aa, Zea mays
  unsure (1)..(157): unsure at all Xaa locations
  Clone ID: MRT4577_144188C.1.pep
APHMFIXRSGRXAGSPASLKNSHPGHQPSGSSSISCTARCTADPTAWPGGATVNPEGIRGPARRRRRWEQGTGGCARERDAVSGAAGAARVSWPNEEAVMAGPARRGDGELQRLERSRARGRVRATAEGGSSCERAEETGEREGADGARLLARTGKG

SEQ ID NO: 233108 - protein, 106 aa, Zea mays
  Clone ID: MRT4577_144189C.1.pep
MEWGSAAYTAATLVCAAAASVVALTHIYRHLLHYAEPIYQRFIVRIIFLVPVTLSARRSHPQQTLVAKGALAPDLSPAFAVAFPYRMSSRGTARSGLVSWRGSHEC

SEQ ID NO: 233109 - protein, 85 aa, Zea mays
  Clone ID: MRT4577_14418C.1.pep
ARLYDRSILTEQQLQQRAVCIRRGCPLMSRTHIREMEAHRWPKQVSSSNDEEYTHYYYSDSKFSSTCHHSSVSSFTFSKTACSEG

SEQ ID NO: 233110 - protein, 49 aa, Zea mays
  Clone ID: MRT4577_144190C.1.pep
YKGDVENTILDILGGLRSTCTYVGAAKLKELSRRATFIRVTQQHNTVFG

SEQ ID NO: 233111 - protein, 105 aa, Zea mays
  Clone ID: MRT4577_144191C.1.pep
GSHGWKHRAQRQSVRRNSVIGVVVPRRSRQAPRPALSDLVAGKSAVSICLLDALRHLALVVLRVWISMWAMRFHRQCRSAMCSDTLTTIVGKVMLGDHPSKKKKK

SEQ ID NO: 233112 - protein, 177 aa, Zea mays
  unsure (1)..(177): unsure at all Xaa locations
  Clone ID: MRT4577_144192C.1.pep
SGARHRRRSRGEAWILARRETPGRTATARSSVVRSPLSCCRLRPAAGRSGRRRGAADPVLPARVGAAHCCCGGCYARWWYRWATGTWNPSCPHSSNSSSGATGNRTRSWLRGCRLARTRRPPPLRRSPRPXSSPPPTSPPPLSSPPPASPLPEPSXXSSPPPALVPPPPDATPPSLP

SEQ ID NO: 233113 - protein, 27 aa, Zea mays
  unsure (1)..(27): unsure at all Xaa locations
  Clone ID: MRT4577_144193C.1.pep
VDXXQQSNKINSVLVLQLRXSYLLRXX

SEQ ID NO: 233114 - protein, 276 aa, Zea mays
  unsure (1)..(276): unsure at all Xaa locations
  Clone ID: MRT4577_144194C.1.pep
MDSTEPEVAAATVEMMPPHVVCVPYPAQGHVTPMLKLAKLLHARGFHVTMVNTEFNHRRLLQSRGPEAVDGITRFRYAAIPDGLPPSDANATQDVPALCYSTMTACLPHLLSLLRKLNSDDPSSSGAPPVTCLVVDGVMSFAYDAAKEIGVPCAALWTASACGLVGYRHYQQLVQWGLVPFRDEAQLADDAYLDTVVRGTRGMCDGMRLRDFPSFIRTTDRGDIMLNFFIHEAXRLSLPDAIMINTFDDLEGSTLDAVRATLPPAYTVGPLLLQTA

SEQ ID NO: 233115 - protein, 67 aa, Zea mays
  Clone ID: MRT4577_144195C.1.pep
NVDGWGHHLWRLQIRNLNSLLGEGFTLTFSPGQTFHKTENKSDSYFIVNPRSWSRNICRGRSMLGFR

SEQ ID NO: 233116 - protein, 74 aa, Zea mays
  Clone ID: MRT4577_144196C.1.pep
PTRKSTRFSETVTRVNNYGPGITYYYKKRRKYPTLIICKKTGPKMRGTWESKAKQFFPSARAGLLHYKGSTTNK

SEQ ID NO: 233117 - protein, 43 aa, Zea mays
  Clone ID: MRT4577_144197C.1.pep
SLSSCVFVSIFFFNSCLNYQIIFVNVPLFLNPLLSIIIDGAFT

SEQ ID NO: 233118 - protein, 56 aa, Zea mays
  Clone ID: MRT4577_144198C.1.pep
FGRWPCCTAWPLQSSDTTQLRVGVGPLERYSVRPPCTLLDQGAIIKSPPCVVARHF

SEQ ID NO: 233119 - protein, 105 aa, Zea mays
  unsure (1)..(105): unsure at all Xaa locations
  Clone ID: MRT4577_144199C.1.pep
PTRPLSPXRELAHLIADVLKEAGAPCXIKSXXXHXPTKNEPQISALKYRVNIVIXTPDRMKNLIEMRVYCLNQVSSVVLDQANSMLDLAFEPEVTAILSQTSSVH

SEQ ID NO: 233120 - protein, 40 aa, Zea mays
  Clone ID: MRT4577_14419C.1.pep
SSSRPISRRLNGISHPVWVGTISWFCPVLDVDWTAGNKAH

SEQ ID NO: 233121 - protein, 78 aa, Zea mays
  Clone ID: MRT4577_1441C.1.pep
CMVNLPLWGRTRHCSRGISLLHLSQILPFRKKETTGMTYSVHVKVHPNLAFDAVLGGPAADKRDLRLSGTFSVCNLYT

SEQ ID NO: 233122 - protein, 50 aa, Zea mays
  Clone ID: MRT4577_144200C.1.pep
GFFYGLEHINYSEQNKGVLDERQALETPVASNARKTPCLSNHGEQEELST

SEQ ID NO: 233123 - protein, 42 aa, Zea mays
  Clone ID: MRT4577_144201C.1.pep
TPIWQICFPFFSRPLFKYRCTCGPPLGGPLGGNAVSLGVSRQ

SEQ ID NO: 233124 - protein, 95 aa, Zea mays
  Clone ID: MRT4577_144202C.1.pep
GPWAPGSGPALAPLGPPVEVAKVIPGSPGVSRRGGVFGNRRKVNGWFGGALGRFKTGLFLGKVFFLAGRFKIPNFWGLARCFLGILTRFPGVLPP

SEQ ID NO: 233125 - protein, 53 aa, Zea mays
  Clone ID: MRT4577_144203C.1.pep
MECHHGSCQLSTPHIHSHKVILSVSCEYLRALFQSGMHESFAETFKVPGGWEA

SEQ ID NO: 233126 - protein, 61 aa, Zea mays
  Clone ID: MRT4577_144204C.1.pep
QNVIWYSKYQRPVLGATFMVISFSNGGRSLRVLSAFVWMGLDQSPINVICMDCRNHELLVV

SEQ ID NO: 233127 - protein, 84 aa, Zea mays
  Clone ID: MRT4577_144205C.1.pep
AGGSAQEEQPSGLKAKRGSLWHDQCTCRSPAMESAVSRAQHIIQDLNGSGDRWIPNRRPIAVPCAHSPASIIPWMFIPNIFLAW

SEQ ID NO: 233128 - protein, 99 aa, Zea mays
  unsure (1)..(99): unsure at all Xaa locations
  Clone ID: MRT4577_144206C.1.pep
KENKGIMGQEDIVSFFHNGTIHKESIPVQKXSFCLCDKVKQKMGSIDPXFAKRWQTMVTGIXAWHXLDPSTPPSANGKSKEMRPPSGTGVKNKVGRGPA

SEQ ID NO: 233129 - protein, 67 aa, Zea mays
  Clone ID: MRT4577_144207C.1.pep
VVVIINYYFLWYQENVLVLGRTQVAGRQPATTPPRCGAFWSVQFVTGRGSCPMPGSATFFRLAWFRD

SEQ ID NO: 233130 - protein, 67 aa, Zea mays
  Clone ID: MRT4577_144208C.1.pep
RPYNTHMHTLLGSSNQLSAASLIRVLLLMSHVHQLSAFTENMHQNDTAQLSRNQQPLDPRSCRLQDP

SEQ ID NO: 233131 - protein, 40 aa, Zea mays
  unsure (1)..(40): unsure at all Xaa locations
  Clone ID: MRT4577_144209C.1.pep
LADDNQYDIXXFCXNDXXVLLAXXVYQENIYXDXKXFNSF

SEQ ID NO: 233132 - protein, 36 aa, Zea mays
  Clone ID: MRT4577_14420C.1.pep
HEPIDVRIKLISCCLLMVVVGIKLKQLAGSRTCARP

SEQ ID NO: 233133 - protein, 34 aa, Zea mays
  Clone ID: MRT4577_144210C.1.pep
LAVEGGSHLAHFYLIELVLRYIASRYFDQMIVRA

SEQ ID NO: 233134 - protein, 196 aa, Zea mays
  Clone ID: MRT4577_144211C.1.pep
SLSILRMTAYFNQTGWPAKAPKTDDKRKEFIASLHKRKTELFMALIEKKLLPLRPGVQRLIDEALGKAVKVAVCSTSNEKAVSAIVSYLLGPDRADKITIFAGDVVPHKKPDPAIYILAATTLGVDPQSCVVIEDSTIGLAAAKAAGMKCIVTKSGYTAEEDFETADAVFDCIGDPPEVRFDLDFCAKLLKKQYVS

SEQ ID NO: 233135 - protein, 140 aa, Zea mays
  Clone ID: MRT4577_144212C.1.pep
SSIWPIFSYLLPRSRRYTDVVHFGSWHQHRTFGIETLTGEKRNMGSPETVTVITGGWDTKVSGAYSTNVNDPAAYTKSLYALGALLSLGQDCLVPYLSLDETHAKLSMDHLHALVDLGALGHSPSQDWQLWCRLWPPQVV

SEQ ID NO: 233136 - protein, 78 aa, Zea mays
  Clone ID: MRT4577_144213C.1.pep
QGNTGYLKHRPPTFFWVYMGPKGSLGPTGQLPSNIASRIGEAQNLGLTGKTYNWGWWNKQPFLTPMGSIWLVGKKLFM

SEQ ID NO: 233137 - protein, 56 aa, Zea mays
  Clone ID: MRT4577_144214C.1.pep
KSLAAKDTQRNKTMQVSLPNGWISNRRIDRAHLFRSPHECGTRRPEQKAEASSGGF

SEQ ID NO: 233138 - protein, 57 aa, Zea mays
  Clone ID: MRT4577_144215C.1.pep
PAGPGYLGHACQLNSFGSSGSLSGSDTSFFSNFGGKNVAGASAASANVANTAGVGKI

SEQ ID NO: 233139 - protein, 114 aa, Zea mays
  unsure (1)..(114): unsure at all Xaa locations
  Clone ID: MRT4577_144216C.1.pep
MATLRTDLPGPIXDKKLEKKPIKFSNLLLGAGLNLFEVTTLGQPLEVVKTTMAANRGDSMAKSLGRVWARGGPLGFYQGLIPWVWIEASTKGAVLLFVASEARYYARADGASPV

SEQ ID NO: 233140 - protein, 102 aa, Zea mays
  Clone ID: MRT4577_144217C.1.pep
MQGVQAVFQMSCGNVGNSQQGGGASGGAAAGGAAAGGAGGTSGSSSSGGAAAAGGGANGGGASSAGSVTGSAGNAVGASGGNNMASGVTTASGTTSPNGGSH

SEQ ID NO: 233141 - protein, 102 aa, Zea mays
  unsure (1)..(102): unsure at all Xaa locations
  Clone ID: MRT4577_144218C.1.pep
PTPIIKSTLALQQWPLNRLCLLMLLGLSARAATATNLXTRAHKTPIAXLFPPXFSPAGVIRYGENPXLFKPYRIQQAXIAAGILPLSPLFLQQXSALLQQLP

SEQ ID NO: 233142 - protein, 92 aa, Zea mays
  Clone ID: MRT4577_144219C.1.pep
SICHRTAKKQSIILSWENTKKAIIEAELKKKKVSLTFSFVLLYIVLKDDHTIFRTLSNYKCKSFRTSKEFHMINYNHMSQSMTFYCKFYYYK

SEQ ID NO: 233143 - protein, 44 aa, Zea mays
  Clone ID: MRT4577_14421C.1.pep
TSPDVSLKLRQLKCFLLNSSTKLIFYSFEITYLLSNFSRLNVFL

SEQ ID NO: 233144 - protein, 48 aa, Zea mays
  Clone ID: MRT4577_144220C.1.pep
MTAASLCHVIGGAGPANPACVYPMSDSTYNLTKRSCRVLYTPFTDEHF

SEQ ID NO: 233145 - protein, 54 aa, Zea mays
  unsure (1)..(54): unsure at all Xaa locations
  Clone ID: MRT4577_144221C.1.pep
FITWAKGGWLGNKHLVFWKGLGNGLLFVRKIXNVATGGNNKPKLAWVIKEGGEK

SEQ ID NO: 233146 - protein, 114 aa, Zea mays
  Clone ID: MRT4577_144222C.1.pep
MTTLRNLKIKTSTCKRIVKELRSYEKEVEKEAAKTADMKEKGADPYDLKQQVLTGPLILRAFFYHYFFSVTELTHPALVIAKHTKILVCCVAPTGCDLICLWQSLALLGLSVCS

SEQ ID NO: 233147 - protein, 91 aa, Zea mays
  Clone ID: MRT4577_144223C.1.pep
EPYYSSSVIVLCKREGCEAEMEELCHRSRQVEHRAMASLVPSLSYRLHHPFLHPRSHLEIACPRCNSFTLLTGHVQPYTVNLTPLHDIRHN

SEQ ID NO: 233148 - protein, 153 aa, Zea mays
  Clone ID: MRT4577_144224C.1.pep
TLVFSTVMVSLIGQGLSLPWVVKKLQLSKPSPLAQKIAMLQLNLVTAKAAQGELKYLLEAGSLPKFLYEELFADYQARIANSEQELREFYNQRNLIFSEGEVEKKYIDGLYRRLYIAEKSAINDALAKGILADDISDEYLQVLNEKLLALQDD

SEQ ID NO: 233149 - protein, 36 aa, Zea mays
  Clone ID: MRT4577_144225C.1.pep
SMERYIPSSLNLAPVGIISSRPLNLSTGSSTSEAIS

SEQ ID NO: 233150 - protein, 83 aa, Zea mays
  Clone ID: MRT4577_144226C.1.pep
RQRITEMCLVNGSPCFSGELRLQLYAHQALFNQESIELALCWNFFFILWQLLCCKCKPSHGNDSSSACSCVIYWEIGMIFFCL

SEQ ID NO: 233151 - protein, 155 aa, Zea mays
  unsure (1)..(155): unsure at all Xaa locations
  Clone ID: MRT4577_144227C.1.pep
MTQAHYDEDRGAVFPCVRRLLTCQDDMARHPILASRDFFIVVPPAEKDDDEDLFKVPQCSCQALQLQEGYINSSRNAGWGAFNSCRWQVNGSGQFCGVAEMIGPVDLDRSVDYWQQDKXWSGQFPVKWRIFKDEPXNNLVRRMLVGNNGNDPGRE

SEQ ID NO: 233152 - protein, 52 aa, Zea mays
  Clone ID: MRT4577_144228C.1.pep
THDESRELATYRAMAMSGSKMMADGDADLVALGLAAYTASARNIKDTTTTTL

SEQ ID NO: 233153 - protein, 62 aa, Zea mays
  Clone ID: MRT4577_144229C.1.pep
IRTRSGLHIGFSTCLGVKCFHRYYHRSKLGGWVCLYKPTHWYRPNKPARYLPGGSYPSNNHS

SEQ ID NO: 233154 - protein, 227 aa, Zea mays
  Clone ID: MRT4577_14422C.1.pep
MAAAEARAAWQRAANRCLFQEDAKRAPKLACCPPTMQQHEANSGNPTSPRDCHIPNFMHLNWNPMNSNQPIDAWFLQLQPNFGCHKVLSGDHLNYMGGEATAKKVDSFSPISTLDDINTKKSECPSELPWMVSTAFMKQTSEAPCEGCPQTSLKCRGNPNDFLHEDKEVMDFKTFDPLFPKKPKKACYEMDPPETERKCQPWWQVADEEGLASLVAERAMQHIENMI

SEQ ID NO: 233155 - protein, 77 aa, Zea mays
  unsure (1)..(77): unsure at all Xaa locations
  Clone ID: MRT4577_144230C.1.pep
RTNXHVCTWAXXCEYXXALGNRLXVXQXLYXLXKPCLFDYMLLVSRSRCRMPRHIXAXGHMNILRYSEMSAVGGVIC

SEQ ID NO: 233156 - protein, 88 aa, Zea mays
  Clone ID: MRT4577_144231C.1.pep
HEGCSWEQACKWPPRTPSSRASWSRQLAVHDVKPSQWYMCSWSTPMAIPLPLKSSSAAGTTTSAPPCALYSSITGWLAGAARAARSSS

SEQ ID NO: 233157 - protein, 119 aa, Zea mays
  Clone ID: MRT4577_144232C.1.pep
MEPPPSPLGAGACAVCCMCGDRGLPHELLRCKLCRVRLQHRYCSDLYPRATAYRRCNWCLREPAEAHAQAHAQAQPVASKKAEKRKMVQSTETSTSDEEARRQHEAGCATATRSRRSAA

SEQ ID NO: 233158 - protein, 82 aa, Zea mays
  Clone ID: MRT4577_144233C.1.pep
VWERRLRRVGVGPGPAGAGVFGSVGVAEHRRWIRPPGERGADFGAFFCCCWPAGGEGRGRACVGSLCAPKNPPPNATSPPGV

SEQ ID NO: 233159 - protein, 159 aa, Zea mays
  unsure (1)..(159): unsure at all Xaa locations
  Clone ID: MRT4577_144234C.1.pep
YERPPCDGYHEKFALKRGTRHEETKKKKKKKTKKKNLIIKFFFFFFFFIFYNFNFQTPPHLFFPPPFFLGPPPLVFGSPFPPFSLFCFPGVGWGVFPIFSCPVGRPLGRVPPPGFGPLFGRFPPPRGPFRGGXFFLFGGVFWWFLLRPQIWXXFGINFF

SEQ ID NO: 233160 - protein, 81 aa, Zea mays
  Clone ID: MRT4577_144235C.1.pep
QRRNWKNLGFPKFNPFEKNPLFPSWLNNKKAPTNPLSKHLPTLNGKWNPPCTGPLSPGGVGFTPRVTFTFASALAPALFLF

SEQ ID NO: 233161 - protein, 108 aa, Zea mays
  Clone ID: MRT4577_144236C.1.pep
WIIIRKRFKQSLKRSPRSVIRFMLLWSRSSRSFKRNSIRAQPPTMEFTQKIGPLHVRCAFPWTKGGDWCFFSLSLPFGKTACTCMYGPLRLLGLLSSPSFINKNPLAC

SEQ ID NO: 233162 - protein, 92 aa, Zea mays
  Clone ID: MRT4577_144237C.1.pep
EIQNKRWLYLDNQINKLSEDIIHQNLQSLERCVKSLGVAWGGGGGAWASRSTVVTNKEDYMGEHQKGAGKDGGQKELQGNVLGRRVSKPSGR

SEQ ID NO: 233163 - protein, 101 aa, Zea mays
  unsure (1)..(101): unsure at all Xaa locations
  Clone ID: MRT4577_144238C.1.pep
TGTEWPSQGFRTNKLSPPLDWQHYASEXAWGVLTEQSPKRXFVVRQKFYELLENGLLPEGVVNNSLAELLMKLDADLKHDIRLWARHYEHPMRVRSKGILH

SEQ ID NO: 233164 - protein, 271 aa, Zea mays
  Clone ID: MRT4577_144239C.1.pep
MADGKRGEDSAVALKTSPSSAVMAGGLRGVSNPLEEWSGRVKAIEAGFRAWMAKQPIQIEAAVTTAVGAVQGGALGGLMGSLTADGGSPFPIPQPPPNANPEAMASFKQAQALAGGPLVQARNFAVMTGANAGISCVMRRIRGKEDIQGSMAAAFGSGALFSIVSGMGTPNPVANAVTTGVAFAVFQGGFFMIGQKFSKPPSEDTYYSRTRSMLHKLGLEKYEKNFKRGLLNDQTLPLLTDSALRDVKIPPGPRLLILDQIKRDPELVRAK

SEQ ID NO: 233165 - protein, 118 aa, Zea mays
  unsure (1)..(118): unsure at all Xaa locations
  Clone ID: MRT4577_14423C.1.pep
DAWADAWAQVCLLRGMWAELLEKERCIYQAVKLGTHIQPPYEKLRIKELKEVTNSFGRAALLGEGAIGQLNKGRVENANLIAIRWXTLHQRCLIQDLKQVIDLLERLRQPKVAMHIGA

SEQ ID NO: 233166 - protein, 499 aa, Zea mays
  Clone ID: MRT4577_144240C.1.pep
MDRAAKPHFALIPFTGTISHVIPMADLGCLLAAHGAEVTIITTPVNAAIAQSRVDRAQSHGATTTITVTAVPFPAADAGLPEGCERMDLPRSQAEVPRFFVANKGFGEAVSRHCLGEALRRPSCVVSGACQTWTLGLARQLGVPCYVFHGFGAFALLCIEHLYRHRPHEAAALADDELFDVPALPPPFRLRLSRRQLPPHFMPTTSVAGKALQGIRDFDMAADGFVVHTFEELESGSTALLAEATGKKVIAVGPVSLCCAPSLDPRLVSNDDARRCMAWLDAKAPKSVVYVSFGSFGRMPPAQLMQLGMALVACRSPVLWLVKGADSLPDDVKDWLRENTDADGVAGSKCLVVRGWAPQVAILAHPAIGGFVTHCGWGSILEAVAAGVPMATWPFFAEQFINEQLIVHVLGVGVSVGVTKPTENVLNATTDAAGGSQGEADAEVGMEQVKKAMDTLMDQGPKGEERRRKAHELKLKAKSALEKGGSSYTNLDNLILSFL

SEQ ID NO: 233167 - protein, 113 aa, Zea mays
  unsure (1)..(113): unsure at all Xaa locations
  Clone ID: MRT4577_144242C.1.pep
ISVWTHACGGTPSTLIHRLLCDYXSHNFGVHDTVGDGIQIKDNDDEQDENEHEDACYEGQYEENISKTXPASDTVLEVVSQTGKEIKWEGETSGKTLLGETLFKXPYIRELKI

SEQ ID NO: 233168 - protein, 49 aa, Zea mays
  Clone ID: MRT4577_144243C.1.pep
SSVSMVYVILLFTFPWPVESLHLRLWLRSGRTLKIYPRVCLASADAWSA

SEQ ID NO: 233169 - protein, 124 aa, Zea mays
  unsure (1)..(124): unsure at all Xaa locations
  Clone ID: MRT4577_144244C.1.pep
SRPLSLLRPVRLRTAAVPFARSARRVRPSGGGGATSPVLAMASAGGGSGAPTTRTALRDLYELQGLSPWXHSLCRPVSDLLPLIARGVRGVSSRPSLVRLAISLPSFDARLMQLFLGGLGAESA

SEQ ID NO: 233170 - protein, 79 aa, Zea mays
  unsure (1)..(79): unsure at all Xaa locations
  Clone ID: MRT4577_144245C.1.pep
DLRSAVIKLNIVIHRDRTSSDSDGRRHRKAPDGADPGSSRRRDATGCSRRPSQCSIXPXADGYRARSRQFNRYSQCFCR

SEQ ID NO: 233171 - protein, 62 aa, Zea mays
  Clone ID: MRT4577_144246C.1.pep
DFFFFMGPEALLTFGPKPLGLGRLNGPPRCFFLTTFNFSPVSPPFGGVKGGKTRAPPRILFF

SEQ ID NO: 233172 - protein, 77 aa, Zea mays
  Clone ID: MRT4577_144247C.1.pep
SRRYKRGRSVTFLKGSKDIMVRLLTRHLQLEVWRSRQRPAPAGRHRERNCCSTAVVVRFGCTQSIDASRPPSASLVY

SEQ ID NO: 233173 - protein, 129 aa, Zea mays
  Clone ID: MRT4577_144248C.1.pep
CLGGGGRLVRGATRIPKQHAVMDPSYKNDFFLLSCGACFVQMVDLTRTGSAPRYRATSTRCAPSWPVFVIDEKRINGQVPLGHECFGSRISCCGCLYEMLLRLVVAPQNFGLKIVLVDRAREYLCRDHS

SEQ ID NO: 233174 - protein, 156 aa, Zea mays
  Clone ID: MRT4577_144249C.1.pep
MVAGLEDPAIDPTALSLALPASAPALNKEDYIAICLAALAGTRKFGLGREKDQHQHTKWCPTTTTTHAPSAQQELRFRCAVCGKAFATYQALGGHKSSHRKPTTPERYAAALGQAATTTAARGDHSDEITASSLSGSAASGGYHRCSIRRHGSEEL

SEQ ID NO: 233175 - protein, 130 aa, Zea mays
  unsure (1)..(130): unsure at all Xaa locations
  Clone ID: MRT4577_14424C.1.pep
PGARRKGEDGKRRGASEEGQGEEGKHRTRTQGTPPPQNTARTTGTNTPTSTYATTGTPPGNDRTTQAPQTAAKSPTTQSRGSQGPKDPSPKTTKKPDATARAADKAKXPGPEGEEHEPEAPDDAHNRDAD

SEQ ID NO: 233176 - protein, 43 aa, Zea mays
  Clone ID: MRT4577_144250C.1.pep
QLPRRHRRHGSIRTPIREASKAQDEAAHLPQDHGIEPVVDQNM

SEQ ID NO: 233177 - protein, 104 aa, Zea mays
  Clone ID: MRT4577_144251C.1.pep
RISLTRRMLIPKLRPKTKHTIRQRHRRPPIIGSLTPPITPHSIRLLIRTTHHRKTKRRRTRTRRRRKRPAEQHHRSHYGRPPERASACQRSALVVRRITAEYSA

SEQ ID NO: 233178 - protein, 83 aa, Zea mays
  Clone ID: MRT4577_144252C.1.pep
MSCCGGNCGCGSGCKCGNGCGGCNKMYPDMAEQVTTTTTQALVMGVAPSKGHAEGGFEAAAGAEDGGCKCGGNCKCDPCNCGK

SEQ ID NO: 233179 - protein, 83 aa, Zea mays
  unsure (1)..(83): unsure at all Xaa locations
  Clone ID: MRT4577_144253C.1.pep
MSCCGGNCXCGSGCKCGNGCGXCNKMYPDMAEQVTTTTTQALVMXVAPSKGHAEGXFEAAAGAENGXCKCGGNCQCDPCNCGK

SEQ ID NO: 233180 - protein, 42 aa, Zea mays
  unsure (1)..(42): unsure at all Xaa locations
  Clone ID: MRT4577_144254C.1.pep
THLFTTSRYPGTCNNRVTAVRYRHKVIKNHRRRGTDXSCFLA

SEQ ID NO: 233181 - protein, 82 aa, Zea mays
  Clone ID: MRT4577_144255C.1.pep
MSCCGGNCGCGSGCKCGNGCGGCSKMYPDMAEQVTTTTQALIMGVAPSKGHAEGGFEAAAGAENGGCNCGANCSCDPCKCGK

SEQ ID NO: 233182 - protein, 82 aa, Zea mays
  Clone ID: MRT4577_144256C.1.pep
MSCCGGNCGCGSGCKCGNGCGGCSKMYPDMAEQVTTTTQALIMGVAPSKGHAEGGFEAAAGAENGGCKCGGNCQCDPCNCGK

SEQ ID NO: 233183 - protein, 37 aa, Zea mays
  Clone ID: MRT4577_144257C.1.pep
SKPGVRLYSCITLAGQVRPSWFLRPNDGFHNQLARLY

SEQ ID NO: 233184 - protein, 83 aa, Zea mays
  Clone ID: MRT4577_144258C.1.pep
MSCCGGNCGCGSGCKCGSGCGGCSKMYPDMAEQVTTTTTQALVMGVAPSKGHAEGGFEAAAGAENGGCNCGANCSCDPCKCGK

SEQ ID NO: 233185 - protein, 82 aa, Zea mays
  Clone ID: MRT4577_144259C.1.pep
MSCCRGNCGCGSGCKCGNGCGGCSKMYPDMAEQVTTTTQALIMGVAPSKGHAEGGFEAAAGAGDGGCKCGGNCKCDPCNCGK

SEQ ID NO: 233186 - protein, 94 aa, Zea mays
  Clone ID: MRT4577_14425C.1.pep
KEQFSDGVGYGWIDALKDTAEKQVTDEMMKNPKPEWGNDIPDTKEAYWYRCMFDEHFPPHCASTVMRWTPTWSKQTDPSGRAIATHNAKYDSAA

SEQ ID NO: 233187 - protein, 83 aa, Zea mays
  Clone ID: MRT4577_144260C.1.pep
MSCCGGNCGCGSGCKCGNGCGGCSKMYPDMAEQVTTTTTQALIMGVAPSKGHAEGGFEAAAGAENGGCKCGGNCQCDPCNCGK

SEQ ID NO: 233188 - protein, 140 aa, Zea mays
  Clone ID: MRT4577_144261C.1.pep
LLSWTDDEKDPQYERSVEALSVLSQSIDAKGRQLEVVKIHVPGPLYMTKEEAEGVVSTGHAVPREPGTRLAASYVNFYIANGGIVAPSFGDNKWDKEAYAVLQKAFPDHEVVMVEGAREIVLGGGNIHCITQQQPVRPSS

SEQ ID NO: 233189 - protein, 83 aa, Zea mays
  Clone ID: MRT4577_144262C.1.pep
MSCCGGNCGCGSGCKCGNGCGGCSKMYPDMAEQVTTTTTQALIMGVAPSKGHAEGGFEAAAGAEDGGCKCGGNCKCDPCNCGK

SEQ ID NO: 233190 - protein, 67 aa, Zea mays
  Clone ID: MRT4577_144263C.1.pep
KKGKRFFQGKGGPQAPGWDLRTNLGFLLIRMKEGPDDPFRARQFWFIPNKTQRPLRGGKFKKRLGNH

SEQ ID NO: 233191 - protein, 36 aa, Zea mays
  Clone ID: MRT4577_144264C.1.pep
YLQGGSHFTFRFRKCWKSQSGRASFVKRHLAKPVCY

SEQ ID NO: 233192 - protein, 49 aa, Zea mays
  Clone ID: MRT4577_144265C.1.pep
DSNDCQVQEPFLHLIPNINFEQGLNRKLKKIHSDPCRGVPEDSSHKEEP

SEQ ID NO: 233193 - protein, 83 aa, Zea mays
  Clone ID: MRT4577_144266C.1.pep
YSSGPKFFLSKEWLGTGFLWYGCLTDGDHCSHFFIGQLLASLAVLFICMMFGPDQSVIPCVCILFQKIILRPTCNSIIFNMNV

SEQ ID NO: 233194 - protein, 65 aa, Zea mays
  Clone ID: MRT4577_144267C.1.pep
MAMDTCFTARELHVTAGSNDRLVGGNLMLPANRALPALSVGSVATYRSPDICQFNTASDEVVVVH

SEQ ID NO: 233195 - protein, 72 aa, Zea mays
  Clone ID: MRT4577_144268C.1.pep
LCDETQAHGTPTNVVIFADKQTLRMGLLIEDTTCWAARVQKTGESRGDTYYWMLERKSCKGTNGIDGFRSFL

SEQ ID NO: 233196 - protein, 92 aa, Zea mays
  unsure (1)..(92): unsure at all Xaa locations
  Clone ID: MRT4577_144269C.1.pep
MHNKPHNNPRETMRALVVVVVVVSVTSSPTCRHSSXSDGXQAHLPAHVHPPAHVQLPAQVPLPAHVQPPAHVQLPVHVHVPVHVHLPAHLWQ

SEQ ID NO: 233197 - protein, 97 aa, Zea mays
  Clone ID: MRT4577_14426C.1.pep
HSIPIQRRSLPVPEPRKPSSIPRGQRQLLGAPSDGAQRDHCQRCASTSPPDRRRPRLSLRFYKFFEDNVGILVIEGADFIGSHLVDRLMEIEKLEAI

SEQ ID NO: 233198 - protein, 65 aa, Zea mays
  Clone ID: MRT4577_144270C.1.pep
GRPLSSCVNNPVDWVTSLSTGLLGDKSAQSFGGGGGGWPPVSRTCGHRVGPSLNGWWTLFSPLHE

SEQ ID NO: 233199 - protein, 150 aa, Zea mays
  Clone ID: MRT4577_144271C.1.pep
THLPRKGNSARTAEPMSTDTHRSRSSRSRGCPVRAATPTPSIGRSSRSAGMLIAAAVVSHRLPDAPARSHHSHLTSPPRGADSSYCNNNNPIALAFPQASQPTHRDEGTRLFLCVKGSMGLLARTSSANIVTERCRCHPEPAGASPHRAR

SEQ ID NO: 233200 - protein, 73 aa, Zea mays
  Clone ID: MRT4577_144272C.1.pep
NVPASRDASDVLDISRCHGICLLGQMSRLGEMPSHVILMPRDDHARWDPQWFPNHSSSYPGRGSFCLLLVTAI

SEQ ID NO: 233201 - protein, 170 aa, Zea mays
  Clone ID: MRT4577_144273C.1.pep
AADRRGVIPASGFSLSALQIWEVIRENKDLNLPAHEVMVATVRCEEIANENLKQFLSDKGWLDLNAAVESGLPPSFGMRLSAILDSYLSEYDMETMYFDEGVRAAKRQQLESSMLDHAYPVIERVMEHLHLVALDKFKGDLEQSLRHTERFAESVRRCSQTSMAEFDAGM

SEQ ID NO: 233202 - protein, 54 aa, Zea mays
  Clone ID: MRT4577_144274C.1.pep
FKLYLLYIMWTTNLISSINRSLDRVDTITAPSRSVCCRIAWAGTHSLLTHCSAC

SEQ ID NO: 233203 - protein, 51 aa, Zea mays
  Clone ID: MRT4577_144275C.1.pep
KYPPPPWGLFNLNNPFGLTGKRSLILLLKSWPCSRCPWGCQFHFDPSPINI

SEQ ID NO: 233204 - protein, 104 aa, Zea mays
  Clone ID: MRT4577_144276C.1.pep
RTWRTREPYTIDHPTLPVIFFLLYRRPAAVADQCSGEEAAAECFPFQEQHVAVAGSSQPLRASSSSSCCCMCAQPRPPRPRPAPSSSSATRWWTAATTTTCPRR

SEQ ID NO: 233205 - protein, 105 aa, Zea mays
  Clone ID: MRT4577_144277C.1.pep
GSPFCKGGFRLTPGALLLSGNHYCRFYCLGPPLGGFPLCWPLLFRKEGPPKILFRFCPPLSVLLGKQVCPRDLFEWKLGFCEAKLLPWNLDLVPTPLGFSPVVNR

SEQ ID NO: 233206 - protein, 63 aa, Zea mays
  Clone ID: MRT4577_144278C.1.pep
YKKLLSSRIPIVYFKPRGRFGMSLLGPMNPCFMPVEGLTLWAMIPLARARTALKCFTLYRPLG

SEQ ID NO: 233207 - protein, 441 aa, Zea mays
  Clone ID: MRT4577_144279C.1.pep
MAGPKFGSFKAEKGDSAAAAGAAAQRRDPYEVLGVGRNATEQEIKSAFRRMALKYHPDKNSDDPVASEKFQEATFSYNILSDPDKRRQYDASGFEAIEADSQELELDLSSLNTVNTVFAALFSKLGVPIKTTVSATVLEEALNGSVEISQLQLGKSLCRKVEKQSAHFYSVDITDKEAKMGLVCRVHSTSRSKFKLLYFELEDNGGLSLALQEDSAKTGKVTSAGMFFLGFPVYRFEQNNSAAAAKDPDSAFFKRLDGFQPCEVNELKAGSHYFAVYGDNFFKSASYTIEVVSGEPFSAQKEKLRSVEAKIIAKRSELSKFESEYREVLAKFTEMTSRYAQEMQTIDDLLKERNAIHASYTNNPTLQRSSSSSKGKSPSKGSRSEDDQTVKKEKKSKSQPMEGSKSDDEGPENKKEETPKDRIRRKKWFNIHLKVDKRRPC

SEQ ID NO: 233208 - protein, 86 aa, Zea mays
  Clone ID: MRT4577_14427C.1.pep
SPLKTRVAPPEMSVAPPKLFPRALPLKMFQNLHKLWSSNEFVSPPLQPKGGIGLIFSPHKLKSQPFEENQPCFSKILPSKKILPFA

SEQ ID NO: 233209 - protein, 52 aa, Zea mays
  Clone ID: MRT4577_144280C.1.pep
VLPDDIRRALLVIVECCMKRDYLAAMDQYIKLAIGNAPWPIGVTMVGIHERS

SEQ ID NO: 233210 - protein, 115 aa, Zea mays
  unsure (1)..(115): unsure at all Xaa locations
  Clone ID: MRT4577_144281C.1.pep
GAHTHTPDLEQPQGVLCRKTAXTGNTPDEPGNMFWKNIELAYQTPTEAIQGTYLDDRSPSTGTVSITGSMMRXTCHRANMNSSIIARTNYSHLPKKYQRCAKRHWHIPAHISPCF

SEQ ID NO: 233211 - protein, 76 aa, Zea mays
  Clone ID: MRT4577_144282C.1.pep
RSKMNLIFGGDSFCNQASNFCPTVWIYAFLFQGGGRHLLILSNKWHIACGLGCISPFLSDVSILLHCNRSSVGFLE

SEQ ID NO: 233212 - protein, 87 aa, Zea mays
  Clone ID: MRT4577_144283C.1.pep
SPTRSATRLTTRTTTRPMKRVLLLWPTIYERHPVRIHYLLIFLVGRCNSTMLILARQHIVLTFDPIGRASDLMVLFLQNTNERLLAL

SEQ ID NO: 233213 - protein, 41 aa, Zea mays
  Clone ID: MRT4577_144284C.1.pep
LNVTHTIEEHCLSMNAHVSLYPLVRPSRFEADVISVRTRAS

SEQ ID NO: 233214 - protein, 77 aa, Zea mays
  Clone ID: MRT4577_144285C.1.pep
WSSRTTTSCTSPTIICFDLPFSCRVRYIAPPANAYITSGYAILTPTSRFFDIDQVIDGGMIYCAANPISNVVMETAL

SEQ ID NO: 233215 - protein, 238 aa, Zea mays
  Clone ID: MRT4577_144286C.1.pep
MNQFICSCTNTKHHGMTINGPCMVFHNANCIGRAHEEEPFKPLCRSACEPSRNSPSRNCSMGRPIRELRAKSSRPLNRLNCLVFSPSFRSNRDTDLSSKHAPYQFTSYLFRLLSAIAMSSSLYKQLGLSGAGSPLSGRHLALLVLGAGFLALTVFVVHPNEFRIQSFFSGSSCGGRPGTDAAAAAVASPHGDTTTEKEENARADDVRVLIGIQTLPSKRARRHLLRDVYSLQAREHPP

SEQ ID NO: 233216 - protein, 162 aa, Zea mays
  unsure (1)..(162): unsure at all Xaa locations
  Clone ID: MRT4577_144287C.1.pep
GSPGFSFVGERIEMVALDVEYRCFDGGLVWTTDDHSLHNDFSTYGEDIXSKIILHRETQRSRGFGFLTFSTEEEMLNAIEVMNGKEMHGRNITXVNEGQTLGGLGRFGGGSYGVGRXAAVLRWRARRDXGGYGAGGSYGXAGGSYGGDGGGYSCGKRVVCYA

SEQ ID NO: 233217 - protein, 86 aa, Zea mays
  Clone ID: MRT4577_144288C.1.pep
GGTHLGSQPASLPLLGVRGPTRARPGSNPRLLPPVVPGGVLPDKLSLRGALPPGHLLKTPIKSTRSTKDFSSTTPPKKTRQLKVNV

SEQ ID NO: 233218 - protein, 130 aa, Zea mays
  Clone ID: MRT4577_144289C.1.pep
MVRVSVLNDALKSMYNAEKIGKRQVMIRPSSKVIIKFLTVMQRHGYIGEFEYVDDHRSGKIVVELNGRLNKCGVISPRFDIGVKDIEGWTARLLPSRQFGYIVLTTSAGIMDHEEARRKSVGGKVLGFFY

SEQ ID NO: 233219 - protein, 52 aa, Zea mays
  Clone ID: MRT4577_14428C.1.pep
LECHMLHLRYSITRCNATLTMMHCAPTIHYCPVQYFQRINDLSPSLSFHHRL

SEQ ID NO: 233220 - protein, 65 aa, Zea mays
  unsure (1)..(65): unsure at all Xaa locations
  Clone ID: MRT4577_144290C.1.pep
MYCRAQKNPLDTMRVLLAALALLALGESATSTHTSXGCSCQPPPSVHVPPTVHLTAPVHXLPPPV

SEQ ID NO: 233221 - protein, 133 aa, Zea mays
  unsure (1)..(133): unsure at all Xaa locations
  Clone ID: MRT4577_144291C.1.pep
MVRVSGLNDALKSMYNAEKSGKRQVMIRPFSRVIIKVLTDMARHGYIGEFEDVDDHRSGNIVVELNGRVNKCGRISPRFDXGGKDIDGWTARLLPARQFGYIVLTTSAGIMDHEEGRRKSGRGKVLGFFYGRS

SEQ ID NO: 233222 - protein, 398 aa, Zea mays
  unsure (1)..(398): unsure at all Xaa locations
  Clone ID: MRT4577_144292C.1.pep
MQSTAAIGLVRPCAARPLPTYPSPRRGAGACSGAAQPILAPRGLCLSARASLLPDSPLEEEYRRCRAXAGTWPRXGKVAAADGAVEEAGGGLVKTLQLGSLFGLWYLFNIYFNIYNKQVLKVLPYPINITTVQFAVGSAIALFMWITGILKRPKISGAQLFAILPLAIVHTMGNLFTNMSLGKVAVSFTHTIKAMEPFFSVLLSAIFLGELPTPWVVLSLLPIVGGVALASLTEASFNWAGFWSAMASNVTFQSRNVLSKKLMVKKEESLDNINLFSIITVMSFFLLAPVTLLTEGVKVSPAVLQSAGLNLKQIYTRSLIAACCFHAYQQVSYMILARVSPVTHSVGNCVKRVVVIVTSVLFFRTPVSPINSLGTGIALAGVFLYSQLKRLKPKPKAA

SEQ ID NO: 233223 - protein, 130 aa, Zea mays; identical to SEQ ID NO: 233218
  Clone ID: MRT4577_144293C.1.pep

SEQ ID NO: 233224 - protein, 390 aa, Zea mays
  Clone ID: MRT4577_144294C.1.pep
MQSAAAIGLLRPCAARPLAAYTSPRRGAGACSGGTQPIITPRGIRLSARPGLVPASPLEEKENRRCRASMHTAASAGEEAGGGLAKTLQLGALFGLWYLFNIYFNIYNKQVLKVLPYPINITTVQFAVGSAIALFMWITGIHKRPKISGAQLFAILPLAIVHTMGNLFTNMSLGKVAVSFTHTIKAMEPFFSVLLSAIFLGELPTPWVVLSLLPIVGGVALASLTEASFNWAGFWSAMASNVTFQSRNVLSKKLMVKKEESLDNINLFSIITVMSFFLLAPVTLLTEGVKVSPAVLQSAGLNLKQVYTRSLIAAFCFHAYQQVSYMILARVSPVTHSVGNCVKRVVVIVTSVLFFRTPVSPINSLGTGIALAGVFLYSQLKRLKPKPKTA

SEQ ID NO: 233225 - protein, 58 aa, Zea mays
  Clone ID: MRT4577_144295C.1.pep
LLLALFCLSRCFIFVSIFNHIILIIPNIVVIRNFYVQFREGISPKLLIAAFSSSSPCH

SEQ ID NO: 233226 - protein, 101 aa, Zea mays
  unsure (1)..(101): unsure at all Xaa locations
  Clone ID: MRT4577_144296C.1.pep
MQLXLRAQELHTFEVTGQETVAPVKAHVASLDSIAPEDQVVLLAGAPLEDEATLGQCGVEALTTLEVAGRMLGGKVHGSLARAGKVRGQTPKVAKQERRRR

SEQ ID NO: 233227 - protein, 101 aa, Zea mays
  Clone ID: MRT4577_144297C.1.pep
NTALPFSVPHIGSGGGGPRSRPPAPYIGAQTPRRVARFHSILCEANSTGSAYHQIAAYSYPDYVRADARFCKQSKQQDLPGADKQATSQPVIHYHEGKSAS

SEQ ID NO: 233228 - protein, 91 aa, Zea mays
  Clone ID: MRT4577_144298C.1.pep
AWWPQVMKTSQAGTPGPVVSWARSLHDGSSCSKLTIYWFGSKYPTLRADTSPVPTRQEQVLGLDDCEVILEKSCTAEPQDRPGKGCGEVNN

SEQ ID NO: 233229 - protein, 91 aa, Zea mays
  unsure (1)..(91): unsure at all Xaa locations
  Clone ID: MRT4577_144299C.1.pep
TLMITKGLMCFKVLEIFDVGKLXSQGTNSLMSTLTSTYKAAVRCECRKGITAYXFQEHNFHAKLXSEASSRKCLASKDSYPKRPRXFXXKY

SEQ ID NO: 233230 - protein, 78 aa, Zea mays
  Clone ID: MRT4577_14429C.1.pep
PTFYKIIHKRTTAYSICTPALQIRLEGSLSSPIGRSRSLKHASTFGARAGTGRPQCWLKACGVYTSSPTSTDRKRSLP

SEQ ID NO: 233231 - protein, 658 aa, Zea mays
  Clone ID: MRT4577_1442C.1.pep
MEYISPERNLEGTCGDPGPLFADQGGSLLDHLGYQGGGIPQHESPTLDHGLLVDPAGAIPYLSTDSPPFMNDQITCNVIKSASASPESCTKQPQEPLNVESDVQNDAAEQNVHNSNSEEQITSLGCDVQQNTEVIDELLPPKLPESSGNDISNFQPETTYSDAYHGDSLLTENSCNSYQLNNSGAPAADIPNSPALQMENEEMGKLHETSHNENSGSEDDQMNGRKPCPISGRDNEKFNTSAVPPSWEQTKQKNPGTRNGSSTPDDQFDSPPDRFARLERDTPSPDGRVSPERFARLERDTPPPDGDISRPGESSHVHSETMEMEPEYRANDDTPPPDGRMSPPVESSHVHSKKMESQHRAKDVGELARFESPQVRHRSRSSEKHDPSRKRTSSGELSPHARQNSPVERKRRRESRHGDGSPRQRSASPRRRSTPPRRRSISPRRSSHKRRESPRRGDSPRRRHSPRRRESPRKRDSPRRRDSPRRRDSPKRRRDSPRRRDRSKSRSPSRKHDTSRHKKEHDRSRSRSPHSRDHHRRSPRRHSPRRRSPPASHRHHSPRRHWSPPANRKTGLGKPGKNLFIAGFSYATTERDLEKKFCKFGRVTSARVVRDKRTGDSRGFGFLSLDKDEDADAAIRACDETEWNGRIILVEKSKAPAW

SEQ ID NO: 233232 - protein, 157 aa, Zea mays
  Clone ID: MRT4577_144300C.1.pep
MADDKDVYPLTGNDDLHAAGLVPDDEDDIWGDVAALLGIDASSATIDVDVDDSGGGPRRQPRIWSALAAPMVVLVHRLEYDLIVARTKLCWLITRLDLPLDMWYGNAKEDDNSVVSHYVNANWELQKRVIGLIRLIEVKHTVENIVERIVVVVKEYC

SEQ ID NO: 233233 - protein, 91 aa, Zea mays
  Clone ID: MRT4577_144301C.1.pep
MTAFICLRKPVLYCIWSHRHTITFNMYFALSNQVPGSMRSRNGNMVHGTLLKLGFNTTGSRLFPRSWNEERGRVSSSRLLRFCMLTQAWYF

SEQ ID NO: 233234 - protein, 66 aa, Zea mays
  Clone ID: MRT4577_144302C.1.pep
NHDADIHRRSQLAASTSLSPHDCALQRELVPAGELRRRAWERRYQHFPQCAQFLMDRRLSERHKNA

SEQ ID NO: 233235 - protein, 62 aa, Zea mays
  Clone ID: MRT4577_144303C.1.pep
WCEMCLLLHQDGLFSAQALLVESDSLYKLFLMKNMASTTMDYYKIHLRFWEQNSHCGPRRGT

SEQ ID NO: 233236 - protein, 238 aa, Zea mays
  unsure (1)..(238): unsure at all Xaa locations
  Clone ID: MRT4577_144304C.1.pep
GGGLCNLIESKTKTKTTGQKRTAGKGGPSPAPGRPGAPPSPQGXRGNPKKILLKPGATRGPKGPPQKPGTAGGREGGKXDRGKTGGTSGETKAEGNRKTPTPXNYPGKRGAKRKSKKTHPPPRSGQGVKKGQKPTNPRAPKRQGETGEAPAGPGRPPGGPKVGQEKREKPGPSGDGGPGATKTPNHPNNKPGKRGSRGPKRTNPTAATVNPDTGTRSKKKKRGGGGGPRGPGHKHKKT

SEQ ID NO: 233237 - protein, 67 aa, Zea mays
  Clone ID: MRT4577_144305C.1.pep
RSYKIKVPCRRRRHRTRRPRRYGRAGPGHGPGRGRCGRVTTGGGDRDKELQGLSYFEYRRLASAVVR

SEQ ID NO: 233238 - protein, 71 aa, Zea mays
  Clone ID: MRT4577_144306C.1.pep
PPPEQAKHLNNRIHRRKATKKTYIEVNNPNRSPDGETRGTRKPNQGLKPKGEPPPGWRKPFTKKNGAQKTT

SEQ ID NO: 233239 - protein, 95 aa, Zea mays
  unsure (1)..(95): unsure at all Xaa locations
  Clone ID: MRT4577_144307C.1.pep
NFFPPHTPKTAQHHLPKLTSPITTFFHNLSPAVLPXCQNPIXQPYRIQHAIAAGISPLSPLHLQQSSTLLQQVPXEHLKSQNIISQQLQQPGLTN

SEQ ID NO: 233240 - protein, 207 aa, Zea mays
  unsure (1)..(207): unsure at all Xaa locations
  Clone ID: MRT4577_144308C.1.pep
MIAMNPDMVLLSWKQMENGSGAVVPSNSSDRSDRSDKPLDQKTMRRLAQNREAARKSRLRKKAYVQQLESSKLKLAQLEQELQKARQQGIFISSSGDQTHAMSGNGALTFDIEYARWLEDQNKQINELRTAVNAHASDSDLRLIVDGIMAHYDEIFKVKGVAAKADVFHILSGMWETPAXRCFLWLXGFRPSELXKLLANHLEPLTE

SEQ ID NO: 233241 - protein, 191 aa, Zea mays
  Clone ID: MRT4577_144309C.1.pep
VAQEVSSTLEIRNVTDHHVAFCMWSLNHTANYIPVPNIEVLSPQSMRQVVITRIARREPVPADPVDDIVYVKGTTVVQGTTSADVTYDMFDGTRTGQILQPAMELNVVLVADSEIIHKARLPWGLDVHPTMPWIMMAQEGDRYRIWNYKTRIEKPIAIKGREVTSAKFIMHKQWILAGCSSGLVYVYRYEP

SEQ ID NO: 233242 - protein, 744 aa, Zea mays
  unsure (1)..(744): unsure at all Xaa locations
  Clone ID: MRT4577_14430C.1.pep
GGIEDGNSASEYIDTQGYELSADARAQADIKFTYVVSCQIXGLLKQTKPLFAADIALLLQRNEALRVAFIHEEEIISRDAWATTREYYSKLVKADVHGKDQEIYCIKLPGNPKLGEGKPENQNHAIIFTRGDAVQTIDMNQDNYLEEAMKMRNLLEEFHNAHGKHGIRKPTILGVREHVFTGSVSSLASFMSKQETSFVTLGQRVLAYLKVRMHYGHPDVFDRIFHITRGGISKASRVINISEDIYAGFNSTLRQGNITHHEYIQVGKGRDVGLNQIALFEGKVAGGNGEQVLSRDVYRLGQLFDFFRMLTFFFTTVGYYVCTMMTVLTVYIFLYGRVYLALSGLDYSISRQARFLGNTALDAALNAQFLVQIGIFTAVPMIMGFILELGLMKAVFSFITMQLQFCSVFFTFSLGTRTHYFGRTILHGGAKYRATGRGFVVRHIKFAENYRLYSRSHFVKALEVALLLIVYIAYGYTKGGSSSFILITISSWFLVMSWLFAPYIFNPSGFEWQKTVEDFDDWTNWLLYKGGVGVKGDNSWESWWDEEQAHIQTFRGRILETILSLRFLMFQYGIVYKLKITDHNTSLAVYGFSWIVLFVMVLLFKLFTATPRKSTALPTFVRFLQGVLAIGIIAGIALLIVLTSFTVADLFASALAFIATGWCVLCLAVTWKRVVKVLGLWDSVREIARMYDAGMGAIIFVPIVVFSWFPFVSTFQSRFLFNQAFSRGLEISLILAGNKANQQI

SEQ ID NO: 233243 - protein, 100 aa, Zea mays
  Clone ID: MRT4577_144310C.1.pep
ARLGSVSSPFQIFLASVRTAVASSNLLVVARLDQGQCRRVGPAPPKNVSAVRSKNDGIPVEPLFSPRTACSHRRERRIMLQPFGLSLVFDSISPVLSTIL

SEQ ID NO: 233244 - protein, 181 aa, Zea mays
  unsure (1)..(181): unsure at all Xaa locations
  Clone ID: MRT4577_144311C.1.pep
MENGSGAVVPSNSSDRSDRSDKPLDQKTMRRLAQNREAARKSRLRKKAYVQQLESSKLKLAQLEQELQKARQQGIFISSSGDQTHAMSGNGALTFDIEYARWLEDQNKQINELRTAVNAHASDSDLRLIVDGIMAHYDEIFKVKGVAAKADVFHILSGMWKTPGXKCFLWXLXGFRPSELL

SEQ ID NO: 233245 - protein, 334 aa, Zea mays
  unsure (1)..(334): unsure at all Xaa locations
  Clone ID: MRT4577_144312C.1.pep
MADASSRTDTSIVLDDNDKNHRMENGSGAVVPSNSSDRSDRSDKPLDQKTMRRLAQNREAARKSRLRKKAYVQQLESSKLKLAQLEQELQKARQQGIFISSSGDQTHAMXSGNGALTFDIEXARWLEDQNKQINELRTAVNAHASDSDLRLIVDGIMAHYDEIFKVKGVAAKADVFHILSGMWKTPAERCFLWLGGFRPSELLKLLANHLEPLTEQQMLGLTNLQQSSQQAEDALSQGMEALQQSLAETLAGSLGPAGSSGNVANYMGQMAMAMGKLGTLENFLRQADNLRQQTLHQMQRILTIRQASRALLAIHDYFSRLRALSSLWLARPRE

SEQ ID NO: 233246 - protein, 239 aa, Zea mays
  Clone ID: MRT4577_144313C.1.pep
PIAKVANQLTSIKRDSIFVRTLMNLRSGLSSIVRLRFLLYQTTLDLLSNCNMSATSMEVDRAAPKHGGRGTQQCFKADSRDSDLACWRRGGLRRYGASSASPWRAESSVRRPGSCTATGVSRDSDTAQRGRGTEGRWTRRRAPGRLVLLLGQSCRRADNETRRGGRRASVAGECSRRPELGPSERRPPGKHGQALVRSGDAKNHRPSADRGGARGRPPWLTSSKPTSRAEGTRTMVEPR

SEQ ID NO: 233247 - protein, 121 aa, Zea mays
  unsure (1)..(121): unsure at all Xaa locations
  Clone ID: MRT4577_144314C.1.pep
VIARELKIEETPVSKVMTRNPVFVLADTLAVNALQNMVQGKFKHLPFIKNGEVIAILDIAMCLYDASAQIVRAAEKDIAIASDIVWREKHXSEQVXSDPNNFIETLLERMLKPCLATIICC

SEQ ID NO: 233248 - protein, 42 aa, Zea mays
  unsure (1)..(42): unsure at all Xaa locations
  Clone ID: MRT4577_144315C.1.pep
NFSTLYTXHXISSLPXFLPFLPTCFPRQGXXSXLRFXLSPPP

SEQ ID NO: 233249 - protein, 122 aa, Zea mays
  Clone ID: MRT4577_144316C.1.pep
MLGAVVRVPGPILPFLPGPTRPLLRRRHYLPPETPMASATPCDGGTGKPDAAPAPTPAPTPLPPEKPLPGDCCGSGCVRCVWDIYFDELDAYDKALAAHAASSGSGGKDDSADTKPKEGAKS

SEQ ID NO: 233250 - protein, 130 aa, Zea mays
  Clone ID: MRT4577_144317C.1.pep
GVRITAVATCSRTSKPLLPLLTGRCSCHVGVEVPASIDFFQPPRCDRSPFPPCTAMADQPEEMPAAPAIRLGPPHPYLKTHGGKVARLHRLDGPCCCSCRARRRAHLVEPFHASSARTCSRTFRTRLRAT

SEQ ID NO: 233251 - protein, 47 aa, Zea mays
  Clone ID: MRT4577_144318C.1.pep
FGLVWFGCIQVKLPNFMQVLFAHLCDELVRASSQTIQIVFIRSGHLF

SEQ ID NO: 233252 - protein, 81 aa, Zea mays
  Clone ID: MRT4577_144319C.1.pep
GKKFPTRPFVNPTQRVKGTLLKRTSIRSTLHVHRQCSGVLNLYGKYPLDLLLQQLQIMQTGTLLPRCPQDKQCHHKQWSLR

SEQ ID NO: 233253 - protein, 219 aa, Zea mays
  unsure (1)..(219): unsure at all Xaa locations
  Clone ID: MRT4577_14431C.1.pep
MGAHPYVPASLDLPGYVPLRLTQLEILGAYLGTSLFVLVAVWLLSGRCRRLSGTDRLLMCWWAFTGLTHILIEGPFVFTPDFFTKTNPNFFDEVWKEYSKGDSRYVARDTATVTVEGITAVLKGPASLLAVYAIASRKSYSHILQFAVCLGQLYGCIVYFTTAYLDGFNFWASPFYFWAYFIGAXXSSWXVVIXXLIATREXWKRICAAIHQSEKIKTK

SEQ ID NO: 233254 - protein, 125 aa, Zea mays
  Clone ID: MRT4577_144320C.1.pep
ATGRDGGVQECKCLDGFEPEDGFFRDFSRGCRRKEALQACGGGGEGGGGRRHYFLALPGMKVPDKFLYVRNRSFEECAAECDRNCSCTAYAYANLSGIVTMSATSDVSRCLLWMGELVDTGKDSD

SEQ ID NO: 233255 - protein, 79 aa, Zea mays
  unsure (1)..(79): unsure at all Xaa locations
  Clone ID: MRT4577_144321C.1.pep
CALESPSSRSARQRSHGTPRWYRGXEGKRXPPRPTQRESPQRVKKSRGXRVRXRCGGGXPXGRSRSLSXXPPPSLFFFG

SEQ ID NO: 233256 - protein, 70 aa, Zea mays
  unsure (1)..(70): unsure at all Xaa locations
  Clone ID: MRT4577_144322C.1.pep
CSSSYLRVYRGSQVQSQHVPGYADYMSPEHSIVREWHQRRQCRCYSFNXVVQERHRRPVVSLCRQVVRRP

SEQ ID NO: 233257 - protein, 67 aa, Zea mays
  Clone ID: MRT4577_144323C.1.pep
LVYIGRQNSWLVIYKCISSDVTDRCHQQERAHGQAPFITLQIIERHLPPLALLRLPWSISRLIGNTS

SEQ ID NO: 233258 - protein, 329 aa, Zea mays
  Clone ID: MRT4577_144324C.1.pep
VFGGAAGALESEEEKMVVLVVATTSDPASIGPAAAFLAMPGWSPGPPIAEAMESFTNGNVRLLKHERSIVAEDDLDQRWQEATGESVSEVIFLSKHTAVSKRPALTVHPIGVPHLKEDETPPQGGTPGWAAIPSPRIGPWLRLMQKIAVEQGLVPEFEVTLEATHHGPVTSTPTMFVEIGSTEDHWGRQDAAQAIALVLWKGLGLEDGNAVGTWQRNCEKVLLGIGGGHYVPRHMDIVIKDGVWVGHLLSGYSLPMDMPSQVNVKSSEEVAGMWKHSIKVSYEATKAAFPGGEVIAHLDHKSFKGWQKNAVTCFLQEQNIRIGKPSDFL

SEQ ID NO: 233259 - protein, 199 aa, Zea mays
  unsure (1)..(199): unsure at all Xaa locations
  Clone ID: MRT4577_144325C.1.pep
GKENVPLLXPIFESYLNKRASDEETYDLVREGVVIFTGALAKHLSKDDPKVHSVIEKLLDVLNTPSEAVQRAVSDCLSPLMVSKQEEGQTLVSRLLDRMMKCEKYGERRGAAFGLAGVVKGFGISSLKKYGIAATLQKNLEDRMSAKSREGALLGFECLCEKLGKLFEPYVIQMLPFLLVSFSDQVLAVREAAECAARA

SEQ ID NO: 233260 - protein, 163 aa, Zea mays
  unsure (1)..(163): unsure at all Xaa locations
  Clone ID: MRT4577_144326C.1.pep
HAAEISFPSDAHMGDGVEDYAHQIAEMIGLRNEFNFNEAGVRTVLDIXCGFGTFGAHLFERDLLTMCIANYEASGGQVQITLERXVPAMIGSFATKQLPYPYLSFDMGHCAKCDIEWGKNDGIFLREVNRLLRPDGDFVWTSNLNTHRGLRDKENQKKWAAHS

SEQ ID NO: 233261 - protein, 235 aa, Zea mays
  Clone ID: MRT4577_144327C.1.pep
GAGERTTAGAAGATPLAHRRSKPTHPWPRAELTCGPPNTPLCLPPAATPSSSSSAGSAKMPAPERAHGKGGRSTDGQAEHQPTAPDLARASHWRQQQHPHHQPAAHHQHRRTVHHSHGRRGRPRNWSPTDCLPPESAAGSCRAAPPKTPPPQPWRRDLRQCRTNPDKGSRSRPPRAPAKRTQQHAHHPPPSLPSAWASQPRSRAAARTGKAGDGGLGRQVQVRPCRPWAADAGET

SEQ ID NO: 233262 - protein, 73 aa, Zea mays
  unsure (1)..(73): unsure at all Xaa locations
  Clone ID: MRT4577_144328C.1.pep
RLSSWSPPATPXAPGTYPPRDPPPHQIVDPAKDCGGACDVRCGAHSRKNICTRACLKCCGVCRCVPAGTVGNQ

SEQ ID NO: 233263 - protein, 117 aa, Zea mays
  Clone ID: MRT4577_144329C.1.pep
MAPSKLAVVVALVASLLLVTTSNTKLGLFVLGQAAPGTYPPRDPPPHQIVDPAKDCGGACDVRCGAHSRKNICTRACLKCCGVCRCVPAGTAGNQQTCGKCYTDWTTHVLYDPTPSA

SEQ ID NO: 233264 - protein, 70 aa, Zea mays
  Clone ID: MRT4577_14432C.1.pep
NVSLRCNLESSIDASIQMLASVVVLGAYIDICTVLNRKIHAQIVKNRNMCSFGMHSGTHILMCANVQFLI

SEQ ID NO: 233265 - protein, 95 aa, Zea mays
  Clone ID: MRT4577_144330C.1.pep
RTHPTTRPALSLTVTCAALTPAALRQVSRASPADSPATNSPEHQPRYALTVVSGGRTLPAAQCGGGPPVVAHVIHAGRYHHVHGPEDQPARRPKY

SEQ ID NO: 233266 - protein, 186 aa, Zea mays
  Clone ID: MRT4577_144331C.1.pep
MAPSKLAVVVALVASLLLLTTSNTKLGLFVLGQAAPGPYTRRGPQPASPQLSTRETSSPAPPFVQRHTTHTMAPSKLAVVVALIASLLLLTTSNTKLGLFVLGQAAPGAYPPRAPPPHQIVDPAKDCGGACDVRCGAHSRKNICTRACLKCCGVCRCVPAGTAGNQQTCGKCYTDWTTHGNKTKCP

SEQ ID NO: 233267 - protein, 429 aa, Zea mays
  Clone ID: MRT4577_144332C.1.pep
MASHIVGYPRMGPKRELKFALESFWDGKSSADDLEKVASDLRSSIWKQMSEAGIKYIPSNTFSYYDQVLDTTAMLGAVPERYSWTGGEIGLSTYFSMARGNATVPAMEMTKWFDTNYHFIVPELGPSTKFTYASHKAVSEYKEAKAAYFAANAAAQASRRSSPRVTNEEVQKAAAALKGSDHRRATTVAARLDAQQKKLNLPVLPTTTIGSFPQTVELRRVRREYKAKKISEEEYISAIKEEISKVVKIQEELDIDVLVHGEPEVIQIDEAALREGLPLRKSEHAFYLDWAVHSFRITNCGVQDTTQIHTHMCYSNFNDIIHSIIDMDADVITIENSRSDEKLLSVFREGVKYGAGIGPGVYDIHSPRIPSTEEIADRVNKMLAVLDTNILWVNPDCGLKTRKYTEVKPALTNMVSATKLIRTQLGSAK

SEQ ID NO: 233268 - protein, 99 aa, Zea mays
  Clone ID: MRT4577_144333C.1.pep
KKKKKKKKKKKKKKKKKKKKKKKKKKKKKKFFKKKKKKKKRFFFWPEPPLGGFFEFSFKLGGFCFFFLGAHFPFLGLVLNLFGPFFKTPFLGKPWVSPI

SEQ ID NO: 233269 - protein, 120 aa, Zea mays
  Clone ID: MRT4577_144334C.1.pep
MAPSKLAVVVALVASLLLLTTSNTKLGLFVLGQAAPGAYPPRAPPPHQIVDLAKDCGGACDVRCGAHSRKNICTRACLKCCGVCRCVPAGTAGNQQTCGKCYTDWTTHGNKTKCAVTPCP

SEQ ID NO: 233270 - protein, 765 aa, Zea mays
  Clone ID: MRT4577_144335C.1.pep
MASHIVGYPRMGPKRELKFALESFWDGKSSAEDLEKVATDLRSSIWKQMSEAGIKYIPSNTFSYYDQVLDTTAMLGAVPERYSWTGGEIGLSTYFSMARGNATVPAMEMTKWFDTNYHFIVPELGPSTKFTYASHKAVSEYKEAKALGIDTVPVLVGPVSYLLLSKPAKGVEKSFSLLSLLGSILPIYKEVVAELKAAGASWIQLDEPTLVKDLDAHELAAFSSAYAELESSFSGLNVLIETYFADIPAESYKTLTSLSGVTAYGFDLIRGAKTLDLIRSSFPSGKYLFAGVVDGRNIWADDLAASLSTLHSLEAVAGKGKLVVSTSCSLMHTAVDLVNETKLDDEIKSWLAFAAQKVVEVNALAKALAGQKDEVYFAANAAAQASRRSSPRVTNEEVQKAAAALRGSDHRRSTTVSARLDAQQKKLNLPVLPTTTIGSFPQTVELRRVRREYKAKKITEDEYISAIKEEISKVVKIQEELDIDVLVHGEPERNDMVEYFGEQLSGFAFTANGWVQSYGSRCVKPPIIYGDVSRPNPMTVFWSKMAQSMTPRPMKGMLTGPVTILNWSFVRNDQPRFETCYQIALAIKKEVEDLEAAGIQVIQIDEAALREGLPLRKSEHAFYLDWAVHSFRITNCGVQDTTQIHTHMCYSNFNDIIHSIIDMDADVITIENSRSDEKLLSVFREGVKYGAGIGPGVYDIHSPRIPSTEEIADRVEKMLAVLDTNILWVNPDCGLKTRKYTEVKPALTNMVSATKLIRTQLASAK

SEQ ID NO: 233271 - protein, 57 aa, Zea mays
  Clone ID: MRT4577_144336C.1.pep
PLPYVVCAFVINYEACWGSLLKGRGTCVKHPLPIKNLWPCELLDYPKKRGNAFVFFF

SEQ ID NO: 233272 - protein, 141 aa, Zea mays
  Clone ID: MRT4577_144337C.1.pep
PPRTRGRTRGRTRGRTRGQIHTHMCYSNFNDIIHSIIDMDADVITIENSRSDEKLLSVFREGVKYGAGIGPGVYDIHSPRIPSTEEIADRVEKMLAVLDTNILWVNPDCGLKTRKYTEVKPALTNMVSATKLIRTQLANAK

SEQ ID NO: 233273 - protein, 766 aa, Zea mays
  unsure (1)..(766): unsure at all Xaa locations
  Clone ID: MRT4577_144338C.1.pep
MASHIVGYPRMGPKRELKFALESFWDGKSSAEDLEKVATDLRSSIWKQMSEAGIKYIPSNTFSYYDQVLDTTAMLGAVPERYSWTGGEIGLSTYFSMARGNATVPAMEMTKWFDTNYHFIVPELGPSTKFTYASHKAVSEYKEAKALGIDTVPVLVGPVSYLLLSKPAKGXVEKSFSLLSLLGSILPIYKEVVAELKAAGASWIQLDEPTLVKDLDAHELAAFSSAYAELESSFSGLNVLIETYFADIPAESYKTLTSLSGVTAYGFDLIRGAKTLDLIRSSFPSGKYLFAGVVDGRNIWADDLAASLSTLHSLEAVAGKDKLVVSTSCSLMHTAVDLVNETKLDDEIKSWLAFAAQKVVEVNALAKALAGQKDEVYFAANAAAQASRRSSPRVTNEEVQKAAAALRGSDHRRSTTVSARLDAQQKKLNLPVLPTTTIGSFPQTVELRRVRREYKAKKITEDEYISAIKEEISKVVKIQEELDIDVLVHGEPERNDMVEYFGEQLSGFAFTANGWVQSYGSRCVKPPIIYGDVSRPNPMTVFWSKMAQSMTPRPMKGMLTGPVTILNWSFVRNDQPRFETCYQIALAIKKEVEDLEAAGIQVIQIDEAALREGLPLRKSEHAFYLDWAVHSFRITNCGVQDTTQIHTHMCYSNFNDIIHSIIDMDADVITIENSRSDEKLLSVFREGVKYGAGIGPGVYDIHSPRIPSTEEIADRVEKMLAVLDTNILWVNPDCGLKTRKYTEVKPALTNMVSATKLIRTQLASAK

SEQ ID NO: 233274 - protein, 835 aa, Zea mays
  Clone ID: MRT4577_144339C.1.pep
MAPTDLAAGKWDLTRSHKRAPPNADTASSTNETPETVRRPVLVITTHISVHPGVVLFPRRYSPAPRSKGKMASHIVGYPRMGPKRELKFALESFWDGKSSADDLEKVASDLRSSIWKQMSEAGIKYIPSNTFSYYDQVLDTTAMLGAVPERYSWTGGEIGLSTYFSMARGNATVPAMEMTKWFDTNYHFIVPELGPSTKFTYASHKAVSEYKEAKALGIDTVPVLVGPVSYLLLSKPAKGVEKSFSLLSLLGSILPIYKEVVSELKAAGASWIQFDEPTLVKDLDVHELAAFSSAYAELESAFSGLNVLIETYFADIPAESYKTLTSLSGVTAYGFDLIRGAKTLDLIRSSFPSGKYLFAGVVDGRNIWADDLAASLSTLQSLEAVAGKDKLVVSTSCSLMHTAVDLVNETKLDDEIKSWLAFAAQKVVEVNALAKALAGQKDEAYFAANAAAQASRRSSPRVTNEEVQKAAAALKGSDHRRATTVAARLDAQQKKLNLPVLPTTTIGSFPQTVELRRVRREYKAKKISEEEYISAIKEEISKVVKIQEELDIDVLVHGEPERNDMVEYFGEQLSGFAFTANGWVQSYGSRCVKPPIIYGDVSRPNPMTVFWSKTAQSMTARPMKGMLTGPVTILNWSFVRNDQPRFETCYQIALAIKKEVEDLEAAGIQVIQIDEAALREGLPLRKSEHAFYLDWAVHSFRITNCGVQDTTQIHTHMCYSNFNDIIHSIIDMDADVITIENSRSDEKLLSVFREGVKYGAGIGPGVYDIHSPRIPSTEEIADRVNKMLAVLDTNILWVNPDCGLKTRKYTEVKPALTNMVSATKLIRTQLGSAK

SEQ ID NO: 233275 - protein, 174 aa, Zea mays
  Clone ID: MRT4577_14433C.1.pep
LRPAQRMSDGPWRSLQAGLPRRIQKLSPCFYCRQSSCLQSSRWQGRPSGATLLVVVAEPWSQPSPIIATSSSPRIALPALSDPGPGECHGTSPFILKRSEGEEMEAEKWHLIEAASDRVDRRLEIVDRILNNFREAVSIAHSSMTRDLLPHGQVSIFFGHFTMFSSFGPTINGF

SEQ ID NO: 233276 - protein, 78 aa, Zea mays
  Clone ID: MRT4577_144340C.1.pep
PFRKYGTHASHIIGCSKPEIPFHSGHACSERTPSALGDTYDVREDFVPSHRRLLVVATETLPGSTPRGSYAIYNEDRR

SEQ ID NO: 233277 - protein, 105 aa, Zea mays
  Clone ID: MRT4577_144341C.1.pep
DSEEAKHSCKTRAIEDLKLQLNDVHKTTAARVSQTPEASPGETSHPEDANHAERERLETMPIEELKGKKKRTLLPKQGKNNPQLILTNRNVHNPELAMTTRQERY

SEQ ID NO: 233278 - protein, 101 aa, Zea mays
  unsure (1)..(101): unsure at all Xaa locations
  Clone ID: MRT4577_144342C.1.pep
QLNFPQSSLYNTIKPTSFYHNIXSLFTNNPAQNPXPSSXXSSSPYIIHXIXKYYXPNNKIYLTNKIXNLSKIPYYLTXYFPLYYIYNPFLLTNKPNHFPKY

SEQ ID NO: 233279 - protein, 41 aa, Zea mays
  Clone ID: MRT4577_144343C.1.pep
PRIRGRVGILATRCYHIHMGCPTVEYIKPRWHPFRTIDPIT

SEQ ID NO: 233280 - protein, 76 aa, Zea mays
  unsure (1)..(76): unsure at all Xaa locations
  Clone ID: MRT4577_144344C.1.pep
TKNQKPSGASQDQSFDKLNDLPPLSVVNFREEEDQFLPALKEKSLAXQEARKFPKEEEEILFLLKGPLLRKLPKIL

SEQ ID NO: 233281 - protein, 45 aa, Zea mays
  Clone ID: MRT4577_144345C.1.pep
LWSLGGQLHSKSLRVKEYNWYHVYQTLEFWHKCSPLLPRTPECVV

SEQ ID NO: 233282 - protein, 150 aa, Zea mays
  unsure (1)..(150): unsure at all Xaa locations
  Clone ID: MRT4577_144346C.1.pep
LGPWANPRGRKKPQRGKKRAKKKQTKKKRGKNKKRGGGQKMGPPPTKGGPPPPNXGHPPPPRGGGPPPXGEPPGXGTRGGGKAPKARSPPRKKNPPPWGGTTPAGGGPTYGGRKEPSGGGKDSQGAPEVRKRTLDRGKGPWKRKESPATQ

SEQ ID NO: 233283 - protein, 35 aa, Zea mays
  Clone ID: MRT4577_144347C.1.pep
SEDFLSLSSAQQLMHFRIIVLSIKLRHLGCHSRHD

SEQ ID NO: 233284 - protein, 121 aa, Zea mays
  unsure (1)..(121): unsure at all Xaa locations
  Clone ID: MRT4577_144348C.1.pep
KGGSKKSYCTLYPDPVQKKEFRPPSPFPGFAKTPLFPVVLQRLGKLXKKVQMLQKNPFEIPCEKKKLLNPPVRRVDALEAELIVTKKALPKALIRQKELLANIATKEIARAQKKKKTMFCY

SEQ ID NO: 233285 - protein, 64 aa, Zea mays
  Clone ID: MRT4577_144349C.1.pep
TTETTANELVLFKIQVQSLCLPEIQSPTVTTFVACFRALYCISDGLHGYCCYFSTDCLSQSHVP

SEQ ID NO: 233286 - protein, 57 aa, Zea mays
  unsure (1)..(57): unsure at all Xaa locations
  Clone ID: MRT4577_14434C.1.pep
PSIPYLYRTLPXGHYGCHPLSHYDPYGTGGFIEPKWXAYREEIKRRYVMLGAGGAIS

SEQ ID NO: 233287 - protein, 74 aa, Zea mays
  Clone ID: MRT4577_144350C.1.pep
HASAAVDPIVTCSPSNKLIKAGRHPSSSSFYYPWRRRSTTTTTCSTIRRTRSRRTTRGRGYGTPARTGGQVTRW

SEQ ID NO: 233288 - protein, 79 aa, Zea mays
  unsure (1)..(79): unsure at all Xaa locations
  Clone ID: MRT4577_144351C.1.pep
YSLVGQCGYFHVKSGVDISSFAYVFFSLWGLKEDGFMFFFDGVNVMRWCKVSFVKCKGTGLFVVFVNGXLQKKKNVTFQ

SEQ ID NO: 233289 - protein, 245 aa, Zea mays
  Clone ID: MRT4577_144352C.1.pep
SRFEWDCSFQYGSLVEEVDGHTAILYHRLQLDWFPMFVWPRDLCYVRYWRRNDDGSYVVLFQSREHQNCGPQPGFVRAHIESGGFNISPLKSRNGRIRTQVQHLMQIDLKGWGVGYVPSFQQHCLLHMLNSVAGLREWFSQSDESQVLPRIPVMVNMTQSVSSKKGRKAQESTTQTGIQMDPSRHSTVLEEESDEDDEFLIPESEPEPSNLEDAADVRKSGRIGEDSDLIDLSGVCGDLRGGDRG

SEQ ID NO: 233290 - protein, 68 aa, Zea mays
  Clone ID: MRT4577_144353C.1.pep
FYQHFSTTLSIKFPIIYQHDPHYLLFQNKRSSAGWLTASTSPLSSSSCSLRTSITTRILNIINCNTCL

SEQ ID NO: 233291 - protein, 107 aa, Zea mays
  unsure (1)..(107): unsure at all Xaa locations
  Clone ID: MRT4577_144354C.1.pep
MCASINLTTRATKIFALLALLALLVSAPNALITTQSXLAPSAIMAQPLPPGTSMGLXHSSVPAYRLQLALADSVSQLPIALLQHQYWAHLNLQSIVTAHQQQFLPSL

SEQ ID NO: 233292 - protein, 343 aa, Zea mays
  Clone ID: MRT4577_144355C.1.pep
MSFSRRRKSEPIADASTRPSSHAALVWPAMSCLAAPPAAPPKAGERMLRAAAPLRSPSPCRGLHYAVRGTVGREAGCGRRQLALLRCSPAGESRASGDGGLSSFCIIEGPETIEDFAQMQSQEIEDNIMSRRNKIFLLMEEVRRLRVQQRIRTSESKDANTEGNEMPEIPSTIPFMPDASPKTMKQLYMTSFSVISGIIIFGGLIAPVLELKLGLGGTSYEDFIRTLHLPLQLSQVDPIVASFSGGAVGVISALMLVEVRNVRQQEKKRCTYCHGTGYLPCARCSASGMLLNTKQFSLLGHNMWSMKGRCQNCSGAGKVMCPTCLCTGMAMASEHDPRIDPFD

SEQ ID NO: 233293 - protein, 46 aa, Zea mays
  unsure (1)..(46): unsure at all Xaa locations
  Clone ID: MRT4577_144356C.1.pep
GKPSPKVIVECSRSASVEAFPFPEKAAVTPPGRETCTEAIXRADKP

SEQ ID NO: 233294 - protein, 137 aa, Zea mays
  Clone ID: MRT4577_144357C.1.pep
GPGSFRLRITGPYQTVLPAPTPPPRLPPASSSSEQGRPTLPTHHPQQALLPRGPDPRAPRRSRSMVRPGALGGAVTVADLLAAAESSARGIYLPRSLPHKSNVADDLNEKENSLTIHTHQTCPKSATDLHYRQPQYS

SEQ ID NO: 233295 - protein, 123 aa, Zea mays
  unsure (1)..(123): unsure at all Xaa locations
  Clone ID: MRT4577_144358C.1.pep
ASGPFKQXAFLQLDPXLEFESQEYPVGLLXKVGVGGGVSQXMSFSTAEFACCEPSPEAQTIWHCLLRHLLXQTDKIDEAFSLKNLPAEKXNFSDCLEWLLFTVFEDRISRRSASKNQASQKTD

SEQ ID NO: 233296 - protein, 293 aa, Zea mays
  unsure (1)..(293): unsure at all Xaa locations
  Clone ID: MRT4577_144359C.1.pep
PTRTVSFTVILTRXRRSIYIVRSNTHGQLGHGDTIDRATPKLIELFEGSTPVVQIAAGASYTFAVTDDGTVHSFGSCTNYCLEHGDQHDELLPRAIQSFKWRNIHVVRVSAGDEHAVALDALGXKSIFALFAFQIYIVNDCSPGKGRSGAVARGISLSHQSWVFRSSLSTFAGEGLPQFIPFSDHLCGSLRXGLPFFFCLGIIIIMKSELSQVYTWGKGYCGALGHGDENDKTSPELISSLKGQVAVQVCARKRKTFVLTDKGSVVAFGWMGFGSLGFPDRGPLDKVMRPRVL

SEQ ID NO: 233297 - protein, 80 aa, Zea mays
  Clone ID: MRT4577_14435C.1.pep
MGKTRGMGAGRKLKTHRRNQMWADKAYKKSHLGNEWKKPFAGSSHAKGIVLEKIGIDAKQPNSAIRKCARVQLVKNGKKI

SEQ ID NO: 233298 - protein, 97 aa, Zea mays
  Clone ID: MRT4577_144360C.1.pep
FNASQDLASPSDSDGHGTHTASIAAGNHGIPVVVAGHQFGNASGMAPRAHIAVYKALYKSFGGFAADVVAAIDQAAEDNVDIISLSITPNRRPPGLA

SEQ ID NO: 233299 - protein, 101 aa, Zea mays
  Clone ID: MRT4577_144361C.1.pep
FSSLVAAWFRSVVLSSSSLCLLALFSSLLRFRPRLLSFLVLALLLVLVVCLVVFSLFWFSCPCSLPGPCLSSGGRFWPVVGSGGFLPFPHPFRLLLLGVGV

SEQ ID NO: 233300 - protein, 41 aa, Zea mays
  Clone ID: MRT4577_144362C.1.pep
GLKPRIFFFFYAKVRFCGDNISSTLDVKRVFQFSRAFSGIH

SEQ ID NO: 233301 - protein, 89 aa, Zea mays
  unsure (1)..(89): unsure at all Xaa locations
  Clone ID: MRT4577_144363C.1.pep
VVHERLWSRHHLRSVQLMLLEDLGPRRRGGYXAGCGIIRGIMLNSVIQLLGTCDRGTXLNVEADDMRNDNAKVLRYMKPLQVEDVGLRQ

SEQ ID NO: 233302 - protein, 135 aa, Zea mays
  unsure (1)..(135): unsure at all Xaa locations
  Clone ID: MRT4577_144364C.1.pep
SCIEMDATLLXFSSAAIKMDDLGRKKALKEIAEAKVFIPQAAXITVIDRAIQASGGAVVSQDTPLAYMWAGIRTLRLSDGPDEVHLQQMGRNENKRSAEATATIKMQRAKTEELLKAYGVERLQLGARIQHKAKL

SEQ ID NO: 233303 - protein, 43 aa, Zea mays
  Clone ID: MRT4577_144365C.1.pep
KILFPGKKALGVQKVYFIWAPGLLLVLNTLCGFNPLFFYLNKQ

SEQ ID NO: 233304 - protein, 76 aa, Zea mays
  Clone ID: MRT4577_144366C.1.pep
VQWVNDHRCLPSLWIMNRCVEPAVQLFYQVGAVGELRLGEYVGPELGSASVALVVVRLRLCPLCSAPTSSADSASG

SEQ ID NO: 233305 - protein, 85 aa, Zea mays
  Clone ID: MRT4577_144367C.1.pep
ARRFPDSHATHPGRSGELKLLALDPENLVTPWDDPSDEKILANFLTSLIEYLYIAHSDVDTLANNNNIMLDSKARLVHALSEARL

SEQ ID NO: 233306 - protein, 259 aa, Zea mays
  Clone ID: MRT4577_144368C.1.pep
DSDQQAASGQARRFSSRAPPPPGCHPRDAPSRLSRRHPHERLLRRRLRSAAFSDAVSAPPSSPTSSPSPRQGSVATGELNFTSTFVDLPPPSAPSRSVSGQSLNPLSTNSLDLDGQETTSVFNLSSDAQSVLVNTNEPTEAQFVPSNQESSQREGGSGRKRKQSHVGLALENYVEFKKVQNTETLETLKEHKRQEDQFSISKCQVELKGMDGLTAVDKSYALVLFESAINREIFLTTTEHDVREIWLKRKIRLLRSSVQ

SEQ ID NO: 233307 - protein, 101 aa, Zea mays
  Clone ID: MRT4577_144369C.1.pep
GGRGVKTFHHFWPKKRETPFVGGKQKMVPREKKRLPPPFLGGFPPNPGPMFGNPPHWGPKKIFGPPPPLKRPHKKSLQTFKNPQVWAPISMANFFRGLGPL

SEQ ID NO: 233308 - protein, 356 aa, Zea mays
  unsure (1)..(356): unsure at all Xaa locations
  Clone ID: MRT4577_14436C.1.pep
MARLADLQRQIDDASEEVGHLTQDEQNRRPQHRELHQEGFFNEDDCRTVXATPWPLSYKPPQLPMYDRHSDPKQFLMSYEATISSYGGNTAVMAKSFVMAVKNVAQTWYSSLGPGTITSWQKLKDMLITSFQGFQTKPVTAQALFQCTQDHEEYLQXRREEAYRFYEIARGFGGRIHPRHVRSIHSTQNGDRGSQQQRPQYSSQASGQQQSYPRPPAPRGRGARCFRGRFGDQPRKIYCLFCGEDKGHTTRMCHVTIQKQKEIAEAAAQQSQPKQVMHTASYHSPYIPEYVGNHPVASVASASQPQASWQQPPPPPPMQRGQQPEGSQHTQHQRDFREESEARTVNSTVPESKHIY

SEQ ID NO: 233309 - protein, 151 aa, Zea mays
  Clone ID: MRT4577_144370C.1.pep
QNIGLLHIETGSVATGELNFTSTFVDLPPPSAPSRSVSGQSLNPLSTNSLDLDGQETTSVFNLSSDAQSVLVNTNEPTEAQFVPSNQESSQREGGSGRKRKQSHVGLALENYVEFKKVQNTETLETLKEHKRQEDQFSISKCQVELKGMDG

SEQ ID NO: 233310 - protein, 67 aa, Zea mays
  unsure (1)..(67): unsure at all Xaa locations
  Clone ID: MRT4577_144371C.1.pep
XPNXTXEXIXSLXXFXXXAPQXXVVTRKKTLCLMKHTQRTXKQXNXXSNPLWTTNXKLTRPHNFILA

SEQ ID NO: 233311 - protein, 331 aa, Zea mays
  unsure (1)..(331): unsure at all Xaa locations
  Clone ID: MRT4577_144372C.1.pep
DSHKVGSGPQXKVYKGTLVDGTRVAIKRAERGSMQGVVEFKNEIELLSRVHHRNLVSLIGFCYEQGEQMLVYEYVSSGTLRENLLVRGTYLDWKKRLRIALGSARGLAYLHELADPPIIHRDVKSTNILLDDHLKAKVADFGLSKLVADTQKGHVSTQVKGTLGYLDPEYYMTQQLSEKSDVYSFGVVMLELVSGRQPIESGKYIVREVKLAIDPNDRDHYGLRGLLDPAIRDNARTAGFRRFVQLAMLCVDESAAARPAMGEVVKDIEAMLQNEVSGPDGTTSSAGSSANDFDGAGAGARSHPYSDVEITRGSYGDNASDYMPYFEVKPK

SEQ ID NO: 233312 - protein, 50 aa, Zea mays
  Clone ID: MRT4577_144373C.1.pep
PRFKKKKKKKKKKKKKKKKKKKKKKKKKKKKKKKTKKNKKFLNRVKIKLI

SEQ ID NO: 233313 - protein, 145 aa, Zea mays
  Clone ID: MRT4577_144374C.1.pep
MAVCNDECAHRGWQLSNKYTCCSSNMVKHIRRNRIRAARAVRVWELEHVLLVTRRCRRFRRSGRCSSSARGTRPWCRSSISTQEHYSTMAQSDVRQVEAIARVQWRDRTPPNASVRRAQGGSDTASLSSVQVGTVAAKAGTRLTR

SEQ ID NO: 233314 - protein, 139 aa, Zea mays
  unsure (1)..(139): unsure at all Xaa locations
  Clone ID: MRT4577_144376C.1.pep
TLGPKPLLRATTNVDGXVRGRWHLTESHGRYSVGDASSAAPQRLRMPSARLSGACDFLVLTSDFLRQPSKAWAHHNSQDGSLELPSIVGRVILSDLAGRLRAAIRRIAVASSPLLAELLPRPRFRSSPVKLSAGVVPAG

SEQ ID NO: 233315 - protein, 82 aa, Zea mays
  Clone ID: MRT4577_144377C.1.pep
KKPKALPKLGPTKLLARSLPRKTLKGLSWWKQKGFYFKNWGDPTKIVFSSHGSKNWKGPHKILFTLIIAPPFQIPPQIGGPE

SEQ ID NO: 233316 - protein, 76 aa, Zea mays
  Clone ID: MRT4577_144378C.1.pep
GPSGLLVLFAGATTSTMHIHCSHAAIAAFTALTSHQRRLWAPKTQSLNPTRSSRQSQLACYLYHTTLLQQQTSAIH

SEQ ID NO: 233317 - protein, 132 aa, Zea mays
  unsure (1)..(132): unsure at all Xaa locations
  Clone ID: MRT4577_144379C.1.pep
KRAIPSRARARRLGPAGAAARFPRGGGTAMKRRAGGRLRIGQGGTISGPGPAFTRVLLDLDGQCFSPGAPSAGRCXRMYAPARAVPQERTLGLHPLVLTPSYTLFRFAYGYTLGINDNANLNNVYIAVNTII

SEQ ID NO: 233318 - protein, 504 aa, Zea mays
  Clone ID: MRT4577_14437C.1.pep
MPPKKASATGAAALQPLDPNQETLSLREARSQKRKATSPTPQEDDLDQEIRNMEMLHQQVQRKKEKMARLADLQRQIDEASEEVRHLAQDEQNRRPQHRELHQEGFFNEDDWYEDFHHGNFAFDDASPLSAELQATPWPPSYKPPQLPMYDGHSDPKQFLMSYEATISSYGGNTAVMAKSFVMAVKNVAQTWYSSLRPGTITSWQKLKDMLITSFQGFQTKPVTAQALFQCTQDHEEYLQAYVRRFFRLRAQAPTVPNEIVIEAMIKGLRPGPSAQYFARKPPQTLEKLLQKMDEYIRADNDFRQRREEAYRFSEMARGFGGRIHPRHVRSIHSTQNDDRGSQQQRPQYSSQASGQQQSYPRPPAPRGRGARGFGGRFGDQPRKIYCLFCGEDKGHTTRMCHVTIQKQKEIAEAAAQQSQPKQVMHTASYHSPYIPEYVGNHPAASVASASQPQVSWQQPPPPPPMQRGQQPEGSQHTHQQRDFREESEARTVNSTVPESKHIY

SEQ ID NO: 233319 - protein, 52 aa, Zea mays
  Clone ID: MRT4577_144380C.1.pep
ASGCLFFFFFCQFEYIYFIYIDTVLEGTEYNYGDCCKHLMPLSILLSIRHAQ

SEQ ID NO: 233320 - protein, 81 aa, Zea mays
  unsure (1)..(81): unsure at all Xaa locations
  Clone ID: MRT4577_144381C.1.pep
PARAHRGPPPXPPPRPGGPPQAPGHPAXPPPPRGEGLSGPFFRPPGPVRKRRDMLGSVGWGPVEPPRVGCSPLLLYFPYAF

SEQ ID NO: 233321 - protein, 84 aa, Zea mays
  Clone ID: MRT4577_144382C.1.pep
LGARAYRHQRIHSRRRNPRSPPNPPPPRPSIDDGLPTLSHLLSSEGPRYPRPISSPFHRRPSSTIATRRDSRCRLPPDSLLLIR

SEQ ID NO: 233322 - protein, 42 aa, Zea mays
  Clone ID: MRT4577_144383C.1.pep
EANNKGRAHSDPSRNTHTKGLNEHGLCCLILIKKTGLICVIN

SEQ ID NO: 233323 - protein, 117 aa, Zea mays
  Clone ID: MRT4577_144384C.1.pep
PGPPFEWAPLAQPHIKGPPVKCPDPPHGRPKSFEWGGRFLPPKGQKKVSLPWAWPLFVCPWGAVPPPKKRPSARALRGEKKICPFPKKKKKKKKKKKKKKKKKKKKKKKKKKKTPHP

SEQ ID NO: 233324 - protein, 83 aa, Zea mays
  Clone ID: MRT4577_144385C.1.pep
RLAIIAVSCTSTSTRNDSVVRAVGTSLMEKSPVRSLIKGSSKPVSAGLVTLQSCDDQVVRVALFVLVQFINMLSEHQQHGVGP

SEQ ID NO: 233325 - protein, 98 aa, Zea mays
  unsure (1)..(98): unsure at all Xaa locations
  Clone ID: MRT4577_144386C.1.pep
IRSLVTPTPEGVWFSTGVYTAETPXGIAEDFVFSTPCRSKGDGYYQLASDVLRHXFLGGGFKKSKVNFLVKKKWFALFTEKGNAFCFLRKNPMPPEKV

SEQ ID NO: 233326 - protein, 237 aa, Zea mays
  Clone ID: MRT4577_144387C.1.pep
MADSSAPHSNGGAGAEAEAVPRSLAPPRRVALVTGITGQDGSYLTELLLSKGYEVHGLIRRSSNFNTQRLDHIYHDPHATPSAARPPMRLHYADLSDSSSLRRALDHVLPDEVYNLAAQSHVAVSFEVPDYTADVTATGALRLLEAVRLSSKPMRYYQAGSSEMFGSTPPPQSEATPFHPRSPYAAAKVAAHWYTVNYREAYGLFACNGVLFNHESPRRGENFVTRKITRAIGRIKV

SEQ ID NO: 233327 - protein, 28 aa, Zea mays
  Clone ID: MRT4577_144388C.1.pep
MSGHVALAADDQHGWAAAIARCGSGGRR

SEQ ID NO: 233328 - protein, 105 aa, Zea mays
  unsure (1)..(105): unsure at all Xaa locations
  Clone ID: MRT4577_144389C.1.pep
PTRVPPCPWGPPPCSPIYDSPPPPPPHKFXAVPWGWLAPNPKKLGPFPHHSPLLPPGGLLENRGPSHLLLGLIPPRVSPKIGPVRAPFLLFCPPGGLKLSPPFFL

SEQ ID NO: 233329 - protein, 77 aa, Zea mays
  Clone ID: MRT4577_14438C.1.pep
NVLPLAETLGLDSGLPWLAKEPEVFFFLSLRQYWGQEKKKLFALSESQVALIFLLRLVPRGRMAKVYVAEPSKSVTY

SEQ ID NO: 233330 - protein, 217 aa, Zea mays
  Clone ID: MRT4577_144390C.1.pep
FDCGIHPAYTGMAALPYFDEIDPSAIDVLLITHFHLDHAASLPYFLEKTTFKGRVFMTHATKAIYKLLLSDYVKVSKVSVEDMLFDESDIARSMEKIGVIDFHQTLEVNGIRFWCYTAGHVLGAAMFMVDIAGVRILYTGDYSREEDRHLRAAELPQFSPDICIIESTYGVQQHQPRIVREKRFTEVIHNTGSQGGRVLIPAFALGRAQGLVLILDE

SEQ ID NO: 233331 - protein, 63 aa, Zea mays
  Clone ID: MRT4577_144391C.1.pep
TNESAAQCLPHCERDRFANHLLCAPTSLITSFRKGNIITPLAPTMHKASTTISSTKLGRHGVS

SEQ ID NO: 233332 - protein, 697 aa, Zea mays
  Clone ID: MRT4577_144392C.1.pep
MASSAAAPSGAPPAAKRPASSGREGDQMVVTPLGAGSEVGRSCVHMTFKGRTVLFDCGIHPAYSGMAALPYFDEIDPSAIDVLLITHFHLDHAASLPYFLEKTTFKGRVFMTHATKAIYKLLLSDYVKVSKVSVEDMLYDESDIARSMDKIEVIDFHQTLEVNGIRFWCYTAGHVLGAAMFMVDIAGVRILYTGDYSREEDRHLRAAELPQFSPDICIIESTYGVQQHQPRIIREKRFTEVIHNTVSQGGRVLIPAFALGRAQELLLILDEYWSKHPELHKIPIYYASPLAKRCMAVYQTYINSMNERIRNQFAQSNPFHFKHIESLNSIDNFHDVGPSVVMASPGGLQSGLSRQLFDKWCTDKKNACVIPGYVVEGTLAKTIINEPREVTLANGLTAPLHMSVHYISFSAHADFPQTSNFLEELRPPNIILVHGEANEMSRLKQKLITQFDGTNTKIVSPKNCQSVEMYFTCEKMAKTIGRLAEQVPEGGESSSGLLVKKGFTYQIMAPEDLRVFTQLSTANIIQRIAVPYSGSFEVIRYRLKQIYESVESATEESDVPTLIVHERVTVRLDSESYVTLQWSSDPISDMVSDSVVAMVLNIGREGPKVVPVEEAVKTKEETEKAALKVVYALMTSLFGDVKVAEEGKFVISVDGNVAHLDGRSGDVECENATLKERIKTAFRRIQGAVRPIPLSAS

SEQ ID NO: 233333 - protein, 77 aa, Zea mays
  Clone ID: MRT4577_144393C.1.pep
KSKAPKGFTPKKGLAPRGAPFGGAPPVGLGNSQFPPKFLGGPAPPHQKKVPFFSGALKIKCQGKEKFKWGPPVFWKG

SEQ ID NO: 233334 - protein, 61 aa, Zea mays
  Clone ID: MRT4577_144394C.1.pep
RSRATRLRDRADDDGGCGSARNQRESEIMEEEQQEAQRKMQGPSSSVASCTTLLASLCGWS

SEQ ID NO: 233335 - protein, 53 aa, Zea mays
  Clone ID: MRT4577_144395C.1.pep
PQEEYDLTTGWRGDEAHARADDTVFVSYLRVRGMLTAVGATTVGLNGRDQMVR

SEQ ID NO: 233336 - protein, 82 aa, Zea mays
  Clone ID: MRT4577_144396C.1.pep
CNGELIRSSDLCVSETALLSELGFQSEYQRTGSTCLQKPAIQSIIPDHAGLLICSRSLGRQDSLDSFYSQVGRRLSPCPHQQ

SEQ ID NO: 233337 - protein, 53 aa, Zea mays
  Clone ID: MRT4577_144397C.1.pep
SYGFLLAEKVLTDCQSKSADDPSPVTLGTIAHLHDIILLRVYKKELASLGSRN

SEQ ID NO: 233338 - protein, 81 aa, Zea mays
  unsure (1)..(81): unsure at all Xaa locations
  Clone ID: MRT4577_144398C.1.pep
ILMLLTQSACNAKATIITQCXQPPIAYIISQYLPSMTAKVYENPALQPYTLQQAISASNIHLSPFDQQXPALSLVPSQTQT

SEQ ID NO: 233339 - protein, 32 aa, Zea mays
  Clone ID: MRT4577_144399C.1.pep
SKKIMLKLFTDCKQTAKFYLNYFANGYNIRTR

SEQ ID NO: 233340 - protein, 69 aa, Zea mays
  Clone ID: MRT4577_14439C.1.pep
CLGEAGANGVPRVEVSMWPSPACNAHAGLLQCQELSAQALAYWFSRIGARAGLYARRRSTERSLPGQLK

SEQ ID NO: 233341 - protein, 85 aa, Zea mays
  Clone ID: MRT4577_1443C.1.pep
CQQSVLVTRLSGMEGSFLWRSQKHLHGESSALGAHTPLFERDFIASPFTDFTIQKKRNYRLFQGPAADKRDLRLSGTFSVCNLYT

SEQ ID NO: 233342 - protein, 86 aa, Zea mays
  Clone ID: MRT4577_144400C.1.pep
NYRGNPQIQTFLGEFFFPDRTFVLNAKAPTIFLLDPQDFYLPFSMFRKGKTKLDLCLRTLLELKTKFSFPAIGEVSRPIAHPLFIT

SEQ ID NO: 233343 - protein, 262 aa, Zea mays
  Clone ID: MRT4577_144401C.1.pep
MNNPQNPKASAPCTLPSELPKEAVATDEAPPPMGNNNNTESATATMVREQDRLMPVANVSRIMRQVLPPYAKISDDAKEVIQECVSEFISFVTGEANERCHTERRKTVTSEDIVWAMSRLGFDDYVAPLGAFLQRMRDDSDHGGEERGGPAGRGGSRRGSSSLPLHCPQQMHHLHPAVCRRPHQSVSPAAGYAVRPVPRPMPASGYRMQGGDHRSVGGVAPCSYGGALVQAGGTQHVVGFHDDEASSSSENPPPEGRAAGSN

SEQ ID NO: 233344 - protein, 123 aa, Zea mays
  Clone ID: MRT4577_144402C.1.pep
RLILPFPLGGKVPGFFSFLKFNLFFGGGPPLFFTRGGGKTLGKKGWGSRIFPWTPKNGLGGWPRFPKKALPRFFIFVFRGVGGPGPLIGGAKPGPLLAWGFLGPFFNNKPGPPQLNLPPFFFP

SEQ ID NO: 233345 - protein, 50 aa, Zea mays
  unsure (1)..(50): unsure at all Xaa locations
  Clone ID: MRT4577_144403C.1.pep
IRGTVVLTSLSARYTSPLLRAPICFXSSFPRLVYGLAVLSSASGFVFPYA

SEQ ID NO: 233346 - protein, 79 aa, Zea mays
  unsure (1)..(79): unsure at all Xaa locations
  Clone ID: MRT4577_144404C.1.pep
MAAPATTTSLLSTLPQLSSFSGKSSPPSVVHVARRAPTAVVAAKGYNVQILVDENEGEEXIFRRFRREVMRAGVLVEIR

SEQ ID NO: 233347 - protein, 108 aa, Zea mays
  Clone ID: MRT4577_144405C.1.pep
MAPKKEKAPAASSKPAKSGGGKQKKKKWSKGKQKEKVNNAVLFDQATYDKLLTEVPKYKQITPSVLSERLRINGSLARRAIKDLMERGLIRMVSIHSSQQIFTRATNT

SEQ ID NO: 233348 - protein, 98 aa, Zea mays
  unsure (1)..(98): unsure at all Xaa locations
  Clone ID: MRT4577_144406C.1.pep
LQCQIWPCNLHKPARLDQPISIHITQGKSLQLLTSRFPWPPYPRTPHHALLNDXHILARPXSPTSCTRLHLAHKYSLQWRPDQALMPSPYSIRARRNK

SEQ ID NO: 233349 - protein, 108 aa, Zea mays
  unsure (1)..(108): unsure at all Xaa locations
  Clone ID: MRT4577_144407C.1.pep
MSPKKEKAPAASSKPAKSGGGKQKKKKWSKGKQKEKVNNAVLFDQATYDKLLTEVPKYKQITPSVLSERLRINGSLARRAIFDFVAHXLIRMVSIHSSQQIFTRATNT

SEQ ID NO: 233350 - protein, 36 aa, Zea mays
  Clone ID: MRT4577_144408C.1.pep
RSIINTHPHTSILLRGPTPQTISQPSQPDLLTADAH

SEQ ID NO: 233351 - protein, 81 aa, Zea mays
  Clone ID: MRT4577_144409C.1.pep
LRITAGPPVFHLPVRGVVTNTPPAGGDRKVFGDQCPFHSQGLHDEGFTFLQSIYRVFGFGKKKRKRRGGLKLSTFLGRISK

SEQ ID NO: 233352 - protein, 131 aa, Zea mays
  Clone ID: MRT4577_14440C.1.pep
VQNYRVEPASDLKKPSLQLTPTRSLVQVAASEARRSPVTTLKTPILFFTPTTFRLGRRSTPTVSNIRDRLLANMPETSVQRVDPQKLGRITFQKSEDLIDEWDIQYDDAEGDADAGTLKQAAHELMSTNTP

SEQ ID NO: 233353 - protein, 109 aa, Zea mays
  unsure (1)..(109): unsure at all Xaa locations
  Clone ID: MRT4577_144410C.1.pep
MGQAMASSISSTPAGVREMQNDLEVHANALSKIQNDIVKNHHFRKQYTIQVXQNELVLNELELLIDGANVYKLIGPVLFKQDLSEVKANVKKRIXYISVELKRMDRPLK

SEQ ID NO: 233354 - protein, 29 aa, Zea mays
  Clone ID: MRT4577_144411C.1.pep
ELIGGGAFLEGVHFYSGDKHNTLVEPVKL

SEQ ID NO: 233355 - protein, 110 aa, Zea mays
  unsure (1)..(110): unsure at all Xaa locations
  Clone ID: MRT4577_144412C.1.pep
MPKLLLNHLLSGLLTNQPAHTPLAPPGSSLPKPXPPGCPXQPPPGLFPPRPARFLACFLRPGVPGLRCGPSLFPGCFVPPPPPPFVGPPPGARASLPPPPQVNEQKKTGQ

SEQ ID NO: 233356 - protein, 129 aa, Zea mays
  Clone ID: MRT4577_144413C.1.pep
MWKQFLGKLSGKSPKSGGGGGWGSPPPKSPTSYDVNGRQWDSMRASPPLAAIAGAEGETREDVFLRKLNVCCVLFDFSNDRGRDSPERERKRQVLMSLVDCLGTAEEPLTEAMDSTWVRMFALNLVKVF

SEQ ID NO: 233357 - protein, 73 aa, Zea mays
  Clone ID: MRT4577_144414C.1.pep
GALLNIPNFVLIHAHPAHALIIKKSILTRWTAFHSILLVPAHPQMTFIGGNRRLLCPDIFLADSRYERVTHNG

SEQ ID NO: 233358 - protein, 87 aa, Zea mays
  Clone ID: MRT4577_144415C.1.pep
HGYLKMSVHSITTYWTLHEHTDWALHPLSPFSHVLAHAITHGRNFTLFAHQNGQTHSTSSDHDHIRSSGRLTHLEETHPHATCSLLP

SEQ ID NO: 233359 - protein, 104 aa, Zea mays
  Clone ID: MRT4577_144416C.1.pep
RPPRRYPAPVPAAAPAPADRLPCLRTKPQICCRSRHCLRQAKAVNATHPAAAAVPHRRGPCAQDHPLEPVPPCRARYQARARRLYASQAGLSTTASLLRGLPAP

SEQ ID NO: 233360 - protein, 58 aa, Zea mays
  Clone ID: MRT4577_144417C.1.pep
IKGYWEHFTLHMTSAHITVSRNSTCLPTRNNFFSCLLLLALFLLFYILFYLLYNLIIH

SEQ ID NO: 233361 - protein, 123 aa, Zea mays
  Clone ID: MRT4577_144418C.1.pep
GAKVQVPIKFIVGHGDLAFHLPGVGWYIHKVGFKRDVPMLEEMVVIKGNGHFIQQERAQEISEHIHGFIKKLEACVFAAPDSFKAIRDLMGSVHTSNGLGAIVVVCRAAAPIYYEWYAVLAIY

SEQ ID NO: 233362 - protein, 58 aa, Zea mays
  Clone ID: MRT4577_144419C.1.pep
YRGQGGRISPFGPPHPLIFFQGYARGHIPPPFLFIYGGETYPAPLLPSTYKSANSFLF

SEQ ID NO: 233363 - protein, 411 aa, Zea mays
  unsure (1)..(411): unsure at all Xaa locations
  Clone ID: MRT4577_14441C.1.pep
MPPKKASSIGVAALQPLDTNQETLSLREARSQKRKATSPTPQEDDLDQEIRNMEMLHQQVQKKKEKMARLADLQRQIDEATEEVRHLAQDEQNRRPQHRELHQEGFYNEDDWYEDFHHGNFAFDDASPLSAELQATPWPPSYKPPQLPMYDEHSDPKQFLMSYEATISSYGGNTAVMAKSFVMAVKNVAQTWYSSLWPGTITSWQKLKDMLITSFQGFQTKPVTAQALFQCTQDQEEYLQAYVRTYLRLRAQALTVPNEIVIEAMIMGLRSGPSAQYFARKPPQTLEKLLQKMDEYIRADNDFRQRREEAYRFSEMARGFGGRIHPRHVRAIHSTQSDDRGTQQQKPQYSSQASGQQQSYPRPPAPXGRGARGFEGRFGDQPRKIYCLFCGEDKGHTTRMCHVTIQKQKEI

SEQ ID NO: 233364 - protein, 101 aa, Zea mays
  unsure (1)..(101): unsure at all Xaa locations
  Clone ID: MRT4577_144420C.1.pep
LKGTTAMRWXAIFFFSQQKRIHLPAXRGRIQXSYLPKLGDSXKPEINSHAFKGXHPLPTCLDDXSAYLLRATAXPLGSRPALSSVLPRTPSLXSXELGFLR

SEQ ID NO: 233365 - protein, 221 aa, Zea mays
  Clone ID: MRT4577_144421C.1.pep
SYSFAKLITKILANRLAPELDKMVSTNQSAFIRGRCIHDNFIMVSQTAKMLHQKKIPAIFLKLDIKNAFDSLHWAFLLEILRHLGFGQVLCNLILNLLWTSSTQVLVNGVPGQPINLKRGLRQGDPLSTLLFILVMDVLNNLFIRADECGLSHPLAGRNISQRVSMFADDVAVFVKPVSGYLVVVREILRCFGVDSGLHTNLQKSFCYPIQCNIERAALAV

SEQ ID NO: 233366 - protein, 152 aa, Zea mays
  Clone ID: MRT4577_144422C.1.pep
KKKKKKKKKKKKKKKKKKKKKTSVATPLRGPFLGSFRGGPSNFLCIGPPFPFLLGAFIALFLGLLPVFWENLSGSHLGKPPANPLLTPWGFTPLAPTEVPFKRPPPLNLESLRPVWSHIERALWGYLRGVYSHFHRPRAPSFTTLSFLFFPV

SEQ ID NO: 233367 - protein, 73 aa, Zea mays
  Clone ID: MRT4577_144423C.1.pep
TFQSRIFSSLRNRLPPFLPLLLLALRQLPHLSRPPAHFPLTLFLPPPFDIVTFSLQPAGARISKIPPPVAILA

SEQ ID NO: 233368 - protein, 42 aa, Zea mays
  Clone ID: MRT4577_144424C.1.pep
SLFSFLYPKFYMRVSFSRRLEPNLSILLFLRINVFYPFFLYL

SEQ ID NO: 233369 - protein, 92 aa, Zea mays
  Clone ID: MRT4577_144425C.1.pep
HSSDYPSPDSSLNKNTLKVGQYKYANATKKKSNTPKYFNIPDLHIVNLVSYYTLKFTYNPYKINFSTISCFENHIIIQNYTNLYSFKFPTLL

SEQ ID NO: 233370 - protein, 70 aa, Zea mays
  unsure (1)..(70): unsure at all Xaa locations
  Clone ID: MRT4577_144427C.1.pep
MATVALTPQADLSTEYGGALAFATXLRFPPNLVRQLSTNARRNCRNIGVAQIVHAAWSDCLDARRLRGGR

SEQ ID NO: 233371 - protein, 63 aa, Zea mays
  Clone ID: MRT4577_144428C.1.pep
VREDLRSRLGEGEGEGEAKSWPTAPATARHNPHITDALPDSLRHQARLREPMQPHTMRLRLSL

SEQ ID NO: 233372 - protein, 297 aa, Zea mays
  Clone ID: MRT4577_144429C.1.pep
MATPTPMGAVRVERVRGRSARPRCFARYPLKLIAPSRVGPSSCDAVWLYALTYGGGIVSGDTVSCTVSVGDGCTAAITTQASTKVYKAVGSKCSEQLLEARVGEDALLAVIPDPVTCFSTARYHQKQVFHVSVNSNLVLVDWFTSGRYESGERWDFSFYKSVNHIFLGDQPLFIDSTLLEQSSSYSIAERMREYNVVAMVVLLGPKLRDIQDKMQDEVRKLMSGQLRPPTAGGSLYTTRSQRPRRPPLVASCSPFGRTGTGMVARVAAVSTELAYIFLRHHLAALEPFLGAPPYAAS

SEQ ID NO: 233373 - protein, 423 aa, Zea mays
  unsure (1)..(423): unsure at all Xaa locations
  Clone ID: MRT4577_14442C.1.pep
MARLADLQRQIDEASEEVRHLTQDEQXNRRSQHRELHQEGFFNEDDXELQATPWPPSYKPPQLPMYDGHLDPKQFLMSYEATISSYGGNTAVMAKSFVMAVKSVAQTWYSSLRPGTITSWQKLKDMLITSFQGFQTKPVTAQALFQCTQDHEEYLQAYVRRFLRLRAQTPTVPNEIVIEAMIKGLRPGPSAQYFARKHSRTLEKLLQKMDEYICADNDFRQRREEAYRFSEIARGFGGRFHPRHVRSIHSTQNDDRGSQQQRPQYSSQASQASGQQQSYPRPPAPRGRGARGFGGRFVDQPRKIYCLFCGEDKGHTTRMCHVTIQKQKEIAEAAAQQTQLKQVMHTASYHSPYIPEYVGNHPAASVASASQSQVSWQQLPPPPPTQRGQQPEGSQHTQQQRDFREESEARIVNSTVPESKHIY

SEQ ID NO: 233374 - protein, 98 aa, Zea mays
  Clone ID: MRT4577_144430C.1.pep
GMSKLQQTLVDTLMTVDVSPDGAGGGYAGQQMACAVGKLADLVDFVDKADHLRQQTLRNMHKILTPRQAARGLLALADYGQRLRALSSLWAARPREPA

SEQ ID NO: 233375 - protein, 98 aa, Zea mays
  unsure (1)..(98): unsure at all Xaa locations
  Clone ID: MRT4577_144431C.1.pep
SWTFLFPAYLQRILRVGATKDDXGPISGMEVLRIINEPTAAAIAYGLDANDKQEKNVLIFDLGGGTFDVSLLTISGGVFAVKATAGDTHLGWEDFDNT

SEQ ID NO: 233376 - protein, 108 aa, Zea mays
  Clone ID: MRT4577_144432C.1.pep
TTYGLGRENYIYYREGTVHKLAMAASSLMHTRVGRSNFFLLRLSTYKYQQKYMLDDAMIWKATPEEEREGAWASMITSIPFGLLSFYSIVSVNSANEQAVSISYGRIS

SEQ ID NO: 233377 - protein, 121 aa, Zea mays
  unsure (1)..(121): unsure at all Xaa locations
  Clone ID: MRT4577_144433C.1.pep
ELKKKKKKKKKKKKKKKKKKKKKKKKKKKKKKKNKKPTNTAQHATTNQPPSKKYPKQRLKKSTKXKRKNQIVKPKNVRQPQKTPHPQKKFPHLKKTPRKPQYKNPFPTTNLIPKCPHILNP

SEQ ID NO: 233378 - protein, 76 aa, Zea mays
  Clone ID: MRT4577_144434C.1.pep
TSMHAAPYLSSYTCRPTPPFLSLPNSTTYGASFYACGQPQHICLCQIIINQFCTPDRHACLTAPFLSCLSLRLNLI

SEQ ID NO: 233379 - protein, 139 aa, Zea mays
  Clone ID: MRT4577_144435C.1.pep
KPCRMSCSLNQSRLFRSSVSLPQLNEPIKVPSLSNLVCLSPEPRDWRRSRAGRRWSSRLLPDPGRRGGAVEASKGPRQRAAWRRETGRRWAGGGLAVGLGAVPPSSVEGSKSKPPAALPCWMYVSWRLGVGLGLTSEQQ

SEQ ID NO: 233380 - protein, 80 aa, Zea mays
  unsure (1)..(80): unsure at all Xaa locations
  Clone ID: MRT4577_144436C.1.pep
KNRHCAETANHLAGMSKCSLPVMAPLCMGCQGVQSCAHIHGINCRDXKKQGGWHNYLLRLVDNISRTGGTHVWLPDASHL

SEQ ID NO: 233381 - protein, 47 aa, Zea mays
  unsure (1)..(47): unsure at all Xaa locations
  Clone ID: MRT4577_144437C.1.pep
NIQLQRQLFTKYFIRVKXIXIXXGXNLNTLACNIXSXXCXGILDEVM

SEQ ID NO: 233382 - protein, 66 aa, Zea mays
  Clone ID: MRT4577_144438C.1.pep
PPPGNKKNDVCSCRHALRKAQSQLHHQIIRIENLELMLKYDQHDWKLHNRQMESNLTMIQKKACII

SEQ ID NO: 233383 - protein, 42 aa, Zea mays
  Clone ID: MRT4577_144439C.1.pep
ENLSGYFTTGHDIFALVETDHPPWAAVRSQTEVCKRHYRSWV

SEQ ID NO: 233384 - protein, 408 aa, Zea mays
  Clone ID: MRT4577_14443C.1.pep
MEMLHQQVQRKKEKMARLANLQRQIDEASQEVRHLAQDEQNRRPQHRELHQEGFFNEDDWYENFHHGNFAFDDASPLSEELQATPWPPSYKPPQLPMYDGHSDPKEFLMSYEATISSYGGNTAVMAKSFVMAVKNVAQTWYSSLRPGTITSWQKLIDMLITSFQGFQTKPVTTQTLFQCTQDHEEYLQAYVRRFLRLRAQAPTVPNEIVIEAMIKGLQPGPSAQYFARKPPQTLEKLLQKMDEYIRADNDFRQRREEAYRFSEIARGFGGRIHPRHVRSIHSTQNDDRGSQQQRPQYSSQASGQQQSYPRPPAPRGRGARGFGGRKAKIPAWSKNKCPMRDYRRAREQYRGTVHLFIGTVHSLYIITFIPFTMNYNNDTEYHGSLSHFIFKSVHHFVLRHVTIPKLYG

SEQ ID NO: 233385 - protein, 122 aa, Zea mays
  Clone ID: MRT4577_144440C.1.pep
QLCPLLCYEYRMSRGARFGVSCAAHLSPIRGVRRRTIGADGGAPTHRVHRRGGQVIKRLKLSRPRAIRLREARAGSRSRARHHLQWESPPCGRCAGPNAQTQGLQTPPASTDPSGTPYPRPL

SEQ ID NO: 233386 - protein, 57 aa, Zea mays
  Clone ID: MRT4577_144441C.1.pep
VWSMVLTSSYQKTKPLERKGRLPRVSATKLDAWNMKKQCLYQCYPPVPRCDGWSFNA

SEQ ID NO: 233387 - protein, 74 aa, Zea mays
  Clone ID: MRT4577_144442C.1.pep
AFGSLGPAGPFGNVANYMGQMAMGMGKLGPFENFFRQGDNFRVQTLQQMQRFFISRQSGEALLAISQYPRREAL

SEQ ID NO: 233388 - protein, 145 aa, Zea mays
  Clone ID: MRT4577_144443C.1.pep
QGLAFLLCRWPAASRRKRNSSGGWVPRNELATNEADKCAPGTDRMKNAHRFRPGTDAVGEIRKYQKNTDVLIRKLPFQHLVHVIDQYFKTERRFQSFAEVALQEGYEGYLVMLYQDNYLCAIHCKRVTIMHKDLQIARRIHGEKV

SEQ ID NO: 233389 - protein, 184 aa, Zea mays
  unsure (1)..(184): unsure at all Xaa locations
  Clone ID: MRT4577_144444C.1.pep
PRVRTVQTNAINEASSANEIDPTFLEALPEDLRAEVLASQQNRSAPAASYTPPAAEEIDPEFLAALPPDIQAEVLAQQRAQRIAHSQPAGQPVDMDNASIIATFPPDLREEXAVLSALPSALLAEAQMLRDRELSRYRARGSLFGGSYRLGGRRLPTDNQTVIDRAVGXTVGRRVISTTMQLKG

SEQ ID NO: 233390 - protein, 96 aa, Zea mays
  unsure (1)..(96): unsure at all Xaa locations
  Clone ID: MRT4577_144445C.1.pep
MDAETYTVIYGKLVRSLWRIGTSKKYNPDPLWDKAXGTALHSLSNYKVSLLXDGIPDFWKLDYECFTGEHDLAVLKAMEHLQDVIIRCEHINRRRV

SEQ ID NO: 233391 - protein, 163 aa, Zea mays
  unsure (1)..(163): unsure at all Xaa locations
  Clone ID: MRT4577_144446C.1.pep
HSLQDYHHLNLGAAGAHDFFSAGQQAAAAAAMHGLASIDSASLEHSTGSNSVVYNGGVGDSNGASAVGSGGGYMMPMSAAGATTTSAMVSHEXCMHGXDEAKQAAQMGYESYLVNAENNGGGRMSAWGTVVSAAAAAAASSNDNMAADVGHGGAQLFSVWNDT

SEQ ID NO: 233392 - protein, 80 aa, Zea mays
  Clone ID: MRT4577_144447C.1.pep
AGIRTSDPRLAGEPLLDMPHPVTQTIVRSVRIPRDTALHLMTVQIPLSNTGMVLGPSTRSSRGSNATGICRTCMAVMAPT

SEQ ID NO: 233393 - protein, 49 aa, Zea mays
  Clone ID: MRT4577_144448C.1.pep
SKSLRTTAKVPPKYVYNVPLVWCASQKKLFSILIKECIPCTVGIIVVKG

SEQ ID NO: 233394 - protein, 71 aa, Zea mays
  Clone ID: MRT4577_144449C.1.pep
KKVRKVEMFDGVTILGSKRVKDEFILEGKKVELVSGSAALINKKCHVKKKEIPKFLGGINVRDKGVIEKEQ

SEQ ID NO: 233395 - protein, 85 aa, Zea mays
  Clone ID: MRT4577_14444C.1.pep
SAHTFPTTFSCSAPVNPPGGGHRIPPAHLPRPPDASSPVPGHTYVRSQCWRRTLCRGLRSRTSPVPTRGAQFLSSPSLPVFTTGP

SEQ ID NO: 233396 - protein, 165 aa, Zea mays
  unsure (1)..(165): unsure at all Xaa locations
  Clone ID: MRT4577_144450C.1.pep
MAGSDEVNRNECKXAVPIHTWVLISNFKLAYNMLRRADGTFDRDLAEFLDRRVAPDARAQEGVSSFDHVIDTSTGLEVRIYRAAANNNGGGGATLPILDFLGGTPAXAAPFPVILFFHGGSFAHSSSGTAIYDNLCRRLVRLSKGVXVVSVTYXRAXPEHRYPCA

SEQ ID NO: 233397 - protein, 72 aa, Zea mays
  unsure (1)..(72): unsure at all Xaa locations
  Clone ID: MRT4577_144451C.1.pep
RTRGRTRGREPSLLHTEERAESKNHTVHNHVVKAHKNGFKKPXRHRQTSTXGMDPKFLRNLRYFRKGIKKSG

SEQ ID NO: 233398 - protein, 354 aa, Zea mays
  unsure (1)..(354): unsure at all Xaa locations
  Clone ID: MRT4577_144452C.1.pep
MAGSDEVNRNECKGAVPIHTWVLISNFKLAYNMLRRADGTFDRDLAEFLDRRVPPDARAQEGVSSSDHVIDTSTGLEVRIYRAAANNGGAGAGAAAVTLPILDFLGGGPSPDPFPVILFFHGGSFAHSSSGTAIYDNLCRRFVKLSKGVVVSVNYRRASEHRYPCAYDDGWTALKWAMSQPFLRSGGDARARVFLSGDSSGGNIAHHVAVRAADAGINICGNILLNXPMFGGTERTESERRLDGKYFVTLQDRDWYWKAYLPEDADRDHPACNPFGPNGRRLRGLPFTKSLIIVSGLDLTCDRQLAYAEGLQQDGHHVKVVYREKATVGFYLLSNTDHYHEVMEEIGDFLAANL

SEQ ID NO: 233399 - protein, 68 aa, Zea mays
  Clone ID: MRT4577_144453C.1.pep
PPGALFNVKEPLAPSPGRWFFFFAPLSFFLFPIPLRCNVSFRPMLPLPSQVIIYETLIIFAKISILTR

SEQ ID NO: 233400 - protein, 147 aa, Zea mays
  Clone ID: MRT4577_144454C.1.pep
MGNSLRCCLACVLPCGALDLIRIVHLNGRIEEYGRPVAAGEILAANPNHVLSKPCSQGVAVRRILIVSPDSELERGEIYFLIPASSVPPEKKPQPQRQQKSVVLAGSHGNQVVVNKKISSSHRRRRTAGCRTTVWKPHLECIVEGDT

SEQ ID NO: 233401 - protein, 237 aa, Zea mays
  Clone ID: MRT4577_144455C.1.pep
MLARRDAEDSGSGTKAAHFVFVPLREQGHLIPAVDTALLLATHGALCTIVGDPYTAALVRQTIEAAQAAGLAVRLAEFPLDYAESGLPEGADRGDSVPAVHMSSYYRGMALLCAPIESYLRANAPYPTCVVSDFVHPWTKELAANLGVPRLTFFSMCAFGLLCQRNLERFNAYDGVQGSDEPVVVPGLEKRFVVTRAQAPGGSFFRGIPVPWWEDFADYVERAQAEADGIIINTFLE

SEQ ID NO: 233402 - protein, 91 aa, Zea mays
  Clone ID: MRT4577_144456C.1.pep
TPGSKLGFIFLQTLGPFLSGLVLRFPKNGLRSRFPKVLTLQVVWENCPPFFYPGGPPLLGAKCLKKTFCPPHFCRLVKKFAGKKKARVFPF

SEQ ID NO: 233403 - protein, 113 aa, Zea mays
  Clone ID: MRT4577_144457C.1.pep
GGPKKRKKAASLPGGELKQKGKKGGGYNKPGGATGVCKKPNPGSKTPKTRPPTSKGTIRKIGFPPRGPISRTPVPKEAQNSGKIKRVGLAKPAKPAAFAPVWGPPVCRRLRGH

SEQ ID NO: 233404 - protein, 44 aa, Zea mays
  Clone ID: MRT4577_144458C.1.pep
KMTHWIAYAMAFDAGMYTLVFHGSADPVSEISKMVDLLCCQPIL

SEQ ID NO: 233405 - protein, 77 aa, Zea mays
  Clone ID: MRT4577_144459C.1.pep
VRLQIRSFQLTQEQHRKLKALLVMFNKLMIVSNTKHHAAKQSLIYISISVPRMYIIFIAQSSALLFNNLMLVLYVCQ

SEQ ID NO: 233406 - protein, 357 aa, Zea mays
  unsure (1)..(357): unsure at all Xaa locations
  Clone ID: MRT4577_14445C.1.pep
MPPKKASATGAAALQPLDPNQETLSLREARSQKRKATSPTPQEDELDQXDEQERRPQHRELHQEGLFDDDXDELQATPWPPSYKPPQLPMYDGHSDPKQFLMSYEATISSYGGNTAVMAKSFVMAVKNVAQTWYSSLRPGTITSWQKLKDMLITSFQGFQTKPVTSQALFQCTQDHEEYLQAYVRRFLRLRAQAPTVPNEIVIEAMIKGLRPGPSTQYFARKLPQTLEKLLQKMDEYIRADNDFRQRREEAYRFSEMTRGFVGRVHPRHVRSIHSTQNDDRGGHQQRPQYSSQTSGQQQSYPRPPAPRGRGARGFGGRFGDQPRKIYCLFCGEDKGHTTRMCHVTIQKQKEIAEAAA

SEQ ID NO: 233407 - protein, 71 aa, Zea mays
  Clone ID: MRT4577_144460C.1.pep
MLGSNPNLMKSCLKLLRLSLLLMLKISCLACKLLQSKFCPSPSLIFTKCIWCLFLFHLLSLLCLDLYEPST

SEQ ID NO: 233408 - protein, 192 aa, Zea mays
  unsure (1)..(192): unsure at all Xaa locations
  Clone ID: MRT4577_144461C.1.pep
RRRQQRHCPSRPDSSVVDKQVIGGGNVAPVQRNTASSAPTPRRPVDTTDVAGEIKAQFVGAADAVRALSPLLEIGRRRYHHRSSVYHVSSSMVSAIALPHSDVGGIELLDVGSEKVLGGRSLCSTLEKLYVWEKKLYDEVKAEEKMRLLLAKNAKRLKYLDLKGAEAQKIEPIRNMVRXLSTKLRISVRVIT

SEQ ID NO: 233409 - protein, 53 aa, Zea mays
  Clone ID: MRT4577_144462C.1.pep
DESVHEILGVRKVYHSYVLDRACTHSVFFFFLSLFFLRIHMPIFSVNLVSNTL

SEQ ID NO: 233410 - protein, 146 aa, Zea mays
  unsure (1)..(146): unsure at all Xaa locations
  Clone ID: MRT4577_144463C.1.pep
NPSDTKREXXXAXAXPAHAASATTTXTSGSXGGQPPPPXQQPPPXXQPPPGDRPPPXXHPPPDHQPPPDHXPPPDXGPTPXQXPPPPXHNPTQPPRPQXQPQPHPXPXQQPXPSPXQXQGTXGXGSTPNPGQSDKNXRQQSSPTET

SEQ ID NO: 233411 - protein, 698 aa, Zea mays
  unsure (1)..(698): unsure at all Xaa locations
  Clone ID: MRT4577_144464C.1.pep
MESFHDYKMADNHSIVEQAHEIQCIAKELDHLKIVLPDRFVAGCIIAKLPSTWRNFATSLKHKRQEISVENMIVSLDVEEKARAKDTGSKGGEGHSSANMVQRNHNNGKRKPKSNKPNKTTIFKKKKNKAELTCFACGEAGHFAKDCPDRADRRGKKGNVNTVVASNEEDKGYGNLPFIFSVFQLHSWWLDTGANVHVCSDINLFSSYQGARDSSVLMGNGLHASVHGTSTVDLKFTSRKIVQLKNVHHVPSIHKNLVSGTLLCRDGFXEHGIIHERTPPYSPESNGIAERKNXGCMAKVNVPINKKRKLGPRTMDCVFLGYASCSIAYRFLVVKSEVPDVYVDTIMESCDATFFEHIFPMKDIHSNSRYSSEITPEHSTSVESSEQPHEIVLEKDDNDAPKRSKIQRVEKSFGDDFIVYLVDDTPTTIVEAFASLDADDWKEAVHNEMDSILSNGFAINEADRCVYYRCGGGEGVILCLYVDDILIFGTNVDVINEVKSFLSKSFDMKDLGEADVILNIKLIKADVSKLSRFMSNPRTDHWHALERVMRYLQDELYATSGYVFTIGGGAVSWRSCKQTILTRSTMQVELAALDTATVEAEWLRELLMDLSVVEKPIPAILMNCDNQTVIVKVTSSKDNGKSSRHVKRRSKSVRKLRNSRVISVTYISTDKNLADPFTKGLPRNVIEIASRDMSMRPI

SEQ ID NO: 233412 - protein, 1188 aa, Zea mays
  Clone ID: MRT4577_144465C.1.pep
MAAFADALKPEKFNGMHFKRWQVKATLWLTAMNVFHVSKGRPEGPLTPEQEKEYDHANTMFTGAVLSALVDRLVDANMQYTDGKELWDALTTKYGASDAGSDLYIMESFHDYKMVDNRSIVEQAHEIQCIAKELDHLKIVLPDRFVAGCIIAKLPSTWRNFATALKHKRQEISVENMIASLDVEEKARAKDTGSKGGEGHSSANMVQKNHNKGKGKPKSNKPNKTTNFKNKKNKAELTCFACGEAGHFAKDCPDRADRRGKKGNVNTVVASNEEDKGYDNLPFIFSVFQSPSWWLDTGANVHGARDSSVLMGNGSHASVHGTGTVDLKFTSGKIVQLKNVHHVPSIHKNLVSGTLLCRDGFKSKQPRKPHKAAEERHLAPLELIHSDLCEMNGVLTKGGKRYFMTLIDDASRFCYVYLLKTKDEALDYFKIYKAEVENQLERKIKRLRSDRGGEFFPKVFDDFCAEHGIIHERTPPYSPESNGIAERKNRTLTDLVNAMLDTCGLSKAWWGEAVLTSCHVLNRIPMGKEEKTPYEKWVGRKPSLSYLRTWGCMAKVNVPINKKRKLGPRTVDCVFLGYASCSIAYRFLVVKSEVPDVYVDTIMESRDATFFEHIFPMKDIHSNSRYSSEIIPEHNTPIESFEQPHEIVLEEDDNDAPKRSKRQRVEKSFGNDFIVYLVDDTPTTIAEAFASPDADDWKEAVHNEMDSILSNGTWEVTDRPYGCKPVGCKWVFKKKLKSDGTIEKYKARLVAKGYTQKEGEDFFDTYSPVARMTTIRVLLSLAASYGLLVHQMDVKTAFLNGELDEEIYMEQPDGFVVKGQESKVCKLLKSLYGLKQAPKQWHEKFDTTLTSAGFAINEADRCVYYRCGGGEGVILCLYVDDILMFGTNIDVINEVKSFLSKSFDMKDLGEADVILNIKLIKADGGITLSQSHYVEKVLKRFGFSECKPSPTPYDPKNKRIGLDQLIYSQIVGSLMYLAGATRPDISFAVSKLSRFMSNPGTDHWHALERVMRYLQGTMSYGIHYSGQHAVLEGYSDSNWISDADELYATSGYVFTIGGGAVSWRSCKQTILTRSTMEAELAALDTATVEAEWLRELLMDLPVVEKPIPAILMNCDNQTVIAKVTSSKDNGKSSRHVKRRLKSVRKLRNSGVISVTYISTDKNLADPFTKGLPRNVIEIASREMGMRPE

SEQ ID NO: 233413 - protein, 1292 aa, Zea mays
  unsure (1)..(1292): unsure at all Xaa locations
  Clone ID: MRT4577_144466C.1.pep
MAAFADALKPEKFNGMHFKRWQVKATLWLTAMNVFHVSKGRPEGPLTPEQEKEYDHANTMFTGAVLSALVDRLVDANMQYTDGKQLWDALTTKYGASDAGSDLYIMESFHDYKMVDNRSIVEQAHEIQCIAKELDHLKIVLPDRFVAGCIIAKLPSTWRNFATALKHKRQEISVENLIASLDVEEKARAKDTGSKGGEGHSSANMVQKNHNKGKGKPKSNKPNKTTNFKKKKNKAELTCFACGEAGHFAKDCPDRADRRGKKGNVNTVVASNEEDKGYGNLPFIFSVFQSPRWWLEEYRDVRXCGACARRRHGAYPGVREPGSVXGGTSAPSPSPTGATSXGKVAELYPEYKVPKFPKDTQPGLVRQGAEEGSKKLVXVGAALQPSGEDHQGRCGGPQEQRLHFVASRPTAAIXWSSMPVEFRFPSXILQNEFANMNXIKNVVIXKADFLLQGSKCHSCVQSKQPRKPHKAAEERHLAPLELIHSDLCEMNGVLTKGGKRYFMTLIDDASRFCYVYLLKTKDEALDYFKIYKAEVENQLERKIKRLRSDRGGEFFPKVFDDFCAEHGIIHERTPPYSPESNGIAERKNRTLTDLVNAMLDTCGLSKAWWGEAVLTSCHVLNRIPMGKEEKTPYEKWVGRKPSLSYLRTWGCMAKVNVPINKKRKLGPRTVDCVFLGYASCSIAYRFLVVKSEVPDVYVDTIMESRDATFFEHIFPMKDIHSNSRYSSEIIPEHNTPIESFEQPHEIVLEEDDNDAPKRSKRQRVEKSFGNDFIVYLVDDTPTTIAEAFASPDADDWKEAVHNEMDSILSNGTWEVTDRPYGCKPVGCKWVFKKKLKPDGTIEKYKARLVAKGYTQKEGEDFFDTYSPVARMTTIRVLLSLAASYGLLVHQMDVKTAFLNGELDEEIYMEQPDGFVVKGQESKVCKLLKSLYGLKQAPKQWHEKFDTTLTSAGFAINEADRCVYYRCGGGEGVILCLYVDDILIFGTNIDVINEVKSFLSKSFDMKDLGEADVILNIKLIKADGGITLSQSHYVEKVLKRFGFSECKPSPTPYDPSVTLRKNKRIGLDQLRYSQIVGSLMYLAGATRPDISFAVSKLSRFMSNPGTDHWHALERVMRYLQGTMSYGIHYSGQHAVLEGYSDSNWISDADELYATSGYVFTIGGGAVSWRSCKQTILTRSTMEAELAALDTATVEAEWLRELLMDLPVVEKPIPAILMNCDNQTVIAKVTSSKDNGKSSRHVKRRLKSVRKLRNSGVISVTYISTDKNLADPFTKGLPRNVIEIASREMGMRPE

SEQ ID NO: 233414 - protein, 748 aa, Zea mays
  Clone ID: MRT4577_144467C.1.pep
MAAFADALKPEKFNGMHFKRWQVKATLWLTAMNVFHVSKGRPEGPLTPEQEKEYDHANTMFTGAVLSALVDRLVDANMQYTDGKQLWDALTTKYGASDAGSDLYIMESFHDYKMVDNRSIVEQAHEIQCIAKELDHLKIVLPARFVAGCIIAKLPSTWRNFATALKHKRQEISVENLIASLDVEEKARAKDTGSKGGEGHSSANMVQKNHNKGKGKPKSNKPNKTTNFKKKKNKAELTCFACGEAGHFAKDCPDRADRRDKKGNVNTVVASNEEDKGYGNLPFIFSVFQSPSWWLDTGANVHVCSDINLFSSHQGARDSSVLMGNGSHASVHGTGTVDLKFTSGKIVQLKNVHHVPSIHKNLVSGTLLCRDGFKVVLESNKLVVSKSGQFIGKGYDCGGLFRFSLLDFNNKSVNHICANVDDLASIWHSRLCHINFGSMSRLATMSLIPNITIVKGSKCHSCVQSKQPRKPHKAAEERHLAPLELIHYDLCEMNGVLTKGGKRYFMTLIDDASRFCYVYLLKTKDEALDYFKIYKAEVENQLERKIKRLRSDRGGEFFPKVFDDFCAEHGIIHERTPPYSPESNGIAERKNRTLTDLVNAMLDTCGLSKAWWGEAVLTSCHVLNRIPMGKEEKTPYEKWVGRKPSLSYLRTWGCMAKVNVPINKKRKLGPRTVDCVFLGYASCSIAYRFLVVKSEVPDVYVDTIMESRDATFFEHIFPMKDIHSNCWGPSASEGPQKHDLTMFLEYNV

SEQ ID NO: 233415 - protein, 83 aa, Zea mays
  Clone ID: MRT4577_144468C.1.pep
VILVHSFVLLAQGITLSTCIIAHNNALLALLVSNNFAEIKSNVFKRVSKENLHNLVYYGECAYLYAYYSKPCAFVFVLWFFMC

SEQ ID NO: 233416 - protein, 336 aa, Zea mays
  unsure (1)..(336): unsure at all Xaa locations
  Clone ID: MRT4577_144469C.1.pep
RVADDDSVGVLRRHRYTDGKQLWDALTTKYGASDAGSDLYIMESFHDYKMVDNRSIVEQAHEIQCIAKELDHLKIVLPDRFVAGCIIAKLPSTWRNFATALKHKRQEISVENLIASLDVEEKARAKDTGSKGGEGHSSANMVQKNHNKGKGKPKSNKPNKTTNFKKKKNKAELTCFACGEAGHFAKDCPDRADRRGKKGNVNTVVASNEEDKGXARDSSVLMGNGSHASVHGTGTVDLKFTSGKIVQLKNVHHVPSIHKNLVSGTLLCRDGFKVVLESNKLVVSKSGQFIGKGYDCGGLFRFSLLDFNNKSVNHICAKKKKKRGPWHSRLCHINFG

SEQ ID NO: 233417 - protein, 128 aa, Zea mays
  Clone ID: MRT4577_14446C.1.pep
AGRAARIAILNPPLPRLPPRIKQPPPPRIPQPWRRGRRLCSLLHPAQQRRPSGPRLADQAGNPPARRLPDSGRRWRQWGPRARMPLPHPLPSLAIPALVTASPTSEEWRSSTPPSPPSSNTSHSHPPP

SEQ ID NO: 233418 - protein, 103 aa, Zea mays
  Clone ID: MRT4577_144470C.1.pep
HKHYTIEIYIVANSMKRDKHIFGKNMWGQVAPQDNIYPPLIAAMEVVFMIGSNYAMWNITDHHNYNNKGFSEEGTSSVGRHMIQLLHFPLSCSTTYPKILQYL

SEQ ID NO: 233419 - protein, 88 aa, Zea mays
  Clone ID: MRT4577_144471C.1.pep
VQERKSPPFLGEGSNNKTDCLFSGVPRARARSSMVVRGYDNIKTFLGLFAYKEPPPTGGAPFPGKKPPILGFVSNKRFFRPFCFLFSP

SEQ ID NO: 233420 - protein, 74 aa, Zea mays
  Clone ID: MRT4577_144472C.1.pep
MRFAISVAALAGAAMAAPSAGYPEGKPADNVVVEWTTVVKTVYVTEGYRYEAPTFTAVYEAPAVTTTPVYEAPA

SEQ ID NO: 233421 - protein, 76 aa, Zea mays
  Clone ID: MRT4577_144473C.1.pep
ATPVVRTGGENPQQRQFMVMEGIWVPSHDTTNNRVYAPVATQPPQSSTSGERSNRGCKSPATSSTTTHTPHLLPLS

SEQ ID NO: 233422 - protein, 279 aa, Zea mays
  Clone ID: MRT4577_144474C.1.pep
PLHAHELPLNWTVGMPGILAGTVEDALIAYSAIVDQSQPSYLRPELNLPQLGSTLSIGNIKLARYGKWFNDSAEDIRSGCDKALQALRANYGWQTVDVTIPEVEEMRLAHYVTIGSECTTSLAKYLDKLKRSEIGWDARVALSVYGSFSSRAYLNAQRLRNRQMYFHKQIFKAADVIVSPMTGVTAYPLQDDALSTGELDYINGAALVRYSIAGNFLGLPAITVTVGYDRGGLPIGLQFIGRPWAEATLLHVAFATQQACAKGYKKPPVFYDLLGKQQD

SEQ ID NO: 233423 - protein, 51 aa, Zea mays
  Clone ID: MRT4577_144475C.1.pep
LYNHCDFITECKDTKFLVIKSYTEDHVHRVINYKVCASTLMSNMNLDSAYH

SEQ ID NO: 233424 - protein, 119 aa, Zea mays
  unsure (1)..(119): unsure at all Xaa locations
  Clone ID: MRT4577_144476C.1.pep
MEXRGKVDGAGAXKKATXRSSKAXLQIPVXRIARFLKAXKYAERVGAGAPXYLPPVLXYLPAEXLKLAXNAARNNKKTRIVPRHIPLPVRTHEELTQLLXAAPLPSAAPMPPIHQPLLP

SEQ ID NO: 233425 - protein, 175 aa, Zea mays
  unsure (1)..(175): unsure at all Xaa locations
  Clone ID: MRT4577_144477C.1.pep
GYERRCAVGWCIDERRRAGLRATPSAGALLSCAQQWRISREERNPRYGSCFLLLFDDSIFTWLICIGPHCPQATTHMALLTRIPVYYVFTRDIVLLVRRVLVWKAAACSRDPRSLPSRRWERAISGVAGWIQSARENAGRIQPVADLELIQEGATIYXLFCSTRLLFALIGLRLE

SEQ ID NO: 233426 - protein, 42 aa, Zea mays
  unsure (1)..(42): unsure at all Xaa locations
  Clone ID: MRT4577_144478C.1.pep
XVSXGFLQSXGLXVALLADGDAEWWSFLTSLTLVPRSSLFYI

SEQ ID NO: 233427 - protein, 76 aa, Zea mays
  Clone ID: MRT4577_144479C.1.pep
TATCTCVTSLVFTGGPSLTTTRPTVCTCANGTGRATRSSYTTITRVRLCGTAFRVCRLTATALAGRIFTSGTTFTT

SEQ ID NO: 233428 - protein, 257 aa, Zea mays
  unsure (1)..(257): unsure at all Xaa locations
  Clone ID: MRT4577_14447C.1.pep
WGTPGFCRELQAXTHWPPSYKPPQLPMYDSHSDPKQFLMSYKATISSYGGNTAVMAKSFVMAIKNVAQTWYSSLQPGTITSWKKLKDMLITSFQGFQTKPVTAQALFQCTQDHEEYLQAYVQRFLRLRAQAPTVPNEIVIEAMIKGLQPGPSAQYFARKPPQTLEKLLQKMDEYIRADNDFRQRREEAYRFSEIARGFGXXRFHPRHVRSIHSTQNDDRRSQQQRPQYSSQASQASGQQQSYPRPPAPRARGARGFG

SEQ ID NO: 233429 - protein, 84 aa, Zea mays
  Clone ID: MRT4577_144480C.1.pep
MARGPKKHLKRVAAPKHWMLDKLTGVFAPRPSTGPHKLRECLPLIIFLRTRLKYALTGDEVKKICMQRFIKIDGKVRTDITLPA

SEQ ID NO: 233430 - protein, 84 aa, Zea mays
  Clone ID: MRT4577_144481C.1.pep
PNGLLQRKASIVAAIDVTHTRKEHQFQQAQQQSIYFLPRGSVLELCVLQGSNFQQVSAATPRIAWTSLLMLNYRSMYIRNRNWR

SEQ ID NO: 233431 - protein, 142 aa, Zea mays
  Clone ID: MRT4577_144482C.1.pep
WLGRSWRRRTMVVDKRGFQVPLARYKSNNPLAIKDLLQLPIDPLARYKSNNPGRLIVIAPGTPAQVWPRSPPFPLVGWGRREVGRGDGGKWDEGWWVRRCGGRPHLSPFPLAGWGSTRSVTSASSCVRARSVWIDSMVAARA

SEQ ID NO: 233432 - protein, 89 aa, Zea mays
  Clone ID: MRT4577_144483C.1.pep
FFFFFFFFFFFNGNFAPGLTKSQEFDPKSSPSKWSGLRKSNSQSPFWGNGKYLFPVRRFSLFPVFAFKFHGTKFLVLFDGFDTLKFHRA

SEQ ID NO: 233433 - protein, 40 aa, Zea mays
  Clone ID: MRT4577_144484C.1.pep
GVHHRGSTEPIYIVYNLQTVVGFLPKPIKYRCLKDSSNRT

SEQ ID NO: 233434 - protein, 85 aa, Zea mays
  Clone ID: MRT4577_144485C.1.pep
VGGRPQAPGECARHGGVTMTTTIWKRVTSRTPGPTTNTVPTVHLSTPSGTAAWTTLMNTVNWCARGDGFRINHYHTAGRRNQMEG

SEQ ID NO: 233435 - protein, 88 aa, Zea mays
  Clone ID: MRT4577_144486C.1.pep
MSDDTGRTIPKFGEWDVNNPASADGFTVIFSKARDEKKAPAQGHIRDRSASADSKDSRSRDEKMTSYSSRTNASKKWFCCVSPSPTQS

SEQ ID NO: 233436 - protein, 101 aa, Zea mays
  Clone ID: MRT4577_144487C.1.pep
NTNKGGPFHNMGATKIKGGPFRGQTILPCKSNKGGGLPKRGPGSQRQRDHFGKIYITSTLEHWPLWKQKEDPRRIFTLISHWEHRALWKQTGTHIPKHEPT

SEQ ID NO: 233437 - protein, 149 aa, Zea mays
  unsure (1)..(149): unsure at all Xaa locations
  Clone ID: MRT4577_144488C.1.pep
MLFRTKTESKDPEIDTLSFTKLRDKLLALDPLAIDHVVKINKAEAEYWKKSEGYRMGWSDEILGFDCGGQQWVSENCFPTGTLAKPSMKDLEYIDKLLQLIEKEEIPAPGPIEQRWTARSKSPMSPGSSSEEDDXFSWVINLFLSNSMF

SEQ ID NO: 233438 - protein, 88 aa, Zea mays; identical to SEQ ID NO: 233435
  Clone ID: MRT4577_144489C.1.pep

SEQ ID NO: 233439 - protein, 87 aa, Zea mays
  Clone ID: MRT4577_14448C.1.pep
SATRRPTGARRHKHIHRSLPTIGLAGGNIRDQTKTKDLPTSLPNYNGCPRAQARTNHGLMHTANCKTQDAHAPCNNNATGGPPPEHA

SEQ ID NO: 233440 - protein, 93 aa, Zea mays
  Clone ID: MRT4577_144490C.1.pep
QPGGSCSCWSPGTGPQGEEGFFSLGAQKGHQVSLWARKGGGQGPRDWLAPVPGYFFGRVHGSFTRDFFFQYATVITGVSLCVCVCFVRSPVRS

SEQ ID NO: 233441 - protein, 93 aa, Zea mays
  unsure (1)..(93): unsure at all Xaa locations
  Clone ID: MRT4577_144491C.1.pep
MSVAKDDTGRTIPKFGEWDVNNPASADGFTVIFSKARDEKKAXDDQTTTRPXTQRSASADSKDSRTDKMTSYNSRTNASKKWFCCVSPSPTQS

SEQ ID NO: 233442 - protein, 81 aa, Zea mays
  Clone ID: MRT4577_144492C.1.pep
MSDDTGRTIPKFGEWDVNNPASADGFTVIFSKARDEKKAPAQGHIRDRSASADSKDSRSRDEKMTSYSSRTNASVCVQTIS

SEQ ID NO: 233443 - protein, 59 aa, Zea mays
  Clone ID: MRT4577_144493C.1.pep
TIISRVYHKCASPPCNTPIIQIIVFCLDGKVISWDVSIWSKIYHPINFALIFGEPAVRA

SEQ ID NO: 233444 - protein, 110 aa, Zea mays
  unsure (1)..(110): unsure at all Xaa locations
  Clone ID: MRT4577_144494C.1.pep
VNLAVAVAAAPLAAYAAATRHQAIARAQVQRVRLVERCDGSVGNHGSIPQRQSPPGGXPXPPTRSACSRTSCCHRTTTYRSRCARLHVNGKGKRSFMSSIYMCLFPKVID

SEQ ID NO: 233445 - protein, 52 aa, Zea mays
  Clone ID: MRT4577_144495C.1.pep
IFGEPDNLIFFFNHLCPHPFQALFKDSSYCDNVIYFLLFILFIDSFFWLYLK

SEQ ID NO: 233446 - protein, 77 aa, Zea mays
  unsure (1)..(77): unsure at all Xaa locations
  Clone ID: MRT4577_144496C.1.pep
CIRSIQTVYDPFIDADSLFRSSGTTSHQQTRMSELVGLFCQTSHETTGGSATAPDGPXAXGYCRVKEQQRTVPTYYG

SEQ ID NO: 233447 - protein, 100 aa, Zea mays
  unsure (1)..(100): unsure at all Xaa locations
  Clone ID: MRT4577_144497C.1.pep
THPAFTPSLPNKGPAFSDIHRGGRKSTAIASIPATTFAVILSVLFCAAACTGVDNQLPDYLIQGRVYCDTCRAGFVTNVTEYISGATMRLXCKHFCTGKL

SEQ ID NO: 233448 - protein, 58 aa, Zea mays
  Clone ID: MRT4577_144498C.1.pep
RDHPCGARCQNQRPRRSSSADYQSSLSQTLLQALERERPPLHHNHRARNCHAITGPKP

SEQ ID NO: 233449 - protein, 62 aa, Zea mays
  Clone ID: MRT4577_144499C.1.pep
VPLKGCQVLASKMPMVNVEIMNELDGSSEMENHGNLSKVDKLYVYRTTAGVRDDAPNFVQIL

SEQ ID NO: 233450 - protein, 136 aa, Zea mays
  unsure (1)..(136): unsure at all Xaa locations
  Clone ID: MRT4577_1444C.1.pep
VGHLDRDLHLPEEDLHPLEEDLYPLEDPHTRGGNHQEGETHLGGGTHLGGGSHRGRETYQGGETHQGGGIHQRGGGTPQGGGIGQNQGHLLENMTLLDIETNMTDLXPGLPTRGXISDGLHEGILRGADLPRPVSG

SEQ ID NO: 233451 - protein, 195 aa, Zea mays
  Clone ID: MRT4577_144500C.1.pep
MKLVTAFVVLLFSLLPDSSTAEDFDFFYLVQQWPGSFCDTRQGCCFPDGAGKPEAAFGIHGTSLGRSWPTLSCKNRRSFEFWSYEWKKHGTCSNLDPHDYFARALQLRERHDLAAVLADAGIVPSDTDTYPVDRVRDAIAQGTGFVANLECNRDADGEAQLFQVYQCVDREAKDLIDCPLPMPTKCTDRVKLPVF

SEQ ID NO: 233452 - protein, 56 aa, Zea mays
  unsure (1)..(56): unsure at all Xaa locations
  Clone ID: MRT4577_144501C.1.pep
AKRPGLAWLGMDSIWWFDPRIPIWSLHDCCMGPFXSLSVVYRSSKSCXINLFVPKK

SEQ ID NO: 233453 - protein, 261 aa, Zea mays
  Clone ID: MRT4577_144502C.1.pep
MKLAIAFVVLLFSLLPDSSTAEDFDFFYLVQQWPGSFCDTRQGCCFPDGAGKPAAAFGIHGLWPNYAKCRGRHHREGGGLARAVLGADDAFLAAVGRRGKCWPEYCGGGGDGDGGHQLSPWDVRDLVASLGRSWPTLSCKNRRSFEFWSYEWKKHGTCSNLDPHDYFARALQLRERHDLAAVLADAGIVPSDTDTYPVDRVRDAIAQGTGFVANLECNRDADGEAQLFQVYQCVDREAKDLIDCPLPMPTKCTDRVKLPVF

SEQ ID NO: 233454 - protein, 87 aa, Zea mays
  Clone ID: MRT4577_144503C.1.pep
SPCGQLLACLSSHFTGRARAPLRAQPFFPAVPLRKLRCLLRRPPWKPARPALLPRPWPVLPARFRLSRPALVAVLQLGFSPARSAFH

SEQ ID NO: 233455 - protein, 74 aa, Zea mays
  Clone ID: MRT4577_144504C.1.pep
NPKYIDPFKENLKGWGTFWCTPILKKNSARTKIRDGQKHILKKRLIQKKLGGRTLRTLKKKKSKKTCMGSPRGF

SEQ ID NO: 233456 - protein, 174 aa, Zea mays
  Clone ID: MRT4577_144505C.1.pep
MAPMKLYGAVMSWNVTRCATALEEAGSDYEIVPINFATAEHKSPEHLVRNPFGQVPALQDGDLYLFESRAICKYAARKNKPELLREGNLEEAAMVDVWIEVEANQYTAALNPILFQVLISPMLGGTTDQKVVDENLEKLKKVLEVYEARLTKCKYLAGDFLSLANIIQGLKSSY

SEQ ID NO: 233457 - protein, 127 aa, Zea mays
  Clone ID: MRT4577_144506C.1.pep
VHRSIVKISNPLGERSVQSLLLHYNRHWSWSLSKSKTARARSRRRLKNTGGAKKKSPVRQTAGAKTVVELQEEIPAVPTSKEKIHGTVNLTNPPVCTSKAALGAAVTEGAGANRITPFAAKVLSFFL

SEQ ID NO: 233458 - protein, 283 aa, Zea mays
  Clone ID: MRT4577_144507C.1.pep
MKNVAKCDTWCELQNPANHRVFERKLRPKPSGGGHVCLGVTRVESWAQRIPRQTNRVEGEERRGWVWNTMAPMKLYGAVLSWNVTRCATALEEAGSDYEIVPINFATAEHKSPEHLVRNPFGQVPALQDGDLYLFESRAICKYAARKNKPELLREGNLEEAAMVDVWIEVEANQYTAALNPILFQVLISPMLGGTTDQKVVDENLEKLKKVLEVYEARLTKCKYLAGDFLSLADLNHVSVTLCLFATPYASVLDAYPHVKAWWSGLMERPSVQKVAALMKPSA

SEQ ID NO: 233459 - protein, 61 aa, Zea mays
  Clone ID: MRT4577_144508C.1.pep
KALGHLTIGLPSFETVLGTITRYSSNLSEDAEGSMLDLVIQPKHIACTQGSPIQKHPTIGH

SEQ ID NO: 233460 - protein, 214 aa, Zea mays
  Clone ID: MRT4577_144509C.1.pep
MAPMKLYGAVMSWNVTRCATALEEAGSDYEIVPINFATAEHKSPEHLVRNPFGQVPALQDGDLYLFESRAICKYAARKNKPELLREGNLEEAAMVDVWIEVEANQYTAALNPILFQVLISPMLGGSTDQKVVDENLEKLKKVLEVYEARLTKCKYLAGDFLSLADLNHVSVTLCLFATPYASVLDAYPHVKAWWSGLMERPSVQKVAALMKPSA

SEQ ID NO: 233461 - protein, 67 aa, Zea mays
  unsure (1)..(67): unsure at all Xaa locations
  Clone ID: MRT4577_14450C.1.pep
TPFKGNKEWVXKXQGGVMMKGALLRECGGQNEGKYDRLILVSVKCGRXVGQLMSIDGPLKCIVGQPC

SEQ ID NO: 233462 - protein, 262 aa, Zea mays
  unsure (1)..(262): unsure at all Xaa locations
  Clone ID: MRT4577_144510C.1.pep
MMLLFLKKKKKKTCVESWAQRIPKQTNRVEGEERRGEERRGWVWDTMAPMKLYGAVMSWNVTRCATALEEAGSDYEIVPINFATAEHKSPEHLVRNPFGQVPALQDGDLYLFESRXAICKYAARKNKPELLREGNLEEAAMVDVWIEVEANQYTAALNPILFQVLISPMLGGTTDQKVVDENLEKLKKVLEVYEXARLTKCKYLAGDFLSLADLNHVSVTLCLFATPYASVLDAYPHVKAWWSGLMERPSVQKVAALMKPSA

SEQ ID NO: 233463 - protein, 128 aa, Zea mays
  unsure (1)..(128): unsure at all Xaa locations
  Clone ID: MRT4577_144511C.1.pep
GTLIVFESWDLLQEFELQHEVEDAHQWILVPSGQFPTRSVYXSVFHGSVQFLPSNLIWKTCLRRKCTCFLWXRLHLTVXWTTDTLARCSLPHPEHCLLCDQLEENTNYIILSCDFARQFLHHLLGIGG

SEQ ID NO: 233464 - protein, 138 aa, Zea mays
  Clone ID: MRT4577_144512C.1.pep
FSSYHKIPHKNLQSAKYYFSCSIFIQSRGFTIIILCYNKPSLVPQNDDINNLYNLPWNKKPKPRFPTVFIAAGHTHGDPNENPLGASQKSLILREQGCITLAPAGLPAHPERLAWSRLDPRSGQQRPHWGRNTSSPLK

SEQ ID NO: 233465 - protein, 59 aa, Zea mays
  Clone ID: MRT4577_144513C.1.pep
LIQCQDARMVESVPCSMVPCISMPGMSLLTSRQLSLIFSFWHRGPRFQDQVYGLICVLP

SEQ ID NO: 233466 - protein, 49 aa, Zea mays
  Clone ID: MRT4577_144514C.1.pep
MWAMGRIKKVFKVFKKKKKKKKKKKKKKKKKKKKKKKKKKKIYKKNPPP

SEQ ID NO: 233467 - protein, 132 aa, Zea mays
  unsure (1)..(132): unsure at all Xaa locations
  Clone ID: MRT4577_144515C.1.pep
TTRTLGHPIFWPDDSPRDGGTLKLAVQLTQEDPDKPPTDRRPSNTHDTIIYSYASNRLHNLQNQCSSINKTAGLXTLIHALPYSPNPNLPATTTATRQSYVHIQDHQPSALPIPDQRPTPDDYIPQLSLQDR

SEQ ID NO: 233468 - protein, 130 aa, Zea mays
  unsure (1)..(130): unsure at all Xaa locations
  Clone ID: MRT4577_144516C.1.pep
TGSSAFGLAPTAICPVTHAGYTKNGPTFGGREGPSMTCTIYHILVLEMPVHSDIGGHKPEGPDLLQYKKISGGVLRAATTMRLLTEGMHHHVINLVWHCVIVXLAILYLSASDCMLINRCPPXIAQAKLP

SEQ ID NO: 233469 - protein, 280 aa, Zea mays
  unsure (1)..(280): unsure at all Xaa locations
  Clone ID: MRT4577_144517C.1.pep
MSLYMLFFIAIFLNYGVPLHLIRELYETFRXLRIRIADYVRYRKXTSNMNERFPDATSEELDVSDATCIICREEMTTAKKLLCGHLFHVHCLRSWLERQHTCPTCRAPIIPADNGHAVSARQHGAQAGVQPAAGTATPSSEGAPGENMSRHQAKLEAAAAAASLYGRSFVYPPANTLKRSVPPQPASSTPQSEASSSNHQSQKDQEMQSRNSSDGLVPLPLNADGAVGSGTSTRDLENSLQKAQENFIKSQIEMLQIQLQMVQRGAAGLSSSENTEHTED

SEQ ID NO: 233470 - protein, 127 aa, Zea mays
  Clone ID: MRT4577_144518C.1.pep
GGGKTTIYFLAAPLKNLKGVCFSITFFFKKVGVILGKICPPKFGACFCTVCDGPPLLKKGRFWFFPPFFFFTLLAPYPPLGFALSGNYFQKKKNTPQGLGPGSQKKKKKKKKNPKKKKKKHKKKKKK

SEQ ID NO: 233471 - protein, 132 aa, Zea mays
  Clone ID: MRT4577_144519C.1.pep
PWLVLPSKGFHVQKPPHTHRERETSGAGNKALIVKHKLTGLPKIQARHHVTVSPSPRYRQSLAFFCPILIAAYLQIQLCAHQYSPYYYTTMQKCLFTDSVILLCAQYSRYWAAQQRHAAPFAVGSVTSQSGS

SEQ ID NO: 233472 - protein, 241 aa, Zea mays
  unsure (1)..(241): unsure at all Xaa locations
  Clone ID: MRT4577_14451C.1.pep
MLHTCTDSATAKRTLHVRYKLLLRAIPTYHAQHTHASTRPGTSRSPGPAQGVTPPAPAPPPPXPPKGVPPPAKPPNGIPPPPPPRGPNPPTPPSGPTPPTPPPTPPSGPVTPLKTPPPLLPKPPPYPPPTAGKPGRSPMPPTPTKRFFLSATPATPEPESSFLVPAAAGSDAVLPVDVEEAPGIGTALAAAAVAAACSTSATQSTTKPMLPLMAIVSVIFLCAFSLMLFRVMMRDRSGLRV

SEQ ID NO: 233473 - protein, 37 aa, Zea mays
  Clone ID: MRT4577_144520C.1.pep
LEHLRARASGTEPCCHDQQGLPSLLLVYELHSSSMPT

SEQ ID NO: 233474 - protein, 121 aa, Zea mays
  unsure (1)..(121): unsure at all Xaa locations
  Clone ID: MRT4577_144521C.1.pep
FPPPVPGFLFFSGGHSEVEXTQTLNPLTQGPNPWPVSFFYGGGLQNPCLKTWGGHPAKVKAAQDAFFLRPKANSLGQLGKYPSPGEAPEAKEGIFVKNSSFYFFARPSPGIPPPPPKKRVA

SEQ ID NO: 233475 - protein, 176 aa, Zea mays
  Clone ID: MRT4577_144522C.1.pep
TSHGWFSSQKAFMYRNHHHTHTETSGAGNKALTVKHKLTGLPKIQARHHVTVSPQVSPILGFLLSHPHRRLFTDSSAVCAQYSHYYYTTMQECPVHSSVCSVFLLLGGPAAPRCTICSWICNISIWLLIKFSCAFCSEFSRSLVLVPEPTAPSALRGRGTKPSLLFRDCISWSFCD

SEQ ID NO: 233476 - protein, 86 aa, Zea mays
  Clone ID: MRT4577_144523C.1.pep
SLLVIVFRLEGSGRNFLPVGYVFKQVVAALFCFLFFLFVFFFFFFFFFFLFCFGHTLMKFIAIIKKQKRKTVLFEETKKVPRAEFR

SEQ ID NO: 233477 - protein, 152 aa, Zea mays
  Clone ID: MRT4577_144524C.1.pep
KIIIIVYTIAPNNWFAPNMFPICTYSSSAHNSSFCMQAKKEHSALIRTTSKSIKSIWTHLTHWLGYIAAACRHFYPLKEIPKGLLSLGLFIYLFISSGSLKPWINTTHAFKQTKGDKFYCKFTYKTQVQQHNLFSAGYLQGMIYQNKQEDMN

SEQ ID NO: 233478 - protein, 110 aa, Zea mays
  unsure (1)..(110): unsure at all Xaa locations
  Clone ID: MRT4577_144525C.1.pep
THHVKLTINHLSPSAANILALACALSMPFIVSHNTMHFIIPHCSLATSAIIPQLLPPVTSMXYXHPSLQAYMLLLTLAASTLHQPITQLQQQSLAHITLQTIATHQQHLQ

SEQ ID NO: 233479 - protein, 42 aa, Zea mays
  Clone ID: MRT4577_144526C.1.pep
VFSSSYRGEILRVATNLHKTGRRPVAPSLAVVKRQTACPDQH

SEQ ID NO: 233480 - protein, 214 aa, Zea mays
  Clone ID: MRT4577_144527C.1.pep
SRCLCLHHRRSAACLCVGSPDLLFALCLRSYSPVFSSTAPVVSPTTPTLFLHRSTPCSALSPSPRLSSPVFAGHTLNLATVGLTSPPNRVRRSLAIVYLYAQHETARPTASSRHRPAGTELHPPRRRPPSPSSLCTRHQLPGAHRHNALVARPPSHAQTLAPVRHLGTSPSPVLRWLSTSLAVFDLQPRHHRALHPFEEHLEKVMFEGVHFSAC

SEQ ID NO: 233481 - protein, 109 aa, Zea mays
  unsure (1)..(109): unsure at all Xaa locations
  Clone ID: MRT4577_144528C.1.pep
TIYMETHQLVLQIAWLKDMVECYPFLKHGLVLRNPYITTLNVLQAYTLKRIRDLNFNVTLQPPLFTDLPDXRSSAXLLKLHPAMLVTIALXDTLILTMTGIVFCMQNTS

SEQ ID NO: 233482 - protein, 129 aa, Zea mays
  Clone ID: MRT4577_144529C.1.pep
MLILVIKMPMSPPPSLSCLPLCWLAGSTVRRATVCAVLKVLLTGLLVDSASRVSRYADTFSPSLDSMLSALTITAPLFAGVRRAYAQPRHRGTYLAFKPCSPQPSHRLPLRSARNRSPYSLVASPFCRH

SEQ ID NO: 233483 - protein, 50 aa, Zea mays
  Clone ID: MRT4577_14452C.1.pep
TSGEHGHFQMLQENGENRTPRRSASSCQQRQSPIHDQTCSDWFINSYMDG

SEQ ID NO: 233484 - protein, 179 aa, Zea mays
  Clone ID: MRT4577_144530C.1.pep
GPTHRSSRRQRQSCLPPRRHFFSIARLRAQRSHHHRVSPRRCSPGIRSTSPPWDLPRLQTVFAAAQPSSTSTLSTKPLALQPRRVTVLQALSSTHLGEGHRPLLHCALGINFLVHTDTTLWSRALHRTLRHLPLFVTSGLRRHPYFAGCQLRWLCSTSSHVTIVPFIRSKVRPPSFDLQ

SEQ ID NO: 233485 - protein, 124 aa, Zea mays
  Clone ID: MRT4577_144531C.1.pep
EGCPAWAGVRLSLPSRFPFKFHLPRCKATGSARKEGSTRHPVRLRKDLHARGTRPASGRVEMTGRTSAEQRQGTRTLHEAATADLQMEREERRLNPHALRQVKAPQLGDGLARSLVKRLMAKPP

SEQ ID NO: 233486 - protein, 53 aa, Zea mays
  unsure (1)..(53): unsure at all Xaa locations
  Clone ID: MRT4577_144532C.1.pep
KARGLGSDHWSSGSSGPLDFSFLHQNREXLVMIVTVIYLVCTACLVHILGIHM

SEQ ID NO: 233487 - protein, 48 aa, Zea mays
  Clone ID: MRT4577_144534C.1.pep
RTLRWLTSGLHFKPAHFNFNRETIVLLRAVRLRTSPPTCEKDGDDQDD

SEQ ID NO: 233488 - protein, 70 aa, Zea mays
  Clone ID: MRT4577_144535C.1.pep
APRLPPLARLVGRAGSDSAVLPPGSRAVAAPMPCAPLLAPSPQALAWRFTLANACTDCCFCRVCSYPHAL

SEQ ID NO: 233489 - protein, 75 aa, Zea mays
  Clone ID: MRT4577_144536C.1.pep
QISCWDSVKNKVNEKIKSVQGIGEWGVFNFFPPDFVKGVEMFGFLFPKGVRVILVKKIIFSFFGGGGGKKKKGGG

SEQ ID NO: 233490 - protein, 108 aa, Zea mays
  Clone ID: MRT4577_144537C.1.pep
PLEPAGSKKKKKKKKKLKKKKKKKKKKKKKKKKKKKKKNPFIGRTKGGGKGGGFWEIGGKEFGFSADKVLSPSPGSGFFRKNKKGGGFLPRGRKKVRRGGSPPPGNKN

SEQ ID NO: 233491 - protein, 380 aa, Zea mays
  unsure (1)..(380): unsure at all Xaa locations
  Clone ID: MRT4577_144538C.1.pep
MSVAGESTTAVVVNGEEHEAKSPEDDEALTTASPAAEAVSTSGCDKTSVGSGCNARSCNGGGAGGSGTGSDWWWRQDNGGGGSGGGGSGGVKDYVMEWIRSEIKKERPKNDWIAGPSAVTPVAPTERKKPKRRAREWWREEYAEELTKKQKRRALAKSKSDAGAMSGLQWWERDCEFEEKGHSRXDDEKLEPEEQQXNGNSNSSISWWVDGVRRSSRDWASGEFVPKSGGAVSSTPSMRGTVCYVAPEYGGGGPLSEKCDIYSFGVLLLVLISGRRPLQMTTSPMSEFEKASLISWARHLAQVGRLLDLVDPALQDVDRDQALLCITVALLCIQRSPARRPSSAEVLDMLAGEGEPPPLPIEFSPSPPGGFPFKSRRKGR

SEQ ID NO: 233492 - protein, 98 aa, Zea mays
  Clone ID: MRT4577_144539C.1.pep
DRARRFSERKQSQPKGYSKKNPPSPPSRRPGSASPHPTSASSPPAIYLSHNGGAHVSHRLSVAAPDRQHHRVPARHRRHHPAPRDRLLPHRPHHPPLR

SEQ ID NO: 233493 - protein, 86 aa, Zea mays
  Clone ID: MRT4577_14453C.1.pep
PSPCRSPAHQFASSSMRSSLLVTAEKAVQEPPILQVHLIGGVYTCPHPAFSAPGRCLSTSVAETEAFAKRFVHRMSHVRESLQLSL

SEQ ID NO: 233494 - protein, 55 aa, Zea mays
  Clone ID: MRT4577_144540C.1.pep
KFLKRGALFDLKNGFGKFMVPPPPMHGWGYKAPKTLKEKKLGFLFFLGRNKIFFT

SEQ ID NO: 233495 - protein, 54 aa, Zea mays
  Clone ID: MRT4577_144541C.1.pep
ISVYRKHHTFTPLTIYIPKFNEHLFIYIYARKPSMSTPGDIGGTGHGDTSFPPG

SEQ ID NO: 233496 - protein, 82 aa, Zea mays
  Clone ID: MRT4577_144542C.1.pep
PSQEKHEKGKNPNFPNLGELGWTLTPKRSHTKNEWPALFNNLTKKKWHVQNSKSNVCDIVLTPKFSPNIKGVGLLKNPLIYK

SEQ ID NO: 233497 - protein, 250 aa, Zea mays
  Clone ID: MRT4577_144543C.1.pep
MDVDSEPSAESKPTQMDLEDQADAKGKADAAEEEKGKGKGKGDELADSIGSLSIGPGRANFKKKPVIILVIGMAGTGKTTFMHRLVCHMQASANMRGYVLNLDPAVMTLPFGANIDIRDTVRYKEVMKEYGLGPNGGILTSLNLFSTKFDEVISVIEKRADQLDYVLVDTPGQIEIFTWSASGAIITEAFASTFPTVVAYVVDTPRSTSPVTFMSNMMYACSILYKTRLPLVLTFNKVDVAKHEFALEWM

SEQ ID NO: 233498 - protein, 65 aa, Zea mays
  Clone ID: MRT4577_144544C.1.pep
GTVATRELQVVLPLGRVTAMVDRTGVGRKKDRPAGGGGRVEQARESPLRIVGQKEEEGTRAGGRG

SEQ ID NO: 233499 - protein, 51 aa, Zea mays
  Clone ID: MRT4577_144545C.1.pep
MVVLMQKPWLPVDLRLPAGPQASLGILAFEAAAAMSKLLSLNRSLSDPEVS

SEQ ID NO: 233500 - protein, 66 aa, Zea mays
  Clone ID: MRT4577_144546C.1.pep
WLLWCYNKKHNTSILLMFKAKILGRMVQQTQKLCHGSTTCLCDDLNNFFLFMNVFCFVFGTVLLDS

SEQ ID NO: 233501 - protein, 85 aa, Zea mays
  Clone ID: MRT4577_144547C.1.pep
FISKLNVRARARGTLYGLLRPPRGSPLARLRGAFCTDTDIMKVTSTKGGFTVPTPKEFKETLDFEVYLGKTRHIKRQGMGHTSGA

SEQ ID NO: 233502 - protein, 76 aa, Zea mays
  Clone ID: MRT4577_144548C.1.pep
HAFEVILVQRKKEADNEKHVRRVCCEVVLVRLRNSPLFSSPYRNGDGPTVLESYLAWEWAGAHFFTHRRWRMKRAL

SEQ ID NO: 233503 - protein, 55 aa, Zea mays
  Clone ID: MRT4577_144549C.1.pep
RFYSISSFLFFFRFSFFFFTQIFRSSYNYQRLNLTTQTQSSRKCCHASHARAQSS

SEQ ID NO: 233504 - protein, 73 aa, Zea mays
  Clone ID: MRT4577_14454C.1.pep
FLYPSFAFSHGGGSLPSLSHTLHQKSSHVLGDGVSRSALSHMHPHMSALKAEIEPILGGESPWQIRYCVLSPT

SEQ ID NO: 233505 - protein, 116 aa, Zea mays
  Clone ID: MRT4577_144550C.1.pep
SSGNNAEYFFFFFFFFFFGFFFFFFFFFFFFFFFWPRGKPLFWFQESQTGKGSTGPQTPLGYSPFYGQKKKQVKPGSQRGTSLEPQHSAPKEGPRFPDPLFWAKEEPRGPWGGTTG

SEQ ID NO: 233506 - protein, 295 aa, Zea mays
  Clone ID: MRT4577_144551C.1.pep
MEILSRTFNCQIGSMPFTYLGIPLGLSKPRIQHFLPLIQRIEKRLSCTSNFLSQAGRLELVNSVFSALPTFLMCTLKILVASIKQIDAYRKHCLWRGNDVNSKKPPLAAWNMITQPKSSGGLGVVKLETHNEALLLKYLHKFFNNYDLPWANLIWNNYYRLNTRNMLRRKNMTLESYSCENCIWQKEETLYHLFLRCNFAKACWNSIGMTPPRIANPEEASATLKQQLNVPFSMEIVILMTWSIWKCRNAWLFENKDPTVQQCKHEFTKELLLVIHRARGRYDSSIPNWLQQWQS

SEQ ID NO: 233507 - protein, 61 aa, Zea mays
  Clone ID: MRT4577_144552C.1.pep
RIPCLVRAMAEEQSNPQHHLAEEREVMVEHQQTRRAPKLMYLDFVHVADAQARVCLAGLYR

SEQ ID NO: 233508 - protein, 76 aa, Zea mays
  Clone ID: MRT4577_144553C.1.pep
CYVFHSPVSHSPPQSRTRRLPLPPPSHTLHSSAAPDAFQSIPHHIFHISLCRLTGRIPLLLNPKDHLSRCKLPIPT

SEQ ID NO: 233509 - protein, 128 aa, Zea mays
  Clone ID: MRT4577_144554C.1.pep
MARFTILPLPYALILVAAACSVLGYVPYDAAPRSTGGAGHHASARTYIVLVEPPPAHTHEDDEAAHRRWHESFLLSSGAGAGSRRRVRHSYTSVLSGFAARLTDDELAAVSRRPGFVRAFPERRVQLM

SEQ ID NO: 233510 - protein, 168 aa, Zea mays
  Clone ID: MRT4577_144555C.1.pep
LVRSQALCLSVFPVAAPSHIWAALAPALVQSPPPFSPVTSATPSPALLRLFLLTAATCPRPSLIGHKSATSSPSTRRILGARSNPLREDTGWSVVGEVVLFAGLPRSDDVLRDVPVSVMASSKEHGEVRQGRISMLWRVSGEVSLVTTWSYAVARGWRAMARTQFPGR

SEQ ID NO: 233511 - protein, 844 aa, Zea mays
  unsure (1)..(844): unsure at all Xaa locations
  Clone ID: MRT4577_144556C.1.pep
WCRNGRTRALLRQSFLSSTPIVSCRSQAYLGILPHFGLWKYLYHCRPXDGWGQHQLVGGASLEMRRRRKTEYVDIPLKDIIKGWRLEWFIVETPCESLPPRSGRQPDVRTPSWVESRTPLEVTEARVLLAEICLLKEKGLTAEAVVADFVFKNIQHLKDRAYPAYLYDDINDGTRVTNKRIPTADLLSRLDMILRGRVSNAGAPVAYSAWNLPSHRSFFNFVSNPPARDGGLGLRVRPSPEDIEALISALRSLPKDERQTHFEMSASTNDEEIDVVLNLLLVGMERIWKPEEVRPKHPRRVSLPTAPVEEKRKKRRLRRLLRLDHGVGPSVPVCDEVPAEVLPEVDPNGCAHAEVDPNGCDCPAVDPNGCDHASAVVHIFVEDEEEEVPLIQKNSQHYRGSKGDSDIPSPALLALVSLQELSISDFDQTLEEVVPEDMLSEPTADDMMAICLEIPAAGLESSMLRCWFGLPDSHGGDRGSFSLRGGCCRGPCPEGGASGYLAPEDLAGSDPALVGSASCNPAPEGVVGSDPALVGGASCNPAPEGVQVGEPNARSLVSAGGAELTPDNVLQTVPVDLPSSSYDVAPPSLGLPSFLSNLQLFRLINLFLIVYPSSAASSDMARRCSELEEKHLQSQADSTRRYSDLEEKYSQGQTDLARVSASLDDARSLNSSLNAQLNSERATHEEEKRAFAASRDNLDMLYRDASNSLTILERSHRFTMSDLDHHHRELQVSQDEVLRLRQLVSSKDSIIKDLRASKKLVAQELEAARLATKVSEDNCAILKAQRDKAMDKAIHEGRILMRRPGVVVPDDIVADVKVAPDASSRPSSSLAPVENIANRDVSMQ

SEQ ID NO: 233512 - protein, 76 aa, Zea mays
  unsure (1)..(76): unsure at all Xaa locations
  Clone ID: MRT4577_144557C.1.pep
LSGLDLSFLDLSYVDFTCAFHKNGLFSRAYLQCTKFRDVDAEGSIFHNATLRECXFTAPNLRGALLAVACLHSANL

SEQ ID NO: 233513 - protein, 76 aa, Zea mays
  Clone ID: MRT4577_144558C.1.pep
MASKVRVLLNPKYQRNGTKSYVHLLRKYGFDTTLDGPYFHASHVQQQGKFTATGQKPVGGRARVHRALQKKVDGQT

SEQ ID NO: 233514 - protein, 43 aa, Zea mays
  Clone ID: MRT4577_144559C.1.pep
YIMNSSKATNELMRLTSSEASESRPRRIMGKRISRRKNRKTSG

SEQ ID NO: 233515 - protein, 102 aa, Zea mays
  Clone ID: MRT4577_14455C.1.pep
VFKRGVETGLFPMAKKGGNGRGFKVIKVGKAGDFPVKTLSKGGKWTCKKAPNRAQKGPGKTMEIAPSQGYGKSALNLPLGWCLVEVFFFFFFFFFFFFFFFF

SEQ ID NO: 233516 - protein, 116 aa, Zea mays
  Clone ID: MRT4577_144560C.1.pep
IRPPAAHQHRQHAPPQRSPGQSTGPREQSRRAPAGRRRATGQGCGRGTRPPPREAAAARRASARPPPPGTRHKRHGTDEADTGGADATAPVGPAAAHSWGAPRRRWWRTRRRTRVP

SEQ ID NO: 233517 - protein, 169 aa, Zea mays
  unsure (1)..(169): unsure at all Xaa locations
  Clone ID: MRT4577_144561C.1.pep
GYPGPPLEFFFFFFFFFFFFFFFFPRSPFWILPGGKKPIPGKKXPGPPPPXGLNLPGXQPPPALFWPSPPPXGLRFFTGPQPXGFFPPLGPXPFYLGPGGQGPXPPGGRPAPFPPGGNPPGPGPGGKPKGGPXPYPKSPFGIGGAQPNGPIPPGPEQEGPPRAQFLAPG

SEQ ID NO: 233518 - protein, 194 aa, Zea mays
  unsure (1)..(194): unsure at all Xaa locations
  Clone ID: MRT4577_144562C.1.pep
MAVTVEKGSMGEPAQLLERSRAVTLHGRDRKGRAVVRIVGNYFPARALGXPEIGDREFVVVYMHSRVDRGHNFPGVGAIRGAYETLPAAAKERLRAVYFVHPALQSRIFFATFGRFLFSSGLYEKLRYMSRLEYVWAHIDKEQLEVPECVREHDDELERRPLMDYGIEATETRCMYDAASMDTSASLHSLRCVS

SEQ ID NO: 233519 - protein, 116 aa, Zea mays
  unsure (1)..(116): unsure at all Xaa locations
  Clone ID: MRT4577_144563C.1.pep
MKPCSYLLPTRTQKARRTGGGNRDATVQVSRRLGDAAERVQGRRGVHGRGVIHAAGLRRLDAVVHQRAALQRAVYFVHPALQSRIFFATFGRFLFSSGLXEKLRYMSRLGVVWAPL

SEQ ID NO: 233520 - protein, 209 aa, Zea mays
  Clone ID: MRT4577_144564C.1.pep
MAVTVEKGSMGEPALLLERSRAITLHGRDRKGRAVVRIVGNYFPARALGGRAEEALRSYLRERVLPEIGDREFVVVYMHSRVDRGHNFPGVGAIRGAYETLPAAAKERLRAVYFVHPALQSRIFFATFGRFLFSSGLYEKLRYMSRLEYVWAHIDKEQLEVPDCVREHDDELERRPLMDYGIEATETRCMYDAASMDTSASLHSLRCVS

SEQ ID NO: 233521 - protein, 87 aa, Zea mays
  unsure (1)..(87): unsure at all Xaa locations
  Clone ID: MRT4577_144565C.1.pep
HASGLDDPVIKSLTEKYGKTPAQLVLRWGLXRDTVVIPKTSKVERLQENFDVFGFDISGEDMERMKAVDRKYRTNQPAKFWGIDLYA

SEQ ID NO: 233522 - protein, 61 aa, Zea mays
  Clone ID: MRT4577_144566C.1.pep
DTKAPPSDLLYVACSGDNVCLYMHPHQHTKDIQSVAPKAYCRLYVPRQRRWAGAISTTRFL

SEQ ID NO: 233523 - protein, 311 aa, Zea mays
  Clone ID: MRT4577_144567C.1.pep
MAASVALSSGHRMPAVGLGVWRMEKADIRGLIHTALRVGYRHLDCAADYQNEAEVGDALAEAFQTGLVKREDLFITTKLWNSDHGHVLEACKDSLKKLQLDYLDLYLIHFPVATRHTGVGTTSSALGDDGVLDIDTTISLETTWHAMEELVSMGLVRSIGISNYDIFLTRDCLAYAKIKPAVNQIETHPYFQRDSLVKFCQKHGICVTAHTPLGGSTANAEWFGTVSCLDDPVIKSLADKYGKTPAQLVLRWGLQRDTVVIPKTSKVERLQENFDVFGFDISGEDMERMKAIDRKYRTNQPAKFWGIDLYA

SEQ ID NO: 233524 - protein, 136 aa, Zea mays
  unsure (1)..(136): unsure at all Xaa locations
  Clone ID: MRT4577_144568C.1.pep
GTPRAGRAGPSLQPAHRRTNPLQGLHVSVTGVAFLHHGGWAAERAAMPHRHHDAAGGNEAPSPRPSAAGCYAFLTRSHRSAGAYRRLDSARALEAEADAAVAAVRVEVGTAAKGRARSVXHVDPAVLEAGPXRRLL

SEQ ID NO: 233525 - protein, 284 aa, Zea mays
  unsure (1)..(284): unsure at all Xaa locations
  Clone ID: MRT4577_14456C.1.pep
RPGRGSLRYFTGSPSPARAQHPAAGSSSSSTAXPCSPSPSPMALDLHLASTTEHLPSLHAFWWSSSSLSLLCQRSSSIPXTAHRSPDLDSNSASSPTSSLLPVAARPWRPAAPPLSNLQRDPSPCPTRAPPLLHSMAGAPSSSVPMAAAPPAPPGRSSXPSRELGPSPSLVSSAPPPPPRTSGRSSSSPCPLTTDTVXSSGPCSPSVRASVRPPRRSXSSPMPSSLGVPPMVAPSSKLASTSHHPSSSSCWTLLAPRCGPALDSCSLTHAISPVRLCAPLPLHC

SEQ ID NO: 233526 - protein, 111 aa, Zea mays
  unsure (1)..(111): unsure at all Xaa locations
  Clone ID: MRT4577_144570C.1.pep
MDPVATWGLTPLAVSDPEIYYLLEREKRHQLYGIXLICFENFNFFARMDALWSALTNKYSDGMPCARFYGVNDFINEIENLCRSRPLSYFRLCPASWGVNVQSLLGLPSQL

SEQ ID NO: 233527 - protein, 211 aa, Zea mays
  Clone ID: MRT4577_144571C.1.pep
AVSWNSMLTGYSHHGLSSDALKFFRCMRAENIRTDEFGLSAALRSCSDLAVLRLGRQVHRLGVQSGFASNDFVSSSLIFMYSKCGVLGDARKSFEEADKSSSVPWNSMMFGYAQHGQAQTVTDLFNEMLDLEVPLDHVTFVALITAYSHGGLVDEGSEILNTMETRYKIPMRMEHYACGVDLYGRAGQLDKAKELIESMPFQPDAIVWMTL

SEQ ID NO: 233528 - protein, 58 aa, Zea mays
  Clone ID: MRT4577_144572C.1.pep
RLTKIRNLSPPPVHLPFTKKMRPAFAINPIFPINQQMLCLIRITNTHTYGLSPPILCP

SEQ ID NO: 233529 - protein, 112 aa, Zea mays
  Clone ID: MRT4577_144573C.1.pep
PTRPDGRTSVMGTPTETAILEFGLEVEKYTKVEHADAKKLKVEPFNSVKKTMAVVIASPNAAGHPRAFLKGASEVVLSRCGSVLDGTGAAEKLTEAKAKRVASAIDSFACEA

SEQ ID NO: 233530 - protein, 85 aa, Zea mays
  Clone ID: MRT4577_144574C.1.pep
MSLNKPADKKSAAEEKVLMTTVVMKPKCEKRLPASKSFGTEGGEKKVKKMAKKIVETYKIYIFKALKLVHPDIGIFFNAMSMMNC

SEQ ID NO: 233531 - protein, 79 aa, Zea mays
  Clone ID: MRT4577_144575C.1.pep
RHCSRCGASPWSACTHHRARPIQRSACGRYASTCRIRIPWIFCSLCQMTHPISFLENFLFAVFFVFFFLFFPRVRARLR

SEQ ID NO: 233532 - protein, 126 aa, Zea mays
  unsure (1)..(126): unsure at all Xaa locations
  Clone ID: MRT4577_144576C.1.pep
NLTLPXGRXXGYHKGSHVSAPAGERGGRGCSSAAGRARAAPRGRCRTPSSTRQVLCGIPAPTARAARRLPDGQRPDLAPYAVHEQQHASLRTDLLSDVLRLSAFPLTGPPTDRDQPPSPALREVHT

SEQ ID NO: 233533 - protein, 78 aa, Zea mays
  Clone ID: MRT4577_144577C.1.pep
VIFALAQSGLCAAFNRTTNKRICYLNISPDEVIRSLFYNKNNESLITVSVYESDCFSSLKCRTTPIEYIRRGQLKDGF

SEQ ID NO: 233534 - protein, 254 aa, Zea mays
  Clone ID: MRT4577_144578C.1.pep
MSYYGSSSSGGRSSRRVDYGRTYVVRPKGRHLATIVWLHGIGDNGASWSQLLDSLPLPNIKWICPTAATRPVAAFGGFPCTAWFDVEDTSIDGRDDIEGLDASAAHIANLLSSEPSDVKLGIGGFSMGAAVALHSAACYAHGKFTSGIPYPIALNAVISLSGWLPCSRTLRSKMEGSHIAVRRAGSLPILLSHGRVDEVVVYRDGERSAEVLRNSGFSFLTFKPYNGLGHYTIPEELDDLCKWLSSSLGLGRSR

SEQ ID NO: 233535 - protein, 77 aa, Zea mays
  unsure (1)..(77): unsure at all Xaa locations
  Clone ID: MRT4577_144579C.1.pep
MPPRAPPRRQPAPDAGGPGFGDSVRVLLALAGLYAVMSLLDYRVIHMRHVAPLGADAPRXNFSDGRVLHHLRRLAVD

SEQ ID NO: 233536 - protein, 186 aa, Zea mays
  unsure (1)..(186): unsure at all Xaa locations
  Clone ID: MRT4577_14457C.1.pep
KPLKTVFPFFKGEGFPLFRALRKFWGGGFFFLFPKGGVFFRGGPPFLPTFFFWGVFWGYPAPIQVGVGGAPWARIRVFSPPPQDFFFFPLPAWVFQKRKFFIQKAPPLVLILRGGXNMAGPLNFLKPLNYAPPLVFSLPAKIFWAPPPPLCFWGGVANLPPFFRGVFLNFLGLFPPPNKKKNFFGG

SEQ ID NO: 233537 - protein, 115 aa, Zea mays
  unsure (1)..(115): unsure at all Xaa locations
  Clone ID: MRT4577_144580C.1.pep
GARKGRRRPPAPPGGGPPPRGPRGPPGPPPPRSETQAPGPAWARRGPPPKGKRGGLPPWGXNGEPGPPGGSPVVGGHKRLGPPPXPGIKGRGVPPLVGGLGNVPCFSCPKLINVF

SEQ ID NO: 233538 - protein, 89 aa, Zea mays
  Clone ID: MRT4577_144581C.1.pep
CDAHRRAGSSGTDPQQRGLMHKAAAAAGGLDWGTDNQVRLQRADEHRGGPRVQDNAWTARAIQPWGACFQTYYTDYEALNAINGFYQKD

SEQ ID NO: 233539 - protein, 75 aa, Zea mays
  Clone ID: MRT4577_144582C.1.pep
QNFERKGWGFLGELRPRFGGGSAFSPWGGLNFNCPRVLRAIGKISSPPPGGFGSPSHVFREGRGNPLGLSPVAIF

SEQ ID NO: 233540 - protein, 74 aa, Zea mays
  Clone ID: MRT4577_144583C.1.pep
ADPQLESSILSSALCRSMLSLALSRSAFHVDQRADGHRSRFRDCGRSQDEEEESERGDVTGPSRRRLTLLTRSG

SEQ ID NO: 233541 - protein, 220 aa, Zea mays
  Clone ID: MRT4577_144584C.1.pep
MGSEGPSVVTVHVTGFKKFHGVAENPTEKIVTNLKSFLEKRGLPKNLVLGSCTVLETAGEGALATLYKVLESAVADRGTGSSAQGQVIWIHFGVNSGAIRFALENQAVNEATFRCPDELGWKPQRVPIVPSDGSISRTRETTLPVNELTKSLRKIGYDVVPSGDAGRFVCNYVYYHSLRFAEQHGIKSLFVHVPLFLTIDEEVQMHFVASLLEVIAFSSN

SEQ ID NO: 233542 - protein, 60 aa, Zea mays
  Clone ID: MRT4577_144585C.1.pep
VNKHVPSKSSFCDYHVDQNLGILNCHVLQALDEVPLPSSLMSSLTTLPAIHSVYPQSKQY

SEQ ID NO: 233543 - protein, 32 aa, Zea mays
  Clone ID: MRT4577_144586C.1.pep
YTTPFVYSSYLPSSAFVYLRHLHLVMQSRLFY

SEQ ID NO: 233544 - protein, 54 aa, Zea mays
  Clone ID: MRT4577_144587C.1.pep
MAMLTLRLAPDLPRVSRRCFGTMTMGEQSGAACSLRLLDAAYDAGVNFFDSAEM

SEQ ID NO: 233545 - protein, 81 aa, Zea mays
  Clone ID: MRT4577_144588C.1.pep
RRGEVVLVLAAVPADGDALVAGDPLCGLVFVPRLPGGVHVLQVALRSPAVVPPGSSALAQHSVVVVPQGLQRHLQAWSVVG

SEQ ID NO: 233546 - protein, 272 aa, Zea mays
  unsure (1)..(272): unsure at all Xaa locations
  Clone ID: MRT4577_144589C.1.pep
MEATAPANLFYAAFLFLSVLYLAVTRRRTSRLPPGPTGLPLVGSLPFLDRNLHACFAGLAAKYGPVFAIRLGSKVEIVVTSPELAHEVLRDKDPVFSNRVIPDAGRAVAFDGVENIVGVPVGPKWRLLRRLCAQEMLSPAGLDSLYGLRRREFRSTLRYLYAQSQAGEPVDLGALMFVNMMNVVTSTLWGGTIGSESERAAIGKEFRALVAKLTELLGTPNLSDFFPVLAPFDLQGVRKKMERIRVRFDRYSTXIIQQRVNAQQDGSKMALD

SEQ ID NO: 233547 - protein, 87 aa, Zea mays
  Clone ID: MRT4577_14458C.1.pep
RWRWPCGGASTASAGARTRLPYDCLQVRQVRKVRLRQDPVAADHALQLKPEVFSISIQFLKPCNLGWPTEVEGRVRAAGDHCPREGL

SEQ ID NO: 233548 - protein, 85 aa, Zea mays
  Clone ID: MRT4577_144590C.1.pep
GSGMEVIQLHITALVMGCLLSKLIYAREIILLCTIEATNVCTDEGTYMWFFWAGIVPAWHRVVRIRLGDAEGHTAGQRGESSGGR

SEQ ID NO: 233549 - protein, 158 aa, Zea mays
  unsure (1)..(158): unsure at all Xaa locations
  Clone ID: MRT4577_144591C.1.pep
CYCQVQSCKFLPQSDDLLSILCSYSISTVYYMAPFATMILALPAMLLEGGGVIDWFYTHDSVFSSLIIILGSGVLAFCLNFSIFYVIHSTTAVTFNVAGNLKVRQLWTIYVFFPQVSLLVLKPAHCAXXAVAVLVSWLIFRNPISPMNAIGCAITLVG

SEQ ID NO: 233550 - protein, 221 aa, Zea mays
  unsure (1)..(221): unsure at all Xaa locations
  Clone ID: MRT4577_144592C.1.pep
QTSNAINITERLGLPLDIVENSRHLLGTAGAEINALIIXHEGLKQEYQQHLQEAQYLLMQSKELHNNLELAQKSIVDHTSAQRKRKARVISEYAVMARSIIRKKFQQFQESAIAERVKEEENAVNDAKSDRVKDPMPANTSAIGKIQNIDTSLGMSATGKVLDDEDEVPEVGDSVYVPKLKNEATVVKIDSSKNEVQVQAGMMKLKLKLKDVKVQKRKVSR

SEQ ID NO: 233551 - protein, 99 aa, Zea mays
  Clone ID: MRT4577_144593C.1.pep
ASPAPTEVLSRAQQGSASAAFRVPVPWPAKSQKDHPGYAVVFSTRLYFPLFLGSRNLGRPPPFCAPPLHVEKRFKGSLQQVWFALKSGTTLVILNGCLL

SEQ ID NO: 233552 - protein, 70 aa, Zea mays
  Clone ID: MRT4577_144594C.1.pep
DPRSQHKEAGFHDRFGPRRSNNTCGLGKTPTTTPTVSKRHTEMIPNHEQDELGPSPIHRIVHGTLDELPP

SEQ ID NO: 233553 - protein, 66 aa, Zea mays
  Clone ID: MRT4577_144595C.1.pep
SRIYRITDYILSSVSAPASPDHDYVTRSRAPDLTTRLWPSAGGLRLVRRGRRLGTIIFFAPLTSRL

SEQ ID NO: 233554 - protein, 198 aa, Zea mays
  unsure (1)..(198): unsure at all Xaa locations
  Clone ID: MRT4577_144596C.1.pep
MSCLVAAYEALPCMYDIALSRPDLENRRPHLYPHRIQGRNTVTLLIYHPDLEDDVQQRRARNLFFGTDEEKHPPEAEIIFVSVNTPTKTRGLGADKAADLTYCDSAARMIADVSKSDKIVDDKSTVPVKTAEAIEKILTHNSKGINYQILSNPEFLAEGTAIEDLLQPDRVLIGERETPEXQHAVQLXQGVYAHWDPE

SEQ ID NO: 233555 - protein, 62 aa, Zea mays
  Clone ID: MRT4577_144597C.1.pep
SVIYVHRTRSPPISEVVLDTFLIGFAIVILFLKKMVQEDYTSIFCPPTNFCEPTNGVMFWTR

SEQ ID NO: 233556 - protein, 56 aa, Zea mays
  Clone ID: MRT4577_144598C.1.pep
ACQLLYPQLVVQAPLVDLEFYHVLAFWFCLPPSIAMYGISCFGDFKMRSFWPKRTD

SEQ ID NO: 233557 - protein, 472 aa, Zea mays
  Clone ID: MRT4577_144599C.1.pep
TLLLPSSRPAPPLAEVDPEVYDLIEREKRRQRAGIELIASENFTSLAVMEALGSPLTNKYSEGMPGARYYGGNEVIDEIEELCRTRALAAFHLDPARWGVNVQPYSGSPANFAAYTGLLQPNDRIMGLDLPSGGHLTHGYYTASGKKISATSIYFQSLPYKVSSDTGYVDYDKLEEKAMDFRPKLIICGGSACPREWDYARFRAIADKCGAMLLCDMAHISGLVAAQEALNPFEFSDVVTTTTHKSLRGPRSGMIFYRKGPKPPKKGQPEGALYDYEDKINFAVFPSLQGGPHNHQIAALAVALKQAMSPGFKAYIQQVKANTVSLGNHLMSKGYKLVTDGTENHLVLWDLRPLGLTGNKVEMLCDLCNITLNKNAVFGDSSALSPGGVRIGTPAMTSRGLVEKDFVQIAEYLHRAVTICLSIQAEHGKILKDFKKGLVQNKDIENLRAEVEKFATSFDMPGFRVSDMKYTD

SEQ ID NO: 233558 - protein, 227 aa, Zea mays
  Clone ID: MRT4577_14459C.1.pep
MENQQQLQGDDESPSHTFPSFPYFTVPSPQPSLLPPPSESDDQRNTLATALQQQPSSACNNNDLQLLPLQLGAATVDWSALLQQHASLMGPLLPGLLLQQPPAPLDDQSAENAGSSSSKEKGGAAAGRKKKPSRPRFAFQTARVNDILPDGYQSTKYNIHLVRNSEHPRSYYRCTHHTCNGTNQVQRLSKDTSIVVTTYEVVHTHPCEKLIKAHSPILKQLQFLSQF

SEQ ID NO: 233559 - protein, 95 aa, Zea mays
  Clone ID: MRT4577_1445C.1.pep
MEYISPERNLEGTCGDPGPLFADQGGSLLDHLGYQGGGIPQHESPTLDHGLLVDPAGAIPYLSTDSPPFMNDQITCNVIKSASASPESCTKQPQE

SEQ ID NO: 233560 - protein, 213 aa, Zea mays
  unsure (1)..(213): unsure at all Xaa locations
  Clone ID: MRT4577_144600C.1.pep
TNFGFPFPGVGVPVLPRAGVPNGVCFFPPCRGGFLWGGGFFPPPGSPPPCFFLDGGFFFFPEMPVPXVGFGLLVFGYMLFPPYAFFVVAGPIGFWARFWVPRVVFFSVKVGLGPKLPNPPCFHYGGQIIVLFIWGGGFPPPLFLRVSGKIFRFGFCFRMGFVLFLAGFTPLWSGPGKKLGVPLFLKKKKKKKKKKKKKKKKKKKKKKKKKKAA

SEQ ID NO: 233561 - protein, 199 aa, Zea mays
  unsure (1)..(199): unsure at all Xaa locations
  Clone ID: MRT4577_144601C.1.pep
YPPGSAGFAVFPSLXQGGPLNHQIAALAVALKQAMSPRFKAYIQQVKGNTVSLGNHLMSKGYKLVTDGTENHLVLWDLHPLGLTGNKVEMLCDLCNITLNKNAVFGDSSALSPGGVRIGTPAMTSRGLVEKDFVQIAEYLHRAVTICLSIQAEHGKVLKDFKKGLVQNKDIENLRAEVEKFATSFDMPGFRVSDMKYTD

SEQ ID NO: 233562 - protein, 372 aa, Zea mays
  unsure (1)..(372): unsure at all Xaa locations
  Clone ID: MRT4577_144602C.1.pep
MASHHLASPAAAATSAATVSRALFKHAYTKPSYSLLHAPLLRAVAARPALLSAAAAVSTTAAPAAAAMDNVEEWGLRPLAEVDPEVYDLIEREKRRQRAGIELIASENFTSLAVMEALGSPLTNKYSEGMPGARYYGGNEVIDEIEELCRTRALAAFHLDPARWGVNVQPYSGSPANFAAYTGLLQPNDRIMGLDLPSGGHLTHGYYTGSGKKISGTFIYFQSLXIRXSFDTGYVDYDKLEEKAMDFRPKLIICGGSACPREWDYARFRAIADKCXAMLLCDMAHISGLVAAQEALNPFEFSDXGTTTTHKSLRGPRSGMIFYRKGPKPXXKSQPEGALYDYEGQXHFAXCPSLXGGPHITQXAALAVALNR

SEQ ID NO: 233563 - protein, 47 aa, Zea mays
  Clone ID: MRT4577_144603C.1.pep
HLPYLTTYIPSNPYFPHHNLFPPHLTYYDLPFITKNYLYPFFYPHNS

SEQ ID NO: 233564 - protein, 95 aa, Zea mays
  Clone ID: MRT4577_144604C.1.pep
EANFVIHALCFSPNRYWFCAATEHGIKIWALESKSIVEDLKVVFKVEVEKADNSGPFAPKRKVFFCPSLNWSVDGSPFFSGYPDGVIKVWGIGRY

SEQ ID NO: 233565 - protein, 104 aa, Zea mays
  unsure (1)..(104): unsure at all Xaa locations
  Clone ID: MRT4577_144605C.1.pep
NKDKEQNFFYFKLKKIKKKKKAFTFSPSTLWANRAGPNPLGGRSGLRLGGPVGLTRGTIHFNWSGFSLPDSVNTQRSATLLLSLYFLFLDSRSXAIDGLLWSLS

SEQ ID NO: 233566 - protein, 90 aa, Zea mays
  unsure (1)..(90): unsure at all Xaa locations
  Clone ID: MRT4577_144606C.1.pep
AIDPAASTLTFGVAPEXLRXTSLGGRAPGDGVNLXXXLTPSSXMGGHFVQXHVDGTGEXXAFRPEXGXSLWXTVXXXXKILRXPRYICTG

SEQ ID NO: 233567 - protein, 95 aa, Zea mays
  Clone ID: MRT4577_144607C.1.pep
PPRADQGQTAARSPPTDAHPPSRKSTPHYTTGYSTPADRARGRYTTVRAGLGFSGSPDGWPGTQGQKGVGEEGLCTRRHWGTLTRLWHVGGALGL

SEQ ID NO: 233568 - protein, 89 aa, Zea mays
  Clone ID: MRT4577_144608C.1.pep
RNASCPTLSSAGEHEGQRSVHSFGSRCTTGDTGATTRPNRNSHQSTKNVAQTPKKTICTGTGGGGPTHNTGISLLWENYFHRQEMKKKN

SEQ ID NO: 233569 - protein, 58 aa, Zea mays
  Clone ID: MRT4577_144609C.1.pep
NYLQKDGGHPWPKRPMATHDETVLIEAAYSLPALASLANLTHLVPRRRAWKEEHAGTH

SEQ ID NO: 233570 - protein, 60 aa, Zea mays
  Clone ID: MRT4577_14460C.1.pep
STKTAHYMRGWRYNQNLHHRNLLLSTNQHHLTSCLLPSSSPAMTMPRTSSEPYTTDHIVS

SEQ ID NO: 233571 - protein, 628 aa, Zea mays
  Clone ID: MRT4577_144610C.1.pep
MAEKALVDAGLLCPHLHGPHLEWIVPGDKQVPARAPGYVVSFTPFHERGFGVSAVCFMRALPHYYGVELHNFNPNSIAQVAIFAAVYEGFLGIEPHWDLWLHLFQAEPFSLSTNVRKVLHVRRVLPLTERRLCLDEMTLEASVGSSWLATAAISTDKLLRWVKGTVGKANYTVVVPMRPDQGYMSLGLWGYRTARPPVLKDVADREACQLAVEEKKKKKDADKKRARKKMLVHDALEKRRKAQAREGLPLEASPSTEEEDYDDDDEGMEVQLGFSPEARLWSEPASAGLSDGADVPVEGPTAPLSEARVSAKPGPIPAVAEVAVMVEENTIDLPRCSIPSLWRRGSSSRPRCLPRGEGAGGARNRGWTWTSCPSPGPFVIFILLCFSTKHWAHELAFTATKAEAIQWGVEAARHALSGQPGQDATVAEVIALPLAPLVEVIPVSSEEEMRVVDATSVVVSPTVSNLLGLMAKFVAKSIFIRHKFVVVFINDILIYSQSEEEHVDHLKVVLQRLREHQLYAKLSKCKLWIQEVLYLGHIINKDELAVDPKKTFSVYCDASYTGLGCVLMQERRVVAYSSRQLKVHEKNYPTHDLELAAVVHALKTLRHYLYGQKCDVYTDHKSLKHIFT

SEQ ID NO: 233572 - protein, 45 aa, Zea mays
  Clone ID: MRT4577_144611C.1.pep
SHEHCVVCMYLRTCLSIGSRHLFTGGATWSVYVSQNSGLLRRGHL

SEQ ID NO: 233573 - protein, 134 aa, Zea mays
  unsure (1)..(134): unsure at all Xaa locations
  Clone ID: MRT4577_144612C.1.pep
PGRPRRTARVRTNHLDRSLRDAPTQPTKRACLLTLRGLSASAAAATILPXCSQAHIALLLPSYLSPADSXLCDNMLLPPYMTQRAIAWSFLPXHPCSLNXSSRLPQQXCLHHLLAQNIRAQQLQRLVLANLAVY

SEQ ID NO: 233574 - protein, 121 aa, Zea mays
  Clone ID: MRT4577_144613C.1.pep
LRTGLRTSTTHTHTDASNRSVLNSKIPCHTVPCTRASDYPATRARRSPGPWPPLPAHGLTRWPSRAPQEQQPPPRRPAPGDQQEQEPPACPRRAPREQQPLPRRQARPPRAPRHQQEPTSP

SEQ ID NO: 233575 - protein, 227 aa, Zea mays
  Clone ID: MRT4577_144614C.1.pep
TAKSRVILPCTRASDYPATRARRSPGAWALAAAAACARPHSLAFSGSSGAAASASAAGSWGPAGAGAGASGSSAASSSGAAASASATGSAAAGSSAPAGGAAAASSSAAASCSAAGVSSGPAGAAASASAAGSAAAGSSAPAGAAASGSAAACCSAAGSSSGAAGAAASASASASASAGADSSGTTAGGGVSTTGASSAATTVGVWTSAVAIGGDEKADGYTKEWRG

SEQ ID NO: 233576 - protein, 73 aa, Zea mays
  Clone ID: MRT4577_144615C.1.pep
MATAEVQTPTVVAAEEAPVVETPPPAVVPEESAPAEAEAEAEAEAAAPAPAGPQEPAAEAEAAAPEEPEKASE

SEQ ID NO: 233577 - protein, 126 aa, Zea mays
  Clone ID: MRT4577_144616C.1.pep
AGGAAAASPSAAASCSTAGVSSGPAGAAAPASAAGSAAAGSSAPAGAAASGSAAACCSAAGSSSGSAGAAASASASASASAGADSSGTTAGGGVSTTGASSAATTVGVWTCTRERRVKIKAYTPTS

SEQ ID NO: 233578 - protein, 152 aa, Zea mays
  unsure (1)..(152): unsure at all Xaa locations
  Clone ID: MRT4577_144617C.1.pep
FDRGRTRNDFTPLTFRPDTVAGYIGRQFLSCXIRLLSQHNRRXNGAGLSRSNLVPTRIPCXXIGGPALNRFYFAVVKETSVRKSGDGITVGTXLPRTDCPYNGFSSASDFGLQESGKSVXALSQFMFMLRVEVGQTPALLFRAEFLGSLDSS

SEQ ID NO: 233579 - protein, 105 aa, Zea mays
  Clone ID: MRT4577_144618C.1.pep
GAAASASAAGSAAAGSSAPAGAAASGSAAACCSAAGSSSGAAGAAASASASASASAGADSSGTTAGGGVSTTGASSAATTVGVWTCTRERRVKIKAYIGPVWFAT

SEQ ID NO: 233580 - protein, 40 aa, Zea mays
  Clone ID: MRT4577_144619C.1.pep
TAGIFYTKRLKIFFFSTFYLKNKLIFNYKNPKLIPQLMFT

SEQ ID NO: 233581 - protein, 91 aa, Zea mays
  Clone ID: MRT4577_14461C.1.pep
EIDSILCTLVQKIGDAYPVTNVTRHSLHTVTVHTFIRHACRDPRTEWLRSAVAYKGYCPSISDLDAFHVLQEFSPLWLEAEIVVDEKSMAL

SEQ ID NO: 233582 - protein, 209 aa, Zea mays
  Clone ID: MRT4577_144620C.1.pep
MYARERLPRHARTPIPWALAAAACARPHSLAFSGSSGAAACASAAGSWGPAGAGASGSSAASSSGAAASASATGSAAAGSSAPAEGPAAASSSAAASCSTAGVSSGPAGAAASASAAGSAAAGSSAAAGAAASASAAACCSAAGSSSGSAGAAASASASAGADSSGPTAGGGVSTTGASSAATTVGVWTSAVAIGGEEKAGGYAKQWLS

SEQ ID NO: 233583 - protein, 223 aa, Zea mays
  Clone ID: MRT4577_144621C.1.pep
TAKSRVILPCTRARDYPATRARRSPGAWALAAAAACARPHSLAFSGSSGAAASASAAGSWGPAGAGAGASGSSAASSSGAAASASATGSAAAGSSAPAGGAAAASSSAAASCSTAGVSSGPAGAAASASAAGSAATGSSAPAGSATSATLSTYWLTRGSSSGSAEAAAYGFGLGLAGDRLVGRSGRRRGVHGWRMFVSTHRSGWWSLPEANGAYYMCLCQLLR

SEQ ID NO: 233584 - protein, 215 aa, Zea mays
  unsure (1)..(215): unsure at all Xaa locations
  Clone ID: MRT4577_144622C.1.pep
MYARERLPRHARTPIPWALAAAAACARPHSLAFSGSSGAATSSASAAGSWGPAGAGASGSSAASSSGAAASASAXARPRAGSSAPAGGAAAASSSAAASCSAAGVSSGPAGAAASASAAGSAAAGSSAPAGAAASGSAAACCSAAGSSSGSAGAAASASASASASAGADSSGTTAGGGVSTTGASSAATTVGVWTSAVAIGGDEKADGYTKEWRG

SEQ ID NO: 233585 - protein, 38 aa, Zea mays
  Clone ID: MRT4577_144623C.1.pep
VHSQYLMVIIKVTAVHIYLPQLLGIEACAFKQRYEEVW

SEQ ID NO: 233586 - protein, 118 aa, Zea mays
  unsure (1)..(118): unsure at all Xaa locations
  Clone ID: MRT4577_144624C.1.pep
RPLAKANSFRNMLEIRSTAFAQWNGREIEVSSSNGGSSTLHLCNISLPVTGSHKDHHWAGPAFIMSHPSFRXRACFANFIGRKVEHPDRRKYSCQVQCRVRPVEPATIWTARTIESQH

SEQ ID NO: 233587 - protein, 228 aa, Zea mays
  unsure (1)..(228): unsure at all Xaa locations
  Clone ID: MRT4577_144625C.1.pep
TAKSRVILPCTRARDYPATRARRSPGAWALAAAAACARPHSLAFSGSSGAAASASAAGSWGPAGAGAGASGSSAASSSGAAASASATGSAAAGSSAPAGGAAAASSSAAASCSTAGVSSGPAGAAAXSASAAGSAAAGSSAPAGAAASGSAAACCSAAGSSSGSAGAAASASASASASAGADSSGTTAGGGVSTTGASSAATTVGVWTSAVAIGGDEKADGYTKEWRG

SEQ ID NO: 233588 - protein, 57 aa, Zea mays
  Clone ID: MRT4577_144626C.1.pep
SRASTVSRVGYCSNHQGCSSMLLTERGCWKRKRYSMWVFKCERYHGCSAVGNPPSIM

SEQ ID NO: 233589 - protein, 126 aa, Zea mays
  unsure (1)..(126): unsure at all Xaa locations
  Clone ID: MRT4577_144627C.1.pep
SPLCLPPSLAGSKTPADLHXXAAPLTAEATPAPCPPATTTTPRSSYPTLGPRHRPAPRRAVRRYISTTPTSRRTKPPSPPPRGSPAAAVACAVSCATSSAACPHADLGLGVASTSTSTSTINSSIP

SEQ ID NO: 233590 - protein, 1550 aa, Zea mays
  unsure (1)..(1550): unsure at all Xaa locations
  Clone ID: MRT4577_144628C.1.pep
MGSLMNKADAEAILNPVGRKSYEIGLASSSTPNVGTVSTIASSNVSIYSRKESIENQNKMKKRKGRCYGCKIRPWRGPLPRISKRLITLEAFMPSLINGLDSLKRPLSDEKFKSSWVTKTHNIQTKETSLENVQLLNASGEEQRHLLPLSRAQLVQKAKTYGASRESLRRPALNQKKGQISPKPVQHLIRPSYAEIAARQPANLKPQRQHMLTMEEKPHHGERTFVPRHHQRREQFPRGGRAGRGPGRGSPASGRGRGTGQNWACGRGYAPQQYAPVASSQQLAPVGIQRIGNQQEIVGGNLAAEGVHDATQKWENRDFKAKKPRPPHCYRCKCNGHLVEACKADLDCYVCNKKNIHIAAKCPLLKMEKPSAAMSGFAKNELCFFRIPVFDYRLETPDAAPTGLIKMTGGKLDVVSIQAELAKLSRVEWAWEALQHGEDSFLVAFPSEEELARMSEMEYKMRSSGVTLTISEWKHGGDATPAYFLDEVWVHVTGVPHAWRHYLGFWALGSMIGTTIDVDMYTYRKKGVIRILVGTLDKELLPLTTDVVFDKVGYEITFSMEDQYFEPAIPPPNSLVPREKDDDSEGNEDAAKDKERVQTAKKAKNTKDASGSKSMQGDNESAPMQTDGENLNHSIGHIVVAPSDPKTIFSPGKPLNLEQGVICSDEQRPNYTQLYETNEVEGKEHASLDLGMRKQPCIDVILGRHISMPTQRMENSSDCDSNTHQTSALETPASNVLSPLSMRAEKPATPLSQDIGQNSQGEQVAKIETNMDSLEKAMNRAAARNLDVKGGSSIAVGFKQYNTSPCPGPHAAVKEHNLEFVVVMETGKQDISSSNLTRLTGGVDFVWHSLPPRGRSGGILLGVNATMFDLSLVVEGEFYIKFHLSNKLDKFNWILMAVYGPAQDEFKPAFLAELVRTCQDNSWPTLIGGDFNILRNSKEKNNNRYSERWPFLFNAVIDSFDLREIELTGRRFTWANSLPCQTLEKLDRVLMTTEWEFKFPLVTVQALDRGVSDHTPLLLDTGTQAFLGKPRQFKFELSWFNQEDFFDKVVHXGTDQPKGKTLXHWNHKLGALRKMLCGWASNASGEYKTKKGQLQAIITDLDTSAEDRILTEAERNQLKQARYQLSSLLRDEEIRFYQIAKELFGEPENSHFSLDEEWIQDIPQVTREENNILSRPFSEKEIKDAIFQMERNKAPGLDGFPAEFYQKYWDIIKYDMLQMFEDLHRGDLPLFSLNFGVITLIPKIQDVNLIQQYRPICLLNVSYKIFTKVATNRLNLVADKIVNPTQTAFMRGRNILEGVVILHETIHELHRRKLDGIIFKMDFEKAYDKVKWPFLYQTLRMKGFSLRWISWIKTFISGGSVAINVNDEIGHYFQTKKGLRQGDPLSPLLFNIVADMLAIIIKRANMEGQVGGVVPHLIDGGLSILQYADDTILFLEHDLEKAHNMKLLLFVFEQISGLKINFHKSEILCFGAAQDQEQLYRDIFGCKKGEFPLRYLGIPIHYRKLKNTDWRERHDQQSIVMEASQRLEQMTTKFLSQAHGWRSSRRIDSH

SEQ ID NO: 233591 - protein, 614 aa, Zea mays
  Clone ID: MRT4577_144629C.1.pep
MHDTDCSGSCSRLIDPPLHFLLQKSLTFAPEASEDVLPLDLGELLAYFVKQSVPLFDQLGIKRDVCDKLVESLCSKRKDHPAYSFLSATESSSLKNDNVGNELDLRIASALQSTGHHYEGGFWSDGHKSDISGKRHVAIVTTASLPWMTGTAVNPLFRAAYLAKSCKQDVTLVVPWLCKSDQELVYPNSMTFSSPEEQEKYMRNWLEERVGFKTDFKISFYPGKFQKERRSIIPAGDTSQFIPSKEADIAILEEPEHLNWYHHGKRWTDKFNHVIGVVHTNYLEYIKREKNGAIQAFFVKHINNLVARAYCHKILRLSGATQDLPKSTICNVHGVNPKFLEVGERIAAERESGQQSFSKGAYFLGKMVWAKGYRELIDLFAKHNSDLEGFKLDIYGNGEDSHEVQSAARKLNLNLNFHKGRDHADDSLHGYKVFINPSISDVLCTATAEALAMGKFVVCADHPSNDFFRSFPNCLTYKTSEDFVARVKEAMARDPQPLTPEQRYNLSWDAATQRFMEHSELDKVLNGDSNSECGGSVGTETGKSAGTMMRRSASAPNMSDVVDGGLAFVHYCFTGSELLRLSTGAVPGTRDYNKQHSLDLRLPPPQVQNPVYGW

SEQ ID NO: 233592 - protein, 109 aa, Zea mays
  Clone ID: MRT4577_14462C.1.pep
FCFFNMDSYGQVSGSVTKEQIRVKGTVTKVVRSMLKSEHGFMSTPTFFARTMELLMLFHGHGQGGDDGSMCFADEAALCARPGMAMSEPQSIVMGFFLFRPRRCSCRPC

SEQ ID NO: 233593 - protein, 786 aa, Zea mays
  unsure (1)..(786): unsure at all Xaa locations
  Clone ID: MRT4577_144630C.1.pep
FLFLFLFLSHPFHPSTPPPPPTSTTSPSPPQRLKPYPDIPTRRSPDTWPASASTPARPPRPPAAAWAWRGRGRARSRFSPAGCGRTFVSSARGPGSSRPSSARRCRNPSCSRASVAPTPPRRPLRGRGSTCPPSGRRSRPTRGGAPGLXRWRWEAETEAEEWEPVRMVKAHLSELERRRLAQSPSDMLHKLKLSLKSLTFAPEASEDVLPLDLGELLAYFVKQSVPLFDQLGIRRDVCDKLVESLCSKRKDHPAYSFLSATESSSLKNDNVGNELDLRIASALQSTGHHYEGGFWSDGHKSDISGKRHVAIVTTASLPWMTGTAVNPLFRAAYLAKSCKQDVTLVVPWLCKSDGQVVYPNSMTFSSPEEQETYMRNWLEERVGFKTDFKISFYPGKFQKERRSIIPAGDTSQFIPSKEADIAILEEPEHLNWYHHGKRWTDKFNHVIGVVHTNYLEYIKREKNGAIQAFFVKHINNLVARAYCHKILRLSGATQDLPKSTICNVHGVNPKFLEVGERIAAERESGQQSFSKGAYFLGKMVWAKGYRELIDLFAKHNSDLEGFKLDIYGNGEDSHEVQSAARKLNLNLNFHKGRDHADDSLHGYKVFINPSISDVLCTATAEALAMGKFVVCADHPSNDFFRSFPNCLTYKTSEDFVARVKEAMARDPQPLTPEQRYNLSWDATAQRFMEHLELDKALNGXANDEEIRLGAEHVRRRGRRPGVRALLLRRRRALXDGGLAFVHYCFTGSELLRLSTGAVPGTRDYNKQHSLDLHLPPPQVQNPVYGW

SEQ ID NO: 233594 - protein, 91 aa, Zea mays
  Clone ID: MRT4577_144631C.1.pep
GKWRLRQPLCSWAVENSISKCFFFHHFFFFGPKKNGVSRPPRYFFFALLPGTNLVFNKAGRNAFSRGTKPPAPFFCKPVPWGGCSLHVCFS

SEQ ID NO: 233595 - protein, 71 aa, Zea mays
  Clone ID: MRT4577_144632C.1.pep
NSRQASATPALLSTTNTQKSKNRNMYLRETLPRSSDVLQSLHEEDDSQSKGYSASRLIQMVFQGAPAYTWH

SEQ ID NO: 233596 - protein, 49 aa, Zea mays
  Clone ID: MRT4577_144633C.1.pep
AKATSMTHRNHIIHITQVHNQPIDTYQEEAAALLPTILSVPTSNQGKLT

SEQ ID NO: 233597 - protein, 88 aa, Zea mays
  Clone ID: MRT4577_144634C.1.pep
HIQVPCADLILFLTLRLLAEIALASWIEMHAGFRFFRQLAASHRFISHQRIQEPSVHACLCHSTIKHFFSNSPGDTMHALVCNILVSY

SEQ ID NO: 233598 - protein, 129 aa, Zea mays
  Clone ID: MRT4577_144635C.1.pep
PAIRTGHETPSPSQGQLRGSSSSSVHVRRPSPWTETTASVDSTLGRPYGLGMWTLGLRLIPAVVSVAGPPGIRPRRRSNFSSVASSFPLAAVPRGLSSTLLDHSEVTSHLKIILVPGISRPRSRPGTAG

SEQ ID NO: 233599 - protein, 210 aa, Zea mays
  Clone ID: MRT4577_144636C.1.pep
RFFRGLRIWEADADELMRSGLAHSKQALLTGCSAGGLATLLHCDDFRARFPPEVPVKCLSDAGFFVDAKDLSGQRSMRAVYSGVVHLQNVTKVLPKDCLLANKDDPTQCFFPAELIKSISTPTLIVNSAYDSWQVRFVVAPDSSSPDESWRGCRDDVRRCNSSQIQVLNAFRKTMVDDLVEAADGTNSSWFIDSCFTHCQTIFDTSGWNS

SEQ ID NO: 233600 - protein, 101 aa, Zea mays
  Clone ID: MRT4577_144637C.1.pep
ETKQSGGVAHFHFQIQFILSWAGHKLSSTGANSRGRVEAPGFCAMCIKQLGFQLPKTTKRVSGRALSIVGVRSFKFIKQTHACLLELHILLPKSLGEIFPG

SEQ ID NO: 233601 - protein, 83 aa, Zea mays
  Clone ID: MRT4577_144638C.1.pep
CVSSSLIPVTLPIRVLSCFTSWSAPSGSWGRKISTLLHMAVLDVVCGVEKVIVINDFRPLITFAILVNHRWFERNYHKIWRRK

SEQ ID NO: 233602 - protein, 136 aa, Zea mays
  Clone ID: MRT4577_144639C.1.pep
APKPEPSVVLVQRDELGPEHELVETEVPEQEQETEPEKEHEPAEKGIPCLAGPEAAATLTVAPAAEEDESFDFGWFDQYPTWHRSALYAPLLPPEEWERELQGEDALFAGLGELPECAVVFGRRRELSLAATAPCS

SEQ ID NO: 233603 - protein, 95 aa, Zea mays
  unsure (1)..(95): unsure at all Xaa locations
  Clone ID: MRT4577_14463C.1.pep
MAPIASMMASKALLVLTLLLVATLLAASDNEQAQAANEEKKVEVQDWHGGCGYPGHGGCGGCXTRTXLRCCHRGYHSGCRCCSHPDQIPEPMYRA

SEQ ID NO: 233604 - protein, 93 aa, Zea mays
  Clone ID: MRT4577_144640C.1.pep
PGRPNRLFAHLTRAPPTFLGRLLAQQKHPTEPHTGHCRPPMTRLVKIPFTFLPSLFPSRNQFYFLKHPPPPHDRENYHNPPLGHFTKTTSARV

SEQ ID NO: 233605 - protein, 80 aa, Zea mays
  Clone ID: MRT4577_144641C.1.pep
RRRQSQWGGQIVNLRDRLRYAVEAGQGWVSCTLSHWCNFGWVFSQSSERERRRRRDFRMQRMRRELIASKVTRRQWQQIK

SEQ ID NO: 233606 - protein, 92 aa, Zea mays
  Clone ID: MRT4577_144642C.1.pep
KHGTHIYNRLEEAHGRGRRAYASRQEGKTTGQGGGRLVQQQGGLNAYKDIPTLPLGGASHYRYEKSRGCIITKPGWNRKYFHKQGCERGLLF

SEQ ID NO: 233607 - protein, 109 aa, Zea mays
  Clone ID: MRT4577_144643C.1.pep
PPPRRPARPAPPTRSPPAPPSRLESRVARPTCTSGCQVASYSFGIYGRHRRKEGSEGGVFSLASLCIYRRSAGEATTRSLDRRAGVGWEEKIWSTCVVPVFWLEAYGVY

SEQ ID NO: 233608 - protein, 77 aa, Zea mays
  unsure (1)..(77): unsure at all Xaa locations
  Clone ID: MRT4577_144644C.1.pep
MGXMILYVLPPLPLLXSPTNSFIIPQFSLXPTAIIPHFLPPXTSIXFXHPSXQTYILQQSLITIILKQPYSQLQQQF

SEQ ID NO: 233609 - protein, 108 aa, Zea mays
  Clone ID: MRT4577_144645C.1.pep
AAAYEVLVAGGEGLFLKTKPPAARSAVEALPSAVVAAGQEVQGDECAVCKDGVAVGQRVKRLPCSHRYHDGCIVPWLQVRNSCPLCRFELPTDDPEYESWKAGRTDAA

SEQ ID NO: 233610 - protein, 69 aa, Zea mays
  Clone ID: MRT4577_144646C.1.pep
KGQGHECPVCKVGVAVGQRVKRLPCSHRYHDGCIPTRPQVRNSCPLCRFELPTDDPEYESWKAGRTDAA

SEQ ID NO: 233611 - protein, 180 aa, Zea mays
  Clone ID: MRT4577_144647C.1.pep
MGGGGAALLLLVMWAGVASAAVYEVGGTIGWTVMGNPDYAAWASSKQIVIGDTVVFTYNKQFHNVLAVSKADYKNCIATKPTATWSTGNDSVVLNTTGHHYFLCGYPGHCAAGQKVDIRVASSAAPSAAPSPTPSGSKPSGGATAAPSPHPNAAPKALSASSVAAAVATSLLSLAAAVLA

SEQ ID NO: 233612 - protein, 159 aa, Zea mays
  Clone ID: MRT4577_144648C.1.pep
RGLLWPPLGPAFIPLPIGQDCSPSGPGRAFPGSFSARAPSRSSLTPWPTPSPSSPGHSPLNLSPAVFFLSTPALVFSPPVPPFVFSSVPSSGGFFLGFACPPRGGFVVAPPRACFCSVCGPPPLSLAAPCRRALFPWAPPLFRPPWLFLFFQEPGPFLF

SEQ ID NO: 233613 - protein, 86 aa, Zea mays
  Clone ID: MRT4577_144649C.1.pep
KRPTVLLHFIFWQLKTNIFSFMQAFVHLGLGYIPLCFYWGGWRSFMPATPQKLSPLWSRAPQLMKLWLQFGGSKLNPFHTKKGGGV

SEQ ID NO: 233614 - protein, 83 aa, Zea mays
  Clone ID: MRT4577_14464C.1.pep
VDFSTRLTCGLVALTFKCSRPTDAILEDLLDMWVRTRTRFRCVTSIYWLMLIALSSVGLAANPLNRSIDMRLVKMLTTMILTD

SEQ ID NO: 233615 - protein, 330 aa, Zea mays
  Clone ID: MRT4577_144650C.1.pep
SKTGKTVEWTSKDLLNGLEEFVPIYETRPIKNNVYGMGFDHSFGLWFMARWIKPDLMIESGAFKGHSTWVLRKAMPNTRIISLSPRHPEKYLKKGPAYVDGNCTYLAGKDFIDFGSIDWGKLLRNHGISDPDKVLVFFDDHQSELKRLKQALKAGFRHLIFEDNYDTGTGDHYSLRQICDQSYIRGGGHSCFWESDEARLRFERKKFWEKAVEIADLCGKDDAWWGVKGYMRDNFNHSNMAISYKEHFQNSRLVESVLDMYWELPPVAGPSLTHQTRYDPARTVDPIIEDGRYGLFRKTGLARLDASVFNGYTQMAYVQISGSMLSTDDV

SEQ ID NO: 233616 - protein, 527 aa, Zea mays
  Clone ID: MRT4577_144651C.1.pep
MATCVLLMLREVSPWALASVVASVSLLWLVVWTLEWAWWTPWRLERALRVQGLKGTRYRLFTGDLRETARANREARKKPLPLGSHDIAPRVQPMHHSTIKEYGKLSFTWFGPTPRVMIPDPELVKEVLSNKFGHFGKPRSNRIGRLLANGLVNHDGEKWAKHRRILNPAFHHEKIKGMMPVFSTCCIEMITRWDNSMPSEGSSEIDVWPEFQNLTGDVISRTAFGSNYQEGRRIFELQGELAERLIQSVQTIFIPGYWFLPTKNNRRMRAIDVEIRKILREIIGKREKDTKNRETNNDDLLGLLLESNTRQSNGNASLGLTTEDVIEECKLFYFAGMETTSVLLTWTLIVLSMHPEWQERAREEVLSHFGRTTPDYDSLSRLKTVTMILHEVLRLYPPATFLTRRTYKEMELGGIKYPAGVDLLLPVIFIHHDPDIWGKDASEFNPERFANGISSATRHQAAFFPFGGGPRICIGQSFALLEAKMTLCTILQRFSFELSPSYTHAPYTVITLHPQHGAQIRLKKLSP

SEQ ID NO: 233617 - protein, 131 aa, Zea mays
  Clone ID: MRT4577_144652C.1.pep
KTNDCSRPLALFLGMNHHRQMTIFGAAFLYDESVESFKWLLETFKSAMCGKHPKTILTDGSSALKEALGLTWPGTVHRSCVWQIYQSTVKSLAHMFSAYEEFTYDFRHCVFNIEDEQDFVDTWNMIMEKYN

SEQ ID NO: 233618 - protein, 1432 aa, Zea mays
  Clone ID: MRT4577_144653C.1.pep
MAGAEQKGEERWERMLTAVERLTGKMEAMEVGQRKAEEDRALMARQLQETEQTVSRLRLELLAKDLEGNESNSEREHRVHRGDERGGGFGREGGRERREQWGEGREFRPSSLPKWSFPKFHGNDPGIWFDRCVEYFTVYQVPEWIWASTASTHMEGNASKWLQVYKLKHGLGDWEQFTHAVREKFGVEEYPHAMRALVNVKQQHGVEEYSQAFNDIRYAATLHNPELDETLFVTHYVRGLKPEIQSQVMARTPKTVDKAMRLAQLYQEIAEKNRMRSQKGVMGIKTQAIGSRSGILNPELNKERQLRDYRRANGLCYICGDKFEPGHQAKCPKRVVTQIHQLTVEDMSTVLTDEVLLKLEQEEEHIVEGLHQLSWNAIKGTECDGCMRVLSLIQDQVLVMLIDSGSSTTFISQRMVTKLGLSTEDCPPVKVKVANGEIMVCEKNVREVKWKAGGHVYRTAMRVLALEAYDVILGYDWLKQHSPMHCDWINKVLTFCDQGVEVKLQGEADLKREVQQVSVLQLEKWVKGDEVWVFVMLEEVKGEEDEAGNETLTGILEEFADVFAVPTQLPPTRPYDHHIPLLPGSIPVNSRPYRYSPHHKTEIEKQVSELLAAGLIVPSVSPFASPVLLVQKKDGSWRFCVDYRKLNDMTIKNRFPMPLVEEILDELAGTKFFTSLDMTSGYHQIRMGAEDEFKTAFKTHHGHYQFRVMPFGLTNAPASFQCAMNSILQSFLRKFVMPRNVTELRGFLGLTGYYRRFVKNYGLLAKPLTRLLQKQQGFAWSEEAQIAFENLKQAMASTPVLALPRFDLPFTVETDASDIGLGAVLMQQGRPIAFISKALGEKNKHLSIYEKEFLALILAVDRWRQYLQRGAFVIKTDHKSLTYLGDQQLQSDLQKKAMTKLMGLQFQVVYKKGTENVVADALSRVEHMMGLSVLSEIQPIWIQEVVNSYATDEDAQQLITQLLIQSPDEQGFSLQQGIIRKANRIWIGCNSALRTKLIAALHDSAVGGHSGIQATYQRVKKVFWWKGLKNDVTQYVQQCAICQKAKAERVHPAGLLQPLPVPQGIWEDVTMDFIEGLPKSEGFDTILVVVDRFSKYSHFLPLKHPFTAKGVAQVFLENVVKLHGVPRSIVSDRDKVFTSAFWKNLFQLMGVKLLMSTAYHPQTDGQSERVNQCLEMYLRCAVHDQPNKWKSWLALAEYWYNTTYHSVLGCTPFKVLYGYEAPLLVAPKTLGMEDREIADWFAERNAFSVMLKEQLARAQLRMKQYADKGRTPREFQVGDLVLLKLQPYAQKTVVNRSCPKLAFKYFGPFKVISRIGEVAYKLELPGDAQVHPVFHVSQLKPFLPCYSPVFSELPPAVDLSQGGIEPEQVLDRRMVRKGNRAIVQVLVKWSGVPKEAATWEDYAVARARFPEANAWGQALSEARGDVMTEDAD

SEQ ID NO: 233619 - protein, 155 aa, Zea mays
  unsure (1)..(155): unsure at all Xaa locations
  Clone ID: MRT4577_144654C.1.pep
PPGGGFGPPPPGGGFGKGKLKVPPRFTFRKGRVGDASFFLGGAGEDLFSGGPFGLFXKMGGPPNWGFSFKDKGWALPFKGGKPFKIRPKKFLPLERAVFGNPPPGVFRVGAFGAPQPPVGAPQPFSGALWGVPGGLGAPPWGGVCGPPVKKITPG

SEQ ID NO: 233620 - protein, 68 aa, Zea mays
  Clone ID: MRT4577_144655C.1.pep
IRNNPVIYMQLFFPLAFHLWKGGHTGFSGWMDLLDPPIGLIFLFLMVPWGGGPLPFFFVDPKTHLSTP

SEQ ID NO: 233621 - protein, 335 aa, Zea mays
  Clone ID: MRT4577_144656C.1.pep
MGRAPCCEKVGLKRGRWTAEEDQLLANYIAEHGEGSWRSLPKNAGLLRCGKSCRLRWINYLRADVKRGNISKEEEDIIIKLHATLGNRWSLIASHLPGRTDNEIKNYWNSHLSRQIHTYRRKYTAGPDDTAIAIDMSKLQSADRRRGGRTPGRPPKASASRTKQADADQPGGEAKGPAAAASSPRHSDVVNPGPNQPNSSSGSTGTAEEEGPSSEDASGPWVLEPIELGDLVWGEADSEMDALMPIGPGGHDSAALEGLGAVGCEAQVDDLFDMDWDGFAAHLWGGPEQDEHSAQLRQAAEPLEVAAAAAAATAARTPDDRELEAFETWLLSDSF

SEQ ID NO: 233622 - protein, 462 aa, Zea mays
  unsure (1)..(462): unsure at all Xaa locations
  Clone ID: MRT4577_144657C.1.pep
RAVVGPHGHQLPWTHARARPAANRAQVVVRLRRRPGSLARSIGGTTYDSGVASGGRAGERTCCERARADASCCRELAGARWGGPPCXCKKVGLKRGRWTAEEDQLLANYIAEHGEGSWRSLPKNAGLLRCGKSCRLRWINYLRADVKRGNISKEEEDIIIKLHATLGNXIQQRTGLDGKWCSGSSSRYWTGLPEVMALVGVLSISLCCLAITAGRWSLIASHLPGRTDNEIKNYWNSHLSRQIHTYRRKYTAGPDDTAIAIDMSKLQSADRRRGGRTPGRPPKASASRTKQADADQPGGEAKGPAAAASSPRHSDVVNPGPNQPNSSSGSTGTAEEEGPSSEDASGPWVLEPIELGDLVWGEADSEMDALMPIGPGGHDSAALEGLGAVGCEAQVDDLFDMDWDGFAAHLWGGPEQDEHSAQLRQAAEPLEVAAAAAAATAARTPDDRELEAFETWLLSDSF

SEQ ID NO: 233623 - protein, 41 aa, Zea mays
  Clone ID: MRT4577_144658C.1.pep
MAEAAPAAGGSLRDILDTSDRDLVVRNYGKQAKTSSVEASP

SEQ ID NO: 233624 - protein, 59 aa, Zea mays
  unsure (1)..(59): unsure at all Xaa locations
  Clone ID: MRT4577_144659C.1.pep
IDKGNLIYKIDVFLTSCVFRHWKVSIIVLQSTKSLQPWCEXLKVINHCIDCIASKVSID

SEQ ID NO: 233625 - protein, 68 aa, Zea mays
  Clone ID: MRT4577_14465C.1.pep
GKKRNRRKPNAGFACQLAAGRINQAHRKPSVSSTVWTATARSHMLSLPLSLWPVIKFPDIGLQEPSSE

SEQ ID NO: 233626 - protein, 192 aa, Zea mays
  unsure (1)..(192): unsure at all Xaa locations
  Clone ID: MRT4577_144660C.1.pep
GTSSRRAGDTGDLPRRNGICWVNTVCYLLCINNFPAQXRVAGSLATSYLGLXSAKVYTTMAQTIPXRRGLRYSTTDEYLLXNAVVHMTAGLVTVMTPRGEEPQEGLDTEDXAAFXLSMFLMTLTTGACAAVVSVGDKSIGLSSRAHMGDLYVLLDLPLLIPVWLRVTEGTAKILESMWENRVHDHNSDGADS

SEQ ID NO: 233627 - protein, 157 aa, Zea mays
  unsure (1)..(157): unsure at all Xaa locations
  Clone ID: MRT4577_144661C.1.pep
PPPPGVPPPEGGPPSPCXPPRGGKPIFVKPPAGXPTPGGWGAGPXPPXEGEDPGQGGLPPGPKGFDXPANNGGRAPPQPVSPXKGGPPPPWGPFPGGAEKQGSFKPPRGPRRLGPPPKGGGQRTSRSGQGGFKKGPVVXGGVPPPTRPNPEKGWCLF

SEQ ID NO: 233628 - protein, 66 aa, Zea mays
  Clone ID: MRT4577_144662C.1.pep
FLIQNPIGSKKILTQSQKSRPNSKKSQPNSDIEARTNPTQPNTNTGRVRTVPTIHDSTLIRLIPDV

SEQ ID NO: 233629 - protein, 124 aa, Zea mays
  unsure (1)..(124): unsure at all Xaa locations
  Clone ID: MRT4577_144663C.1.pep
GTXLLPNXXTMCVAYSKPTXALTXXPAXRSIQXXPIIXXGAXXFXRFXLSTLXXFNXXKRFFGLGSXXXXKKXXKKKKGPARFFRGSXXLIVPAXSCXXSIASFLFSXXPKXXNSLGPRRFTKR

SEQ ID NO: 233630 - protein, 43 aa, Zea mays
  Clone ID: MRT4577_144664C.1.pep
MRPNRSIPYCIPMRTDNTIMYNANRRHWRRTNLIFCASPLVHY

SEQ ID NO: 233631 - protein, 139 aa, Zea mays
  Clone ID: MRT4577_144665C.1.pep
MLPYYGGYYWSEYVEQYHRARRLENEKRRLENEKRALERQLAEKTRDAQVSSTQVFTLQHKVRELEQRNTGLSGDLANEREDTRKAGLLFMVAADRYQEEAQKQIRAKAEELADTRKAGLALMNTADTYQQAARKQMKE

SEQ ID NO: 233632 - protein, 88 aa, Zea mays
  unsure (1)..(88): unsure at all Xaa locations
  Clone ID: MRT4577_144666C.1.pep
RGXIXPFRQPRRKKKRAKRGHQLTAERKRRRAPTPLLVRRRLPGPCPWPPPPGCSGLPSPPASSLSPSSPVPSHARSRILCLLTLLNG

SEQ ID NO: 233633 - protein, 283 aa, Zea mays
  Clone ID: MRT4577_144667C.1.pep
SSSDASVNGSIAIGGKEEAEAQPIDTNHTVVISDDMAAKAKALLANKSLQPKHGDDIGLQETTVAAAKERVATGDDSTATPGTEMMKGSATSAGAQVNNVCDSDSLAMEVDGVLHPLRRVDGFLVCLSCNAKAPSEIVMRSHLSGKKHKRKITLAAAGGNNSLCVLATAGADGAQENIGSKPTKGNVEAESAAAQAKTAANEEAESAPSLEVSQTKNTASTACIIEPAEDGEIAKEAEEERAAAGTNGGVIQAKETVRADDATSPAKSIEASTVMQQENGRSA

SEQ ID NO: 233634 - protein, 74 aa, Zea mays
  unsure (1)..(74): unsure at all Xaa locations
  Clone ID: MRT4577_144668C.1.pep
MASHHKQLHAGASASALSDVGFDDYLSQIVXRLTEYTLMLELSSVFRLLMDPALXLITFDSLRRIAPLLGLCGM

SEQ ID NO: 233635 - protein, 39 aa, Zea mays
  Clone ID: MRT4577_144669C.1.pep
DNMIPSFQPQLAHPVDIRNPDSSGRMSTTTLRGHNFFTY

SEQ ID NO: 233636 - protein, 53 aa, Zea mays
  Clone ID: MRT4577_14466C.1.pep
TSHSFLYIVHVSIILSYAHVCRFVAISWFLRMCLSCGFFKKTKKKRRRRLVSS

SEQ ID NO: 233637 - protein, 59 aa, Zea mays
  Clone ID: MRT4577_144670C.1.pep
VVDRLAFDACNASAPLAAFAGGATEFCLHRPGFFCFISGEPGHCEEEGQRLIVRLLVWV

SEQ ID NO: 233638 - protein, 96 aa, Zea mays
  Clone ID: MRT4577_144671C.1.pep
SLFFISGTRSFLRGVGFVTLKTASTESIACSLSDEPHSHHRENIHKTRSIIQTTAINKNASCWSSYVDALNKIINRSIKGYSYSRIEVSTERVFKR

SEQ ID NO: 233639 - protein, 68 aa, Zea mays
  unsure (1)..(68): unsure at all Xaa locations
  Clone ID: MRT4577_144672C.1.pep
IVMAAQLIHDRVEMECLEGAXETLEGNTRCRFRCTTRFTATSXVHPDEPARTLQRTVEWILPTPTPYI

SEQ ID NO: 233640 - protein, 100 aa, Zea mays
  Clone ID: MRT4577_144673C.1.pep
DGAGLAKGRVRACAPSPPSCLVGMVWPGDPLRSGGHRVSGGLPVPPAEKKSWSFLWWNRWWAGVLLLPPWIMTLSYKKGCSALISLLEGEQVTIGSDRPV

SEQ ID NO: 233641 - protein, 63 aa, Zea mays
  Clone ID: MRT4577_144674C.1.pep
VLNIWFYGVILPNKIPVPVRFQPASSDCMQAFRTWPAVVTVISAEMSYSKLCLLVLFFFCVWS

SEQ ID NO: 233642 - protein, 35 aa, Zea mays
  Clone ID: MRT4577_144675C.1.pep
PPRSTGAARPTDIANSWSSSWSWVAEATGRSSCVS

SEQ ID NO: 233643 - protein, 85 aa, Zea mays
  Clone ID: MRT4577_144676C.1.pep
LLSLGEIVGGRTNSSISKHWLVKQTKTRASINNSRKGEVHLELLKTTSVCLEHNRGGLHSAGYGDKIYAGCRCCCALPTNSPGGR

SEQ ID NO: 233644 - protein, 354 aa, Zea mays
  Clone ID: MRT4577_144677C.1.pep
MATSKKDPPNPSRGRTSPNLMSSSSESSGHGYGARRARSVPSSAHRKFGSSSPSVSASGSTDVHHSSLFNAGRSISSRTMGSSIQGTKAQPFPSAASKPTLAKEKSDKVSTTLQRPPVLAVPAAKASPSTLPRRVRGSCCQVLLKETSSPLSTAQSPGAAARKRLDTVNGATTNSKAKSVSQKAMGASSARKEKHKDPSMQIKGTECINTTTSIEEHLHKELPDPVDLKSMEMTVPDQHEPSFNEPEHVLKDDEKSEGHFSEEKVDAGANEIHNGGQDDNGGVKTIYECGIVEKKADRSVDKTVPKTEVAQVWRKDDPKGNDVIEETKSKLLLERKSRVKALVGAFETVLSFKE

SEQ ID NO: 233645 - protein, 73 aa, Zea mays
  Clone ID: MRT4577_144678C.1.pep
RSTRRAYLSIASTSRGAHRKGQRQQPRGRTPAAAAAAARPRTSKGQWASTPTPRGRRRSARATAPTRTRTPPN

SEQ ID NO: 233646 - protein, 233 aa, Zea mays
  Clone ID: MRT4577_144679C.1.pep
MATSKKDPPNPSRGRTSPNLMSSSSESSGHGYGARRARSVPSSAHRKFGSSSPSVSASGSTDVHHSSLFNAGRSISSRTMGSSIQGTKAQPFPSAASKPTLAKEKSDKVSTTLQRPPVLAVPAAKASPSTLPRSKPSPRPSSDSCKAAASLKPSSQRVMLPGAAQGDKVQPLSTAQSPGAAARKRLDTVNGATTNSKAKSVSQKAMGASSARKEKHKDPSMQIKGTECINTTT

SEQ ID NO: 233647 - protein, 48 aa, Zea mays
  unsure (1)..(48): unsure at all Xaa locations
  Clone ID: MRT4577_14467C.1.pep
VNYPVLNVFFCVACTTISVGIFAPTREPHPSXFMLWCMMCMHPPHLFS

SEQ ID NO: 233648 - protein, 107 aa, Zea mays
  unsure (1)..(107): unsure at all Xaa locations
  Clone ID: MRT4577_144680C.1.pep
ISVFHHTTPERVCVILHFPLRHTRPDITQPHSNSPPPPIGKPTELYHTXLNIPKDTXERXIPAAYNNVVKKLHPDKHPASYIQDDDEHLKAINEAYEALLDQQENMG

SEQ ID NO: 233649 - protein, 372 aa, Zea mays
  Clone ID: MRT4577_144681C.1.pep
MATSKKDPPNPSRGRTSPNLMSSSSESSGHGYGARRARSVPSSAHRKFGSSSPSVSASGSTDVHHSSLFNAGRSISSRTMGSSIQGTKAQPFPSAASKPTLAKEKSDKVSTTLQRPPVLAVPAAKASPSTLPRSKPSPRPSSDSCKAAASLKPSSQRVMLPGAAQGDKVQPLSTAQSPGAAARKRLDTVNGATTNSKAKSVSQKAMGASSARKEKHKDPSMQIKGTECINTTTSIEEHLHKELPDPVDLKSMEMTVPDQHEPSFNEPEHVLKDDEKSEGHFSEEKVDAGANEIHNGGQDDNGGVKTIYECGIVEKKADRSVDKTVPKTEVAQVWRKDDPKGNDVIEETKSKLLLERKSRVKALFETVLSFKE

SEQ ID NO: 233650 - protein, 72 aa, Zea mays
  unsure (1)..(72): unsure at all Xaa locations
  Clone ID: MRT4577_144682C.1.pep
VCSRVSARKMYGRGKKRYGGRCRGESEAKRKDGMDDGSANSLKNVTSYMRYIVXRRYTLGDGKVWSCWSYVS

SEQ ID NO: 233651 - protein, 127 aa, Zea mays
  Clone ID: MRT4577_144683C.1.pep
NFFTYSQFPNPRQYAGRVQFRFYLAHDTSMPTQNKIQNTKPSLSHNDNKEVDLACDIADQYTTPSTRPLHHIPLAPKNCATGPPPIRRTWYPRAPMIQQTSRMSMRMMATPGPPSPQKSMTSNKPTR

SEQ ID NO: 233652 - protein, 35 aa, Zea mays
  Clone ID: MRT4577_144684C.1.pep
YLDIAVPSSVSGTEEVVLGTQDVFKTQFVELAPVS

SEQ ID NO: 233653 - protein, 83 aa, Zea mays
  unsure (1)..(83): unsure at all Xaa locations
  Clone ID: MRT4577_144685C.1.pep
KKXKKKKKEEKNEWVPRGGRETPSPTPLRASPHGSPGLPSSPAQHCRHRSLPRRPRHPGDQPIATRDWRSSHPPPQARFPPRL

SEQ ID NO: 233654 - protein, 195 aa, Zea mays
  unsure (1)..(195): unsure at all Xaa locations
  Clone ID: MRT4577_144686C.1.pep
MQNSRQRGNMSNVDTIKEFESLAFDGHNFPTWSIDLKVSLSLQXFGRSLFNGNRXQYPTIKPSTSYASYIYHRPSXSRVFFWIALQQRYEQQXATHEWNHLRLQDFKSVGGYNHALYKLCAKLKSYGKEPTDAYRIDKTSSTLTTTVYRILPRXYHEKNFKVYSXLINSLFXAEGHNKIFVWNTNKLSLNVALLL

SEQ ID NO: 233655 - protein, 237 aa, Zea mays
  unsure (1)..(237): unsure at all Xaa locations
  Clone ID: MRT4577_144687C.1.pep
IPVRRPPLHPDDDSVRECISIHIGHARIHSLNLCWELYCLEHGIHADXQMPGDKTIXGGDDAFNTFFTDTGAGNHVPRAVCADLEPTAVDDVTTGTYRQLFHPEQLXLEGKEDAANNFARGHYTIVNEIVDXASDRIRKLADNXTGLQSFLLFNAVVAPTDSGLGSLLLERLSGHYSKKSKLGFTAYPIPQISTSVPEPYNEALTTQYLLKDADVAILLDNDVMYDICLRSLXIERP

SEQ ID NO: 233656 - protein, 55 aa, Zea mays
  Clone ID: MRT4577_144688C.1.pep
FLKTKYENNRIESSTFLFFFLPITAENRHVSSRRSTPTPMIDLPIHPWIDLSCIN

SEQ ID NO: 233657 - protein, 72 aa, Zea mays
  Clone ID: MRT4577_144689C.1.pep
EHEVGGSDAFLRRALAQRQPTNRYISYAALRADQVPCNQRGRSYYSNCASQKPANPYRRGCSAITRCARNTN

SEQ ID NO: 233658 - protein, 49 aa, Zea mays
  Clone ID: MRT4577_14468C.1.pep
IWLSRAMLLIFGYRDSLCLSFGLLLNSTYSANRKSKHKFEDHNLAKASP

SEQ ID NO: 233659 - protein, 81 aa, Zea mays
  Clone ID: MRT4577_144690C.1.pep
PSVRALATHPGSYESHFPSQLATAPPHGLTYSRYTHAPTYPKDRARSPPPAVPPPPPPHGGGGGGLLKINISRLEYREREW

SEQ ID NO: 233660 - protein, 189 aa, Zea mays
  Clone ID: MRT4577_144691C.1.pep
RASHNGKELDAAKHAKARSMILLYMTRRRTMATWGGLGMAESAQSSKSTATRTSWDNRTRRYPLAGALGSSTDAAKKIGERTRDDRRDQPERASGTRSGLETETRLETQASETDERRRKEQGELYSIGNGTTSTRTLCAAMATLASWATACRHQRTRRRRPGRAQQGAGHGEQQERGSIAAMEERGTPA

SEQ ID NO: 233661 - protein, 41 aa, Zea mays
  unsure (1)..(41): unsure at all Xaa locations
  Clone ID: MRT4577_144692C.1.pep
HNLNSKFNXNLSYPIISPPYLRPLXTTEMWQKKPSELHEHG

SEQ ID NO: 233662 - protein, 99 aa, Zea mays
  unsure (1)..(99): unsure at all Xaa locations
  Clone ID: MRT4577_144693C.1.pep
PRVTGASISACCTAVPCRAIIWCVSPAEREQRRGVAAPKLATLALAVLVAATVVTPPAAVRAAXVSCSAVYSTLMPCVPFVQMGRAVPPQACCCGIGSL

SEQ ID NO: 233663 - protein, 86 aa, Zea mays
  Clone ID: MRT4577_144694C.1.pep
PGSVVLTCSHHSQASTESYEQSHASVKRRNGRHGSHPICQSVRRGVRGAAAGTGGYELGGRHLLRAGELPHRALPLLLTQNGFHPL

SEQ ID NO: 233664 - protein, 110 aa, Zea mays
  Clone ID: MRT4577_144695C.1.pep
AGVVSIFIWLAYSGQHGFGPYGMGLEDRLGLYQSSSGTLSHDIQMSDEHSGGVKKRKGVEDCVTLLPNACDQQTEGSSQPERNSMEEGNRKISPKIQSKEDSSYGDGTKE

SEQ ID NO: 233665 - protein, 94 aa, Zea mays
  unsure (1)..(94): unsure at all Xaa locations
  Clone ID: MRT4577_144696C.1.pep
VVQQSIIVKHQALPCPLSNSRVEAFGSDTRIPVHVVPPSALVAWIMGDPIEDHKYSLHHGRLFPAIXATHHPPQEESSHYLKGLLLVFCDIVIS

SEQ ID NO: 233666 - protein, 119 aa, Zea mays
  Clone ID: MRT4577_144697C.1.pep
SCISIIMRRPALPSNLVVTALGLVCETSPTRRPPLLGQIQRWISKWQRLDKIRCFLSNHNSHHRSVCVFFLSQAVVLVLTAQSGHLESPPLQPWIPQASWRCTLCIFRVSCTNYSGNPT

SEQ ID NO: 233667 - protein, 59 aa, Zea mays
  Clone ID: MRT4577_144698C.1.pep
LYSGRPLLNNSPRRNTHKGGPFENKSGTSKMQAALSYMPGIGNAGGSKDTTRTSMVRTD

SEQ ID NO: 233668 - protein, 140 aa, Zea mays
  Clone ID: MRT4577_144699C.1.pep
AGPVPKNRARPLITHSTTLSYYQQLASRIEQSERRHTAKSASHGLFLLAMAAVLAAGTRGPRRTHNCDDQRERAVHNLGYTTETCTIRCAGSLLRRCCAVYLTRLSPHHTHSCRLSCCTKPLLLHDCAQRQLHCLSRASA

SEQ ID NO: 233669 - protein, 183 aa, Zea mays
  Clone ID: MRT4577_14469C.1.pep
KKKKKKKKKKKKNKKKKKKKKIFFSSATTPLGDFSDFFLPGGGCSIFLLGALFPLLGGVLIIWWPFFNTVVGEKPLLPPFLIFLQILLFSPGGLLKKTPPLVLFTNFSASLLNKGPPLWGFINRGGGGVSQRGPFYFCHPLTPPFFCFLSFFCHLGRLFSPKFFKRGAPLGAPFWFFAAPPPK

SEQ ID NO: 233670 - protein, 137 aa, Zea mays
  Clone ID: MRT4577_1446C.1.pep
CPLRVRAVSVIRCILMNKILVCAGADRLQTGVRGAYGKPYDTDARVDIGQVLLSVRTRDSNRAVVIEALRRSRYKFAGRQKIIISKRHGFTNMMRSEYQQAKADNRILKDGCYLQYINNHGPLEKNLRLQARIAAQK

SEQ ID NO: 233671 - protein, 102 aa, Zea mays
  Clone ID: MRT4577_144700C.1.pep
MDQVFSCESYKPMMIPEAGGHSSDDFFSDLAELESDPMSLIFSREYMGAEARGGGGDHRGHQEKLAMTSKDLDPLFDMLDWSANSSSSAVSSSFEQQGNNRG

SEQ ID NO: 233672 - protein, 81 aa, Zea mays
  unsure (1)..(81): unsure at all Xaa locations
  Clone ID: MRT4577_144701C.1.pep
GHGXVIQNVKFMEKFGKFYGMGLLGKMXXPSLKPWQGEGAWHSIYRAETGTXRNRLILGVGASXREXKLKXYFKANLIKGS

SEQ ID NO: 233673 - protein, 75 aa, Zea mays
  Clone ID: MRT4577_144702C.1.pep
EGFFKFFLLFFSSLPIQNASPLKYGCLIQFCSCLGFLDYSNSFCRTSSGWGGSLHPPCKRSFSPLTSTTEGPRKH

SEQ ID NO: 233674 - protein, 90 aa, Zea mays
  Clone ID: MRT4577_144703C.1.pep
MASAGDAEWQAAVRKVLVALKLCSGLPTGCRGCLYVLMYLRMSHVHFDIHVDTSFHIAYHIPYVGFGDSIAISSEIGCVMDYIMDEKIAD

SEQ ID NO: 233675 - protein, 58 aa, Zea mays
  unsure (1)..(58): unsure at all Xaa locations
  Clone ID: MRT4577_144704C.1.pep
DKRAEAAYAAYVARGLAYLHGRTVVHGDFKARNVVVGADGRAKLDXFRCARAVGSGRP

SEQ ID NO: 233676 - protein, 61 aa, Zea mays
  unsure (1)..(61): unsure at all Xaa locations
  Clone ID: MRT4577_144705C.1.pep
RPSRLXXKGALYSGFXSEKFSISNRFLSSGVXLVLYPFXVAETCYPARCFKQAASPKLGEG

SEQ ID NO: 233677 - protein, 232 aa, Zea mays
  Clone ID: MRT4577_144706C.1.pep
PAGLPVAFALLLVRQRFTAFSVNAVALLSAGAAMLGMNAGGDRPAGVSPAQYGAGFAMTLGAAALYGLLLPAMELSQAQARAGTAAAVTYTLVIEMQLVIGLTATVFSAVGMLANHDLHAIPGEAREFDLGRSGYYLLLAGSAATYQCFFLGTIGAVFFGSALLAGVVMTVLIPVTEVLAVVFFHEPFNGTKGVALALSLWGFVSYFYGEVQTSKAHHHLPDKPTNVERLDP

SEQ ID NO: 233678 - protein, 61 aa, Zea mays
  Clone ID: MRT4577_144707C.1.pep
MSSSNSAAMSGHSKGGNGLGKGGAKRHRKDLRDNIQGITQPAIRRLARMGGVKRISGLIYE

SEQ ID NO: 233679 - protein, 347 aa, Zea mays
  Clone ID: MRT4577_144708C.1.pep
MARSAGTRRRVARQLKSTHPIPSYRWKSKPMKKPMKKSNRKQVLPTLQKMDWEDANCSVCMEYPHNAVLILCSSHDKGCRPYMCGTSYRHSNCLDQFKKAYTKGALLEEVPANSVGSNLDSAPLAAEKTDSIDLACPLCRGKVKGWTVVEPARSYLNGKRRTCMQDGCSFVGTYKELRKHVKLEHPLAKPREVDPVLEQKWRLLEIERERQDALSTITATMGRAVVFGDYVLDLEDGMDSEDVDSDADNDGRGTENTRRMLLFIMRQVAQHHQNQRLQNATGASDNAEDNYVVSSGANGTTPYSYPLEGEDENGMVVAGGRSTDVLRPERRRRRRRRNRGRLFLGAN

SEQ ID NO: 233680 - protein, 132 aa, Zea mays
  unsure (1)..(132): unsure at all Xaa locations
  Clone ID: MRT4577_144709C.1.pep
GTLEGAGTLPNPSRRPDEQGRQGRHLTMATATAAPVPAGGHPYRRARTRCGPPRLRRLRFPGAXAAASCSLRAPCGMLRPRPXGGGRLGAELGCAFNELTGRMGEDLAXSSXAXLRFRVRKRGLPALREGGG

SEQ ID NO: 233681 - protein, 93 aa, Zea mays
  Clone ID: MRT4577_14470C.1.pep
MRGLLVLSVLFGAVFGKEDFVGPQVLRISVADEAQVRKVKELEDLEHLQLDFWRGPAHPGSPIDVRVPFPSIQAVKIFLESHGISYETMIEDV

SEQ ID NO: 233682 - protein, 344 aa, Zea mays
  Clone ID: MRT4577_144710C.1.pep
MARSARARRHVAHRIKSTHPIPSYRWKAKAMKKSNRKQVLPALQKMDWEDANCSVCMEYPHNAVLILCSSHDKGCRPYMCGTSYRHSNCLDQFKKAYTKGALLEEVPANSVGTDLDSAPLDAEKIESIDLACPLCRGKVKGWTVVEPARSYLNGKKRTCMQDGCSFVGTYKELRKHVKLEHPLAKPREVDPVLEQKWRLLEIERERQDALSTITATMGRAVVLGDYVLDLEDGVDLEDVDSDVDVDDDRGTENTRRMLLFIMRQVAQHHQHQRLHNVTGASENVEDNYVVNNGANGTTPYSYPLEGEDENDMVLAGGRSTDVLRPERRRRRRRRNRGRLFLGAN

SEQ ID NO: 233683 - protein, 65 aa, Zea mays
  Clone ID: MRT4577_144711C.1.pep
KGIMGYSKEELVSPTSLGDTRSSIFYAKAGIPFNDHFVKLVLWDDKEWGYSNRVVDLIPPMFKTQ

SEQ ID NO: 233684 - protein, 58 aa, Zea mays
  Clone ID: MRT4577_144712C.1.pep
ATRPRHNVCCNRIYSVSLHIAQCKDSLVTRRINVSMICRALTHDYPLIIYVHKIGPVS

SEQ ID NO: 233685 - protein, 77 aa, Zea mays
  Clone ID: MRT4577_144713C.1.pep
SGKARRAHNSDSVRVPCFQFLMTSYRLNKNHRLVYFVFRAGRHDIYRHYHERLMYLGETGWLIRCLQPAEERILRAT

SEQ ID NO: 233686 - protein, 75 aa, Zea mays
  Clone ID: MRT4577_144714C.1.pep
FLSREKKPPNFGGWVNLPRGLFPAKVQVLWGFGVINLKCYFPYHQAACGSFSPQEGATKVLGPFEPPLKGRTRTR

SEQ ID NO: 233687 - protein, 86 aa, Zea mays
  Clone ID: MRT4577_144715C.1.pep
IKLYIIFFQRPLLTFSKDLITSEEKHIMYDYKGEAIWGKVSICAGLLGKCFRLAKNLRNGASLHSFFSTCCVRPPNPIPVGPKFLA

SEQ ID NO: 233688 - protein, 143 aa, Zea mays
  unsure (1)..(143): unsure at all Xaa locations
  Clone ID: MRT4577_144716C.1.pep
GGGFFGNRSGSYPGGGGPKCFLQRTGIQALVFQPGTTYGGPGCLTSLPGGKNTPPPXFKDPFPXGFSPKTGDPKTGPPGLEXGPPGKXPANPFFPPKNSGGNKPQISPEEAPPPLVFGRPFYPDRRGESPPVLPPPFPGGEPP

SEQ ID NO: 233689 - protein, 76 aa, Zea mays
  Clone ID: MRT4577_144717C.1.pep
QDPEEAERLLKGRYRIINVWRPINGAVQSAPLAIASAASGNPDKDLVPIEHRYPTRTGETMAVVYNPETRWNYWSG

SEQ ID NO: 233690 - protein, 49 aa, Zea mays
  Clone ID: MRT4577_144718C.1.pep
KKTESNLIFLKVMIIASANLLYDMCFHQTEYATTKKKTLGPRPASSLRA

SEQ ID NO: 233691 - protein, 39 aa, Zea mays
  Clone ID: MRT4577_144719C.1.pep
LPLDLSKIDVTVYVLYSTDNYPDITKHLEKLSSCHITKI

SEQ ID NO: 233692 - protein, 245 aa, Zea mays
  unsure (1)..(245): unsure at all Xaa locations
  Clone ID: MRT4577_14471C.1.pep
IPRCHTLSQPPPPPPSPPPPLQPPPSIPWNWRGRQLDLSAAGGVGRNRMKARQFLNVVMERYGTGGAGGSLYTVSRINAKEHLFYRSTAEAQAAEKSRFDMECIWRMPTSRLRFEAYRSDDKRLNFLPFYGRRSGGDSKMLCMDAAGHTVLCDAAGLSVMPAPCLNEPKVDSPVSFSITRTNAETPNRADALYVLDRFVTSRNSFNFEALMFGEKTXDXVRLPPPPYVNNPAYNSTSIQSYTLPG

SEQ ID NO: 233693 - protein, 172 aa, Zea mays
  unsure (1)..(172): unsure at all Xaa locations
  Clone ID: MRT4577_144720C.1.pep
MASNNTGEPSTAPQPNRWYDLRLGSSCRDPALTTKFCTLRYEFKPASIDKTQAGSLQKSKDNRVTVEFHNNQPGRPKVAFEGSQEEYKDNDGVLFFDGETFRLERLHRAVKRLRHVRVPGESTSLAATTTGMGESHSPPLAKVGKLPATXQPSIHPVPVEVEHIDIGEPENP

SEQ ID NO: 233694 - protein, 62 aa, Zea mays
  Clone ID: MRT4577_144721C.1.pep
CESCAASAGRTASGSISNGCSATMWKIASRIASADVGDVDPSVRRRRAAAVAARRGQHVVSC

SEQ ID NO: 233695 - protein, 144 aa, Zea mays
  Clone ID: MRT4577_144722C.1.pep
APKEQPLPSPFGPPLFFRGSPSSQPAFKGNPGRALKVNNNHALSVKTTCNGAPVRFKFPPAMGWSPPLEKGTKRFKLGPRGFPFKKKGSKDKWGFLGNNPPPPEGVGVLDSIGSPRVKLQGGALPFLVNNLGTNKFFFQVEESP

SEQ ID NO: 233696 - protein, 120 aa, Zea mays
  Clone ID: MRT4577_144723C.1.pep
MPKIKTSRVKYPEGWELIEPTIRELDAKMREAENDPHDGKRKKEISRELYEFCLDQSYADRNLIAKWKKPGYERLCCLRCIQTRDHNFATTCVCRVPKHLREEQVIECVHCGCRGCASGD

SEQ ID NO: 233697 - protein, 145 aa, Zea mays
  Clone ID: MRT4577_144724C.1.pep
MPKIKTSRVKYPEGWELIEPTIRELDAKMREAENDPHDGKRKCEALWPIFRISHQRSRYIYDLYYRRKEISRELYEFCLDQSYADRNLIAKWKKPGYERLCCLRCIQTRDHNFATTCVCRVPKHLREEQVIECVHCGCRGCASGD

SEQ ID NO: 233698 - protein, 145 aa, Zea mays; identical to SEQ ID NO: 233697
  Clone ID: MRT4577_144725C.1.pep

SEQ ID NO: 233699 - protein, 145 aa, Zea mays; identical to SEQ ID NO: 233697
  Clone ID: MRT4577_144726C.1.pep

SEQ ID NO: 233700 - protein, 219 aa, Zea mays
  unsure (1)..(219): unsure at all Xaa locations
  Clone ID: MRT4577_144727C.1.pep
MIYLLKNMVVKKPMAACKYCTDVLCAASKQGTTRLWNHYYSYHDENKVKPSIRKLSSDDLIYNEEASVRKYYLAIIMHEYPINFCEHEYTNDFIRSLRPNYPLMGRKGSRTKIMDIFYNEKKSIFDYFCTLDCRFSCTMDLWTSNQNKGYLCVACHFIDNDWRIHKRIINFMHLKGRHTRANLSAAFMQNMDSWNLDHKLFALTLDXASPNDVCVDTVV

SEQ ID NO: 233701 - protein, 58 aa, Zea mays
  Clone ID: MRT4577_144728C.1.pep
QSNLSLPPSDFAKPPFPFSLLRCSKFRKLKAAYRKRKKGHKSSLSLSVKINKTAAANK

SEQ ID NO: 233702 - protein, 629 aa, Zea mays
  Clone ID: MRT4577_144729C.1.pep
GYLEAGRAGGYSYPQSSPSPLKLRDHLHRSPVSLFHTPASSPASRSPSVSWLAGRERERLFSSFVRNALGSCIDYAPVTSFPLGVRPAATGVDAAELAFELDENLSEAEPSCEPDAHELLAGAQARHHIFRDELVVKAFKEAERAHRGQKRASGDPYLQHCVETAVHLANIGANATVVSAGLLHDTIDDSFMDYDHIFRMFGAGVADLVEGVSKLSHLSKLARDNNTASRTVEADRLHTMFLAMADARAVLIKLADRLHNMNTIEALPLVKQQRFAKETMEIFVPLANRLGIASWKDHLENICFKHLNPEEHKELSSKLLMSFDEALLTSTLHNLDKSLRDEGISYHSLSGRHKSLYSIYSKMIKKNLTMDDVHDIHGLRLVVETEEDCYRALDIVHKLWPRVTGRFKDYICHPKLNGYRSLHTVIMCEGVHPFEIQIRTKEMHLQAEYGFAAHWRYKEGGCRHSFVLQMVEWARWVLTWQCETLSKERPSSLSSSVGIRPPCPFPLHSEDCSYSYSRQCNYEGPIFVIMLEHDKMSVQELPANSTVVDLMERVGANSPRWSPYSFPLKEELRPRVNHKPISDPNRKLSMGDVVELTPALPDKSLSEYREEIQRMYERGGFALATTPRS

SEQ ID NO: 233703 - protein, 79 aa, Zea mays
  Clone ID: MRT4577_14472C.1.pep
MQGSRRSKARSALPRAQKSSSSIDHGPMDRHLLPLSLLVAASLCVNVVVVGGTGDRAPWPVALAASTVVAAHLPRHRAQ

SEQ ID NO: 233704 - protein, 86 aa, Zea mays
  Clone ID: MRT4577_144730C.1.pep
QRLEHRAEHSKPSSSDGGGGCCSSSADGGGGCCSSPAIRPGRPPEARLEPVCLPDQSTRCYCRSSALTCNPLIRPYHVNLVLCNGE

SEQ ID NO: 233705 - protein, 134 aa, Zea mays
  Clone ID: MRT4577_144731C.1.pep
GIARIGIVKRCVSSELRKPWTTSRLGARPPQDPSSASITVGSSAARLTMNMRSKCHKEMITKQDQVKLAASSIDRIVNVSDSFMEPFVAGSNTFLSAAHVQLQTMNVLQPADAARHSEGLVGISKGGRVGSHRC

SEQ ID NO: 233706 - protein, 30 aa, Zea mays
  Clone ID: MRT4577_144732C.1.pep
FLGLLAWIEFLGLLAWIKASFVRDCSNYNL

SEQ ID NO: 233707 - protein, 80 aa, Zea mays
  unsure (1)..(80): unsure at all Xaa locations
  Clone ID: MRT4577_144733C.1.pep
YDSCDIMHMISDNMKXYKRPCRLNRIYTQKGDIXAVYANWCSDCDEHTSNNVLHAYIVGDVLDAYDDTHGNCIIPLVKVT

SEQ ID NO: 233708 - protein, 130 aa, Zea mays
  Clone ID: MRT4577_144734C.1.pep
GGVKFFSPRPVSFTWFSMPPTMGLLGPPTLFKRALFPVYFAPFQPGGPPPFGVSLGWKKKTPSSKKLPRKKGQSPVALSLFLGFFSPKCVSLWGPLFLVSCFQFKGFFPVFCPFLVPVFLKRFGFSPMFF

SEQ ID NO: 233709 - protein, 40 aa, Zea mays
  Clone ID: MRT4577_144735C.1.pep
TKSQVAKIYIVNSYIQLAIYITLHLSHMSKMTNSIALSTS

SEQ ID NO: 233710 - protein, 66 aa, Zea mays
  unsure (1)..(66): unsure at all Xaa locations
  Clone ID: MRT4577_144736C.1.pep
MPFLTEKRQSEANRIREKYPDRIPVIVEKAERSDIPDIDKKXYLVPADLTVGQFVYVVRKXIKLSA

SEQ ID NO: 233711 - protein, 50 aa, Zea mays
  Clone ID: MRT4577_144737C.1.pep
DQLRRHADMTTSRLFAVMISAKFQNNITNRVFVVDTTVKKSNDYPVGPIV

SEQ ID NO: 233712 - protein, 75 aa, Zea mays
  Clone ID: MRT4577_144738C.1.pep
LQHPRVSRINRASRLFTIDSSLPTPTAPGPRVRQHGPPRRRRHVGTPSGGRGGGRVHPGDGLGEVLRPEADGVAG

SEQ ID NO: 233713 - protein, 85 aa, Zea mays
  Clone ID: MRT4577_144739C.1.pep
NARVHPSRARTQGRTLGLARALLPSSSARHPCASAGHLALPTTMAAAVVVFGQSRSGFGARGRPGEAMPSTGGLRGLPLSPPERP

SEQ ID NO: 233714 - protein, 92 aa, Zea mays
  unsure (1)..(92): unsure at all Xaa locations
  Clone ID: MRT4577_14473C.1.pep
MVGLFFSPTLFPVRGGAPSPFHTNGGFRDIVFFQKIWVPTGVPPPIFSPGGSLTAPGGTSSVPLPXPGTXGFFCAPPQEAGMVANFPLPYLS

SEQ ID NO: 233715 - protein, 97 aa, Zea mays
  Clone ID: MRT4577_144740C.1.pep
CVASGVAAGAGGAAASSPLVAGLYSLGWRPGSSLTKRGSVVHSSHPPWRGAQSDTSSSPPLPDPYCLSIGPLRGEKALDSPAAHIFFCSGDSLMFTM

SEQ ID NO: 233716 - protein, 112 aa, Zea mays
  Clone ID: MRT4577_144741C.1.pep
SLVRRVHQLISRSDIGQQKYNWNLSPASSGEGSAVSAFPSDKVCEVVEKMKLIHTTEFFLLFYCFFRRKKKDNSKHVLLLLHSLLDRIFMMLTLLLFAEAGHWLGLNLRHYL

SEQ ID NO: 233717 - protein, 71 aa, Zea mays
  Clone ID: MRT4577_144742C.1.pep
REHERGLHTGDGSRRCVTRVIGGLAANSNSGEEFGRTPATPALGIAWGLPKMCSNPPWPDIKYTPRWNPAP

SEQ ID NO: 233718 - protein, 81 aa, Zea mays
  Clone ID: MRT4577_144743C.1.pep
NRELAKQFLQGGNTGYTKLICILAKPVCSRNTWVGGGALLLPMFHDSIFAGLFFPSISPNSSRVNVRCGVPPTLEIKPGFY

SEQ ID NO: 233719 - protein, 234 aa, Zea mays
  unsure (1)..(234): unsure at all Xaa locations
  Clone ID: MRT4577_144744C.1.pep
RRAGRIRVTSARTASTTYIRCDGRSSEDIQVCFADDYLSFQTFADDFTXTRMEHEMHPXVAPKADCPXIERDRAPVAKDEYRSCDHKETCFVEYFRSATXVDRVGXRMIIGCLPRKMRHGGRITTLRVIHCIISCHQIHXHLLVCLXDPPHVKLVMDKEVNNLQELKEMYNERPFLKPNRQLLDMDCARVHPDIGALYDQLLVAQELSXFVNELRDXYEETGGFTSHSCTHDIL

SEQ ID NO: 233720 - protein, 64 aa, Zea mays
  Clone ID: MRT4577_144745C.1.pep
IVPVFVFVNQPYPGRVVSLASTPSPIPIMASLTVSVGLVLVYMTRHLSFSPYLCTVQRGRFMLS

SEQ ID NO: 233721 - protein, 375 aa, Zea mays
  Clone ID: MRT4577_144746C.1.pep
MAAAAIHQFAECITCHAWSPDQSMIAFCPNNHEVHIYKFFTDKWEKLHVLSKHDQIVSGIDWSNSSNKIVTVSHDRNSYVWTQEGSDWIPTLVILKLNRAALCVQWSPKENKFAVGSGAKSVCICYYEQENNWWISKVIRKRHESSVTSLAWHPNNIYLATTSTDGKCRVFSTFIKGVDTRGSQSSTSTNSKFGEQIAQLDLSSTWVFGVRWSPSGKTLAYAGHNSMVYVIDEVESSPVAQNLTLRDLPLRDVLFVSERTLVGVGFDCNPMIFAADDTGLWSFVRFLDEMKAAPSASKASQLSEALGKLYGQSKQGASSDTVEPSKARGGAHENCITCIVPLRKGSDGTIKRFSTSGLDGKVVVWDLENHVSIAK

SEQ ID NO: 233722 - protein, 37 aa, Zea mays
  Clone ID: MRT4577_144747C.1.pep
INLLYLVVESLLRVYCCRCYQETVVGPFALGVLHLAL

SEQ ID NO: 233723 - protein, 139 aa, Zea mays
  unsure (1)..(139): unsure at all Xaa locations
  Clone ID: MRT4577_144748C.1.pep
MDSEHWISRLAAAKRFYAAQLGHIDDMSGMGMEEVDMDMEDDGEMDMEMEMQMEEARWPEVACPYCYEDYDLGSLCVHLEEDHPYEPHPAPCPICSXKITRDMLNHITMHHGYLFKALLGGGHSHRSRDTNAATTKYYA

SEQ ID NO: 233724 - protein, 94 aa, Zea mays
  Clone ID: MRT4577_144749C.1.pep
GSCVAPFDARQHNICYVGVPCLGAFRSRVLSPSRRLCALRLTGCSGVVPGPFWSESTSTTSATYWTVLRAYGWHSTAQVLCSYGYRFLSVLVGS

SEQ ID NO: 233725 - protein, 65 aa, Zea mays
  Clone ID: MRT4577_14474C.1.pep
GGAPAPAPPCSYRLRPIFVARAHVASPRAMSFQNHATPFRRAARLVSWIECRRTRHLPSNACTYE

SEQ ID NO: 233726 - protein, 53 aa, Zea mays
  Clone ID: MRT4577_144750C.1.pep
NFPVYTQYKRHTFTVKKGAQCLKPHVFKGTNLVTGGKPPLGACFKGNILGGGF

SEQ ID NO: 233727 - protein, 38 aa, Zea mays
  Clone ID: MRT4577_144751C.1.pep
GVFFVGGEKKKKKKKKKKKKPKKKKKKPKKKKKKKKKE

SEQ ID NO: 233728 - protein, 81 aa, Zea mays
  Clone ID: MRT4577_144752C.1.pep
RSRAPGDLRLHAGTSSFLSDVIAFTTSWPERPHHHGVTPSPGCSASSPREANCATRAGRVSYAWAPSYLHERWDSQAVQIG

SEQ ID NO: 233729 - protein, 108 aa, Zea mays
  Clone ID: MRT4577_144753C.1.pep
PRVRPRVRPRVRPRVREDLRHDLACMFGIQGQLEDPYRTDWKLVYVDHENDILLVGDDPWEEFVSCVKSIKILSSVEVQQMSLDGDLGCIPPQTQACSASDDANAWRA

SEQ ID NO: 233730 - protein, 52 aa, Zea mays
  Clone ID: MRT4577_144754C.1.pep
VRSLRVGLLLRAAGLTMSPISPAASFSLRTAFTDTLPHWLSTNGDRCSLPLA

SEQ ID NO: 233731 - protein, 61 aa, Zea mays
  Clone ID: MRT4577_144755C.1.pep
RVSASGHSPSLSYTFPKVPLRGDQLRPRYRACKPLTLHADRSLASWVEGTLIPPRSDLMVT

SEQ ID NO: 233732 - protein, 126 aa, Zea mays
  Clone ID: MRT4577_144756C.1.pep
MHCFASPSPGLRPRPGRKQNTGMEGYDRVLYQFIDQLRMQMAAFTGLSLGYSMWAPVGRSNNSNDALFTGSSTTADSAATSNSTSGLKFNDAGTALISYGKMTFLTGASSGVTYYAERYNYNQPPQ

SEQ ID NO: 233733 - protein, 104 aa, Zea mays
  Clone ID: MRT4577_144757C.1.pep
AMNMCEVTFAVSHPHRRRTGGSRGATHRGVRFDLGGVSQLTFWRQGWILIRSIFIFYFVRLPLRNKYSDYIVTFISIHSVIIYVVFFGACMRCTRLCPLNPGVT

SEQ ID NO: 233734 - protein, 297 aa, Zea mays
  unsure (1)..(297): unsure at all Xaa locations
  Clone ID: MRT4577_144758C.1.pep
MNPLTQVKRTQIINQKEALLGIGEDASWHAKFKDSAYVYVGGVPFDLTEGDLLAIFAQYGEVVDVNLVRDKGTGKSKGFAFLAYEDQRSTILAVDNLNGAKVLGRIIKVDHVSKYKKKEEEDEEELQKKREARGVCYAFQKGECNRGASCRYSHDEQRNANTGWGSKEDSGARWEHDKHSDVPKSRGMCYAFQKGECNRGASCKFSXRAEKCKQSSGXRDGGPSRSERYGDRESRSRHDDRRAEDRDRFRRDNSPERSRGERQRDDDRSDRGRETKSERRRYDVEHEDRKRSRHGRE

SEQ ID NO: 233735 - protein, 287 aa, Zea mays
  Clone ID: MRT4577_144759C.1.pep
TIIFGADVTHPPPGEDSASSIAAVVASMDWPEITKYRGLVSAQPHRQEIIEDLFTDSKYPQMGHNVNGGMIRELLIAFRKKTNRKPERIIFYRDGVSEGQFSHVLLHEMDAIRKACASLEEGYLPPVTFVVVQKRHHTRLFPEVHGRRDMTDKSGNILPGTVVDQMICHPTEFDFYLCSHAGIQGTSRPTHYHVLYDENEFTADALQSLTNNLCYTYARCTRAVSVVPPAYYAHLAAFRARYYVEGESSDGGSTPGSSGQTVAREGPVEVRQLPKIKDNVKDVMFYC

SEQ ID NO: 233736 - protein, 63 aa, Zea mays
  Clone ID: MRT4577_14475C.1.pep
SCCRLRLPTWFHWPEAVQLAHADAGMSASERGLNSDLMSPRAVGGSPHTLRCAVLFRELNPTY

SEQ ID NO: 233737 - protein, 98 aa, Zea mays
  unsure (1)..(98): unsure at all Xaa locations
  Clone ID: MRT4577_144760C.1.pep
MDMASPALLTDDLLSDIFLRLASRPXLVRTAAACIPFRRLVADRAFLRRYRSLHPAPLLGFLDHNGFHPALSPHASAPAARAVSLAADFSFSFLPASS

SEQ ID NO: 233738 - protein, 117 aa, Zea mays
  Clone ID: MRT4577_144761C.1.pep
TKLTLRKSTEGLEFVLQHHQFLVGEFFSLHPLRLQAVASPINLSPEKTRYSRSSCYLVPNLQYAFFIDYVRSDHHHLRWTTDIAEQFLGPNLLEPCLCPVQNFYWGIRLLLGCTCCC

SEQ ID NO: 233739 - protein, 62 aa, Zea mays
  Clone ID: MRT4577_144762C.1.pep
IKQQTKATTFKYQNLTALVVCKLRVQTSIPHKNLDHFSICACHPCAGAMLIFSVSFQFYRMS

SEQ ID NO: 233740 - protein, 101 aa, Zea mays
  Clone ID: MRT4577_144763C.1.pep
GKTNHFFYTKAPPKKLNGTQGYYYGPEPWAHYAFSKTPLPNHTTIFNWPPDSPFLIFNSGRRGIQIQSPHREKPVWGRAHTNTHYWPFAKGLAFGPHKNTF

SEQ ID NO: 233741 - protein, 210 aa, Zea mays
  Clone ID: MRT4577_144764C.1.pep
SEQVLQVHNQMQQLRCEPDVITYNFLIETHCGKGQGNLDAALKVLDKMTAKKCVPDCHTFNPMFRLLLVLGNIGAAHKLYEKMRELQCKPNVVTYNCLLRLFNKEKSMDMVLRMKKDMDAEGIEPNMHTYAALIEAFCGRGNWKRAHTTLKEMIEEKSFKPSKQVRDMVLVLLRKAGQLKKHEELVELMVDRGFISQPPNDALWSALSAC

SEQ ID NO: 233742 - protein, 82 aa, Zea mays
  unsure (1)..(82): unsure at all Xaa locations
  Clone ID: MRT4577_144765C.1.pep
ASLPPPEQDAKRVKNPXWLVVIGVCTHLVCIPLPNPEDFGGWFCPCHGSHYGISGRIRKGLAPFNLEVPTYSFLEEYKLFIG

SEQ ID NO: 233743 - protein, 123 aa, Zea mays
  Clone ID: MRT4577_144766C.1.pep
RLAARFARAVLCPLRVAGFLVRRGACVVGSVQFVYRSPVRAARHTWPLSVVESLESLRVHHLPVSRFIRLNRSSPAVHACQCAAILVRISPMASIYTIYVRLSVSPVVDFSIRYGHHVGRPYP

SEQ ID NO: 233744 - protein, 183 aa, Zea mays
  unsure (1)..(183): unsure at all Xaa locations
  Clone ID: MRT4577_144767C.1.pep
MVKAVAVLGSSDGVKGTIFFTQEGDGPTAVTGSVSGLKPGLHGFHVHALGDTTNGCMSTXLFFFLLWLAYVIRMCAKLISVIELSTCWXXGPHYNPASKEHGAPEDENRHAGDLGNVTAGADGVANINVTDSQIPLTGPNSIIGRAVVVHADPDDLGKGGHELSKSTGNAGGRVACGIIGLQG

SEQ ID NO: 233745 - protein, 52 aa, Zea mays
  Clone ID: MRT4577_144768C.1.pep
SAHRREKIWPGRCLKLHPYMNCAKMKPGQFVRACSNYTRPHTVIYKPSTGWA

SEQ ID NO: 233746 - protein, 152 aa, Zea mays
  Clone ID: MRT4577_144769C.1.pep
MVKAVAVLGSSDGVKGTIFFTQEGDGPTTVTGSVSGLKPGLHGFHVHALGDTTNGCMSTGPHYNPASKEHGAPEDENRHAGDLGNVTAGADGVANINVTDSQIPLTGPNSIIGRAVVVHADPDDLGKGGHELSKSTGNAGGRVACGIIGLQG

SEQ ID NO: 233747 - protein, 104 aa, Zea mays
  unsure (1)..(104): unsure at all Xaa locations
  Clone ID: MRT4577_14476C.1.pep
SDAPDPAAAMDIDDAEHYHTAYMSTDDIIQASRLQDNNEPTLKDXRQRTNLQLETLKDKMNENQEKIKLNKQLXPYLAPNIGEISQMNPEDEADDEAANTDIDS

SEQ ID NO: 233748 - protein, 232 aa, Zea mays
  unsure (1)..(232): unsure at all Xaa locations
  Clone ID: MRT4577_144770C.1.pep
MGPGASTSAQPLSRLLLSLPKPGAAKHPRSSSSSSSPSQPRPDVAAARSPGLVLRRREAAAALLSTAFLSRFALPAAAADGGECPLEVAPSGLAFCDRAVGTGAAAQEGQLIRAHYTGRLEDGTVFDSSYKRGKPLTFRVGVGEVIKGWDQGIVGGEGIPPMLAGGKRTLKLPPALAYGEKGAGCRGWEPTSCVIPPXSTLLFRRSSNVGQSQRLRSPETLKVLNARGQGSD

SEQ ID NO: 233749 - protein, 152 aa, Zea mays
  Clone ID: MRT4577_144771C.1.pep
MVKAVAVLGSSDGVKGTIFFTQEGDGRTAVTGSVSGLKPGLHGFHVHALGDTTNGCMSTGPHYNPASKEHGAPEDENRHAGDLGNVTAGADGVANINVTDSQIPLTGPNSIIGRAVVVHADPDDLGKGGHELSKSTGNAGGRVACGIIGLQG

SEQ ID NO: 233750 - protein, 374 aa, Zea mays
  Clone ID: MRT4577_144772C.1.pep
MGAYATTGMQMIATRPSIPAYRQILGSTSALSAFGRSICSRTGFAISSKATSAGPLVSSNCKRVVVRAMSQRGAQGLPIDLTGKRAFIAGVADDNGYGWAIAKALAAAGAEILVGTWVPALNIFETSLRRGKFDESRKLPDGSLMEIAKVYPLDAVYDTPEDVPEDVKANKRYAGASNWTVKEVVETVKNDFGSIDILVHSLANGPEVTKSLLETSRRGYLAAISASSYSYVSLLQHFLPIMNPGGASISLTYIASERIIPGYGGGMSSAKAALESDTRVLAYEAGRKGKIRVNTISAGPLGSRAAKAIGFIEKMIEYSYVNAPLQKELLADEVGNTAAFLVSPLASAITGSTIYVDNGLNTMGLALDSPTLST

SEQ ID NO: 233751 - protein, 55 aa, Zea mays
  Clone ID: MRT4577_144773C.1.pep
ATRFCNINFFCYSTHKMRMRMGTFYNNNNCCHLSQLDLTNPTTLLQHATIGGAIF

SEQ ID NO: 233752 - protein, 152 aa, Zea mays
  Clone ID: MRT4577_144774C.1.pep
MVKAVAVLGSSDGVKGTIFFTQEGDGPTAVTGSVSGLKPGLHGFHVHALGDTTNGCMSTGPHYNPASKEHGAPEDENRHAGDLGNVTAGADGVANINVTDSQIPLTGPNSIIGRAVVVHADPDDLGKGGHELSKSTGNAGGRVACGIIGLQG

SEQ ID NO: 233753 - protein, 152 aa, Zea mays
  Clone ID: MRT4577_144775C.1.pep
MVKAVAVLGSSDGDKGTIFFTHVGDGPTTDTGSVSGLKPGLHGFHVHALGDTTNGCMSTGPHYNPASKEHGAPEDENRHAGDLGNVTAGADGVANISVTDSQIPLTGPNSIIGRAVVVHADPDDLGKGGHELSKSTGNAGGRVACGIIGLQG

SEQ ID NO: 233754 - protein, 152 aa, Zea mays
  Clone ID: MRT4577_144776C.1.pep
MVKAVAVLGSSDGVKGTIFFTQVGDGPTTVTGSVSGLKPGLHGFHVHALGDTTNGCMSTGPHYNPASKEHGAPEDENRHAGDLGNVTAGADGVANINVTDSQIPLTGPNSIIGRAVVVHADPDDLGKGGHELSKSTGNAGGRVACGIIGLQG

SEQ ID NO: 233755 - protein, 154 aa, Zea mays
  Clone ID: MRT4577_144777C.1.pep
MVKAVAVLGSSDGVKGTIFFTQEGDGPTTVTGSVSGLKPGLHGFHVHALGDTTNGCMSTGPHYNPASKEHGAPEDENRHAGDLGNVTAGADGNGVANINVTDSQIPLTGPNSIIGRAVVVHADPDDLGKGGHELSKSTGNAGGRVACGIIGLQG

SEQ ID NO: 233756 - protein, 152 aa, Zea mays
  Clone ID: MRT4577_144778C.1.pep
HSYSILYSIECCLHLVDSSCLDLLLGPTAVTGSVSGLKPGLHGFHVHALGDTTNGCMSTGPHYNPASKEHGAPEDENRHAGDLGNVTAGADGVANINVTDSQIPLTGPNSIIGRAVVVHADPDDLGKGGHELSKSTGNAGGRVACGIIGLQG

SEQ ID NO: 233757 - protein, 164 aa, Zea mays
  unsure (1)..(164): unsure at all Xaa locations
  Clone ID: MRT4577_144779C.1.pep
PPLFFTPLVPGGPGTPFFFFLLGGPAPPHNPPGRIPRAAGSFKAVPLSPPFQNGHRGGVGPPPSPLCLGGPPPKFFMRGGGGPPXKQEQGGVKVFPRGPQPFLGGGGLLFVVPLPPPKRXPSPPLRKIRGGXGGREAPPGGGSPPPFLGGAGGCEPEPPLLLEK

SEQ ID NO: 233758 - protein, 66 aa, Zea mays
  Clone ID: MRT4577_14477C.1.pep
IISHIAVIGYNAHLPRLVQQYLHILRSQSVCCLVHVQGNKGPLFFCAGQYLFWQQTRVPFGMKHQH

SEQ ID NO: 233759 - protein, 151 aa, Zea mays
  unsure (1)..(151): unsure at all Xaa locations
  Clone ID: MRT4577_144780C.1.pep
QDAEEPILCFYNXGFFCTSQTMNMCSNGHNDMITNQDHSKMPASSIHSIANASNCGMEPHDARNIXDELMPEMTFKQRTGNYPLMLPNPARFRRRSLKDENXPNRCNACMKTVGLTGFNXRGDNLYWALQLYXDNHDCQFHYRDAARDPID

SEQ ID NO: 233760 - protein, 78 aa, Zea mays
  Clone ID: MRT4577_144781C.1.pep
YHKHKQHDQDHFYHNFSWILVSDRFLLIFKRMEKKLKFCKLTVLYSGNITVVKSRGSRAKLPGIKYWFYHLYLCALIS

SEQ ID NO: 233761 - protein, 38 aa, Zea mays
  unsure (1)..(38): unsure at all Xaa locations
  Clone ID: MRT4577_144782C.1.pep
LXKKKKKKKKKKKKKKKKKKKKKKKKKKKTRRGSRALF

SEQ ID NO: 233762 - protein, 80 aa, Zea mays
  Clone ID: MRT4577_144783C.1.pep
KDGGPLFFNKNNGSPNVVSIIITPCCQQNVFFLDPNPYFGGHKQSFPSPCPFKKIDTPRWAFWVSHGHLINKPHLVFWPI

SEQ ID NO: 233763 - protein, 75 aa, Zea mays
  Clone ID: MRT4577_144784C.1.pep
QVYQLFTDYQIKDGHVILQLNANPSSDLLCVRIRIFELFEDWFLSPATFTVYEYRRPDKQCTMLYSTSNINNQKV

SEQ ID NO: 233764 - protein, 37 aa, Zea mays
  Clone ID: MRT4577_144785C.1.pep
MFYFSYHSGLLIGSRFLLNDSIIGCRGGLLVETWVFI

SEQ ID NO: 233765 - protein, 280 aa, Zea mays
  unsure (1)..(280): unsure at all Xaa locations
  Clone ID: MRT4577_144786C.1.pep
MAAPQQSAPLSGSAPKRLRAMASDAAAVPNPPASSGCPAMKAEFAKHAEYLNTLNDKRERLVKASRDITMNSKKVIFQVHRITKVNRDEVLSKAENDLAAVVNQYIAKLVKELQGTDFWKLRRAYTFGVQEYVEAATLCRFCKTGTLLSLAEINDSLLALSGQSVEPLQLNVLDYLLGVADLSGELMRLAIGRISDGXEVEYAKTICAFVRDIYRELTLGVPLMDDNSEMKKKMEVMLQSVVKIENACFSVHVRGSEYIPLLESSADPGYSYFGAPDFDQ

SEQ ID NO: 233766 - protein, 62 aa, Zea mays
  Clone ID: MRT4577_144787C.1.pep
AATLALFQQHNCSLLKAKCLEFVTRSPETLDAILATDGYEHLVASCPSVLAELLRAARGRKI

SEQ ID NO: 233767 - protein, 164 aa, Zea mays
  Clone ID: MRT4577_144788C.1.pep
MKSAMLPLLLLLAVAGPAAAKPTAYEALAAFDFPPGIIPKGVVSYTLDNATGDFTAHINSSSTCEFSIQGSYSLRYKPDISGRISVDRLTNLQGVTVKVLFFWLNIVEVTRSGDQLGFSVGIASADFGLDNFLESPTCGCGFDCNDLLLPRSTAGSSLRLRGAF

SEQ ID NO: 233768 - protein, 198 aa, Zea mays
  unsure (1)..(198): unsure at all Xaa locations
  Clone ID: MRT4577_144789C.1.pep
AALPADQDEAYGQTNLRARHVPGRNVRTNLLTMYCTTNXITSLLKNLLTLIETYVDAHTADNYMLRXMLIGFTIRRTNQRTRTCYTNAYDIAYIIRKMVEMMINNIITCDLTXHLNKLIPKVIAKEIDKYTYNIFSIINALIHVVMILEAILIDLKKDLEEYVDYHEDYGEDLDMTLESADAIHEAIHDDDAICYFII

SEQ ID NO: 233769 - protein, 117 aa, Zea mays
  Clone ID: MRT4577_14478C.1.pep
RNAVYDLQWPSNNNNYLIAEFVDPEEAMANQTLVPPHVPATSRGLLPTPARFAKLPPTSDPGPARESLPPPPLSLEPARTLDELFKKTQTYPRIYYRPLSEEEVSAKRAAHDKGRRG

SEQ ID NO: 233770 - protein, 174 aa, Zea mays
  unsure (1)..(174): unsure at all Xaa locations
  Clone ID: MRT4577_144790C.1.pep
NWQEHXYRSCHDNKVTRKFCRNTNKYTHPRSIIKLPRSQKKREGPRQLLFSQISWITHSRLWLASGPRSCIRRQAVTRTAPLAAESPESSARCCSGHFLLPVPPAVSSICGSVDHVPNAQLEAGKPAVRHRMRQRLVERRRGVLLLSPAAAGDSGGRPCISYDEQPEGGIAAQY

SEQ ID NO: 233771 - protein, 57 aa, Zea mays
  Clone ID: MRT4577_144791C.1.pep
RFRLSDERASLLTLGKWLCACHALTRDHLHNGGQDFGGRIVLGVDIQCKRARAHYST

SEQ ID NO: 233772 - protein, 63 aa, Zea mays
  Clone ID: MRT4577_144792C.1.pep
IRDRSPDGSICVVVRTLLTAPPARTRNRLASCARPRYGGCGPCTTADGIAVLPPRPFSSLRLR

SEQ ID NO: 233773 - protein, 84 aa, Zea mays
  Clone ID: MRT4577_144793C.1.pep
TERAFIDLACTVSPGRSNMFMLTSPHYLCGWRAGSCLPPVDYIFWWHVAVVSKTRSSSFWTHKVWVNPRHTSRGLSTRTRLWHA

SEQ ID NO: 233774 - protein, 223 aa, Zea mays
  unsure (1)..(223): unsure at all Xaa locations
  Clone ID: MRT4577_144794C.1.pep
MATSSVLPFHLPSCARRASTAARASAAPVAAAAATTAQSLEESFGRKGLRFVADPAGGAPAAELSVRNGSSLHLRLGDGLVTSYKPKVQWKDDGCREVLHTVGGKGGVGLVLSDQASGGQSSLLDGAEWAVRDADSDSYDAVQVELGCTMGKLDISYVVTLYSLSMATAVIVRNTGSKPVALTGAVLSHIKFDKRSGTAVEGLRGCPYCSHPPPXAAFSLLSP

SEQ ID NO: 233775 - protein, 73 aa, Zea mays
  Clone ID: MRT4577_144795C.1.pep
MSSTATAADCGGAKTSWPEVVGKSVEEAKKVILKDKPDADIVVLPVGTIVTADFVPSRVRIFVDTVAQTPHIG

SEQ ID NO: 233776 - protein, 122 aa, Zea mays
  Clone ID: MRT4577_144796C.1.pep
LLNGVPGEIISHQRGLRQGDPLSPLLFILVMDVLNLLIQKASDEGLLQQLSSGTLHHRLSLYADDAVVFLRPVASDISLVLEILRLFGEASGLKTNVLKSSVFPIRCTEDDLMRVQASLPCP

SEQ ID NO: 233777 - protein, 357 aa, Zea mays
  Clone ID: MRT4577_144797C.1.pep
MATSSVLPLHLLSCARRASTSTSTAARASAAPAVAATTAQSLEESFGRKGLRFVADPAGGPLAAELSVRNGSSLHLRLGDGLVTSYRPKVYWKDDGCREVLHTVAGKGGVGLVLNDATSSSAQPSLVDGAEWAVRDADSDFYDAVQVELGCTIGKLDISYVVTLYSLSMATAVIVRNTGSKPVALTGAVLSHIKFDKRGGTAVEGLRGCPYCSYPPPAAAFSLLSPAEAMKREDPGWFGGGGGEEPRQGVWTIEEDLYTTLKKKVSRVYAAPPEERKKRVYSTAPSKFTTIDQYSGLGFRLVRMGFDDMYLCSPGGMYDKFGKDYFLCTGMASMLVPVVVNPGEEWKAAQVIEHDNL

SEQ ID NO: 233778 - protein, 88 aa, Zea mays
  unsure (1)..(88): unsure at all Xaa locations
  Clone ID: MRT4577_144798C.1.pep
AAAPLPKNSPDSICQLIELHAPTLPRRLNRLRYERRLTIAPIDASDTVLEYYVGVNYTEPXNSEKDKEEEMLGSGDHKGEGEMADDQT

SEQ ID NO: 233779 - protein, 120 aa, Zea mays
  unsure (1)..(120): unsure at all Xaa locations
  Clone ID: MRT4577_144799C.1.pep
KSCLRLQHPYSLKSSKGAPILPRPVFVFFIATFGFYVCYLSFNQITLENNREGNSXEEQRDDICRKPYVPYEELSYVHFPEPTSYSRGECSCTPVRFFVIVSMQRSGSGWFETLMNSHPN

SEQ ID NO: 233780 - protein, 249 aa, Zea mays
  unsure (1)..(249): unsure at all Xaa locations
  Clone ID: MRT4577_14479C.1.pep
MALLRAAAAALRRRARVAALPAVSPFPHTHGQTSSPSPSPGPVSNPAARRHLITLSRRGPCLRPPSASASASSHYIDRILLPSSFSHPLSTSSRDKDTDRDKEESIPPLPPASWVERLLPEAARPYAMLARLDKPIGTWLLAWPCMWSITIAAMPGKLPDLKMLALFGCGAVLLRGAGCTVNDLLDRDIDNKVERTKSRPFASGALTPSQGVAFLGAQLLLXLGILLQLNXFSRVLGASSLLLXFXYPL

SEQ ID NO: 233781 - protein, 56 aa, Zea mays
  Clone ID: MRT4577_1447C.1.pep
LDRGRACRSGHYASSSVEPRALDEFAISNNTSSREASDAFRQPRIYMLCEVVVTVD

SEQ ID NO: 233782 - protein, 174 aa, Zea mays
  unsure (1)..(174): unsure at all Xaa locations
  Clone ID: MRT4577_144801C.1.pep
MHPYSLKSSKGAPILPRPVFVFFIATFGFYVCYLSFNQITLENNREGNSREEQRDDICRKPYVPYEELSYVHFPKPTSYSRGECSCTPVRFFVIVSMQRSGSGWFETLMNSHPNISSNGEIFNRVDRRENISSILQTLDTLYNLDWLTSAAKNECTAAFXGLKWMLNQGIFGKP

SEQ ID NO: 233783 - protein, 68 aa, Zea mays
  Clone ID: MRT4577_144802C.1.pep
SLESLDSLMLASSCTRLDYSRTVSLLFKRCQTHPCLSEATTRGPSAYTRISIWAHVTLTFLQQSISWC

SEQ ID NO: 233784 - protein, 66 aa, Zea mays
  Clone ID: MRT4577_144803C.1.pep
LTHPLPRGLERGVSRSAWSPCRPCASARISARGSGCGSIYGERVRARRLAPVQQACGRGIGSAPAP

SEQ ID NO: 233785 - protein, 76 aa, Zea mays
  Clone ID: MRT4577_144804C.1.pep
GGAFVQQGPPARPLGEKGHPGGAIPPGPKGAREKKGLLCQIQEKLPRKPLKGPKRGFFFFCWGVKTGFLGVPKKKK

SEQ ID NO: 233786 - protein, 97 aa, Zea mays
  Clone ID: MRT4577_144805C.1.pep
KPAGHLPLRARKSRLPPHRSWPNQQTARKPPAERRRGSNWRITRPASLKHATAGAKKPHRFRPTNAPPPETRRPPPRTNTEGPKNDKNTNDCIDTLP

SEQ ID NO: 233787 - protein, 92 aa, Zea mays
  Clone ID: MRT4577_144806C.1.pep
GAVPGDFIEKAGSLVLTALPKKRGRAKNKKPFFPQKKGFAQNLFCSWENWSLSEAFSPRVPLWYSFKTPPLFFSSWTLFFLKKREGPSLFLF

SEQ ID NO: 233788 - protein, 42 aa, Zea mays
  Clone ID: MRT4577_144807C.1.pep
MPSHADLDHQISHLRERKLLPAVEVKTLCVMAMAILMGEWNV

SEQ ID NO: 233789 - protein, 133 aa, Zea mays
  Clone ID: MRT4577_144808C.1.pep
HLDQVESLRVRRLLFDHLFSVVKQRLSTGLQRQGRGGDRTTIARGSRRGTGLGSRRIPASMIFTSGEGDLTSDGRSRAKVFVRRSPLPNRSEDEQPGSALVRASGGNGEIGCGDNFLPFLSTLSRLAQLNDSR

SEQ ID NO: 233790 - protein, 131 aa, Zea mays
  unsure (1)..(131): unsure at all Xaa locations
  Clone ID: MRT4577_144809C.1.pep
DLKVLPGGDDXDLELNAEPHFLSFLQRFXASSKDXTSHAFXRLSXFKANLXPRPPYQLLDXSXAEHGITKFSDSSPPEFRXRPFXGXRKFRRXLLRELGXSAHEAPVLPPMVSPXDFDWRDHGSXVAPVKN

SEQ ID NO: 233791 - protein, 79 aa, Zea mays
  Clone ID: MRT4577_14480C.1.pep
TIGAPTNPGWTISHTLTTIARTRKLTLTEYGQGANLSHSRTHTLTGYHAASWRLLIKANNRLLQRGASQLRGPKPNARA

SEQ ID NO: 233792 - protein, 237 aa, Zea mays
  Clone ID: MRT4577_144810C.1.pep
HWVPRGRPGELFQVRLLPLQVYTCVIRGLGKGNSPDAEFDVIEHLKRRGVVPNQFVYNCLLGGGKSCGELGRVQAVLDDMEAQGVPPNIVTFNTLMSIHVQQGRVEDALRVYADVQGRGLVPTAATYSTVMSAYNKAGDASADIQLFALVMERYRNGELVGSRGDPEQELVKLEKLTVRACYLSMRRSLVRGKNPVGEALKVLLDMDETSVLAERSDYERLVWVCTRDEHYAIVQEL

SEQ ID NO: 233793 - protein, 100 aa, Zea mays
  Clone ID: MRT4577_144811C.1.pep
QKGNGDHKQNSDSLVDGYRFCLRFALIKAITPGRPSLASPPSITYDAYGDRQTHRPCTQQAKSHYPSRRHCSLTTSQDVPGHKDHCTNQRHHHNDYGDCA

SEQ ID NO: 233794 - protein, 122 aa, Zea mays
  Clone ID: MRT4577_144812C.1.pep
TRTQTRGCGLNLFFIVFTLILVFAFAIVALHPKVPSCSLFFSVLLILHLFILLDLTRNRCLISYTGWVWGLGQYYTCNSRLLGWFDCFRFHLGHRMTMLSKNYVYTFPLNVTIFFVLNNAEL

SEQ ID NO: 233795 - protein, 274 aa, Zea mays
  unsure (1)..(274): unsure at all Xaa locations
  Clone ID: MRT4577_144813C.1.pep
MTGCLWPCVGAAVAGHGAGHRKAGLFRSKPRTPAEVVQHARDLVTYXSTTRTAAAPXKRDAKHEHRMVELSKEVKEMKGILYGNGEEDPCEEACKQLTKEFFKKDTDTFRQLIVCLQYVDLETQKDITQVIANLQRQKVDSRLVASDYLETNLDLLDILMSGYGNLDIAIHYSTLLRDCIRHQVAARYVLESPHFRTFFDHIQFPDFNVXSDVFKTFKELMTRHKSTAAEFFSKKYDWFFAEXNSKLILSASNYFIRXGKHQLLRDILLESQTL

SEQ ID NO: 233796 - protein, 120 aa, Zea mays
  Clone ID: MRT4577_144814C.1.pep
PPASGPTSGSSPVETPDRHGPEEGGGILLRLLHSVSGPGQVAWRRMNRLSGTERDTPARIPMGGHVSDLTHLESYFTMWPLSPKSKKWMHAIDVLPPERGINTCIIAPHVFESIPLLDFN

SEQ ID NO: 233797 - protein, 83 aa, Zea mays
  Clone ID: MRT4577_144815C.1.pep
QQPRRVTRFSSGSGDEVLVGIFDSPDPDRGDGHDHRHQRGATMPILYDAAWIVLQRSFVSINISAIRRAHDAPSPTNLCALIL

SEQ ID NO: 233798 - protein, 517 aa, Zea mays
  Clone ID: MRT4577_144816C.1.pep
RRGLPTINTAAITALVDRWRPETHTFHLPCGEMTVTLRDSQKQLGLSIRGRPVTGQAAPGGWRQRVEAFLGREVPTDTPGSHTSGVSLAWLRQSFGECPAAADDQTVSYYCRAWVLHLFGSVLFPDATGDSASWMFLPCLTDWDMAGGYSWASAVLSFLYRQLCEACRRTAKNASLGGCVYLLQLWMWSHLPVGRPIEFAPRPWFDVVGLRLRPTAAYRWDQVQAPFARHQRAYVEYSNELDALTPSMVSWQPYDQPPSPHIQLSSACTADEDIYKLRCPLICFYAVEYHLPHRVARQFGLRQEFPVEPFSTSIELHKFDRQKQKKITDFEAHHQVYIDEWDQMHDLLYQNDQPHTNYNFREYISWYVSATRCKLKGQWTSADYAELESSDDEDTSYDLVTRHGTHVEAAPILDRVGNSMMQSVVDIEHFSKTTSDSRTLAFLSRLSRRLRCAAARCGCRTSVGVNIQHTLQHHGDTSLGLGAIIVAQGSSRSTRDAFASHKEDEDDIKIPLDKIGP

SEQ ID NO: 233799 - protein, 47 aa, Zea mays
  Clone ID: MRT4577_144817C.1.pep
MPSTLFASSIAYNLSAKRRKLLLTKIKELNLLFNLLQKKSNKNHYTS

SEQ ID NO: 233800 - protein, 148 aa, Zea mays
  Clone ID: MRT4577_144818C.1.pep
PGSPHGWASGWGYFGLGFPCGASFSPGGAALGRSFLWNSPPFFFVPGFGVSGVGPTPPGLFGKLGFFFFRRFFCSFFKPFVFFMVPLSLGELLFGALFLARMGPSILAWPFILFLDPCNQLFGFAPPPLVIMEGSFPPPCFPNMQTKH

SEQ ID NO: 233801 - protein, 66 aa, Zea mays
  Clone ID: MRT4577_144819C.1.pep
LKLQKRLAASVLTCGRGQVRVDHNEDSENSMANSRQNVRMLDKQERHTKTRRHGERASGQALRTGA

SEQ ID NO: 233802 - protein, 227 aa, Zea mays
  Clone ID: MRT4577_144820C.1.pep
MRPILMKGHERPLTFLKYNRDGDLLFSCAKDHTPTVWYADNGDRLGTYRGHNGAVWSCDVSRHSARLITGSADQTAKLWDVKTGKELFTFRFDAPARSVDLAIGDHLAVITTDSFMGNMPTAQVKRIAEDLQDQTEESALVISGITGRINRAVWGPGNRTIITAGEDATIRIWDSETGKLLKESDKEVGHQKAISSLSKSLDWSHFLTGSLDKSAKLWDARTLTLIK

SEQ ID NO: 233803 - protein, 91 aa, Zea mays
  Clone ID: MRT4577_144821C.1.pep
YFYFIIIIALLIGVLYSPPYGGKATGGQAAQLIYTNTISGTTGKANARKHNNRREGQNYGFLKTLRRKIQSQEKMSTSKNDFYFYQVNVCR

SEQ ID NO: 233804 - protein, 86 aa, Zea mays
  unsure (1)..(86): unsure at all Xaa locations
  Clone ID: MRT4577_144822C.1.pep
VVLERRXYGWGTLRGASQIVSAMVRSSARACGEVVRQDRQRALRRGGLASRVVTECDDEDEETDRGSHARRMSGGGGAEEESYGPP

SEQ ID NO: 233805 - protein, 81 aa, Zea mays
  unsure (1)..(81): unsure at all Xaa locations
  Clone ID: MRT4577_144823C.1.pep
YPSVLSHMITASFSLWTRKLTMPEILFLLPYHXLHTFLFFFFLAEDIDLEALATLVFNWLRPSLIYCSLLMPLAFSSANFS

SEQ ID NO: 233806 - protein, 107 aa, Zea mays
  Clone ID: MRT4577_144824C.1.pep
PISGTRTVFVELPPLRRLVKGKKDADSMGFSGLHCGHGVGGASRLGVPLPGYCQKGCPRHGQWGDRSVCCRVSYLTGFRWVSCSCIFDSVFLDRYILYTLFFCTNGV

SEQ ID NO: 233807 - protein, 87 aa, Zea mays
  Clone ID: MRT4577_144825C.1.pep
AHYVLASAYTGSHAVGGCFARPRRASMLVATGADAWLQAFGGPTLLPRVKVLASHEEDARKENDMVEEILIPKQTIGGNWFVPFRAP

SEQ ID NO: 233808 - protein, 106 aa, Zea mays
  Clone ID: MRT4577_144826C.1.pep
RRRRRRPTPVTEVFVSPFAGGEHPLGIPFPAPAARNRPPKFVLHWVSGSDPGLAEGASSNTHVGEVFIEIPERNVLAVFYRAPFFHSMLPFSCMNGTRLGWLNELK

SEQ ID NO: 233809 - protein, 30 aa, Zea mays
  Clone ID: MRT4577_144827C.1.pep
SHFNIVRSCYFHPIQSEMIVQEPTIWCLPC

SEQ ID NO: 233810 - protein, 135 aa, Zea mays
  unsure (1)..(135): unsure at all Xaa locations
  Clone ID: MRT4577_144828C.1.pep
AARGGRAGTLTLSPKSPPPWRRRRSCPSPSLPXXRPSPAPPPALIPPPLAATPLPRPLPPPRNSSPSXPSQTLXPEPRPSLWRPSPTPGTSSTTAPANPPPSRPARRRTPSTPPQPVTALARADPPXLCTMPPRT

SEQ ID NO: 233811 - protein, 107 aa, Zea mays
  Clone ID: MRT4577_144829C.1.pep
ALGPPAIVRPGCPRVRSPRPGTGRRLQAEACHRLVRSRRRWYSISVFERGCGHLGRGERAPYDRRPPWHRAPGRAPAYLFASCCALPQGIMLLPQCNQVWFCLCRSP

SEQ ID NO: 233812 - protein, 524 aa, Zea mays
  unsure (1)..(524): unsure at all Xaa locations
  Clone ID: MRT4577_14482C.1.pep
MVGGCASGDGAAEGTLARWRRAAAKRIGLSCASFFSYAASPSPPPSKTISHSALNAPDGEQQKMEEPTSTRVADKNLCAICLELLSTSISSDVDSGEAAAIYTAQCSHSFHFLCIASNIRHGNVSCPICRAQWSELPRDLKVPPLLHNQSDPIXHPGRQHCVXRVNRRSSIRAARYNDDDPVEPFTLAEHVDPCLRFVLXGTGVSSPSRPRALPLWTHVATATAXQYSGSSMLSPPQIASPSGQRRAYLSVSLAPQPAMDLVLVASPNGPHLRLLKQAMALVVFSMRAIDRLAIVTNATTATRAFPLRRMTSHAKRMALQVIEHLCCVGGTDPVGALHKGLKILEDRAHRNPSNCILHLSDHPVRNCVGGVDMNHSSIPVHQFHVGLGFGVRSGFIMHEFEELLARLLGGVIGDTQLRIGEHGGMVRLGELRGGEERRIPLDLAADCGFILVGYSYLEGGREEQLRTGEIAVGFEEKGDNGYCGMREMGLSIGGERRSCCAERRDYHDPFMARRWAKHFNVYRA

SEQ ID NO: 233813 - protein, 42 aa, Zea mays
  Clone ID: MRT4577_144830C.1.pep
NAPCIMHACLSYIPFICFYNACMQILITNHQSACTNKPLVLL

SEQ ID NO: 233814 - protein, 89 aa, Zea mays
  Clone ID: MRT4577_144831C.1.pep
DAADHAHHRAHDATDGGGRGVADACRHALAGLGHLVHGAGGAVLLQLRAVLLGSGRVLARLPRVLRLVLAIASPLHAWNDCLMVDCTDG

SEQ ID NO: 233815 - protein, 67 aa, Zea mays
  Clone ID: MRT4577_144832C.1.pep
AGLGLSVAVSHHPRRVVYLCLLDIAFFISVPQHVQPIALCIRSFDSVKVCCLRNIFLKMAHNNSVLL

SEQ ID NO: 233816 - protein, 144 aa, Zea mays
  unsure (1)..(144): unsure at all Xaa locations
  Clone ID: MRT4577_144833C.1.pep
NWRXGIEVDQLGQQADAIHAEVLQEEVPEMIEVDQLGQQADVIHAEVLQEEVHKSEQSDEPGVDAQEVLNQESAEETDGLVNVKTDETEHKSNMVVPDDTIPEHDAQTREPPVNIQEQSRESVGDAEAVNTEAEMQQNSVAFEE

SEQ ID NO: 233817 - protein, 66 aa, Zea mays
  Clone ID: MRT4577_144834C.1.pep
QAVRPSWVPSPSHKQFRGGSVHRRDPMFFGPPFFGGYGYASPGPPPNMFASGYGPDPLYGPPPLVS

SEQ ID NO: 233818 - protein, 289 aa, Zea mays
  unsure (1)..(289): unsure at all Xaa locations
  Clone ID: MRT4577_144835C.1.pep
GDYVFLFMGLSQKRDEXRRTSLLLPGMQQSLITAVADASKRPVILVLLSGGPVDITFAQSNPKIGAILWAGYPGQAGGLAIAKVLFGDHNPSGRLPVTWYPEEFTKVPMTDMRMRADPTSGYPGRSYRFYQGNTVYKFGYGLSYSTFSRRLVHGTSVPALSSTLLTGLRETMTPQDGDRSYHVDAIGTEGCEQLKFPAMVEVQNHGPMDGKHSVLMFLRWPNTKQGRPASQLIGFRSQHLKAGETAKLRFDISPCKHFSRVRADGRKVIDIGSHFLMVDNHEMEIRFEP

SEQ ID NO: 233819 - protein, 114 aa, Zea mays
  Clone ID: MRT4577_144836C.1.pep
PKFLPTVLPKGAPPQKGSNQTGAPGLGPRSKTFGGRPGPVFFWGQELIFPRQHSWIGARMVQLKGKRPKNLPLFFCLGKPGGLLYNPRVGAPLNFVFGKKMCFLVQIVSAPRFY

SEQ ID NO: 233820 - protein, 178 aa, Zea mays
  Clone ID: MRT4577_144837C.1.pep
GHVAFDRVIKPLVRKRRCVRPSEGKLRFVEIRGLSYKVPVDESNPTVWMWTLVDPEVPNPWTFEYEVAFAEIWEDETYAAAGLQPGEVPDVALVDPNDHYVVYFFQGSKLFGLDLREKKVVGCEEWLIDRDRLEYQSSRPIVDAWELSPPPPSPPILSGDDDYSTDGMRANICIALRY

SEQ ID NO: 233821 - protein, 179 aa, Zea mays
  Clone ID: MRT4577_144838C.1.pep
MVSFEMNDLKKIGLGLTGFGIFFSFLGIIFFFDKGLIAMGNILFLSGLGLTIGLKSTMQFFTKPKNYKGTISFAAGFFLVLIGWPFLGMLLEAYGFVVLFSGFWPTLAVFLQRIPIIGWIFQQPFVTSVCKGSNSFRLLYGKERRLGRIEVTCDSCDAMWLFSSVIPLPGLVWELSFEL

SEQ ID NO: 233822 - protein, 140 aa, Zea mays
  Clone ID: MRT4577_144839C.1.pep
MVSFEMNDLKKIGLGLTGFGIFFSFLGIIFFFDKGLIAMGNILFLSGLGLTIGLKSTMQFFTKPKNYKGTISFGAGFFLVLIGWPFLGMLLEAYGFVVLFSGFWPTLAVFLQRIPIIGWIFQQPFVTSFLDRYRGKRVPV

SEQ ID NO: 233823 - protein, 56 aa, Zea mays
  Clone ID: MRT4577_14483C.1.pep
SAIQLSFFLLEKQLTPNLKRKKNTCSSSYHKPRGRLKSQIKFDWALEPKVGNISFI

SEQ ID NO: 233824 - protein, 38 aa, Zea mays
  Clone ID: MRT4577_144840C.1.pep
GDIFHKAFPILGIRSALHIRFSENSTLLFSFTRELVPV

SEQ ID NO: 233825 - protein, 67 aa, Zea mays
  Clone ID: MRT4577_144841C.1.pep
AAFFFFFFFSHVSAYCCCCDLSLFFILFFEQKRTFLFLGSHRYTPNILFGDLYATDNLKEAPPHDCL

SEQ ID NO: 233826 - protein, 69 aa, Zea mays
  Clone ID: MRT4577_144842C.1.pep
MPKQIHEIKDFLLTARRKDARSVKIKRSKDVVKFKVRCSKYLYTLCVFDAEKANKLKQSLPPGLSVQEV

SEQ ID NO: 233827 - protein, 274 aa, Zea mays
  unsure (1)..(274): unsure at all Xaa locations
  Clone ID: MRT4577_144843C.1.pep
MAASRLLRPASRLMASTRQAPAFRPAFRAAALTPSIARRGYASGQKEMTVREALNEAMAEEMERNDKVFVLGEEVAQYNGAYKVTKGLLDRFGEKRVIDSPITESGFAGLTVGAALAGLHPVCEFMTFNFAMQAIDQIINSAAKTHYMSGGIQPCNITFRGPNGFAAGVAAQHSQDYTAWYGSIPGLKVVSPYSAEDAKGLLKAAIRDPNPVVVLENELLYGLSFPVSEEVQRDDFVIPFXKAKIEXPGKDLHIVTLSRCVGQSLVAAETLKSK

SEQ ID NO: 233828 - protein, 69 aa, Zea mays; identical to SEQ ID NO: 233826
  Clone ID: MRT4577_144844C.1.pep

SEQ ID NO: 233829 - protein, 135 aa, Zea mays
  unsure (1)..(135): unsure at all Xaa locations
  Clone ID: MRT4577_144845C.1.pep
QSCYRFEAKLLLEKLRNKRLMFVGDSLNRNQWESMVCLVQSEASWDKKSLVKNGSLNVVHLQEDHATGGVYWASFLMEVELQKNPNFLRNKGRXTNPPSIVKHAANWEGVDYLIFNTYIWWMNTPQMKTLHGGSF

SEQ ID NO: 233830 - protein, 125 aa, Zea mays
  Clone ID: MRT4577_144846C.1.pep
PAGPGSPHFHLPVGSQSPPQEEELGDFQVSREDGPSVADIADGPRQCYCALVLYNLCPKQIHEIKDFLLTARRKDARSVKIKRSKDVVKFKVRCSKYLYTLCVFDAEKANKLKQSLPPGLSVQEV

SEQ ID NO: 233831 - protein, 69 aa, Zea mays; identical to SEQ ID NO: 233826
  Clone ID: MRT4577_144847C.1.pep

SEQ ID NO: 233832 - protein, 103 aa, Zea mays
  Clone ID: MRT4577_144848C.1.pep
ALAAGPPLPPSASVRLKSLESSVGLSRKDLRVGKLLQLPQRASAPTRTLPRSTCYSPTVVRASTTSLSTSSGSPRTGSCLRTFNRASSVSAPEMSCCATTVAL

SEQ ID NO: 233833 - protein, 95 aa, Zea mays
  Clone ID: MRT4577_144849C.1.pep
GDHLWYATSRRAEHSTAHKLASSMAFLSRRCCKSIAQRAGVTSCTLIGEMAVSGSSVDVRSRDKDALGVRQRGRCSSSRAQGALARSYAFLLAIT

SEQ ID NO: 233834 - protein, 103 aa, Zea mays
  Clone ID: MRT4577_14484C.1.pep
LKRKRKRALSQSVLLRTSTRLSSFLMCLRKCHKGVEPPKKTKVLKYPLLWHKWMQLILRRAHLVLQGNLKHTRHFIGLSHSQPFQNCLVCSHKNLLSLAPGGH

SEQ ID NO: 233835 - protein, 95 aa, Zea mays
  Clone ID: MRT4577_144850C.1.pep
DLQPENRTNKGEHGSLPRACASTPQGPDPRQVAHRNPPMGGSIMSVPVAAGSASVDVQRSIVQHTTRPCVYLANHRTPSSAARPTDKILTSLFQG

SEQ ID NO: 233836 - protein, 89 aa, Zea mays
  Clone ID: MRT4577_144851C.1.pep
SAMSLSLLLNLQRQQLSVYQARNVRRHFHNELLTKSTNGTPKAVSSSLLIIFLISYFKLHSMNSAVYSTNQCFTRLYSRSAKDNIIFKI

SEQ ID NO: 233837 - protein, 60 aa, Zea mays
  Clone ID: MRT4577_144852C.1.pep
SHASDVLQVIILSSLQSLSIDLCGNSHILELKILWTWFGHGYAFKNGDVRICNIAHELSL

SEQ ID NO: 233838 - protein, 56 aa, Zea mays
  Clone ID: MRT4577_144853C.1.pep
ERVSAAAHPQTSGSLPGAASPCMEMIMAWRGHRPQSVMAATTGTQPSAGGSSSRRA

SEQ ID NO: 233839 - protein, 79 aa, Zea mays
  Clone ID: MRT4577_144854C.1.pep
RPGLELLGQCALSLTASTFFLRAFLLFGTSPAIACCILNLSKTCADCQLPRLWLNERSLSLARKPMVCLRLLLHMGCDP

SEQ ID NO: 233840 - protein, 67 aa, Zea mays
  Clone ID: MRT4577_144855C.1.pep
RWYRFPFVASCLWSCLGTRVLRFNIKEEGVGDMMDGVVAIQRGGMEWIAVFTESKGSEGKLKMYQTA

SEQ ID NO: 233841 - protein, 210 aa, Zea mays
  Clone ID: MRT4577_144856C.1.pep
PAGFTFNLQDPEAFHHDVYEISHDADTVNEFHRLMAERKQQRLCELHESLESLAVEIIANPKLMDSEDWLHALRLFRTKSFDSIVRYFASYLPANYGDRNERDHDTISIASSSYSEANSVKTDSTTGSSVDGVSSFFDDEPVTKKKSPLSIHTDMRSSSIVQAPPSPPHSVVAHSDESSASSPMESHRYSSNPPSRSMSFFCVRVKGFSS

SEQ ID NO: 233842 - protein, 53 aa, Zea mays
  Clone ID: MRT4577_144857C.1.pep
WGPQVIRATTSTNTITTSSLYQRRTRLFFLRVTSCVQKFNTYCSGANLSRRKT

SEQ ID NO: 233843 - protein, 73 aa, Zea mays
  Clone ID: MRT4577_144858C.1.pep
MIEVVLNDRLGKKVRVKCNEDDTIGDLKKLVAAQTGTRPEKIRIQKWYNIYKDHITLKDYEIHDGMGLELYYN

SEQ ID NO: 233844 - protein, 104 aa, Zea mays
  Clone ID: MRT4577_144859C.1.pep
RAQPNKAKLCPVKKGREGLKKKGGGPYSLDPKTYNGATSFTLKQKYKKVLGTHPNLSEKRGKTSPLPQKFHTETASLDYLTTRTFRASKKKTPSGWGTGPSKTF

SEQ ID NO: 233845 - protein, 88 aa, Zea mays
  Clone ID: MRT4577_14485C.1.pep
GEELKGDSISAAGEEETDWNKETEEGFVIMSFLSPKPAPKALFYGNLYKRGKYNKDWKERWFMLMDNKLLYYFKNKQQKQPINDGIPL

SEQ ID NO: 233846 - protein, 73 aa, Zea mays; identical to SEQ ID NO: 233843
  Clone ID: MRT4577_144860C.1.pep

SEQ ID NO: 233847 - protein, 59 aa, Zea mays
  Clone ID: MRT4577_144861C.1.pep
KDPNDFILRTPLRNSCTHTCTLQCQGDIRCCGESMFVACSVFNPFAANGTCQTLRSNGL

SEQ ID NO: 233848 - protein, 73 aa, Zea mays; identical to SEQ ID NO: 233843
  Clone ID: MRT4577_144862C.1.pep

SEQ ID NO: 233849 - protein, 73 aa, Zea mays; identical to SEQ ID NO: 233843
  Clone ID: MRT4577_144863C.1.pep

SEQ ID NO: 233850 - protein, 102 aa, Zea mays
  Clone ID: MRT4577_144864C.1.pep
MANSTVGFTPAREHQRARDKGERGGERARLRTQMSGGKWASGAQGLKGRGHEEVAGERGHGRVHGEGRGREGFCNTPGVYIPLDNEYGFKHVISVDKTNAKF

SEQ ID NO: 233851 - protein, 73 aa, Zea mays; identical to SEQ ID NO: 233843
  Clone ID: MRT4577_144865C.1.pep

SEQ ID NO: 233852 - protein, 76 aa, Zea mays
  unsure (1)..(76): unsure at all Xaa locations
  Clone ID: MRT4577_144866C.1.pep
LCHTXDTCYLYHGTPTLRFICTASQRRRAFSSYFGLYFSTIKTIGPLGVNEHGQYDRHNYLRHGSLTVRIIRVAEL

SEQ ID NO: 233853 - protein, 73 aa, Zea mays; identical to SEQ ID NO: 233843
  Clone ID: MRT4577_144867C.1.pep

SEQ ID NO: 233854 - protein, 126 aa, Zea mays
  Clone ID: MRT4577_144868C.1.pep
PRLPRRHPQRSKSILRRAPGFFLLISRDKPPPADAVPERGEAGWSVCYAAAESGFAPDEPSVAEPRRALGRASHTRRGKGVVARNDSAWRRTRRDTGEERKLPTDGSLPSWRFGGGVPRHRHGPRG

SEQ ID NO: 233855 - protein, 99 aa, Zea mays
  Clone ID: MRT4577_144869C.1.pep
SALAPVHSRMLIELHPGPSRAGSVRGREVRQGDLSIRGACAGGPLQLSSSFLSGRAEPSPWKGGGIIVHARAMPLGPRLRANHRSVSDVYTERGYRILL

SEQ ID NO: 233856 - protein, 41 aa, Zea mays
  Clone ID: MRT4577_14486C.1.pep
NNTQELTAHLVKKKRKLKGEATSIVNQQDMTFDHRLTQNVL

SEQ ID NO: 233857 - protein, 69 aa, Zea mays
  Clone ID: MRT4577_144870C.1.pep
GGRSKARAEQRRSTHFNPWSCFFPREWKLIFSFLTGFIITGFIITNFTDNFSEEGLYNSNFLPEHYMKP

SEQ ID NO: 233858 - protein, 54 aa, Zea mays
  unsure (1)..(54): unsure at all Xaa locations
  Clone ID: MRT4577_144871C.1.pep
RTCKHTXIIHSSPLLLACIAIFSHIQSSYSLRLKSSSLSHRHSQNILSSVPSPS

SEQ ID NO: 233859 - protein, 214 aa, Zea mays
  unsure (1)..(214): unsure at all Xaa locations
  Clone ID: MRT4577_144872C.1.pep
MSDYCTKXYRIELILQXVYFGYPXKGILAADDPTGTIGKSLSTIHVXNDVENLRDLRELLFCCPGALXNIMRVILFKDTLNQKTKDGKPFVDVLXEGGVLPGIKDDYGTIEVAGTDNETTTQGHDDLDKLCPKYYEARARFVKWHDVLKSVPNDASQVVIHLNAQGLARYGIICHENGLAPTVEPEILVDVPHEIDICSYLTETVHADCXKALN

SEQ ID NO: 233860 - protein, 122 aa, Zea mays
  Clone ID: MRT4577_144873C.1.pep
VFKSVGASSKDVTPSAEDISDTFKHIENEVDALDEVITGHSDFYALLASRGTAAAFLKAGCMHAKTVNKPTYSPSLSDLINIPGEARSIENRFITQIWAKGGRELAGDEARSLLKLDSGAEG

SEQ ID NO: 233861 - protein, 71 aa, Zea mays
  unsure (1)..(71): unsure at all Xaa locations
  Clone ID: MRT4577_144874C.1.pep
LRGEGVLHLRALLLXCAEAXVNADNLDDAHHTLLEIAELATPFGTLTQRVAAYFXADAMFARVVSFCLGLY

SEQ ID NO: 233862 - protein, 40 aa, Zea mays
  Clone ID: MRT4577_144875C.1.pep
APIIHSQIIKGFKIRRGKKNLPLSQKVYVPHKVKRSGEGR

SEQ ID NO: 233863 - protein, 93 aa, Zea mays
  Clone ID: MRT4577_144876C.1.pep
CSLTSFIVIAFCTFLKIMKTMKCSWFLSSVLDLYVSSIENWFRAGVYGLPLKSNLSLSLSLSLSIYIYISSIENWFRAGVYAFWLKQMKRILS

SEQ ID NO: 233864 - protein, 118 aa, Zea mays
  Clone ID: MRT4577_144877C.1.pep
AGGLFFFFFYEKNLPERRGGWKIRTTRSPKAFTNLHGDDIARGKKVLVHWKVALVLFKLQSNDSRFAGAYQTHQLDRGRQSWLLCRTSFLSTAFPRKKRRGRLPGILCVHSQDAASME

SEQ ID NO: 233865 - protein, 43 aa, Zea mays
  Clone ID: MRT4577_144878C.1.pep
MKSSVFSGDGTAPFFGFLGAAAALVFSCMGSVYGTAKCVVVLA

SEQ ID NO: 233866 - protein, 156 aa, Zea mays
  Clone ID: MRT4577_144879C.1.pep
REGEEKKGRPGRGINGRWSFQAIDASVSRKEIMGGGRNGCCEVPLSRTRNGCAGCAASGQGRGRADVCGDFGRLARFSRARGRRAVVTAVQGAVGRLAAVRAGRTRWTRHRAVRAASSSACVREQRERRLRERENRGRGTQGAAAACSRPASRYPM

SEQ ID NO: 233867 - protein, 84 aa, Zea mays
  Clone ID: MRT4577_14487C.1.pep
AEARQRKKRRGRLARAADVLLLLLEPDHLLGGREQEVAPHIPQLSTQSQAIRADVRTRGPTDVPCSDLTARRARAYTTGRSWLR

SEQ ID NO: 233868 - protein, 79 aa, Zea mays
  Clone ID: MRT4577_144880C.1.pep
SCVFPEILFTYALSLSIPTLAATNILALSSEHFPSQVMIEQHQVCITFFTSSYCSSGGTASYGALPRSQLRPRNLHRPR

SEQ ID NO: 233869 - protein, 94 aa, Zea mays
  Clone ID: MRT4577_144881C.1.pep
GGWKLQNIFSEGYGEEFCFSKPVNFGLFRFFNWFNALFGTFNVSLVWKNYKGGLVDLVMVICICPIEIVILVWKKILGCGCRFLNVYVCGKIFW

SEQ ID NO: 233870 - protein, 85 aa, Zea mays
  Clone ID: MRT4577_144882C.1.pep
PGFWWLGSTPAPAKPCVILLQNTEYFLGWTHAPAGLYINGVIYLAKVVLTRDRGEQKKLNMPLFLWCGVFCTPFIPKWNSYYLGL

SEQ ID NO: 233871 - protein, 57 aa, Zea mays
  Clone ID: MRT4577_144883C.1.pep
RYNLVGRPVFHKRITGMRHIQRYGRLLLMCSCCQVLGTRSVVKSGVGHICWPPCSTS

SEQ ID NO: 233872 - protein, 103 aa, Zea mays
  Clone ID: MRT4577_144884C.1.pep
QPKTEIVWSLGNSAMIYVEIKSGRKCSRNTQLPKSPFAKTVYLRIEKWWPFLVPAAAIVLKLGRKCMTNTQVHAVRPAVPGLFPYMVPNSECSLLLLLLEILP

SEQ ID NO: 233873 - protein, 80 aa, Zea mays
  Clone ID: MRT4577_144885C.1.pep
MERVQVLLPCTDSTNPVLLMIQKKKKKKKKKKKKKKKKKKKKKKKKKKKKKNKNKEKTQKQIVKKKKKGGHLKRLSLNYP

SEQ ID NO: 233874 - protein, 62 aa, Zea mays
  Clone ID: MRT4577_144886C.1.pep
AVRRPRPNQWRLGLLRRAPIIVSRPPPPASDEPPLGPPSFQEACTLKIVQVPQSTFNKSKCN

SEQ ID NO: 233875 - protein, 82 aa, Zea mays
  Clone ID: MRT4577_144887C.1.pep
RFILDLLKNAESNADVKGLDVDNLYVSHIQVNQAQKQRRRTYRAHGRINPYMSSPCHIELILSEKEEPVKKEADNIVAARKQ

SEQ ID NO: 233876 - protein, 62 aa, Zea mays
  Clone ID: MRT4577_144888C.1.pep
QDQLYVSHIQVNQAQKQRRRTYRAHGRINPYMSSPCHIELILSEKQEPVKKEADNIVTTRKQ

SEQ ID NO: 233877 - protein, 88 aa, Zea mays
  Clone ID: MRT4577_144889C.1.pep
EHQEFVQRHSEVVTESHLRIPEVAVSPCPLILGARKFGRNCVKSYSFRERASAGSAPILLPVLTRWVQDVALRAGDLLPLPPFTSPSL

SEQ ID NO: 233878 - protein, 78 aa, Zea mays
  Clone ID: MRT4577_14488C.1.pep
VAFSSPSGSVSVSEGFRGFGFGGNRIKMAASIVKSRCLVGGLAWATDNNSFKNALRTYGRVLKSKIILNRKTQRSGGF

SEQ ID NO: 233879 - protein, 171 aa, Zea mays
  Clone ID: MRT4577_144890C.1.pep
MVKYSQEPGNPTKSAKAMGRDLRVHFKNTRETAFALRKLSLTKAKRYLEDVIAHKQAIPFRRYCGGVGRTAQAKSRHSNGQGRWPVKSAGFILDLLKNAESNADVKGLDVDNLYISHIQVNQAQKQRRRTYRAHGRINPYMSSPCHIELILSEKEEPVKKEADNIVAARKQ

SEQ ID NO: 233880 - protein, 101 aa, Zea mays
  unsure (1)..(101): unsure at all Xaa locations
  Clone ID: MRT4577_144891C.1.pep
PPKIVPGFQFQIIXPGFVGQLKAPTFRIKKKXTXRKTWFIKISAGPPKEENAFRIVNKELENFPKKGFKWTFXRXIFPFYFNFQRFRFKGLNGFKSKGKMG

SEQ ID NO: 233881 - protein, 113 aa, Zea mays
  Clone ID: MRT4577_144892C.1.pep
YTACNRFQNRPSWFCTTTSDVVSATADQAEAVAQAARAASKHPLPGRHQHRRSCHRGTSSAPPYKQAPPELVQAHLDFAEDRPWLQSWVATESTTPCTADHIHRLPWILLLSI

SEQ ID NO: 233882 - protein, 57 aa, Zea mays
  Clone ID: MRT4577_144893C.1.pep
MAKEGCSVNFLTAVNSVEKREGTAKPGRGLRFYHSQIHRAAFVPPTFVTRSGSIPPS

SEQ ID NO: 233883 - protein, 48 aa, Zea mays
  Clone ID: MRT4577_144894C.1.pep
PDTSATQRSKRLTLSWTVDQRCRSEFSLRSDAKSRCAWKWSCSRLQKG

SEQ ID NO: 233884 - protein, 71 aa, Zea mays
  Clone ID: MRT4577_144895C.1.pep
VGGHQCWLVSFLLLLCSFPWVVLPSDLILFEYFLIGMTRQITVLEGSAVKIKLIWLDDALTSRRRTPKASS

SEQ ID NO: 233885 - protein, 51 aa, Zea mays
  Clone ID: MRT4577_144896C.1.pep
LPLVFYSLKFLVGSKLGLVKNFGWPFTPIKFYWGLGTFEYFFIPFFSCELS

SEQ ID NO: 233886 - protein, 113 aa, Zea mays
  Clone ID: MRT4577_144897C.1.pep
GGSTPSRWPKEEVEALIQMRNEKGEKYHDAGAKGPLWEDIAAAMRGIGYSRSAKRCKEKWENINKYYKKVKESNKRRPEDSKTCPYFHQLDAMYRNKHRSGTGGRTAPRTNMA

SEQ ID NO: 233887 - protein, 257 aa, Zea mays
  Clone ID: MRT4577_144898C.1.pep
SISFPALMAVAHWVPRRRAGRDPLPILLSPRSRVQSPDERLELRRAVSISCPALMAVAEVAIEILPQQQQQQPPPPPREPAVVPPNLSVPRVLQYLYLLSAWVACAGVAAGTVARRALGDSSPLVYGFLKVSIGALVFPALLILVFALRVLRAMLAVGFRRSLRTHAREIQIQATKIFRALTWKVLQDPIVLAWLASLLFILLLAASVLVFVGLLPMEESRRERIGYALSDVGVLGAMAMYCLIIIPSFALKIWRSK

SEQ ID NO: 233888 - protein, 37 aa, Zea mays
  Clone ID: MRT4577_144899C.1.pep
HRLVHRTKQMLRRLPQLMRNVRETEHHVRAVRGDHRP

SEQ ID NO: 233889 - protein, 65 aa, Zea mays
  Clone ID: MRT4577_14489C.1.pep
PAGAEQVAIACNPSGGNKVVWMSILVHVPGSSATNCGPPIPSYVVGFGCLCESLCIPTPKVADIT

SEQ ID NO: 233890 - protein, 114 aa, Zea mays
  Clone ID: MRT4577_1448C.1.pep
TTKHSQGNKSFTAIVGAKAKTPPFARCLHHNRWTNGDKTTDRFTLRPIRHRTKTCDEVIPSCDLVQHGGPRVIRPIVTGPVWPVRVTGLICKGIPVITVHNPALWEYSGDNLSV

SEQ ID NO: 233891 - protein, 79 aa, Zea mays
  Clone ID: MRT4577_144900C.1.pep
TRGRAQGMADNTSAGLERVEAGGGREGGDIPDLVRAHLHENLDLTGKGVEQGPHHRLEGVPSRSPVLAAGTSGARRVAF

SEQ ID NO: 233892 - protein, 183 aa, Zea mays
  Clone ID: MRT4577_144901C.1.pep
VIDPFWPFCMFELRGKCNDEECQWQHFEHHDWRKLELTKHSMISVSGQIPYGLSQYILPVPVYRVGSNLIKADLNLTQSVLASSLWQYWQRGFCASFPLPLSVQRVLPSDAPFFQAGDGRIADFDRNRQLLKFRMLDSRKVGRAHCIAVIITSQKWHTYWSLVLYTKLILEVFCSFYSCIMAY

SEQ ID NO: 233893 - protein, 84 aa, Zea mays
  Clone ID: MRT4577_144902C.1.pep
EGLHRPLHLMLQVQAVAAAAAVHVQVLQRREAHGRAHVLERADVQHRCGLPSRDLYPAATGCTQPGPGGDGLVGFLQDGLHVLA

SEQ ID NO: 233894 - protein, 63 aa, Zea mays
  Clone ID: MRT4577_144903C.1.pep
LNENLNKNPQVGCFKKKPALWAGGGHAQKVALVPSYQKNTTWCFRNKNNHRSSNEPVTNFFNL

SEQ ID NO: 233895 - protein, 49 aa, Zea mays
  Clone ID: MRT4577_144904C.1.pep
GCDWVTGGVKGGLKGKNQMWGGQISLKGGKTKTCGWGKLVYRGIKQKKG

SEQ ID NO: 233896 - protein, 59 aa, Zea mays
  Clone ID: MRT4577_144905C.1.pep
QIRATAITITLHPTPTGTDISTIVAGGDITTIALVHSCIYSTNNTLLMSNAIYRYVLNT

SEQ ID NO: 233897 - protein, 51 aa, Zea mays
  Clone ID: MRT4577_144906C.1.pep
ENEHDYSITHGRTFSGIADHTEDAPSIPPTAPEVVNFKDMDIDRQYKHATF

SEQ ID NO: 233898 - protein, 127 aa, Zea mays
  Clone ID: MRT4577_144907C.1.pep
TATATIPVREDITKSLKMSKDTAIVLTSFFRPNLRFSVMHSKTSASSYGKDFQELIGAYKASWEGQQILHGIDTDSESSSYESLNDSASDDEDAYVISADHGDKNVGKTKTSMTLVEENIENELDLY

SEQ ID NO: 233899 - protein, 109 aa, Zea mays
  Clone ID: MRT4577_144908C.1.pep
MSPLNQQQVLLKKALAKKPNAKKMSEFGLKPSAALLKSRTQQLPAPVQPRRRVRVLFEDPDATDSDSDSDDEEAGGTPSRTKRFSFEAFIGKAPAKPVLPAGRCRVATA

SEQ ID NO: 233900 - protein, 74 aa, Zea mays
  Clone ID: MRT4577_144909C.1.pep
LLFFCQKGNRCKCADLKRKGIQFTYLKYSQNYSKFGMYLDKITKVSFGWKFHFILVPHIIGFLLFLYKKVRVLS

SEQ ID NO: 233901 - protein, 57 aa, Zea mays
  Clone ID: MRT4577_144910C.1.pep
RPSFHPSHSQSLTQRENPQPAGRGLIGPSDFLALFNMPPSFATFTSMGQLALPTMQD

SEQ ID NO: 233902 - protein, 50 aa, Zea mays
  Clone ID: MRT4577_144911C.1.pep
IYFYVFTSARHNRHGGVSVQIRVRPNKERGEHNPCSRDHGLQKMNGLMMK

SEQ ID NO: 233903 - protein, 272 aa, Zea mays
  unsure (1)..(272): unsure at all Xaa locations
  Clone ID: MRT4577_144912C.1.pep
MPGTRGPVPVPLETKGQNLTQDILDLLDTKEPLRTDEDFPAISQAEIKAALDRLASRSMVEYKSLDSEKVVLTPESEGIVAEGSREFKVWKLVKERGSVPIAELPTIFGKEVASVGQGNGFKNKWIKKDGDNLVLIQTEEPADTTRQLLQGIKDTQSLDDSKLLAQLKKKKLVTVTKVITYTITKGPKYAKEIPVEHTDLTAELLTNDAWKTANFKPYNFAALGANQDAGALHPLNKFRQEFRNIFFSQGFVEMPTGHFVDTGFXWNLDALF

SEQ ID NO: 233904 - protein, 199 aa, Zea mays
  Clone ID: MRT4577_144913C.1.pep
MKKDDDLESALLAAKEPAPAPAKGYAYALTCALLASLTSIIYGYNRGVMSGAQKFVQADLGVTDAQLEVLIGATSVYSLVGSLAAGWACDRAGRRRTIALSAALFLAGSAVTAAADGYAALMAGQFVAGVACGFGLVVAPVYIAEISPANARGFLSSIPEIAGNSGILLSYIADFALAGLPTPLNWRLMIGIGAVPPLF

SEQ ID NO: 233905 - protein, 91 aa, Zea mays
  unsure (1)..(91): unsure at all Xaa locations
  Clone ID: MRT4577_144914C.1.pep
MAMRKRNANAPPTTRMDMLDTDFACPCXFHSHSGEGQSDMNNMNVEAYXEAERETXNSTANALAVPIAIYREWVGEGERERTDNGDDDDEA

SEQ ID NO: 233906 - protein, 75 aa, Zea mays
  Clone ID: MRT4577_144915C.1.pep
KAKESGKKRPAHPKTCPYFDELDRLYSRLGQAKQASSELLDPVVKYPHVRYGPPGFGMDKEQASGGGGNNNNPNN

SEQ ID NO: 233907 - protein, 36 aa, Zea mays
  Clone ID: MRT4577_144916C.1.pep
LNLTDKSYTSTELYDDLCHPPQRYPAIALNVIPLLH

SEQ ID NO: 233908 - protein, 69 aa, Zea mays
  Clone ID: MRT4577_144917C.1.pep
MNPKISMATHRGWLSLLLLAGVSLCQTALLARRLRGGRGPMLGGWNTIPDVSESHIQKLGGWAQRHAKH

SEQ ID NO: 233909 - protein, 81 aa, Zea mays
  Clone ID: MRT4577_144918C.1.pep
MRHTSAALLNDFRGLDVNRILVYDFVNNDNLYQWLHETIEPNVLHRDIKSSNILIDDEFNGKVSYFGLPKLLLSDNCHITS

SEQ ID NO: 233910 - protein, 144 aa, Zea mays
  Clone ID: MRT4577_144919C.1.pep
MSATPLPPPGPDGAVALLPPPGTDMTGICFRDQLWLDTYPLDRNLVFDYFALSPFYDITCNNESLRSRQIHPLDMSHLTKMTGMEYLLSEVMEPHLFVIRKQKRESPEKSSPMLAYYILDGSIYQAPQLCNVFASRISRAMHHI

SEQ ID NO: 233911 - protein, 863 aa, Zea mays
  unsure (1)..(863): unsure at all Xaa locations
  Clone ID: MRT4577_14491C.1.pep
LGTSRPASDFXARWESLLPSIVSSLGTAVNAGDIAATNSLLTAVVSLFSRFRNAFDNNALRLDLKYCLDIFAAPLLEVFLFASRRLQATAITANPLELRPMFECLRLCCEIFYSLNSIDLPEFFEDNMRQWMTEFRTFVTTSYSPPVEADGAPDALRAAVCDNLQLYMEKYEEEFRGYLKEFVEAVWGLLMAQTASPSRVQLAVTAIRFLTTVAESVHHALFGSPEAMKQICDSVVVPNLRLRDEDEELFEGNWVEYVRRDSEGSDADTLRRAACRLLRGLAANYQEQVAALVSAQVQQMLVAYAANRSNNWKEKDAAIYLVIALMQKPGATGGGTPVVDMESFFTSVIVPELQAPDWQSEPMLKATVLRFLKEFKDQIPKATALALLQSVMRFLTHESNVVHSYAATFIENLLIIKDAVPVPGVTTVIRSPRFVAADINPFAPQIIQNLSTALGFPDSQENPYLMKCLMRVLGIANIAGQIVHEITAQLVGILMEVCNNPKNPDFNHYLFEALAAVIGRTGEQDPTLLPAFETSLFPVLQRILVEDISEFWPYAFQIFAQLVNLSRPPLSQNYMQLFGVLLSNATWDRPPCVPALVRLLRAFLRKILNELNQEGRLPNILAISRSLLSRSSTEDSAFYMLNTIVENVGFDILNPYISEIWSALFTRLQTRQAVKYVNSLVVFMSLVLVKYGSSVLVSSVDSIQPNLFTQILQRFWIPNLKLIKGALEVKLTAVASTKLLCESAVLLDAAAAQLWGKLLDSIVTLLSRTNQDGTQEQNDGTDAVDIQKTSSYSVSFVRLQYAGKSEDDLLKEVNDPKQFVVTSLATLSAQFPGRFGPVIEQHVDLANKSVLLQLCAAYNANIV

SEQ ID NO: 233912 - protein, 279 aa, Zea mays
  unsure (1)..(279): unsure at all Xaa locations
  Clone ID: MRT4577_144920C.1.pep
MSATPLPPPGPDGAVALLPPPGTDMTGICFRDQLWLDTYPLDRNLVFDYFALSPFYDITCNNESLRSRQIHPLDMSHLTXTLSLAPHLPPIRLDFFGLVLVFDWCCGRRKMTGMEYLLSEVMEPHLFVIRKQKRESPEKSSPMLAYYILDGSIYQAPQLCNVFASRISRAMHHISKAFTIACSKLEKIGNVETEPDAVASESKTQKEAIDLKELKRIDHILSSLKRKIGAAPPPPPYPEGYVPPSAEQEKAPDDVAASEAPPQLDPIIDQGPSKRPRFQ

SEQ ID NO: 233913 - protein, 249 aa, Zea mays
  Clone ID: MRT4577_144921C.1.pep
MSATPLPPPGPDGAVALLPPPGTDMTGICFRDQLWLDTYPLDRNLVFDYFALSPFYDITCNNESLRSRQIHPLDMSHLTKMTGMEYLLSEVMEPHLFVIRKQKRESPEKSSPMLAYYILDGSIYQAPQLCNVFASRISRAMHHISKAFTIACSKLEKIGNVETEPDAVASESKTQKEAIDLKELKRIDHILSSLKRKIGAAPPPPPYPEGYVPPSAEQEKAPDDVAASEAPPQLDPIIDQGPSKRPRFQ

SEQ ID NO: 233914 - protein, 69 aa, Zea mays
  Clone ID: MRT4577_144922C.1.pep
EGRLSSSADARELLRSCCPARRTWSNGRGCWRAVICRVGARCVANNGKAHQPFPGRSHRFSPDTRRRTY

SEQ ID NO: 233915 - protein, 90 aa, Zea mays
  Clone ID: MRT4577_144923C.1.pep
MGGGVGERAGWLCTGFSRNGLYAARNAYYAFNMNLQAHNQMEGSDEFQGLAPASADNPGTSPWSWSHRSGRGRGRDRGARQGTAHGQHGS

SEQ ID NO: 233916 - protein, 196 aa, Zea mays
  unsure (1)..(196): unsure at all Xaa locations
  Clone ID: MRT4577_144924C.1.pep
KKPANPWGKGKTRSKGPFWKPPQKAGGVFLKKGPTPPQGAPEQTPGGGFLKKGKPPPQPKAQKKPPVPGQKTFGGGPKNPGGKKPIGGPKGPGPYFWEGGAPPKNPWGAKKGGGDGPPLLETPPDPGGPGGPPQGGGLQGFSQKNLPGNPPGXEPPGGPPPGEPPGRPPPGKPPPGPPLGKPPPGPPPRKPLGKAP

SEQ ID NO: 233917 - protein, 84 aa, Zea mays
  unsure (1)..(84): unsure at all Xaa locations
  Clone ID: MRT4577_144925C.1.pep
AVYSIIFRYIPSARECPLYLQLPDGGLSKTNAFISPMWGGVLIWNSPDCSLGSKKTHGTQKKMSSQELMEALEIXVGQLRQLFG

SEQ ID NO: 233918 - protein, 167 aa, Zea mays
  unsure (1)..(167): unsure at all Xaa locations
  Clone ID: MRT4577_144926C.1.pep
MFGRAPKKSDHTKYXYEILGVPKSASQDDLKKAYRKEAIKNXPDKAGDPDKFKDLAQAYEVCEXPXKREIYDHCXGEDALKEGMGGGGTHADPFDIFSSLFGPSFGGGGASSRGSKLKRGVDVSHSLKVSLEDLYTGXSXKKLFLSRSAIWSKGKGKGPKSGASMTC

SEQ ID NO: 233919 - protein, 127 aa, Zea mays
  unsure (1)..(127): unsure at all Xaa locations
  Clone ID: MRT4577_144927C.1.pep
VLGPSSNAQWVQNINXSFSKLSPSPEQRKVVDSFNSSLAPLFTSVSKLAPESPKWGFVLSPPGLEKWIALTGLGGPPKGYLWVRGEKNPWVVLCLGPAFFNPLKRGPCPKTGFKKACYAPPKTGPVF

SEQ ID NO: 233920 - protein, 165 aa, Zea mays
  unsure (1)..(165): unsure at all Xaa locations
  Clone ID: MRT4577_144928C.1.pep
ELAXXAEERGSDREEEXCRERERTXEREKEKERREREEKEKEKEREEEEREREREEKERKEREREEEERREEEEERARKEREKQRRREKEEEERARRREEERQREEEEREREEEEERRREEEEGGGGRGDEPEREDEGGDKPPYRLSKKLKKRYHARAGMFSRSG

SEQ ID NO: 233921 - protein, 247 aa, Zea mays
  unsure (1)..(247): unsure at all Xaa locations
  Clone ID: MRT4577_144929C.1.pep
SARVPRFHPMAQMSFNDDSFVFVGFSTHMGQNHPQFLAGKGSVLQAIGKKVLALALGQRDPTAVDKLLSAQRESTILPCVSCAEELAEKAEEERKRREEEXRERERTXEREKEKERREREEKEKEEEREREREEKERKEREREEKERKEREREEEERREEEEERARKEQEKQRRREKEEEERARRREEEEREREEEEERRREEEEGGGGRGDEPEREEEGGDKPPYRLSKKLKKRYHARAGVFSRSG

SEQ ID NO: 233922 - protein, 95 aa, Zea mays
  Clone ID: MRT4577_14492C.1.pep
VKAHFFLPLFLSFAQFPAVNPSAYFHQPIVLPFGQRAASSPASFLRHPLLLPFLQQFVAISPTLLQLPQLLPFFQIALAFPPAFFQGGALGGALF

SEQ ID NO: 233923 - protein, 77 aa, Zea mays
  Clone ID: MRT4577_144930C.1.pep
LCCPDQQLGARLTDGRAECRQVAHLHARHLLLFRPLLPVPDLHRHYAVLLSHSDSNYASDTLPLSTLTNSVHMHIDL

SEQ ID NO: 233924 - protein, 78 aa, Zea mays
  unsure (1)..(78): unsure at all Xaa locations
  Clone ID: MRT4577_144931C.1.pep
KRSLDIYNFXPGIVSCILPFIPYLLQLLLCLLHVLPLVPLFIHTLLLQQLQLLVLADFADYSQLQQFFLLNQLYSFDY

SEQ ID NO: 233925 - protein, 75 aa, Zea mays
  Clone ID: MRT4577_144932C.1.pep
TFGAELKTLTTAKKNKKKNISPTPSTESKLTYSSIQHHNSSILPPNNNLLPFFIQPPNSQNPDKTQLNHLQTYPP

SEQ ID NO: 233926 - protein, 96 aa, Zea mays
  unsure (1)..(96): unsure at all Xaa locations
  Clone ID: MRT4577_144933C.1.pep
RRDTLRPVASQAAPTPPRGPRPPPPPPPPRQTATAQPRDGGGRXAFCPPPQPAPAASPASKPPAPVLGAGGAVAPVAGHGRGAGRQYRGAPDAQVG

SEQ ID NO: 233927 - protein, 62 aa, Zea mays
  Clone ID: MRT4577_144934C.1.pep
QLQCLLFTMTASLNPHNVPPHDTTHRIMYLWHGATLTRLLRDMINHYRSKEWKLFLQQQQNS

SEQ ID NO: 233928 - protein, 67 aa, Zea mays
  unsure (1)..(67): unsure at all Xaa locations
  Clone ID: MRT4577_144935C.1.pep
LHXIALIGLFFIKGVTIKLVSIYDERILIDIHNFYNILIDELPSNVANLLLSILIKNKTKNVVCVIS

SEQ ID NO: 233929 - protein, 54 aa, Zea mays
  Clone ID: MRT4577_144936C.1.pep
QSVSTCTNAHQPEKYFHIYHSDRLKAFGPISVSLNRANHNQQVIVFSCIRQILI

SEQ ID NO: 233930 - protein, 67 aa, Zea mays
  Clone ID: MRT4577_144937C.1.pep
QQGMLQHEDPCMIPLKGLLRPRLSLSLILYILDRLYICSRMLFSAAFNCKFYCWMNRYPLVHTDFQA

SEQ ID NO: 233931 - protein, 58 aa, Zea mays
  Clone ID: MRT4577_144938C.1.pep
MYKQNTTVSGLTPKTQFAEAAADSAGCHRDAILALASFNLSSQRLISASRDGAVKVWK

SEQ ID NO: 233932 - protein, 88 aa, Zea mays
  unsure (1)..(88): unsure at all Xaa locations
  Clone ID: MRT4577_144939C.1.pep
AVVTTQNXFFFFFFFFFFCFFFFFFFFFFFFLRGQQMQGAFAQIPVHTDTVIHIYHTDHMTTKGGRNHTSNKYSHFCDTRVLCVVTTA

SEQ ID NO: 233933 - protein, 32 aa, Zea mays
  Clone ID: MRT4577_14493C.1.pep
LARPTSDHLEPCLRGDALSAPPAPIDHRFSPR

SEQ ID NO: 233934 - protein, 122 aa, Zea mays
  unsure (1)..(122): unsure at all Xaa locations
  Clone ID: MRT4577_144940C.1.pep
FGTRLRFNPGRPRFRGRLSRWSLSPPYPACRDGRRPCYPHASACVPPLWPAIAAVQPQTPQRGHRPKTEEPSRRWKSLAHSIDGRSTLDPLPPSWSYTLHGRGRDAPAPLDAVQXAILDYAV

SEQ ID NO: 233935 - protein, 360 aa, Zea mays
  unsure (1)..(360): unsure at all Xaa locations
  Clone ID: MRT4577_144941C.1.pep
MHQPRARYPPGYGSSGGGGGGGGGSGGGRGGSGGGGNHNYYGRNTHPQHQHHYQQQQQHSHRNSSHQQQWLRRDQGPAVAGPVSGNAVPKTAPQLDAVDSSSQDWKAQLNIPAPDTRYRTEDVTATKGNEFEDYFLKRELLMGIYEKGFERPSPIQEESIPIALTGSDILARAKNGTGKTAAFCIPALEKIDPENNAIQVVILVPTRELALQXSQVCKELGKYLNIEVMVSTGGTSLKDDIMRLYQPXHLLTPNLSCKHXXKRSFHDFRNGACXNLVCTGLFTRGIDIQAVNVGINFDFPKTXSETYLHRVGRSGRYGHLGLAVNLITYEDRFNLYRIEQELGTEIKTIPPQIDLAVYCQ

SEQ ID NO: 233936 - protein, 502 aa, Zea mays
  Clone ID: MRT4577_144942C.1.pep
MHQPRARYPPGYGSGGGGGAGRGGGGGNGGGGGNHNYYGRNPQQHHYHQQQQQQQSQHSHRNSSYQQQWLRRDQAPAVAGAASGNAVAKTASQLDAVGSSSQDWKAQLNIPAPDTRYRTEDVTATKGNEFEDYFLKRELLMGIYEKGFERPSPIQEESIPIALTGSDILARAKNGTGKTAAFCIPALEKIDPEKNAIQVVILVPTRELALQTSQVCKELGKYLNIQVMVSTGGTSLKDDIMRLYQPVHLLVGTPGRILDLTRKGICVLKDCSMLVMDEADKLLAPEFQPSVEALIHFLPPSRQLLMFSATFPVTVKEFKDKYLPRPYVINLMDELTLKGITQYYAFVEERQKVHCLNTLFSKLQINQSIIFCNSVNRVELLAKKITELGYSCFYIHAKMLQDHRNRVFHDFRNGACRNLVCTDLFTRGIDIQAVNVVINFDFPKTSETYLHRVGRSGRYGHLGLAVNLITYEDRFNLYRIEQELGTEIKTIPPQIDLSIYCQ

SEQ ID NO: 233937 - protein, 116 aa, Zea mays
  unsure (1)..(116): unsure at all Xaa locations
  Clone ID: MRT4577_144943C.1.pep
RTRGPARKPPAVLHLPPGGASGAYPLSAXPAVGAXCGAFXXXAARSXLLVSLGFPPDCGGGGGWLXPLLGXSXWPCSCLACCFRVLFPFLLGFFSVLLLASLLLVPFLGQTSLLGR

SEQ ID NO: 233938 - protein, 130 aa, Zea mays
  unsure (1)..(130): unsure at all Xaa locations
  Clone ID: MRT4577_144944C.1.pep
GRFDSTRGTGVQERVVWIKGQGKKPATEKGINDPLHMRQTMMRGRYPQHQAKRQESMIGAWVARLEEETEGKDGKQKXPYEGXSDDDRNLPEVHKALYEKVGVCKHTHKNGYKERMTECGTTCRTRGEAP

SEQ ID NO: 233939 - protein, 82 aa, Zea mays
  Clone ID: MRT4577_144945C.1.pep
PAGIFSSLHSSSSGSRTRCESVVNSAQPWLFTSSSCFVSLATLCVDGRAGRGRQARHVELQTRMTTTSRTERTRTSTAPTTT

SEQ ID NO: 233940 - protein, 225 aa, Zea mays
  Clone ID: MRT4577_144946C.1.pep
MDPDQVADAGVQVQHDDLGGSATSANGCCDGGSDDSWARALLRLGWDLSRKAVIAGVAATAAPVVAPPLLVLSLAGLALSLPFAAYLASLAATDRLMGALLPAPRTTQPYCGCDLEDDEFLDPSEAPGAEATALDHWRDTEDDAIMEENESFVPLPLSRQPRFSEEPITSSSTDVEDKMAEGESLSRGLGHESLVLDNKEGTIMEDTEYITMEAPPRGSDVFRSA

SEQ ID NO: 233941 - protein, 72 aa, Zea mays
  unsure (1)..(72): unsure at all Xaa locations
  Clone ID: MRT4577_144947C.1.pep
SRLALTLGLDEDMADIIDELIAIRDLIHSVNCAYXAGLQEKFPPVPLLVSYLEDSKMTWSAASYNSSTSSSG

SEQ ID NO: 233942 - protein, 81 aa, Zea mays
  Clone ID: MRT4577_144948C.1.pep
GRTGIRATTSWAPRPPCAAGILLQHLHQPQLDGVLQRHGHDGRRRHPASRYIHHSSLPPLRPRSRRCSPRSFTGRVVARSP

SEQ ID NO: 233943 - protein, 82 aa, Zea mays
  Clone ID: MRT4577_144949C.1.pep
AGKLLNLHSSPASLLLEAPGSSAGARPPGQAKPLVPPTYEEACWHGWFDRDMETIAFESNPAPTRTIIKQTDNLRTGSRRSR

SEQ ID NO: 233944 - protein, 33 aa, Zea mays
  Clone ID: MRT4577_14494C.1.pep
SYSFFFYFLKKNHTFRLPALLSGTQLCYGGWEP

SEQ ID NO: 233945 - protein, 139 aa, Zea mays
  unsure (1)..(139): unsure at all Xaa locations
  Clone ID: MRT4577_144950C.1.pep
LAPTRSRDGGSFREFGGSPTFPADGLKIYPTVVIRGTCLYELWXTVRYRNYPPELMVDIEARTLYLDPPFTQVYSLQRDIPMPIDTYGXRDVTLAXLALARMEDLGLKCRDVRSRVAGTQDYHYMYRPDAVELDRRDYA

SEQ ID NO: 233946 - protein, 98 aa, Zea mays
  Clone ID: MRT4577_144951C.1.pep
AFHPYIINDALQKLLLWWAPVIKDSLASLLPQIPSTVGYCTCSLHLVPYWRDCWIGYWLAGARFWWWRAADGGGWLAAGARFLAVAAERQRDGEKVTG

SEQ ID NO: 233947 - protein, 115 aa, Zea mays
  Clone ID: MRT4577_144952C.1.pep
LGGEGTAEEAGQEEEDAHEQAEPRETAQHGGGAAGERHRPQDPPGQQQEAEATSFTSWGQEPPLRQPPEAHLQLQQEEPNHVQEAPPDPSRSQPGGRRTSTLRRIQRRVTPAART

SEQ ID NO: 233948 - protein, 45 aa, Zea mays
  Clone ID: MRT4577_144953C.1.pep
HSNSQKQRAVAICNGMLGWFIRALLNPTELRSLFLREFQRANVLK

SEQ ID NO: 233949 - protein, 43 aa, Zea mays
  Clone ID: MRT4577_144954C.1.pep
KNWAYNPYNSRFSNQKCVYGRVLKTKFGGALIFALKKAERPFF

SEQ ID NO: 233950 - protein, 58 aa, Zea mays
  Clone ID: MRT4577_144955C.1.pep
AACHTRTTDFSGISSISNTLVKQIDQRVQQRPALAVLLKRATNRCKDRHPPIQKFSYS

SEQ ID NO: 233951 - protein, 124 aa, Zea mays
  Clone ID: MRT4577_144956C.1.pep
HLYYLARMQGQSIRFVAPVSPSRPPRRYSSHPAVVVVSSSVSSFSSAWDAAAGFSSWKMVLCTASVLLVVGLGEGSFWSEHLISLLMLNVGRSSRLIHHHLIRYLFISRNLNGDWSGLGRQPWV

SEQ ID NO: 233952 - protein, 166 aa, Zea mays
  Clone ID: MRT4577_144957C.1.pep
HKSYWRNPSYTATRIFFTTVIALIFGTIFLNLGKKIGTRQDLFNSLGSMYAAVLFIGIQNGQTVQPIVDVERTVFYREKAAGMYSALPYAFAQVLIEIPHIFLQTVVYGLIVYSLIGFDWTVAKFFWYMFFMFFTFMYFTFYGMMAVAMTPNSDIAAISLTAFYAI

SEQ ID NO: 233953 - protein, 71 aa, Zea mays
  Clone ID: MRT4577_144958C.1.pep
VHINKKSVGKIGLRKIQIHPFLFSLGFLLRFMIEGVYLDPNSYLSRLPQEALDILNERVAAKQTENVSTFT

SEQ ID NO: 233954 - protein, 74 aa, Zea mays
  Clone ID: MRT4577_144959C.1.pep
PPEQGQDQFSPSVGPFFVGPNTPLKSQCMIFNRRRSEITNKAPARMLGFPRSASLGRQHPSARGITKETPHVSP

SEQ ID NO: 233955 - protein, 136 aa, Zea mays
  Clone ID: MRT4577_14495C.1.pep
CHCKSKHSANNIIHKSRNERVTTFLGGDHCKQKLTIAITWIYTYIHTKFSSFWIHKRSALKCTELLWNKVGLMECSATKRIIIIILPQFNISEDTLHIYMQIEKWVATYMQIEKERMDTCRLIELECTKKFLMHVN

SEQ ID NO: 233956 - protein, 85 aa, Zea mays
  Clone ID: MRT4577_144960C.1.pep
RCMHTLVCLKAVQPFFFFFCIAMWLSGLLEGRQDSNLLHRASWAVYNTGQKASNVNVSHVIQGSIHIHNNRFCQNSETLHMHLST

SEQ ID NO: 233957 - protein, 115 aa, Zea mays
  Clone ID: MRT4577_144961C.1.pep
SPPCSVSSDRARIKSPSLWLPLSHYPFLFGHIDRGPFDAFSVSLGCGEEQPSGDIVPTVRLYSFGAAENRLQACRRRRSRRLDSHVRLRTLRVCLHSFFRARAFCACAVLPPGSD

SEQ ID NO: 233958 - protein, 64 aa, Zea mays
  Clone ID: MRT4577_144962C.1.pep
KTIICENQINLHFKFLKLMVQPFCFGLNIFCPFGINRQKTETLRALMLLSPPLVQVNMMKDYTD

SEQ ID NO: 233959 - protein, 85 aa, Zea mays
  Clone ID: MRT4577_144963C.1.pep
NCSICLPMVYFIIMAALTQTPARVLYELSTTDLSVNSGDHHCVSNKNMTNQNYIERKDEQLCYCRIIQQDIHIYSFRSSIKKPGL

SEQ ID NO: 233960 - protein, 92 aa, Zea mays
  unsure (1)..(92): unsure at all Xaa locations
  Clone ID: MRT4577_144964C.1.pep
SISEAATPSVDSSIQAPVKAPVXKVEMKSKESAYQAWLGYYNSHKATNRDKARLVMLAEEFSQSMGLAVPPAIPKQILRKMGLSNVPGLRSS

SEQ ID NO: 233961 - protein, 183 aa, Zea mays
  unsure (1)..(183): unsure at all Xaa locations
  Clone ID: MRT4577_144965C.1.pep
ATRRQLGSGGVLVQLAQGLRLAGDPASSYSSPAXKDITGREAWNSTLNEQMKADRSGILMGXEAANSPRAYRISRGSREQXGPIRVXRTTITEELCPGLRVGAGLHSLRPXVNRSCTLCLSMQXIEHTGCAAGESKYTTAVQISVPIVCNXQHGDAAXVRVQHSQCYAAWDAHVPGLKVLAPY

SEQ ID NO: 233962 - protein, 130 aa, Zea mays
  unsure (1)..(130): unsure at all Xaa locations
  Clone ID: MRT4577_144966C.1.pep
SMEQVRVAQITYGSTFTAVDYSPRSVIQACLCLGGSPIQAEIGNGKAKHARIRPPFLSRAIDDAVACKGRRGHGWSRAFAEYVTKXVGRQLAADAAAVHANTAPRRVYFPDGGXNSRRFRTPRSTRLNFI

SEQ ID NO: 233963 - protein, 87 aa, Zea mays
  Clone ID: MRT4577_144967C.1.pep
IIYYTYSQQTHFTIEKWDPPFCRASKNLVKLLALNFCFKKHLKVLFATKKTSNNPLLRRVSDPPNPSSVSLQEAFSTFNEHGLAWHT

SEQ ID NO: 233964 - protein, 119 aa, Zea mays
  Clone ID: MRT4577_144968C.1.pep
GAYSGGGTRSGKRPTDRTNRWPIWVTVGLTITDQSTVLWSILSVQQSIQLPSALASVLVVKILVKIPATVARTEAIIKFLKGGVSGGLIKMYLKMVDDLIHQLMQVMNVEPDKNAQMKE

SEQ ID NO: 233965 - protein, 62 aa, Zea mays
  unsure (1)..(62): unsure at all Xaa locations
  Clone ID: MRT4577_144969C.1.pep
SWVVRHSKPAILLSNGGFHSVTVTSSNSIKDRLLMFSASELXIALPMLAYSSIAVKSSHNAQ

SEQ ID NO: 233966 - protein, 98 aa, Zea mays
  unsure (1)..(98): unsure at all Xaa locations
  Clone ID: MRT4577_14496C.1.pep
MPLKGLIYSVGGTKVPLFDLTXYYVYLFLELSLAPVPRLXMTYSXYYVMMPRIILLNVEYLARTINTILSTXYKHLXRHSSPYHYFLFCXCIRQFPLL

SEQ ID NO: 233967 - protein, 86 aa, Zea mays
  Clone ID: MRT4577_144970C.1.pep
EKPLRASRSQGSLLFRSSLAGRLKTPLSHGFVSLCLFLHSVRSVFFICISVFYGPFFSVKGSISHVSHNLSDILHYYQKKKKKRPL

SEQ ID NO: 233968 - protein, 114 aa, Zea mays
  Clone ID: MRT4577_144971C.1.pep
AKRTSVVSRNEEEKGPKRPKKSSNIEVLMERYLDIRSKQAEDEATQLAREREARGGDDFSIKNCIAVLNTLEVTKEEKVKAYKVFKDPDNRQIFLSACNDDREAALMWLRDEMA

SEQ ID NO: 233969 - protein, 84 aa, Zea mays
  Clone ID: MRT4577_144972C.1.pep
KFITRLILTQGVPAPKYLKSGGPKLFLVKAPPCHGSLSEMPIETRRGNLWWFEKDGPPFLKTWPIWQENQKRLFFPSEPLVHPE

SEQ ID NO: 233970 - protein, 67 aa, Zea mays
  unsure (1)..(67): unsure at all Xaa locations
  Clone ID: MRT4577_144973C.1.pep
RKKLVSATKEGLKLDEMSXQHRGXEELRESFLGLCMVIKEVLGDKVEKVVVSDRDVYLPCLSLSLGR

SEQ ID NO: 233971 - protein, 56 aa, Zea mays
  Clone ID: MRT4577_144974C.1.pep
PRAWPCRWSRRWPGHSSNGRTSFQRTTAGFFNPPVDWFSCWVRLANVYLDYSHKKK

SEQ ID NO: 233972 - protein, 146 aa, Zea mays
  Clone ID: MRT4577_144975C.1.pep
SSESRSIVPSQFQCKPVSGQFSHEDVASRPCASNESAHRSNSCATLWRLAWHAPAIRALSIGWRSSVRSGRFLGWASGSVRPFSLSRPASASGSTRWSCRRGSWSSYLCRGSSSGNAVSRSASRFEFYVWIERHRLPCAVHVDDVT

SEQ ID NO: 233973 - protein, 148 aa, Zea mays
  unsure (1)..(148): unsure at all Xaa locations
  Clone ID: MRT4577_144976C.1.pep
SARARIPRETYLPQALFIGRGHRKNIIPDEAPAYAAAVQTAILSRAGMEKVQHLRRMDVTPLTMXRPTAGGGRTSLIPRNATIPTKKEKGFSTYLDNKPGILRQPYKGERTXTDDNNPLGKPXLSRLSPAPWGVLKTTAWLGIKSKTG

SEQ ID NO: 233974 - protein, 44 aa, Zea mays
  Clone ID: MRT4577_144977C.1.pep
FFTFCAHCRGCSVCSNFRITSLVWSIAIDIVRLLLSYNQRRGGR

SEQ ID NO: 233975 - protein, 290 aa, Zea mays
  unsure (1)..(290): unsure at all Xaa locations
  Clone ID: MRT4577_144978C.1.pep
MDDLLSPCSSFSPPSPASFFSHAGHPVIEFASCEVPEQWLLDDLVVAKNEGYDDVDDLWPVRSSLSPDSEVSEQPLPPQPPPPSQQELTSVTAAPAQQQQRLGKRRGRKPGPRPDGPAVSHVESERQRREKLNRRFCDLRAAVPTVSRMDKASLLADAASYIAELRGRVARLEADSRRATAARWDPAVXRRRPPPAPPXGLAGAGGGADEAVEVRMLGPDAAAVRATSAGPHAPARLMGALRSLELHVQHACVTRVNGVTVQDVVVDVATPLQDDDGGLRAALLQMMQDS

SEQ ID NO: 233976 - protein, 87 aa, Zea mays
  unsure (1)..(87): unsure at all Xaa locations
  Clone ID: MRT4577_144979C.1.pep
MDDLVERFKDGLHMCMTEVYDKKPELFEPLMACQAPKYMVFACSDCRVSPAVTLRRQPGEVFTVRNIFAMXPAYDKTKYTRIGSVIE

SEQ ID NO: 233977 - protein, 33 aa, Zea mays
  Clone ID: MRT4577_14497C.1.pep
VTRQTWFYISRFIVDTFLDNNKNNFRLFYLRKL

SEQ ID NO: 233978 - protein, 48 aa, Zea mays
  Clone ID: MRT4577_144980C.1.pep
IVILLPRMVSNGGSFGSLAACRGIFQCLFVQTIFASGFTWCPPKKTPP

SEQ ID NO: 233979 - protein, 62 aa, Zea mays
  Clone ID: MRT4577_144981C.1.pep
RKIQINPGSYKGGFKGVWKGHFVLLKGWPPPPPNWGPWKPFKTEPLVGPFGDWNPKPFLAFL

SEQ ID NO: 233980 - protein, 800 aa, Zea mays
  unsure (1)..(800): unsure at all Xaa locations
  Clone ID: MRT4577_144982C.1.pep
MVVDRRWMYDSWKMKGALSSEWVSKTDTFLDLALARSETEIDDRCPCSMCQNIYFLNRRTISIYLCKNGYIHGYEVWVKHDEDPPPRIISEVQSHEEGYYDRMEEMLDGKEIASEKKCIVCDERRFAEVDNDDGLIVTIEDHPFRFDMNAFRKDTIVMKGPPKCLSGPEIVARLNDLKFLHGYAAGFRRSMNLKTSKFSRLKSHDYHIIMERLLPVTFHGFVKNDLWEALAELSYFYRHLCVKEIKKEMMEKLEQQIPIXGFFNPMQHLLVHLPYEAXRTLKKLRAMVANKRRVEGCIAEEFKYKEIASFTVLYFAEERNVDAPTLQYHVDEPPISDLEIFQWRSKTIGPSTAYYFTNDEWKTALLYMYNNMEEMSQFLLFRSTRFEDDHPLATTTNSGVVTRAVDDDGKVTNYYGVINDILEYKFFGDKQLKVVFFDCDWFSPNTTRENQYGMVEVKHYDQLKGHDNIIRAHQCEQNAEIMREMMMKMMVEMMWEMMLETMLDLDRRLVHRHRTLQKQYKLPEDGSYDMNARYVFEYNANDVVADAMYYARIQAIKAWCWCRGWPPDQRVIGPCADGGLPLSFVPFPKGTRETVGLSRSTTTAAMDMCAWLSEWYVTCMVHSCRLGIFDSTIDSRQLRRRGRQSTSSSSQSSRSRSSAQEIELAVLRQQVEYHQSVLREQLEYQRQQAEYQKKKDGYYTNLQAHNQALLSLAQQAGVRMPTYGMPPPDFALPMPMLSPPPPPPSQFPMGFQTPPASVAAPGDRSGQDDTSHSWVNNLFNTQSLAGGSGYNSNQSGDGYE

SEQ ID NO: 233981 - protein, 295 aa, Zea mays
  unsure (1)..(295): unsure at all Xaa locations
  Clone ID: MRT4577_144983C.1.pep
MEKLEQQIPILVCKLEKIFPPGFFNPMQHLLVHLPYEAKVGDPVQYRWMYHIERTLKKLCAMVEEHNVNDPALWYHVDEPPISDIEIFQWRAKTVGPNTTYCFTNDEWKTALLYMYNNMEEMSQFLLFRSTRFEDDHPLAATTNSGVVTRAVDDEGKVTNYYGVINDILEYKFFGDKQLKVVFFDCDWFSPNTTRENQYGIVEVKHNDRLKGHDTIILAHQCEKVYYMTYPSKKKGLVDWRVVYKVNSREQLYAPGDAGYXKSNRAGSGAAEIFQDDELTSTFNVQTEMLEESLL

SEQ ID NO: 233982 - protein, 230 aa, Zea mays
  Clone ID: MRT4577_144984C.1.pep
MAVMGSTSEKMYLFQVSLCSRFRIFVSPMIYNVCVTGETLLGKNDLVAREHVEEVIMRPIWSRFGLRRPKVEIDEATEACQKAFGTVCFFIGTRDLIQEHIAFRVWPLLESWEMPKETVTKSGEGELVRLKYTFKYGDKFDEPNDDWLKYIEATSNELLGPYSKVEDNVLSTSFGARGKKRLNRVFDAIGFVYPDYNYPLRDEERKGKLLLRPRSLLWPPPMSLRRRAKN

SEQ ID NO: 233983 - protein, 141 aa, Zea mays
  Clone ID: MRT4577_144985C.1.pep
MKHPRDAGAVPLSLALSLGGGGGVATKHGISKKPRRAAGGEFVCKTCSRAFGSFQALGGHRTSHLRARHGLALGVPAAAPAKEDTATKPAAAEPAPASHLCHVCGLGFDMGQALGGHMRRHREEAAAAAAQAPPVLLQLFV

SEQ ID NO: 233984 - protein, 245 aa, Zea mays
  Clone ID: MRT4577_144986C.1.pep
MSIDLCKNGYMLDYEVWVHHGEDPPPRIVSEVQSHEEGDYDRMEEMLDDVRHELLTADSENPGQPTDYEDLATPEVQKFFELLKAAEEPLHEHTKVTVLVFVTRLMAIKSKFAFSNNYYKELLNLISDETASEKKCTVCGEHRFVEVENDNGLTVTMKIARKQLRYMPLIPQLKCLFISKNTARHMRWHKEGVRENPNVMAHPADTDAWKTLDAFDSSFADEVRNVPFGLAIDGFSPFNLTAMFY

SEQ ID NO: 233985 - protein, 148 aa, Zea mays
  Clone ID: MRT4577_144987C.1.pep
MALEWVVLGYAAGAEAVMLLLLTLPGLDGLRRGMVSSSPPRSSSTGSSSPSPSSSSGSTRCSSASTSSRSATTDGARARAFPASTRRSRSSLCLVLSVFFSCWSADVLDLDRNLRHGASFCPYRLQIKRTTLFEMMIYLGCLDKWYRN

SEQ ID NO: 233986 - protein, 233 aa, Zea mays
  Clone ID: MRT4577_144988C.1.pep
YCLQGHRGYALIFDIVCLQASYGQEMVQRHGQEYDWRSQPIDPQAAYASGGGQAHGRLGIFDSTIDSRELRRRGRQSTSSSSQSSRSRSSAQEIEIAVLRQQAEYHQSVLREQLEYQRQQSEYQRQQVEYQKKRDEYYANLQAQNQALLSQLSQQAGVPMPTYGMPPPDFALPMPMLAPPPPPPSQFPMGFQTPPASVAAPGDGSGQDDTTHSWVNNLFSTHSPAGGGGDGYE

SEQ ID NO: 233987 - protein, 132 aa, Zea mays
  Clone ID: MRT4577_144989C.1.pep
MALEWVVLGYAAGAEAVMLLLLTLPGLDGLRRGMVSVVRSALKPMMSVVPFCLFLLMDIYWKYETRPTCDDEHACTPSEHLRHQKSVMKSQRNALLIAAAHLLYWILFSVTQLVVRLDQMQQRVDKLKKRDD

SEQ ID NO: 233988 - protein, 113 aa, Zea mays
  unsure (1)..(113): unsure at all Xaa locations
  Clone ID: MRT4577_14498C.1.pep
PLTSASILRLLDLVALFTRAATAYQFCPQXCTQLLLLSFLTPYLLPPVSSVCENPLFQPYMLQHGILLGILALSPLGLEHSLSLQQPLPXTHLLAQNIRAQQLPQLVLAHLAA

SEQ ID NO: 233989 - protein, 1515 aa, Zea mays
  Clone ID: MRT4577_144990C.1.pep
MEEDRRWMYEGWKKRGALSSEWVAKTDAFLDRAFARSETGTDVRCPCSKCRNICFLDRRTMSIHLCKNGYMPGYEVWMHHGEDPPPRTVSEVQSHEEGDYDRMEEMLDDVRHELLTVDSENPGQPTEFEDPATPEVQKFFELLKAAEEPSHEHTKVAVLVFVTRLMAIKSKFAFSNNCYKELLNLISDVLPENHKMPKDMYQSKKLLSGLGMDYEKIDVCDNNCMLFWKETAGEKECTVCGERRFVEVENDAGLTVTTKIARKQLRYMPLIPRLKRLFISKNTARHTRWHKEGVRENPNGMAHPADTDAWKALEAFEFRLVDEVRNVRFGLATDGFSPFNLTATSYSCWPVFAVPYNLPPALCMKYEFIFLCLVIPGPDHPGTKIDVMMRPLIEELKILWAGVEAYDCYKKQKFNLRAAFLWSIHDFMAYGIFAGWSCHGILTCPICVEDTSCFRLKFGGKICYFDCHRCFLPEDHPFRFDRNAFKKDTIVTRGPPKRLSGPEILARLNDLKLNEHGNRFEGYGTEHNWTHKCGLWELPYMKALILMHNIDVMHQERNMGESIISTCMNITDKTKDNPKARKDLALICRRPTMEIGENQKKPRAPFSIKPKRKKQLMKWLKNLKFPDGYAAGFRRSVNLKTGKFSGLKSHDYHIIMERLLPVMFRGFVKNDVWKALAELSYFYRHLCAKEIKKEMMEKLEQQIPILVCKLEKLFPPGFFNPMQHLLVHLPYEAKVGGPVQYRWMYHIERTLKKLRAMVGNKRRVEGCIAEEFKYKEIASFTGLYFAEEHNVNAHTLRYHVDEPPISDIEIFQWRGKTVGPSTTYCFTNDEWKTALLYMYNNMEEMSQFLLEFDSENCISGCERDQIRREGKDGGLNFLCWFRDYVDKNDNIHPDLRQLSLGAVTGRCYGRYDVNGFRFRSTRFEDDHPLAATTNSGVVTRAVDDEGKVTNYYGVINDIIEYKFFGDKQLKVVFFDCDWFSPNSTRENQYGMVEVKHNDRLKGHDTIILAHQCEQVYYMTYPSKKKGLVDWRVVYKVNPRERLYAPGDAGYVESQIEHEVGAAEIFQDEELTSTFNVQTEMLEESLLGDQNDVEVPGVVTLPTGESVPATTWEHYRYGVCRTFGNTQALVWDAFWKRYKLPDDGSYDMNARYVFEYNANDVVADAMYYARIQAIKAWYRANADDRPMPNTKAEWSSIYLTEEQYLEVSVPWMATRSEGYRALCRWWASPEFRAISERNRGNRGTESFHNYGGDGHVRLAKRMEVKSGRTPTDVEVYMQGHRGSDPQNPDVLCTQTATDRLASYGQEMVQRHGEEYDWRSQPIDPQAAYASAGGQAHGRLGIFDSTIDSRELRRRGRQSTSSSSQSSRSRSAAHEIELAVLRQQAEYHQSVLREQLEYQRQQSEYQRQQAEYQKKRDEYYASLQAQNQALLSQLAQQAGVPMPTYGMPPPDFALPMPMLAPPPPPPPPSQFPMGFQTPPASVAAPGDGSGQDDPTHSWVNNLFSTHSPAGGGGDGYE

SEQ ID NO: 233990 - protein, 132 aa, Zea mays
  Clone ID: MRT4577_144991C.1.pep
MALEWVVLGYAAGAEAIMLLLLTLPGLDALRRGMISVVRSALKPMMSVVPFCLFLLMDIYWKYEMRPTCDDEHACTPSEHLRHQKSIMKSQRNALLIAAALLLYWILFSVTSLVVKLDHLQQRVDKLKKRDD

SEQ ID NO: 233991 - protein, 132 aa, Zea mays
  Clone ID: MRT4577_144992C.1.pep
MALEWVVLGYAAGAEAIMLLLLTLPGLDGLRRGMISVVRSALKPMMSVVPFCLFLLMDIYWKYETRPTCDDEHACTPSEHLRHQKSIMKSQRNALLIAAALLLYWILFSVTQLVVRLEQMQQRVDKLRKRDD

SEQ ID NO: 233992 - protein, 70 aa, Zea mays
  Clone ID: MRT4577_144993C.1.pep
RGFCTSQGQRRCHWFNPGSQVEEVYARVQGRPGEVFPRILYRLYANFVVCLFFENVVPEVFPLIAGWKKQ

SEQ ID NO: 233993 - protein, 132 aa, Zea mays
  Clone ID: MRT4577_144994C.1.pep
MALEWVVLGYAAGAEAVMLLLLTLPGLDGLRRGMVSVVRSALKPMMSVVPFCLFLLMDIYWKYETRPTCDDEHACTPSEHLRHQKSVMKSQRNALLIAAALLLYWILFSVTQLVVRLDQMQQRVDKLKKRDD

SEQ ID NO: 233994 - protein, 78 aa, Zea mays
  unsure (1)..(78): unsure at all Xaa locations
  Clone ID: MRT4577_144995C.1.pep
FLPPQFKXPPXXPFPPLKTLLIIFPTTFFSNNLFPLSPLKLYPSIPXESLTPVPFYIPFFFSKNPPXPPPPYFKIKXK

SEQ ID NO: 233995 - protein, 140 aa, Zea mays
  unsure (1)..(140): unsure at all Xaa locations
  Clone ID: MRT4577_144996C.1.pep
MGKPLGGPYSIQQAKTTSIXTLSSLILQQSSGLXQQLPLVHAWAQNIRAQQLQQLGLENLAAYSQQQXFFTFNQLGTLNYVFYLQQQQLPFRQLPVDYPQEFLPFNQLAALNSPGYIQEXQLLPFSQIAGESPANFLTQP

SEQ ID NO: 233996 - protein, 99 aa, Zea mays
  Clone ID: MRT4577_144997C.1.pep
DPRVRHAMASLASAAVTAPSFAEPFPARAVVIRMSFNVSASLGIAIGTITVPTRDTSLLASSDTAYDVLLVSHYRRLVVKHSMTISRFVTLSHSVPWLA

SEQ ID NO: 233997 - protein, 107 aa, Zea mays
  unsure (1)..(107): unsure at all Xaa locations
  Clone ID: MRT4577_144998C.1.pep
SNALIISQGSLGPSAVIPEFLPPDTPMGFXQIAEQTNMQQQALGGSILQQLIVQLQQQWLPHVKIQSXITTXQDRQQVSTRLCHLSIVNPATYLQDHVVAFYPLAMG

SEQ ID NO: 233998 - protein, 96 aa, Zea mays
  Clone ID: MRT4577_144999C.1.pep
GRKLPGLSPPRHGQGGDLERQACARALGCCRARRRSVAETTTNPRPGTDTKWRREGVVRPHCLRRPSAGRGQCPVAGRAQRLDGGRLPAHGVAARR

SEQ ID NO: 233999 - protein, 66 aa, Zea mays
  unsure (1)..(66): unsure at all Xaa locations
  Clone ID: MRT4577_14499C.1.pep
KPGSPAKFSMYGFFAQAVVTGKGPIXTLLGPIGDPVKSNGWAQPPIFVPGKVRSAPPVPFRCPNAS

SEQ ID NO: 234000 - protein, 238 aa, Zea mays
  Clone ID: MRT4577_1449C.1.pep
ARGSAHYRTFWVTDSHYLTATGPAIAIFTNPTKQGYDDGLGEKIIGTFGNCAGGTTPWGTVLSAEENFQSQVPEAVYADGSAVDPAQCPLKISTNGLSGQGNVFGLAGNKYGWMVEIDPANANDYGVKHTALGRFRHEAVAVRATANQPLAVYSGCDRTSGHLYKFVSADTVKSPTDKGNSRLFTAGTLYGAKFNADGTGEWIALTPDTVVNPVRPSDIAVDSSTTGIVYLPHPDRNQ

SEQ ID NO: 234001 - protein, 112 aa, Zea mays
  Clone ID: MRT4577_144C.1.pep
VTARRLGSVWGKLRPARTSTAPRPRVILVGNRLTVHRSSAHVMYYVLLPGTGKVVIEWSLQQVETCGLSVKSCLHQHSLNFIILKETTAIMRQRRDVWTKGTSAGEEFWPDG

SEQ ID NO: 234002 - protein, 98 aa, Zea mays
  unsure (1)..(98): unsure at all Xaa locations
  Clone ID: MRT4577_145000C.1.pep
NFLSSYTCLSLMNQVARLLKLIRXYEIATFYTMFNRTKVGKYHLLVCGTTPCMIRGSRENEESLLLQHLGVKXRNEVTSETYIALAAEFCCPMPAFNA

SEQ ID NO: 234003 - protein, 68 aa, Zea mays
  Clone ID: MRT4577_145001C.1.pep
AVQVAACVSEMDFGRAAWYRGPCLYGVSKGGYRRARVRNERRTGGRGGNRGGGDRRVRGRVCIGCPRR

SEQ ID NO: 234004 - protein, 49 aa, Zea mays
  Clone ID: MRT4577_145002C.1.pep
SARAQKKPALFLLRPEYFNVEKMGASMELQNRLTYCAKLQLLLLGSILN

SEQ ID NO: 234005 - protein, 27 aa, Zea mays
  Clone ID: MRT4577_145003C.1.pep
EPENTLFLGYMVCVVNALNSADYNSKS

SEQ ID NO: 234006 - protein, 78 aa, Zea mays
  Clone ID: MRT4577_145004C.1.pep
MSLFKRSVTEGLGTFWLVLGGCGSAVLAAAFPAVGIGLLGVALAFGLTVLTMAVAIGHISGCHLNPAVSVGLVVGDRC

SEQ ID NO: 234007 - protein, 79 aa, Zea mays
  unsure (1)..(79): unsure at all Xaa locations
  Clone ID: MRT4577_145005C.1.pep
SSWXXXLLCVVSSLFLLFXASSLVRFSPGLPVPGGRVCWFSSSLSLGPXFFVASPALLASLLLSLRAVLWAFXSXXRVG

SEQ ID NO: 234008 - protein, 259 aa, Zea mays
  unsure (1)..(259): unsure at all Xaa locations
  Clone ID: MRT4577_145006C.1.pep
MAGSSGGAASSSSSRGVPENRFYNPPHVRRQQQQQGQRPLRPASPSPSPRPVRQXPLRRRRPLPRRXVDIRVDSDDSSSTTSSKPSVASTAATAAAGEVNVAVAEAEAGNLERFLASTTPSVTAQFLPMSSLRMRRGGDAMDSRPYFCLGDLWESFREWSAYGPXVPLVLNGSDSVIQYYVPYLSAIQLFADPSRPASRNRYFSRLRRPGDESDGDSMDTSSESSIENDVERLRVSSSLESTHRLENGGIRSDDGEGDA

SEQ ID NO: 234009 - protein, 388 aa, Zea mays
  unsure (1)..(388): unsure at all Xaa locations
  Clone ID: MRT4577_145007C.1.pep
MAGPSGAAASSSTSRGVPENRFYNPPHVRRQQQQEQQRLRSASPSPSPSPSPRSARQKXAAAGGPGLGXADVDSRVDSDDSSSTTSSKPSVASTAAGNLERFLTSTTPSVTAQYLPISTAXSLRMRRGGDAMDSRPYFCLGDLWESFREWSAYGAGVPLVLNGSDSVIQYYVPYLSAIQLFADPSRPASRNRRPGDESDGDSMDTSSESSIENDVERLRVSSSLEGKHRLENGGIRSDDGEGDASSSFPIFQYMERDPPYGREPLTDKVSTLAHRFPALKTFKSCDLLPSSWMSVAXFLMHAVIVTLLRQHALALXINRGTTAAGKLSLPIFGLAPYKLRASIWTSDKTQERDLVTSLMQEADSWLRRIQVDHPDFRFFVSHFSTTWR

SEQ ID NO: 234010 - protein, 68 aa, Zea mays
  Clone ID: MRT4577_145008C.1.pep
KTGGTRGGIKTTRTGGHPYIFKRALPPSLYINRYWGLLREKQVVLFYFFPGLKTRAGGGTNVYVGEVY

SEQ ID NO: 234011 - protein, 87 aa, Zea mays
  Clone ID: MRT4577_145009C.1.pep
VCITDCCVYFGSLGSVHASLRSSLGSLSGMLTSRLNSLVSVAHASWPHVAPAYSRVRVSMSTRRSSMLIQSRQIFIVPLVTALCPRD

SEQ ID NO: 234012 - protein, 52 aa, Zea mays
  Clone ID: MRT4577_14500C.1.pep
KNPGRQGGICNTCPIVQTVLVLKKGSWEFEKQKKKQKKKKKKKNKKKKKKAA

SEQ ID NO: 234013 - protein, 76 aa, Zea mays
  Clone ID: MRT4577_145010C.1.pep
KTSGGKPAFPLGWRHFVCEPIFPTVLTSGVERCSFSGRGGPVNFFGGKQPVRQDTGFVGLGPQFSQSYFLGPNKAT

SEQ ID NO: 234014 - protein, 60 aa, Zea mays
  unsure (1)..(60): unsure at all Xaa locations
  Clone ID: MRT4577_145011C.1.pep
LPLSPLSSEGWPLSLGTSLLRLHXLPSRFLSTHGGRLHYRGGIRLSMSINWQLLLLLSEG

SEQ ID NO: 234015 - protein, 75 aa, Zea mays
  Clone ID: MRT4577_145012C.1.pep
KKRDFCCPSRKADFLFMYGTQYAHYLPITSSVPRKDLFALVVGKCYIILLRFDAILRQHQGARASCFLKYGNGFK

SEQ ID NO: 234016 - protein, 67 aa, Zea mays
  Clone ID: MRT4577_145013C.1.pep
RGLEISGHLWRPNSVVLVSLPFFRQVYCSLCFALISWCLQNVYVILYPLVSLNHETIIKDFKLAPNA

SEQ ID NO: 234017 - protein, 121 aa, Zea mays
  unsure (1)..(121): unsure at all Xaa locations
  Clone ID: MRT4577_145014C.1.pep
DMEEYLVKALDNVGTHVDTLAYLFTELSXELASLITTVECXRTNACTXETSSDTYSLKQRLMMEAVMRNCKHNLVPYVXTMQCNTLFDAQADAHADPAPKPSSWPWSLEWTLDCDKNSKTS

SEQ ID NO: 234018 - protein, 90 aa, Zea mays
  unsure (1)..(90): unsure at all Xaa locations
  Clone ID: MRT4577_145015C.1.pep
NQSVDRANRIGQNKDVIVYRLMTFATNEEKIHKFPVXKGALFRPAPEQKEQTRYFSESEIPGLFSRPQQGFDVSLTHKQLQEQHGLQVVM

SEQ ID NO: 234019 - protein, 243 aa, Zea mays
  Clone ID: MRT4577_145016C.1.pep
NLLLKSSERYLVDKKVSESSAPLDVAAGVHGDGIMRRVVSFTARKTSRLPVEANHKSALVNLDRPCSMGKEKESVATMSESFAPTKKLKIKGPSQSKYLPMNTISTSVLHSKEKLKHEEASHLEDDEVLNAIAVEANHKSPLVNLDRPCSMGNVKESVVTMSESFAPRKKLKIKGPAQSKYLPMNTISSKENLKHEEASHLEDDEVLNAIAVHEGKLEMYLNDPSWRHMQHGGQTADARSKAR

SEQ ID NO: 234020 - protein, 217 aa, Zea mays
  Clone ID: MRT4577_145017C.1.pep
TLPCGRPRVRPPPSAPPAAFDVSHLRPRLPLAPVAEEPPRGLPSGRFRSPAIGLPTAAEMSGGEKMLLFGSFTEDETKLFQGQPLKSPNKSVNKECERTEIQFGTLNFSVLSLEKVSTSSVVLPAKSANSETSAIAKENTCSNEKKAAGSSLPNGGSILANGCPPVNVPANNGLFENVKKTEAVVPPVVPVKSISISTPQMTLEVHNNGTEPTQSRK

SEQ ID NO: 234021 - protein, 70 aa, Zea mays
  unsure (1)..(70): unsure at all Xaa locations
  Clone ID: MRT4577_145018C.1.pep
SISXVAHRXSYATTKLASVTARAPVAALRPSASLKSSSSSAAAFLGHSSRLVRTVTVSSTRRSLKAVAKG

SEQ ID NO: 234022 - protein, 82 aa, Zea mays
  unsure (1)..(82): unsure at all Xaa locations
  Clone ID: MRT4577_145019C.1.pep
KYPSNWGPFKHKFKGPNLPYRKSYKNXIGRCLXRRNXKNLGFPKFNPLGKNPLFPSWLKNKKARTNRLSKQLPNLNGKWTPP

SEQ ID NO: 234023 - protein, 204 aa, Zea mays
  unsure (1)..(204): unsure at all Xaa locations
  Clone ID: MRT4577_14501C.1.pep
MRLSHNAQLAPSKSGHPLTRGPPASHRRPPSGSEDVSLFSKNPVQKPKPDVQSSSSPYIRDELVKXHAPDRRIYLPDGLLDRSEETKYLTEQDPGDYGYDPFGLXNKPHDFFKHHAYELIHGIWAMLGAAEAAIPYVCNNDGANCGPEAVCFKTGAXLLLDDNTLNYFSNRIPINLVVDAIXTIILVRGGEYYRITNGLDLEDK

SEQ ID NO: 234024 - protein, 101 aa, Zea mays
  Clone ID: MRT4577_145020C.1.pep
RPCFHSPPYASWCPWCPVGRGGLPSRSCIRQSAGCAPPPPLLCVLRFLSLSLCRLSLSFGLSCPFSMFRFRSRPSSASSLLHFRFHPLLLCDISYLRACRT

SEQ ID NO: 234025 - protein, 173 aa, Zea mays
  Clone ID: MRT4577_145021C.1.pep
DSRFQHHLPLVFTSLTPAYCYYVARNMDSSENPSLSIQRNLNLTHDIITLTIDGTMPSTHTLHTHAAYMAGYSLRTCTGPNIASAWAILKALQPTRWRTTTTTASTTRATVALCHWPRRSSRRPHLPDWHPYHSCPRSVVRRPGDRVRRLCMPSVRYHTRSTTLAETDYRHRG

SEQ ID NO: 234026 - protein, 62 aa, Zea mays
  unsure (1)..(62): unsure at all Xaa locations
  Clone ID: MRT4577_145022C.1.pep
REIVRDIKVTLEYLALDYVQELATANITSXVVKSYELPDGGVITIGAERFTCPEVVFHASMF

SEQ ID NO: 234027 - protein, 53 aa, Zea mays
  unsure (1)..(53): unsure at all Xaa locations
  Clone ID: MRT4577_145023C.1.pep
GLPRGNPANFGRXGEGRNPRERGLGPWPIVGVPWGVHPTPPGFNGPLRGGSLF

SEQ ID NO: 234028 - protein, 82 aa, Zea mays
  Clone ID: MRT4577_145024C.1.pep
YAVVCRPDNAAVWFSFWAASGRQKQKLEPNAPLLAPLLHDALPQEAVRPLNARSGRELASVRSSAHFPRVVAHATLPRSRQA

SEQ ID NO: 234029 - protein, 124 aa, Zea mays
  Clone ID: MRT4577_145025C.1.pep
GGCSYFICSSTVQDHIVTYIPQLFYSVFVLGGTRDSTATLNVLISQPPDTRHAAGVGQRQPPGRRGSDFQRRAPPGNRPHPPPPGWLGRVDTKVSSSAPLLRILFCSETPAEAGSTWYKDDYFN

SEQ ID NO: 234030 - protein, 168 aa, Zea mays
  unsure (1)..(168): unsure at all Xaa locations
  Clone ID: MRT4577_145026C.1.pep
YVRPPVARGIAAPAPRAAVPTVRSAWWERKIEMADARRQSAGCWPAEEHDGDDAAAETTGGALSGDSSYQALETSTLVRALAHVVAGGGEGYQPPWAGARPENSPPTAIMATPGGTGTGYSPAAPTRPGHYFFEAGLLARHTACXQCXXXXXXXXXXXXXXXKKKKKK

SEQ ID NO: 234031 - protein, 575 aa, Zea mays
  Clone ID: MRT4577_145027C.1.pep
VASTIGQYGNGFKTSTMRLGADVLVFSRSPGKSGKRPTQSIGMLSYTFLRSTGKEDIIVPMIDYEYKQGWERMVRTTLDDWSTSFQTIITWSPYSTEAELLEQFSSMKDRGTRIIIYNLWEDDQGDLELDFDAEIHDIQLRGGNRDEKNIQMANQFPNSKHYLTYRHSLRSYASILYLRLPTYFQMILRGKEIVHHDIVTDMMLKKEVTYRPVAPNGHPKDSNMVADVTIGFVKDTKHHIDVQGFNVYHMNRLIKPFWRVWTAAGSAPRGVIGVLEANFIEPAHDKQDFERTTLLARLEARLVQMQKDYWSGNAHRIGYVAPRFGRNTEAGDGEDSPENTASAQPSPYHSGKGYTHAKDLSNNIKKGGKASTSFGIQQRAEKSARTKRSTKSILHGLSDSDNSDSEFMGTLSRSRSHTLKTNRKLFQNGSTGLITPQSSGLIERERVRTKSQPLDPKATSNGDLHTMDEYQSVIMQLRDENSSLKERLSKMEESMSQELVVECDKNKSLTERVEDLQRQLESATKEQEALIDIFSEERNRRDQEEESLRKKLKDASSTIQDLLEQLNAARKGRKV

SEQ ID NO: 234032 - protein, 140 aa, Zea mays
  Clone ID: MRT4577_145028C.1.pep
PSSSFFFFFFFFFFFFFFFFFFFFFGGQREVLWFGTTPFFYNHVIDSTDFSTKKHFFFFTTTSSSPRPFRLKSMGKKFKRGKTQARGVTSAIFFLETGPPKSKGPPRGRQAGDKTQGQIPQGPGDGKNKRQTGPSPGGEL

SEQ ID NO: 234033 - protein, 204 aa, Zea mays
  Clone ID: MRT4577_145029C.1.pep
MGRYEYAVKFYLLIENVATQNDGGLCFDHKEMGSWYVKAAQCYMILGDKKNAIPYFYKALQSMKDNIGIRLTLSSLLIDDDKTDEAATLLSPPKIPELQSANTPDQQKPWWCDGKVKMALAKLYYNKGNLEDFVDTIFHPILETLNVEYANRKVKSMRKLPNIVLHERVKVLGEQRPDSVFQGLRPIASPDELQKANRAKKLIE

SEQ ID NO: 234034 - protein, 218 aa, Zea mays
  unsure (1)..(218): unsure at all Xaa locations
  Clone ID: MRT4577_14502C.1.pep
ELRPAVDDQRPEGVAALRSALPFLLRRRLVERRHTSQLRWLFAGDERPPVRHGTRWTREVVQFPSSFARVCACSPYLCCKLCSFHSIEFGLAPFPLLNPEGSIAGGTAGVVVETALYPIDTIKTRLQAARGGSRIEWKGLYSGLAGNLTGVLPASAIFVXVYEPTKRKLLETLPENLSAVAHFTAGAIGGIAASLVRVPTEVVKQRMQTGQFKSAPDA

SEQ ID NO: 234035 - protein, 72 aa, Zea mays
  Clone ID: MRT4577_145030C.1.pep
QRANIKLYKGSSHTVAKEFWVQHKGHNGFFKPTKPQPCFMTQKPRLFFRRPLPFWGPPGGPRRPNSPGPEEV

SEQ ID NO: 234036 - protein, 179 aa, Zea mays
  Clone ID: MRT4577_145031C.1.pep
NPAQGREHQQLLLQPFEEAKAFLLVGYFGVCSPRTQIAVRIHELCVRPLDFQARRGLGLVHTAAQGVEPCLPLLVTLAGETVLRPRHFSLRSRSLRFSDGLVSLPPLLRQPAPEVRLLGLQGSHLLHQPTVFALRSRLLPESIRMLRPKTLDFGSDVCSQDARQNTVGEVGRLTKTHET

SEQ ID NO: 234037 - protein, 49 aa, Zea mays
  Clone ID: MRT4577_145032C.1.pep
GKAKNGKAPWEGVKAPCRKKWGMFPPRLPDAEKAYSLGPGIPPPKSPVV

SEQ ID NO: 234038 - protein, 210 aa, Zea mays
  unsure (1)..(210): unsure at all Xaa locations
  Clone ID: MRT4577_145033C.1.pep
SSRLLASAAAHSSPSSSGNHGHPYSKTKSVTNVVFYTQLTXSLTRHLPEDGYSGEDVRVTAMRTQIIIRATRTPNVLGYKGRXRSRELTSAXEKRFNFPDNXGELYSEKVXQRGLCAIAHDETLRYKLLPGLDVHRTSYDALHDVMNSAAKVCEAIESGKLMTPRATSMNFKDVYMISSGLAVNGYXDSAVTHVPLRRXVLAIKVKIMLD

SEQ ID NO: 234039 - protein, 57 aa, Zea mays
  Clone ID: MRT4577_145034C.1.pep
MDTPKKTLGGAFNELRASANHIIFNDVPILLMGLAAGPHKHMRGPPNGFLLPPVDQT

SEQ ID NO: 234040 - protein, 114 aa, Zea mays
  Clone ID: MRT4577_145035C.1.pep
RDGTAAGAKHVRNAALLPPGACACERHSHFLPLPSPPIIFSASAPTPTTLYSLHTHYVTARLHGRHPRAAPPPRRRHPPPRVVPHRCSVTRIRTGAAGVHAVPGRRGGYAGGGP

SEQ ID NO: 234041 - protein, 121 aa, Zea mays
  Clone ID: MRT4577_145036C.1.pep
TRRTNNTQPTTGQGSRQYHYQEQNVQAVHGNHSSISQIIPQKTYSKLAAAERSLDLNPYRLILQCLCLYGLQRQKSGFNPKRTSLRLVSILPWQRPSTPLQNTQQTAAARDTAKQRQADQG

SEQ ID NO: 234042 - protein, 104 aa, Zea mays
  unsure (1)..(104): unsure at all Xaa locations
  Clone ID: MRT4577_145037C.1.pep
MPDVATEAPKMDELVHLTTIPFHPVSKEDSSDDEDDKPVTVFHDNDNFIVKHPLQNKWTLWFTKPPSGKGDNWNDLLKEVITFDSVEKXWGVYNNVTPVYYISL

SEQ ID NO: 234043 - protein, 131 aa, Zea mays
  Clone ID: MRT4577_145038C.1.pep
LLARTSRTTRSPSPSPSRSPSLPPPLPPCPSPSRCPPPSPTPTPSPPAPTPTPTAYSPLNASSDAASNPKPRPVCPATRTYLKTDHTNATDSIKGCTIHQGANDGSHYLPKANPKAHTAHYQLKLALHNTV

SEQ ID NO: 234044 - protein, 47 aa, Zea mays
  Clone ID: MRT4577_145039C.1.pep
PCKVGCPLRPRSPPRTTGSGSCPLYARPARAPSRTGGTTPRRSPRRP

SEQ ID NO: 234045 - protein, 111 aa, Zea mays
  Clone ID: MRT4577_14503C.1.pep
GWRWSQARAHLGPPPMQKPVLATPPAVPYAIIVPISAETLQILLQKVALVPMNVKVRKKKNPVPIRRKRYVPLAKKHALSDGGPAYFLNERNNGIHWPRNSKFFLKNAPLN

SEQ ID NO: 234046 - protein, 124 aa, Zea mays
  Clone ID: MRT4577_145040C.1.pep
SPKILRPRRYERARSTQLSTKSSTGFPLSTDWKTTAAFRATASRSHGSMEWRPTVAEVKAMAGPFLLSVAACDMRVCSSGLRGQCRLITGHGIQPTCPSACYHPRFGVSVVTSIGYRGSLVSLI

SEQ ID NO: 234047 - protein, 75 aa, Zea mays
  unsure (1)..(75): unsure at all Xaa locations
  Clone ID: MRT4577_145041C.1.pep
MQEMIVSMAVAGAIIGAAIGGWTIDRFGGGAXILVADSLFFAGAGVMXXATRPAQLVVGRVFVGLGVGLAFMXSP

SEQ ID NO: 234048 - protein, 38 aa, Zea mays
  Clone ID: MRT4577_145042C.1.pep
KKKKKKKKKIKKKKKKKKKKKKKNKIKKKKKKKKKKAC

SEQ ID NO: 234049 - protein, 198 aa, Zea mays
  Clone ID: MRT4577_145043C.1.pep
GRLGYSARGTEGKVRTTGSLPGSPSAASKCLSLLLQQQQQQNDGQRAAAAAAAAALMLGGDEAHKFMNRPRLDRGDFASMMNPGSRQIYLTFPADSTFREEDVSNYFSIYGPVHDVRIPYQQKRMFGFVTFVYPETVKLILAKGNPHFICDARVLVKPYKEKGKVPDKFRKQQGERVDFSGCGSPTGLDARDPFDLHQ

SEQ ID NO: 234050 - protein, 82 aa, Zea mays
  Clone ID: MRT4577_145044C.1.pep
MKEFNGSYVLFLINGLYITLPTMYEPTPHAWSISRSSLSTMGFDPWKQPPLRLMFYFYDQHCMLLPWLITISSPIHPCQYDV

SEQ ID NO: 234051 - protein, 51 aa, Zea mays
  unsure (1)..(51): unsure at all Xaa locations
  Clone ID: MRT4577_145045C.1.pep
TPIYVLHPPFSAFRACSIWCTRPPPEKILMWRSYTAPASRVLCPXAXILXX

SEQ ID NO: 234052 - protein, 211 aa, Zea mays
  unsure (1)..(211): unsure at all Xaa locations
  Clone ID: MRT4577_145046C.1.pep
GRXIFYITYIAYPTQPKLTYTKLTNLKAHMPLSEYGKRNLVNGRRIDQRYYLRSSSLMNEDLDTYDDVFDFLSELSDYVEGVTNETDLASLQIQLLAALSADIMLHPNYESLPDLSKISLVPNCRLIRTYVLRISISHYHNIDKFIDRMTSITVILINSTSLLDEIIMYYTQYSRSTLRSTLKELLRVRTVTRVPPDRFLVKRKLHTTRNT

SEQ ID NO: 234053 - protein, 40 aa, Zea mays
  Clone ID: MRT4577_145047C.1.pep
TGAPSIGEWKKPSLFWVVCLFKKGSFFYENLGPMCEQACL

SEQ ID NO: 234054 - protein, 74 aa, Zea mays
  Clone ID: MRT4577_145048C.1.pep
GHAELASVIGILVWQTEICAELILAGSFDVFCALILPFESTETAVLVRFPLSVVQLFFRTASVKPHVIPEPCSS

SEQ ID NO: 234055 - protein, 131 aa, Zea mays
  Clone ID: MRT4577_145049C.1.pep
FPPPRNFGFESPFFPFLVLGAPLSTFSPRKSGFLWAKSFSNFGKSFLTWAGFPFLILPKAFWLSKVSVVGSTFPGFKWPTLFPFPNFAVYGYSAPLLALCLAPPGFLKFNFLPNFPPPSFIFFGVLPFPPF

SEQ ID NO: 234056 - protein, 107 aa, Zea mays
  Clone ID: MRT4577_14504C.1.pep
GVPFSNQRWATCVKGDTHGPLRGKATWRKWYGYQRGIRWGTAGYFRAGSCKKAANEKEFRRPKKRAMTLEALIRKPGSFKKAGLFFFIVFFFFFFFFFYFFFFRTRG

SEQ ID NO: 234057 - protein, 68 aa, Zea mays
  unsure (1)..(68): unsure at all Xaa locations
  Clone ID: MRT4577_145050C.1.pep
KNISLAVSPISLAVLAPQVSGCSSAYFVFISMHYLSLFLCIHIHEECFLSFRCSTSRQRRQTNAAQYX

SEQ ID NO: 234058 - protein, 167 aa, Zea mays
  unsure (1)..(167): unsure at all Xaa locations
  Clone ID: MRT4577_145051C.1.pep
SQEQVACLSQVVLLTPQSSGVEWSGVRPIQSSSICSCRWASHPHFHFTLPMQCGVAALLCRCRPAQSDRGEEMNSYTRAEQQQHHHDRPGPPTTPHRGPMRQHLYGEEARLIGRYTVLVLWSXRXRCQLXRRDTVRTRTLASAGANTLDALAGAEVASNELKLLLLL

SEQ ID NO: 234059 - protein, 120 aa, Zea mays
  Clone ID: MRT4577_145052C.1.pep
MAMVASTSFAYHKPRFAVVCRKNRDGRDRERERDGKEHKHPFKVVEITPPPRCLGVRCFPTNIHCGESVTIEGQAYTVSAVTHRYQLRKGRYEPSEKRLDVLSTGRYILNLYLQNLLDQS

SEQ ID NO: 234060 - protein, 87 aa, Zea mays
  Clone ID: MRT4577_145053C.1.pep
PWEYFGMACSGAFQALQAKVGPGDPPPTLKEPVGGFSIMCHPCCPRTSFLFSSPPNNPTFWGPLFFKEMYPSWFLLPPLFFFPPTTW

SEQ ID NO: 234061 - protein, 298 aa, Zea mays
  Clone ID: MRT4577_145054C.1.pep
MGAPKQRWTSEEEAALRAGIARHGVGKWRTILKDPEFSSTLCYRSNVDLKDKWRNMNVIVSTSSSRDKAKSALKRIRTIPKNNEHTMAITRVTSDIDDEIVDEKPIVSLPSEAKNTSSSKKSHRLDNIIMEAIKNLNEPTGSHRTTIANYIEEQYWPPSDFDHLLSAKLKDLSTSGKLIKVNRKYRIAPSSPNSERRSPKMPLLEDVQREPVKIWSDDTKTLTRSQVDAELARMATMTAEEASVAAARAVAEAEAIMAEAEAAAKEAEAAEAEAQAAQAFAEAAFLTLKNRNAGKLMA

SEQ ID NO: 234062 - protein, 123 aa, Zea mays
  Clone ID: MRT4577_145055C.1.pep
APTRPVDMFLAVGIYDHAVRTGNHGTGKTFAGLSDTNRLGCPRNILPSSGHPIDLPSLVCTPDFTRSLPSVLDSFSGRGCVTNLRSWGRVPYGNVVFLGHGHSNPHVDELNHLDNLLLDLVRE

SEQ ID NO: 234063 - protein, 58 aa, Zea mays
  Clone ID: MRT4577_145056C.1.pep
TVAVLTSPAALTSWHPLNRRGQPSSIQANLCFVKLQKAFFSANPVIGGALILDFYMSP

SEQ ID NO: 234064 - protein, 213 aa, Zea mays
  Clone ID: MRT4577_145057C.1.pep
MRAFEAAKGAPAPRIGVPEYLERVHRYAALDPECYVVAYAYVDMAAHRRPAAAVASRNVHRLLLASLLVASKVLDDFHHSNAFFARVGGVSNAEMNKLEMELLDLLHFAVAVDHRVYHRYREHLETEMLRRDYHHGLMPVSGSAAPSKPRTTASSVVNNPPLPPPLTEGRRPAEAGDDGDDREEHEYRKVPNGLPAVNTMTTSSLRELWTFDY

SEQ ID NO: 234065 - protein, 45 aa, Zea mays
  Clone ID: MRT4577_145058C.1.pep
RWAASGACADHALVGLICKILDRDGSPVRCVFCASQLLTEKRGCP

SEQ ID NO: 234066 - protein, 48 aa, Zea mays
  Clone ID: MRT4577_145059C.1.pep
AFLQAQPICSLTALFSTPGLLSPRLLSSCCPSCHIGHEDLRSTLQQEG

SEQ ID NO: 234067 - protein, 100 aa, Zea mays
  Clone ID: MRT4577_14505C.1.pep
HASAEDGQDGSLTSRWNFAQRPHSNSPVMSRVQGSDAYSSTKTEESGGAPSSALAKLTTRLNFLKERRALLASEMQNLDLGRSQAQRHTAPPKAETPTEK

SEQ ID NO: 234068 - protein, 93 aa, Zea mays
  Clone ID: MRT4577_145060C.1.pep
FDRIDQEQLIAAENDGLRERGDNSNGVEQTDKLEAVESSEVWWCGGGDHESMTMVCGGSGTGGQARACRRSVRATRRRLCLPLLAPARIPSLR

SEQ ID NO: 234069 - protein, 228 aa, Zea mays
  unsure (1)..(228): unsure at all Xaa locations
  Clone ID: MRT4577_145061C.1.pep
MPRLMHLRARCLRRCCGPNCLLDHSDDGVLLENGAFCEIWRPSINIERHPHYNDMIVEAIAVLYVTDSLRSEGXLSTDXTNTQTSSPPYSTINFMLSEXNSMLSARXIPKNSCPAAELRNQALERSSLRTQCHPRHEDLIECXLMYRCDVXADDVQADVDAIDNERAIXRYCRAMPFTCGINYQAPSVVAGGDLAKVQRAVCMIXNSTXXVGVFSRIDHKFDLMYAKR

SEQ ID NO: 234070 - protein, 393 aa, Zea mays
  Clone ID: MRT4577_145062C.1.pep
MEGFSRDLLCGIGKGDAPPPEKRPGQLREEMEEVELSLGLSLGGRFGLDRKGSKLPRSSSVAAMLTTPVEVPAPPALSRASSLPVQAEASEVERKQGLDGWGSCREGGGLGVQHAARLPASGNPSSASSVGEGQILQGTLMRTSSLPAVIEASGNDDWKKRKEAQSLKRLEVKKKRIERRNSLTCNTSKEAAGQSPEEMNANTDKLVSSDETIASANESHSSGKHLVKGLPPKYQATITSQDSSSAMRKKPNSAFKGTAITEEQNSSSSVPSSGEAISSVTAPSLPLLSLVPITATLGSREDQSILGRAGARANGMGDVERRMMQEMPGVFTKGLSNGSRVEGFLYKYSKGEVRIVCICHGSFLTPSEFVEHAGAGKVDNPLRHIVVSATPNL

SEQ ID NO: 234071 - protein, 56 aa, Zea mays
  Clone ID: MRT4577_145063C.1.pep
WGQCIWPTNVSIAQVLTHGTEKISSITQPKLTKEGKKPIRSSVFIKPVPPFHWVKK

SEQ ID NO: 234072 - protein, 73 aa, Zea mays
  unsure (1)..(73): unsure at all Xaa locations
  Clone ID: MRT4577_145064C.1.pep
KQKQQGREIAVTEAEAARGVEEEVXKVAEVEEAREMRAEEVDGDSDAARVPRPPDNHHIIIVLVSSMMMLLAR

SEQ ID NO: 234073 - protein, 164 aa, Zea mays
  Clone ID: MRT4577_145065C.1.pep
MTINCFPRWFCLHNSSSSDVSNYEFVMARLFICQTLIAEFLFQSELLAAEINYMAKRETELQNDHMNLRTKIEEGEQQLQQVTVAQSVAAAAATDVELNPFLEMDTKCFFPGGPFATLDMKCFFPGSLQMLEAQQRQMLATELNLGYQLAPPDTDVANNNPQQF

SEQ ID NO: 234074 - protein, 268 aa, Zea mays
  Clone ID: MRT4577_145066C.1.pep
MGRGRIEIKRIENNTSRQVTFCKRRNGLLKKAYELSVLCDAEVALIVFSSRGRLYEYANNSVKATVERYKKAHTVGSSSGPPLLEHNAQQFYQQESAKLRNQIQMLQNTNRHLVGDSVGNLSLKELKQLESRLEKGISKIRARKSELLAAEISYMAKRETELQNDHMTLRTKIEEGEQQLQQVTVARSVAAAAAATNLELNPFLEMDTKCFFTGGPFATLDMKCFLPGSLQQMLEAQQRQMLATELNLGYQLAPPGSDAANNNPHHQF

SEQ ID NO: 234075 - protein, 268 aa, Zea mays
  Clone ID: MRT4577_145067C.1.pep
MGRGRIEIKRIENNTSRQVTFCKRRNGLLKTYELSVLCDAEVALIVFSSRGRLYEYANNSVKATIERYKKAHTVGSSSGPPLLEHNAQQFYQQESAKLRNQIQMLQNTNRHLVGDSVGNLSLKELKQLESRLEKGISKIRARKSELLAAEISYMAERETELQNDHMTLRTEIEEGEQQLQQVTVARSVAAAAAAATNLELNPFLEMDTKCFFTGGPFATLDMKCFLPGSLQQMLEAQQRQMLATELNLGYQLAPPGSDAADNNPHHQF

SEQ ID NO: 234076 - protein, 234 aa, Zea mays
  unsure (1)..(234): unsure at all Xaa locations
  Clone ID: MRT4577_145068C.1.pep
MGRGRIEIKRIENNTSRQVTFCKRRNGLLKKAYELSVLCDAEVALIVFSSRGRLYEYANNSVKATIERYKKAHTVGSSSGPPLLEHNAQQFYQQESAKLRNQIQMLQNTNRHLVGDSVGNLSLKELKQLESRLEKGISKIRARKSELLAAEISYMAKRETELQNDHMTLRTKIEEGEQQLQQVTVARSVAAAAAAATNLELXPFLEMDTKCFFTGGPXRTLDMKCFLPGSLQQM

SEQ ID NO: 234077 - protein, 49 aa, Zea mays
  unsure (1)..(49): unsure at all Xaa locations
  Clone ID: MRT4577_145069C.1.pep
CSRLPRPPPELAGAPXPPPTPTPHPAPPPPPPPRSPPPPTPTPPPPHPP

SEQ ID NO: 234078 - protein, 38 aa, Zea mays
  Clone ID: MRT4577_14506C.1.pep
HRLHSLLSKGKKNHGCYRFPIIKRSFFRILNSHQVKAE

SEQ ID NO: 234079 - protein, 140 aa, Zea mays
  Clone ID: MRT4577_145070C.1.pep
DHPSDEQVKVLDHPKLHDGFHEKWDHGLVAELTMEHVQLWAIDTIVTFDSYGVSGHPNHKDVHHGIWLVQLSGLTLHELLKWFVNIGTPICWASDLLFFDCAQLMLISFTCVFLCYTYACHIYEVVSYFLHSESKIFISI

SEQ ID NO: 234080 - protein, 251 aa, Zea mays
  Clone ID: MRT4577_145071C.1.pep
MGRGRIEIKRIENNTSRQVTFCKRRNGLLKKAYELSVLCDAEVALIVFSSRGRLYEYANNSVKATVERYKKAHTVGSSSGPPLLEHNAQQFYQQESAKLRNQIQMLQNTNRHLVGDSVGNLSLKELKQLESRLEKGISKIRARKSELLAAEISYMAKRETELQNDHMTLRTKIEEGEQQLQQVTVARSVAAAAAATNLELNPFLEMDTKCFFTGGPFATLDMKCFLPGSLQQMLGAQQRQMLATELNLGYQ

SEQ ID NO: 234081 - protein, 201 aa, Zea mays
  Clone ID: MRT4577_145072C.1.pep
MSFLLKEKEMIIAAGIVASMGRGRIEIKRIENNTSRQVTFCKRRNGLLKKAYELSVLCDAEVALIVFSSRGRLYEYANNSVKATVERYKKAHTVGSSSGPPLLEHNAQQFYQQESAKLRNQIQMLQNTNRHLVGDSVGNLSLKELKQLESRLEKGISKIRARKSELLAAEISYMAKRETELQNDHMTPQTKIEGGESTAAA

SEQ ID NO: 234082 - protein, 287 aa, Zea mays
  Clone ID: MRT4577_145073C.1.pep
MSFLLKEKEMIIAAGIASMGRGRIEIKRIENNTSRQVTFCKRRNGLLKKAYELSVLCDAEVALIVFSSRGRLYEYANNSVKATIERYKKAHTVGSSSGPPLLEHNAQQFYQQESAKLRNQIQMLQNTNRHLVGDSVGNLSLKELKQLESRLEKGISKIRARKSELLAAEISYMAKRETELQNDHMTLRTKIEEGEQQLQQVTVARSVAAAAAATTNLELNPFLEMDTKCFFTGGPFATLDMKCFLPGSLQQMLEAQQRQMLATELNLGYQLAPPGSDAADNNPHHQF

SEQ ID NO: 234083 - protein, 23 aa, Zea mays
  Clone ID: MRT4577_145074C.1.pep
HDFTCVGLQLSVAVPKYLLRQQT

SEQ ID NO: 234084 - protein, 265 aa, Zea mays
  Clone ID: MRT4577_145075C.1.pep
MGRGRIEIKRIENNTSRQVTFCKRRNGLLKKAYELSVLCDAEVALVVFSSRGRLYEYANNSVKATIERYKKAHAVGSSSGPPLLEHNAQQFYQQESAKLRNQIQMLQNTNRHLVGDSVGNLSLKELKQLESRLEKGISKIRARKSELLAAEINYMAKRETELQNDHMNLRTKIEEGEQQLQQVTVAQSVAAAAATDVELNPFLEMDTKCFFPGGPFATLDMKCFFPGSLQMLEAQQRQMLATELNLGYQLAPPDTDVANNNPQQF

SEQ ID NO: 234085 - protein, 64 aa, Zea mays
  Clone ID: MRT4577_145076C.1.pep
PLFRLPFFFIFITTVFVISGQKKVESVDRCLRYPNTGCTQNINNSCNEFQRIHQNLTKRNLLQT

SEQ ID NO: 234086 - protein, 122 aa, Zea mays
  unsure (1)..(122): unsure at all Xaa locations
  Clone ID: MRT4577_145077C.1.pep
PSERPHAAGIFQXAAAQANGSIXDQVGVLTTPAATLVGVYDGHGGADASRILRSRLFPHVQRVVQEQGGMSAEAIRSASGAAEEESHRQARQEWRNPPRIAAEGSRXLLGANFGDTLYLANP

SEQ ID NO: 234087 - protein, 45 aa, Zea mays
  Clone ID: MRT4577_145078C.1.pep
VSNIRQGALKKITDAVSIMICVLNKSAHEKRAPFHTRLMMLMTNR

SEQ ID NO: 234088 - protein, 51 aa, Zea mays
  Clone ID: MRT4577_145079C.1.pep
SLYFLVLIINKLVWKKKKKEKKKKKKKKKKKKKKKKKKKKKKKKKKKGRKF

SEQ ID NO: 234089 - protein, 321 aa, Zea mays
  Clone ID: MRT4577_14507C.1.pep
SPACFCLPGFEPRSPQQWNLRDGSAGCVRRTSLGCGGGANASSDGFWVVDQMKLPEATNATVYAGLTLEQCRQACLSNCSCRAYAAANVSGGVDRGCVIWAVDLLDMRLYTTDVEDVYIRLAQSEIDALNAAANRRAPSKRVVVIAVVATVTGVLLLLLSAGCCCVWRRKRRERHGETDPCPAPPSGGGDDALPFRARKQQALDEDWRSAEKDVDLPLFDLAAVLAATGSFSASNKIGEGGFGPVYMGKLEDGQEVAVKRLSRRSMQGAVEFKNEVKLIAKLQHRNLVRLLGCCIDEDERMLLYEYMHNQSLDTFIFDEGK

SEQ ID NO: 234090 - protein, 84 aa, Zea mays
  Clone ID: MRT4577_145080C.1.pep
ARLRIIGRLRGLRVLALHFLRLQTRTPRWTEKTKGICRYSVVLYSSDRSLALSNVRGELIECACVIITPSSTYYMCLSLPLSTS

SEQ ID NO: 234091 - protein, 55 aa, Zea mays
  Clone ID: MRT4577_145081C.1.pep
RGPRPGQTPICLVFRSTLNGVNPTLSYDAYIIGYGKHDNVCRLTALLHIYIERDA

SEQ ID NO: 234092 - protein, 79 aa, Zea mays
  Clone ID: MRT4577_145082C.1.pep
EWKESWAQPCTTALHIAHNRAAAPVRGHGCRCRPDRRRGRRGIRPRPTTDSSFRASASRKAGYGPGYVLVSYASVACRR

SEQ ID NO: 234093 - protein, 53 aa, Zea mays
  Clone ID: MRT4577_145083C.1.pep
ADGRDAEKYVKVPYYRNHSCELLRCGIVLAPLSAYRSPSGHRGFLNAGCAIPW

SEQ ID NO: 234094 - protein, 153 aa, Zea mays
  Clone ID: MRT4577_145084C.1.pep
VMRRQVFLTVVPVRQVDPTSVLAQGATTARLLPAVSIGPATTSEAGSAPMELSVVRTASRGRGFHGSVPGPSSRSRRQTHRLSTRATTCLLVILRSDKAPVHGRLELQIFWPRSRVGSCAQRRVSALQSAAARRWGRERRPRQVCRFRPSRGY

SEQ ID NO: 234095 - protein, 72 aa, Zea mays
  Clone ID: MRT4577_145085C.1.pep
EASILPSKVDYIVPTSSFRGAFGCHATRGYRMSPAMRDSRVYAKDPAEKRDENFMIHLMMAGVASAAPKTSC

SEQ ID NO: 234096 - protein, 41 aa, Zea mays
  Clone ID: MRT4577_145086C.1.pep
HLGFNTTSLLFILNKIYIKKNFQKTFHYNVNLSKIWFLPSQ

SEQ ID NO: 234097 - protein, 615 aa, Zea mays
  unsure (1)..(615): unsure at all Xaa locations
  Clone ID: MRT4577_145087C.1.pep
EHEYFQVFSWEPVRCHDVVDMGWSNLADLSIYEGKLLGCSYHECRVGLWAADISLIGPYALGVLPKANFFAELVQSMEDNPVKPVDSTANSRPASAMAHSRSSYKIKESGIAQSRVRGSHLTPASTDKTKKDRSSTIPRRPDSSLKSSVQSTTLMRRMKLVDSPSTNTKNVERNVGQRDISLASRAVMANNSATAKKSNLTESALVKDIYTTSQAVSAPIVVPRDILEDKTVSNVRRGTGETAAVPDDFRIPVHRRKPSLSGSAADSDSSSRSVFTEPDVCSEGLSSLKFSFGLTPYHKKEEFGDVDNEGIAQIAEKMERTVSLDHSQQLNDXMYSHFSLFLNIDTVFASMVMXSRTLFYAAFESPCSTTETAKVKYVRGVAVPLGKTKSLVERWEKRETSSTDYSPQTGSCGDRASRNDNHPFHLAEPSTTFEKDLSTVDEAMAPVNLVRNHDEFLNAVKLRLTKLEMMRHVFEQSGIKGAIAAVAKLPDNAVQADVVSALKGKLDLFNLEFFSNFLPVLAGLLCSKTERHAMVSLEMLLDLIKIFGPVIHSALSANLGVGVDIQAEQRLQRCSRCFNHLQKIQQSLNPLILRGGQTAQLAQELSLSLQDLVVI

SEQ ID NO: 234098 - protein, 197 aa, Zea mays
  unsure (1)..(197): unsure at all Xaa locations
  Clone ID: MRT4577_145088C.1.pep
HGVTVXLXSLGGGGTIEIEVKYKSYDDIERENXWWRIPFVSDFLVKSSLGSALRMVLGSESINASQFVKSAFGQLSSFTYTYLPKPSSLESGVDVSKSDEESSDGPTNSNELQQQNIDSEIISDSHSHSEVQSPTAVVNSEGNSSSDMKKSDEYFWRALNNVLNQNVLQNFGFSLPEXSNWGGFDLLSSLGLKSRNI

SEQ ID NO: 234099 - protein, 58 aa, Zea mays
  Clone ID: MRT4577_145089C.1.pep
VFHIFLALHLFMLFTCESMSWTKQLFLHPSFVASQMPNSSRSIAPGSFGSSPPYYEVW

SEQ ID NO: 234100 - protein, 74 aa, Zea mays
  Clone ID: MRT4577_14508C.1.pep
GSGAPSYPFRCWSPWMVYKMIPGLFHKTFCPHMCEQYSDIVVLRDPYKICFRSPLWLMENAIVLPKKKWLQDGK

SEQ ID NO: 234101 - protein, 97 aa, Zea mays
  unsure (1)..(97): unsure at all Xaa locations
  Clone ID: MRT4577_145090C.1.pep
LDDWIPRAAGFLYEVTVGECAVGITCPLSSDTXGTFPADYVPTVYGIFSANVAMDGIRLNHGLRYTAGQAXHTTLQSLSYKGSDMLLLGFSHNYKAN

SEQ ID NO: 234102 - protein, 163 aa, Zea mays
  unsure (1)..(163): unsure at all Xaa locations
  Clone ID: MRT4577_145091C.1.pep
MASVGVARSSLGFQNGTSSSSDPDRLPNELGSMSIRDDKDVEDIVVNGNGAEPGHIIVTSIDGRNGQAKQTISYMAERVVGHGSFGTVFQAKCLETGETVAIKKVLQDKRYKNRELQTMRVLDHPNVVALKHCFFXKTEKEELYLILVLEYVPETAHRVIXHY

SEQ ID NO: 234103 - protein, 155 aa, Zea mays
  Clone ID: MRT4577_145092C.1.pep
LMRGKKKEEGKPFSMHLAKFAPKLTLFPTNPSASHAGGKPTRARTDLGSQNQPTTPAPLDLTDRQGYGRRRCGIKRPTGSTERRTARARRGLPDRVGAGSASASASAPESFSPLPPTPARGGRIEEEEEERERGGGGGKPEMEMEEGGTRPRPGR

SEQ ID NO: 234104 - protein, 77 aa, Zea mays
  Clone ID: MRT4577_145093C.1.pep
HGWIQVKNIKLKIVGSLPSHFELEAVIWLLVIGRRAGHTSKWKEENYELNKDDGTNTKLETSTAAPFQFIRVLAGQM

SEQ ID NO: 234105 - protein, 410 aa, Zea mays
  Clone ID: MRT4577_145094C.1.pep
MASVGVARSSLGFQNGTSSSSDPDRLPNELGSMSIRDDKDVEDIVVNGNGAEPGHIIVTSIDGRNGQAKQTISYMAERVVGHGSFGTVFQAKCLETGETVAIKKVLQDKRYKNRELQTMRVLDHPNVVALKHCFFSKTEKEELYLNLVLEYVPETAHRVIKHYNKMNQRMPLIYAKLYMYQICRALAYIHNSIGVCHRDIKPQNLLVNPHTHQLKLCDFGSAKVLVKGEPNISYICSRYYRAPELIFGATEYTTAIDVWSAGCVLAELLLGQPLFPGESGVDQLVEIIKVLGTPTREEIKCMNPNYTEFKFPQIKAHPWHKIFHKRMPAEAVDLVSRLLQYSPKLRSTALEALVHPFFDELRDPNTRLPNGRFLPPLFNFKPHELKNVPADFMVKLVPEHARKQCAFVGW

SEQ ID NO: 234106 - protein, 83 aa, Zea mays
  unsure (1)..(83): unsure at all Xaa locations
  Clone ID: MRT4577_145095C.1.pep
LINCILYXFHFQTRDKTTGQLKNKCGLLKTLGQRVNPYLPHIFGTIKWLFNNNSSKFKHHAAHLISIIAIVIKHFQDDQFMSH

SEQ ID NO: 234107 - protein, 106 aa, Zea mays
  unsure (1)..(106): unsure at all Xaa locations
  Clone ID: MRT4577_145096C.1.pep
NVKHTPMTLCKDEPAFYSGLRCSEGGTSRQSSPKSQIISRPNHSLEPRPPPPNAATIRAGTGPGVGYGRPSGAGCRGAMRIRGRGKWGGVPSGXGGGGAGGGGGAG

SEQ ID NO: 234108 - protein, 50 aa, Zea mays
  Clone ID: MRT4577_145097C.1.pep
ETLGSSKRLGLAKFFGGRTYWDWWTEFSGGGLLGFWDCLGGVPFGDGLLA

SEQ ID NO: 234109 - protein, 37 aa, Zea mays
  Clone ID: MRT4577_145098C.1.pep
SCPGTGLFRLTLSLFRVLSSCCPVVGPAGVLAAEQRV

SEQ ID NO: 234110 - protein, 83 aa, Zea mays
  Clone ID: MRT4577_145099C.1.pep
QHNAMGLTKSIKIDVRLKLNHKAPCVCPHLTHVYCNHTNLGEVASTPNYPIPNRRKFEFTLNNSWGTLMYKRSSIKGRCKPMF

SEQ ID NO: 234111 - protein, 133 aa, Zea mays
  unsure (1)..(133): unsure at all Xaa locations
  Clone ID: MRT4577_14509C.1.pep
MAKAYPTVNNDFLKAIDNVKPELLFLGGVKNRPPLMLKLAPHSGDTSYVNTKTRIHFPTLNNTVKQAHGAIYRLLFALTLLXPINDHFPILXYSNLHHLAGIGAKXITGRPDDPYHPKRRHNPNPSPTGPLAN

SEQ ID NO: 234112 - protein, 114 aa, Zea mays
  Clone ID: MRT4577_1450C.1.pep
PNALNPHPNDATDTVGDREHRRKACYLLVAQQGIPPISSVAPRRRHTSGEKSQPPNDPPPTLRPHQVRFPPTTPSPRVCIRAQVPPGTKNRSGGPTCSSSSWTDALTLSLSRCL

SEQ ID NO: 234113 - protein, 46 aa, Zea mays
  Clone ID: MRT4577_145100C.1.pep
APCAKRGPLFTMATIVPIQPPCFDNPKRVHPTPQLGGAPPFKFLRG

SEQ ID NO: 234114 - protein, 234 aa, Zea mays
  unsure (1)..(234): unsure at all Xaa locations
  Clone ID: MRT4577_145101C.1.pep
MDLLRKELEKKRKAATADFGGKNFVRRSELEDKQLQKRRQIPAKAPSVPTPNSSSASDPTNSNADPAQAGGGNPNPSSSAAAASVPPALAGKKATPDDTLHSEERRIDELVLPRNEVMRRLRVLREPVTLFGEDDADRLDRLKLVLKSGAIDDIDDLEMTEGQTNDFLRDMIELRMRQKAGRDAYGKGKGKRVGAGDGGEGGALGDDVDEGGXDARXSGDDADAXXGLKRMKPV

SEQ ID NO: 234115 - protein, 130 aa, Zea mays
  Clone ID: MRT4577_145102C.1.pep
GGVSLLFERKGRAFGQKLCFKKQGAERGWALQGFPGGVPPRARGGLVGSPRRGGHLRFFLGAPPRSRNGGQDPRHTKGRWSLPWLSIGMYSARRWMRPPSWLGFPAGATVNPPHCGGFWERKKTPTQRED

SEQ ID NO: 234116 - protein, 142 aa, Zea mays
  unsure (1)..(142): unsure at all Xaa locations
  Clone ID: MRT4577_145103C.1.pep
PRARAAPRRPRPAAPSAAATAARAPRPKASPSPPRPTXAPPPAPIFADQAAALASLFAPPPPPPLPAFSFVAAQAKEETSSTPAGFAAPYSSVSEDMAPFASLDAAGMFEIGEDASAAAAYWNAGSCWTDVPDPSMMMYLLP

SEQ ID NO: 234117 - protein, 65 aa, Zea mays
  Clone ID: MRT4577_145104C.1.pep
FIPRVNRPNCPDARLQSDCYILVLTEWRAHKVFISQILRPEIYTIQAYYHQSGWREGDTNSTQPS

SEQ ID NO: 234118 - protein, 53 aa, Zea mays
  Clone ID: MRT4577_145105C.1.pep
NRLTDDNQLAKLGEESSPRKATKQLSWPHFSSCVTSAGNPLRGKCPAFGLFGG

SEQ ID NO: 234119 - protein, 79 aa, Zea mays
  Clone ID: MRT4577_145106C.1.pep
AITLISIFFFLNKKDKFPVAFPSGLRVCAKGVFETWAGGYRQPSLIFLGFQKPTLQDRWTKLGRPFSWAVHQILQPGCC

SEQ ID NO: 234120 - protein, 92 aa, Zea mays
  Clone ID: MRT4577_145107C.1.pep
YTSFTLCRCCASLPTSHVTHLPRGHESHTPLPRKRGRVTLRGLYKVPLASENSLQFLGSSNAGIPRLTAIATKSTQGPPYTDHSPTALAPFG

SEQ ID NO: 234121 - protein, 59 aa, Zea mays
  Clone ID: MRT4577_145108C.1.pep
AHPCCFTSPPRKKTCGSKGAIHRGVRFDLGGVSQLTLWQQGRSLVHFIFIFYFCKTSPM

SEQ ID NO: 234122 - protein, 62 aa, Zea mays
  Clone ID: MRT4577_145109C.1.pep
VNLEDLCAIISPPSFVIIKKVKKERKKGPNTLPLLEVLSSLRARDWVIGICLNKNESSSCQV

SEQ ID NO: 234123 - protein, 178 aa, Zea mays
  Clone ID: MRT4577_14510C.1.pep
MGAGDGEVAASKDKASGGGAERTSLDGVRDKNVMQLKKLNTALFPVRYNEKYYQDAIASKDFSKLAYFSDICVGAIACRLEKKEGGAVRVYIMTLGVLAPYRGLGIGTKLLNHVFDLSAKQNISEIYLHVQTNNDDAIAFYKKFGFEITQTIHNYYMNITPPDCYVLMKFIGQAATKK

SEQ ID NO: 234124 - protein, 215 aa, Zea mays
  unsure (1)..(215): unsure at all Xaa locations
  Clone ID: MRT4577_145110C.1.pep
MSIYLTKASEADLPTIARIATSAFHPETDALSRRLFPRHLQPKDIPDGEAAYDWRLARKASSLASSESHLVIAVDKDKNVEDRIVGFALWDAPPAEGGDSSPNKPVECDALDKSAFEEMKKTVNQDAIDTLGEKGIAGVWHLDYIGVGPGNQRRGIGKMLLQWGLDRASEEGKDCYLVATEAGRPLYVAAGFEDIRTVLILGIPHHSMILXAGKS

SEQ ID NO: 234125 - protein, 43 aa, Zea mays
  Clone ID: MRT4577_145111C.1.pep
PVSQDQEKSFEMRTFVIRMSAMLIDSAGMYIWLQGDATFTDPN

SEQ ID NO: 234126 - protein, 151 aa, Zea mays
  unsure (1)..(151): unsure at all Xaa locations
  Clone ID: MRT4577_145112C.1.pep
DPYRATVSLHVPQLNPLTLDILRKEPEHVNFYKINITSDETPSPDEIARYKVLPKCLDLRQRDIFREETAPCEKXIITDPSTSKANTNTFSYEHQAXTEHHFIIVDGVILACPNKDSIERVYPIAEATTVFTDMHYHLSVLSAGDIRTVGH

SEQ ID NO: 234127 - protein, 52 aa, Zea mays
  Clone ID: MRT4577_145113C.1.pep
VGMCSSAYTEIFVSYPLMGLGVVSYATLFKIVTPRAAIHIVSHELQIVPHAW

SEQ ID NO: 234128 - protein, 98 aa, Zea mays
  unsure (1)..(98): unsure at all Xaa locations
  Clone ID: MRT4577_145114C.1.pep
NVQPGTMDRYRTAPCEQNISPDICEMGQYGAGXTDTKAHYTEGSVLIDSVLNVAMNEDQNCYCFXGCQVFHSIXRCTESSLGTLLISKIRXEHHDRMK

SEQ ID NO: 234129 - protein, 145 aa, Zea mays
  unsure (1)..(145): unsure at all Xaa locations
  Clone ID: MRT4577_145115C.1.pep
VMRLGAMDSVQTSRGYSYNGPLYRLDSTSFTTREDLXLSGLHDVRRTGVTGHLCTVLXAGKINLHTTDAXVNMATGHTIRLLHXPSFESRLLPYQDPSLNETLLGHLSRNCPHKVTYLRTPNDMHTHVAFYNKYYDHLVNHDGLF

SEQ ID NO: 234130 - protein, 273 aa, Zea mays
  Clone ID: MRT4577_145116C.1.pep
MPGHPTPADALLGGGTSRRHAELLLHSSDDGVSVKDLRLRRVVPPAAGSLDTFPECVAPVKSRFVERTPLEAVSAATAAAAGDFDRKLAPPRSKLVRDPRSFGYRRLLPFLNELTKNDSSIGMVFPQDTAAHSKDGLGGSDCRLADESIGVSHCEPEAMVVNTGGDTDVKDACNNVSEEIKIAPHDLTNKPLLAGCTRSRFVYHPSSFSYKRMLPFLMENDISAQECNRVKIRKIAEERQLASNENDVSASGQHCLAASDDSSHECNRGQAET

SEQ ID NO: 234131 - protein, 221 aa, Zea mays
  Clone ID: MRT4577_145117C.1.pep
MDAAARKRSRPESANGGAAGGKRSRESESQQTGLSSKSKPCTKFFSTVGCPFGEGCHFAHFVPGGYQAVSKSHSLGHAAVSAPSRAPADHAASGVKTRMCTKYNTAEGCKFGDKCHFAHGERELGRPPSSYMSQESSYAPPMGGRYGGRHEPPLPASMGPPAGNFGASSTCKVSVDAALAGGIIGKGGVNTKQICRITGVKLSIRDHESNPDLKNIELEGS

SEQ ID NO: 234132 - protein, 115 aa, Zea mays
  Clone ID: MRT4577_145118C.1.pep
TDPLCSLGVVCRLRSPRARPDVLRCPTPASSPPTHPQLKPTFIRIPRALDSPHLSVTAMTARPASPPAAGGGRDGCSATASPPRSASRAVCCWGGASPAAVCQPWPVARRGARSG

SEQ ID NO: 234133 - protein, 104 aa, Zea mays
  unsure (1)..(104): unsure at all Xaa locations
  Clone ID: MRT4577_145119C.1.pep
LTFXHKGGGCFTHISLTTCLAPTLFSPTTTLASSPCSATTLLRRDFLPSNRSRRNQQRRVVVVVGAEEFERVEGGHGSGCCSESRGEEVRRGACWEGCLAAAAT

SEQ ID NO: 234134 - protein, 57 aa, Zea mays
  unsure (1)..(57): unsure at all Xaa locations
  Clone ID: MRT4577_14511C.1.pep
SPLMTSSRGILVDLKLFFGPFLNLRLWRLILTAHVDSVVIVVHNGSARASANAPCXR

SEQ ID NO: 234135 - protein, 119 aa, Zea mays
  unsure (1)..(119): unsure at all Xaa locations
  Clone ID: MRT4577_145120C.1.pep
NKVLKNPQQRRFFKARDMKDLLTLQDDEGNGSTETSNIFGQLSKDVNVGVPNDGQQDXDEESSILKSLFGAQGIHSAINHDAIMDANDDQKVRLEAEASQVAQRAAEALRQSRMLRSHD

SEQ ID NO: 234136 - protein, 81 aa, Zea mays
  unsure (1)..(81): unsure at all Xaa locations
  Clone ID: MRT4577_145121C.1.pep
GGAWANSNKSFKGGATGYSRPLGPKGFDVPKAALIGSAIGDPRKDTSGPXLNIVIKVMRVEFLGFAPFFASXHGGLLFKVL

SEQ ID NO: 234137 - protein, 73 aa, Zea mays
  Clone ID: MRT4577_145122C.1.pep
SILGMQPCEGTDVVPSNSRSPPCLLSGVFLGTVKVLVSLSFGISAPKEVALKLAVRFYDPKISAKIPEIVANG

SEQ ID NO: 234138 - protein, 98 aa, Zea mays
  Clone ID: MRT4577_145123C.1.pep
RPNYFQLKSLFSQANSFNLGASKVNLGCSMQELGSCDACVCNGRTFLIVSTFFFFFFFFFFFFFFFQLRIPFKVYIRTSVKEHINVIWGNLKHLGLIW

SEQ ID NO: 234139 - protein, 124 aa, Zea mays
  unsure (1)..(124): unsure at all Xaa locations
  Clone ID: MRT4577_145124C.1.pep
MMRPGAESFPATSHGAPMAAPNSPWQSPVPYLFGGLAAMLGLIALALLILACSYWKLSGYLDAGRDQRAAGEAGGAGAGADGEKGSATGAARPAAGVREHVVVIMAGEDRPTFLATPAXSRAVA

SEQ ID NO: 234140 - protein, 59 aa, Zea mays
  Clone ID: MRT4577_145125C.1.pep
WNGQTNQSPIPVSKKKRGTISLIAQAFKIIHFKFKRGAYAFANPAINCRDNVGKKQLPN

SEQ ID NO: 234141 - protein, 80 aa, Zea mays
  Clone ID: MRT4577_145126C.1.pep
KGVFIYSNPFHLSTERLYIERLRCRFPQLFDSCESFQLPPGVDTHTFSLFLRTSADNKQKKTICEIAWATCYGPLARELH

SEQ ID NO: 234142 - protein, 70 aa, Zea mays
  Clone ID: MRT4577_145127C.1.pep
LTGGPHRHGWHGLLRGATRGVAPSHRSMVRSTNFVQGLTALLARYTDDVHVPCESTFTRTDQTADTSLSE

SEQ ID NO: 234143 - protein, 60 aa, Zea mays
  Clone ID: MRT4577_145128C.1.pep
HHCYSFSEIISPLFKPLLIARIHHYLIASNTLKLLDGYAWFNYLWRAICILKLCKCNFYL

SEQ ID NO: 234144 - protein, 833 aa, Zea mays
  unsure (1)..(833): unsure at all Xaa locations
  Clone ID: MRT4577_145129C.1.pep
MSQPHAAAPASKRPFSSTTTSPSPTSSPATPLMKKAKHPAATASSVGTVEKNGIHLDTTAAAAAMGGGRTNGEEDAEMVPVDQDELPAPSAPASAGVAANLFRKKATLPQPSTSARKPLRIRIGQPKLPKNFEEDTWTILKDAITAIFLKQKLSCDVEKLYQAAGDLCLHKLGANLYERIKKECEIHIAEKISALVGQSPDLVGFLSLVQRTWPAFCAQMLFXRPVXLLLDVKYVKNVANICSVWDMGLQLFRKHLSLSPEIEHKTVTGLLRLIESERLGEAIDRTLLSHLLKMLTALGMYSESFEKPFLECTSEFYATEGVKYMQQSDIPDYLKHVESRLQEEHERCILYLEANTRKPLIATTETQLLERHTSAIIEKGFAMLMDANRINDLLRMYNLFQRVNAVELLKQALSSYIRATGQGIIMDEEKDRELVPFLLDFKASLDKILEESFAKNEAFSNTIKDSFEHLINLRQNRPAELIAKFLDEKLRAGNKGTSEEELEGILDKVLVMFRFIQGKDVFEAFYKKDLAKRLLLGKSASIDAEKSMITKLKTECGSQFTNKLEGMFKDIELSKEINDSFRQSSQARTKLPSGIEMSVHVLTTGYWPTYPPMDVKLPHELNVYQDIFKEFYLSKYSGRRLMWQNSLGHCVLKADFPKGKKELAVSLFQSVVLMLFNDAQKLSFLDIKDSTGIEDKELRRTLQSLACGKVRVLQKIPKGRDVEDKDDFVFNEDFSAPLYRIKVNAIQMKETVEENTSTTERVFQDRQYQVDAAIVRIMKTRKVLSHTLLITELYQQLKFPVKPADIKKRIESLIDREYLERDRSNPQIYNYLA

SEQ ID NO: 234145 - protein, 66 aa, Zea mays
  Clone ID: MRT4577_14512C.1.pep
PAGFISIDFVIKKKKKKKKKKKKKKKKKKKKKKKKKKKKKKKKKKKKLKGGRVWGVSLAPKNQEGG

SEQ ID NO: 234146 - protein, 76 aa, Zea mays
  Clone ID: MRT4577_145130C.1.pep
QCDGPRCMGLMVNISCRKFERSSHELYLLLVNAKGLWISSLRFGVWKVHLTACVLCATLGVLSNLGFFKHPQKKRK

SEQ ID NO: 234147 - protein, 252 aa, Zea mays
  unsure (1)..(252): unsure at all Xaa locations
  Clone ID: MRT4577_145131C.1.pep
MANLLAHQLVYELSSPRAWMLLLFCVLVAYARYSLATFSAKRARNRMQAQAQHHVHDDNYNNLLPPPSPPALPVLGHLHLVGSLPHVSLRRLARKHCSDVMLLRLGAMPVLVVSSPRAAEAVLRTHDRVCASRPYSLVGEVVMYGSSDVGFAPYGDYWRRTRKLITTHLLTVRRVQALRIAREEEVSAVMARIGEAAAAGAAVDMGELLGSYANDLACRAVMGKSFPGXEGRNKLFRELVSDTSPLLGGFQR

SEQ ID NO: 234148 - protein, 94 aa, Zea mays
  unsure (1)..(94): unsure at all Xaa locations
  Clone ID: MRT4577_145132C.1.pep
TINFTFLITTFIPSIIXSTFFIKSIQFILXPITQTNSIKSNTPIQSNKYIISKFTNSIFKIFLLFLFTTSLYYLXQLLPPPFFTXKXSXIQPTH

SEQ ID NO: 234149 - protein, 115 aa, Zea mays
  Clone ID: MRT4577_145133C.1.pep
MAMDHVARLASERAVVVFTASNCSMGDVVTSLLSSLGVNAAVHDLDRDPRGMEMERELARRLGGGGGGGRGTTTTPTVPAVFVGGDLVGGTNRVMALHLSGELVPMLRKAGALWL

SEQ ID NO: 234150 - protein, 177 aa, Zea mays
  Clone ID: MRT4577_145134C.1.pep
GKIHRAERFPPEPAAAVRLARPRAVPEMITDEEKSVFRRIGLRLKAYLPLGVRGVFDGVIENMHLHWKHREVVKLISKQKTLSFVEETARLLAYESGGILVAIERVPKGYALIFYRGKNYRRPINIRPRNLLTKAKALKRAVAMQRHEALSQHIDQLESNIKQMKLDLVCNFSLGYF

SEQ ID NO: 234151 - protein, 60 aa, Zea mays
  Clone ID: MRT4577_145135C.1.pep
RLHDSSGRKVRDGGADGKIFQASLIDLDLDCRASTRALCWGHLSFIILKVHIHDNTHASK

SEQ ID NO: 234152 - protein, 150 aa, Zea mays
  unsure (1)..(150): unsure at all Xaa locations
  Clone ID: MRT4577_145136C.1.pep
FLMLRRLQGHSNCFGLGGFATSRSSASIYLAFKCLQHDLLRLISCHDMTFTEYQIKSYMRQLLXGLAHCHARGEMHRDIKSANLMTSDGSKLKVADFRMANLYSPAPAAPLTSRVVTLWYRPPELLLRTTVYEPFTDLQSANCFYLIMHT

SEQ ID NO: 234153 - protein, 94 aa, Zea mays
  Clone ID: MRT4577_145137C.1.pep
MGSWVRTITTPFRKACTIFGPQKDGGGGGGGGGGGGGGKRSQQPNPATMVRHVDDAAERAKLHGEVMACAYEDVQVMWSMLDQTTRIGDLSGSS

SEQ ID NO: 234154 - protein, 77 aa, Zea mays
  Clone ID: MRT4577_145138C.1.pep
KPRHFWAGGGPFPGARSSPLAALETFPTPRRPHGRPPQNEKRLHTALALFTTPTHLGMLTMKKHSNASQVGTASYHP

SEQ ID NO: 234155 - protein, 114 aa, Zea mays
  unsure (1)..(114): unsure at all Xaa locations
  Clone ID: MRT4577_145139C.1.pep
IRLEKVYTLQSSCGRLLTYYQGLERDGHQWKQNRVSLLELHSGGHMSIEAGNKAMQKAIYVCSRDSLRSDLKKQSACHRQGKEXFXKIGKILHLFYSKTDGFISKKDMDRAPNA

SEQ ID NO: 234156 - protein, 99 aa, Zea mays
  unsure (1)..(99): unsure at all Xaa locations
  Clone ID: MRT4577_14513C.1.pep
RHWPFHPWCPPSNGSDPIPLASHLRLPSTRTPTRLPSIHHLHAWIPFEALELAIYLRSTTXTDYSXPTIYLRNPPCVTPVGIPQARPPPAHSNLMHRQP

SEQ ID NO: 234157 - protein, 294 aa, Zea mays
  unsure (1)..(294): unsure at all Xaa locations
  Clone ID: MRT4577_145140C.1.pep
MATAAACVRVASPFTGPPIWHPRHVISTRRGPRRAGLAVTAAAATVLVTGAGGRTGQIVYKXSTLKERYGQFVGRGLVRTGESKGKIGGGDDVFVGDIRDPESIAPAIEGIDALIILTSAVPKMKPGFDPSKGGRPEFYFEEGSYPEQVDWIGQKNQIDAAKSIGAKHIVLVGSMGGTDINHPLNKLGNANILVWKRKAEQYLADSGLPYTIIRAGGLQDKDGGLRELIVGKDDEILKTETRTIARADVAEVCIQALLFEESKFKAFDLASKPEGEGTPTTDFRALFAQVNSRF

SEQ ID NO: 234158 - protein, 129 aa, Zea mays
  Clone ID: MRT4577_145141C.1.pep
TPSTRSDPILQPTHQESEDETRSTQKLDGLQKKKTTNPTTLPQLRLTPRVAGKRNAPKGSAEPQQQQKRSAREETDPTRSRNGVYKEGRNGKHKRAEMNNRRARKIHLQCPAPLKDTTTYYDHLINGTK

SEQ ID NO: 234159 - protein, 404 aa, Zea mays
  Clone ID: MRT4577_145142C.1.pep
MAAGARPLVSVRALEGDMATDSVGVPLPDVLRAPIRPDIVRFVHKLLSCNSRQPYAVSRRAGHQTSAESWGTGRAVSRIPRVPGGGTHRAGQGAFGNMCRGGRMFAPTKIWRRWHRRVNIHLRRVAIASALAATAVPSLVLARGHRVEYVPELPLVVSDSAESIEKTAQAIKVLKQLGASADADKAKDSVSIRPGKGKMRNRRYINRKGPLIVYGAEGSKIVKAFRNLPGVDVANVERLNLLDLAPGGHLGRFVIWTECAFKKLDEVYGTFDTPSAKKKGFLLPRPKMANADLSRLINSDEVQSVVKPINKEVKRREPRKNPLKNMAAVLKLNPYLGTARKMAALAEAARVKARKQKLDSKRTKLSPEETSKVKAAGKAWYKTMISDSDYTEFENFTKWLGVTQ

SEQ ID NO: 234160 - protein, 195 aa, Zea mays
  unsure (1)..(195): unsure at all Xaa locations
  Clone ID: MRT4577_145143C.1.pep
HAGDRTGQIXYKKLKERAGEFVAXGLVRTGESKVKIVGGDDVLVSDIRDPESIALAIEGIDALIILTSAVPKMXFDPTGGCPXFNFEEGSYLEQVWKRKAEQYLADSGLLHTIIRAGGLQDKDGGLRELIVGKDDEILKTETRTIARADVAEVCIQALLFEESKFKAFDLASKPEGEGTPTTDFRALFAQVNSRF

SEQ ID NO: 234161 - protein, 404 aa, Zea mays
  Clone ID: MRT4577_145144C.1.pep
MAASARPLVTVRALEGDMATDSAGVPLADVLRAPIRPDIVRFVHKLLSCNSRQPYAVSRRAGHQTSAESWGTGRAVSRIPRVPGGGTHRAGQGAFGNMCRGGRMFAPTKIWRRWHRRVNIHLRRVAIASALSATAVPSLVLARGHRVESVPELPLVVSDSAESIEKTAQAINILKQLGAYADAEKAKDSVGIRPGKGKMRNRRYINRKGPLVVYGTEGSKIVKAFRNLPGVDVANVERLNLLDLAPGGHLGRFVIWTECAFKKLDEVYGTFNAPSAKKKGFVLPRPKMANADLSRLINSDEVQSVVKPINKDVKRREPRKNPLKNMAAVLKLNPYLGTARKMAALAEAARVKARKQKLDSKRTKLSPEEASKVKAAGKAWYKTMVSDSDYTEFENFTKWLGVTQ

SEQ ID NO: 234162 - protein, 298 aa, Zea mays
  Clone ID: MRT4577_145145C.1.pep
MATAAACVRVASPFTGPPIWHPRHVISTRRGPRRAGLAVTAAAAAGGSPRTVLVTGAGGRTGQIVYKKLKEREGQFVGRGLVRTGESKGKIGGGDDVFVGDIRDPESIAPAIEGIDALIILTSAVPKMKPGFDPSKGGRPEFYFEEGSYPEQVDWIGQKNQIDAAKSIGAKHIVLVGSMGGTDINHPLNKLGNANILVWKRKAEQYLADSGLPYTIIRAGGLQDKDGGLRELIVGKDDEILKTETRTIARADVAEVCIQALLFEESKFKAFDLASKPEGEGTPTTDFRALFAQVNSRF

SEQ ID NO: 234163 - protein, 91 aa, Zea mays
  unsure (1)..(91): unsure at all Xaa locations
  Clone ID: MRT4577_145146C.1.pep
TPHSPNPSXHPLIPPTEAPSXSARPTXSLPGYGLTXHLINGGLESXKPRSTQRPKPPKPPLXXYKRYSGMLGVGHGPHMACGTXTPYAGSH

SEQ ID NO: 234164 - protein, 49 aa, Zea mays
  Clone ID: MRT4577_145147C.1.pep
KFALHLTWQGMPLSGLKGSETNSLLVLTSILYVALLSLSSTFQWAKKLT

SEQ ID NO: 234165 - protein, 203 aa, Zea mays
  Clone ID: MRT4577_145148C.1.pep
MAFPTPASVFVDENQQINRGKRAAGSRTKGLKPSENPGNLERRALQDLSNFAKGTGLKGTSTLKERSQRKAFSNVTNTIKGTALKDRPITKEKSTQKQRSQNPVKILSDEDIKLCHEWAKDGVEGFHSTQNDSQKFDKDLLAKRVKKKVASVNFSLSVVGSDTVFDSLMFPAMGRFYNETKLLELVREIHRDIRCGSPKLSRW

SEQ ID NO: 234166 - protein, 94 aa, Zea mays
  Clone ID: MRT4577_145149C.1.pep
ACGSPRCQSQSPCVARCPCVTSVCAFDAREHFPDVFLSAMSVDGSLQRHSLNVRGARSSWGHWERCDKWSPCLFGPTRESLRAINLTRAEFRAS

SEQ ID NO: 234167 - protein, 145 aa, Zea mays
  Clone ID: MRT4577_14514C.1.pep
KQNKNIKKKNGCSSCRNPPGGEFFKCPSPWRGARPCFYWAPFPPLGGGFTIPWRGLYYPFWGNPPLSPPYFPGGPPPFPRWPLCKRGPGHWPFPAVAHSEWGVGGPCLGALFPLDGRFPPPVTVSFARALGPVPFVFFPSFFGGF

SEQ ID NO: 234168 - protein, 113 aa, Zea mays
  Clone ID: MRT4577_145150C.1.pep
ALTSPLGALDPYAANVSKVSHITRQRLDQVRGAGIHLRLVHCAQAYMGGTALMALSLAQGKAYLCGHPSGQVYGSIYDCRGPQTCAREGYGQPHLEDKQGGPFGALALTCRHL

SEQ ID NO: 234169 - protein, 108 aa, Zea mays
  Clone ID: MRT4577_145151C.1.pep
TSISSTKIPLSVVRTSQSVALVLAQAEQPPPAVPLSADDAWSWSSSSSSGLHLHGLLLHAWRRRAPTAGHTGGEGAALVFPVSGWIPLGSEGKSELFAEAAPASSAHR

SEQ ID NO: 234170 - protein, 47 aa, Zea mays
  Clone ID: MRT4577_145152C.1.pep
MTPLIALFEDYITDDAHGEGRWSAQHRQPLLSLRRPGARQVQRLQHT

SEQ ID NO: 234171 - protein, 80 aa, Zea mays
  Clone ID: MRT4577_145153C.1.pep
ADKHTLSVLSKIFGLYLILLYTLLSYPSTILDLELSILVNLHLLKSMITFTELLLTNTIDPAFARFVRHLQTLVLASSSH

SEQ ID NO: 234172 - protein, 61 aa, Zea mays
  Clone ID: MRT4577_145154C.1.pep
TASIKQLFKLRFQDNMALVRGVSNLSKLHHKNLVHIIGYCADGDQRLLAYQSLPASTLEEH

SEQ ID NO: 234173 - protein, 47 aa, Zea mays
  Clone ID: MRT4577_145155C.1.pep
EKRKVEPPFKPKVKSPSDYSNFDPEFLNEKPQLSFSDKNLIDSMDQT

SEQ ID NO: 234174 - protein, 81 aa, Zea mays
  Clone ID: MRT4577_145156C.1.pep
GIKNGIPAWPFFFPIKKQHRGILRSSFIQGPSPAVQGLWIWVWPTNKNETGGPFILFYKLLYGKLTRFLHAPGTSKKGFRA

SEQ ID NO: 234175 - protein, 66 aa, Zea mays
  Clone ID: MRT4577_145157C.1.pep
FFSIHGRLWGSCSTITCSRSCPSSSGFNIYLRAFVFVICYHNSPFPEYRLSGDLSNQPKKKRPCAD

SEQ ID NO: 234176 - protein, 75 aa, Zea mays
  Clone ID: MRT4577_145158C.1.pep
GWNRLTRGEGKGLQSDFDSRGGFILPHYGNLLGNLGCQFLKPSVLRPIVEVLAGDPQIRFPGTLRRFMGNLMGRG

SEQ ID NO: 234177 - protein, 68 aa, Zea mays
  Clone ID: MRT4577_145159C.1.pep
WSDFAICIHGCLVDVSTSELQTGVQLSFLYWCGSQHDVCLYSSSIIIATPSVLHARPGERSCPARCGT

SEQ ID NO: 234178 - protein, 247 aa, Zea mays
  Clone ID: MRT4577_14515C.1.pep
MMDHQLFDDPFGSSISSLEAEIFSAAAQLPPSPPWPDIDLDDDYDIHDLSAPAANAATSSGGGYGSGGSGGHRKLSHNAYERGRRKQLNELYSSLRSLLPDADQTKKLSIPTTVSRVLKYIPELQKQVDNLERRKKELTNANCKPGVLKTTKAVTPIVSATCLNDTEIMVQVSLHSDVAATALPLSKCIKVLENEGLHLVSSSTYSSAFENKTFYSLHLQRSQRTMKEECPAFCEQLEKIVRKKAGA

SEQ ID NO: 234179 - protein, 74 aa, Zea mays
  Clone ID: MRT4577_145160C.1.pep
AWNTNYGLLIQLTMENRTRTLKLLIFDDFYPHSRRTLQTNLTPGRPGRVNQAGPSAGQAWPGHSKGRLLLLLTG

SEQ ID NO: 234180 - protein, 82 aa, Zea mays
  Clone ID: MRT4577_145161C.1.pep
SSTLTVSVFPVKDYAKIRLPAMRRHERQHAMSVVDHLVYKCANVLALLTSVYEPEIERGLSPPVKDTAHGNATMATSLRHRV

SEQ ID NO: 234181 - protein, 65 aa, Zea mays
  Clone ID: MRT4577_145162C.1.pep
GVGGGVAQIEKRVVPLKAGPPPKNRNGPAGFPSPVFYPPPPAPKGGAPGLPPKGISNSISLLVLF

SEQ ID NO: 234182 - protein, 177 aa, Zea mays
  Clone ID: MRT4577_145163C.1.pep
MLPMAVHPTTTPALSPRARVSPHRPPISSLADPSSSPCHRIVSFKSRRLPLRSLHIAAAAAAGAEEEEAQLGGSVNAVDEEEAENKVVVPERQDPMLVLKFIWMEKNIGIALDQLVPGYGSIPLSPYYFWPRKDAWEELRAKLEEKEWISQKQMIILLNQATDIINLWQQGGGNLST

SEQ ID NO: 234183 - protein, 72 aa, Zea mays
  Clone ID: MRT4577_145164C.1.pep
DFLCVEYLKVDRTSWGKLINYIITKEPTMEKNHCPANDHKTTNRITKKQIPIPLLMNPKAYIFMGSLVCKTA

SEQ ID NO: 234184 - protein, 178 aa, Zea mays
  Clone ID: MRT4577_145165C.1.pep
MLPMAVHPTSTPALSPRARVSPPRPSTSLAATSSSPCSRIVSFKSRRLPLRSVRSVVAAAAAAAAEEEEVQLGAGVDAVDEEEAENKVVVPERQDPMLVLKFIWMEKNIGIALDQLVPGYGSIPLSPYYFWPRKDAWEELRAKLEEKEWISQKQMIILLNQATDIINLWQQGGGNLST

SEQ ID NO: 234185 - protein, 223 aa, Zea mays
  unsure (1)..(223): unsure at all Xaa locations
  Clone ID: MRT4577_145166C.1.pep
MYTQQQRPLFQYGVPQQYQLQQQQQQYTQQYAAAPVQQQQVYQQPPQQQHMYAQQQQAPQQQPQGVAAANPIVYFDVAIDNQPAGRITFELYRNVVPYTAENFRALCTGERGIGQQGRPLHYKGSVFHRVIPGFMLQGGDFTRFDGTGGESIYGGRFADESFAGPAGVHNQPGLLSMANSGPNTNGSQFFITTRAXPHLNGKHVVFGRVVGGMDVVDAVRARG

SEQ ID NO: 234186 - protein, 77 aa, Zea mays
  Clone ID: MRT4577_145167C.1.pep
SATTVFDLKKRCPPPWGARRPGAGPSSPKEERATPHTHAHIRVGQFNQKSTTKRDRRHDLDIHVYRFYFFHGFPSFS

SEQ ID NO: 234187 - protein, 105 aa, Zea mays
  Clone ID: MRT4577_145168C.1.pep
NDQPTRPWGELLRTCGLIPRDVRDNPEPETENAPVCSPHQNGGPGIHSLLRENTASVLPLLEPVCLQGKTKDGHASPEEVADSSLVGLSRSRGRRCRSGGTGFCK

SEQ ID NO: 234188 - protein, 81 aa, Zea mays
  Clone ID: MRT4577_145169C.1.pep
KGKSWARGRNFFFFFWRGKKLTQLIANSTYMMHSYIHIQIAKICHTLIQTKKQQRASGVLATLKQNSAVCGGSDSTRRPAP

SEQ ID NO: 234189 - protein, 282 aa, Zea mays
  Clone ID: MRT4577_14516C.1.pep
MAMALAPLRRRRRSFLLLLLLPRPRRSLCPCSRRPGPGAPAASRCRARGAAAGRLGMKTVGNGIYSFGLPLSSLRETKFCYFNNYNVRQPRHLCRACRRYWTSRGALRRAVDASPVRSLNGCSAAYRIIRLVPNIENFRTALGCLQCWANSRRVYSNVTGFLGGVNWALLVARVCQLYPNAVPSMLVSRFFRVFTQWQWPNPVMLCSIEEDELGFPVWDPRKNPRDKCHHMPIITPAYPCMNSSYNVSTSTLRVMVEQFQFGNKICQVIFAPLKLLFQKYLP

SEQ ID NO: 234190 - protein, 77 aa, Zea mays
  Clone ID: MRT4577_145170C.1.pep
NYSIHYKPHNNPRGTIMVLLVAPPLLSVTFRPTFSQSICLCPCQAHLPVHLHLPTHVQPPLHLQLPAHVQLSVQVHL

SEQ ID NO: 234191 - protein, 84 aa, Zea mays
  Clone ID: MRT4577_145171C.1.pep
FCPKPRRPTTPLRCHQSGGFCDAERAFQGDESGLSSASPQPPLFCGSPPRRASNPVVHDSRFGADCPPVPVQGLSVHRPSPRSS

SEQ ID NO: 234192 - protein, 36 aa, Zea mays
  Clone ID: MRT4577_145172C.1.pep
SRSTVGIPGQQNQDARTRGGPWFLEPDCSSNYRYKD

SEQ ID NO: 234193 - protein, 73 aa, Zea mays
  Clone ID: MRT4577_145173C.1.pep
MGSQESEQAKVLPGTDCPQQPPASRTWQRRFDDEGKKVAMFSMTMTDLVDLMPLMVKILKLQVEEHAKGRVAV

SEQ ID NO: 234194 - protein, 55 aa, Zea mays
  Clone ID: MRT4577_145174C.1.pep
MSRALPRENMKSLYMWYYKSKKKKKKKKKKKKKKKKKKKKKKKKKKKKKKGRAVL

SEQ ID NO: 234195 - protein, 64 aa, Zea mays
  Clone ID: MRT4577_145175C.1.pep
YSCCIYSCLLFTSIWYISVVAFVTKYTCPCLSQFTDCSFCLALVTQFAVNHLILPLYKSDAAHI

SEQ ID NO: 234196 - protein, 154 aa, Zea mays
  Clone ID: MRT4577_145176C.1.pep
SCYSEEKEPIHTSSLTGAKKVREILEGHESWCKSEFQMEPAIFETTTNFLRRENLLRDTRGVIVEKQLGMFMYMISNNASNQMLQKAFQHSGETIHRKISEVFDIVPTLTQCFVKLPSSIQTHTKIATDSRFMPFLELHWCNRRHTYTHHHSRT

SEQ ID NO: 234197 - protein, 142 aa, Zea mays
  unsure (1)..(142): unsure at all Xaa locations
  Clone ID: MRT4577_145177C.1.pep
NAYRFSXTRKHRGHVSAGHGRVGKHRKHPGGRGLAGGQHHHRTNFDKYHPGYFGKVGMRHYHLLKNQSFRPTINLDKLISLPEAKVEAPSGTVPVIDLQQLGHFKLLGKGRVAQPFIVKTRFVSKLAEKKIKEAGGVVKLVA

SEQ ID NO: 234198 - protein, 136 aa, Zea mays
  Clone ID: MRT4577_145178C.1.pep
MFCMLKFLIRAISTSLYMGSWEQQVRQFLLDEEEDDDELFFAILPAIIPYLSEEKEPIHTSSLTGAKKVREILEGHESWCKSEFQMEPAIFETTTNFLRRENLLRDTRGVIVEKQLGMLMYMISHMLVTNATEGFF

SEQ ID NO: 234199 - protein, 248 aa, Zea mays
  unsure (1)..(248): unsure at all Xaa locations
  Clone ID: MRT4577_145179C.1.pep
MYLDYPVTNGATDLCIMSDKDLDDARSCDSDIIKTTPDMGSWEEKVRQFLLDEEEDDDELFFVILPAIIPYLSEEKEPIHTSSLTGAKKVREILEGHESWCKSEFRMEPAIFKTTTNFLRRENLLRDTRGVTIEEQLGMFMYMISHNASNQMLQKAFQHSGETIHRKISEVFDIVPTLIQCFVKLPSSIQTHTKIATDSRFMPFLXNCIGAIDDTHIPTHIAEHRPPHIEHERTLSXHGMVACDFDLN

SEQ ID NO: 234200 - protein, 89 aa, Zea mays
  Clone ID: MRT4577_14517C.1.pep
CAVLVRLQEEPSRVEMAVYDTVANKCARDEEETSTSPQSRSSWLLEASAPPPFGAIPPHPRTPSLDAGREELRSPRACATVSSWRWACA

SEQ ID NO: 234201 - protein, 78 aa, Zea mays
  unsure (1)..(78): unsure at all Xaa locations
  Clone ID: MRT4577_145180C.1.pep
HSHRALPPXLLXLHLLVGSFSLHPXQSSQWLPWKFRXXKXLIXTLFXXXXTGXSNNQYXIFKTLFNGVLFIKYIMRNV

SEQ ID NO: 234202 - protein, 893 aa, Zea mays
  Clone ID: MRT4577_145181C.1.pep
MRCAPPPAAAAWWPAHVREGPSATRPGYCGSESEFAPRARAIAAGRSGSPNMWLFWRTRNRFSLEELRYLTDQLQKVHVVNEANKEFVIEALRSIAELMIYGDQHDALFFEYFMEKQIMGEFARVLRISKLSRVSLQLLQTMSIMIQNLRNEHSIYYIFSNEHINFLVTYPFDFRIDEMLSYYISFLRAISGKLNKNTISLLVKTKNDEVTSFPLYVEALKFAFHEDSMIRVAIRTLTLNVYHVGDESVNRFVSRTPLSDYFSDMVQHFQKQCIDLDKLVARSSRKGNSSVPISSIEDAIVQIEDTLYYFSDVMSSGIPDLERFITENILRVLVFRFLLPSLQRQSTDLDLSVTTSMYLLCCILHIFKNKDMASTVAAALFHQPDGPDDRKQRTPNGYTSEHDSCKSENHCTTASGIEQSSEEPNSLSSVSWKHLPNNSSRSDCCQGNTPREHLLSYITEGDDSQALGSLCLFATLLQTKELDESMLDALGILPQRKQHKKLLLQALVGEDLAETQLFSSSSSLTDDSICSDFDIYVRKLQDKYGLQCHHPRQMTSKAHRYQVLDALVDLFCRSKVSADVRLVGGWLFRQLLPHGEEEFTAFHLRRLKDSHKDCSSKLSEESGGCWCDMLLPIVKEAWRNCKKAIEASSPPKGSKSIIVPMDLCSFEGDSSVAIAEALYEMVKGFVLQHQVILFCLGETFTELPPIYPLVDLPINTRASAADFGGSVPKPGLEVNLVDAVPCRIAFERGKERHFCFLAIAHGTSGWILLLEELPLKRERGIVRVMAPLAGSDPRIDTKHGKWLHLRIRPSSVPFLDTEKHKAKTKKYLVDGRWTLAFRDEQSCKVAESMVIEEMKLQRGAVAEQLKPLVEFDMPEDGMQHPQTSHETPSDDGS

SEQ ID NO: 234203 - protein, 107 aa, Zea mays
  Clone ID: MRT4577_145182C.1.pep
GKGGTCPDSFDRSAQNKQTNPACVFEMRSMVYSVQRDRCASSTEGSFTYCMQNGLAISVLLRSGFSKNYPSSSACASRNANLSAMPSSYKFLLAPHIFPGGLFPFIC

SEQ ID NO: 234204 - protein, 77 aa, Zea mays
  unsure (1)..(77): unsure at all Xaa locations
  Clone ID: MRT4577_145183C.1.pep
VFRFSKGTGMHVVAHDLYASADRARSIGVXELVCMEEALTSVDXLXLHMPITSATYXMLNYLALANIKFGVRIINVE

SEQ ID NO: 234205 - protein, 684 aa, Zea mays
  unsure (1)..(684): unsure at all Xaa locations
  Clone ID: MRT4577_145184C.1.pep
LNVYHVGDESVNRFVSRTPLSDYFSDMVQHFQKQCIDLDKLVARSSRKGNSSVPISSIEDAIVQIEDTLYYFSDVMSSGIPDLERFITENILRVLVFRFLLPSLQRQSTDLDLSVTTSMYLLCCILHIFKNKDMASTVAAALFHQPDGPDDRKQRTPNGYTSEHDSCKSENHCTTASGIEQSSEEPNSLSSVSWKHLPNNSSRSDCCQGNTPREHLLSYITEGDDSQALGSLCLFATLLQTKELDESMLDALGILPQRKQHKKLLLXSLPIKNHIRQLVXILWVVVIRVKXQDLXQALVGEDLAETQLFSSSSSLTDDSICSDFDIYVRKLQDKYGLQCHHPRQMTSKAHRYQVLDALVDLFCRSKVSADVRLVGGWLFRQLLPHGEEEFTAFHLRRLKDSHKDCSSKLSEESGGCWCDMLLPIVKEAWRNCKKAIEASSPPKGSKSIIVPMDLCSFEGDSSVAIAEALYEMVKGFVLQHQVILFCLGETFTELPPIYPLVDLPINTRASAADFGGSVPKPGLEVNLVDAVPCRIAFERGKERHFCFLAIAHGTSGWILLLEELPLKRERGIVRVMAPLAGSDPRIDTKHGKWLHLRIRPSSVPFLDTEKHKAKTKKYLVDGRWTLAFRDEQSCKVAESMVIEEMKLQRGAVAEQLKPLVEFDMPEDGMQHPQTSHETPSDDGS

SEQ ID NO: 234206 - protein, 85 aa, Zea mays
  Clone ID: MRT4577_145185C.1.pep
KRDMLCDLWTLFVSFISLPKVQENLWLGIGERACIKWGLNVGQCFSLETCELTVALQPRRYVQVQWVPAVYIFSSSVIQVPILLS

SEQ ID NO: 234207 - protein, 169 aa, Zea mays
  unsure (1)..(169): unsure at all Xaa locations
  Clone ID: MRT4577_145186C.1.pep
RPDFTSSPLTLSSLVASRDAGCCGPGDRAXPRPPYRLLPRFLATPLHLEANGGDSQQTEVEGEWRRACPGGVGQPTXSDQMATGPGDEVAEVERRWLETAGPDGGEAEACCSGRRRKASGPRGEEEDWKRWRLARTEGEVAGALAVGGRETGGDKDEVNEPPGCRVPRP

SEQ ID NO: 234208 - protein, 91 aa, Zea mays
  unsure (1)..(91): unsure at all Xaa locations
  Clone ID: MRT4577_145187C.1.pep
QTRTPPIHSFHPKTHSPWARFYIXNLSNPIMHTSPLSTXRHTTHINRSTTSSLDNNPSSPNHSSKKINSSLKQMLEEEKKKPQKETEFKLL

SEQ ID NO: 234209 - protein, 32 aa, Zea mays
  Clone ID: MRT4577_145188C.1.pep
IQCPIKFKDPILSNIIGHCYLKKQYSTTNILF

SEQ ID NO: 234210 - protein, 69 aa, Zea mays
  Clone ID: MRT4577_145189C.1.pep
MAASKPILYSAWISSCSFRVRIALNLKGNWIKPLALVSCSIDDGESCPKQGSRRLVPGRWGVGDNVTFS

SEQ ID NO: 234211 - protein, 132 aa, Zea mays
  Clone ID: MRT4577_14518C.1.pep
QFEDLMSQTREATKEKFLTRHTRLALEDHKARRDQPWSEKAEECHVIAYSLTYPLSRQRSNADAWPDAPSVSTGRCLTKASHIGHAIIECRWDAYLPTPVTDSVSLSLNTRDAPGLQCADFTVTCTLPRQRH

SEQ ID NO: 234212 - protein, 80 aa, Zea mays
  Clone ID: MRT4577_145190C.1.pep
GDKSASQEHSVLGEIKDPWNSFAALSHSFPNPQHMDFTNFSVDNPHLWEVHCDIYFEVHAINNTLTPLFVALNFEGAVAN

SEQ ID NO: 234213 - protein, 54 aa, Zea mays
  Clone ID: MRT4577_145191C.1.pep
ARNPASASALSSLNLNVSSSSSPCNPASARAINSLNLNVSSSSSSISSTVAIFS

SEQ ID NO: 234214 - protein, 203 aa, Zea mays
  Clone ID: MRT4577_145192C.1.pep
LAEGDAYLQMLMSPGKAKKPLPPIWSEVLRFFVNPHKPMILALSRPDPKKNVTTLLKAYGESRHLRELANLTLILGNRHDIEEMSGGAATVLTAVLKLIDRYDLYGCVAYPKHHKQTDVPHIYRLAAKTKGVFINPALVEPFGLTLIEAAAYGLPVVATKNGGPVDIIKALHNGLLVDPHDEAAITEALLSLLADKARWPECR

SEQ ID NO: 234215 - protein, 287 aa, Zea mays
  Clone ID: MRT4577_145193C.1.pep
MSLSRFLKEISTAPEEEQQRIQNEYALQQQPNHLVQTPIPSFDLPGVQDPIEFLKTHTDDRSADAKIKIKHGTTTLAFRFQHGIVVAVDSRATAGSYIASGTVKKVIEINPFLLGTMAGGAADCQYWETYLGIQCRLHELRNKSRISVAAASKYLSNLVYSYKGMGLSMGTMICGWDGSGPALYYVDSDGTRMKGDVFSVGSGSTFAYGVLDQGYHWDLSVDDALELGRRSIYAAGHRDAFSGNTLNLYHVKQDGWHFINNYDFNKLHYDMAYGYEERLKQEAAVLA

SEQ ID NO: 234216 - protein, 157 aa, Zea mays
  unsure (1)..(157): unsure at all Xaa locations
  Clone ID: MRT4577_145194C.1.pep
SYQCACTEKGYIMTANGRSCKQLDECALRTHNCSEAETCHNIQGSFRCLRFECPPNYVQVSKTXXERTTCHDFLECQNSPARITHYQLNFQTGLLVPAHIFRIGPAPAFTGDTIALNIIKGNEEGYFGTRRLNAYTGVVYLQRAVLEPRDFALDVEM

SEQ ID NO: 234217 - protein, 62 aa, Zea mays
  Clone ID: MRT4577_145195C.1.pep
GSGFLVQVPVKERGFVGLSVGHQNQARSLVVICKNQVFFRCLLAVFVEGIYFAVVYESMGVM

SEQ ID NO: 234218 - protein, 152 aa, Zea mays
  Clone ID: MRT4577_145196C.1.pep
GRDSSFVMRGVCRDLPTQSRARSSGWTPNPSSSGLNNGVRLRPRSPAAMTEGGDLDPQMRISSTTPHIVRKIARPSETSTAVGYWCSALHNSAAVAHGNAYGNALASRTQHANENTQAADTQIVGSKRTVITWGRGRGAARQHWGGRTLARG

SEQ ID NO: 234219 - protein, 178 aa, Zea mays
  unsure (1)..(178): unsure at all Xaa locations
  Clone ID: MRT4577_145197C.1.pep
GTVSDYXEAQLEELGNGLYNSGKPFIWVVRSNEEHKLSNELRDKCKERGLIVSWCPQLEVLAHKATGCFFTHCGWNSTLEAIVNGVPMVAIPHWADQPTISKYMESMWGLGVRVRKDEKGLVTRDEVERCIKDVMDGDSKDKYRKSATMWMQKAKAAMQNGGSSDKNITEFIAKYSLS

SEQ ID NO: 234220 - protein, 92 aa, Zea mays
  Clone ID: MRT4577_145198C.1.pep
TVPAAPAGAPPFAPFGRFTTSRASAVFLVAVAGAVATPVMLYTPPRGVPVVGPVYTIVFYFCVCVCECVLVQGDSFLDTETAEVYVIDSRWV

SEQ ID NO: 234221 - protein, 47 aa, Zea mays
  Clone ID: MRT4577_145199C.1.pep
KKKKKKKKKKKKKKKKKKKGGTIYYNPNLHTRACQLFISSIGRTKLK

SEQ ID NO: 234222 - protein, 129 aa, Zea mays
  Clone ID: MRT4577_14519C.1.pep
LNCLGAIDGTHVPITIAEDRAPPYRNRKRTLSHNVMVVCDFDLNFTSVSCGWEGSASDAGVLRSAISKGFSVPEGKFYLVDGGYANTPSYIAPYRGVRYHLSQFRRSRSSQSGYANYKELFRGMEVYHC

SEQ ID NO: 234223 - protein, 127 aa, Zea mays
  unsure (1)..(127): unsure at all Xaa locations
  Clone ID: MRT4577_1451C.1.pep
KNPLGNKGKKPFVGLSPSQGIXLEKIGFXAKQPKSPNRKGGWVQLFKKGKKNSPFGPKNGCFYSLXEKKEVFNSGFGCKGPPLGKNSGGRVKGGKGSGGVLLAPFKEKKKKPRVLNALSPQNNKGGV

SEQ ID NO: 234224 - protein, 72 aa, Zea mays
  Clone ID: MRT4577_145200C.1.pep
MGGKGDGPAIGIDLGTTYSCVGVWQHDRVEIIANEQGNRATPWCGAFTDSERLMGDAAKNQVRMNPINTGFD

SEQ ID NO: 234225 - protein, 53 aa, Zea mays
  Clone ID: MRT4577_145201C.1.pep
EKKGHPKGGLEVNFSKKTGHAVKKVNSPQLQEQPHSKFGDGGTSHVLQKPIPG

SEQ ID NO: 234226 - protein, 191 aa, Zea mays
  unsure (1)..(191): unsure at all Xaa locations
  Clone ID: MRT4577_145202C.1.pep
MGGKGDGPGIGIDLGTTYSCVGVWEHDRVEIXLANDQGNRATPWGGAFTDSERVIGDAGKNQGAMNPINTGFDAKRVIGRRCRDAAVQSDIKVWAFKVISGPGEKPMSWWQHKGEEKQVAAEEISSMGLIKMREIAEAYLGSTIKNAVVTGPAYFNDSQRRATKDAGVIAGLNVLRVINEPTAAAIGYGLD

SEQ ID NO: 234227 - protein, 80 aa, Zea mays
  Clone ID: MRT4577_145203C.1.pep
GPEIPGLNPRVPFKKPGQKGGPCPTKKTREGHTFYSGHFSPRNHRSVPTHGGNPPLGPLTAINPVRGPNNCCPWRKKPLA

SEQ ID NO: 234228 - protein, 121 aa, Zea mays
  Clone ID: MRT4577_145204C.1.pep
GLSPPPGAPWASPQGLGVLSPPPPGPLGPALPFFGPSLGICFSLGRDRGLPLPLFQKPGGSLFGVLGAPGLGWLSPLPFWAPFAFPFPPGPLFCSFRVPPLGFCLSPADFCGFLMFTPVFS

SEQ ID NO: 234229 - protein, 157 aa, Zea mays
  unsure (1)..(157): unsure at all Xaa locations
  Clone ID: MRT4577_145205C.1.pep
NPRRGEKLFTGPRGPTPGRAKGFGRKKRVGAAPYPKRGGGLIKGKGAPMELIRRERSRLRALKPFWWGGASRFRDFKLRIPAGGGGKTPKIYAIPRAVPRGFFPYNKKNAKKAPKKGVRNIFTGXNRTFFVANPRGWKPKKFXGGRGPRPRFQNPNG

SEQ ID NO: 234230 - protein, 65 aa, Zea mays
  Clone ID: MRT4577_145206C.1.pep
TLAIHNRILLTGLVLSHVDFTTLLSSDSLFYNHIKYSAPIDALYWQPSNSLSQCPCAQASAHAKA

SEQ ID NO: 234231 - protein, 69 aa, Zea mays
  Clone ID: MRT4577_145207C.1.pep
FKRVFKAFGSPFFYHWLPFGSQFCLLGQIWPILTFKRMAILLKGFPRFLWPKAKQTSDPFFWNFLWDFI

SEQ ID NO: 234232 - protein, 75 aa, Zea mays
  Clone ID: MRT4577_145208C.1.pep
STILPQPNGSGINGYKPINLTATTVGPRKSKPSERHPPRGKLTQFNMHARAQNKLNGGLLPTQRELNAMWADLPH

SEQ ID NO: 234233 - protein, 99 aa, Zea mays
  Clone ID: MRT4577_145209C.1.pep
GSIPVFVGLRAVQDLAFLGMVGNGLLGAIAPSATVFNLVLVGIRLRGTMPGVLEGVALGEVELSGNQVTVDVLGLFGAKKHDERVVHVCATGLGLTSEG

SEQ ID NO: 234234 - protein, 74 aa, Zea mays
  Clone ID: MRT4577_14520C.1.pep
GSQAERTSPAATGLTKAQAGRRRNSPFSTGRCFLSTVNIGAATGPRAMWLCPLALNLILMAASGAVCEVKDVCV

SEQ ID NO: 234235 - protein, 116 aa, Zea mays
  Clone ID: MRT4577_145210C.1.pep
VQPAGFGPEFPGRPTRPMTPRDRHEGRKQSSTADTQKKAAPVLKQADRRQSMAFSILNTPKKLGNSLLRRGASKKTPAKVSPNPRSGTRRSPRIATTTTGTATVATTPRAKGKVKH

SEQ ID NO: 234236 - protein, 89 aa, Zea mays
  Clone ID: MRT4577_145211C.1.pep
YLDKVSHSEDDCLAFKVHQYFNVELIQPGAVKVYAYYNLEESCTRFYHPDLEDGKLNKLCRDELCRCAEENCFIQKSDDKVTLEERLDK

SEQ ID NO: 234237 - protein, 60 aa, Zea mays
  Clone ID: MRT4577_145212C.1.pep
TPTMFLKYTITHGLLTPQGDYTQNPPEHGRTLRGLRSPKEASSFKQRKSVTMIHFCDKKR

SEQ ID NO: 234238 - protein, 67 aa, Zea mays
  Clone ID: MRT4577_145213C.1.pep
ESTVVAIAFVFSTALNRGLRLLAAGAEASKPASRGFHATGVKRMGGHGHDEPYYIHAKHMYNLHRMK

SEQ ID NO: 234239 - protein, 334 aa, Zea mays
  Clone ID: MRT4577_145214C.1.pep
MGPPPRRRQLLLSLALLATAAACCAAGAAPRLSPNYYRRSCPRVERIVSDAVAAKQRANPSTAAGTLRLFFHDCFVNGCDASVLVSPLSSSGAAPERAAEINLSLPGDAFDAVARAKAALEAACPGVVSCADALALAARDLVAALGGPRFPVALGRRDSRRSDARDVEGNLPRTNMSARAMVRLFARKGLAPREMVALAGAHTVGFSHCAEFAPRIYGYRGASHDPRLNPEFARALQRSCAGYRTDPTVSIFNDIVTPRDFDETYYKNLPHGLGLLASDAAIWEYPPTRVFAQRYAANRTAFFEDFAAAMQRLGAVGVKTGRQGVVRRRCDALD

SEQ ID NO: 234240 - protein, 144 aa, Zea mays
  Clone ID: MRT4577_145215C.1.pep
MAMAYKMATEGMDVKEECQRWFMEMKWKKVHRFVVYRIDERSRAVLVDRVGGPGEGYEELVAALPGDDCRYAVFDFDFVTVDNCQKSKIFFIAWSPAASRIRAKILYATSKQGLRRLLDGVHYEVQATDPSEMGFDETVLPIDY

SEQ ID NO: 234241 - protein, 190 aa, Zea mays
  Clone ID: MRT4577_145216C.1.pep
MANLPGLLIDIPRNPILAVGIPVAVGVVNGFATKSSNYSADSVWYKSLKKPSLNPPSSYYGIVWPVLYASMGWASHLTVKALDRTPPGLGRDTAKKALSLYWIQLGLNALWSPLFFGAGNVGLALVNIGALTGTVGLWAATVKDVDETAGLLAIPYVGWMVYATYLNASIWWQNYGSSKFGKLKKEAKDL

SEQ ID NO: 234242 - protein, 231 aa, Zea mays
  unsure (1)..(231): unsure at all Xaa locations
  Clone ID: MRT4577_145217C.1.pep
MVSPTEPQAETTVFRSTLPDIAIPDHLPLHDYVLERLAERRDRACLIDGATGETLTFGDVDRLSRRVAAGMRACLGVRSGGTVMLLLPNSVEFALAFLACSRLGAAATTANPLHTPPEIAKQAAASGATVVITEPAFVGKVRGLAGVAVVATGDGAEGCVSFSDLASSADDGSAALPEAAAAATAIDVANDVVALPYSSGTTGLPKGVMLSHRGLVTXVAQLVEGEHPNLY

SEQ ID NO: 234243 - protein, 76 aa, Zea mays
  Clone ID: MRT4577_145218C.1.pep
ERAHTSGGNKWINVAGPCDIADKLKCSVGCKLSHCYSCNESPCIVCRVMYIGLITIFMQHSVDKPESTMTLLVMRP

SEQ ID NO: 234244 - protein, 148 aa, Zea mays
  Clone ID: MRT4577_145219C.1.pep
ACLSLSLVEERNKKKKNKEAHSHSQPSPINFRVSSQNILPAASSKSPQPQCSSRHQLQPLAISSFSLLPPPRNSPLTATCSPCCDLQAAPTCALCCNLRAAPPPPLPAPSRCSPSATALPPPQLISPLSGRLEPRAAAAAPRRRPDEA

SEQ ID NO: 234245 - protein, 142 aa, Zea mays
  Clone ID: MRT4577_14521C.1.pep
MASAAPAPKPGVLLLRRTDADFAAALRARFRVHDLHASGAPLGAFLAAAAAEPEPPRAALVMAGGAVLVDAAFLDAVPSLGCVVTTSAGVDHVDLAQCARRGVAVAGAGGTFSVDVADHAVGLLVAVLRRVAADDRYFRAGF

SEQ ID NO: 234246 - protein, 49 aa, Zea mays
  Clone ID: MRT4577_145220C.1.pep
GHKINIKTPIITNLILNICTKTFFSHTTYNIHTFHSQIIHLILNTYYYL

SEQ ID NO: 234247 - protein, 160 aa, Zea mays
  Clone ID: MRT4577_145221C.1.pep
PRVRACGTSPLVGGNSWRSRRELTDPNGPVYYNGMYHLFYQYNPHGALWDVGNLSWGDSVSGDLVNWAALGNALDPTAPFDANGCASGSVTILPDGTPAILYSGIDADRRQVQNVAFPKNPRDPLLREWAKPAYNPVVPLPADVSANDFRDPTTAWVGRD

SEQ ID NO: 234248 - protein, 85 aa, Zea mays
  unsure (1)..(85): unsure at all Xaa locations
  Clone ID: MRT4577_145222C.1.pep
TYIPNRFAMLSVVDSVLSVSRNSVFFSPPPTLYSLGLIPNCYYYYLLLLFYYXIIFFFVMTVILSICSLGFSIYLLSLLYYYVDV

SEQ ID NO: 234249 - protein, 81 aa, Zea mays
  Clone ID: MRT4577_145223C.1.pep
GPRLVLFILWGALPPRFKWGPPSFSVKKIANLRGGGPFFMGPLGGGVGRKIRGVAPSVFFLESYWLGNLVEFFFPQKIWDI

SEQ ID NO: 234250 - protein, 55 aa, Zea mays
  Clone ID: MRT4577_145224C.1.pep
VKNSFPPCVFINLLVQTPPVGSVPVYIISPRALLVFIVSRVCIKLVPPDKKKVVP

SEQ ID NO: 234251 - protein, 90 aa, Zea mays
  Clone ID: MRT4577_145225C.1.pep
RYVIIRRRPFKRLVPRRMVQQYPGLDSGLDRQPRHVHHGVRAQGSPIQSRIDRRATRSCSSSESVILAAAPKFHHNRRHHQYARYQRPCR

SEQ ID NO: 234252 - protein, 124 aa, Zea mays
  unsure (1)..(124): unsure at all Xaa locations
  Clone ID: MRT4577_145226C.1.pep
TEEQEKDNTTHHTTPQTDRTASKVGLVGCSLIKLQGGGLSQPFFPPNNNKKKPNPQLAQSSNNTIRRRWGGPKAGAVGGGWVGQDSRASRNHXPGHPPAAAGSFYGASKNLGPGPCTFTPGGRR

SEQ ID NO: 234253 - protein, 79 aa, Zea mays
  Clone ID: MRT4577_145227C.1.pep
ILMQLCNCPSRLWSPIQDVNSEMGIALQAGFYARHRPRLWSPSHDVSSETRRIAFQMVREARAEAMSSSNSSNRSPAWQ

SEQ ID NO: 234254 - protein, 241 aa, Zea mays
  unsure (1)..(241): unsure at all Xaa locations
  Clone ID: MRT4577_145228C.1.pep
FSTPLPPESPISLPVTRRPRRLSRRRRAGLSSPPKLPSRPPRPPLTSSFPRFSLPQPPPLELPRQPQRLQPSPLLPPPSRVPPXLQSPPXTTRSRNPSESPRRHASPPKLHRVPSPLVSIRPSPPPPXPRPRPPFPRARDSLRRSTSSPPAASPERRPSRLSRRSPTSSPPPIPTPSSPSSAASASPEPTSPPPSPRTPGYSAPAWRVLWPPTSLRSAASGCRAPRSCASSACAADLSSPS

SEQ ID NO: 234255 - protein, 47 aa, Zea mays
  Clone ID: MRT4577_145229C.1.pep
EMGNPNIIFNSANEFSNLVFSLLKPIACSIGFVISILKHDRNVYGSI

SEQ ID NO: 234256 - protein, 133 aa, Zea mays
  Clone ID: MRT4577_14522C.1.pep
MSKEGARASWNSTYEKGLVDVLHDNKDNPKLKGQNGWNSEGWKCITAKFNERFSLAHFTKQQLQEKDKELKSSYKAVRDSRKESWTGWNDSLCMILAEPEVWARLISAHPKVARFRKKPFPLFYSLEALYEEC

SEQ ID NO: 234257 - protein, 35 aa, Zea mays
  Clone ID: MRT4577_145230C.1.pep
YVVWLAQRMPMVNMSWKPMLSIPRSARRRNLSSSR

SEQ ID NO: 234258 - protein, 86 aa, Zea mays
  Clone ID: MRT4577_145231C.1.pep
FGFFFFFFFFWSKHIIVGLAIMTRGIMEPLASKQASHTMLFLANRGQKSGGDAFHVPFLFFCHMFISFYGYASCTRIALLGFPLCI

SEQ ID NO: 234259 - protein, 77 aa, Zea mays
  unsure (1)..(77): unsure at all Xaa locations
  Clone ID: MRT4577_145232C.1.pep
VILEYFTDEVLELAGNARTVLKVXRITPRHLPMAIRGDEELDTHITGTIAGGGVIPHIQTSLINTSSKACCIGNAHC

SEQ ID NO: 234260 - protein, 63 aa, Zea mays
  Clone ID: MRT4577_145233C.1.pep
KNVPLGKTGRGPFWGEKIKPFRFRVSNCCPTLCPWARGAPIFKKNNFPFRGGGEKTAEKIPQK

SEQ ID NO: 234261 - protein, 103 aa, Zea mays
  unsure (1)..(103): unsure at all Xaa locations
  Clone ID: MRT4577_145234C.1.pep
TKLGIRLGLRGVVLGAGERLQEVLLSXDLNXTTTDALRRRLEEDFGADLSHKKAFIREQVDLFLAEVAXKAEPEEPKEEEELEDSPVPKAEEAEEGEGVEEEG

SEQ ID NO: 234262 - protein, 43 aa, Zea mays
  Clone ID: MRT4577_145235C.1.pep
GIFFYLCLFLLNKLAIISEQLFLALSIQCVSVCVFRACLDPWC

SEQ ID NO: 234263 - protein, 64 aa, Zea mays
  Clone ID: MRT4577_145236C.1.pep
TNSLVRSLMRDGTEYVTRYSRKSLRVLRSVGEPINPSAWRWFYNTVGDSPCPISDTLWQTETGR

SEQ ID NO: 234264 - protein, 88 aa, Zea mays
  unsure (1)..(88): unsure at all Xaa locations
  Clone ID: MRT4577_145237C.1.pep
PRPGAPPKGGNSKTMGAGTKGSRPQPXGGTEGKRGPPGKTRTPPPGPKKNKPGGKKGKPGPPKRGXPTLMGSAQKPVFPGGNLNPPPP

SEQ ID NO: 234265 - protein, 95 aa, Zea mays
  Clone ID: MRT4577_145238C.1.pep
SRNGHRTRTLIQPLAKPMTSMTKGVTIPKMMNVGQRCHLGVLALPLPRGQPGLYRSLVRGKQLQITRSIQLSVSDLHCYHRAHTACVMHAHLNGR

SEQ ID NO: 234266 - protein, 154 aa, Zea mays
  Clone ID: MRT4577_145239C.1.pep
VAPFILWKNVPQGGGASCFVGLGPPLKGVAGKFFFVCNVGKTSQLARNEELAKQLWGFSEELVKFSKLEPKKLGQRKCCGPAWPLVGQVMAYLFLARGGNLGDGWAPWCSGIKSACLRTLIRPGWGTPPPPPGNICSIYGQVSFGFKNAKSGLP

SEQ ID NO: 234267 - protein, 53 aa, Zea mays
  Clone ID: MRT4577_14523C.1.pep
TLHAIIEHPLNQFIGLGRAEHGSNGHVVYHASSWDLLPRLTKKSGFYYISLKH

SEQ ID NO: 234268 - protein, 57 aa, Zea mays
  Clone ID: MRT4577_145240C.1.pep
PMLCFSWQGPFWVICYSSAIPRPPQNLTAHGLIWGSLVIVSPVPLCCELIPRNTGFL

SEQ ID NO: 234269 - protein, 108 aa, Zea mays
  Clone ID: MRT4577_145241C.1.pep
GSSAAARGKPFPSPIWARCRVVVHRGGVGGLFSLSRRLKKHGAAGNFSPGFFIVAAPWAEGLYGCNLDEQATVDSDVQQVEVAEQELIEGEEQVVEEELPNTEAFDLI

SEQ ID NO: 234270 - protein, 38 aa, Zea mays
  Clone ID: MRT4577_145242C.1.pep
YSHTFNKVVLFDCIDITLLRGMLNFMFLIASILLFICL

SEQ ID NO: 234271 - protein, 108 aa, Zea mays
  Clone ID: MRT4577_145243C.1.pep
VYNPPFSLFFFLPPRVTPRGPFLGEGGKSFSPPPFQKRVGGGFFKKNKKKKGVFCFPTPPDRVGGFWFSPLLGGPFFFPKVFRGLLKKGVSRIFFYKKKGGIFWGVPP

SEQ ID NO: 234272 - protein, 107 aa, Zea mays
  Clone ID: MRT4577_145244C.1.pep
YKYYTHLGLSPVNLYMLQPFKQSWPPIRSDRRPMLNHVCIYNKQQPGPRVTTHIQQITPPFTMDGLKHPGIHHLYLNPHIMLEPLHSTKHTCSPPCNHVHLLLLQSG

SEQ ID NO: 234273 - protein, 57 aa, Zea mays
  unsure (1)..(57): unsure at all Xaa locations
  Clone ID: MRT4577_145245C.1.pep
RIPPPPASQERLLGPAPAPAGRRWTGWPWTIFLTXLFFPRAGVKELAGVRFSGSVRN

SEQ ID NO: 234274 - protein, 49 aa, Zea mays
  Clone ID: MRT4577_145246C.1.pep
IVIHLFAYQSYHETKGNENGIPRGIAMRHSQEMRRLKCSYMNCNHLLCY

SEQ ID NO: 234275 - protein, 47 aa, Zea mays
  Clone ID: MRT4577_145247C.1.pep
NCFPPRVVPSKKKKKKKKKKKKKKKKKKKPKKKKKKKKKKKKKKKKK

SEQ ID NO: 234276 - protein, 111 aa, Zea mays
  Clone ID: MRT4577_145248C.1.pep
CKSKAWPRREEEAVKWWQGATAARRAACWSQQRTGRGAAGRGEGGDGSSGWGASEPLTPGLSLRDEREWRERKICCEQDEGSGCYLPSLVRWSCEKVRVLSLGGVLGWMLN

SEQ ID NO: 234277 - protein, 235 aa, Zea mays
  Clone ID: MRT4577_145249C.1.pep
MKQQHIEEKEMRHVNDYREERKKKLERTRRAKEAMEENPRCFPEGKVAPLHSVGLHGFMSGSTRWLMSCATSSGYPPEREVKGKAWTRVSTVPLLTPGSSSFRDLAEVRTLLGGSGLIRIGVWCPSVEVRTPRYILECVVFSCHVAPFGLPMRWGQASSSAWPGDVAWVRRLHAVEEGTPDLGYYSGESTGLNSKEMKMMLKPLGALAGKWKWWPYNFLLILVGSSQTGFQASIS

SEQ ID NO: 234278 - protein, 69 aa, Zea mays
  unsure (1)..(69): unsure at all Xaa locations
  Clone ID: MRT4577_14524C.1.pep
LXLLFLRVPCFLFFLPRFRCXSGSFLLWCRRPAXVSPLLLLSXLXVACPLPPLLVLLXCSLVLXAXRVG

SEQ ID NO: 234279 - protein, 79 aa, Zea mays
  Clone ID: MRT4577_145250C.1.pep
MKPEEIKEYRKQKRAKAEKSLDAYVQMAKAVTFQVACAKVIIETDDVAEGLEELISLNNVTEFVMGAAADRHFSRYGSD

SEQ ID NO: 234280 - protein, 54 aa, Zea mays
  Clone ID: MRT4577_145251C.1.pep
FSAHMTSHTIGGSDQSPSWCRSGSSALWSRLRLWSTKAWVDPVNAARFRQGVTA

SEQ ID NO: 234281 - protein, 59 aa, Zea mays
  Clone ID: MRT4577_145252C.1.pep
SSSFVPRIWSHTAKAALISSNVSKAGSVSWGQSHNLVWSIISVANNCIPRLLLIIHYMA

SEQ ID NO: 234282 - protein, 52 aa, Zea mays
  Clone ID: MRT4577_145253C.1.pep
VNHVVLRFLNALVSDASPVALVSLTAEHRAFGFEPTALPMPEFCALLVLARA

SEQ ID NO: 234283 - protein, 163 aa, Zea mays
  Clone ID: MRT4577_145254C.1.pep
PKLDPNEEKIIYVRAVGGETASSATLAPKIGPLGLSPKKVGDDIAKATTQWKGLKVTCKLTIKNRVATVEVVPSAAALLIKELKEPARDRKKEKNIKHHGNLTLEQLYSVARVMRKKSQAREFSGTVKEVLGTARSLGCTIDGQTPEALTAKINSGDLVTPEN

SEQ ID NO: 234284 - protein, 226 aa, Zea mays
  unsure (1)..(226): unsure at all Xaa locations
  Clone ID: MRT4577_145255C.1.pep
MGPPQNSLXWLRVVSACCKIRKMHAVFSPSEAEDVLVIVISLFLDRRLEGLLLILGDCLNSLISYFNTSEWESSCLIVAESISKRVKMDLNCLRLVDCITGTNDRSKFLRSQLALQLLKNSFGLKVANVERILKSVTSINVKEKECNFFMLYVHIVLMDNLLFSSDAFRNKTAIIDAWRIFLRNCSTHIGCTDWRFYASKVRNKASYLLQGAMLKRXAGSGNIPAK

SEQ ID NO: 234285 - protein, 39 aa, Zea mays
  Clone ID: MRT4577_145256C.1.pep
TYNAAYLKLFSHYVDVSHEYESRLRHAQNFNCRHTYIHD

SEQ ID NO: 234286 - protein, 71 aa, Zea mays
  unsure (1)..(71): unsure at all Xaa locations
  Clone ID: MRT4577_145257C.1.pep
XHERLKSSLFLXFASSXFWXGXSQLFSSNXRVLPCLXXXQXGTSCXERKRNATCXPRLEDXTLKVNPMVHA

SEQ ID NO: 234287 - protein, 110 aa, Zea mays
  Clone ID: MRT4577_145258C.1.pep
AREGGSESEKPKQEGDGKEGVDTVATRVESLTINEDVKENEPEDDEGLPIYLYERLKTTAADPVTEIDVTRRETYLSSTEFKEKFGMTKEAFSKLPKWKQNRLKIALQLF

SEQ ID NO: 234288 - protein, 66 aa, Zea mays
  Clone ID: MRT4577_145259C.1.pep
APSNAHYHKLWWFWRMNSWCIQALRILERESERKIRMANWNLKMSLGLQVPWMDAIDITEFSCKSC

SEQ ID NO: 234289 - protein, 81 aa, Zea mays
  unsure (1)..(81): unsure at all Xaa locations
  Clone ID: MRT4577_14525C.1.pep
KLPPHAKKKIEGPIGGPLKWVDGNQLPEAEEFXAKIKELESIFNPFFFQMFQGGAGPSGMDKNVPRGGPGNGGGNGPGPKI

SEQ ID NO: 234290 - protein, 192 aa, Zea mays
  unsure (1)..(192): unsure at all Xaa locations
  Clone ID: MRT4577_145260C.1.pep
ALQKPEFALGPPDFGIVLLPNSKVLFSPKVYFPLPSFSGFPDGTKTFVGAQNGELRIFSPRGDTLSKKALLXKPRGAFPSLPFSPKGFMFGFAEAPKETFLWGRARKKIQLKNLLFPPARINSLGWSPAHRLVAPGSLGPWAIVFEINKPVARWVPIKGGPLGGGPGLTLLEKKTLVAPREEACLCVLKGVE

SEQ ID NO: 234291 - protein, 960 aa, Zea mays
  Clone ID: MRT4577_145261C.1.pep
MSVSMKDLDPAFRGSGQKDGLEIWRIENFKPIPAPASSYGKFFMGDSYIILKTTALKNGSLRHDIHYWIGKDTSQDEAGTAAILTVELDAALGGRAVQYREIQGNETEKFLSYFRPCIMPQPGGVASGFNHVEVNEQDYKTHLYVCHGKHVVHVNEVPFARSSLNHDDIFILDTKSKIFQFSGSNSSIQERAKALEVVQYIKDTFHEGKCEIASVEDGRMMADAEAGEFWGFFGGFAPLPRRAPAEGNEKHDETAFKLLCFDQGKLEPVDCQSLAHELLETNKCYFLDCGAELYVWMGRITSLMERKGASEAAEKLLSDSNRTRTHIIKVIEGFETVTFKSKFKEWPQTPELKLSSEDGRGKVAALLKRQGLNVKGLMKAAPTQEEPQSYIDSTGNLQVWRVNDKDKVQLSPSDQSKFYTGDCYIFQYTYPGDDKEECLIGTWFGKKSIEEDRVIAVSLASKMVESAKFQAVQARFYDGKEPIQFFVIFQSFQVFKGGLSSGYKRFIAENGIDDESYSEDGLALFRIQGSGPENMQAIQVEPVASSLNSSYCYILHNGNTVFTWAGNLTTALDQELMERQLDVIKPNTQSRSQKEGSETDQFWSLLGGKSEYSGQKMVRELESDPHLFSCILSKGNLKVKEIHHFTQDDLMTEDVFILDCHTSIFVWVGQQVDVKGRLQAMDAGEKFIVLDFLMENLARETPVFTVMEGNEPPFFTRFFTWDSAKSLMHGNSYQRKLAIVKGGGAPALDKPKRRTTVYSGRSTTQDKSQRSRSMSFSPERVRVRGRSPAFTALAANFESSSNRNLSTPPPVVKKLYPKSVTPDPSNTASKSPAIAALAGSLDHPSQTPALEFMKGGSESEKPKQEGDGKGVDTVAPRVESLTINEDVKENEPEDDEGLPIYLYERLKTTAADPVTEIDITRRETYLSSTEFKEKFGMTKEAFSKLPKWKQNRLKIALQLF

SEQ ID NO: 234292 - protein, 101 aa, Zea mays
  Clone ID: MRT4577_145262C.1.pep
FFFEKNIFMWTGSHNKQRLESKPHGQNHLLSLYRAVTVQELSVMHHTGYTLWRMYEDSKTDAGLDCPAQRILLRSLMKSEARDVMFSPALPVMYLSQDRSC

SEQ ID NO: 234293 - protein, 64 aa, Zea mays
  Clone ID: MRT4577_145263C.1.pep
TYTTMWQQIASTTAIHILIYHHRTKYTVNHLSNQWIRSTNSHQLLQYCTKHPRLHSSAVKTKAE

SEQ ID NO: 234294 - protein, 50 aa, Zea mays
  Clone ID: MRT4577_145264C.1.pep
VMALMSMLCIYPSHKSLFFISLISQCTISMSLANRYSILFSYFQFVSVNY

SEQ ID NO: 234295 - protein, 97 aa, Zea mays
  Clone ID: MRT4577_145265C.1.pep
FQRPQGLGSGFTVDMGKKNLDRLLFQIGAYPLLQDGCAHYTTRLVIRQIMLARGEKQMACFCCVTCFGIAKVCTACDFGIYFDFMRMWFDSFYCGLW

SEQ ID NO: 234296 - protein, 50 aa, Zea mays
  Clone ID: MRT4577_145266C.1.pep
GLNLGTGMHDYLMDSTLDGIRVCIPDMICRKIKGCLSGATVLPILIGTKP

SEQ ID NO: 234297 - protein, 67 aa, Zea mays
  Clone ID: MRT4577_145267C.1.pep
KLRLAKARLPAFLPGHVGLCHSLTYLQLHHEPRLGHPPIPVRQHSADWRIAPCTLALPTGCTMRSLP

SEQ ID NO: 234298 - protein, 157 aa, Zea mays
  unsure (1)..(157): unsure at all Xaa locations
  Clone ID: MRT4577_145268C.1.pep
GRAGLSPRAARRQESXPPPAAAARRPXRPEPSNGPERSHRQPXPPGRPRXPPXPRGGARETTGATGPGXPARESGKQTRPTQPPPTEPHAPPXDAGRQQAHPTSTGRRKKPPPETVLCLTPPPQARRKGRQQRTATARRKNTKKKHGNDKQEKKENK

SEQ ID NO: 234299 - protein, 39 aa, Zea mays
  Clone ID: MRT4577_145269C.1.pep
RTRGRHTRADAVLPCQRGSPALIATDLNETTRPLMNAAP

SEQ ID NO: 234300 - protein, 164 aa, Zea mays
  unsure (1)..(164): unsure at all Xaa locations
  Clone ID: MRT4577_14526C.1.pep
MDSKGGKKPGGRVNPTPPRGGPKKKKKKNPQNPGLLIDHGRGEGGEKRQKPFGKGKPPWGGEQQQKKKXPGGKGEPPGEGELGKPHRGNPKKPDGEXPRGGGKNRGPRPLKGASGGNPKKPGPRGGGKKKGPPKGTKGKNWSGDPKKIRLAGAKKGKSKGPGLA

SEQ ID NO: 234301 - protein, 336 aa, Zea mays
  Clone ID: MRT4577_145270C.1.pep
MAEGFGRWESDLLFPAAECVQDSADRMEGVYRLLLHERKLMQDGTSDAKFHAPIQYERDVITALGTTKWQLEQFEREVNAAAFSDKSKSRENAILKFRQFIRAIADQISQVEESLESLRLGSSRTPKHLYSSEHDGDGLASFLSGSSKDDHAYHSTGTDEIVELKLDNVPLVNGYHSTQEHTTYEHRNSDKDVEGAGKLKCSCGEGACEGDHNNSNMFVLDADDSISRRVFCKNKLSRQYHSFIRNLWFTKRRRDRESFTKRRKDGEDMDSLRNGNMLPSFNLPQSGRVMYFWPEVIKRRLCRSDYFTDHNHPQIRLVTAVLIALAVLCLLVSHVK

SEQ ID NO: 234302 - protein, 161 aa, Zea mays
  Clone ID: MRT4577_145271C.1.pep
MATMSLAAASPLASIPRGIAAQAPCAAFLSIRLGGATATRFAGLAVASQPAERRAAAMVTMAKREQELEEIRAMTTEQMEEEVVDLKGELFLLRLKRSARQEFKNSEFSRMRKRIARMLTVKREREIEQGINKRLSRKLDRKWKQSIVVRPPPSLRGNKEE

SEQ ID NO: 234303 - protein, 42 aa, Zea mays
  Clone ID: MRT4577_145272C.1.pep
RWRDRGTHQVLRYRIHFHILRTDANRAATDVHPYRNSHAIYS

SEQ ID NO: 234304 - protein, 49 aa, Zea mays
  Clone ID: MRT4577_145273C.1.pep
GNKNLILFLQNKKVPDRQELTFLDLKHKQYRPNLRVQKPRPFKNLQTNH

SEQ ID NO: 234305 - protein, 77 aa, Zea mays
  unsure (1)..(77): unsure at all Xaa locations
  Clone ID: MRT4577_145274C.1.pep
EAATDSEXIEISDDDDRNHKHRRREAKQQSXDNTEEQHPGPPLKKRSRVAGNGEPFGGAGSQGEVPKDFVPXFKRRF

SEQ ID NO: 234306 - protein, 60 aa, Zea mays
  Clone ID: MRT4577_145275C.1.pep
KLFTYFQQHICTRHQSHHREQPHFPLRSNDWVPKHDGILQPSRSRDGRLSSEVTHYAVVD

SEQ ID NO: 234307 - protein, 64 aa, Zea mays
  Clone ID: MRT4577_145276C.1.pep
DCSEFLVAARIIIVHPSAATSGSKMCALSTDKAWRSVRPGARQAYTSACSRISVRHAAPSLAPR

SEQ ID NO: 234308 - protein, 60 aa, Zea mays
  Clone ID: MRT4577_145277C.1.pep
RVRVRERYFSHESSSTASMPWPIRFVPVGGSHEDAKSRSSGEIPPSLRRELYNVGRAKHR

SEQ ID NO: 234309 - protein, 185 aa, Zea mays
  unsure (1)..(185): unsure at all Xaa locations
  Clone ID: MRT4577_145278C.1.pep
FEFLQLAEDLGASPVWVVNDGASLNEEVSTKTISSEFSYGVNGIEFASGGPKTTWGSVRAAMGHPEPFKLDYVSIGNQECWMLYYRGNYQKFYSAIKSAYPDINIISSCDRPTISPSNPADLYDVHVYTSSTNMFSKASMFDNTPRGAPKAIVSEYAVTXGNDAGKGTLVAALAEAAFLIGLERN

SEQ ID NO: 234310 - protein, 301 aa, Zea mays
  unsure (1)..(301): unsure at all Xaa locations
  Clone ID: MRT4577_145279C.1.pep
MASTHVYKKNYRCDRSLQQFYTGGPFAVGLAPGGDGEGGAEAEAFLACACGGEVRVVSAADASAIGEPVDGDSEAITALALSPDSRLIFAAGHSRLIRVWDLASRTCIRSWKGHDGPIMAMACHASGGLLATAGADKKVCVWDVDGGFCTHFLRGHMGVVTTIMFHKDPKRPFVVSXEEDGTVRVWNLETKKCVAVLKEHFSAVTSLALSDDGQTLLSAGRDKIVTAWDIRKYSSKKTIPTYEMIEAVSFIGSGSELLACLGIELANIKEKSAGYFLTVGERGVVRVWCLESCVCVFEQQT

SEQ ID NO: 234311 - protein, 98 aa, Zea mays
  Clone ID: MRT4577_14527C.1.pep
HASAHASEKSYKNFLYKTKLKKKRRFKKKNRKTKKTKKKKKNGQPLYNTQVYIPCHPLAIASNTATQTKFMARFYPTLFLKKPNHYPTYTNCPNFHFN

SEQ ID NO: 234312 - protein, 75 aa, Zea mays
  Clone ID: MRT4577_145280C.1.pep
RFVLFVRAGFKHSPGNPVFLGFIKAGDGVFLPPIPKVQHNRLHYPIPDRRPRAHHLLSLRAASGPKARAHLSWSG

SEQ ID NO: 234313 - protein, 105 aa, Zea mays
  Clone ID: MRT4577_145281C.1.pep
SLVPHPKTLVHRGPHRLGVRVFGNATTYGGSDPDTCCFSAGRQYEDSNSNNKVIFRATYWARSWSLLLRDEDARTDLNRACRLLESVVMEVFAKFGWKFSNRIAA

SEQ ID NO: 234314 - protein, 95 aa, Zea mays
  unsure (1)..(95): unsure at all Xaa locations
  Clone ID: MRT4577_145282C.1.pep
GMKQSSTVRSWLDRRCAICSANSARMCRLSGCCCSMVWRCDHKCAWGRCCGTTCVSCWHTGLQHPLALRLALWRDCPAALMQEASADASVPAXSF

SEQ ID NO: 234315 - protein, 144 aa, Zea mays
  unsure (1)..(144): unsure at all Xaa locations
  Clone ID: MRT4577_145283C.1.pep
EVRGAEKGEGAREREKKXGGGEKNREKKKGEETSGGKEGTRGEKRSPGGXNGIKKKKGTGNHKRKGDQKGGDGQKTGQQKRDGHPRRDGPPRGEKLAQRGGRGESRGKTARPRRPVRETKTNPKTRAGPQRNSQKAGPIERGVP

SEQ ID NO: 234316 - protein, 133 aa, Zea mays
  unsure (1)..(133): unsure at all Xaa locations
  Clone ID: MRT4577_145284C.1.pep
MQIQNRMIIFIEKRCIHDAGCVCRKLIPHNSIVYGRGXAIISCXSIVLEAASDQYPRVELYANRAFDDALDXIQKALAEYSELQPIDTLXRVXSHLIHDNNSHYGIDCNDDATNHMQEQDFFVSLIGXQQQIL

SEQ ID NO: 234317 - protein, 130 aa, Zea mays
  Clone ID: MRT4577_145285C.1.pep
WIIFAAAGSTFYWFQCFQYSIHIMRCDIFMLPPMIIYLADSRYSSDVHAAFPVWVTILSTPGNSSPAACPHAVRLFFVSFVNLLPLLVLCVDCSCAFFFLVVVVSIAGIGFVVTLSSTRMVPFPRVRVRM

SEQ ID NO: 234318 - protein, 57 aa, Zea mays
  Clone ID: MRT4577_145286C.1.pep
CSWSCIKIYLCFPLKGCAKMAFGMKPCSLVVNFYNIVLAGSCPAELFMVCTRFSFCV

SEQ ID NO: 234319 - protein, 328 aa, Zea mays
  unsure (1)..(328): unsure at all Xaa locations
  Clone ID: MRT4577_145287C.1.pep
MGSLQQPLQPGTVLRFGSLEFMSFDDSYDMILLSPLRGSDNGGRQPARRRGNRRRLPHVVEGRHSGLSRPLPRRRRRRRGNRGQAGGGTSLAVERVDGAGAPTESASGISLASETKTSTISPRHTNLKQTDDACTLAKDLLGVTLVPETTVQSAPDATSSPPVGQKVPIDSHLTPFGFGLDPPSNSALVDTPIEDFMTACDYCLSDCSNGSRSLGDEDCGPSRECFHVDLEGPDEGNHLGIPENGDPPRPVPRVDILRELAVVPVPAGGHDPHLDQIREMQARLDEGAGTLEPIRRDIRQEWAGQPSTGEAHRXPQGIQYRIGDDVRV

SEQ ID NO: 234320 - protein, 120 aa, Zea mays
  Clone ID: MRT4577_145288C.1.pep
MLLAAEYKVHSVQMRNDDNPNDETAAYEAHNDKVAHKDPLSCDIHTESIDLENENESTANADIHHSKAMETKLKVDETAKRSTMLLPRSRLPDNANSQLNRRRRRLRMLTTTTPQASSVH

SEQ ID NO: 234321 - protein, 239 aa, Zea mays
  unsure (1)..(239): unsure at all Xaa locations
  Clone ID: MRT4577_145289C.1.pep
MASSSAAEPGARLSDRTRRSPLGLRAMVLLMHVVFVGAVFLLDSTLDRRIHEELWYIGVYGVLVLITLAQYFYTAGSSPGYVIDAMQASGGMHATFINTATLSKQSSSKHGSLKSSTNRPDLEKLRPMSSSSSWLHQIVDPYPPGSSNRDWTCQYCKIIQPPRTRHCHDCDKCVLQXDHHCVWLGTCIGKKNHCRFWWYIFEESILSTWTVALYIESLHLDIEKVWWKGXLGVTLLAIL

SEQ ID NO: 234322 - protein, 105 aa, Zea mays
  Clone ID: MRT4577_14528C.1.pep
GLHTINFFFSRANNPSDSIKVRVVALSLLTLAGSSSSSHTSCSCCCHPPPPVHLPSSVHLPSSIHPPPTMHLPTAVHLPSTGHLPPTVHVPASVHVASSTCHFPT

SEQ ID NO: 234323 - protein, 366 aa, Zea mays
  Clone ID: MRT4577_145290C.1.pep
MVLRFGSLEFMSLDGSYDMILLPPPRDSDNGGRQPARRRGNRRHLPHVVEGRHSGLSRPLPRRRRRRRGNQGQAGGGTSSAVERVDGVGAPTESASGIGLTSEMNTSVVSPQHTNLKQTDDASTLAKDLLGVTLVPETTVQSVPDATSSPLVDQKVPTDSHLAPFGFGLDPPSDSASVDTLIEASPNPLGYCVRSPWDRLTAVSTYGPSGSKEDGEPDLYWDFSGLGNPSAVRDFMTACDYCLSDCSDGSRSLGDEDCGPSRECFHVDLGGPSEGNHLGMPENGDPPRPVPRVDILRELAVVPVLAGGPDPQLEQIREMQARLDEGAGTLVPIRWDIGQEWAGQPPAGEARHLPQGIQHRIADDVR

SEQ ID NO: 234324 - protein, 91 aa, Zea mays
  unsure (1)..(91): unsure at all Xaa locations
  Clone ID: MRT4577_145291C.1.pep
WQCNPKGIWFWFXEIYSFLREQFKKELAFXEGETKALFFFKQFLEEKVPPKKVDFSKVVSKYPFYPPPKVKTVFSRFLNPFGAGFFYVTNR

SEQ ID NO: 234325 - protein, 90 aa, Zea mays
  unsure (1)..(90): unsure at all Xaa locations
  Clone ID: MRT4577_145292C.1.pep
PGGFAGPGPTAGIRVVPLIIGKALFMPEELVVNPLXQXXXXWXXETVRPGSLDSRGDDEEKPHTRRYGVPPTRPPTRPPTRPPTRPPTRP

SEQ ID NO: 234326 - protein, 126 aa, Zea mays
  unsure (1)..(126): unsure at all Xaa locations
  Clone ID: MRT4577_145293C.1.pep
RNERIESKKAFLFPETEEELRALHDKKGQKNLRKQQMYPGPRDKLNARQKALDSRWKXAQRNAGHLKRQPTWPTNEHLGKKGISGHINVDHKNEAPPGELTMPQDASRDTIRDTRGPTGGERPYTT

SEQ ID NO: 234327 - protein, 61 aa, Zea mays
  Clone ID: MRT4577_145294C.1.pep
MPCESILQILLKSTHKKKGGDAHVCRAWDSDESSTESSSDEDAANIAVTKGLLFPNVGHKC

SEQ ID NO: 234328 - protein, 58 aa, Zea mays
  Clone ID: MRT4577_145295C.1.pep
GTAISIKLLSIMGLHRASSAFNAITSASMLISPDLTVPVLYICQCMETSASRIDGLAL

SEQ ID NO: 234329 - protein, 85 aa, Zea mays
  Clone ID: MRT4577_145296C.1.pep
AGAIFFFWFLFCTEKAFSYLIGLFFRGDVRTEKMFSRNLTISLTILMDTGESKFLLLSKASLLVLSFTNDKHISPVLQEGMVLTF

SEQ ID NO: 234330 - protein, 62 aa, Zea mays
  Clone ID: MRT4577_145297C.1.pep
RPGLFVSWHPQRACSVQATKKQVAPPRRGRREQRRMARTKQTARKSTGGKAPRKQLATKAAR

SEQ ID NO: 234331 - protein, 59 aa, Zea mays
  Clone ID: MRT4577_145298C.1.pep
TRARTLEQELAYWWHSCRDVLQGDEQGQDIGEVLARIRTHYLMGERTCSCRRIYLSPAP

SEQ ID NO: 234332 - protein, 82 aa, Zea mays
  unsure (1)..(82): unsure at all Xaa locations
  Clone ID: MRT4577_145299C.1.pep
NKPXWDAHPTSTQFHYDPQNQEGRXRGNTRHPTAPTQQQRKEKTGNPEASRKAGTDLKAGNQQQTGSKRARTGRKQQTRDGT

SEQ ID NO: 234333 - protein, 102 aa, Zea mays
  Clone ID: MRT4577_14529C.1.pep
SKCLKKKKKKKKKKKKKKKKKKKINKKKKKKKKKKKKRVVAPKDLRPFMCVRNVTVPSLGFSNLTYRLLPHNAGVGKISVPFKNKYPSKTFRPFGGATWKTY

SEQ ID NO: 234334 - protein, 211 aa, Zea mays
  unsure (1)..(211): unsure at all Xaa locations
  Clone ID: MRT4577_1452C.1.pep
MAPNGDNTVANVHSGIDSTNKTLLKSDALYTYILDTTVFPREHECMRDLRLITDKHPWGYMQSSSDEAQLLGMLIKMAGAKKTIEVGVFTGYSLLATALALPEDGKVVAIDTDRECYEVGRPFIEKAGMAHKVDFREGTGLARLDELLVEDXTAASYDFAFVDADKPNYVRYHEQLLKLVRVGGTIIYDNTLWGGTVALPAGTPMSDLDTR

SEQ ID NO: 234335 - protein, 451 aa, Zea mays
  Clone ID: MRT4577_145300C.1.pep
PRVRYAFDIKLCRTNNSSKSVMRAPGDTQGSLIADAVIEHVASVLSLDANSVREKNFHTYGTLRSFYPDSAGEASTYTLHSIFDRLVSTSSYLDRAESIKEFNSNSKWRKRGISCVPLIFKVEPRAAPGRVSVLKDGSVVVEVGGIEIGQGLWTKVQQMTAFALGRLWPDADGGGECLLGRVRVLQADTLNLVQGGLTAGSTASESSCAATLQACNTLYDRLKLVLDRLQQRSENVSWDTLVSQAYEDDVDLSASAYWVPGQASNKYLNYGAGISEVEIDLLTGAITIIRGDLVYDCGKSLNPAVDLGQIEGSFVQGIGFFVYEEYTTNSDGLMISNSTWDYKIPSVDIIPKQFNAEVLNTGYHKNRVLSSKASGEPALVLASSVHCALREAIRAARVEFADSTVSSGHSPLEFQMGVPAPMTLVKELCGLDIVDRYLEGLSTCERAAGGA

SEQ ID NO: 234336 - protein, 92 aa, Zea mays
  Clone ID: MRT4577_145301C.1.pep
KRVLSYSLEEGCSYERTISNDKMVVQSCYFFTITATATTTRREKDEKIQSIAGRRLECAPRGDRNKEDRSLSKSPPRKGKSPFLFLVVLPPC

SEQ ID NO: 234337 - protein, 186 aa, Zea mays
  unsure (1)..(186): unsure at all Xaa locations
  Clone ID: MRT4577_145302C.1.pep
MRKFCLXGHQRRGXSHAGCCRAVXLAELILTXFLFVFSCRGSAMPTGKLTSRAGHTMLGQTSRALSYTVTLTAWSSALHGPRPIKPSGTLGLAXATGRITLCRSELXYEDAQLFFSTIAWLLRSLLIAVDSDVPAHALNVGVHSIRMALMDVVFTYSLIFEMYVNDFYLKLTDRVLRPLHELLAAL

SEQ ID NO: 234338 - protein, 488 aa, Zea mays
  unsure (1)..(488): unsure at all Xaa locations
  Clone ID: MRT4577_145303C.1.pep
MDTQKQSVVTKFKAQLFKLMQQLESTTPHFIRCIQPNSKQLPRLFEHDLILHQLKCCGVLEVVRISRTCYPTRITHQQFAERYRFLLLRSIASQDPLSVSVAVLQQLNIPPEMYQVGYTKLFFRTGQVAALENTKIQMLLGTLRIQTHFRGMHSRQGYQRLKKVAMNLQSFIRGERARIHFDNLVKRWRAAVLIQKYTRRRLAANMFNDQLNHIILLQSVMRGCLARRKYKCLQNEKESKASHSIVQGDTRKNNAESRICHGMNGHYPHEPVITELQGRITKAEAALRDKEEENVMLKQQLEQYERKWSEYEAKMKSMEEAWKRQLSSLQLSLVVAKKSLAADDAATRAARTDCTPTHAQYDSEDTLSTGTRTXSDRVETRQPXPEAKVSAGNSDRRVNAVNHLAKEFEDRRQVFEDDAGFLVAVRSGQVGSNTNPDEELRKLKDRFETWKKDYKSRLKETKVNLNKVGTGTHDDKSRKRWWGKKSSK

SEQ ID NO: 234339 - protein, 112 aa, Zea mays
  Clone ID: MRT4577_145304C.1.pep
LEPLIHGLLKSMFPTPIFGPMRLRSQLQWMLTSVHELTHILNAGTVISVTTSLIAHQATMYLLPSPGAVARYVSASPSSGRWRRIAAPPVLHRRDLQARDARGRTQRNGGEG

SEQ ID NO: 234340 - protein, 64 aa, Zea mays
  Clone ID: MRT4577_145305C.1.pep
NAVVICIIITNVLVCVRYDLLCMCARMFIMDWKILYSSHSRSASCTAHARARGGARRRPPGSPS

SEQ ID NO: 234341 - protein, 84 aa, Zea mays
  Clone ID: MRT4577_145306C.1.pep
GGLSFIKKSMGAYPRNFFAPVAAYQKNQVPKPPAPGFPLKMSPGPANPVSVFPASHFWCLARFRLFFGSVPMGFCIDFFVVSRF

SEQ ID NO: 234342 - protein, 77 aa, Zea mays
  unsure (1)..(77): unsure at all Xaa locations
  Clone ID: MRT4577_145307C.1.pep
LYPATCGIFDKDNYSNRIWDIRQRTIAIGTPQGLTIHTDACNGLTNAVFMTFHGPFXRKKCLRRRLTNLIEKYQGDV

SEQ ID NO: 234343 - protein, 88 aa, Zea mays
  Clone ID: MRT4577_145308C.1.pep
KSRVELYVPNHTSGCYKNMTIIMDSSSLENGYKLSTVIHWTPYLDSEPTSGKPLTELAESKFMHTWSTFCMYIPNTTRHSSLISAVGH

SEQ ID NO: 234344 - protein, 70 aa, Zea mays
  Clone ID: MRT4577_145309C.1.pep
EARAAHYHSAENAPSQGSTYALRVVYRKRLETIWTTCITLKLLHSFPSRSMCCCWKRIRRTARSPYPDSL

SEQ ID NO: 234345 - protein, 61 aa, Zea mays
  unsure (1)..(61): unsure at all Xaa locations
  Clone ID: MRT4577_14530C.1.pep
ANRIDRLPGQPPVNFSMYSGXYVTVDAEAGRALFYXFIEAVGVPAXSAPIKLCLNGGPGCS

SEQ ID NO: 234346 - protein, 391 aa, Zea mays
  Clone ID: MRT4577_145310C.1.pep
MAAVAEEEVIVVGAGQSGLAVAACLSLRGVRALVLERDDCVLLLWRKRAYDRLHLHLTKKYCALADAPHPDEAPAYLHRDDFARYPHSTLSLHVHTTPPPMAAVAEEEVIVVGAGQSGLAVAACLSLRGVRALVLERDDCVGSLWRKRAYDRLHLHLTKKYCALPHAPHPAEAPAYLHRDDFARYLDGYAARFAVRPRLRREVRSARYDPASARWEVEAVDLGTCLPERFVAKLVLLMCAVVFGDTSRQGLRRPAFGPFTMKLTTPGYPVVDVGTYAKIRSGEIRVLPAAVKSVRGNVVEFGDGSRHPFDAIVFATGYRSTVRRWLKSEDGLVGDDGMAARSYPEHWKGDHGLYCAGMVRRGIYGSCEDAELIAADISKLLHPKQEQGNGV

SEQ ID NO: 234347 - protein, 77 aa, Zea mays
  Clone ID: MRT4577_145311C.1.pep
KPKGGLALKIFSLSLQSIGIGEISISRTSNPLQSISTFPNTFKLKITAQALKYFGPLSPFLYSKTSCLKYKMGPQLL

SEQ ID NO: 234348 - protein, 170 aa, Zea mays
  Clone ID: MRT4577_145312C.1.pep
EVGRPRPRPPLPWEPATPSPQRGYSGLAGMRWEPARTSQAGFTVESKEAQKLVPSVPNPSPAPGIRLARSGGRNPDVIRASGKQPLTDSAPLEERTNSSRATCYCYRLQQRLHRWNRGPRPRSGIRKRNERNLYRRGGGAGTSDSDRIASAIDENKQEKGGRGWSELGSG

SEQ ID NO: 234349 - protein, 75 aa, Zea mays
  Clone ID: MRT4577_145313C.1.pep
GPPGAHRTPRDARCSSGRWTQPPAHPIARVGAPLSRKDNHVPSAPAGVSGLPNVAVSRHVPAREILTRLPSDDAR

SEQ ID NO: 234350 - protein, 36 aa, Zea mays
  Clone ID: MRT4577_145314C.1.pep
VMRVLSADSHEFLLLLNLDVLYAHSLRHSVVITFKG

SEQ ID NO: 234351 - protein, 59 aa, Zea mays
  Clone ID: MRT4577_145315C.1.pep
IRYTQDLRDLISLSTSLDSKTSTSTRSTSEPTKVAKTSYHPGIMNTINKPTKQEEKTSQ

SEQ ID NO: 234352 - protein, 41 aa, Zea mays
  Clone ID: MRT4577_145316C.1.pep
RPSWCLWTIPAIARSLHSYLVSLLITSLFRSSSMTDPPSPS

SEQ ID NO: 234353 - protein, 58 aa, Zea mays
  Clone ID: MRT4577_145317C.1.pep
GMWTSTRLRPDEGSTSSDVGLLIPSISTAILKLGESSSKRTKSGVCYLLVSHIRLLVT

SEQ ID NO: 234354 - protein, 166 aa, Zea mays
  unsure (1)..(166): unsure at all Xaa locations
  Clone ID: MRT4577_145318C.1.pep
MAGIGPIRQDWEPVVVRKKAPTAAAKKDEKAVNAARRSGAEIETMKKFNAGMNKAASSGTSLNTKRLDDDTENLAHERVPSDLKKNLMQARLDKKLTQAQLAQXIDSWEVAXLGWPLYEMRIWCSLQMINEKPQVIQEYESGKAIPNQQIIGKLERALGTKLRGKK

SEQ ID NO: 234355 - protein, 109 aa, Zea mays
  Clone ID: MRT4577_145319C.1.pep
MAGIGPIRQDWEPVVVRKKAPTAAAKKDEKAVNAARRSGAEIETMKKFNAGMNKAASSGTSLNTKRLDDDTENLAHERVPSDLKKNLMQARLDKKLTQAQLAQVFLWIH

SEQ ID NO: 234356 - protein, 134 aa, Zea mays
  Clone ID: MRT4577_14531C.1.pep
FMCLFMCLFMCLLICLWMCGWSNVVVVTPSSLVSDGNKVRTGESGVTRLSAESSEYGSMVVRKDVVLVTPNSRMSYENKLWVIKSGVADAMSRVAVRVGDGLGLGLSADELSVASVSSLGDYEVAEEAGEMGGA

SEQ ID NO: 234357 - protein, 62 aa, Zea mays
  Clone ID: MRT4577_145320C.1.pep
DACVDSLAGCYLWHLARACRDIIHTTMSKRLHSTHVNLHGEYEHPRTRVECRRPVTCACKYG

SEQ ID NO: 234358 - protein, 33 aa, Zea mays
  Clone ID: MRT4577_145321C.1.pep
LRRQSEEAYTSSLARDPMNIIQSVLSCRITDIY

SEQ ID NO: 234359 - protein, 55 aa, Zea mays
  Clone ID: MRT4577_145322C.1.pep
FVLGNKKNTSFYSQNWGPLPVKNTLGKFVFQYWPPFGIPDPIYQHAMVQHTGVAS

SEQ ID NO: 234360 - protein, 60 aa, Zea mays
  Clone ID: MRT4577_145323C.1.pep
SVWRNSRVRGYRDIDKTMAGRALLLQLGLALSLLDPRLRPGGVRTVQLRLLRDKGQFQER

SEQ ID NO: 234361 - protein, 86 aa, Zea mays
  unsure (1)..(86): unsure at all Xaa locations
  Clone ID: MRT4577_145324C.1.pep
AGGLVLWSHKRWREKVCMHALLSLGSSILAARYVFVLVGSYLLVILFFLCFFSFRYIFYFLSDNMQFFCSLLHACESLLHQGARXS

SEQ ID NO: 234362 - protein, 107 aa, Zea mays
  unsure (1)..(107): unsure at all Xaa locations
  Clone ID: MRT4577_145325C.1.pep
MPPKICGLLMLLGLYTRTYTATILPKCSQAPIACLVHPXYYHQESSVCENPILQPYRIQQTITPGILPVSPLLLQQSSTLLHQLPMAHTLAQNIRAQQLQQLVLTNL

SEQ ID NO: 234363 - protein, 79 aa, Zea mays
  Clone ID: MRT4577_145326C.1.pep
SRKLRTTDIRHQVKGRYLSTKCTAYNWWGTILSKDLRTGSNQGHNITHAIQHTETIPNPYQLSSVAYSYTQTHLTPPKN

SEQ ID NO: 234364 - protein, 106 aa, Zea mays
  Clone ID: MRT4577_145327C.1.pep
SSCQILDIKSKIAELNQIQNTCNYLKTEKTCTPGAQEDASPPPQHSLTSRPLHHDNLLRHYCSSGTFSTSLTKHSEPLLDLRLPHGDLLLVHPDLPPLAASLSSSA

SEQ ID NO: 234365 - protein, 246 aa, Zea mays
  unsure (1)..(246): unsure at all Xaa locations
  Clone ID: MRT4577_145328C.1.pep
MFPLLPLLLLLTSPTSSSSVSAKPDLASDNNILPDNIPTYSAMSVGTYSLPALPYAYDALEPSISAQIMELHHSKHHQAYVTNLNVALKNYATATSSSDIAGQIALQSAIKFNGGGHINHSLFWENLCPSSSPDSKPDSAPTLGAEISKTWGSIEAFQETFKKTLLGLQGSGWGWLVKDTQGLRIVTTKDQDPVVXGEVPIFGVDMXEHAYYLQYLNGKAAYVDXIWDVINWKTAEARFTGSREDA

SEQ ID NO: 234366 - protein, 239 aa, Zea mays
  Clone ID: MRT4577_145329C.1.pep
MSCFSAMTTTTGGRGTYYYSSSPGRPRGGGGGKRPWRRWRAKCAGIAAAVGSRLRRSVVRAVDGGRRRTPPPSSSSVHRGWCHHHHHGRQSFAPVYVDDLYSHSLQPAAKAHRGVVVQQVQVHEPPSTSARDKLPAMDAAAAAAAPAHGASASASGNRQQARAMAAGVAAMRNVLLRSPGRGGGGVLGVVREYGGKVEPSGPSSSSRSSRETCGCRASARRESCRPCSQEAYDTRTIPY

SEQ ID NO: 234367 - protein, 67 aa, Zea mays
  Clone ID: MRT4577_14532C.1.pep
PPPPPLPSAACRTPDLLRVIHLWPPPPADARTPPYCALSACCESRERQPQRRQGQDQPSGHNQKQAQ

SEQ ID NO: 234368 - protein, 55 aa, Zea mays
  Clone ID: MRT4577_145330C.1.pep
QEGGGNFIRMVCYIPGPFWGNLGHWPTISPQRETATPKKKALLQLTTKACYDGGA

SEQ ID NO: 234369 - protein, 61 aa, Zea mays
  Clone ID: MRT4577_145331C.1.pep
SVLHALWYLIFIVFILICLLLYPHFIINILFISFYSFHNISASILINSLYIQAIIISYNPN

SEQ ID NO: 234370 - protein, 88 aa, Zea mays
  Clone ID: MRT4577_145332C.1.pep
FIFLGLYFFLCFTNVQSATKSETVHFEQLLALTRRGRQMQNQSSIRKLCLLKRAFFHIKTFQLSYLSTPTFVQTILFEQSPVLIISGT

SEQ ID NO: 234371 - protein, 174 aa, Zea mays
  unsure (1)..(174): unsure at all Xaa locations
  Clone ID: MRT4577_145333C.1.pep
WRLNSRPKQQAAGNTHPTHPPPXPPPPPARPPPPPPPNHQTAGHPPSPKVRGSWLPGPSPPPPRPPGPLSRGAGPPPPPPXPRGGXGLPAPDPGTTRGPPXSPGHAGQGPSSXAPGRRENVPRAPXKGPGGPXGGAACPXPPSYHGPDPXPPXPAPRXPGGGXPSPPEPGGGGA

SEQ ID NO: 234372 - protein, 79 aa, Zea mays
  Clone ID: MRT4577_145334C.1.pep
PISVVCFSPLFYVKPICSMDNTISIRFLVFILHTIRDSALHSDWRRDHSLKYECQYAYIQPVLQHQVRVLISTAVCIDT

SEQ ID NO: 234373 - protein, 42 aa, Zea mays
  Clone ID: MRT4577_145335C.1.pep
PCILRDMEQDLAHGCGSGSRDFYGFSTDYEVGAVGSPVGRLS

SEQ ID NO: 234374 - protein, 63 aa, Zea mays
  Clone ID: MRT4577_145336C.1.pep
PMNFNIKLGRSNLSPIFHFPSFYQALKVLLKVLDFPNILGCPQNVKSHNPRVLFFFFPKKTFF

SEQ ID NO: 234375 - protein, 122 aa, Zea mays
  Clone ID: MRT4577_145337C.1.pep
GGVGEGNTLYPGGGFFDRLGLAEDPVPFAGFRVKGIKKGPLPMFSMLGFLVGALVPGKGPLENWFAPLGAPVAKKAWVYPPKLAPGFLVSSGAGGGQDILLSPPRLRRDWAHEGMQIFLGSP

SEQ ID NO: 234376 - protein, 58 aa, Zea mays
  Clone ID: MRT4577_145338C.1.pep
YFHAPFVPLWQRSHACIQCLTQLISHDQIHFCLRPCNLVSLGHLLPSPPSLLSSFRAW

SEQ ID NO: 234377 - protein, 216 aa, Zea mays
  Clone ID: MRT4577_145339C.1.pep
MADEDSSDFTFCRVSSAENDGQPESPKAIPMASMTLEDVRVKSADTSKNNGMKTVDSEKDRSGNNVSVSTKDDNMKAPVTHTGSGAESNVPLQAKRSSKKPAARAKVPFEKGYSQMDWLKLTQTHPDLAGLKGQSNRRLISLEEVKQHKAGDCIWTVLKGRVYNIAPYMKFHPGGVDMLMKAAGKDCTALFNKYHAWVNAEFLLEKCLVGFLDPTA

SEQ ID NO: 234378 - protein, 227 aa, Zea mays
  Clone ID: MRT4577_14533C.1.pep
MKNNPSFENTCSAAAGGSGSGSFNVRNLSKVILPPLGGPSGQSQSHGGSDKWVISPLDSRYRWWDTLMVVLVAYSAWVYPFEAAFMNASPKGGLEVADMVVDLFLAVDIVLTFFVAYIDPRTQLLVRDRKKITLRYLSTFFIMDVASTIPFQSLAYLITGEVRENAAYSMLDVLRLWRLRRVKQLFTRLEKDIRLSYFWIRSARLIAVTLFLVHCAGCLYYLIADRY

SEQ ID NO: 234379 - protein, 104 aa, Zea mays
  unsure (1)..(104): unsure at all Xaa locations
  Clone ID: MRT4577_145340C.1.pep
VGLAHYRREIVNTRRRTLNRYINITHCVISLTNSNTVSRAINTIMAITKRSPHLMRLIKVNNLGSTLILHTSSKNKTCTSXLIEPQLVSIELRLMMPWDDQNQQ

SEQ ID NO: 234380 - protein, 76 aa, Zea mays
  unsure (1)..(76): unsure at all Xaa locations
  Clone ID: MRT4577_145341C.1.pep
CISCVGYADLVSRLHRASLSVHQAREXIMFSLSTSTGTVSIVASGRKLAPSCTRSRSLLDRSIIFVTRWLTSNCRP

SEQ ID NO: 234381 - protein, 102 aa, Zea mays
  unsure (1)..(102): unsure at all Xaa locations
  Clone ID: MRT4577_145342C.1.pep
GAFGGINFWKKQPLPKIFEKNSELKFGEKTLENPWEKTPGQKTNCVALKTCVKAXKKKGQXFAREGNXIIKPACKRSVKQTPAFXKWKEIKFFGFKPMDPLL

SEQ ID NO: 234382 - protein, 141 aa, Zea mays
  unsure (1)..(141): unsure at all Xaa locations
  Clone ID: MRT4577_145343C.1.pep
RLTKXRRAGPFFFXFGGYLFYIFELWWSTNRLFHSYLGFLHCLRREAGGREHSERNMASRTVSEAKQGKGRQPDKQVTHHKLPTQERKKGRHYYGVAVQIIKGRTGNHQSSRDLDSVVAPPGNLALPCGGALLGTGALGHR

SEQ ID NO: 234383 - protein, 82 aa, Zea mays
  Clone ID: MRT4577_145344C.1.pep
LFWKRFNFDIDPPCVHKTRKLQASNFFKWPNSKVLPKKSFLHGIQAHRFPSSHRVLFCKTFLNPTLTTFKMGNQASSFLRKM

SEQ ID NO: 234384 - protein, 27 aa, Zea mays
  Clone ID: MRT4577_145345C.1.pep
ASKCSVCRMHFTCITADLITGRPAQLI

SEQ ID NO: 234385 - protein, 227 aa, Zea mays
  unsure (1)..(227): unsure at all Xaa locations
  Clone ID: MRT4577_145346C.1.pep
STIRKAARQGGKKRLAGLSYHEGSNFPRRSRQLFWRACVGLSQTSSQLALQVRYLDAHIRWKEFISPDQIPSDGKSSDADFSALRNAVLCDKKIIDNKIRYALKFPNQKHLPVRLTKNILEAESDQDEIRKMWFSENHVPLYMLREFEXSMLRLAPCLLQEFRNVXNLYPRRVKAPDRDVFSYLFHKGEVYPCASCKKGVLYRDIVKCSSCQGNWHKECTSRSACSK

SEQ ID NO: 234386 - protein, 126 aa, Zea mays
  unsure (1)..(126): unsure at all Xaa locations
  Clone ID: MRT4577_145347C.1.pep
ACLGFLRGXFALPFFSFFFPVLSXGVFGVRVARGRGVVSFSPGGRAVLLXPLFSVRFXXFGLXVXGRPLASVSPCSGVLXXCXRVXSPVXVFSFRLLLGPLCVSLGSLFCVFPPVVSPVSSXVRFV

SEQ ID NO: 234387 - protein, 218 aa, Zea mays
  Clone ID: MRT4577_145348C.1.pep
NDLKLLIFIFYLAAVSYTITPHFIIQRRLPTTMFMRLLIALSLVSLLAQEVISEGVSPSSSTLGSHLATRSASTVLKSEFSDIHDEIIKAREPLARACQENDEPSVVSTFEEFQKSFQTLANSCSKTYNQNRKSPSQFARGFIMILVEFQPLLESLQPHPALLRACFHSFRSSSHSINTMISFLKAGKVDLESEVHNAGAGLDLQLFAQCGFKINLSS

SEQ ID NO: 234388 - protein, 66 aa, Zea mays
  Clone ID: MRT4577_145349C.1.pep
FKKDASQQSTDSSPQYFHELIMLSDIVQQPAVAPKVSPDKLWCGAIHRVARCLIVPHSKRARTREK

SEQ ID NO: 234389 - protein, 848 aa, Zea mays
  Clone ID: MRT4577_14534C.1.pep
MKKNNSSIESTGGGGGTVSGSGSGSGSFNLRNLSKVILPPLGGPSGGQSQSHGGSDKWVVSPLDSRYRWWDTFMVVLVAYSAWVYPFEVAFMNASPKGGLEVADIVVDLFFAVDIVLTFFVAYIDGRTQLLVRDRKKITLRYLSTFFIMDVASTIPFQGLAYLITGEVRENAVYSMLGVLRLWRLRRVKQFFTRLEKDIRFSYFWIRSAGLVAVTLFLVHCAGCLYYLIADRYPDRQKTWIGAVIPNFRQASLRIRYISSIYWSITTMTTVGYGDLHAQNNVEMIFNIFYMLFNLGLTAYLIGNMTNLVVEGTRRTMEFRNSIRAASSFVGRNHLPPRLKQQILAYMCLKFRAESLNQQQLMDQLPKSICKSICEHLFVPVVKDVYLFRGVSREMLLSLVTKMKPEYIPPKEDVIVQNEAPDDVYVVVSGEVEVILFDGIYEQVQATLGARDIFGEVSALSDRAQAFTFRTRTLSQLLRLKQATLKEAMQSRPEDSVVVIKNFLKHQVEMHGMKVEDLLGDNTGEHDDDANVLTVAAMGNSGLLEDLLRAGKAADVGDAKGRTALHIAASKGYEDCVLVLLKHACNVNIRDAQGNTAMWNAIAAGHHKIFNLLYQFGRASNPRAGGDVMCLAARRGHLGALQELLKLGLDVDSEDHDGATALRVAMAEGHADAARFLILNGASVDKASLDDDDGSGSGSGSGAARLAMSPTELRELLQKRELGHSITIHDSPAVVPNGGSSGHSRPGRLQSTSSDSQRWPRVSVYKGHPFLRNRTSEAGKLINLPGTMEEFKVIVGEKLKVDAEKALIVSDEGAEIDSIDVIRDNDKLFMVTEEDLRRLASMDWLSCE

SEQ ID NO: 234390 - protein, 68 aa, Zea mays
  Clone ID: MRT4577_145350C.1.pep
GKKKKKGFPRFFGFSIFSGPKGPKGVPPKIFFFPKKKKKKKKKKKKKKKKKKKKKKKKKKKKKKKLEE

SEQ ID NO: 234391 - protein, 49 aa, Zea mays
  Clone ID: MRT4577_145351C.1.pep
KTHPGTDRATHEALAVTLDVRFYTPCDYSRIYVDFHISTHRYCNGYDTV

SEQ ID NO: 234392 - protein, 133 aa, Zea mays
  Clone ID: MRT4577_145352C.1.pep
MATPTSPPAAPASTATTSVSRLRPLRPFVPRLRFWPAPVAAAAAVPFSIALGPGCRPLPGIRCRAAAGPSPPSSEPPPPSPHGWQERLSSLQDRARIFFAVLFWMSLFFWGSAWDGSNNSGGKKRQRFRKKSK

SEQ ID NO: 234393 - protein, 150 aa, Zea mays
  Clone ID: MRT4577_145353C.1.pep
MAAALASLLHLATPTQTRSTHLAVRLPSAQLPRWPSGSRIAAAQPPRAYKVTIEHGGESRVVEVEEDETILSRALDEGLDVPHDCKLGVCMTCPARLVSGTVDQSDGMLSDDVVARGYALLCAAYPRSDCTIRVIPEDELLKVQLATADD

SEQ ID NO: 234394 - protein, 128 aa, Zea mays
  Clone ID: MRT4577_145354C.1.pep
TSMLHQENSEPFLRHHSEQLACGNMRGADNGRPNFLPEKCQIAVCPEVCQRGEKVSLFDEELVHGVDLTNHTAQSPLVPSGVKETPIVDHNKRPASSDMLDIVECKRVKQEGQIVTKEDNHTFCRGIS

SEQ ID NO: 234395 - protein, 168 aa, Zea mays
  Clone ID: MRT4577_145355C.1.pep
MAASSTATSVHDFIVKDASGKDVDLSTYKGKVLLIVNVASQCGLTNSNYTELAQLYEKYKDQGFEILAFPCNQFGGQEPGTNEEIVQFACTRFKAEYPIFDKVDVNGSNAAPIYKFLKSSKGGLFGDSIKWNFSKFLVDKEGRVVDRYAPTTSPLSIEKDIKKLLGSS

SEQ ID NO: 234396 - protein, 98 aa, Zea mays
  Clone ID: MRT4577_145356C.1.pep
ILSFVSSSRKQLPSRLVKICNFKSDIACFCIINMLDLRVILTINRHSQNSIINSLWINISPLFPSFYLKAINSFIDLFVPSELLQTQNGSIIPWPNSI

SEQ ID NO: 234397 - protein, 45 aa, Zea mays
  Clone ID: MRT4577_145357C.1.pep
SCKLTALVVRADDAVWSWVELVQFLGVVRVWFVSQGAVRLYLGLR

SEQ ID NO: 234398 - protein, 125 aa, Zea mays
  unsure (1)..(125): unsure at all Xaa locations
  Clone ID: MRT4577_145358C.1.pep
MAPLGDGGAAAAAASNNLVVSNTEMVNDLPPXDREWDYIKAVSVARNIYLRQLIGFCGFQKIYSDRHIYVSHPPPFCNSRASAARNILHQMQIMCIFEENPNDVRLITNQKKRDLEQLICRFYDL

SEQ ID NO: 234399 - protein, 48 aa, Zea mays
  Clone ID: MRT4577_145359C.1.pep
GPLERHRALGKSVNGGTEPRVRVQHLVRRHKALTELQGYGKSGCGRRP

SEQ ID NO: 234400 - protein, 37 aa, Zea mays
  Clone ID: MRT4577_14535C.1.pep
TISISHYYSHLYPLYFRQRFTLNFDGYRLILSITLTL

SEQ ID NO: 234401 - protein, 78 aa, Zea mays
  Clone ID: MRT4577_145360C.1.pep
RKLQRRSLPQAGPFSFFWAKLCGRWNRPIINGAPVENLVKVRVRKRGFFWEGLFGAIVRAVLEILIQSKYRWDRFAPP

SEQ ID NO: 234402 - protein, 182 aa, Zea mays
  Clone ID: MRT4577_145361C.1.pep
RACIDCLVVLSSSPSLALHRSANLSSMEAAATEALTVNPDPELVDDLATPSMSLLLVLFELKIWNVVSLISGCHHVPTRCSRFTKSQTSVQSGQDGQRGRAALAPPPAGGRPQMLCRGRTVRRLRPGAAIRRTSSGKKSYGGWSCVCPCDARAGADERCLCVCVCGDRRGCVDASGIGRLKT

SEQ ID NO: 234403 - protein, 121 aa, Zea mays
  Clone ID: MRT4577_145362C.1.pep
QGPGRHVQLRGARRATYETEQASPTPYRFYAMGAPYDPYVDATRLIPRTMMTWRSVWFWSQLESYNHDIACHMHVSHLELGNRLYSTLSMHCDKLSGQERRDRKHPSEEQTGSAHVHEKAS

SEQ ID NO: 234404 - protein, 100 aa, Zea mays
  Clone ID: MRT4577_145363C.1.pep
HDNAQVRAGVHRLLSACRYQSDHLKMHLKEYHEKIHYCEEKIDKAKAENITDDELNALQSKMEEKMQEEKQLRQELKELHDELGDLQSLRLSMKERKDAV

SEQ ID NO: 234405 - protein, 134 aa, Zea mays
  Clone ID: MRT4577_145364C.1.pep
FTLRSDICCSSSFSLSDLRPFSLETLSYEATKRVFCPSILPGASSTPDSGVQPGATTNEESAVEVAVPVVSSLHDECAARSLIPPTQDHQQRTGRDPFITATSQELGGSLSSYMMSRQLGASLGMSLVALIILM

SEQ ID NO: 234406 - protein, 72 aa, Zea mays
  Clone ID: MRT4577_145365C.1.pep
FQRMKGLYFSLALVDVIYDNIFESLNVYYEKTSIDRMVWQFLIKKIVCLKEVPLAVVQLINFPVLGCVGGRV

SEQ ID NO: 234407 - protein, 165 aa, Zea mays
  unsure (1)..(165): unsure at all Xaa locations
  Clone ID: MRT4577_145366C.1.pep
MSPRRRRRAHGQRQDPSSGRGNDLMTKNGLPNGVSPDAVTSYRLEEATGAFEIHLDSTCXVHFRSHLVYYERTITGKLSRADISDLSDVQAEKLFLWCYFTRMVADPDQVTIDSQDEFVSESLSASMFDEERNCGPRAGEELREAPGDIVKLENAPRCAGKKPRD

SEQ ID NO: 234408 - protein, 68 aa, Zea mays
  Clone ID: MRT4577_145367C.1.pep
LPLKPFYRFHLSFTWPERFSSCAAMELNHLHQIGDAGQGTTTTTTLGTVVPVPSSRLEAQGITDASVT

SEQ ID NO: 234409 - protein, 59 aa, Zea mays
  Clone ID: MRT4577_145368C.1.pep
NLAIKIRGTLHLLTKETIMPIRTTNCNTNMITHNLQYHQPNDSYVKLLKIRFSQMHMRQ

SEQ ID NO: 234410 - protein, 244 aa, Zea mays
  Clone ID: MRT4577_145369C.1.pep
GGSGTQPESEAGVVKGRGRLAPQRSQFSVSSRRAEREREEEPRDESRGAIHRPPNPCSLLDSPDHRGAAPRIYGAASVLIGIQRGGGCLPGIGAACLRSEMDRIRDGRRGGCRSEAFRRRRLRGGASGATAEGAPGTRLAPSADGASASCSTAGVAAPVGTTATTSPTRASATTTTTPSRSSCRGTTSSGGHRARRHLLPRHLRPAGATTAVVAAVAGGLYNHHHGQHHQMQWEGRLQSHRVQG

SEQ ID NO: 234411 - protein, 153 aa, Zea mays
  Clone ID: MRT4577_14536C.1.pep
MRSRLLLPPSWRSRAPPPRARCLSRPCHPRPAPREMSDSYCPDCKKQTEVAFDHSAGDTVCTESGLVLEAHSVDETSEWCTFANESNDNDPVRVGGPSSPLLTDGGLSTVIAKPNGAQGDFLSSSLGRWQNRGSNPDRSLILAFRTIANMADS

SEQ ID NO: 234412 - protein, 86 aa, Zea mays
  Clone ID: MRT4577_145370C.1.pep
AGGLVEEKVGSHPELLPSIAPSQNLVSKETSTTALQASVARPELEVNAAIVSGQSSEPKEIVEKSKIPGRRNSRTEEPTVASESVE

SEQ ID NO: 234413 - protein, 122 aa, Zea mays
  Clone ID: MRT4577_145371C.1.pep
MDAAVAPLLAVAVLLFLGLRRRGGHRNHCPYPNPVLGNVVPLVRNLHRFLDWATDQLTAAPSSTIEVRGALGLGRGVATADPGVVNHMLRARFPNYVKGARFAGPFGDLLGSGIFLADGRLW

SEQ ID NO: 234414 - protein, 60 aa, Zea mays
  Clone ID: MRT4577_145372C.1.pep
RRHLRGKKSADGDTAEQDAYLGERLLSEKAASSGGGHRRRRSGARVGVWRPQLDSIVEEA

SEQ ID NO: 234415 - protein, 88 aa, Zea mays
  unsure (1)..(88): unsure at all Xaa locations
  Clone ID: MRT4577_145373C.1.pep
MAYQDAPLAVEAPTPVLGEPMDLMTALQLVXMKKSSAHDGLVKDLREADKAIDKHAAHLCVLADDLDQPYYVKLVTALFAEHNVHLGT

SEQ ID NO: 234416 - protein, 137 aa, Zea mays
  Clone ID: MRT4577_145374C.1.pep
WLGTFGLIYVLVYVLVSSYPSVGLQTHTHGLLLSNHNSIEQQILRGKFYGLLLLLLRCRRLLVLLCRCRARAGEVGDMAVLLICRLLVLVSVFCLWRRVCLLLGGMCLSIWLLIIRLRRIRMRMCLLSVLCRCVSML

SEQ ID NO: 234417 - protein, 113 aa, Zea mays
  unsure (1)..(113): unsure at all Xaa locations
  Clone ID: MRT4577_145375C.1.pep
RLCSCSYAYLAPILIVLLSVLSDPSLAFPRFKMHIFVKTLTGKTITLEVESSDTIDNVKAKIQDKEGILPDQHRLIFSFXHLEDSRTLAXYYILIDSSLHFLLFLIVCIHIFF

SEQ ID NO: 234418 - protein, 71 aa, Zea mays
  unsure (1)..(71): unsure at all Xaa locations
  Clone ID: MRT4577_145376C.1.pep
PRVHPHILTLHHSLYFLSPHHHXCVVSFKPVCRGTYQSISSXLYPSYSPYHLIIIIKYIILSLHSLHISSS

SEQ ID NO: 234419 - protein, 117 aa, Zea mays
  unsure (1)..(117): unsure at all Xaa locations
  Clone ID: MRT4577_145377C.1.pep
PPGPLPFXKSPRRKRTXGARAPPQNQKRGFGGGGRRLRRLSLPRAPREKKGPPGGPGGRRPKKTPLLRLIDPPGLSSXPCATRGCXSYIERPPFCARVRMYALVLCPNKGGYVIYRM

SEQ ID NO: 234420 - protein, 91 aa, Zea mays
  Clone ID: MRT4577_145378C.1.pep
GAPTPVAAAPFFFFFFFFFFFFFFFFFFLKNNISSHMPHSRSTTPDQFIFTITSSSLYQKKKGGGKMKSSQRLYKKCRLFRSCPQYLFRLT

SEQ ID NO: 234421 - protein, 208 aa, Zea mays
  Clone ID: MRT4577_145379C.1.pep
HASADAWVRRRIRRGYVPLKDESDLTNGYLDTAIDWIPGMPDIRLKDIPSFIRTTDRDGGMLNFDGGEAQNARRARGVILNTYDALEQDVVDALRREFPRVYTVGPLAAFANAAAGGELDAIGGNLWKEDTSCLRWLDTQRPGSVVYVNFGSITVMTAAQLAEFAWGLAGCGRPFLWIVRPDLVFGETAMLPEGFVPDTKGRGILASW

SEQ ID NO: 234422 - protein, 180 aa, Zea mays
  unsure (1)..(180): unsure at all Xaa locations
  Clone ID: MRT4577_14537C.1.pep
MEEPQKDSGQPSKSSDSELEAMVLDDNGAGKSHSMEENRDSPIDVDGGQSSMDVDIKGKSSLSDDVNGKSSSEPYSNAPIDMSVESLEKFCKEASRSFFDEVGLISHQINSYNEFVSHGLQELFDSLGEVIVEPGYDPSKKGSGGWKHAIIKFGRVKLEXPVFWTGKEKVLLIXPWHARL

SEQ ID NO: 234423 - protein, 268 aa, Zea mays
  Clone ID: MRT4577_145380C.1.pep
MKSNSNVSENAASSSKRKRTVSQYSYWLNGLRWSQNPHDERARSFRKERVVFPSEDAEISEVSPVCCLCEKCYNEEDIYIACEKCEDWFHGDIYSVNIENVNNLIGFKCHRCRRISLPVCPYAETVTVVKGQSDEDHCIKFVDQCVGKFVEDEDPNCPKDLGAPGSLQELHDHEIEQGLNVHITEIEFSYDNCLEELNDHGCSKEFDAHSTEKDLEDDKSLKKVDIHNELRALDDLGSEKEPGDHCNPKRSHSHISEPRGRPGRVIKR

SEQ ID NO: 234424 - protein, 142 aa, Zea mays
  unsure (1)..(142): unsure at all Xaa locations
  Clone ID: MRT4577_145381C.1.pep
LILTRSVARPNTTPTKSSGVSAPRNQLGTKEPLYSAPVTGGVKKAHRFRPGTVVFRYIRTYHTTQELLINNMXLQRLVFQIPEDSRTXLRLXSSAVSLLTDAXEGYLXRTSSRVPSDAIHYTRNTVMSKDLQLAPLIRGQKA

SEQ ID NO: 234425 - protein, 82 aa, Zea mays
  Clone ID: MRT4577_145382C.1.pep
WWVFSNKIMRQDLLAAPYPLLTAKKGRKQKSLLDSQLSLNEGRHESKRYPREGARWVAHTTLYHMHPWKALYGTPPFNATKA

SEQ ID NO: 234426 - protein, 117 aa, Zea mays
  Clone ID: MRT4577_145383C.1.pep
ITLFHMYIPMSLAYEQPNEVAMFVGYVSTSGHCLLLILMLIRVVTGPLRPHAASAWSRCLVVVPIRQHHPAFSLYVMRPTCPFCPLRCHGTRSLHWMSHVSSLSRAESQWSRSARIV

SEQ ID NO: 234427 - protein, 102 aa, Zea mays
  unsure (1)..(102): unsure at all Xaa locations
  Clone ID: MRT4577_145384C.1.pep
PTLRRSTYYKRRDRLCHKGRELYGLCDADLVLXILFSSSWKVYHYRLGTVLCVTDLCERDDCTTHTTVWTDMLQERSAELQKAEPMCQLVXNELQDMTVDDR

SEQ ID NO: 234428 - protein, 118 aa, Zea mays
  Clone ID: MRT4577_145385C.1.pep
MGSIPAAAAGPGTELEDLPEDALLCILVLLARGDAAAVARYGRRLAAMAGLPLLRVVLTMRLGQSAPALDPGLLAPRAVRMPRGGLGRGALLLPSCASSGPGGSLASPWVPGRRDRAR

SEQ ID NO: 234429 - protein, 126 aa, Zea mays
  unsure (1)..(126): unsure at all Xaa locations
  Clone ID: MRT4577_145386C.1.pep
RTSELPADAGGGGGAGVTADRPCFTIPFFDLKVTFSGVETIRGRGHLASWCPQEVVLXLRHEAVGVFLTHCGWNSTMESLCAGVPMLCWPFFAEQQTNCRYTCVEWGVVLATLISQFNQQQQSTTI

SEQ ID NO: 234430 - protein, 103 aa, Zea mays
  unsure (1)..(103): unsure at all Xaa locations
  Clone ID: MRT4577_145387C.1.pep
QPHLLVQCQPRLIDKMVMVGVNGFGRIGRLVTRAAFSCDKVDIVAINDPFIDLNYMVYMFQYDSTHGXLNGTVKAEYGKLVINGKPITIFQERDPANIKWGDA

SEQ ID NO: 234431 - protein, 165 aa, Zea mays
  unsure (1)..(165): unsure at all Xaa locations
  Clone ID: MRT4577_145388C.1.pep
RTSELPADAGGGGAGATADRPRFTIPFSDLKVTFSGVETIRGHLASWCPQEVVLRHEAVGVFLTHCGWNSTMESLCVGVPMLCWPFFAEQQTNCRYTCMKWGVAMEIGQDVRQEAVEEKIREAMGGEKGMEMQRRAGEWQQTGLRATRPXGGRSYANLDKAGLVW

SEQ ID NO: 234432 - protein, 89 aa, Zea mays
  Clone ID: MRT4577_145389C.1.pep
HSYGRLGSSRPAGAQFSITTRPSWAPPFSPILILVLPPPRTLPPPRAAQAPVASPSSMNSSVYSPTPTSLDSPPDASRCFCSLVLRACG

SEQ ID NO: 234433 - protein, 62 aa, Zea mays
  Clone ID: MRT4577_14538C.1.pep
RSRRHYHCWHCQQSPQLTIQMESNNTYPTNTIINRHKIIYHNKYNPSHIIQFQQLNTSTKKK

SEQ ID NO: 234434 - protein, 590 aa, Zea mays
  Clone ID: MRT4577_145390C.1.pep
MQVNENSENPYWKAIGYSVDEPREDRARTATPSPSRPLDVGVVETRLLDDNKLLRSLVGRGLTVKPASSDANHHTVQCDAVIVGSGCGGGVAAAVLASAGYKVVVVEKGDYFTAEDYSSIEGPSMERLFERGGIFCTSNVTTMIFTGATVGGGSAVNWSASIRTPEEVTQEWAREHGLPVFASPGYAQAMDAVCARLGVTDGCQEEGFQNKVVRRGCEALGLCADAVPRNSSDAHFCGSCNFGCPTGDKRGTDTTWLVDAVARGAVILTGCKAEYFVLEKNHSSGSGSGRGKKCVGLVATCASNGVTKKLRIEAKVSIAACGALMTPPLLRRSGLKNRHIGSNLHLHPVSMAWGYFPENKQDPPLSGKCYEGGIITSMHRVTDRTIIETPALGPGAFAAMVPWESGRDMKERMRRYSRTAHAFALVRDRGVGFVDGEGRVRFTPSREDVDELRNGLRRVLRILVAAGAAEVGTHRSDGLRLRCKGLRDEDLEAFLDEVTIEKGPMHSRVDKWALHCSAHQMGSCRMGSSPKDGAVDGRGESWEAEGLYVCDGSLLPTAVGVNPMITIQSIAFCLSKGIAETMAQGQGKGQ

SEQ ID NO: 234435 - protein, 154 aa, Zea mays
  unsure (1)..(154): unsure at all Xaa locations
  Clone ID: MRT4577_145391C.1.pep
SQLSMMAKCDPTXGKYMACCLMSRGDVVPKDVNAAVGTIKTKRTIQFVDWCPTGFKCGINYQPPTVVPGGDLAKVQRAVCMISNSTSVAEVFSRIDHKFDLMYAKRAFVHWYVGEGMEEGEFSEAREDLAALEKDYEEVGAEGGDDEDDEGEEY

SEQ ID NO: 234436 - protein, 73 aa, Zea mays
  Clone ID: MRT4577_145392C.1.pep
WLDITIASVHTGLFITGELLLRNGPRLLRVVLERFSVGGAVIVVLERVPHGEVPLGCNSLRRTNRQTRTATRY

SEQ ID NO: 234437 - protein, 46 aa, Zea mays
  Clone ID: MRT4577_145393C.1.pep
IKGISCDRHKLGDCMVFAVVADESTGSIILFSNCYRRDMLLLASEL

SEQ ID NO: 234438 - protein, 58 aa, Zea mays
  Clone ID: MRT4577_145394C.1.pep
YNHGFNERNNIFFLGKHSLHILFVFAPPPRMGSRRDMFFLPCGGEQTRHRTSHLYYFF

SEQ ID NO: 234439 - protein, 34 aa, Zea mays
  Clone ID: MRT4577_145395C.1.pep
DKIAYLVTAKRAFFLLATLHVIHRDMAQSNDTIA

SEQ ID NO: 234440 - protein, 475 aa, Zea mays
  Clone ID: MRT4577_145396C.1.pep
MHTAPSPCYTDPIQTYQRRGRLGAPARSRAEPPAYHPIVVHRDPRRIHPMVTRRAASVLRAPDHLIQSTTSSPALPPAPMTVCGALADPQWRCAMEAEYAALQANHTWDLVPPPPGTNMVTKKWIFKLKLNDNGSLERDWSVHQLDVTNTFLHGTLTETVYCTQPIGFVDPAHPNMGFVAAKSDMSLFILHHGPDTTYLLLYVDDTVLTASSPGLLHHIVSCLQQEFAMKDLGALHQFLGVTVEHRPQGMFLHQRQYTIDLLERAGMAECKPYVTPVDTQGKYLIFTKPDIAYAVQQVCLQMHDPREPHLTTMKRVLGYLCGTIDFGLLLRCSSTMELRVYTDADWAGCPDMCRSTSGYVVFLGDSLVSWSSKRQPVVSHSSIEAEYRAVENSVAEATWLRQVLHELQSPLARSTLVFCDNVSAVYLSTNPIQHQCTKHVEIDLYFVRERVACGDVRVTPQVFIVYSTTSADFNT

SEQ ID NO: 234441 - protein, 144 aa, Zea mays
  Clone ID: MRT4577_145397C.1.pep
LPPTLLTTRPLIASVRVSILIETGLPLTRMTNLRRATQRNITTITITQTDNNTQPRRLLRSCIHHIHIPIPIPTIIIIIRRSLRPRSRTLALTDAPTTTTTTRNRKQQHHTSSTSPIIRNNNTALVPRIRSTLPSQAHKSAQRF

SEQ ID NO: 234442 - protein, 119 aa, Zea mays
  unsure (1)..(119): unsure at all Xaa locations
  Clone ID: MRT4577_145398C.1.pep
GGKSFPKASNFQKTCSPRTKAPPGAPRPSLGPPEQPPGGPVFPTSGXPGAPFTPKPGSRPPGLIKKTLFPNPTLGGGNRPPTRGVGAPKLGRGNSGPPSGGGSXAPPGPXGGRPGPPPG

SEQ ID NO: 234443 - protein, 98 aa, Zea mays
  unsure (1)..(98): unsure at all Xaa locations
  Clone ID: MRT4577_145399C.1.pep
SSRRCWXRPRSPASWPRSXACXRLSGXXCXAXGXWSAXXXXCWXXXXPRCARPXLRXXAXXRLVPVPPXXCXSPSAXXXXXVSXXXFXAXXPXFGXVV

SEQ ID NO: 234444 - protein, 73 aa, Zea mays
  Clone ID: MRT4577_14539C.1.pep
PFRIQLHAFTKIPALVSNLSFGVHKKGQDGHPRSDGKEKVLCNMASKVKHLAWPPAENFIVCAAHTSLYMFHT

SEQ ID NO: 234445 - protein, 58 aa, Zea mays
  Clone ID: MRT4577_1453C.1.pep
GIPGSTHAFEKKKKKKKKFKKIKKKEKKIWKIGIYKINNAKLLTIKKWYLNSYKLDDI

SEQ ID NO: 234446 - protein, 68 aa, Zea mays
  Clone ID: MRT4577_145400C.1.pep
SKQICINPSKRRTECLSQLGAKFARIDYKSTRSHVLGFTHYLEKCLIFQRSVFNLIMGFLLQLALIAI

SEQ ID NO: 234447 - protein, 106 aa, Zea mays
  unsure (1)..(106): unsure at all Xaa locations
  Clone ID: MRT4577_145401C.1.pep
LLVTDLRDDKQFFVDHPGAVPISTAQXLSALTCRFVFIVAYKVSVVSLICXGEELRKLIGAAAYIECSSKTQQNIKAVFDAAIKVVLQPPKQKKRKKKVQKGCTIL

SEQ ID NO: 234448 - protein, 83 aa, Zea mays
  Clone ID: MRT4577_145402C.1.pep
DDSSIYRARPGQTSVMVMYPFSVDAVQYRTGSSITLEKPLSRQRGYYPYGRVHAEQCAVDTGVCATTTREHELTLTSASDDIY

SEQ ID NO: 234449 - protein, 125 aa, Zea mays
  unsure (1)..(125): unsure at all Xaa locations
  Clone ID: MRT4577_145403C.1.pep
AHASVPLFSRPNTATVAAKHDLHVLAFVLLVTAVKDAYEDWRRHRSDRAENGRLCAVLFXAPPGAXQFVPTEWKHVRVGDVVRVVSDESLPADMVLLATSEPTGVAYVQTLNLDGESNLKTRYAK

SEQ ID NO: 234450 - protein, 32 aa, Zea mays
  Clone ID: MRT4577_145404C.1.pep
DATNVQVQHEHTVIPSALEAERIRATSRHTEH

SEQ ID NO: 234451 - protein, 52 aa, Zea mays
  Clone ID: MRT4577_145405C.1.pep
ATLKAYRSCLGLSKSLSDLSKTCMLALKRASTTNIVNTSLGQLVENNSAAMY

SEQ ID NO: 234452 - protein, 111 aa, Zea mays
  Clone ID: MRT4577_145406C.1.pep
MPDSDVPSPASSPLGSVQKIARGRKSRRGGGRSPAYRGVRMRAWGKWVSEIREPRKKSRIWLGTFPTAEMAARAHDAAALVVKGRGAVLNFPEMAASLPRPASAAPRDVQA

SEQ ID NO: 234453 - protein, 165 aa, Zea mays
  Clone ID: MRT4577_145407C.1.pep
PRVRGELLRDIVGSAYYIAPEVLKRKYGPEADIWSVGVMLYIFLAGVPTFWAENENGIFTAILRGQLDLSSEPWPHISPGAKDLVKKMLNINPKERLTAFQVLNHPWIKEDGDAPDTPLDNVVLDRLKQFRAMNQFKKAALRIIAGCLSEEEITGLKEMFKNIDK

SEQ ID NO: 234454 - protein, 51 aa, Zea mays
  Clone ID: MRT4577_145408C.1.pep
KHLSQLGEHTVFLFFPTQICYKRWGWFFTHNGCGWKQQLLGPQWRGGEIRV

SEQ ID NO: 234455 - protein, 126 aa, Zea mays
  Clone ID: MRT4577_145409C.1.pep
ATRPPTRPPTRSLQRVVSIAPLAAPRHRAGRRTPWTSCASPAHVIGATAIICFVAHACSHIPRAPAGRNHRATTGRLTQYAAAHHQLSFSRATLVPRPAFSRAPFPLYQPTPPLSTLCTQSPLRDC

SEQ ID NO: 234456 - protein, 76 aa, Zea mays
  Clone ID: MRT4577_14540C.1.pep
GPTGQHLPFRVQDYCSVPHMLASLPDVVNTAASYLDGRRVGSFWSLEMARERRSKKSSSGEELQGKCPESWPRNRP

SEQ ID NO: 234457 - protein, 318 aa, Zea mays
  Clone ID: MRT4577_145410C.1.pep
MGGEAKKLPRIDFSEVDPSAPGGQAWGTARGEVMDALATFGCFEAHYPALTPRLRAELFDGAVRPLFALPADAKRRNCYGADRPFHGYLGDVPGFPGYESLAIVDGTKDESVRGFARLMWPDGGDNSDSFCGTVVEAAQRIFQLEEAVRRMVMEGLGVAKHHDALSASMWHLFRMAEYKAPNAAEKVVRYGAHQDTNWLSVVCQHEVAGLEMQSRDGEWIVVQPSPTSLVFMVGNELRAWTNDRLYAPFHRITVAGDVPRYSAMLFSVPSFQVQVADELVDDEHPPRFKPHDNNDFVCFCVSEEGALHQDKLKAFCGV

SEQ ID NO: 234458 - protein, 326 aa, Zea mays
  Clone ID: MRT4577_145411C.1.pep
MFWRMTGLSAASPVDTILDKENFTLEELLDEDEIIQECKALNSRLINFLRDKSQVEQLLHYILEEVPEDAERKRSFKFPFIACEIFTCEIDVILRTLVEDEELMDLLFSFVKPDHPHSTLLSGYFSKVVICLMLRKTAPLMSYVQGHPKIVVQLVDLIGITSIMEVLIRLIGADETIYSNYGDTLQWLENTDVLEMIADKFGSSASPEVHANAAEVLCAVTRCAPPSLAAKICSPSFVGRLFHHALEESRPKSVLVHSLSVCISLLDPKRLASASYQAFRSNLSHGALVTASPETVDGMLDSLGNLLKLLDTSATESGLPTTYGLA

SEQ ID NO: 234459 - protein, 144 aa, Zea mays
  unsure (1)..(144): unsure at all Xaa locations
  Clone ID: MRT4577_145412C.1.pep
RLRQSQLPPDERDETGVINPQMDDTLEPTALTTEANRVAIHHXNLHDTLPGDSGAYTAKNVAVKXIRPVEMAPPTXDDPVEAATNFTYQISLMNHPAQSVNGXSPRSEXHTSHIAVKIAELDTXIVKRSDMELNTEPRFLKNGY

SEQ ID NO: 234460 - protein, 31 aa, Zea mays
  Clone ID: MRT4577_145413C.1.pep
ISTDASIDCIIYISYLKVKLPTNFTIVCYTL

SEQ ID NO: 234461 - protein, 90 aa, Zea mays
  unsure (1)..(90): unsure at all Xaa locations
  Clone ID: MRT4577_145414C.1.pep
ICARASETDTFVFQAVINQLLSLIINTFYSNKEIFLRXLISNSSXALYKIRFESFTDMSXLDAQTVLLIHLVPHMATITLFTIDSGFGMI

SEQ ID NO: 234462 - protein, 97 aa, Zea mays
  Clone ID: MRT4577_145415C.1.pep
PSVIQTMWPKKTTTTSSLKWSCEICLVEAPTECHLQQHFAWHPVFLLHKVAENSALILVFGSLFGGALLWHFGSVLFIVMPGSNLFYPSYCSTQKLC

SEQ ID NO: 234463 - protein, 58 aa, Zea mays
  Clone ID: MRT4577_145416C.1.pep
VGASLPVRCLYDTPYMDVFNMTGIFTLSNRSSHFLRNMGLPDIEIRDHGGPLPCSMPG

SEQ ID NO: 234464 - protein, 384 aa, Zea mays
  Clone ID: MRT4577_145417C.1.pep
MLAARSFASPARQCLRQANRSRWAPALSQVSARTYASEVAKFHGTKGSDGKYCVTLIEGDGIGPEIAQSVKDIYSAANVPIKWESVDVTPRLNEEGKTVISDESIASVKKNLVALKGPLATPIGKGHVSLNLTLRRTFNLFANVRPCRSIAGYKTPYDDVDTVLIRENTEGEYSGIEHIVVDGVVQSIKLITREASERVLRYAFQHARDIGRKKVRAVHKATIMKMSDGLFLSTAREIAKDFPDIEFDAELLDNTCLKMVTDPVPYNDKVLVMPNLYGDILSDMCAGLIGGLGLTPSGNIGDNCSIFEAVHGSAPDIAGKQLANPTALLLSSIMMLRHMGLNSEAANIEQAIFKVLAEGKTITGDLGGKAKTFEYADAVIKALK

SEQ ID NO: 234465 - protein, 117 aa, Zea mays
  Clone ID: MRT4577_145418C.1.pep
KKKVWGYNRGPSGTEIPPNGEYRGRPNTGPKGTDPGRTPGGKTGGPKTTQWPPWGGKEPPPRGPRTPKGQPGRPNPGPTWGGPTPPPKPPPPGDRTPPPAPRGPPPPPPPPPPPPPP

SEQ ID NO: 234466 - protein, 66 aa, Zea mays
  Clone ID: MRT4577_145419C.1.pep
MEISLQLLSGGYLLMHIKDNLNLRHISLLYVHATARPPQKHRRTSYLNSTSLSISGTSTSSYDAIV

SEQ ID NO: 234467 - protein, 105 aa, Zea mays
  Clone ID: MRT4577_14541C.1.pep
MGKENTHINIAVIGHVYCDKSTTTGHLIYKLGGIDKRVIDRCEKEANEMNKRLFAYAWMLDKLKAERKRGITIDIAMWKVETTTYYYAAIDAPTHPDCIKNMITG

SEQ ID NO: 234468 - protein, 134 aa, Zea mays
  unsure (1)..(134): unsure at all Xaa locations
  Clone ID: MRT4577_145420C.1.pep
LSHRKNLSXDGVGALYRGFNMLLCVVIICIMRGHXHSGTFDVSYQSQVXLHGELQEICFASFPMSWMXTNGPXLESYPIDILRRRNIXTSGEAVQTRSXLDAFQHILKKEGPKSLFNGAGADILHAIAGAGVLS

SEQ ID NO: 234469 - protein, 107 aa, Zea mays
  unsure (1)..(107): unsure at all Xaa locations
  Clone ID: MRT4577_145421C.1.pep
QIQQPCNECIGTGESINEEGLFPWCKGHNLVQEKKVLEVHVEKGMQHNQKITFPGEADEAPDTVTGNIVFVLQQKDHSKFKKKGEDLFYXHTLSLTXTLCGFQIVLT

SEQ ID NO: 234470 - protein, 204 aa, Zea mays
  unsure (1)..(204): unsure at all Xaa locations
  Clone ID: MRT4577_145422C.1.pep
MSRYRGPRLKKIRRLGALPGLTRKTPKSGSNQKKKFHSGKKEQYRIRLQEKQKLRFHYGLTERQLLRYVHIAGKAKRSTGQVLLQLLEMRLDNILFRLGMASTIPGARQLVNHRHILVNGRIVDIPSFRCKPRDIITTKDNQRSKRLVQNYIASSDPGKLPKHLTVDTLQYKGLVKKNLDRKWXVRLKINELXLVVEYYXSRQT

SEQ ID NO: 234471 - protein, 175 aa, Zea mays
  unsure (1)..(175): unsure at all Xaa locations
  Clone ID: MRT4577_145423C.1.pep
MSRYRGPRLKKIRRLGALPGLTRKTPKSGSNQKKKFHSGKKEQYRIRLQEKQKLRFHYGLTERQLLRYVHIAGKAKRSTGQVLLQLLEMRLDNILFRLGMASTXIPGARQLVNHRHILVNGRIVDIPSFRCKPRDIITTKDNQRSKRLVQNYIASSDPGKLPKHLTVDTLQYKGL

SEQ ID NO: 234472 - protein, 129 aa, Zea mays
  unsure (1)..(129): unsure at all Xaa locations
  Clone ID: MRT4577_145424C.1.pep
MAASEAAAAAATPVTPTEGTVIAIHSLEEWSIQIEEANSAKKLVVIDFTATWCPPCRAMAPIFADMAKKSPNVVFLKVDVDEMKTIAEQFSVEAMPTFLFXMREGDVKDRVVGAAKEELARKLELHMAS

SEQ ID NO: 234473 - protein, 514 aa, Zea mays
  unsure (1)..(514): unsure at all Xaa locations
  Clone ID: MRT4577_145425C.1.pep
MTMNGAAAPERSPPPSPPPLVQAQAPPSPSPAQPLEWRFSQVFGERSAGEEVQDVDIISAIEFNKSGHHLATGDRGGRVVLFERTDVKDLASRKDAEKADYSISRHPEFRYKTEFQSHEPEFDYLKSLEIEEKINQIKWCQATNCAXFLLSTNDKTIKFWKVQEKKVKKVSEMNLDRSTAPTNGSPGGTGYPRPSLSNGNVLKPGGLPLLRLPVVTTQETSLAASCRRVYAHAHDYHINSISNNSDGETFISADDLRINLWNLEISNQSFNIIDVKPTNMEDLTEVITSAEFHPTHCNTLAYSSSKGSIRLVDLRQSALCDTHSQIFEQHEAPGSRSFFTEIIASISDIKFSKDGRHILSRDYMTLKLWDVKMNSGPVATFQVHEYLRPKLCDLYENDSIFDKFECCQSGDGLRVATGSYSNIFRVFGCRSGSSEATTLEATRNPTRRQVQTTSRATRSLSTLTRAVRRGGESTGIDANGNSYDLSTKLLHLAWHPSENLIACAAANSLYMYYA

SEQ ID NO: 234474 - protein, 213 aa, Zea mays
  unsure (1)..(213): unsure at all Xaa locations
  Clone ID: MRT4577_145426C.1.pep
WVPRGRPGAHSQKASSQQRLHQPPXASSSATPSAPRXNAPLPQIVVVGSADIYVEVHRSPLIGETAAXGGKGANLAACGXRPTYLVARVGDDANGRLLEDALADAGGVXTDRVARAADAPSGHAIVMLMPHDHNSVIIVGGANMESWAAGIGSEDLDXIRKEXMQREIPDXVNPQAAQALAFYQSQLGLGTHFSFFLCYCLIILISIRLNRAM

SEQ ID NO: 234475 - protein, 141 aa, Zea mays
  unsure (1)..(141): unsure at all Xaa locations
  Clone ID: MRT4577_145427C.1.pep
ANPKPRPPXSGFLTQAPHPPQKRETPPPNLKPGPXPPPPPTPKGLTQPPGTGGRPPIFPNKKPPXFGFNKPXGPPKXPFPPPQPGADKPGGGNPFGQGKLHPPVPAGLETPTRVHPKEVGVQPGKHLVNPGPKPLGGGDPR

SEQ ID NO: 234476 - protein, 59 aa, Zea mays
  Clone ID: MRT4577_145428C.1.pep
ATRSLSSLTRTVRRGGESTGIDVNGNSYDLSTKLLHLAWHPSENLIACAAANSLYMYYA

SEQ ID NO: 234477 - protein, 56 aa, Zea mays
  Clone ID: MRT4577_145429C.1.pep
VSTIKLTKSLNKSFTKPTPFKKSLGGKRKKEKRKPTPTNNFYIPQSHHGNYLTATP

SEQ ID NO: 234478 - protein, 78 aa, Zea mays
  Clone ID: MRT4577_14542C.1.pep
NHSVTMLEKESCLQQIKIQQLEEVLSPTGRQGEKEEHKWGMEQGRQELYGAATQGLHGLEKTLRDSEEMQRARTTRCL

SEQ ID NO: 234479 - protein, 338 aa, Zea mays
  Clone ID: MRT4577_145430C.1.pep
MLLGRGVTLRVLLFSSLWRLRARAYAAISCMRSAALPVAASWLRLRNTHVLLLMVVLFALFLRKLSGARLSLDLLREEPRRRAPAAAAGGGLPPLHAMLSSRSCNPSAKCYSAERTVNAPELVDDYYLNLLDWGSNNVMSIALGNTGCLRDASSGSTSELVTIDEDSGPITSPRTLRGVHEARTYERHIWDQGSSWPGGVRTQVVWSRAAAGQWRQRQPSAHLGMMPVFSTCCIEMITRWDNSMPSEGSSEIDVWPEFQNLTGDVISRTAFGSNYQEGRRIFELQGELAERLIQSVQTIFIPGYWKLQTEKAPTALGPNSQAIKANTVQLTGHNIFLQ

SEQ ID NO: 234480 - protein, 63 aa, Zea mays
  Clone ID: MRT4577_145431C.1.pep
FEGGEKCGRITFSGWRLLCGYLGLGLFPVTVCKTGRPAGAGQELVGLPAGWFGPDLMLEGSPG

SEQ ID NO: 234481 - protein, 108 aa, Zea mays
  Clone ID: MRT4577_145432C.1.pep
GGGRVFFFLFFFSFLLVFFLFYRFFVGPPRVLWPARRGNNQKKKLGKFTRALFGGGVLFSPCPLLLWPGGGGGSPPWGPGWAWPLCLLPTLALGGRSLSGCVEVWARA

SEQ ID NO: 234482 - protein, 174 aa, Zea mays
  Clone ID: MRT4577_145433C.1.pep
MAEDAPNAVAEGSQPAASEGSADAALPAAAGAKAAEALLPSLSIWPPSQRTRDAVVRRLVQTLAAPSVLSQRYGAVPEPEAERAAVAVEAEAFAAASKSAAAAAECPASVEEGIEVLQAYSKEVSRRLLELAKTRSAAAAAAPAPAEGSAQAQESAEASSATAPPTEEAAVNEE

SEQ ID NO: 234483 - protein, 75 aa, Zea mays
  Clone ID: MRT4577_145434C.1.pep
RELGPSRRTRRWRAVRAPPPPSWVSGWAWRGCWRSCARGSALLPDRERGAITPDSCGAARRRRWAWPGWRTPTRP

SEQ ID NO: 234484 - protein, 365 aa, Zea mays
  Clone ID: MRT4577_145435C.1.pep
KLGIRLELGCVVENKVLCNSLLLRLQEELDDIENVIYPTRLVSLTFPLKTRQAGMKPTSREPLSVGHTTEEFHRSHLVKLDLSDGRSLYSKLVIGADGSKSNVRQIAGIKTTSWNYPQSAIICTVEHVVENDCAWQRFLPSGPIALLPIGNNFSNIVWTMSPEESLRHKSMSPEEFVNSVNHALDFGYGPHPRSTALDHYMEQFFSGIGSSAASTKECFEVPPKATRVVSERMAFPLSLMHSHDYVSKRLALVGDAAHTVHPLAGQGVNLGFGDAAALAKVIAEGVSVGSDVGDLTLLQRYEKERKAANVAMAAVLDGFQKMYSVDLGPLNVVRAAAFHGAQYISPLKKNIISYATGDTKWSLFQ

SEQ ID NO: 234485 - protein, 92 aa, Zea mays
  Clone ID: MRT4577_145436C.1.pep
NSCPHLVLCFGMYWETKNAISNFVRKTSSFGLFGYWDTSSARLALAWIAGNVALLRFCSYRPATKKSSILHARVQAVVMHYSHPNTSSAWST

SEQ ID NO: 234486 - protein, 55 aa, Zea mays
  Clone ID: MRT4577_145437C.1.pep
AFHVTPTSTHPSRPSARTTTSSIAILSSIDKRRHDADSPAPSCSLRTRIGSLSRA

SEQ ID NO: 234487 - protein, 72 aa, Zea mays
  unsure (1)..(72): unsure at all Xaa locations
  Clone ID: MRT4577_145438C.1.pep
LTKHLTSSRHRGTXAPVHLDSLPSPQISPLRVSPSHNHPQPLPSSPIPSLPLTLNRRVKDGVPAVQQHLVRS

SEQ ID NO: 234488 - protein, 145 aa, Zea mays
  unsure (1)..(145): unsure at all Xaa locations
  Clone ID: MRT4577_145439C.1.pep
EEVLRVSGGASCRVPDYDGLSRLKIETMVLNEVLRLYTPLPALHRRTYKPMELGGVRYPAGEMLMLPLLCIHHDKDAWGPDADEFRPERFAEGCRRAXSAGDAPXXFFPTGCGPRTCGGQTFTLLEAKIGLAMTLGSFTFELCTS

SEQ ID NO: 234489 - protein, 113 aa, Zea mays
  Clone ID: MRT4577_14543C.1.pep
PDSDGLVFYFSCHELMEATTWHVPGPVRSEPARQPNTKCGGLQIQDPQFSSESSSIRVIAAWCVSLPFAHRSRATCLVQFFRILLITIGLYKHSSGVKIQMPQFSAESLRIGP

SEQ ID NO: 234490 - protein, 129 aa, Zea mays
  unsure (1)..(129): unsure at all Xaa locations
  Clone ID: MRT4577_145440C.1.pep
NHKPHSEGERSRHGRRKKGGPGAAGAGEEQQRTHASRSRGGQPPAAAQQPPPGHQPTTGGGAPPEAEAPPDHQPATGHQPPADXAPTTEQQPATPGHDPTKPAGTEAKDQGHPGPSQPGGNKSRASRRK

SEQ ID NO: 234491 - protein, 60 aa, Zea mays
  Clone ID: MRT4577_145441C.1.pep
LLHESLVSEKQHEVSQWMNLERDIHTLRGLIICDIFLLFFFFLILYIVYPAGLTNTSNHL

SEQ ID NO: 234492 - protein, 374 aa, Zea mays
  Clone ID: MRT4577_145442C.1.pep
RYSAGAPDSPVLHWTVRCYTGQSGATLDSPVNYSGAAPRILEGGKFKVGFPGASDTVRWHTGQSVCCDPLAPIQSVINEGRLKFQEMQVDTEPFPMNMIDFEGKRILVRPNTTDKGKDKEIIIGNTREADGNHKISCRKVVAKKTPDGGETLKVTITTSSARGQAQTKEQEPVLRISDGPTHKRRRSGTTPDGPENSSGWFDHTQDLQRPRTFKPQRPEIGTWKTNTFKACGQIWPDFRSIIVKYVKKKAGPSDRPAKRPRLPIREQCQVRPIGPPHQSEEMEGHTVQLRSNIPIWTPPPPYPPMSYPYTYLPTPYVPNQMWGMPPYPFGMPQYPASGAPQTFVFNRLAPPVQDRLSVAQSGHQTQAQQDCQSA

SEQ ID NO: 234493 - protein, 101 aa, Zea mays
  Clone ID: MRT4577_145443C.1.pep
VRVAPSGGDRARPLPGQRGQRFASAIGARLCGSIAARQSRIVHKRIHLGRQRVLPVHPSVTARPLCCDPPPYSRCSRADAGRPPESPAGSQSSFMRGPSVS

SEQ ID NO: 234494 - protein, 113 aa, Zea mays
  unsure (1)..(113): unsure at all Xaa locations
  Clone ID: MRT4577_145444C.1.pep
SPPVGSPCPPTRPLLSAQTVTPHARRSGRLRVHSRYGSCGPPRCPPLDRRGRDRGHAKGXAGVAIFRPQRRPSKNPVRSISSSPATLVCALPGLISRLLCAISIAVRSLFSHK

SEQ ID NO: 234495 - protein, 112 aa, Zea mays
  unsure (1)..(112): unsure at all Xaa locations
  Clone ID: MRT4577_145445C.1.pep
TTRPEIAFCRSYGHLGGGAHDQFYXPPTVLXLNVGHTPKIMQEETFEPMIPIMKCTPNEXAIKLANDSKYDLAXNWIYGNQNLAIRISFHLHCGVAEINACAPRYMCQSIPF

SEQ ID NO: 234496 - protein, 67 aa, Zea mays
  unsure (1)..(67): unsure at all Xaa locations
  Clone ID: MRT4577_145446C.1.pep
NPPSLAIIFQLAFAXMMKRTTYLARVXHNETKLSKVLDLYNQPLGENQDFACYNFSLTHLFHFPNSN

SEQ ID NO: 234497 - protein, 86 aa, Zea mays
  Clone ID: MRT4577_145447C.1.pep
AVVTTQSTFFFFFFFFFLGSASACLHYTTAYTLQATAAQLNQDDRIQQYSTISWRERDREREDQAHAHWLAHTLGHWRLQINKQMQ

SEQ ID NO: 234498 - protein, 42 aa, Zea mays
  Clone ID: MRT4577_145448C.1.pep
RSRYYGDQDGDKAKHVAWRAEQDAGELKERASGTVKTGGSAS

SEQ ID NO: 234499 - protein, 95 aa, Zea mays
  Clone ID: MRT4577_145449C.1.pep
PGRSPPIGSWPCPALYGFWRFVSSLDWRASPRYFVMFFALECRCLASRVPLSFGLSGAWLFSCPAQSVVPSPAFRSVSPPFALFVVCPPCVLLVS

SEQ ID NO: 234500 - protein, 391 aa, Zea mays
  Clone ID: MRT4577_14544C.1.pep
MHRQKNPNSGWAAFDRKQRSADGSGYEGDADPFPSLSNSGASNIASSSITEKNGLKRKPFASVVRPSVDSGAVSTGCGNKNSANHVDSGNHGAISAPLNKVKILKDAHSWADIHLIEDVLAAVNNDVGQASDLLKVMDSPALQTGEGRTSGQLADVMNKTHGSPSESAAAGKANPDSSQLLLPLMNFPSIPLQPEFEDIDDEYFSYRKDALKMMRAATKHSQSASNAFLRDDHAAAKELSLRAQEERAAAEKLNNKAAEEIFRLRNSNNDIWKIDMHGLHASEAVAVLERHLHMIEFQQPGNKSASSEDLAKLESAYSESTTGSNIELAAEKVVLRRPKQSILHVITGMGNHSKGQASLPVAVRGFLIENGYRFDELRPGVFAVRPKFRRR

SEQ ID NO: 234501 - protein, 59 aa, Zea mays
  Clone ID: MRT4577_145450C.1.pep
YQPSLCAQCILPCLACCIKDDHIVIACTVECLAKTKCVVLVESMVRSSIRDARVLCHAA

SEQ ID NO: 234502 - protein, 187 aa, Zea mays
  Clone ID: MRT4577_145451C.1.pep
MASKNQVDLESQKPMPQAFRSTAELAKHLPTGAVLAFEVLSPVFTNGGKCDDVNRVMTSWLVGLCAAACFFLCFTDSFHDAKGTVRYAVATRRGLWVIDGTPAPPPVEAAEKRIKFIDFFHAFLSVIVFMSVAMFDGNVGACFNPVMSYDTRQVLTAVPLAGGLVGTLLFATFPSTRHGIGFPIHAS

SEQ ID NO: 234503 - protein, 254 aa, Zea mays
  Clone ID: MRT4577_145452C.1.pep
MASKNQVDLESQKPMPTHAVVASAPAASVPASSGTGSVVAGISDAAPETQPLLAEPNGHSQEEGLGDGGGTDDETTQLERAMAQAFRSTAELAKHLPTGAVLAFEVLSPVFTNGGKCDDVNRVMTSWLVGLCAAACFFLCFTDSFHDAKGTVRYAVATRRGLWVIDGTPPPPPAEAAEKRIKFIDFFHAFLSVIVFMSVAMFDGNVGACFNPVISYDIRQVLTAVPLAGGLVGTLLFATFPSTRHGIGFPIHAS

SEQ ID NO: 234504 - protein, 62 aa, Zea mays
  unsure (1)..(62): unsure at all Xaa locations
  Clone ID: MRT4577_145453C.1.pep
MGGGNGQKSKMARERNAEKNKGGKGSQLEANKKAMNISXQICMQPYCTTRAKARHASEIQTT

SEQ ID NO: 234505 - protein, 55 aa, Zea mays
  Clone ID: MRT4577_145454C.1.pep
CGGKCGCGCVCKCGSVYGGCHMCPDMAEQVSPPMTVIMGVEPSKGGLRAAADLSA

SEQ ID NO: 234506 - protein, 103 aa, Zea mays
  Clone ID: MRT4577_145455C.1.pep
MADNNNRRNHGQTLLAGAGLGLLAVNSGLAIYRARGDTAAVLFVAGSCATLLLLFACLRAYERAAPGSPARDRARRAVWPLATLLTLSFAWKVAAAMPSAAAA

SEQ ID NO: 234507 - protein, 78 aa, Zea mays
  Clone ID: MRT4577_145456C.1.pep
WHLASGLLADKLLKFCDRSARPQSTKLVPPKTRGFKIAPPRGPMFPGGPNWVSPPQFLTSPGPGGGPPGFLFWGAHFI

SEQ ID NO: 234508 - protein, 100 aa, Zea mays
  Clone ID: MRT4577_145457C.1.pep
MGSGSVTLKQKKRVKHTKNKYLKPGALAQIRYSRSTSRDIGKKRILLNVEKDDELEISPHAEVVFESSTPIMSPARLSFETFSGIKGTVVANYSKDSSSS

SEQ ID NO: 234509 - protein, 59 aa, Zea mays
  unsure (1)..(59): unsure at all Xaa locations
  Clone ID: MRT4577_145458C.1.pep
IQPMDFKKLRYLRLTLYLRKLQKCVFRCYAELCITQLEAHLQQPYASTDDSAQCXTGLP

SEQ ID NO: 234510 - protein, 35 aa, Zea mays
  Clone ID: MRT4577_145459C.1.pep
VLKVLTISKRQKTYHSSLTCLGMPSGTSTLRLSPR

SEQ ID NO: 234511 - protein, 77 aa, Zea mays
  unsure (1)..(77): unsure at all Xaa locations
  Clone ID: MRT4577_14545C.1.pep
PTSPRGKNKERPLWSTGGADAXXGIRKDQSCCRSPDPRSDLPPVQSVLLGLRDAVVPGGVGQRIQITALPELTLKLD

SEQ ID NO: 234512 - protein, 61 aa, Zea mays
  unsure (1)..(61): unsure at all Xaa locations
  Clone ID: MRT4577_145460C.1.pep
NYARNYLAELLEPCVRRAIYLDSDLVVVDDVAKLWRTDLGGRTVGAPEYCHANFTKXYFTG

SEQ ID NO: 234513 - protein, 65 aa, Zea mays
  Clone ID: MRT4577_145461C.1.pep
IQIAHGAKGPEPARTHKSMQRGTGATQRKTGPRQCANERGGQLLTRAPNGGRTEKLLLTRGDQGE

SEQ ID NO: 234514 - protein, 124 aa, Zea mays
  Clone ID: MRT4577_145462C.1.pep
AIMPLARRHAPRTAVRTSPRTIRAARPSLKTRLLGGNRRTHTKRTGGTTVTTTTTTRTTRTGGHHGHATTAAPVHHHKRHATMGDKVSGALMKLRGSLTRRPGLKAAGTRRMHGTDGRNARRVY

SEQ ID NO: 234515 - protein, 193 aa, Zea mays
  unsure (1)..(193): unsure at all Xaa locations
  Clone ID: MRT4577_145463C.1.pep
MPSPVVVAATLLVVALAAFCGTDPLRTDSMVDFPGFESHLVDLPNPAEMPTHADEWERLCGADVRFCGEVQGPESITFDQXGPYTGVADGRVVFWDGERSSTXGPKASPLEYLXSEHICNRPLGLCFDKTGDLYIADAYFGLLKVRREAGLATLLATEAEGVRFNFTNDLDLDLDDEGNIYFTDSSIHYQRRL

SEQ ID NO: 234516 - protein, 188 aa, Zea mays
  Clone ID: MRT4577_145464C.1.pep
MGRDDDRRAAALQRSSSPWSVGSRLSLNERWRAHAGMVLVMLAYSGYHVLAKSVLNVGMNQVVFCVYRDLLALLVVAPVAFLRESVEAISVFTKDGILKVTGTAVCVSGAILMALYRGPSLIALLRSMPTAWTSAPYHPAATPAVLEQGVEAWQLGVLCLIGNCLLAAVYLLSSRAGVCVCALLPARR

SEQ ID NO: 234517 - protein, 57 aa, Zea mays
  unsure (1)..(57): unsure at all Xaa locations
  Clone ID: MRT4577_145465C.1.pep
RVLKHXILYIPPTSFLSHKPYIPCDSFSKKPPPSLHQLYIITPTLPFFTLTFITNTF

SEQ ID NO: 234518 - protein, 139 aa, Zea mays
  Clone ID: MRT4577_145466C.1.pep
MGGGDDRRAAALQRSSSPWSVGERWRAHAGMVLVMLAYSGYHVLAKSVLNVGMNQVVFCVYRDLLALLVVAPVAFLRERRVRPPVTPQLLASFALLGFTGLYGNPLLCLVGLRYTNASYAAAFQPSIPVLTFLLAAIVG

SEQ ID NO: 234519 - protein, 89 aa, Zea mays
  unsure (1)..(89): unsure at all Xaa locations
  Clone ID: MRT4577_145467C.1.pep
KRLQEDPPAGVSGAPTENNILVWNAVIFGPEGTPFEDGTFKLTIEFTAEYPNKPPTVRYDSXMFHPNVYAAGSIXLDILQNRWSPTSDV

SEQ ID NO: 234520 - protein, 383 aa, Zea mays
  unsure (1)..(383): unsure at all Xaa locations
  Clone ID: MRT4577_145468C.1.pep
MGGGDDDRRAAALQRSSSPWSVGERWRAHAGMVLVMLAYSGYHVLAKSVLNVGMNQVVFCVYRDLLALLVVAPVAFLRERRVRPPVTPQLLASFALLGFTGLYGNPLLFLVGLRYTNASYAAAFQPSIPVLTFLLAAIVGVEAISVFTKDGILKVTGTAVCVSGAILMALYRGPSLIALLRSMPTAXGRALPTTLLLXAVLEQGVEAWQLGVLCLIGNCLLVAVYLVVQAPVMIKYPASLSVTAYSYFFATTFMVLTGVCATSGLHEWALTKAEVIAVLYAGIVASCLSYSIMTWANKVLGPSLVALYNPLQPAFSTALSTVFLGDPVYLGSVIGGVSIIAGLYLVIWARYNQGQRAPTDACLDPLIIVDNPRIPKTQESPFV

SEQ ID NO: 234521 - protein, 411 aa, Zea mays
  unsure (1)..(411): unsure at all Xaa locations
  Clone ID: MRT4577_145469C.1.pep
MGSSSQHDSISASGSSERADGSRSSISMWTKITSTDSWRWCLGLIYIVAVASIWIAASYIVQSVVDAGVSPFLITYICSGLFVVYIPIVGAARYFEDSIGDLWTKLKFKDAESLQQASDMESVNLLQSGGHEINVASDXNHKQGCLETLQFQIQASLXQAELTVVDCSKGLDAKGRWTRARVAQVSMLISPFWFLAQLTFNLSLRYTTVTSNTILSSTSSLFTFLVALVFLGETFTWLKLISVLLCMGGTIIVSLADSSSSVNAIATNPRLGDFLSIVSAGLYAVYITLIRKKLPDEKEGQGQVSMAQFLGFLGLFNMLFFLPVALVLNFAKLEQFHSLTWEQVGLVVGKGTFAPYHESSPLSEKTRRSAVAGRLERWLGCLAAPCARRRLGCSAAPCARRLAARCSPPRA

SEQ ID NO: 234522 - protein, 109 aa, Zea mays
  Clone ID: MRT4577_14546C.1.pep
YMSESNIILSVGITEVVVRMNNLLVGLTVNIKEHASTPEFQLHVYNQIELVSAPLEEPLFGCVDPHLPGPRRRGGREGQTGPAEGRFGDQGYGSSFGPSEFHQRRRRFL

SEQ ID NO: 234523 - protein, 147 aa, Zea mays
  unsure (1)..(147): unsure at all Xaa locations
  Clone ID: MRT4577_145470C.1.pep
DQCCLGSITNKVVWIHFSSIYKLRCPGRANCCRLQQRLDAKGRWTRARVAQVSMLISPFWFLAQLTFNLSLRYTTVTXVLLRRTEXLPYFTEIYFSFVLSLSGLKNIYASVSVNLQSNTILSSTSSLFTFLVALVFLGETFTWLKLI

SEQ ID NO: 234524 - protein, 35 aa, Zea mays
  Clone ID: MRT4577_145471C.1.pep
RLMQQRMAVARIAYIRFTSVLSYLNLEPRFLLRAS

SEQ ID NO: 234525 - protein, 119 aa, Zea mays
  Clone ID: MRT4577_145472C.1.pep
RRGCTRLPTTLRPGVRGTALARPQGLIELGGAFARGFGRCSSRSNLCRIWSSSSLGAGARRASALRAGSGREHPMKSPPRPLTNHESVSFPLSREVISSGDQNGSATAQIRASPHPHRP

SEQ ID NO: 234526 - protein, 283 aa, Zea mays
  Clone ID: MRT4577_145473C.1.pep
PRVRVDDIHSTAADFIIECHGQNSLPCDFSHSLVSTQWIRSGLEENCLQDVGSHPIFSPLRCRIPFPGFESFRFCISLSQYGEKERHLLKNLCFLLGAKFTDKAYKGVTHLICKFASGLKYEVYSKRGTPTITSEWLYECVKQDKLLSVDHFQPKPLTSQDKDAYPCTASQYSTQATRFDSSELLSGCQVTKNNATHNSVNEETTMPAVSRKRRISVPGKVNGICGNIEKTEKQLDNSSVPDVADAIEVLSSKIQDVQSPRSVSYTGDKCFPVLTPYCTVKVY

SEQ ID NO: 234527 - protein, 85 aa, Zea mays
  Clone ID: MRT4577_145474C.1.pep
YSIVCHRKNTTGRTWHQLICCYSRIILFLFRLMLVDLVQLAAKMGLVVVFHGFLMNTFSILLYAMKKHSRTNLTMLCIFSFCVLM

SEQ ID NO: 234528 - protein, 133 aa, Zea mays
  Clone ID: MRT4577_145475C.1.pep
PPHLGIASSQDLLASSSCSSCSPTPPTRKEQGAMRVPSVLSVTGRSLMRMRSRRSDAYGDKTVTSNRSKGKEKHRESKRGKGWNRCSFRRRNKKQRRRRGARAGERIDVTITLLLSTERHWDSGTKIRRPSRL

SEQ ID NO: 234529 - protein, 78 aa, Zea mays
  Clone ID: MRT4577_145476C.1.pep
RPPRESFFFFFFFFFFFFFFFFFFFFFFFFFWASANTPLAQLGLKGPHLLNRSKKPIFSKAPLAPKTPPSSNVGIMPR

SEQ ID NO: 234530 - protein, 37 aa, Zea mays
  Clone ID: MRT4577_145477C.1.pep
WWSQHKVVFMVILKDVKCKSSSGLDQAQVTARLSTKL

SEQ ID NO: 234531 - protein, 82 aa, Zea mays
  Clone ID: MRT4577_145478C.1.pep
QILMKNQVYGHQDNPVSSPNDWFRLGIISCGSTDVIVRSTAGKNHPATSALLIIVGRKVSTYNSSSCLMDNSPNRKGFAHSP

SEQ ID NO: 234532 - protein, 73 aa, Zea mays
  Clone ID: MRT4577_145479C.1.pep
GGFPFPFHPPLQPLFLPIMHYVGIFWGISFVFPFNPIPTQPHVFDHLLFYSPYISLERLLDPFGNPPVFQIFL

SEQ ID NO: 234533 - protein, 72 aa, Zea mays
  Clone ID: MRT4577_14547C.1.pep
MSFLRLLPQRLPQLIRQVEQDVETVIHVLQPGPIGIVEHKFTDAEILEARATVKRAVDNWRRNWTLERNVGR

SEQ ID NO: 234534 - protein, 74 aa, Zea mays
  Clone ID: MRT4577_145480C.1.pep
IISCRTRAPAVSFNLLVSKYLGRHPHPHNMGAQRSSNGLLNGPYSQPPIPNSCSNGIGCASSRRRCVSAARFYI

SEQ ID NO: 234535 - protein, 71 aa, Zea mays
  Clone ID: MRT4577_145481C.1.pep
SYSYARPSQAECFLVGPSSYIYAHQFTDDDITIVGVQKLHMVVLARSLSCIFFLLLVYFSLSLSLSERTRN

SEQ ID NO: 234536 - protein, 115 aa, Zea mays
  Clone ID: MRT4577_145482C.1.pep
TKQQQQQQEEARATRQGEAPAREAAAALQGEASSSGRINKHIWTAPLLAWRSIELETSCLLEEEEEEATTSMHSFVEMEIINGKAIFFLALDFAFSMHTYGHLLLVEIPCCSSVS

SEQ ID NO: 234537 - protein, 153 aa, Zea mays
  unsure (1)..(153): unsure at all Xaa locations
  Clone ID: MRT4577_145483C.1.pep
PDCHLNLLSVCDQNXYAHTSYIAQFYNTISXNRPXPRLPLIGSQNAFCQGYDKLSRDLHISDMTLASDSIXLHATXNYLLPHNDETPMTCEILLYMYVLYSPYXHYSSTXMPTFLIMDEAHSAVXFSLPRYTSNPXLHYVGHCELCIPRMDYY

SEQ ID NO: 234538 - protein, 186 aa, Zea mays
  Clone ID: MRT4577_145484C.1.pep
NPSAPSSSLSTCTSLARPSLAAAMGRGKFKGKPTGRRNFSTPEEIAAGTSGRPRTFKKKEEEEEEEEEREESEEEESEDESDDKPKHKGTEGIIQIENPNLVKVKNIKAKEVDLGKTTELSRREREELEKQKAHERYMKLQEQGKTEQARKDLERLALIRQQRADAAKKRDEEKAAKEQRKSEARK

SEQ ID NO: 234539 - protein, 280 aa, Zea mays
  unsure (1)..(280): unsure at all Xaa locations
  Clone ID: MRT4577_145485C.1.pep
MASLAIPALRPAGAKLTGNITPTNPWRPARQCACASGGHVGELSALAPEAEAEQAVVSEVKPRFRWDAFGSDLTGPQQRAVRVLSPKLPNRCKALVARVVCLSPGDERLGALLAYWVKAMKPKRADWLLVLKELKAMESPLLAEVLEHALLENSFEANVRDYTKLIHIYGKQKRLQKAEDAFAAMKGRGFPCDQVMLTALMDMHXKAGDLARAKEIFXEIVLLGLPLDKRAYGSMVWAYVRADMXRXAEDLIKETEGAAGVRPGKEVYKALLRAYSYRGD

SEQ ID NO: 234540 - protein, 154 aa, Zea mays
  unsure (1)..(154): unsure at all Xaa locations
  Clone ID: MRT4577_145486C.1.pep
LWFCPRTLCPRFPSPRPQPPPPXPIPPPASPPRTRSPAAIPIPPSASPPRSPRPQPPPPXPIPPPASPPRARGXPPSRFLRQRRCPRGRSGRRRXIEMAVSAKKQKAAPPXRPCRRPRRTPRRTPSPRSSRPPRRLRTAAVTLXGPRVRRGEFL

SEQ ID NO: 234541 - protein, 544 aa, Zea mays
  Clone ID: MRT4577_145487C.1.pep
MELEGPWARVLHLQHDACEWGRAVRARAVAPALEAAAWACLAMSVMLVLEVCYMSVSSFVAVNLLRRTPQRRYSWEPMPSGTGTGTARGDDEEAAVGDGGGEAYPMVLVQIPMYNEREVYKISIGAACALTWPPDRIIIQVLDDSTDPFIKELVEFECKDWASKKINIKYEIRESRQGYKAGALKKGMEHSYAQECDFVAIFDADFQPDPDFLLRTIPFLVHNPKIALVQTRWEFVNYNICLLTRIQKMSLDYHFKVEQESGSSMHAFFGFNGTAGVWRVSAIGEAGGWKDRTTVEDMDLAVRASLKGWQFLYVGDIRVKSELPSTFKAYRHQQHRWTCGAANLFRKMAGDIVISKGATVWKKLHLLYSFFFVRRVIAPILTFLFYCVVIPLSVMVPEVSIPAWGMFYIPTAITIMTAIRSPWSIHLVPIWILFENVMSMHRMRAALTGLLETTYVDEWVVTEKVGDHVKDKLEVPLLTPVKPTECVERIYLPELLVAFYLLLCASYDVVLGAGHYYPYIFLQAFAFLVLGFGFAGTVTPCSCS

SEQ ID NO: 234542 - protein, 68 aa, Zea mays
  Clone ID: MRT4577_145488C.1.pep
KLCVYERFSKNESFRRAFLHPGFGGEHPVVFINLKAGGLFFFFDPVSRLCVTSLVKAFQSLFMTWVSV

SEQ ID NO: 234543 - protein, 216 aa, Zea mays
  unsure (1)..(216): unsure at all Xaa locations
  Clone ID: MRT4577_145489C.1.pep
VLEKLHLLYSFFFVRRXIAPILTFLFYCVVIPLSVMVPEVSIPAWGMFYIPTAITIMTAIRSPXKWPVFPLTDRLQMERISLASYALVNLACLLMMPLVIFRARXSIHLVPIWILFENVMSMHRMRAALTGLLETTYVDEWVVTEKVGDHVKDKLEVPLLTPVKPTECVERIYLPELLXAFYLLLCASYDVVLGAGHYYPYIFLQAFAFLXLGFGF

SEQ ID NO: 234544 - protein, 60 aa, Zea mays
  Clone ID: MRT4577_14548C.1.pep
MSFMRLLPQRLPQLIRQVEQDVETVIHVLQPGPIGIVEHKFTDTEILEASATVIRAVDNW

SEQ ID NO: 234545 - protein, 95 aa, Zea mays
  unsure (1)..(95): unsure at all Xaa locations
  Clone ID: MRT4577_145490C.1.pep
CDLFCGHADYTNLLHYVLDWRGNXHTCPCNCETRVIYHIAXAYATLDGKHFXTMKLQLLVDCTADETGNYTIEFYDCHDEDIXHAVLLDIPLEDC

SEQ ID NO: 234546 - protein, 111 aa, Zea mays
  Clone ID: MRT4577_145491C.1.pep
KNKIPLICDAKGGRSLIHSLPGPLEPPLDDRLPHPDVKLYHHKHVPWISWCLSPLKTYTTLVSTDTHLVHDYQQSQGGSSHKRWERPRDRDVTRPLSGTWQLSPAYRACSR

SEQ ID NO: 234547 - protein, 50 aa, Zea mays
  Clone ID: MRT4577_145493C.1.pep
PGGLPESWPKLLQVLNLDDQYDLTLATAYRVRLSATDLPTAKKINHIYYA

SEQ ID NO: 234548 - protein, 141 aa, Zea mays
  unsure (1)..(141): unsure at all Xaa locations
  Clone ID: MRT4577_145494C.1.pep
GGGGGFFFFFWVFFFFFFFFFFAETKESPRLLKLAQGTGGFQKLNLGFNGGSQGGFFFLDRAPGPSKGHRGTQGRGARPKEEPTRKTGPREXPGAGRAGXXTTTRKAERTXPPPSRXXPGTQPGKTPPGXXGQEPPNPASP

SEQ ID NO: 234549 - protein, 186 aa, Zea mays
  unsure (1)..(186): unsure at all Xaa locations
  Clone ID: MRT4577_145495C.1.pep
THASEPPASQPRCSSRTSTAXCCPSTTTIPAQPTPAAEGGGAPVRHGAGRAPPGPAAAAGLPARGARAGGRPPRAXSPRRGPRSPAPARAPPSPPTSTPXRRAPRRLQRHRRAARRPPQAPSPRQPRAPPXSPPPRRPGGRARARRSRTATPXPSAAPLAPVRAAPRAXRPPRASSPPWTPYPRSR

SEQ ID NO: 234550 - protein, 75 aa, Zea mays
  Clone ID: MRT4577_145496C.1.pep
KSFKTQGRGCMHWGLPRINTTLVFVRRLSLGGHPLSWHLFKLSIFRLVRLTTSSYGDACTLHHLVVDSALVLRIT

SEQ ID NO: 234551 - protein, 95 aa, Zea mays
  unsure (1)..(95): unsure at all Xaa locations
  Clone ID: MRT4577_145497C.1.pep
MKTAIGRAACLALAGVSDFAMHMQCTCPALERLYRACTGLTTIIGPXGXHPYSKYMRXPXCSPIAAGSXYARSTQTIGIXQPFTKQCCHNAIRMI

SEQ ID NO: 234552 - protein, 104 aa, Zea mays
  Clone ID: MRT4577_145498C.1.pep
RIYISRDVVFDENIFPFSKLHKNAGAKLRSEILLLPPVLLSSHFGGTNMDYVTNLSKNQDTATSCSVQIPAEKRSMQGAPTSNVGNSAAWEHYPPLPIRVPACN

SEQ ID NO: 234553 - protein, 53 aa, Zea mays
  Clone ID: MRT4577_145499C.1.pep
VLTFLDSQLWYISCKLYRFDARVRHCHSEINKGFGTDWKAERGFRPAVVNYPG

SEQ ID NO: 234554 - protein, 72 aa, Zea mays
  Clone ID: MRT4577_14549C.1.pep
MSFMRLLPQRLPQLIRQVEQDVETVIHVLQPGPIGIVEHKFTDTEILEARATVKRAVDNWRRNWTLEKNVGR

SEQ ID NO: 234555 - protein, 52 aa, Zea mays
  unsure (1)..(52): unsure at all Xaa locations
  Clone ID: MRT4577_1454C.1.pep
KKAFFLILVRIXSXFXPPLNYLISPLKISYPNCPKTIFFLPKKPFILKFKIS

SEQ ID NO: 234556 - protein, 119 aa, Zea mays
  Clone ID: MRT4577_145500C.1.pep
MAKTCFKTEHPLERRQAESARIREKYADRIPVIVEKADKSDVPEIDKKKYLVPADLTVGQFVYVVRKRIKLSPEKAIFVFVNSTLPPTASLMSAIYEENKDEDGFLYMTYSGENTFGSA

SEQ ID NO: 234557 - protein, 67 aa, Zea mays
  unsure (1)..(67): unsure at all Xaa locations
  Clone ID: MRT4577_145501C.1.pep
FTGNILMKWFLKSFGLYDSNILMKWFLMQEHTDEVVPNSRAEVTQGLVPTSMTRIEEVVTGXAGVVS

SEQ ID NO: 234558 - protein, 79 aa, Zea mays
  Clone ID: MRT4577_145502C.1.pep
MAMLRVWEWDWDVDLDSVLDFVLWCLPLLLVACLIGSRVVTGGQLDPVADAAAAAAAAVAIANVLARRLKLRCFWRRKN

SEQ ID NO: 234559 - protein, 118 aa, Zea mays
  Clone ID: MRT4577_145503C.1.pep
MAPRSRLLDLERHDVLFFYGDGAYHQSESVVVLVVVVAALLLLLLIAPFPHAAAVCGALYVAYCFLLDRAAKASSSSSSWPSTATATATATAAPPPADASRPTTRGTVAGYTIVQKQN

SEQ ID NO: 234560 - protein, 62 aa, Zea mays
  Clone ID: MRT4577_145504C.1.pep
HGCYDRLILVTDHRPFPAPKSKENPNSNRGFVTKKTGRKPTFKINEIEGGNPKGHIFRHFRP

SEQ ID NO: 234561 - protein, 63 aa, Zea mays
  Clone ID: MRT4577_145505C.1.pep
TIKRGPELAPINRYCVVCVKKKKTEFFSLLSLSACWASVFVLMYVRVSPCMLVDPIASAVPIY

SEQ ID NO: 234562 - protein, 37 aa, Zea mays
  Clone ID: MRT4577_145506C.1.pep
PGEKLLAGSGDPSYPGGTLFNPLVFVYTVDSLASSHD

SEQ ID NO: 234563 - protein, 60 aa, Zea mays
  Clone ID: MRT4577_145507C.1.pep
QNHGMGYRFNDNSVLVTEGFTFCHMFGAKNWRHGTHLKNLVSKRQKKTLVLVATVKPNRN

SEQ ID NO: 234564 - protein, 110 aa, Zea mays
  unsure (1)..(110): unsure at all Xaa locations
  Clone ID: MRT4577_145508C.1.pep
YPQCPREEAVDAEVXLTDVPAEVPAVQVADAPKAKNAPTEKKAPKEKKLSAAKKPAAHPTYAEMIVEAIAALKERKVSSSVAIIKYVXGEHGGKAHTNLRKQLTVQLKKL

SEQ ID NO: 234565 - protein, 100 aa, Zea mays
  Clone ID: MRT4577_145509C.1.pep
VDPKKGCLGSFCPHCNRIHRGGQPCWWRAPSTERPMKCIRVVRPLPSSHWEWDWSVGVLGRSPHMRRPLWRHLRFSLDLPPPIADHLLGGAKSRSRYKQG

SEQ ID NO: 234566 - protein, 79 aa, Zea mays
  Clone ID: MRT4577_14550C.1.pep
FHTPILPFISPHWSEDDETLGGRSRHVVPRTRERKRWLISWPSAAFHDICMQPDNRALVDFQLHGLCPNAEHLPPWPVS

SEQ ID NO: 234567 - protein, 42 aa, Zea mays
  Clone ID: MRT4577_145510C.1.pep
KSKMLYASLNQKFKSGLNGIQVELQATDASEISLDEIKDWAR

SEQ ID NO: 234568 - protein, 98 aa, Zea mays
  Clone ID: MRT4577_145511C.1.pep
SNFKQIEPCHHNLLLRTQHQSCHPLHSTPVGRGEWGHLHTISNSQQNYDQWVQKCPHLAQELKLFIKCVKAHIRSFFKRRHTTKVGRVSLCVGIPCQF

SEQ ID NO: 234569 - protein, 66 aa, Zea mays
  Clone ID: MRT4577_145512C.1.pep
KKKKYNKKSIFPQIRGVSLKYAGYLISFILFFIFFNIYSYISIHSLSLYNYFSAKTLTIPNLLSFL

SEQ ID NO: 234570 - protein, 158 aa, Zea mays
  Clone ID: MRT4577_145513C.1.pep
MVCSVSFIDHTLKHALQTSILITYPTDSRSMNMLDSEKWSMRNDINVLIFSHQFISNVSARIFDSHCEFKIVEEIPLQLVTSTSAHRPLFHAKWNAENYRSSSATRYWLQVFVLDSHGVKISSEQRPFSVEGKMAIPTSPWTNYLLFEVQWEGMYQVL

SEQ ID NO: 234571 - protein, 208 aa, Zea mays
  Clone ID: MRT4577_145514C.1.pep
ILDLFNPSQTTTSQLNQIKKRPGIQANSKLLTIQEQKETPMRLLFNLPLHSKTDSDKKNLQPPQNSLLAIRRTSIEALHKFEQLNINSDGSPTQLATKSQPTAQTSKLPEKRFSLLIPKQYPSTPTHVNSQRMSNPSFGQLENLDIQTDRAFKSDAIPMKRMSIQPPTFFEKVHEAFQEKKPLKKNLEFMPSLLVPLNPHQKNDNPRL

SEQ ID NO: 234572 - protein, 68 aa, Zea mays
  Clone ID: MRT4577_145515C.1.pep
GWRGVIICTLAVQQGTRFRSKKTRVKLLSRGAPYNFERLTNYKNGGGIRNSLKRRVPNLPIIWEDLGG

SEQ ID NO: 234573 - protein, 95 aa, Zea mays
  Clone ID: MRT4577_145516C.1.pep
YVTGVVGLSKWGPRSRLDEFVGIRGFQVSTSVGFGGSRMLVKGFRFWAPSIWSTMGLFPINFFFLMYRVGPLQKGKNKEKIKKKKKKKKKKKKKT

SEQ ID NO: 234574 - protein, 69 aa, Zea mays
  Clone ID: MRT4577_145517C.1.pep
SPYIMRQQGCTHYLRLTDMTIGRSSRGLQVFSWCNIIRVLANYLINSIHKTSMVRIVIVQAMPLLQVHL

SEQ ID NO: 234575 - protein, 138 aa, Zea mays
  Clone ID: MRT4577_145518C.1.pep
DVGVMHPDGYMEIRDRSKDVIISGGENISSVEVESVLYNHPAVNEAAVVARPDEFWGETPCAFVSLKEERSGSPGAVTAADVIAWCRDRMPHYMVPKTVVLRAELPKTSTGKIQKYVLRNLAKDMGPTRKGASSSSRM

SEQ ID NO: 234576 - protein, 261 aa, Zea mays
  Clone ID: MRT4577_145519C.1.pep
PGKVRILTAGAPPPAAVLHRTESIGFEVIHGYGLTETAGLVVCCAWKGEWNKLPASERARLKARQGVRTPGMAEVDIVDGETGRSVPRDGSTMGEIVLRGGCVMLGYLNDDKATRAAIRDNGWFYTGDVGVMHPDGYMEIRDRSKDVIISGGENISSVEVESVLYNHPAVNEAAVVARPDEFWGETPCAFVSLKEGSGAVTAADVIAWCRDRMPHYMVPKTVVLRAELPKTSTGKIQKYVLRNLAKEMGPTRKGASSSSRM

SEQ ID NO: 234577 - protein, 123 aa, Zea mays
  unsure (1)..(123): unsure at all Xaa locations
  Clone ID: MRT4577_14551C.1.pep
KTYNDLVNSSNHTLGTLRDLLEAMLESNQPSNGAKEISYSSNGDNDKWSQVHRXRRXITTHINTDIDKWHRKIQVTTLADALKRKLHAFNHXISDQNAXYMKDPSRMINRMYLTNSDVRVFGK

SEQ ID NO: 234578 - protein, 130 aa, Zea mays
  unsure (1)..(130): unsure at all Xaa locations
  Clone ID: MRT4577_145520C.1.pep
AAVIRHQRPSSQVGTASPHDVVPISQQQSLNSXAYYQQRRLRRFSQLDYVSPTAFLTQQQLWPFXYLHAMPSAGTLLQLQQVQPFHLLALTNPAVFIXEPIIGGALLVDRYMSYSSSNEVFWMRLGAAQK

SEQ ID NO: 234579 - protein, 114 aa, Zea mays
  Clone ID: MRT4577_145521C.1.pep
LGPRAGGRILITVRRRYYHGERTHGTERYVLRPAYHPWTQYEHALRTRKHVRQPHLGRGHMGGHGVQPCRAHGATSTRLRPTSARSPTARIWMNATPRTDTLSWSAQNSIQSLY

SEQ ID NO: 234580 - protein, 120 aa, Zea mays
  unsure (1)..(120): unsure at all Xaa locations
  Clone ID: MRT4577_145522C.1.pep
AAARRRPRGAAAXEXXXXKXXXXXEXXAGAXRRGRGRXEGVVXFDXDXKEQKGTGKGKGTGEAXXQTXXKXGKRTXXRKKKATAPDXAAXXGAEAXPGTAAEAXXXXXXAAPEXTPAKXD

SEQ ID NO: 234581 - protein, 281 aa, Zea mays
  Clone ID: MRT4577_145523C.1.pep
MLTPRVLKASLLRCLRATAELPPLRRPRILPVRVYHSRGYSSGGSSKYDRPMRQFSEQNESTSQPLIYYIAPSALLAFAGIATFVHYNDERRAVPFAKVPGQTNVPKRCTTNRPAIGGPFKLYDTENNEVTESKLRGKWNLMYFGYTSCPDVGPAEVQKIADVVKLLESKYDINITPLFVTIDPQRDSPAQLKAYLTEFDPRIVGLTGPISAVRQIAQEYRVFFKRVEEVGQDYLIESSHNMYLLDPCLETVRCFGSEYEASDLAEAITTEVQKASASSTN

SEQ ID NO: 234582 - protein, 106 aa, Zea mays
  Clone ID: MRT4577_145524C.1.pep
TKRNGAKVFLIMGGKSTNVACGFGSKNPFRNWGVSGHWFKGNPTKKKRKHKTLPLEIFEKTNCPLPQETGGKKQKNPWAICQGALDTCKFAMALMPCSGPGGFLVF

SEQ ID NO: 234583 - protein, 154 aa, Zea mays
  Clone ID: MRT4577_145525C.1.pep
MASSTLRCLPGDIPPTTLLTLPEEMLEEILLCLSDAADLVRASMARVSIRRLVTNHRFLRRFRTRHPPPLLGIVSPYPLHRWDRPLLNLAQPPHPSAAAASAFSGLDAADFSCTFLPNAARWRRDLRDGRDLLSGLPKGTKFNQPRLCQGPGCL

SEQ ID NO: 234584 - protein, 110 aa, Zea mays
  Clone ID: MRT4577_145526C.1.pep
AHDKPSCSDAYIRTARTGNEKTHGIMTSSRPPPPMDTKDTYQPNYVAKNSSHAGESIQGPRNKTIQNPAARCAPYNNPIWSQDRAHIRSVTQKDASPRCIPCGQRPHAGG

SEQ ID NO: 234585 - protein, 53 aa, Zea mays
  unsure (1)..(53): unsure at all Xaa locations
  Clone ID: MRT4577_145527C.1.pep
WELPCYVTYFITVVILGVGVNAQPTLQSSTWAHXQALERXQQQELAAAETQAE

SEQ ID NO: 234586 - protein, 51 aa, Zea mays
  Clone ID: MRT4577_145528C.1.pep
SLDVTARVLMSVWLIQESSVHPLSSGTHSCCMSCWTIRHVHDIGRRSPDIV

SEQ ID NO: 234587 - protein, 79 aa, Zea mays
  Clone ID: MRT4577_145529C.1.pep
AVVVVPVVVKVLWVIFLEALSLHNQHWHQLQALHLLINHLMHILILPIILLLMLPFIPITTTGVILYNTAYFFTDCSLS

SEQ ID NO: 234588 - protein, 78 aa, Zea mays
  unsure (1)..(78): unsure at all Xaa locations
  Clone ID: MRT4577_14552C.1.pep
ISSSLKAIYSVMPAGTPPSRSSVAEPTSPRRWVRWCRRSXRLHPGDRDRHLVVSSLLSQKKKALKRALSVVAFAXLPR

SEQ ID NO: 234589 - protein, 112 aa, Zea mays
  Clone ID: MRT4577_145530C.1.pep
RTRGRTRGRTRGGACYKIVLSVTISVITSCCTFGLPWLTACTPCPPELASKCPTIGRSGNFKNFQCPPGQYNALASLFFNTNDDAIRNLFSAGYDREFGVFTLLTFFTTVYT

SEQ ID NO: 234590 - protein, 69 aa, Zea mays
  Clone ID: MRT4577_145531C.1.pep
PTYVHKTYTAFINLHTLLNVSINTDNSLSRRIKTLMNDYLHTQLMELFQSLSFYFRTITQYYKSKILNI

SEQ ID NO: 234591 - protein, 42 aa, Zea mays
  Clone ID: MRT4577_145532C.1.pep
LMVPGTLQSPRHQNYWRLQHNTFHALALQKLNGGYPGESSQF

SEQ ID NO: 234592 - protein, 556 aa, Zea mays
  Clone ID: MRT4577_145533C.1.pep
MGETNELPPPPVAAPPPMMPMQSMMVGAGAIHPPHEQFHHLNYCVHSNPSWVQVAALAFLHYLVMLGSTVMLATAIVPAMGGNAGDKARVIQSFLFMSGINTLLQTLIGTRLPTVMNASFAFVVPVLSIAKEIESNNFLNDHERFKHTMRTAQGALIVASILNMILGFSTIWGAYAKKFSPVIMTPVVCVVGLGLFQLGFPQVGKCVEIGLPMLILAVVVQQYVPNYFSYIHQRVTFLFERYSLLLCIGIVWAFAAILTAAGAYDHASPKTQQHCRTDKSFLMSSAPWIKIPLPFEWGPPIFTAGHSFGMMGAVLVAAFESTGAHFATARLAGATPPPAYVLSRSVGLQGIGMFLEGIFSVPAGSSVSVENIGLLGLTKVGSRRVIQISTGFMIFFSIFGKFGAFFASIPLPIFAAIYCILFGIVAAVGVSFMQFANKNSMRNIYIIGLSLFLGISVPQYFNGYTSSAGGHGPARTNAGWFNDIINTVFASGPTVALIVASVLDNTLEFRGYEADRGLSWFQPFLRRHKGYSDPRNEEFYSFPISVYDVIPDRFRR

SEQ ID NO: 234593 - protein, 144 aa, Zea mays
  Clone ID: MRT4577_145534C.1.pep
GRGKSSLLLISSRIKRFGRGAHLFSLALSHRVRAVSTACFLSVAGCWLHRLQPFPASSTVGHWEEGASVGAGAAGPNRRGQGAVRAAPAVPGRNGLHAAGHCPCSSSVPTLPCARWSDHGTRICSSVQAPQVRSSPCSLVLPAS

SEQ ID NO: 234594 - protein, 100 aa, Zea mays
  Clone ID: MRT4577_145535C.1.pep
ITHAYIPSSSLRRVVRRRFKFSGKLGQYTHGLSRARLMLSWSWTVFVISTMFLLQRYTWLCSSCDQLVTALFCSHYRGHLCSAIADEDKHENSTHKNLHC

SEQ ID NO: 234595 - protein, 46 aa, Zea mays
  Clone ID: MRT4577_145536C.1.pep
RDLAFYFTEICVVCSNWFIHNFLQKIMYEPIRSHNTYFSNIKGLIA

SEQ ID NO: 234596 - protein, 65 aa, Zea mays
  Clone ID: MRT4577_145537C.1.pep
DPLFLSRFCSCLSTIFTSPVTRILLACFKTYHGPHISFIPSFVNQMIIYKHLLSFLLIHLYHYFN

SEQ ID NO: 234597 - protein, 81 aa, Zea mays
  Clone ID: MRT4577_145538C.1.pep
LKFSCPIVGVWVRCVFDLAAVLLGDIELGQGLRSLGAEKDAILSDMAYAVKPWFVTVLLPELYQNDLEAGDDITYSVCRVH

SEQ ID NO: 234598 - protein, 184 aa, Zea mays
  unsure (1)..(184): unsure at all Xaa locations
  Clone ID: MRT4577_145539C.1.pep
FVDDYYSVEKFRKAYLRRIPPIGDRSFWPKVDIANEVFAPMAKRGVGRQRKNRIKSCLEGGTAKKRKGVENAQCTTKIKRQYTCPNCGQLGHRKTSYKCPLTGTMIRKRKPRKTTTKNWIPXELRTSTSHTSAPIDESSIVPSAALSVGAGSVVFDHGCLDFVCADAALVCVPSPPTSPRCVWL

SEQ ID NO: 234599 - protein, 81 aa, Zea mays
  Clone ID: MRT4577_14553C.1.pep
LRTAQTIARATTTTSGATHGISALRRRVPVPRASGVTPRPDPRMAALPSVRGRPGRGRSHMASRCDYIGSSTNLIMKTKQL

SEQ ID NO: 234600 - protein, 147 aa, Zea mays
  unsure (1)..(147): unsure at all Xaa locations
  Clone ID: MRT4577_145540C.1.pep
KFPVKGRGHHRTCSLVPLRREKHPRDGILGGCWGSIAAXILTLAAVEGFIGLEINRGLGPSKPSFYLKEGKLRSFNLRDRGFSLDLQGTIASGNPNEGGGVNYKTLEGFTTNRNKGGTVPVSMPGIYQGHKDVSGWSPVMSGDASPG

SEQ ID NO: 234601 - protein, 40 aa, Zea mays
  Clone ID: MRT4577_145541C.1.pep
VRKKKKKKKKKKGGEKKKKKKKKKKKKKKKKKKKKKGRPF

SEQ ID NO: 234602 - protein, 212 aa, Zea mays
  Clone ID: MRT4577_145542C.1.pep
MGRRPARCYRYCKNKPYIKSRYCRGVPEAKLRIFDLGKKKAHVDEFPVCVHMVSLEFEQLSSEALEAARICANKYISKFAGKDGFHMRVRVHPWHVLRINKMLSCAGADRLQTGMRGAFGKPCGVVARVDIEQVLISIRTKESFKAAACEALRRAKYKFPGRQKILVSKNWGFTKFHKEEYNELRASGKIVPDGAHCKLISQHGPITKPHAH

SEQ ID NO: 234603 - protein, 90 aa, Zea mays
  Clone ID: MRT4577_145543C.1.pep
QYYIKKILTLRDKYNFLKKKLKISRLMLNIYRYIYYDAAGFGIQGFRQVKNKKFICLNFLNIVGLISYLNIRHHYRKYIVYLRLQWHFQI

SEQ ID NO: 234604 - protein, 73 aa, Zea mays
  Clone ID: MRT4577_145544C.1.pep
GNNPHYVKAPIFLLYPRLQHKHGAQALHCIFLTKYDGVYWAPGDKQGLKRVSRNRQEGGAFNVFPWGTPGGQG

SEQ ID NO: 234605 - protein, 105 aa, Zea mays
  Clone ID: MRT4577_145545C.1.pep
LMIGELYDFPTIFLATSSKQNIHISAVSSEAMELSLYLRKAMIEGVRNRRRQQRRHCRRRRRRCLPQKAMVGGPAIQAAGESSCAVGTVVASLLHSYSRVSEVSR

SEQ ID NO: 234606 - protein, 119 aa, Zea mays
  Clone ID: MRT4577_145546C.1.pep
IAHFFLTPPATRKGWVILLVLSASVVTTTKIPQCSHNPIYFFFFHTPYINIALCEKKTTHPYNMHQTIKPGIEQSSLSLLQQTANLLLELHMGHNLAENNMEQHLLQLEKTNIAAHTHH

SEQ ID NO: 234607 - protein, 120 aa, Zea mays
  Clone ID: MRT4577_145547C.1.pep
RPDHIGTNLVPWLPMTLLKCECSVSTTLPRKLLGNHTTLLSSVTGTSTILLDLTLIVSLKFTFVVVYNQISFVDLEKELFMKSFIASYGRNVIAITQMKHSTICQLQQNYCLDQNNHSPN

SEQ ID NO: 234608 - protein, 46 aa, Zea mays
  Clone ID: MRT4577_145548C.1.pep
HSTQGRGFKLPNTFFYFPPGRSMTTMNGMGVTVLMVVPLNHEDRLG

SEQ ID NO: 234609 - protein, 126 aa, Zea mays
  unsure (1)..(126): unsure at all Xaa locations
  Clone ID: MRT4577_145549C.1.pep
MIFGMIPFLDPHFNHHQLHKLVEVLATDLVTADLNAYYIELDPELDALVGGLGGRPWTKLMTADIHAVVSPVAIPVVVKLLRXDHHYRLTDRVAVRHAYLLQDLVEENSVTSPQSWRPTPWNRRWC

SEQ ID NO: 234610 - protein, 85 aa, Zea mays
  Clone ID: MRT4577_14554C.1.pep
FSFKTTKRLFLGAVGHRLKAHSTTYNLVCDDLHKNKSVPVLITHAVISRVGTRGIHGIPIQKSYRRSKFLYIIKALPVSHALPSN

SEQ ID NO: 234611 - protein, 71 aa, Zea mays
  Clone ID: MRT4577_145550C.1.pep
FPPRESFRNNNRGALFYQDLNVKRNFKGSRGQGENKTSALERNLATNKYDPSVNFYQDKKTLIRLTNECPP

SEQ ID NO: 234612 - protein, 72 aa, Zea mays
  Clone ID: MRT4577_145551C.1.pep
HIYHLFIDFLHSYITQQSCCINKILRPRTTIQRYQSKAYIKHLAITTITINTIHSKYTIKNMQPYMTNTHHS

SEQ ID NO: 234613 - protein, 231 aa, Zea mays
  Clone ID: MRT4577_145552C.1.pep
MPAPMAASTFPVAPLHAPPLVRPRVVPPSPTFGCCCRCSAPRGGLTLRPQACAPRRRCNPAIRPVRFCAEVGSVWPVVLTRSIRRGFQKGISVARVDDNAAGQVSLGDDNEDLDHITNETLRTTIRKSKEVLARHKIIMNQISEKKQLISTILDSSIHNEQEPLSGQSDGSLSNLNAIAKGTEIGYDHQTYHNRSLQQYEFDTTYGESIYDQNPTMKVQKTTALISVRLSV

SEQ ID NO: 234614 - protein, 50 aa, Zea mays
  Clone ID: MRT4577_145553C.1.pep
IPLTALHFPSQGDRRRDGAGGSYAWPSACPPALAASDPWLRPGVAEPGRG

SEQ ID NO: 234615 - protein, 54 aa, Zea mays
  Clone ID: MRT4577_145554C.1.pep
SCSDGLHLTQEGNAVVHKEVVEALRNAGFKAEQMPYDFPHHSKIDGSCPEKAFQ

SEQ ID NO: 234616 - protein, 107 aa, Zea mays
  unsure (1)..(107): unsure at all Xaa locations
  Clone ID: MRT4577_145555C.1.pep
KGEQTLCRQTGGKKKETTPPAGDSKPQCVPCTKTTDHVMEPAWAGLARELSPDNPAAGETDFPPQRKDPXVKLELTGRDLHVQAPRIADRYRVGSQLSRKQVDYSAG

SEQ ID NO: 234617 - protein, 71 aa, Zea mays
  Clone ID: MRT4577_145556C.1.pep
SVPLVTSCSCPKTNKINETKLIQKKSDPYEKSEKRSAISAKYHSNHKAKVLFGCKAFFVGLEKSLCVMEYF

SEQ ID NO: 234618 - protein, 39 aa, Zea mays
  Clone ID: MRT4577_145557C.1.pep
IVEVLFLPSSSLIPDGAMSSRVPVQIADGVELARDGVRR

SEQ ID NO: 234619 - protein, 101 aa, Zea mays
  Clone ID: MRT4577_145558C.1.pep
VPYPASPAASPPWAWRWCCGQCLGPADPQRTQERAQQPGVCTYGVSLHAAKPRALPTRGARQARSSLMDACRPLPPSPPHHVYRVRRQVCSRTPPLTQIAV

SEQ ID NO: 234620 - protein, 37 aa, Zea mays
  Clone ID: MRT4577_145559C.1.pep
ASSFRLAGRRPGAPQGHKKVTHRNGNLYTLGFLLGGS

SEQ ID NO: 234621 - protein, 85 aa, Zea mays
  Clone ID: MRT4577_14555C.1.pep
MAMVVFRMVEGIAMVGSRLMLPLCLMFWAVWMSMSSSSSPLRSCSAADGSTIAISVPVVHGEVIVVEESLARLVRLHDTCRNVYV

SEQ ID NO: 234622 - protein, 80 aa, Zea mays
  Clone ID: MRT4577_145560C.1.pep
SPLGKCRRLPGFSWVPSLVLLASLVGPARPPRGPPQGGRHAWDLPVAQTGASGPLLVSRNGAGPCYLGSGLNGGVRRKPY

SEQ ID NO: 234623 - protein, 114 aa, Zea mays
  unsure (1)..(114): unsure at all Xaa locations
  Clone ID: MRT4577_145561C.1.pep
RVAVDRLQCRRLESRVVYPEYYTPYIQFGRTPHLYGYKGGALGASFGGGGPYKYNVRGLCGVPGATTCXDPDAHVSLDGIHLTXAPYRFIANTWVKGPXGHPPLATVVLEDMVD

SEQ ID NO: 234624 - protein, 350 aa, Zea mays
  unsure (1)..(350): unsure at all Xaa locations
  Clone ID: MRT4577_145562C.1.pep
MAIEEDEDYEPPLMATYKHLLDSHPHRPLGAAQDDEDCFLLPVIDLSSLLPPVHHRKQSAAAEQCRASIVRAASEWGFFQVTNHGVPQVLLDELHQAQAGVFRRPFQLKAHQPLLDFSPESYRWGTPTATCLEQLSWSEAYHIPTTTXPRPVTTTRXRLVVEEVSTAMSKLAQRLAGILVAELGEDSAAAVVSRCTRSTCFLRLNRYPPCAAAASGVVYGLCPHSDSDFLTILHQDGVGGLQLVKDGQWVAVKPSPGALIVNVGDLLQAWSNDRYRSVEHRVMASATRERFSAAFFLCPSYDTLIRPRCGAGGPPPRYESFTFGEYRNQIREDVRLTGRKLGLQRFRKAE

SEQ ID NO: 234625 - protein, 77 aa, Zea mays
  Clone ID: MRT4577_145563C.1.pep
MPKLRLIFTVILVVSLLFSGVSSGQTAATQASDADLSEAVEVERRSGKVLTYVQDYDYGGSNPKHDPRRKPGSGHPP

SEQ ID NO: 234626 - protein, 164 aa, Zea mays
  unsure (1)..(164): unsure at all Xaa locations
  Clone ID: MRT4577_145564C.1.pep
MNTSRASYPCENYETERRGLGKRTLGDPQVTMGSSMVVDGSFVSSMSSDNSVEESSFQQLQDAVSQLDVQTKLCIRDGLYRLARSAQHRQVFPNTMNSNGGSEXKGTGERRNFVXFMDPRSIETQTNPIDRSIALLLFRESSGGHVHVAVAADDASSLKSPAGV

SEQ ID NO: 234627 - protein, 88 aa, Zea mays
  Clone ID: MRT4577_145565C.1.pep
QQQQRDFYSSDNRLITAVLTTFNNRRPKVSSSGTNYPCFLSHPTNPITKIGFLKTIYSLSWSSLSDTGVGALAPGRAAGPSGTRPTRW

SEQ ID NO: 234628 - protein, 62 aa, Zea mays
  Clone ID: MRT4577_145566C.1.pep
RVCLNVSSSCAFVFALSYGVLVYVFIREDRTCAVGMSSVVYVNTRVYNERSGGPVVLLLLKK

SEQ ID NO: 234629 - protein, 269 aa, Zea mays
  unsure (1)..(269): unsure at all Xaa locations
  Clone ID: MRT4577_145567C.1.pep
MELLPTDQICSGHENIDMVGNQYPSENAIQGTEDKKFSIASTSQLSSQNLLNQRHHLDSSSPSNITSESYPGKFGPSSCSSAQRNSKVQKKTVNIQPRQPANDNVMNTSRASYPCENYETERRGLGKRTLGDPQVTMGSSMVVDGSFVSSMSSDNSVEESSFQQLQDAVSQLDVQTKLCIRDGLYRLARSAQHRQVFPNTMNSNGGSEXKGTGERRNFVXFMDPRSIETQTNPIDRSIALLLFRESSGGHVPVAVAADDASSLKSPPGI

SEQ ID NO: 234630 - protein, 292 aa, Zea mays
  unsure (1)..(292): unsure at all Xaa locations
  Clone ID: MRT4577_145568C.1.pep
MHMVNRYTKRMGWSCCPLTRYAVDMKTLIWCVGNQYPSENAIQGTEDKKFSIASTSQLSSRNLLNQRHHLDSSSPSNITSESYPGKFGPSSGSSAQRNSKAGVTLKCANAVQKKTVNIQPRQPANDNVMNTSRASYPCENYETERRGLGKRTLGDPQVTMGSSMVVDGSFVSSMSSDNSVEESSFQQLQDAVSQLDVQTKLCIRDGLYRLARSAQHRQVFPNTMNSNGGSEXKGTGERRNFVXFMDPRSIETQTNPIDRSIALLLFRESSGGHVHVAVAADDASSLKSPPGV

SEQ ID NO: 234631 - protein, 48 aa, Zea mays
  Clone ID: MRT4577_145569C.1.pep
TNASKETALLAPTSSGVTSLINVRFVHPSASRIQYGLITGSRQNGCCL

SEQ ID NO: 234632 - protein, 52 aa, Zea mays
  Clone ID: MRT4577_14556C.1.pep
NSIKGYKVYHHLVRQHEWHLTSCADPKPLVLSHHRTLSIITIKNMPYTINKD

SEQ ID NO: 234633 - protein, 214 aa, Zea mays
  unsure (1)..(214): unsure at all Xaa locations
  Clone ID: MRT4577_145570C.1.pep
RANSDRLWXVWRGGPARHADFTDPDWLDSSFLFYDEDARLVRVTVRDMLDIGRLRYAYAEVGLPWLSARPPINPGDVNRGRDPPHLESVRFPVSLDAPVTAEVSRRPGKPXGATXEEVLVVEGIKADGADFVKFDVYVNAVDHEKIMPGGREMAGSFVSLKHPGNMVVQSSMRVALNELLEDLGAEGDDSVTVTLVPVEGRVRIGGLRIVYMAE

SEQ ID NO: 234634 - protein, 49 aa, Zea mays
  Clone ID: MRT4577_145571C.1.pep
RTACFSLREAKDKQKSKSSHWERHLSRQLSPDHFGRCYLEPNPNLLHVK

SEQ ID NO: 234635 - protein, 123 aa, Zea mays
  Clone ID: MRT4577_145572C.1.pep
MVVPKFATLGLAGFLGGTGGVPPAAGRAGMSGSTGNRTLMPGLPFVQMGGAMPPQPGCGGIRSLLKKAKKTPNGRTICGCLKNVANGANGRGTYLSGAAGLPRKGGVALPNKIRTNVNCNTIN

SEQ ID NO: 234636 - protein, 66 aa, Zea mays
  Clone ID: MRT4577_145573C.1.pep
AMSSSNSYRWARPCCRLKHSHLLLQRSSDRLQSSTLCTAACTRDPLVRFLMLLHQLVEGLIDEPRA

SEQ ID NO: 234637 - protein, 49 aa, Zea mays
  unsure (1)..(49): unsure at all Xaa locations
  Clone ID: MRT4577_145574C.1.pep
MGYKILSLPGLLXAFASATNAFIIPQCSLAPSSIITQVLPPSTLMGFEH

SEQ ID NO: 234638 - protein, 111 aa, Zea mays
  Clone ID: MRT4577_145575C.1.pep
NAEERSRSFGGTARGRFLAWARLRVWPTCRGAGRGVALGAGARPGGSRGVGLHGTRPAAGRVGGAVQGRGALGRAWELRGVKPACSGRVAGSRGCVLGAGAGQRAGAARMA

SEQ ID NO: 234639 - protein, 92 aa, Zea mays
  unsure (1)..(92): unsure at all Xaa locations
  Clone ID: MRT4577_145576C.1.pep
EIEEDFGKSRVXSQSRSTELIQGANDSWPVDWNHWXSGGKLSILENEMRRVKMVDVGLMPAGNGTSINVFRDASVRWGKRQAKVLEIAEHGW

SEQ ID NO: 234640 - protein, 265 aa, Zea mays
  unsure (1)..(265): unsure at all Xaa locations
  Clone ID: MRT4577_145577C.1.pep
MDQYEKVEKIGEGTYGVVYKGKDRHTNETIALKKIRLEQEDEGVPSTAIREISLLKEMQHRNIVRLQDVVHNDKCIYLVFEYLDLDLKKHMDSSTDFKNHRIVKSFLYQILRGIAYCHSHRVLHRDLKPQNLLIDRRNNLLKLADFGLARAFGIPVRTFTHEVVTFWYRAPEILLGARHYSTPVDVWSVGCIFXAEMVNQKALFPGDSEIDELXKIFRILGTPTKETWPGVTWLPDYKSTFPRWPPVDLATVVPTLAPDCLRVKH

SEQ ID NO: 234641 - protein, 114 aa, Zea mays
  Clone ID: MRT4577_145578C.1.pep
LDAWAWISDLISPFHCHRRGDGSLSGPTSPTIEWPKPRPLRQSSSPRVAALMWAWMVRLVSTLDWCSRPPHGPSPSGAITHTGLAPSPRHRRRRRARVIISQVNRSAHSPYPIL

SEQ ID NO: 234642 - protein, 114 aa, Zea mays
  Clone ID: MRT4577_145579C.1.pep
SVGCYGAASRHQEEGKGRRRQTDLRPDRKQFKRHHKEDAAAEQGDGNGEPGSDLEDNISNTCLEIANGTEANAKKSDKQLKKEARKQRYSDILFYSATFVDICIKLYILIWFST

SEQ ID NO: 234643 - protein, 135 aa, Zea mays
  unsure (1)..(135): unsure at all Xaa locations
  Clone ID: MRT4577_14557C.1.pep
YAQLTVEIGQNVPIVRDDLFVTNPTRVGKVIIDSTCHALLLTVNQLVFVTDSIVPVRMYKHPXDGXVMPSHMSEDTXDTFIADLSVALYTDQIKTGAHCPFDRLAKYNHVLMIHEQHRDADVYVRAQCMAPGDPY

SEQ ID NO: 234644 - protein, 87 aa, Zea mays
  Clone ID: MRT4577_145580C.1.pep
RMVAPLQLPISKRRAPPPWCSVFPVVINPPVVKPPPVFGLSRVFAIAHGGCCLSKNLYGLCRKSSLTWFHGPVVFWLPKTMVRPHMV

SEQ ID NO: 234645 - protein, 146 aa, Zea mays
  unsure (1)..(146): unsure at all Xaa locations
  Clone ID: MRT4577_145581C.1.pep
TLYSNIYITTNFFLYLIFAESTLSDFISNFDXNIYIPYNSCLNDDFLMNYDANLMLTLYIIFHALNLNXMHYYFCYAWPVSYDNKRLGIITNIXLLLXLLMSAIFIPTIWNAFQLTRTTDDFFISFILPAAIILSDTHCIHKKYHK

SEQ ID NO: 234646 - protein, 78 aa, Zea mays
  unsure (1)..(78): unsure at all Xaa locations
  Clone ID: MRT4577_145582C.1.pep
RAHPVPLTPGFKENPNPGNKSFWVGPRAGEKEKAGGSQKIPQPKKGGKKNQGATTRGVKKNLWPPTELPQGVKTPKPX

SEQ ID NO: 234647 - protein, 104 aa, Zea mays
  unsure (1)..(104): unsure at all Xaa locations
  Clone ID: MRT4577_145583C.1.pep
VXEWCIXGECDPNNASQXGIKDEIELGFGLPVXSSPRQCLQAVKDFFPAFAXDXDFFVGGALPWXLPLDPSRGGKSIFCVKTVLLLVALPLVFFFFXAGLAPRG

SEQ ID NO: 234648 - protein, 94 aa, Zea mays
  Clone ID: MRT4577_145584C.1.pep
HGLRVVVGLAGGSPLAPNCHRSDLPCWEVPRVPLAQSRGRRQVDTGYCYSFYRLLLLLGFRCSLSKIAWGKACLGLYFPNPTHVGAVSTRSFLN

SEQ ID NO: 234649 - protein, 65 aa, Zea mays
  unsure (1)..(65): unsure at all Xaa locations
  Clone ID: MRT4577_145585C.1.pep
KRQKKKGGPPPPQKGGGGGGRTMPPKIRXXGGXCCSVWGNPPQQKIWGLLLTLPPHKKRWLPPPP

SEQ ID NO: 234650 - protein, 80 aa, Zea mays
  Clone ID: MRT4577_145586C.1.pep
VFAFSFPVPLGSLPGADASPIVSTVKLWKKIQAGSKNGFASTPVVVCSFRKRPCWEKYKNHLLPQGTRTPKARDMPLANR

SEQ ID NO: 234651 - protein, 40 aa, Zea mays
  Clone ID: MRT4577_145587C.1.pep
CVRVRNVLIVIRMLVKLYVPLGALPHVLNESLCKDGWMYL

SEQ ID NO: 234652 - protein, 244 aa, Zea mays
  unsure (1)..(244): unsure at all Xaa locations
  Clone ID: MRT4577_145588C.1.pep
MSTPRQRHTSTSGGGGGGRRAASGSAMLPPVVVLVFLFVVAPSLFFVVRNDGRAHAHVHVASDRKGKNGNQEAAAMKNLKSILPKEVFDAITASQQESGTLSVEFFRNHASPSWKTDDLVTEKSMDVNDNAKAENSLLEHSVPTNRSPKDPDEHQVDKAAKVARRKLREKRREKRAMDLVHKDDEARIKLENAAIERSKAVDSAVLGEYSIWRKENENENSDSTVRLMRXXXYMARVYSTLAKI

SEQ ID NO: 234653 - protein, 102 aa, Zea mays
  Clone ID: MRT4577_145589C.1.pep
CILLITLLSYYSVYNRLELPLRINCSLHNVTILSTSMHHVVFFKSIMDILLHMPKSSRMTVDEVIDLFMEFMTAEVNLELLTFNLSISRFSPTLPSRLRDLS

SEQ ID NO: 234654 - protein, 113 aa, Zea mays
  Clone ID: MRT4577_14558C.1.pep
MWDGWGIYSPNHQKWPLEVCCRMAHRTVRRTLSGATSASRWGSTVGDLTCGPSGLSGGAPDRSCRLSGAPTTRPLTSAHAGAQLMRCSRPLLREVAVALLAHRTLRCAPDTVR

SEQ ID NO: 234655 - protein, 154 aa, Zea mays
  Clone ID: MRT4577_145590C.1.pep
SSFFFFFFFFFFFFFFFFFFFFFFFFFLGKTIGNFPKELGGKVLKKNSGLFFLGRIKGPPFSRENQKKFLPKKFSKFPALKKGGLNFREKFFPAAIKNLGGALIYPSSKRWALGEKKKITQFWVWGGHPSLRGRDFPKAPLWGFLGGGPLPRGG

SEQ ID NO: 234656 - protein, 94 aa, Zea mays
  Clone ID: MRT4577_145591C.1.pep
EFSGGCPSLAMKGLVEYLILFFYILLLCVVTLPVFFFMWFNRIFFVSGAPFLTLVAFYSRCCCFIYLVKKKVFKKGRCSGCSLLTEWFIRNHSC

SEQ ID NO: 234657 - protein, 35 aa, Zea mays
  Clone ID: MRT4577_145592C.1.pep
MGTMTLPPGFRFHPTDDELVSYYLKRKVDNLKIEL

SEQ ID NO: 234658 - protein, 266 aa, Zea mays
  Clone ID: MRT4577_145593C.1.pep
MPASSLPASPDATGDIGAALELDLEDLAAGGGTDCIGALACGRSSFSYRRLPEPRLRLTVQKLDDSFFDIEIARSATVWELKVTIENLFSALYDDTQKTISWNHVWSHFCLCFKDERLTDDKATLRGFGIRDGDVLHFAQHLSVDYSPCRDPPKNQKEASHTHRRSRTSLDGYRPVSMLDDLSEDDDEKFTHSRCSTSVLEDPCLYEYIEERVEEETPKKGSLFQRWFCSSKLRSNRRTHAEDTVPLSGEKKNAHPKLGKWLTFKF

SEQ ID NO: 234659 - protein, 49 aa, Zea mays
  Clone ID: MRT4577_145594C.1.pep
GMDLEGGDGRVLVEKREFEGVEGKFLEDVVDEEVNDGNGYRGDDDVREH

SEQ ID NO: 234660 - protein, 59 aa, Zea mays
  Clone ID: MRT4577_145595C.1.pep
TRCFKRLNISKIKPESPTTVFVNTQTEVFTEKNCCTLYRIRSYLRTLPTAYLYYRIHKD

SEQ ID NO: 234661 - protein, 81 aa, Zea mays
  Clone ID: MRT4577_145596C.1.pep
PRFQKMGGVKKKWGPLGKILIPKWGNRLLLWKKVGLPPNRGPFGTRGRVKKLRARLGPKEPLFGTIFGKNACLFGKALNKW

SEQ ID NO: 234662 - protein, 57 aa, Zea mays
  Clone ID: MRT4577_145597C.1.pep
CARRLLRRHTAPPEQLESRQASHAREMRLLTHNMLSWNVRRATTGYPLTAGGDQLLH

SEQ ID NO: 234663 - protein, 138 aa, Zea mays
  unsure (1)..(138): unsure at all Xaa locations
  Clone ID: MRT4577_145598C.1.pep
MKELFVGLAXLLALAASVTSTHTNAGXGXQPSSPSHLPPPVHWASTIHLPPPIGYPPRLHLAPQVHLPPPYHVKPRVLVPPPPXQCRTQTQRTQSHPRPHSCPCQQPYSTPSQLLGTCDLGSTPILGHSAEFLRSSRH

SEQ ID NO: 234664 - protein, 76 aa, Zea mays
  Clone ID: MRT4577_145599C.1.pep
GWKRTSSPAAVSSTSAGGVSSPGLFYPPAGGHPGPFVFAGVPYVCLWLTGCTGSWNLAIEVAGTKFLFFWGNKFVT

SEQ ID NO: 234665 - protein, 70 aa, Zea mays
  Clone ID: MRT4577_14559C.1.pep
QVVTTQEVLSPPFFFFFFFLTFFFFFFFFFFFFFFFFGKNQINHLIDNQKTGQAHDRRHKPRVLCLVTTA

SEQ ID NO: 234666 - protein, 139 aa, Zea mays
  Clone ID: MRT4577_1455C.1.pep
MPERSTKSLMSRWDTIKTQCSLFSGYMANVLRENSSGLSDADKTSLAASRFATMEKRPFTLLHCWSILKDEPKWMDHSSNKQVRIIEVAPIGSNIIDLDPKDSFLGSTTSKQHLGQDASKGKTKKARSSSITVSSSDEY

SEQ ID NO: 234667 - protein, 64 aa, Zea mays
  Clone ID: MRT4577_145600C.1.pep
GLRLFLIHVDWNVLGGIETDLTCYRFKSTQSHSIHMEEVPLHRFVIGIYTRSRGVINVTVQAFG

SEQ ID NO: 234668 - protein, 60 aa, Zea mays
  Clone ID: MRT4577_145601C.1.pep
WVIGTHSCPLEHTGTRIISEMFLCRLLQNSLLFRCNIKWDCVLNSTHCNWPARGWMKMEH

SEQ ID NO: 234669 - protein, 135 aa, Zea mays
  Clone ID: MRT4577_145602C.1.pep
LFPVTKPFIPVGDPTGRAIGYCLAIMRNDMAIGIDIIGENFMTGLKVVFDRERSVLGWEKFDCYRNARVADAPDGSPGPSSAPAAGPTKITPRQNDGSGSGYPGAAPLPRSAGSRNAAAALGLGCLYLLLAAALV

SEQ ID NO: 234670 - protein, 94 aa, Zea mays
  Clone ID: MRT4577_145603C.1.pep
GYYIYEFPSLFSSVSIYWCQTVYSSGCSRQSMSIGVIYYNLTCLKISCAWLSILAPPPSACTLFVYRLVAASVPSSLYDGCTIGTWGSREHSRV

SEQ ID NO: 234671 - protein, 114 aa, Zea mays
  unsure (1)..(114): unsure at all Xaa locations
  Clone ID: MRT4577_145604C.1.pep
MPTTGCQHRGTSDGIPTGAGHDDDPDDCGDDDVNKPPFNSMGACGNIAIFNDALGXSCCFEIGXDNSAKCSGQXRSCTLTDMNYEPIAAYHFDLAGTXFGAMAKKGEEEKLSQG

SEQ ID NO: 234672 - protein, 48 aa, Zea mays
  unsure (1)..(48): unsure at all Xaa locations
  Clone ID: MRT4577_145605C.1.pep
QIVFENNLMNHHVALQSGSMGKXNYIARAGQHSLQDTFLELKFQGIKK

SEQ ID NO: 234673 - protein, 77 aa, Zea mays
  Clone ID: MRT4577_145606C.1.pep
CTKLQGGSFVCARGGGGGSGAAMSYVIHCKKDDEEDDDATLLQEVCTLVYRGCQQRRDYIMVGFAQDYGADCAAQSS

SEQ ID NO: 234674 - protein, 217 aa, Zea mays
  unsure (1)..(217): unsure at all Xaa locations
  Clone ID: MRT4577_145607C.1.pep
MPIGVPKVPYRIPGDEEATWVDLYNVMYRERTLFLGQEIRCEITNHITGLMVYLSIEDGNSDIFXLFINSPGGWLISGMAIFDTMQTVTLDIYTICLGIAASMASSILLGGEPTKRIAFPHARIMLHQPASAYYRARTPEFLLEVEELHKVREMITRVYALRTGKPFWVVSEDMERDVFMSADEAKAYGLVDIVGDEMIDEHCDTDPVWFPEMFKDW

SEQ ID NO: 234675 - protein, 72 aa, Zea mays
  Clone ID: MRT4577_145608C.1.pep
SVLQQLQTEVYRGAQTLYVPNCDHRALYRKRQCRASQGQRRGPCWCVDRMGKSLPGSPDGNGSSSCPTGSSG

SEQ ID NO: 234676 - protein, 101 aa, Zea mays
  unsure (1)..(101): unsure at all Xaa locations
  Clone ID: MRT4577_145609C.1.pep
PAPAQPAREQPKTEPPLSAPPPPRRGSRKAGVPAREPARKAAASPPPPPPSXNKGXTGSPPPPPTGKKGNKILSPELCHAQAGPGLGPGSGGTRGAPLGVG

SEQ ID NO: 234677 - protein, 85 aa, Zea mays
  Clone ID: MRT4577_14560C.1.pep
LCFSLVGKIQETLFPLPLNLVGNIPFHEPRLGPAPFFFTWVNRVYLAPTSWGGFLQTMAGPVGNLNPVSNKPVVPLLFSPEAVKG

SEQ ID NO: 234678 - protein, 197 aa, Zea mays
  Clone ID: MRT4577_145610C.1.pep
MPETAAPIGLSWAPKLPSFATTSGGSKSDHAPNPSAAQGSLWNRASDLVDGLFVAPRDPRQLNKLARKNVKDTAGKGWFDMPAPTITPELKKDLEILQLRHVIDPKRHFKRAGKSKALPKYFQVGTVVEPASEFYSSRLKNRERKATLVDELLSDQSLKSYRMRKVREIQEIRTPGGNQKWKNKGKKTLKRAKDRRK

SEQ ID NO: 234679 - protein, 113 aa, Zea mays
  Clone ID: MRT4577_145611C.1.pep
KKTFTRVIFQNKANTGHNFGILITIMRRAAKPPNTKQDNIKGRNPNQTNPPLRGGLTTTRGVFHNGLGGGRNPNPGGNLYKEILKGPCPQIKPTGGGGDRVHPKRGLTLVGGF

SEQ ID NO: 234680 - protein, 198 aa, Zea mays
  unsure (1)..(198): unsure at all Xaa locations
  Clone ID: MRT4577_145612C.1.pep
MSETAAPIGLSWAPKLPSFATTSGGSKIDHAPDPSTAQGSLWKRTSELVDGLFVPPRDPRQLNKLARKNVKDTAGKGWFDMPAPTITPELKKDLEILQLRHVIDPKRHFKRAGKSKALPKYFQVGTVVEPASEFYSSRLKKKXERKATLVDELLSDQSLKSYRMRKVREISPDPYPXGNQKWKNKGKKTLKRAKDRRK

SEQ ID NO: 234681 - protein, 70 aa, Zea mays
  Clone ID: MRT4577_145613C.1.pep
AKWGQLDSQALIVDITTAVGLIRAILNPLRTPLDTITHRDRLHQCSHLILQLTALRESNSKGLSYQTSAL

SEQ ID NO: 234682 - protein, 80 aa, Zea mays
  Clone ID: MRT4577_145614C.1.pep
DAGAKMKTLFQGRHPKKQAFFDLWRQKGEGEIFFLSFLAPCLGVKFNMWVYKNCYKKKWPNFNVYVAIKTSPALVSNFHA

SEQ ID NO: 234683 - protein, 165 aa, Zea mays
  unsure (1)..(165): unsure at all Xaa locations
  Clone ID: MRT4577_145615C.1.pep
MGSASRAISCLCCPCRCLFSCLCSILVSLAVTLGLLASSLYLILKPRMIAATVDSASLSQFALSASSTLAYDLNVTMTVRNPNTRVGLYYDDVQALASYESQRFGYAPLDAFYQGTGAATKLAPGFRGTQLLQGDVAAAQXRQQQSAGRFDVDVDLNATLRDTYW

SEQ ID NO: 234684 - protein, 39 aa, Zea mays
  Clone ID: MRT4577_145616C.1.pep
ARAVLYFYFWIAKWRDYIMRWALDGRWAEPKLPLFNNGR

SEQ ID NO: 234685 - protein, 61 aa, Zea mays
  Clone ID: MRT4577_145617C.1.pep
SARGTTHSLSSRDNEPNETDDCRCEDARLQQERRTRTTGAVRLLERHQQWSSTRPLWRTKR

SEQ ID NO: 234686 - protein, 80 aa, Zea mays
  Clone ID: MRT4577_145618C.1.pep
AGHAFLFYTPTHWPAPGPAGRNGRRRTSPDALDASTTHPKGPLHIRRQSTARAGAPLTPKTLTLLDHGLRYQARHGPLDP

SEQ ID NO: 234687 - protein, 89 aa, Zea mays
  unsure (1)..(89): unsure at all Xaa locations
  Clone ID: MRT4577_145619C.1.pep
PPPLFKVPKKMFSSKRKPHPIKQILSIPSFLQPPATTNLLSVSMDLSILAILYKSNCMRPFVSGFFHLVQVFEIYLHSSMYQHFIXMAK

SEQ ID NO: 234688 - protein, 175 aa, Zea mays
  unsure (1)..(175): unsure at all Xaa locations
  Clone ID: MRT4577_14561C.1.pep
MAATTSLLLCLLLAFLHGLQFHIPPVAAATTSTSHNKTESRRDARGKTLSFTLYQHETINKTGYIVVDGVAGAGVSQTTTPFGTIYVFRDDLTVHADRKSPVAGVAEGSSITTSLDGLQSLSLAKITVHHRGHRGSVSVLGGTYNTKPSDYPVXVGGTGDFAYALGYVRSSALDL

SEQ ID NO: 234689 - protein, 46 aa, Zea mays
  Clone ID: MRT4577_145620C.1.pep
VRGRFSCRWSWLVWCPLSIRKLSKVSAVRFMRGVIFGQRMARLSCV

SEQ ID NO: 234690 - protein, 115 aa, Zea mays
  unsure (1)..(115): unsure at all Xaa locations
  Clone ID: MRT4577_145621C.1.pep
IEKRMRVAASEKAKAEKIHQIKRAEGEEESKYLTGVGIARQCQAIVDGLRDTMLALSENVPGTTXKGIMDMILVTQYFGTMRLGPPPSHLFIPHGLGAVKDVLAXIRDGVLQANL

SEQ ID NO: 234691 - protein, 48 aa, Zea mays
  Clone ID: MRT4577_145622C.1.pep
WLDFLFRKRATGLLFSLRTRRPTSLLHLTLSEAERERAHSYMLTTHTA

SEQ ID NO: 234692 - protein, 73 aa, Zea mays
  Clone ID: MRT4577_145623C.1.pep
ISLSTPSAEDPIDTMRGARALALCSRCERHSRSTLGCVHHARYYARHCTRTASDSRACARTDAHARYWATSYA

SEQ ID NO: 234693 - protein, 55 aa, Zea mays
  unsure (1)..(55): unsure at all Xaa locations
  Clone ID: MRT4577_145624C.1.pep
GXTRGDATRTADRVGRTTWAGRVGTDAXGXTQGAXITVNYRSXXGFKSLAISNGF

SEQ ID NO: 234694 - protein, 125 aa, Zea mays
  Clone ID: MRT4577_145625C.1.pep
PCFAHTGIIHRAAFVLPLRNTGNTPSLNSPPEIGRHDAERHGSCPGPPPYSRCSCLWPAVVWNAAYSTTSERGLSLRPGAGAKITPAREHAASPWGAGTRTDGSGIRIDPEIRGRHSAARHRAEP

SEQ ID NO: 234695 - protein, 133 aa, Zea mays
  Clone ID: MRT4577_145626C.1.pep
WVPRGRPGLQLPDSGTRSDNDEAAGGLEQRAPQIPILKPPSEFFRPPRSQPWPAPPRSRSPGMRRRRATASGGGGGFSGGGGSNMLRFYTDEAPGLRLSPTMVLVMSLCFIGFVTALHIFGKLYRSRTAAASA

SEQ ID NO: 234696 - protein, 55 aa, Zea mays
  Clone ID: MRT4577_145627C.1.pep
SEHSETHQAKHIIHSLTTLAAEILSLLALLALFASASNAYHYYTMLTCFKFHYYT

SEQ ID NO: 234697 - protein, 70 aa, Zea mays
  Clone ID: MRT4577_145628C.1.pep
MARRATSSAGGGGFSGAGGSNMLRFYTDEAPGLRLSPTMVLVMSLCFIGFVTALHIFGKLYRSRTAAASA

SEQ ID NO: 234698 - protein, 84 aa, Zea mays
  Clone ID: MRT4577_145629C.1.pep
RWGRPSPRRPALLHPPGLPLPGPPPCRDVPPSLPVRSPVSVLSGCLLLPGLGVRLSAGTGSAPCAGARAPTPHGPPKLPPATRR

SEQ ID NO: 234699 - protein, 504 aa, Zea mays
  Clone ID: MRT4577_14562C.1.pep
MALRRALLRSVNFSPDSKAAIEYFYSFSRAQSACSLNGAGLCPASRSFSTQAATTSSTPQPPPPPPPPEKTHFGGLKDEDRIFTNLYGLHDPFLKGAVKRGDWYRTKDLVIKGADWIVNEMKKSGLRGRGGAGFPSGLKWSFMPKVSDGRPSYLVVNADESEPGTCKDREIMRHDPHKLLEGCLIAGVGMRASAAYIYIRGEYVNERLNLEKARQEAYAAGLLGKNACGSGYDFDVHIHFGAGAYICGEETALLESLEGKQGKPRLKPPFPANAGLYGCPTTVTNVETVAVSPTILRRGPEWFASFGRKNNSGTKLYCISGHVNKPCTVEEEMSIPLKELLERHCGGVRGGWDNLLAVIPGGSSVPLLPKHICDDVLMDYDALKAVQSGLGTAAVIVMDKSTDVVDAIARLSYFYKHESCGQCTPCREGTPWLWMIMERLKVGDAKLEEIDMLQEVTKQIEGHTICALGDAAAWPVQGLIRHFRPELERRIRERAERELLAASA

SEQ ID NO: 234700 - protein, 101 aa, Zea mays
  unsure (1)..(101): unsure at all Xaa locations
  Clone ID: MRT4577_145630C.1.pep
MARSSSQSQSSVGGGGGGGGGARPATVGPRGTAAAXTSSAGGGGFSGAGGSNMLRFYTDEAPGLRLSPTMVLVMSLCFIGFVTALHIFGKLYRSRTVAASA

SEQ ID NO: 234701 - protein, 107 aa, Zea mays
  Clone ID: MRT4577_145631C.1.pep
MARSSSQSQSSVGAGAGAGARPATVGPRGTAAAAAGMRRRRATASGGGGGFSGGGGSNMLRFYTDEAPGLRLSPTMVLVMSLCFIGFVTALHIFGKLYRSRTAAASA

SEQ ID NO: 234702 - protein, 83 aa, Zea mays
  Clone ID: MRT4577_145632C.1.pep
ETARRRREALRASAAASPPPSRRGALPPGQPAQMVPPVNHQATGPPGSPTMLIMMPETDELIDVRDSHACTRGQLSTCVLLYE

SEQ ID NO: 234703 - protein, 109 aa, Zea mays
  unsure (1)..(109): unsure at all Xaa locations
  Clone ID: MRT4577_145633C.1.pep
EPDEFMPERFHGCCAGGESTKKLLSVAAEMKMLPFGGGRRMCPAIGVSLLPIGYFMANLVREFKWRETEGGEHPGVQLXRRPRRNVXFMEGPLGARLVPLRRPGGKKFR

SEQ ID NO: 234704 - protein, 214 aa, Zea mays
  unsure (1)..(214): unsure at all Xaa locations
  Clone ID: MRT4577_145634C.1.pep
RSAGWWTPKVNSEAPVPSPIFMDASPLNPPPLVEEELVLRRSARCLNRPTRPSYAEQEPPKKPGGRGRSKRKRDEEKPELAPAQQGAKSPDRKDSKDEAGEKKPTPMIAALPVSCAGVAAEDDATGTGKSAKLRVKETLRAFNSHYLHFVQEEQKRAQAALQEINAKSGLKRQTKGGEKKRPSKRPDLKAITKMQEMNAVXYPEKTIGHLPGIR

SEQ ID NO: 234705 - protein, 86 aa, Zea mays
  Clone ID: MRT4577_145635C.1.pep
GKEEPNVVDFLIVLSTISNSWLTYLIFFVNEGSFITFTFTLILKLLKRIHFLIINLMSNEACFFYYSCSIFYSYHVVCLTFLFYSI

SEQ ID NO: 234706 - protein, 71 aa, Zea mays
  Clone ID: MRT4577_145636C.1.pep
GPPSPGFGVLAGGPLRVFLEMVGFQNALGKQLPHKNPLNTAGAPIKGPQIIKPFQDVPGGGGFPMGGLWKL

SEQ ID NO: 234707 - protein, 180 aa, Zea mays
  Clone ID: MRT4577_145637C.1.pep
MDPACEELERRSRYLSALVRRTKFADPPQPEPEAKADVEPPQLKAPPHVGGEGKGGKDEAKAEERTPMKKPRGEAAAAEAEGRKVAVCVRAADMPLPLQRRAVRIALEAVAAMPRLESKRLALALKKDFDTTYGPAWHCIVGTSFGSYVTHSLGGFLYFSVDKAYVLLFRTAVQPLVQLQ

SEQ ID NO: 234708 - protein, 120 aa, Zea mays
  Clone ID: MRT4577_145638C.1.pep
RPARVGARTIFQPNSFCSPSKVQKGGVGHPPPVFFFWVPDQFGGEFFFSCQPGFGFLFFYWPLAPFFWEVPLSSPFNKVKDVFFVSSRLFNGMPPGAKKKKKKKKKKKKKKKKKKKKKKK

SEQ ID NO: 234709 - protein, 158 aa, Zea mays
  Clone ID: MRT4577_145639C.1.pep
MSGSSATTKKTCDKCDDEVTSRCSTCSREFCKFHTKAHLKSKKTSDHKIESLDSKTDTSTKNEHTKCKIHRDMVVDLYCHECKAILCRKCEVDHESSCKQRPDYLRNAADALLKDVNDLLNQTKHTHTEFSRIVNLSALKQAINRAQQLRREAGEQAT

SEQ ID NO: 234710 - protein, 72 aa, Zea mays
  Clone ID: MRT4577_14563C.1.pep
SLTFPIQSLALTVYRSSHHGGELAVSLPTRGAWPPAPHPAAHPPRRAHAAPPRPGRHRRLWGTCTWRIARSQ

SEQ ID NO: 234711 - protein, 112 aa, Zea mays
  Clone ID: MRT4577_145640C.1.pep
VIVGGSSEYKINNIVVPLHDYSEELEKLGMLIRARNFLVFQGAVESIAMKNPKERTVLFEEISRSGELAQEYDKRKNDMVKAEEDTQFNYHRKKNIAAERKEAKQDKEEADR

SEQ ID NO: 234712 - protein, 387 aa, Zea mays
  unsure (1)..(387): unsure at all Xaa locations
  Clone ID: MRT4577_145641C.1.pep
MKSSIASGASVTYVIPALSLPLKPVYKLLCEACCVSVSNAFFLLQCGTMVALWPVVHLDILLIDSALGLKRFLLDTCMRSAVSLFCLLAGSFKQCSRQRTTKESRIPCTSVRFQISGGHGRSEVVFMFFSFVGVEKWKWEHLQGKLQYHCSKSELSKDSTKCTGRRALSSMDLFSKGFDVQDFLPESNYSDREPIICCLDEHCRFTQSVLDMTTAPSLLPWHHKKMLTESNLTNGSQQSMSCTLDEDQQQLVTEHASDTVFHAPPQVCSLNLGSSPDSPLDMASASCANPSSSASRESNIAERNVSTECNGSSIGDANIIHRKCEDQNGPCAGPDKSFSSNLSVICSSQKSAESRLSIXIDKANDKPLDNDEKEKQPISNLVQELND

SEQ ID NO: 234713 - protein, 122 aa, Zea mays
  Clone ID: MRT4577_145642C.1.pep
GGYGGSSGSSAGGYGGSSGSSAGGYGGSSGASAGGYGGSSGSSAGGYGGSSGHDDSPVIPVIIIQKEEGGSSGGYGGSSSGGYGGQQASSGGYGGQQASSGGYGGQQASSGGYGGQQASSGG

SEQ ID NO: 234714 - protein, 92 aa, Zea mays
  Clone ID: MRT4577_145643C.1.pep
EQRLRTKTRRDIFFLEGGGGFVGAVVSRDQTGPWEKKKRFHSRACVPAPSARANLLVFSTRREHLAARFGPPREFTPQRAERARIRIGVGLA
